United States Patent Application Publication US 2015/0052636 A1 - sequence listing, part 18

SEQ ID NO: 61737 - DNA, 718 bp, Populus trichocarpa
  Intron number 1 from transcript POPTR_0003s17280.1 (locus POPTR_0003s17280) derived from phytozome v7.0 (chr-ID scaf fold_3; pos 16681975 to 16682692)
acaaaccccaaactgcattctccgtgccaaggaaggttagatttttttcagaatgtcagaattctcacttagtttgtgctctctttcctcacattattactggccagcattgcttaatcatttactgggttgctcacaagccaatttctgtatctctgcttagttttccaaatctcaattttcttcgagttcattactttccagtgttacgtacctgcattttggtttccatggctctgtgcataagttagttgtcagctagaaaacacaatcaatgcatcaagttatcagccatttcccatccacaattcaaaatttaattgtattactatagaatatatagcgtcgctttgatatggctcactggtggagcaaggtcttagctttgagtttgagtgctccaaagtaatacatttcagtatttctctagtaccagtttaattgaatttttttcaaaggatctttaaaaccttcagctgccattctgggttgtttgtgcaatattagtagaataccaggtcttttaagcaggaaatgtgtcaaatttgcaaagaaatcttgattttgtttaatttttttaaaaataaaacttgggatttcctctttgtttttagtttctcctgcatgcaacataacaatgttagcatcgaaagtgttgaaagtcacccgtgataaattaattaatcaacttgtacactgtattacttgaaattgcaga

SEQ ID NO: 61738 - DNA, 1042 bp, Populus trichocarpa
  Intron number 2 from transcript POPTR_0003s17280.1 (locus POPTR_0003s17280) derived from phytozome v7.0 (chr-ID scaf fold_3; pos 16682874 to 16683915)
ttaaagcttggttttttcgcgattacgggcaaagggttctatctcatttctatagtgagtcaatcatcttccctttccatgacttgtagcattcttttacttctaaatgaatcatttttggtccctgagattgccataaatcatgcaaaagttgtgatacatcatttattcattgatattatcacttcaagtggtatctataatattatgtcagtgtccgcactagcttgaatcttttgataatgtctttcaaatgactagtagcattgtatagttacccccgttaagatttctggtgaaggcctatggttgctgtttctcttttggtactatttactttgaggctgcattctcagtttatacttgaatatttggaagattacgtgataacaaaaattatcacatgttagctttaggaatgtagtatgcatccctggatcagttaatgtaaagagaaaattagcatatatgaaagcaatgctttcttgaattatatcaagtgattactgccatttataagttactgcactctgctttcaccgtgctccatattttatattacctattgcatcttttagctctttgatcttagtttaacttcattattactcaacattaagtccaagttaaaggtatttttcatgtatttttctataaatttgtttttgagcttctgccacagatgtgaatttgttgcagaacctgtgctgaaacgaaaaaaatactcgaatctttattttacttgttaatatcttttgcagatataaaagcttgtggaattgacggacaagattgctgtcatacattgggcgttcttcgtgtgagtttaggatgcttcgtatctttgttttaacagaacaatgactttaattgttctgaattctcacatgttcgatgccttacatcattatatatcattgcctaattgccagaatattgctacttggttctataatgcagagatgttggctaaacttagatttgttttatttctcctcatttaggaggaagattttgcccttctttccttacccttccttgc

SEQ ID NO: 61739 - DNA, 886 bp, Populus trichocarpa
  Intron number 1 from transcript POPTR_0001s26220.1 (locus POPTR_0001s26220) derived from phytozome v7.0 (chr-ID scaf fold_1; pos 25283053 to 25283938)
tggattcttggtgtctggcctagaagctgtgacaggtacaaaacgcgccctagctctttacattttatacatagcatatatcatgactgtaagtatatgtgtgtgtaactctgagctactgtttgcatatatatagtacatataacattctttttcttattatttcagtttgttgaaatttattgccttaagttgctgacgtgttgcttgaagaccagttcagctcacgtgttgtttttatttctgctagaataaaggattgaacaagtccttaggtgaattgttagtagtggcgaaatgtaagccaaacgtggcagtattgttgcttaattttagtttttctgtttattttccttctataaatcagtgtaattgattgctgtaaaaaaagtgcaattatccttatcattatccagtttttcatgcaataaacatttcttgttcaaattcaaatttctagtgttgatctacagtaacaaacagtctgtagagatcaaagtcttttatttttctgcttctcggttcttcacttattctgcaaaagtattttcacagttttcacgtttttccttttgcttgtgcgttggcctctttgcttacctggttcggttgcttaggttttgtttgcttttagggttttttcttttttctcgcttatgggtcttgtttggagacttttttttctccatgagcatcggttgatctttgtactcttttttgttctcttaataattctgtcgttttttcatcactgattttctttctaagatataatccaactttgtttcctactcgaaagctggtgcacaatctgtaggtgtctgcaacggacggttgggaaatgacctaccttctgaacaagaagttgtagatttttatagaagca

SEQ ID NO: 61740 - DNA, 566 bp, Populus trichocarpa
  Intron number 1 from transcript POPTR_0011s15170.1 (locus POPTR_0011s15170) derived from phytozome v7.0 (chr-ID scaf fold_11; pos 17311049 to 17311614 reverse strand)
ccatcgagatcaggaacttccttggcgagaagaaggtaatgatttcttactactttcgagaaaccaattgttctttaaggctggtgttagtgtttgatacgtttttcttcgaaaactttttaattttaggtttagaaagtgaaaaaaatcttattgttcaactgttgataatttagctggtagctgatggtttgtgagattattctattggttatttttaaatgatgttgctattgtatgacaaatatacaaatatacaaagattattctattgtttatttattgctgatctaatgcaattttgatctgagaaatagtaaatgtattgaaatattgttgtgagattaatctaaaggaagaacattcatttggttttggtgtagttctgtgttgaatttttgtcaatggatatggatatgatatgagtagttgttgccagtcagcagtgttatgagttttgaccatgtaaaaaaaacctgatgtttactttttgcggatgatttttattggtggatcaatttggtaatgctgtttgtgtttggtttcttaaggtgagaaaggttgac

SEQ ID NO: 61741 - DNA, 1027 bp, Populus trichocarpa
  Intron number 1 from transcript POPTR_0162s00320.1 (locus POPTR_0162s00320) derived from phytozome v7.0 (chr-ID scaf fold_162; pos 52591 to 53617)
gtttcagtgaaggtgagtgaatactgtgtgtttcttgatgttattgtgtttgatggatgtttaattaagagagtgaaagtaatgtttgttagaagttaagggttttctgggttgttgaaggtagtgaatttgatttgaacattgaaggaaagtgtgaactttctttgacgatataggaattaacgttaagcttttggagttatcagaacaatagtggaaggacaatgaggaattgggagttaatgttaagaattggaaagtgaaggaattggtaggtggaattgatggaagtaaaagttgtgtgttaagagcccaattggcataacctagtttacctcgagtcacaattcataagttgtttttcataaataatgtgacaaaaataagttcagaaatatgtccggtaaaaatgattcaaaacgaatttttcggggaagagatatagtattaagtagaatccgagttgaaaattgaaaattttaacttttgattaaatcaaaatcttgactcacttttgtaacaaattttttatttcagtcagaagttgtctaatcaaatatatttatgacatttctacaagtaaaaagtttaaaaaacaactcaaatcaatgcacaaaagtcataccaaacagaaccttagttcatttgaagtgggtgatatcttgacccttttgagcgtagtatagaatacagatgatcaaagaaagctatgaacttatttacaatgtagagcagtgagctgtgttgatgtgttaggattgctggtaaatctattgaagattgaattatagtcaagatgcaattgggcactaaagtttaaaggtaaagaatcagaaagttgagattgatatttgtatgtaatttggatgctacgtgtgtgaacaagctttaggatgcatgcttgataaccaagaaaattgtggattttctgggagaaaaaaagctaagaaaaagttttatgaatgtttgttcatatttgtttcattttgcaggtcaagtgggttctggggcaagatcttactaccat

SEQ ID NO: 61742 - DNA, 381 bp, Populus trichocarpa
  Intron number 1 from transcript POPTR_0010s11650.2 (locus POPTR_0010s11650) derived from phytozome v7.0 (chr-ID scaf fold_10; pos 11844120 to 11844500)
ctggattagttggtctggataaagccatatagaaggtttgattttatgataaaattagcttgaggtttagtggtgcttatgcattaaaaacaattgaacaaacaattgtctaataatgaattagtggatacttgtgaccttttccctttcatatgcttgttagatgcaggtctgatatgggcaaatacccattacctgcaccacatcatgtgcaccctaacatcctaaaatttccaaagggcattaaaattctgactataaaatctccctctttttttccaatttgttttttgttttttgttttttggggtctgtttcattttaatgatttgagtttaatttatcttctttcgttgtgctttcaaggttcttggagctgca

SEQ ID NO: 61743 - DNA, 626 bp, Populus trichocarpa
  Intron number 1 from transcript POPTR_0012s13060.1 (locus POPTR_0012s13060) derived from phytozome v7.0 (chr-ID scaf fold_12; pos 13360813 to 13361438)
gctcatacttgccgctgctactgatttgagccaaggtaccgtcgccaaatctatgctcttctttcgttgagcccttttgtgctttatctattcatgtagctgtaaattgcctttctttcttgatattaaacttgttttaggttgtaaaaaaatggaatctttacaccaatctgcagccttattctgatcattttcatgtctcagggcttagtctgtttgtgtagctttcgagctgtaattttccaagcatttttaagcgtatcaccatgatttattatatatatattttgttgatataaagccgatatttttttccccattagtttgctaatttgattgtaaatatttgtgatctcttgtttgttggttacattgttattcatgtcagcccttttttctctctctcttttggatacagttttgagaacgcgtttatgcattattatgatttgtgctatgaagcttggtgctctttgttttgtgttgtataggttggaatgtagttggagtagaatgagctaacgttgtgacttcagtacttggatttttagtggtttgaattttattcgtttaacattgtgatgttgttttgattatgtgctgaattaatctttgctgtttcagca

SEQ ID NO: 61744 - DNA, 584 bp, Populus trichocarpa
  Intron number 1 from transcript POPTR_0005s26630.1 (locus POPTR_0005s26630) derived from phytozome v7.0 (chr-ID scaf fold_5; pos 24561506 to 24562089 reverse strand)
gacctgtgcaattctgactctcttatctgcagaaggtgagtgcatgtaacatttatgtgcctttttctcaaactatatatacattgacttgtttcgatctgatattcttcaggttttacttgttcatgtgaatcgataacgtcctgctctgtaaccttttcagtttgattttcggtttttattattttttacaaaatttgtttgttcaggatttttaaaaaaataaaaccagctggaagtctggaaccactattttgttcagtccaaccacgattgataccaaacgatgacgcatggttaattagtaaaatctaggaggtcattctttgccttgtaattatacaatctcaaaaaaaaaaaaaaacactgcagacaaattataagcagttacttttctatgaaaacaattaactatcaattttgtagaaaattgggtaaaattaatgatgtattatattaaagaattatttcaattcaaaaattaaaaacttaattttttaaatgaaattctaaaatataatttatattattttctaatattttgaacagtgggtgcaacattgggagtcctgataggagctttt

SEQ ID NO: 61745 - DNA, 282 bp, Populus trichocarpa
  Intron number 1 from transcript POPTR_0001s27470.1 (locus POPTR_0001s27470) derived from phytozome v7.0 (chr-ID scaf fold_1; pos 26380490 to 26380771 reverse strand)
tcatcttgcttcccattctctccttttcttctcaggtgtcttccctctctctctctctcaatttttttttttttttaaaaaaaatactctttctgttttttttttatatataaatttatctcttaacgttaatcgagaaactgctttgaattttgatcaatgtgattacccattttcctttttcattgccttctttctctgacttccctgcttttctttattttaactccgttttctctgttaattaacattatagatatctttgcagagtttctagctgaa

SEQ ID NO: 61746 - DNA, 465 bp, Populus trichocarpa
  Intron number 2 from transcript POPTR_0014s17990.1 (locus POPTR_0014s17990) derived from phytozome v7.0 (chr-ID scaf fold_14; pos 14581953 to 14582417)
acccttttcctgttcaatctacaacggtaagcaattccttgttgctacttgctgctgcataattgatcagattatattattggagggtgtgtttctttggcttaacttgctcttgatgccattagtttttggctgttgcttttagtgctggaaaggggattccatggccattgcttttcaaaaaaagatatatttttttttcttgttattctctggccattctttttttaaaatgttattttgttcatgttttcctaattaattaagattcaagaagcatatgatcacatctggtctatcttcatataattggcaaaaatctaaattaactgaacttttgattggaaattattattcaagaagcatatgaacatctggttcatagataatgttccaatcgtttcgtgtttgttttttgttggaatgctagccgaaggagaaaatatctcaagttagcaacggaaa

SEQ ID NO: 61747 - DNA, 746 bp, Populus trichocarpa
  Intron number 1 from transcript POPTR_0004s00900.1 (locus POPTR_0004s00900) derived from phytozome v7.0 (chr-ID scaf fold_4; pos 426112 to 426857)
tgcttggtctattgtgggtctttacaagttgacaggtaacctctctcccttgttttctatatattctcttctctgctccatttcgtgttccgtgactctctctcccttttcttttcgcttctcaaaaatcaaaatccgtgagtagctttaattttttgttgttgttgtataaccgttttttgttaatgtgtttttgtgattatttttcgtaaaaagttggtttctttttgtgtgattattgttttttttatatatatatagtttttgtggtggttggattaatgctggttagattttgtggtaattagagtttaattgcgtcagcttgtttgttttattgtgtgctgaactgggtttgaataaagtttctttctttattttgaaatgaagagctaggtgcaggttattttctgttttgttggtgtagttgaggacttgaagggaaataaaggatttgaaagttttgatctttttctatattactttgttgaaatgtaaagattgactaaagaaatgagctttacttgagccaaggacattgcatacagtagacaagttattgtttgcgttaaatgtcatgactttatgttagattttttatttatgattattgaacatgatattagctttcttcttgataatgcgtgttaatcactttggattaatctgattgattgtattggttattgtgtttcctgaattgggcttgattttttatttcttaacatcaatttataggtgtaaac

SEQ ID NO: 61748 - DNA, 940 bp, Populus trichocarpa
  Intron number 2 from transcript POPTR_0010s12910.1 (locus POPTR_0010s12910) derived from phytozome v7.0 (chr-ID scaf fold_10; pos 12840970 to 12841909 reverse strand)
aattgggcaccctttgcatcttggataacaggctggtaatctttcttgtttactattgtttttttggttcttaatttatcttgctaggttcaaatttgattgtggtttggaattctgtggttttgcattcacaatttatttgcctttatttctcatgaccttattgttgtaatcaccaagatggttaatcctctgggtgtgaaactttttaggctgtgcaaaattcccttcagggacagtttcagaatcttttctatttgtaactgtaggcaccacatataggctagtgttttttacattataggccgcagagacgaagtttcttgaaattgtacgctgagcttcactcgttatactgcaatttgaattggtttatcagtcattgcagccttggagtcagagtaatattgtgatgatcccgaaaggatcacaatattatgatgttctgaaatatagtagatggcttctgagtgattgtaatttgaaatttttttgccaccgaagaaagaaagaaatggtaatgcactaaaatgtaggtttcacaatggccttcatcttggtgaaagtaaacgtaagtaaaacacctgcaagatacaaacatacaccacacttgaaacttcagtcaacgaaccgtagtcagtgctcttattctgtctcgggcagattcttcagtaaagtgtggaatgagaagaatgagaattggatatctagaattcacttgttttcagttttcaccagcttattcttttgagttcaaaacctcaaatcactgatattattatgtgacctgctttggtcttgtgaggaaagttagatacgtagcttttacaaccgaccacttttacaaagttggtcttcccttaggacgtgttctgatgcagtaaattgtcttttttttttttcaggttcaacattgttggtcaggtacagctaagaattt

SEQ ID NO: 61749 - DNA, 875 bp, Populus trichocarpa
  Intron number 2 from transcript POPTR_0002s04690.1 (locus POPTR_0002s04690) derived from phytozome v7.0 (chr-ID scaf fold_2; pos 2936379 to 2937253)
tcgcagctgtagaccttgccaggcagttgctccaggttcgttaattctctactctatacatcttttactgatggccttctttctaatgctggctttggttgatatctgttcaaaacactacactaacgttagcactggcttgtgtccaaaagaagtaattttttttttttaaaaaaagaacatgtagccctaaaattagatcaaagacttgggagaatgatcagcctaaaaaaactaaagaaagaaaattgacattttccatgttctttctttttttcctcctcttttcttatctatgaacaatattttattgtttttatctgcatttccgttgattgataaaaaatttcctgtagtttttgatctttgactacaaagtccagttgctaacagttgttttgtctagaacaagaggtcatggacggatcaaagagggccccatgagaagttgaggttataaatttgtttcatttcatcaggccataattgactggaaatctctggatctgtccttgaggatcctgggcaatagtgctgtactttttttaggcgaatccagtgtgttgttttaattagacgacaatccaatcaaggaaaaaagaaaaggacatctcttttattgtacttttccttgcattaatttcaatctatttttataaaaaattcaatctattttttatttattaatattaaaaataaataaataaaaaatattgtaatatatttttaaataaaaaatattttaaaaaataccttctaggctttctaccattcattccggaacaccgtttaagtgatgcgtggtgcccgaacaccccttaagtgatgcgcttgttgggaatatgtaatatagggttaggtacacagaacttcct

SEQ ID NO: 61750 - DNA, 740 bp, Populus trichocarpa
  Intron number 2 from transcript POPTR_0001s13820.1 (locus POPTR_0001s13820) derived from phytozome v7.0 (chr-ID scaf fold_1; pos 10901094 to 10901833 reverse strand)
ctcataggtggagtttgtgaggaagattggggtttgcttattggttacaacgcccaatctgtcccaatgcattatggatgccctggaattttgatcactcaatatcactcaacaatgtgtatatttcacatgaagtgattgtaataaacttacttgcgatcaacactataccctgctttcctactaagaggtgcataatgtttaagacacaagcacgtctgaaagtaacagtttaatttgcttttacataggattttgatgagagcttgtgcttggagatagcagctcagtttaatcagtctgtggtgaaaacaaatgtccacttttttgtgcacagaaagtattgtcaactcactgcagtttaagaacacctttgcatgtaagaagatagtctttaaacacttaaacattgctgctcaaatccatatcaagccaccttaattgactagagatccaagctagtcctttttgtattttagtttattgtcatcatcatcttttagaggatgatttctgtaacacttgaaatgtattaacgcagcatttcttttagaaggtatgcttcttacaacttgaaatgaatttaaatgtgttttttttgtgtggcgcagcgttactacaaactatctcttccacataacaagatccctgatgaactctgtcagctggctaagaaaatggctgcttccgcaatgcccatgtgagaagaatttcagccagaaggtgcaatagtaaactat

SEQ ID NO: 61751 - DNA, 402 bp, Populus trichocarpa
  Intron number 1 from transcript POPTR_0006s29480.1 (locus POPTR_0006s29480) derived from phytozome v7.0 (chr-ID scaf fold_6; pos 26831006 to 26831407)
ctagcagcgccttcgacttcattgtcgctcctctggttcgtccttttcttgtgtttaataacatctaatttgacctgatttgatttctggtggctagttagccttttacgtgttatttgtgtgaatggtagtaggctcacctacattgatctttttgtggccttcccttccgctctttgctcttttccacacttgtaggcaacattcttcttattgccgattctacttctaggctaggctgtcgacataacatcttctgcccttttattttatttttatatagtgaatttaccattctaactcccaattcttcaatttgatctatctatgttttctaaagtattgcatgttaataataattgtgactgtgatcatatctatgcagcctggtttctggcacag

SEQ ID NO: 61752 - DNA, 504 bp, Populus trichocarpa
  Intron number 3 from transcript POPTR_0006s29480.1 (locus POPTR_0006s29480) derived from phytozome v7.0 (chr-ID scaf fold_6; pos 26831670 to 26832173)
aagaaatagcttgggctaatcatctctctatacaggtgattttcaatcctaaaatttaaactactttacttcattctttcaaagttgcaatgtatttcaattgccatgaactccatatagcctgacaagtggtggagaaaccaaaaacttttactataagcaaaccttttcctgttacttatcaatacgatgacagtcattggaggtgcatcaacatacagaaattagtttgtacaagacaaattctgtatgctgataactttttttgttccacaccttaatggctgtcttctttccacttttgtctgtcctaaagtaaacaaaaggcacaagttgtcgcactcttctgatttacccccttgtgcaacatctatccctattcccggtgttcattcatctttattgtttgtgttgtggtgatttctcgtgttctagatatagttctttcagaaaagccatttttaagagcctatggtgttaaagctttcgttgtctggtgcaggc

SEQ ID NO: 61753 - DNA, 655 bp, Populus trichocarpa
  Intron number 2 from transcript POPTR_0001s14090.1 (locus POPTR_0001s14090) derived from phytozome v7.0 (chr-ID scaf fold_1; pos 11066577 to 11067231 reverse strand)
aaggtatgtcggattttgagctttttatcgtgttcatagagaagtgatcgatctttactactttagccacgttacattttttgtatcaggcaataatctgaccacttattcacagttttctagaaaaaatgagcttctccatcttgtgtagattctaaaatgttggctgggactgtttgtccgcttcccctccctttgggggagagggatgctaattttctgtttaaaacttatactgcgacgatcctaatctctggtttgctgcaattgctcataaaggaattattaaattattgagaaattaagctgatttgatacttcttagtgtgaaatctggcatattaccattactttttccgaggcactcagtcagcaaagaaagttcatgaattccctttatatttttgttgtctcaaacataagcttggtctttcagaaaagcctggactttgtagagtttttctttagatttatacccccagctacctggtcggattcagatgtctctattgaacacagataaaagcgtcattttattggtttatgttcttgttttgcaatttgtatagcttttttggtgatatacagatgctgaagtaggaaatcttttatattcgcagggaaaatcaatcaagatttttttccattttcacac

SEQ ID NO: 61754 - DNA, 942 bp, Populus trichocarpa
  Intron number 1 from transcript POPTR_0014s01670.1 (locus POPTR_0014s01670) derived from phytozome v7.0 (chr-ID scaf fold_14; pos 1547926 to 1548867)
tgacacagtccggcaccaatcgcgccaagcagaaggtgagcctaattctaaatttccggttattcaagacctcgtgtctgctgcttctgctgcaactgacgtggcatgcttgttttgggaatcaatgtcgttttgttggttatctttttgaaggtagtacatcattagtttgccacgtcagttacttctttaatttcactcccctttttagaaaatgaaattggtttttattttctcctcgctcacttttttttggcatttatcttaaaatatttaactttattagtttgttaatgtagttattagatctggtttaggtattagaattttggattaactttaaaacaatattatatcagatttttaattaaaataatattattttagataaaaaaaaatagaagttaacctcataattaatttcatgttgttaatggagtagtaaaattctattaattattttattgagtttattttaaaaaaacaaagaagagaaaaaaaattaaataaaaacatgttcatgcgtaaaatatgtttattgacctcatagcattaattatttttatataatataaaattttcctaattatggatgtgtgtttgttttaaaggtatgattggtttttttaaaaggtttaatttttttaaagtataaatcatattttataaaaataattttttttatgtgaatcctataaaataaaactaaccgcacttttatcacaaacatatttttaaaatgaaactcaacctcaattaggttttgagcttcgtttttatattttgaaattaattacgttattgcaatcaaataaacaatattttgtctgtcgttgtctttattttttctctttgcattattgttgatgggttttggtgtcggtttgtgctggatgattatggacaggcggagacattgatcgatcttctacggcaaccgag

SEQ ID NO: 61755 - DNA, 745 bp, Populus trichocarpa
  Intron number 2 from transcript POPTR_0015s15420.1 (locus POPTR_0015s15420) derived from phytozome v7.0 (chr-ID scaf fold_15; pos 14706166 to 14706910)
tgttggatcctgacgtatgttcttcatcttcgtatcttttatgcttatcttacatggtatttagattcaaaaccttgctatggagtaaaattttccacttttaactaggtgggttggggggagctatgattccgttatatttgctttataataggaagttctactttattcaataacaattgcaacagagaaagtcagctctaatttgaataattgaaacataagctcacaattaaaggacttgttaatgctcttgagataggagatgttttggagaacaactttacagaaagaagagtccattttactggaaaattcaaatgcattatattggatgttttctgatttaatttacaagctttgttcaactagaacttcattatagttttgttcattttaaacaattcttaagtatatgctacaacgttcaagttacttgatatctcaaaattcacctttaatctagttcatctctaatgtctctcatgtataagaagctttttctattttccattatattgtaaaacgtcaaattcatggctgatgcgggttggtatgcaacttggtctcaaatttcttcagatattagttttattgtggaaaagagtgataatcagatgttatcaaaattgaatatattgctataaaggttggcttttagttctcaattaaatttgcatggaagtttcatacacattattttgtttcatgcagataataggacgtgactgtgtttattatttcc

SEQ ID NO: 61756 - DNA, 653 bp, Populus trichocarpa
  Intron number 1 from transcript POPTR_0010s14130.1 (locus POPTR_0010s14130) derived from phytozome v7.0 (chr-ID scaf fold_10; pos 13823797 to 13824449 reverse strand)
agtccagtattggattgaaaaacggtaccgttttctaatcttgtctggcaagatttttgggagtttatttttatttaattttagtgatcttttgtgggttctaaatattctgctgatttggtagcttgtttgacttggtctcactgtttgaacagtggttctttttattttttggatgcaaaaaacatataaaaaaaattgagttgttaacgatgttgtgttagattttatagtaagttgctagcggtaattctatcaattaaacttatgtattagcttcgatggatcttcgtcaggccgagaaaaaaagaaagagaagcttgcaatttgatgggtgtttgggtcaatttatgtaggtttgtgtgaatcatgcaccgaaacacatatttttttttgtttttttacaatgccgtgaaatgtttgctgtagggtagttgtgtaaacaaaagttactgcaggtggtaataatgtgttttggtttttgtttccctaagtttaccagggagatagtttttgggtgatcattttgatgttgcaacctgtttcgtttatatatatggttattttgatgttgctttgttgtggtggatgtaaattgttctgttttcatgttggcagtgcggtcgtttggaacagaagggcggaaaaaggat

SEQ ID NO: 61757 - DNA, 863 bp, Populus trichocarpa
  Intron number 1 from transcript POPTR_0008s11060.1 (locus POPTR_0008s11060) derived from phytozome v7.0 (chr-ID scaf fold_8; pos 6976969 to 6977831)
aagaaggtattgaagattggaagagagctcagcaggtatgatttttatatttcatctgttttctaagtttgatatgtttattgattatggtttgatgtgtttcagtaatgtcttcttgacttgttctcatagagagaagtttcagattactgtactgattgaatggtatttgtatgatttgatgatgaaatcttgggataattttgatactactactggaaattttcatttgtttcaaattactgtactggttgaatggtatttgtatgatttgatgatgaaattttgggataattttgatacttcatttggaatttttagttttctttgcttgacatactgggaaatcttttgcctagaagtttaataaggttttagatgacagtgataaactaaatgaaagttttgacatgttactgacggagtctttagagaaaaaaaaaaagacctttctttttcaaaaaattaagaattggagatagttgataaattatatcttcaatatgtctggggagagatggaccggaactttagctcatttttaaagattcatgtcatcttttcccagactttgtgtaatttgtaaaagtagtgaaacatcacatacaggatgagccttctgctctctcacagggtaatttgtgctacactgtttagcatcgaaactccttttcccaaatagcagtcctgtttatattgtatatgttttacctgcaactttttaaatgcttccatgttctcatgcatgttattagagatgtctatatcgaaaatgataattatgctgatcatccatcttctattgaaatttctcatatctgatctatacttttgctttcggaatgccttctcaggatattgag

SEQ ID NO: 61758 - DNA, 334 bp, Populus trichocarpa
  Intron number 1 from transcript POPTR_0001s23000.1 (locus POPTR_0001s23000) derived from phytozome v7.0 (chr-ID scaf fold_1; pos 22038235 to 22038568)
ttcctcttcaaagtctaaatcatctaacaacagaggtactctccacaattttgctcctctttttcactcacacactgtacgcttttacatctaggttaatccgaaggctcgaagaattttgacttaattgttctgataattatctgattaagcaataattacaagagaaacacaaaaaggttttgctatttaatttttagtattgatttttgttgatttaatttttttttcaacaggaaagagcaagaagaaagtgaatgactctaatttagtggtaaaaatagagaaacagaatgaggagaatttggttacgtcttcttcagaagtttataag

SEQ ID NO: 61759 - DNA, 459 bp, Populus trichocarpa
  Intron number 1 from transcript POPTR_0010s15800.1 (locus POPTR_0010s15800) derived from phytozome v7.0 (chr-ID scaf fold_10; pos 14913507 to 14913965)
tctttgctcgttctccaggttccaaaaatccctccctctctctctcatcagtcctctgtttggttcccgagaaaacgaaagaaattcaaatttttgtttttaagaaaaaaggttgatattgatagggtttcgttaataatacgtgcacgtattttactgaattgaaccagtttcttcagctcaaacatctcacactttctctcgacataatttatcatctgtttgattcggtagaaaacgaatgaacaggaaagaaagaaagttaaatttgaaaaatcgggtttattttattaatttaagaagattttttggttctgtttttttaaaaatatatatatacaggaatgacagaaataaaataacgtactcgctttttaaaaaaatttgtcagtattattttaatttttttatcgtatttttgcagggagagtgaatttgattggagaacatattgattat

SEQ ID NO: 61760 - DNA, 580 bp, Populus trichocarpa
  Intron number 1 from transcript POPTR_0013s11470.1 (locus POPTR_0013s11470) derived from phytozome v7.0 (chr-ID scaf fold_13; pos 12103952 to 12104531 reverse strand)
ctggaagagaagttgaaacagtatcttcttgtgcattctccactccagcactgccttgatcattcaaacattagtttccattgatcagtttctgcttttcattggatatgaaatatcatcaaaatgttcttcttcttctgaccttagcaatctaaaagtgtggtatttgtaacgatgaaatgtttcgacgctagaagattatgttgtttagcttttgaaaattgtcattggaggggaggccatcgagctttcttgtatggacttggggttctctgaggatttgaattgaagagttctcgttgcaaaagatcctttaagatttaatgttcttctctaactaaaagcccataccctcaggttaccaagaagagatgccctgtatgatgatttgacaatggcaatggcatttgttttgatcatctgaatttcaccaaatggtgcttgggctgaggggtgaaattttttcatgtgaacatatttaatgctgctgcagtgtcaaaggtcattgataggttgccttttgttatccagatggcttgagctggtctaacttgattgctgcaggtcatttgcaagactg

SEQ ID NO: 61761 - DNA, 518 bp, Populus trichocarpa
  Intron number 2 from transcript POPTR_0002s16700.1 (locus POPTR_0002s16700) derived from phytozome v7.0 (chr-ID scaf fold_2; pos 12485903 to 12486420 reverse strand)
cagctatattaaaagagaaggaggtacatggacaatggccctttgtttgattttcattttttttggtgcagaaaataaattgatttcttggctagttgttgccttttctcgttactaatgaaataccaaaaatgaaaattatttactgaggaacgatgagaagatccaagtctgttctgcacattgaaatgctatgtccttttttatttatgctgtaccttcacattttattgaaggaaaattattttctggcaagacatgacgtgtccagaattaatatccaatacttttcatttcatagttattgatcctgtttctgtttactctttgggcattcattataaacaaatgcttatcacgatcattctctaggattctagtatatagttttggctcactagctctcatttaacaccccctagttctgttagttctatctcgaagggcctttgaaaactaaacctgctgctcttctatcccaatttcacaggaccagatttctagattgaaccaagaaa

SEQ ID NO: 61762 - DNA, 593 bp, Populus trichocarpa
  Intron number 1 from transcript POPTR_0002s16700.1 (locus POPTR_0002s16700) derived from phytozome v7.0 (chr-ID scaf fold_2; pos 12486462 to 12487054 reverse strand)
gctcaccgtacaattttgaggtatttgttgtttaatgtgtttccgtgattgggtttttgatagctgtttatgcttggctccaaaagaacacgaacttgatattgattttcattgttttgaattttgattaagaaacaaggaaatctaagaattatcgtgtttccaaattaattagggattatgcgatcctcacttcagttaggtataaaaagtgcactgcaatatagttgatcttttaattgaatcaccatgagatattaatcttgtcgtattctccaaatcattggcaacattaataacctgctagaaagcaggcaagcttaggttttgctcaaggcttgtggttgattagcttagaagtatttggatcaatgatagctgtaaatggaagtaatttaggttgaaaatgtttatttgcgaagaaaggttaaatgagttgattttcttgacaagttgatgttagtagcgatctagttgtgacttagggtggggttttatgtaatgaggaatacgtggttagttgatttggtgtttgctattgttttttgcttgttgtagattgaacaatacaaagcacaaatcaaaaggcttca

SEQ ID NO: 61763 - DNA, 536 bp, Populus trichocarpa
  Intron number 1 from transcript POPTR_0019s05620.1 (locus POPTR_0019s05620) derived from phytozome v7.0 (chr-ID scaf fold_19; pos 5981188 to 5981723)
caaggaattgtctattcttcaccttattgctattggtttgttctttttctcttaattcttctctttgaccaaagaattttatctgggttttgttttttggatcatggttttgattgtcttgtgcttcttctttcttttttgtttgctaatttaccggatggatgagttgatgctgatcgtgttaattggttttcaggttttggccagaaattttaagctttctttcctgtttttctttggatgtatcatttccttgttgtcttatccaaataatatttcctttgtttaacttttttttttattgaaattaagttttattaaaacataagccaaaacctgatcctgctaagcaccgtcttaatgctactttgaaaagttttttttttttatcctttttgtaactttcagtttttcgtgttagctttctagttttttaatgttggttcttgtgctatagcttgccttctatctttgaattgctgactgttgaactctgatcaggcgttggctcaaccattggagctggagtttatatt

SEQ ID NO: 61764 - DNA, 770 bp, Populus trichocarpa
  Intron number 2 from transcript POPTR_0019s05620.1 (locus POPTR_0019s05620) derived from phytozome v7.0 (chr-ID scaf fold_19; pos 5981879 to 5982648)
tgttggagaagggtaagtatttgttgtttcttgtttggaaacttatttacttctgtggtagtccctcttctatttggttcatggtttacatcctgctatttctttattcaaaggggataagtaagttgatgctgtgcttgctttttcatttatctttttttttttatatgtgtaattgtattaaagggaaaaactatacaaaaatactaggggcataccttaagatgtatatcgtcccgttacccaaatccatctgaccttaggcagcaggaaaaaaaaaagctaaagaaaactcaaatatatccgaataaaagactgtctggacagcagctaggaagctggtcatccggtttgttgacaacttagaaccgggcgactggttctgcaaaaacagcagacatgctaagaagaactcaaagaaaagcaaagcaaaggtacctcatgactctagcagacaccatatggacctgagagcaactggaatctgatactttggttctagcaacatgttgttgggggatttggttggtcataatttggttccatgatgcacctacttttgggacatttcttgctgtttttgatatgattattgatttatataatagcatacctcaggcattgtgtttggatagttctttgtttgtatttgggttccatttttggactgaatatagtttttgacagaaccagcaatgccctttgcttattgattcctgcattttcaatttgcagtgttgcttggttgattggctgggctctaatattgg

SEQ ID NO: 61765 - DNA, 565 bp, Populus trichocarpa
  Intron number 2 from transcript POPTR_0010s14690.1 (locus POPTR_0010s14690) derived from phytozome v7.0 (chr-ID scaf fold_10; pos 14212285 to 14212849 reverse strand)
cgtctggtatcctgccggaaactggatcttttacggtaagaattaccacatcattcgcatcatgattataagttgctaaaccctgggctacactgtgcacgcatgaactgaggttcctctcatctgttgtttagattagcgttcattctatcatttattcacgatcaaaactccacctatctaaccactaaatcactctaaaagaccactgaataatattcaacatttcaacataacactttttttttagtagaatttttcaaccttaaaatactcaaatctgatgattcttagatttaatactgatatgaatgaacttatatcagtccaacctttcatctggtggtagttcgtcattgatagtagataaaacctgataaagatggtcctaattcaaacacttcatagttattaaaatcaaaagaagaatataagagatgccaatgaaaactatctggattgtagccctgtaaattggatggtccgaacaatttatttcgacataactgtttcttttggtttttgtgtagggatcccccttgaccttggacaaccagacagattt

SEQ ID NO: 61766 - DNA, 661 bp, Populus trichocarpa
  Intron number 1 from transcript POPTR_0002s04510.1 (locus POPTR_0002s04510) derived from phytozome v7.0 (chr-ID scaf fold_2; pos 2824963 to 2825623)
atttaactgtgctggctcccatccttatcgtttctgtaggtaattttttttttcacttttctgtttctgtttgttaaacattcaaaacacgttgataaggaaatggaattttactgaggataaaaatttacttatcattgaatctcttgttagtttcactgaagatttctacattagtagaatcatggttttgatgttgctataattggtgatttgattgactttttttcttctttttttgtggatttgttgtggcagggcgggaagaattgatttcggatttgtcaaatttggtaagaagtttcgcctttaacttgattttcagttttcattctgtttggttgctaagaaaattctttatgcttgtgatgcagattttttgtaaaataaagtgatgtttgataatgtgagagtgattgttttttaaagtagtttttgtttagaaatatattaaaataatatttttttattttttaaaatttatatttacaaaaaaattaatttaaaaaaacaatcatttttttttgtaaagtcagccgcaccacaaaaacaaatggctcctaagttagatacaagcatggtcggctgttctaattgtctatcaaatgttctggttttgactgcaggggtatccaattcagagatccacagataagaaggt

SEQ ID NO: 61767 - DNA, 757 bp, Populus trichocarpa
  Intron number 1 from transcript POPTR_0003s11000.1 (locus POPTR_0003s11000) derived from phytozome v7.0 (chr-ID scaf fold_3; pos 11846000 to 11846756 reverse strand)
tctcacctggattacataaataagagaaggtaattttgttttcttcttaacttaatttaattcatttcaatctgtttatttttattttttgtgaactgaacaggaaagaagttagctcatctaatcagtcgtatgaaaatttaacttctgatgttctagtggtaattcacgactcttttcggtttgagatttctattttatttggtatttgtattaactgatttctgtttttcttgtagcagggaaatacgatctctgttttaaatttggtaaattatggaagtatgcatttctatttctgtcgtgatcttcattttttttatatactaatttggtaaaaaatattatgcaagttagctaattaggtgatgttaaatggaatcaggctgcttattgcgcgtgttgattatttttttatgttaatgaaaaccccaggtgattcttcggaatctgaagagaaggagggttcctcaggttctagacaggatgataccttgcattctggttagcctgttattatctggactcattttgtctttgaataattggttagattccattatctttcgcaaccattgagattttctgattgatcaagtaatttgaagtaggtgttaaatcaagctgatttgagtatgtctttgtcattgcttatgctgttttcctttcctttttcctctcttgctagatcatccaaatgaagttgatcgagtgaagtctagaagtgagcaacggtatcctgtcccaggagagcctg

SEQ ID NO: 61768 - DNA, 614 bp, Populus trichocarpa
  Intron number 1 from transcript POPTR_0001s13420.1 (locus POPTR_0001s13420) derived from phytozome v7.0 (chr-ID scaf fold_1; pos 10507566 to 10508179 reverse strand)
tactgttccttctaacatctccaagttgtcttctggttagtttttgttttattattttttgttaataatcaatttctttgctttttatgaattagttgcttcttcatatttgtcattgcttgatctgatctggttactttctgattttgtaatgtttgtggatatcacatcaataacacttgctttgccttttcttttttcctattttattacgagtacttgatgatgaaattctagaatgatagacttaagattggttctggtagaccccactggattttcatgcagcttgtaaagagtttttcattctttggtgaaatattcgagcattcgggttggatctgattggtgattagaaggttgtagatattgggggtattagtaacttaattcaattatcaatttgtctctttggaaccatcatttattggaggttcaattcatgaccattgctatgcaactgttctattgatctcactgaatttgaggactgaaattcttaatcttatagtgcctggttgaaagtaaatgaattttttttttatcgatctgagttctttgttttgatggaatttacaggatctgacaggctcagaccaagaagcaacggagga

SEQ ID NO: 61769 - DNA, 905 bp, Populus trichocarpa
  Intron number 3 from transcript POPTR_0008s13140.1 (locus POPTR_0008s13140) derived from phytozome v7.0 (chr-ID scaf fold_8; pos 8580703 to 8581607)
tttcccgccgattggccaaaacccataactggacggtatagattttgtttattttttgaaattctaattgttttatgatgttttggactccaaatgaatcggggtttgatcaatatgtgtatttgtccatccaatgcaaacgatgtttttggttattttttcttaatctttgaaagttatcagttgaattctttggatgaacaaaaataagatagaaagtctcctctacattttgttttttctttgttatcaattgggcttgcacaagaagctgttggaaagtaactcaggtctgctcatttgatcctttatgcgacccctcaatatttgaaggttttcagttgtgtcgactgttgagaggagtgtgcattgccactgtcatggaataaatttagtcttgaagcttcaaactaaaccaggctatgtcttaagtttatccattgcgcatgcagtgtgttattgtttgactttgctgcactgtaccaatttgcttttgcagtaaccacttgttggggaacttggtttcacagcttaatgcccgaatctaagatgctaacccacatggtgattgtggaaaaaaagataacgagcagaaccagtgagacagtcattgtgacaattgatgagaattatagttattcatattgacagagggtgtttggaagaaaaaggctctagatgttggaaaaaaaaaagatattggaattgctgttgcatcaaatatacatctgcaatttgtgcaacctgtacattatgtgaaaaattttagtattttctgtgaagtgattgaaatttgttgttttatttttgtcattaccatttttttgtgaagatgctcatgttatgcttccactcctgcatttttaccaggtagctttgaaaatactgattgtgatccatagatt

SEQ ID NO: 61770 - DNA, 780 bp, Populus trichocarpa
  Intron number 1 from transcript POPTR_0097s00290.1 (locus POPTR_0097s00290) derived from phytozome v7.0 (chr-ID scaf fold_97; pos 60708 to 61487)
gataaacccttcatgtgtcacgtatccaattatcatataccctttatggaagccataataattaagatacgacgtacggttttcgaaggaggcagagcaatagaaaacagaggattgggggtttttagaactatagaaaagaacccgctaactcaagttcttcaataaatcacacatttatatgtagattaaaaaataaaaatgatagaatttaaactagaatattattttcttttagttaattcctcaggacttcctatctcatttgcgtgctactttaatctatgtaactttcttaattatttccacaaatggtggaccagccttaaatagtctaggcacgttattaaatattattaaagttttctagtttttttaaataaagagttgtcatgacttttagcaagaagacttagttaaaaaaaattaaatattttatgtgtttctctgttattcttattttttaaaagttttgatttataagaaactttattatcattcactttcctcaattgtcagtcattttatgttaaaaataagatttataactaaaaataaaaggctaaaataactaaaaaaagtatcttaaattgctagacataataattgattatgtaagagcagtacttccttcgatcgtataacgatctagctagagaaacaaatttaattaaccttccaaatatccattaacatttttttaatcaagcaagaaagattaaaataatataattgttcggaccagctggtctggcaaaacctaattgttcggaccactgt

SEQ ID NO: 61771 - DNA, 587 bp, Populus trichocarpa
  Intron number 1 from transcript POPTR_0004s19830.1 (locus POPTR_0004s19830) derived from phytozome v7.0 (chr-ID scaf fold_4; pos 19544037 to 19544623)
cttgtcttacatcagagaaggctaggagaaaccgagtagcagttacaacttgattttccagttgaactcgggaacatatgttcaggaggttgcctcctgctgttttagatattaatgtaatgagagatgaagaagtttgattgtattattatattgtaaaccaccttgttctatttccttgaaactactcaatctgaatattttattggatataatcatattttgacgtcttgagaacaagtccagaggtcgggcagaagctaggaatagttttgtatcttctgcagagaaggtttgaaatgtccagcaagaaatctacgaagtataaatttataaaataaataaattgacctcagaatagtttaatggaaaccaatacaagttggaaaaatgccggaactttcctccgaactttgagctttatcttctcttttttttttcaggtttcttccattctaagaaattactagggggattttagagtctgaataagattattatgtgaattgtgtttagaatctgctgaaattctctgaagaaatacatggaaatagaattaaggttcatcggagaccaaatacaggaaa

SEQ ID NO: 61772 - DNA, 907 bp, Populus trichocarpa
  Intron number 1 from transcript POPTR_0019s05910.1 (locus POPTR_0019s05910) derived from phytozome v7.0 (chr-ID scaf fold_19; pos 6337513 to 6338419 reverse strand)
gtccatttctcatagattcttccaccatcccgccagtaagccagctctatatattccttcacacatatacatttatgtatatactgtagcttccatttcttgtctactgatttagagtcttcattgggtttcttctcgatttgattaggggatcgtgtcgagtatagagcgccctttcccttgttttcccttgtccttctgcttcttcttcttgtttaaacactgaaactttgctttcaattgtttacgttttcttgttatggataagtaatgtcaagcttacacatgttatgttgttttcttgattatcatggagaagtatttcccttcattgttattattattactaagtgctatgttgatatatatctggtagacttggatttcaaaggctggctattctttttaattgattttaaatctgttggaacatcctttttttttttttcattttgatcacagtcgaggtttgtgggctactaattatttggtcaatatatcagctttcaagggcaaaagatttggcatttttccacttcttcagaatttcttgaagagataaaattgtaatgtcaatcatctaattggttttgtgtgttgtattgatgcaaccttttcttgccatgaccgttgctttctccaaggatttgattctctctttcatacttctttagtcatgtgatatggtgattaagagatgccatatcacttattttataacaaagtctgacactgctgattgtaaaggctgtacggttcttaatataatgaattatcatgttctcaatgctgtgtatattatatgaattgtggcatagtgtgtatctcttgcttgtcttgttgttggtatgaaattgtttgtgataacaatttcagcatgattttgcagtgggctattgcactttct

SEQ ID NO: 61773 - DNA, 721 bp, Populus trichocarpa
  Intron number 3 from transcript POPTR_0010s10080.1 (locus POPTR_0010s10080) derived from phytozome v7.0 (chr-ID scaf fold_10; pos 10661217 to 10661937 reverse strand)
atagatttgtgagttcttaatgcttatgcttgaatttttgactaccctgttaccttcttggaggagactttgcgtactgtcatttcataggggaaactattttactctagaaaccttccctgaattgtgttggcactctccttggcgctatttttattaagagaatattgttattagctgtttagaactttgagctgataaagaactaaacaagtattatgtctaaactgatggttaatctatggaagcttggcgtactctcttatgttgtcttgatttggaaattgacaagtcctcttggcttatgatccctcctctgcttaaggtggagttaacattcgattcaaaacaattcttttgacgcaaggatctgggttgtgtagctgctttgttcacgtaatctgatactgcagcattctgcatttgtgactttaaaaaaattaggcagacagcaatgacttgtttattcttatcttttggcatttttagatttgttgcatctattttttggtccttttattttctgatttatggccagtaatgacttgtttagtcttggtaagatttttcatatactcgtatgaatgccttctggtgatgcttggaatatgattatgcgataaatctagtgcacgtttctttttgtgatggttatgtttgtcatatttgttttgggcttgttgcagttaattgccgttgctgcactttttctcgctgcaaa

SEQ ID NO: 61774 - DNA, 558 bp, Populus trichocarpa
  Intron number 1 from transcript POPTR_0010s10080.1 (locus POPTR_0010s10080) derived from phytozome v7.0 (chr-ID scaf fold_10; pos 10662669 to 10663226 reverse strand)
acggaattttcagatctatatctccactaatcactgtaattattcgtgatcttatccctcttactaccgttcaattgatgtttttgacgtgcgattggcatatatgaatgaatttttttttgtgtttttgaaagtctttctgttgtctttagtattctgtagaactttaattcggattaattagatcagtgtattacatatctttcttcggtttttttgttcattaaatggctgttttagaaaaataattggtttccaccaacaaacttagcttagtacaggcctttgattttgaagaaatgcttaagcttttatctggatctttgttgttgaagaaactagtattttcatgttccggctcatgtcaaatcgatctttttaaggaaagttccaatgcctataagcacaaaattttgagaaaaacaactacactacaagtgacctgacttacttcgtgaagtttcagcttttctggacgagtttattatttttgcggttcaatcttattcttagtgtttttttttatgttttgtttttatggctaatttgtcaggaaaa

SEQ ID NO: 61775 - DNA, 781 bp, Populus trichocarpa
  Intron number 1 from transcript POPTR_0002s22470.1 (locus POPTR_0002s22470) derived from phytozome v7.0 (chr-ID scaf fold_2; pos 19215905 to 19216685 reverse strand)
ttgttgttcacgaagatcagaaaagggttatcaaggtatgattgttgcgatgcgcattgttgcttcgttttatcagattactgctgtccttttgtttcttgaattaagaaaaagaaatatgttgtgcagactgtaatacatgcatgatgaattaagtaaaacacacactaactcgtacacacccacacacacaaggacaccagagaggagtttttactaggtgagctagacccatctggaggaagagatcaacatctggacctctcgcctccgccatggggttccataagaatctgccatctataatcaaattgaatcctcaaattagcttgtaccaaattgcctcttttcttccatttccatgattatttcagtgtgtctgtgactcaaaaataatcctgttctttttattgttaattttagtgcaaattatgaaatcaatatagtgatacctgttagtttactcaaggttttgattattgacttatcatgtgtgtttctggcgaggttatagttgtgtaatagtgtagtagatgtcttagtgtcctctacaacccccatctaatccttcccggattctataaaaactaaaattattatatttagatgatatattatctttggaaaacattctaagtgggctattgcctatgataaaccaatgcttttgttctgtgtttttgttccatctcatgattagttgtttctgtcaacaatagatgatagctaatgtttcgttgatgcaggattttcagccctatttacctagttggggagcaag

SEQ ID NO: 61776 - DNA, 651 bp, Populus trichocarpa
  Intron number 3 from transcript POPTR_0005s01820.1 (locus POPTR_0005s01820) derived from phytozome v7.0 (chr-ID scaf fold_5; pos 1219592 to 1220242)
ggtacttgagattgtgagcggcaagaagaatactagtttctaccacagcgacaccctccatcttcttggacatgtggagagctttcatatactccttttttctttttcttcctgcttgaattttatttgatccggttgtcctctacacgatggtatgttcaaaaacacgtttggagaactttgatttttgagtttggatcaaacaccctctttgtcaagaacaggctctgataccagttgttgggatatttccagaactcaaacacacacaatttacgtggttcggcaacttgcctactccacggagctactggtttgtattaatgaagcttacaaacaatacaaacaaaggaggaggagaatcttctcaactcaactctacactcaagctctctctacacttctctgttctctcttctctctgtgttttcactctctgcaactcgtcggttcttcttctctgtgttctctcgatacacaactaaaacacttcacaaggggcacattaatatacaattaatgggagtgagggggagtcctccaccatgtgctaagtgggagattaggtaatcccacttgcacatggtggggcttgcttgtctccaataattaacagatcctccttcaactgctacgctgttgagatacata

SEQ ID NO: 61777 - DNA, 762 bp, Populus trichocarpa
  Intron number 1 from transcript POPTR_0016s04230.1 (locus POPTR_0016s04230) derived from phytozome v7.0 (chr-ID scaf fold_16; pos 2430913 to 2431674)
gatctgaagcggaaggcaaaaagcggagcatccaggtttctttttaatttacgcgtgttttatcttgtggtgactccataacggaaacttattagctgttaatttcttcttttgattcgaaactggccgtggatgaggtttgacttgtgggtcccacatgctcattgctggattttttactgctagtgcctacttgatactgtaataacttttattttttaaaggattttttataaaaataaattattttatatatttttttatgattatgatataataatgttaaaaaaattataaaaaatattttaatatatttttaattacaaaaatattgtaaatcatattatcaaacacacatgttgttgcagttaatttaagcaccatataatttattatatataaattttattatgagattacttttatcttaattttttaatcaagaaaaagatcttataagagtataatttggatgggttttttaaattgaaataaaatctagataggttgagataagagattgcagaccatcaataatgtctacgtggaaaaaaactttttttattcataagaaattgcaacttttctttcctttttctttttgcagatccaaaaaacatacccttttgtaattgtataattttttttatatggtttccctaatgataaaattattaaaacaatttgttttttttgcattgccaagaaaagaagtttcctgaaaattcactccacctttcccaaaccaaaagtataaaatca

SEQ ID NO: 61778 - DNA, 828 bp, Populus trichocarpa
  Intron number 5 from transcript POPTR_0017s00990.1 (locus POPTR_0017s00990) derived from phytozome v7.0 (chr-ID scaf fold_17; pos 736266 to 737093 reverse strand)
accagatatttgaggtattgttgcatgccatcttcctttttcctgcaacttttagttttttttgtagaattaatgactaggttttatagagcagaaagtctctatgtgtcgtgttctgttacagtgaagacatggaagttgattttatgacaccccacagacatcgtatgtattgtgtatagtgatatctatcaattaatcagatcataaatctattcataacaccaggattcggtgatgtactctcactgagcagtagcccaaagattctacaggttgactaggatcaagtcttataatccggtcctatctcattctatctaatccagttatgttatagtagtgatgccacagttttagagataaactgaactattgcaatacaagcattttgacttctcatggttgaattaagttgcttgccagtgtctgtggatatattcttgtatcccataggtttcaacctgatgattggatggttttggtaactacaagggaatagtgtgtcagttagccacattatgccagattctatgctaatgactagtacaatcctctcttgtgaggcacatgattagcagtaacttttcagattaacatttgaattaatccctccatttatgttttgttctccttattgtttcaattagaaaatttcaatcaacatgatcttttaatgaccctgaatatgatgcggatgatggatatccttgtcttgcttttggaaacaatgttatatggcactaaccagatagtagttcatattggaatacctgaattactttggtatattaatttgatctctcattcttgcagatatttgctgat

SEQ ID NO: 61779 - DNA, 722 bp, Populus trichocarpa
  Intron number 1 from transcript POPTR_0005s18120.1 (locus POPTR_0005s18120) derived from phytozome v7.0 (chr-ID scaf fold_5; pos 16196349 to 16197070 reverse strand)
atttttttcttaatctcatacactgaaaacttgttagtttctccattctttccgtctttgatttttcttaaattatttgctggctcgatttcttttgtttgctctgcataatttgcgtgattcgatcgctgtcactgtttgcttgatttagaataaaccccatgtgtaattttttttgttctttgattctagttgaatttatctgtgttaagtcttatttagaatcattatttttatttatttttaattagcttcgtaaaagatgtgaaattacgaatacaagcttgaactttttatttgcttatagtaatttttagataagtgcattgagtttcatgtgaattttctgtactgggtttggaagaactttccccaaaggtgataaatttttcaatgattcaagtctaatggtgaaacaagtttcactgccacaagtttgggcggaggcatggatgattgtgtgagatctaatatgagtattctataataattcaaattacaatggtcttttgtttagtatcatgtgtttgtttgtttttacctgcggttcttacttttttaagatttgtaattcttggtttattcagactaatagtttcaaatattttctgaaatgtgaatgatggttaatttatttgctgaactaagttttgatgatgcgtattcttgaactttgtgcttcttcaggcaagtttttataaagggcaaaataggaaggataa

SEQ ID NO: 61780 - DNA, 582 bp, Populus trichocarpa
  Intron number 1 from transcript POPTR_0009s13490.1 (locus POPTR_0009s13490) derived from phytozome v7.0 (chr-ID scaf fold_9; pos 10721299 to 10721880 reverse strand)
gcagcccaaaagagatcttgataaataactttgaggtaattatgacaccagatttgtgccgtgcacaggggatcaagagacggaaagagcaaaatcttccatatttcccaattctccaatgaagtaataaaaaaaaatccttagatcgatctgccagtgagagaacaatgtgttgatacattcaagctgagcaaagcttaccacacaacctatgaaagaaaaagaaccagtcatcaccgaatttcatatctgctgacttaaataaatcccaacatttgaggtaatcttatttccttaaacgttgttgtaaatgagggttgcgtattttgactgctgggtcttcttgtctgtggtcatggaagttgactcttaattgttttatttggctgtttattcttttgatgttcttgagcctacaagccgttggcaggaaggaaataacggtgagatttccatgaaacaatgactatgagacgggatgttcaaaggacaagaatatgaaccgccgttcagggtactggagtttactccaatatcagagcttgatgcttatatggatgtatagtgttctgaagctggaca

SEQ ID NO: 61781 - DNA, 642 bp, Populus trichocarpa
  Intron number 1 from transcript POPTR_0015s03470.1 (locus POPTR_0015s03470) derived from phytozome v7.0 (chr-ID scaf fold_15; pos 3025260 to 3025901)
tgaaggcaatcacatatatttattttatatttattgtttccttcttgtttgttaaggttaaataaataagtaaataacaatgatattgggttttgtttgattaaaaaattaagaacaagcaactcaatttagtaatcaggtgtttatctgcagaatgaaatgaatggttatttctgttttgatgatattattatgacatatctaatttgctgaatacgatgatttaagctaagtggtttcgacttatgatgtttacttggttgggtgttactttgcttcgattaattttaaagcatttacttgatagaaaagaaatgatgattgattttttccccttgccatcactaccttttggagcgcacatgcttgtataagtaaacatggataccatgcatatgactaatctaataaattcgcatccgaatttcatactcaatgttttcatttcatgattcgttcgtttagcatttctttctgtactgtaagtaaatcgtttagaagtcaccaactttttctaccgcagaaggtgagtgctgatagtttagatatcagcagtataaacgcagttgttcatatgccttttcattctctattttttcaccaacaggcttttcctgacgaggttcttgatcttgacaaagc

SEQ ID NO: 61782 - DNA, 850 bp, Populus trichocarpa
  Intron number 1 from transcript POPTR_0018s03610.1 (locus POPTR_0018s03610) derived from phytozome v7.0 (chr-ID scaf fold_18; pos 3110498 to 3111347)
gaggtaacaagtaagttcctcttcgctctcagtctcttctaatggctaatgggtttctgatttcttctgggttttgactgatatttggttcgatgcttgtttttgttgttgatatgatgctttgggctgaggaatgttgtggggttgttggtagtgtgttgttctgtgtgtaacgaggaaaaaggtgggagtttgttttggaaaatgggcattgattttagacgaaatttgatagtttttgaactgtggattttgttgctgttgtggtaaatttagatttgtagaaataatctggttgttgatgtgtaattgttgatgatggaagctaaattgcggcatttatgagtcaagaagctaagatggcgactcagattttgattggaaatgttaatgtatcattgccagagaaggggaagaacttctgtgattgaatagttttaagtagtttacttgtaggtaaggagtgttataccaataaggtgttgatttcgtttatcttgattcgttattgatttttgaatgtgccgactttgtatattttttagattcagtgaggcgcttctgttcccaaagaagtagtcttttgggcaatttgatactggtcagagcttgctcagttgtgaggaatgtttttatgtcgtctgattagtatgaatgtgtctgatgaggattgtgcctgtttgattgttgtacctttttattttttcagttgcatgaaagacttggagctttcctgtttttggtgtaatgaacgtgtattatgtgctatatattgggaaggaagagtgatttattttgttgaagtgcttgtgtgttggtgattataggagtaggagaagttggaagccaa

SEQ ID NO: 61783 - DNA, 732 bp, Populus trichocarpa
  Intron number 1 from transcript POPTR_0002s05660.1 (locus POPTR_0002s05660) derived from phytozome v7.0 (chr-ID scaf fold_2; pos 3725000 to 3725731)
gtgaatctggtaaaacatacataagctaagctccttatttatacttgtcttaattgcttgtaagtgatgaactgaaatggctagtagtatatgcgttttaatgttgaaatcgaagcaggactctatggaggttctgcttaacatgttggcatcatatgtatgccatgattcttgtcttttctattttgggacaatcaaccgccagctctggttttttccaataaaaccagtaagtatccacaagaatagaacatccatagatatatcttcactggcaaaatcaaataattccatcgcattaatcataaccaagtatcccatatttatgttgtctttggctttacctacctctgaactgaaggatttaaactgtactagtttcagcttatgttttttttaaaaaaaaacaccttattgatttcatcatattggatggtagctagtttagatagggggaagtcactcgaggaacatactggttaatccaactcacttgaggttggagtgattaaggagagaatgctctcttaatggacattttactgattctaaaaaaaaagcgactaaagaggggaaattcatgtcctctgaatctgataccctccaaaccatccataaacgtgggcatggtactctgtctcgagaaacagaattgatcaaatttgtctagttgatcagtttacatggctcgttgcagccaatattttcgggaagccaaagacaaacacagac

SEQ ID NO: 61784 - DNA, 324 bp, Populus trichocarpa
  Intron number 1 from transcript POPTR_0002s06290.1 (locus POPTR_0002s06290) derived from phytozome v7.0 (chr-ID scaf fold_2; pos 4200725 to 4201048 reverse strand)
gtttctcgaggaggttgttgaagaatcagagcgtaaatcataatgcctctagctttctttttctttttctttttttcatttttcattttgaattgttaatttgttagtcggtattgtagatccattctagttgttttttgaattttcaattttgatgtcgaatacatacacaattttcgttgtttgatcttcagcataattttcttatatttttgtttatactgaagataattcatttactacaccgtttttgcagattattcttgatgctgtgattggtgttttgtaggatactaagagaacgctgcagcgttctgtgctggc

SEQ ID NO: 61785 - DNA, 572 bp, Populus trichocarpa
  Intron number 3 from transcript POPTR_0019s13050.1 (locus POPTR_0019s13050) derived from phytozome v7.0 (chr-ID scaf fold_19; pos 14058211 to 14058782)
accagtggagaattaacacatcaatatttgcagaggttagttattcagctttatggagttgaggaattatgttcaatgtttggtgttgttttggtgattgaaaagactgttgcttttttgtgtttatacggtagcaattttgtgtactgaattttcatgtattttcactaatatccttacatatagggtaccaaattttgttgaaaagaagtggactttatgtctaatactattagagaaatgttgattggtttgaaaccctgcaatatccttatttgtgaaaaagaatccatcttcatcttcaatgattgaaaaacagaatgatgggaacacttatctccaccctcctccttgagtatccatccttcaaagtgattgataattctgccatttagggaaggaatcaatggcatttctaaaatgggaaagatttttttttaaaaaaaatcattttataagccaaacttcttccttttgacttagttatgccatagtttatggtttatacatcttttaaatgcacgtaaatacgtgtagatttcctgattcatatgttgaaattgataggagag

SEQ ID NO: 61786 - DNA, 750 bp, Populus trichocarpa
  Intron number 1 from transcript POPTR_0003s00520.1 (locus POPTR_0003s00520) derived from phytozome v7.0 (chr-ID scaf fold_3; pos 319010 to 319759)
agcagaaactgaagaggcgcattgatcaatacgaggtcagctttaaaacattcgtggttaattaattaagtgaattgtatcttgtgagttccacgggaatataatatatctaaatgtttcttgtcaaaattatgttgttggtttttaagaactaaaaattgatttcaagttctctttaaattgatgattttaagtgtctgttgaagttttatggaacctattccataacacaaccaccctctcgttagtctgtggctgcaaaatttgagatttaaccaatatcttgattgcaggtgttttggtcgctagacaatgaagtcaaaatatctttggctttgtacattaatctcttgacattcagtttttgaaagaggatgagaaataaggaatttaatggagtggaagtggaaggtcaaaatgtcacaaagtggtatatgtatatgtgcatgtgtctgataattggagtgcatgagtggtgtatttagtagccaagctgctgtttcctctatattttccaccatttgtttctttgcacagaagattataaaaagtgcctattatgtacctaatcataaacaaggacgcatgggttttatctactaactacggcatgacacttctaaactgacattaatttgaatgcacgctttgatacttcatttttctgcacaaagcttatgagcaatgtccatctttgttgtgttttgatctgtagattgaacttaaaaatccaagtcgtccagggaagaa

SEQ ID NO: 61787 - DNA, 798 bp, Populus trichocarpa
  Intron number 1 from transcript POPTR_0009s13720.1 (locus POPTR_0009s13720) derived from phytozome v7.0 (chr-ID scaf fold_9; pos 10889446 to 10890243 reverse strand)
gagtgaaaggggaagccttgatagagttgattaaggttagttattgattcttaactttagttgattcttgatttgtttagttacaagccagaccttgaatcttgatgggttcttgttatcatcatatatgaggtatggcgtaattttgacttgcaattttgtgacaacgttacttgtataggaagaataagtgggggttttaagagattagagagggagacagcatagttgtgatttcgttcttgatagcttggcttcaggttttttggacccaaattaagttgatgttgattgtttggcggttcagggaattgataaaagataaactttttaattacatgttcttattttcattagttcaactcgaaagaactcatacatttcaactatcttcagttttgagtttttcttgcttgttcaaatccacaagctgttggagtactttgaataatatgaaactatgcattagagttgctcgaaagaactcgtacatttcaactatcttcaattttgagtttttcttgcttgttcaaatccacaagctgttggagtacttagaataatatgaaactatgcattagagttgaataaacttgattctgaaaattttcagaaaagtaagctgaaattattgtgcttgtatagaaactcaggctttttaattcttaatttcctctgcatttgcttgatattgcttccgagttatgtcatcttcgtgtaagtcagtttctcaagtttagtgttggccttctccattttaaaggtcaggagagaaaaggccgaggttgagaagcgaag

SEQ ID NO: 61788 - DNA, 985 bp, Populus trichocarpa
  Intron number 1 from transcript POPTR_0004s16840.1 (locus POPTR_0004s16840) derived from phytozome v7.0 (chr-ID scaf fold_4; pos 17199702 to 17200686 reverse strand)
caaaacttagagaacaggtcgctaagcaacaacaggtacccctcttaatcaagccctaaaatgttagatccaagtttgaatttttattctttttagctcaatatcattatttttttgtcctcgatttatcatttctgattattttatggataacccatgttgtcttttaggtttaggaattagaaagatcgcgactttggtagaaatgttttgcaaatttgattgatttggtcaaatttgtggagtagtattaagccttggagatggaaattgttgtcttggattattagctgaagagtttttgtggctttttaagaatgctcaatggaatgtacgttagtgaaaatgaagattgtagggaaaattgttagtgttaattgattttttcttattaaggtttttctattgtgaaggtttgggatttagatttaatgtttttagaggagtttgatttgggggagtgaaggtgaagagagaataaagtgattgtttttatgcatggagagtgaaattacttcatgtttacgacgtatgatttgccaaggcattgttctacaccacttcggatggtgcttgcaaccgtttttttacaatcgtaatgctaggtttagtgtgtaaaactgtaatttggtattgacatatcaagttgaagcttcattttgcttaccttttgaagtgattcgcgatgtgattttctttatgtgtctttaaataagatttatgcttgaaactgattttttctattccaatataagtttcagtttctatgtgctttgttattggaacatcaatttgaagctccatttggttatccatttaattgtgattcctcatgatgcttgacttaattagggtgcatctctggcttcatgaagcactgcattttattttccccacattgtagtagtttgctctacaaagccactaatctaattgcgtggggtgttacttcaggctgttctcaagcagtttggtgctggtggat

SEQ ID NO: 61789 - DNA, 583 bp, Populus trichocarpa
  Intron number 1 from transcript POPTR_0174s00250.1 (locus POPTR_0174s00250) derived from phytozome v7.0 (chr-ID scaf fold_174; pos 48119 to 48701 reverse strand)
ctcaataacccaactattattctctgctgattcaggtacgctttcgtttcttttcttttattttatttccattatttgaaggagcgttctagggtttgttgtttcctcttctcccatcttgtttttatgcttctttctcttcatctacatcgatattttcccctattttcttttaatgatttcttttgaaaaaaaaaacagagcttgctttttgttgttgttgtgtgtttgttactggctaaatttattgaaatcaagtagagagaaatccttgtataagttgtttttggatagttttccagattcaaaagaatgggctttgattttatgtgtttctgtataaaactggaatgttctacaaacaaggttactgttcatttgttaaatgccttttgtatgcgaagatgaattcaagtttgcaaagaccaagtgaaaagcttcgattttggatgctttatttgtatgaagactggttctttttgttgctaattcttattattctggctctgttttgcatgcaagatgggtttaaggatatgttgtaatgagatgcatgatttgatgtgtagatttcaatttacaa

SEQ ID NO: 61790 - DNA, 412 bp, Populus trichocarpa
  Intron number 1 from transcript POPTR_0015s15690.1 (locus POPTR_0015s15690) derived from phytozome v7.0 (chr-ID scaf fold_15; pos 14911814 to 14912225)
gctttagtaagtgttttttatttgtgggttttgtttagttttgaggtttttatgttttcaaagagtttttgttctgggttttctgttttggtatctcggttatcattgttttttgctgtaagagagggtttgttgggtttttgtagattttatttagggaggtgcggttgatgagacatgaattggatctgtttgattctcttgaaactgtggctcgactgtagagaggatttgtgtttttgggtttcggaaaatgttatgttaatgcaaaacctaagaattctaacgttcttaaataacatatgaaagtagtataaggattctaagtgactttgcctttacgtcgaagattgacttgagcgtttttgttgttgcagcttattgtgtggttgcagctgaatcggctggaaga

SEQ ID NO: 61791 - DNA, 809 bp, Populus trichocarpa
  Intron number 3 from transcript POPTR_0015s15690.1 (locus POPTR_0015s15690) derived from phytozome v7.0 (chr-ID scaf fold_15; pos 14912538 to 14913346)
gagaacattgagaaggtaggtgaccttttgcccacctgaaacacagtatcacatttttcaagttatattttcttgtggtacatgattgaatgaggcacaagttttgttgttgaatcattagtgctagaatgttaaaacgtctaaaagttacttcatgtgtgcattcatgcaagtttgcttgtttatgtgcacgtgggcacttgggtgtgtgtgtgtttcgtcaccgagcgtaagtaatttcatgttcctgacaagattattactttcaaatactttggtttaaagctgttataagtatttccattgaatcattaggttttaccaaaatgttcaaaagttaccttatttgtcatatgtgtagattctttcaggtgtacttgtcaatgtgccttttgaatgtgtggacatgtatgtgttattgagcatcagttcattgaggtttatgtttaagtgggatggcattcccattttttggtgcacaggtagctttaattgctaaattgagtcttcagcaccagtttatttgtgtgctttccctccgaagttgttggacttcttatttcattgtgttcattggtgtagactagatggacacttttttctctgtatttccgtgtgttttcttatgtttgcagattatgaaattcagctgaccccatttggaattaatgtgttcacttcatttactgttgagattgagctgcacttggttcctctaacacatggtgttttcaaggtttgaataaaagagatcttttttctgtattgatacaggttttggataggggggagaaaatagaacttcttgt

SEQ ID NO: 61792 - DNA, 952 bp, Populus trichocarpa
  Intron number 2 from transcript POPTR_0012s07250.1 (locus POPTR_0012s07250) derived from phytozome v7.0 (chr-ID scaf fold_12; pos 8041428 to 8042379 reverse strand)
acatctatttgatcagtgcttcaatagaatccctggtaagattcttaaaaaagttttagctgtttatatttgtattgaatctccctgcatagtttcatttttcaatagaaactagctagtttctgccatccattatgcaacataaatgttatcaatggaaactatattaacagtcaacattttggctaccaatgagtggcgtcgcaagtagggaactggttgagagagcatctatcaatttgcctgccatttccctttcaagagtaccatttagtggagggtcaggcacaagaatatctcctgagtttttcaaggataggccataaaacgacctgaccatgcccaaacatgtgccactgccaatcgtattgcttcaatgttgttaactttatagatggtactggaacaaatctatgccctaccggataattaatctcctgacccaccgttgaaaaaatgtccatgtttcttagaagaacttgatacttccgacgactgtaaggacacaagaaagctagaatcgtccaatcatgcacctaaaacaacaaggtaaaatggcaacttgtaccctagtaaagtttgattgatttctagaacagaaacgaacacttcggaaatgacaataagataagtgacagtttgacgcacgtatgtaatattttgtgtgaaaatctgattgttagaaaagaaaagacgtaatcaatgatcctaacactctcttcttcaatatagtaaattgtaagacctagtgaaaataagccctcaatctcctcaacttcagcctacaagttgttcaaattcagtgtcacagcaacaaacatagccagactgcagaaaatcttttcgtagccttgctagtttttcttttcttatcaatcctcactcgtgagtgcgtttaaagatttccacaacaattcaagatctttaactaactatgatctgcggacagggt

SEQ ID NO: 61793 - DNA, 906 bp, Populus trichocarpa
  Intron number 3 from transcript POPTR_0004s01920.1 (locus POPTR_0004s01920) derived from phytozome v7.0 (chr-ID scaf fold_4; pos 1189133 to 1190038 reverse strand)
gagatattgctgttgatcattaccatcgatatccggtgcttcatttatccttttaactttcaaaacaataaattctgatagatgctaggaagctttacagcagcttttttctgttctgcccatgttctgcaactatgaaatatggaaacttgtctatccatttctgaggaacccttttacataaccacaactctctatctgaaacagaagtagtaagtttccattggtggaaggtggacacaacttctttcatagttctcacacagtatatgaatttgtggagaaatcttaaagtctactaattatgaactattatggtgggcttagattgacaatcttaaacaaggcaatttctatgaagatttgaactcattacatatataatcatgctttggcgtgtggcagctgtgttttgtgtgctgacatgctgagtatgcaatcattcttgtggttaacatgtcaatttgaaaaaaaagagcaacattttgatagcttccagggatatgaccccctccatgatttggatggtaataaatgattggacaagaagattatggaccccaaatgtcactgtatggtctagaccatgcttgtttcctccacaccatggtgtgtttctttgaagttcagcataagccacaaattgttctagtgccgtaactatgtgtttctactctctaacatgactgactgtttaaagggtccggatgccccatgattcttcgccagtggaaatcaaatgacgggaggaaactgatcatgttaacatttggatgtctgaattgttgtgatttgacaattgttttgagcagatgaaaatgaacaaaatgaatccatcatgcatggagatggtaatgatgaatttgttctgttatgacctgatgaaaacaggaagatctggatctc

SEQ ID NO: 61794 - DNA, 857 bp, Populus trichocarpa
  Intron number 2 from transcript POPTR_0005s17600.1 (locus POPTR_0005s17600) derived from phytozome v7.0 (chr-ID scaf fold_5; pos 15188953 to 15189809)
tggcaacactgtatgccttttttcctttttcttccctcctcttttttttttttttttgtacttaattttctatgtttttgcttggttaaattcatatgctagttagattttggaaactgttactcttttgcgagacagaaatgatgataatgttctatggcctgcttctgcatataatggaattgtgaattttgactatttatagtggatatgctttcttttcttacatgatcagtgtagaatcagcctgttcagctcggccatgcccgtctttttattttgacgttggtggtggtccgactccacccccgttatcctctcttgactattctatcacctcttgatgttttgtaaagatggtctttagttacaacttagaaatattgtggcctttaagcatctttgtcatacctttccagcttaaatgtctacacttgattgtgctttttgatttaattcttaccacagcgataacaattgggcaacctgtgccttttgacttggtgttataaggtattttgtgttgcgttcaaagctattgcttcctgctggattcatttattaaaaagaattctgattgagagtatcgtgtgatactctgatttcttcactctttgccttgttgaaggcctaatatatatttttagcagaatctgttgcttctggctgctgcagttgtgatgagagttatttgatagtttgaaatgcttgaataatttattttagctgctgcactgatagttattctgattttcaaatcaaaccgattgactaaatttcatgtctagcatcttcttgttgaacttctgattctgaaatacttttttgaccagtgaagacaggccctagtttcgctg

SEQ ID NO: 61795 - DNA, 747 bp, Populus trichocarpa
  Intron number 1 from transcript POPTR_0001s15610.1 (locus POPTR_0001s15610) derived from phytozome v7.0 (chr-ID scaf fold_1; pos 12463284 to 12464030 reverse strand)
agaaaggggttatcgtcaccaaccactcattgttggtatatgctctctctctctccccagacctttctttctctttcaaaatgcaaagatgatcaaatgtaagaatttgtgtagtgtttctaggcaggatgcaagctgttgcctctttttactctatttcttagatctttgatcctattgctcttgtatctttgataaatttttgggcatttctttttatgttgcggagcatgccttctgtgatccatcaatcccctttgtgcagttaatataggtattggatttatttagccccatttttctgtcatggtggtgttggacttattttgtaccctctttgctatggcggtatcttctattatcatctatgtcaaatgaatcagagtcaaacttagctgttttatgcttggtttagggtgaaaataatccaatagcagtgataaatcttaggattgtttttttgagatgcatttcaaatcatgaaacaaagttaatgagattttgttttgttaatatgagctccttggtatctatgaaattcaatcttctcaaagtttgtcattatgagtatataacagtggctgaataaaattgtactaaaaatcgaatggctcaaatgcatcacatcattttcttttcttcgatatagaacttcatctgtttgtgtgtttacattttattctctttttgtttaagaatgcttctgaactttactgatggaattctcactatcctaggttactttta

SEQ ID NO: 61796 - DNA, 618 bp, Populus trichocarpa
  Intron number 2 from transcript POPTR_0018s01200.1 (locus POPTR_0018s01200) derived from phytozome v7.0 (chr-ID scaf fold_18; pos 1118135 to 1118752 reverse strand)
tctcaaaccaactgggaagctgataaaatgtaagttctttattgaaatatagttgaagattctctcttcactgttgaaagttcacattttttctgttttaatgccgttttctctcatgtttctgttcttgattggggtttttaggatgtggttttttctggtttttgtttcttatggtcgtttctggacaaaagctttgttctttgaagctgttttatgttacttacatgtacattactagtattctagggtttgtgtttctcgtactggttagtaaattgaatttgtactgtatttagtgtgtaagcactttgttgtttaactatattcttcgtttgtgtgaataagatgggattgtatgtagttttgagttttaatcactggggttgctggtttacttccttttttttataacattcgggaatcttgtatttctggtctggattctgtccatttatacatttttcttcccaagattcgctatgatgtctgatttgggtgactagtttggatttgtacttgttatcctgttcgcagctgttaggattggtgaagcctacttttatttttcttgatatgagtgaaatcgagtaaatttttggataaataacaggttag

SEQ ID NO: 61797 - DNA, 905 bp, Populus trichocarpa
  Intron number 3 from transcript POPTR_0007s06030.2 (locus POPTR_0007s06030) derived from phytozome v7.0 (chr-ID scaf fold_7; pos 4186198 to 4187102)
gaccttgtgagtcagtcagcaatttaacagtaattcagttttatttatactatcaatttgttctttccatgccaatataagttttgttttaaattttcctacgtttgcttgactagtaacttaaattatatcactttgtagaggctgggttgtaacactgacctctgattacattttcgaagcacctgtctgccctaaactaatccctgataccttcccaatcagttgctctattactgttttgcttcaatgccattagccattggcaacataagatcaaatatttctctcttgcaaattataatcagcttaagtagatcacaaaacattcattcattgatctgaaccattaactaatctaattcattactttcacttaatgttcaagacatttacttctggtcttgcattttgtgaaaccagtttaaatccttcttttgcttctttgtgaattctctttgatttacttagaaacaaattatcattatttactcaatgttgggcccaatacaccacgtgaccatatatttagtgaagtaccttgctgctggagctccttttaacgtaggcaagggatggttgcaagtaatgcaagcctaacgtgttcttctcaaaatattctaaattttagaatacattatctgatcaagtttaatgtatgtgctccttagcttccatgaacccctttgcgtgttttccaatggacccagcttgtgttattattttttaccaggtaggctatattcctgtggtcgttttcattaatgtgaatcttgatgcttggaatctggatgaggaaaatatatttatttttctcaggatattgagtatagcatgcaaaataagatctcactctgaccctataatatctgtttatgctgccacaggaggtgaaataagtgaaa

SEQ ID NO: 61798 - DNA, 851 bp, Populus trichocarpa
  Intron number 4 from transcript POPTR_0003s17040.1 (locus POPTR_0003s17040) derived from phytozome v7.0 (chr-ID scaf fold_3; pos 16535794 to 16536644 reverse strand)
ggagtacccttggactgcaatttgattggtctaaggtgattgcagcttcagtgtttttctcttttgcaattcctgtctactagttctgtgttcttacatattgacctttcaatgtcatgatacagtagggaagtacacatgctcaaattttagtttcactcattagttgttagagcttgtcccttagggccatgctgattgacagcaagtatagatcctttaacaattataaagcatagagttttctttcttatgtagccttctttcagttatgtaaggttggcattgtgacccttgggtttagttattgtataccacaccctatctatctgcattatgaatgccatgggatttgatcacagaatatacaatctggtatgatacaatctttcaatgtactaacattgttatgccttggttttctacataatgtatagacacaagtatgattgtcagcagtaacgatttaatttgtttttactctgaattttaagaggttgtgcttgaagttagcagttcagtttaaatagtttgtcttgaaacaattgtctactctttttgtgcaaaaaaaaggttttatcaacttgctgctgtttcagaacacggtgcatgtaagaatatacatcttcaaccacttaaatcttgctctgctcaaatctgtatcaagccgttttatgtgactggagaatcaagatgccagctagtccttctcttagtttatttgtcttcatcaatattttgggcgtgttgattattatacactctcaacccaacacttcttttagaagtttcccttctttatgaattggaatgaatttaagtctttttgtttgtggtgtagcgtaactaca

SEQ ID NO: 61799 - DNA, 785 bp, Populus trichocarpa
  Intron number 1 from transcript POPTR_0013s15250.1 (locus POPTR_0013s15250) derived from phytozome v7.0 (chr-ID scaf fold_13; pos 15279914 to 15280698 reverse strand)
attgttttgtcagagtatttctctttttctctctacttaactgaactcttcccttactttgctaggtggtttgttacatggcgttaaatcctttgattttttttttttatatcaaaacatcaaagtcataaaaataaatattaatttaatgttttttcaaaatgaaattactttaaaaagcaacaaaaagtaaaaactatcactcctgggtaaattttttttatcggaatggattattatattggcgcgctaataatgtgacaaacacaattagatcttgaaagggactgctgtgcataaaatatgtgtttcttatcatgaacagcaaaagtaagagaattctatggtaaaaaacaaacttagtacaattatatagatatgctgaaatcatggtgatcgacacttcttcacttttccttccttgtctcatttgttacatcaattcactctaactcagctccctaattcctgaagagactagcattaacttttgccgtccaaaatcatacatgttaatttgtatggatttctttcttccattacttcgaattataatgacttctgtaaaatttgatttattttctttaactgaatcacataaactttatatttctagtgaaaagagttaaatatataaaaagatttttatgatgatcagagaataagtatgagtaatatatgtgttaggaacaccaaaaaaaacctcttttttttgtgagttaatttatttacttgtaagaattaacattctgggaaaatttatttacttttctgacagggttgtg

SEQ ID NO: 61800 - DNA, 464 bp, Populus trichocarpa
  Intron number 1 from transcript POPTR_0007s13900.1 (locus POPTR_0007s13900) derived from phytozome v7.0 (chr-ID scaf fold_7; pos 13898361 to 13898824 reverse strand)
ggaatcccatatagtatcagaactttgtcaaagaagtagttatgagttcaactcattaattttattttatttgataaaaattaaaaacaatataatataagtttgtgcgactttcaaacctaaagcttcactatcttcttctcgttttaaatcttttcatcaacttgttatgagacttgctgggcgacgcaagattacacaatcatttttgaattaatcacaaagtagtggtttagtctgatacgaattatgtattgatagcatcgaaatgtgaaaattattgatatctctgtattcatgatttgatgattatatttttttttttagtttaacgtgggtgttcggtccggcttgcgcgtaccctaactaaatatatttgatgattatatttcattgtactaaatatggattaatattttgctagtttagaagttcacagtgttcctcagggattcttcttgcag

SEQ ID NO: 61801 - DNA, 727 bp, Populus trichocarpa
  Intron number 1 from transcript POPTR_0017s07360.1 (locus POPTR_0017s07360) derived from phytozome v7.0 (chr-ID scaf fold_17; pos 5725500 to 5726226)
tctgtccaaggttcctctgatccttacctcgtcgagtaattttatcgccacccctctttcctagttgtaaggctcctttctatgattgaattgcattcttggaggtaaaaagtctcatttcagtgctatttaatgaactcacagtgatgagttttgtttagagttggtaaattagtattcatgcatttcttgctcacaagcacacttaaaatgagattgtggtggatattgcttgtgattctttcaactcagatcaacgagaaatcttgggtctatgcaggggttgttttcttagcgattgtcccgcttcatggcagtaatgagctaaaaatggaagaaaaggaaacgaaatgggatttttgtgcatgttggtttaattatatttagtaaagattgattctttgcttttgtttgtatccaaaaagattgatttttgttgttatttatattgtgtgcttaaattattatattattgactaattttgatgttctttccttttgggtttccattgcaatcagggtgggtcacaggaacttcagagaccttgtaatatatctgtcttggttctcttcagttttgtgtgctgttccacattctttttaggatggaatctgataactagtaattttttagtacttgatgattatacgccttgatattctttgattcttgtcttttttcttttgcttagactttattttacaaaagtgaaattgggctctcctc

SEQ ID NO: 61802 - DNA, 1051 bp, Populus trichocarpa
  Intron number 1 from transcript POPTR_0007s05170.1 (locus POPTR_0007s05170) derived from phytozome v7.0 (chr-ID scaf fold_7; pos 3336850 to 3337900)
ttactaggaaggcattgaaagagcccattgctgaggtacccattttcttttctttgttaatgttgttaattactgaaaaagaaaagggtcctgaagttgtttacaatagatgaatttgaggattggattggaatattagcatatttaatggaaagcaattgttagtagaagtaatcaagttttgttgtttgaagttttatgcacgaaatgtggaagattttgagaaaatgaagaaggtttggaatattgaaaattggaactcggtggcaagagaagagatgcctgagaaaaaatgagttcgtgtttggcattatcttttaattatagaaaaacctttgaaattgatatatactgcatctctgaggattttcatcctaataaattggtgtcattcttgcggtttgactaacaagctgatatgaaagaaaaactgatgattgtccattctggatgtccattctcatttgcatattaataatgagtttgggcatgggtttactgatgattgtctgaatggttcgttacttttgctgcttaaattctattctttgagaagttcagcaaaagtctccttgattctattgcttaggactctggtatgtgtgctgacatccaaagaatggatggtgataaacgaccatagtttagagtggctaggtgttctctcaatgggtgcatcatttatattgcttttgttattctttcaaaggctcgacatgctaaactaagctgtgttgcccctgtggaagaaaatattgcctttttctattctttggttttcttagaatctagaacctctggttgatatggtttttagttctgtataaacatggtatgtggcttgaagcctcgaacaagaagatactgttttatagttgcgcagtgggtctaatacctctgacttcaaatagattgcataagtaatgtatatctgctgatactttttgaaattagtgcaagtttttttataactagcttgagttaattactcagctattaacttctttcaacctgtgtctgaagactgcagctttggctcaaaagaattctg

SEQ ID NO: 61803 - DNA, 1009 bp, Populus trichocarpa
  Intron number 1 from transcript POPTR_0018s00580.1 (locus POPTR_0018s00580) derived from phytozome v7.0 (chr-ID scaf fold_18; pos 510807 to 511815 reverse strand)
ccttttattttctagtaaataaaggtgtgattcttactcgaattattcatttttatctttctgggtcctttaattttttgttgatggtttgttgatctgtgtgagttttagctgtggtttagcttgtttgttagtgttatttaggtcatttcactgtttgaggtacgtcaagtttgttcgtttctttgtgttttatcatttcgtttctatctggggtgtgaatttattgatttttgtgatatttcacgtgggttttcttctgtgtttttgtggtttgttgaatttgtgttgactgtttacctatatatatatggtcaatttcggaggaaatgaaaccctaaagttctcattttttgaattgatgtacgtgattgtaacagctgacttggagcttttagaggatgtcttgaattgggtttgtattttttttctgttttaattgagagattaacgacttcaattcttgagttaatactgttagtcttatgtaaccctaatctatgacttgtctcaatagggttatatcttgaattagtttgtaattgaaatggaggggtttaattacatgtttgattatattctatgtgaagcttggatatggtaactgaagatttatgtttttatgagatggagatctagggtttttccaagttttgctttgtgatatcttgtacttgtttttgcaagtcgttattttatgtgcttaatcactttgatgatagcattttgatgtgttacttgatttagaatggaatatagaaggaatatttgttttcagtttaaattttctaataattatgaacaaaccctaaggtgtttgtttggactatctcttaagatcttttgatctactttggaactttaatagcttgttattttcatccatgttgttttaaattgaataatgttgtagtttagcatatgataatatatatcattacttgagatttgggtttgtaggcttaagaaatttgtcatttgagcattgcagcattgactttcttgtacc

SEQ ID NO: 61804 - DNA, 783 bp, Populus trichocarpa
  Intron number 1 from transcript POPTR_0002s06070.1 (locus POPTR_0002s06070) derived from phytozome v7.0 (chr-ID scaf fold_2; pos 4048416 to 4049198 reverse strand)
gcctctttttaactgctctggtactctttcttcctctcttctcttatcacttttttttaaatctttatttgttgaaggtaattcgtagtttaagctttttatactttgatctttgattgttttattttatttttggtaagatagttaatggtgctgttaggggtttctctctctctctctctctctctctctctctctcgtttttgagtttaattttttttggctaattttcggtgtttggagtttagggttgacttgagattgagtaaactgtgaagtgaactttgtgagctgctgccgacctgggtttttttttttgtttgcgtgtgttggttgcatgattttgattgtactcaaattttgctccttttggtgtggatggattttttttctcagattgttgacttggtacctactgctagtgtttgtgttataattgttattccgcagccgtttttagcctttgataagatttaacatgcgattgagattgtaattttgcagaattagaacgtgggagaagggggaaaaagtggagattttctttaactgataggtctggagaacgtgtctgcattagggtttagggattaattttatttaatttttttactgaaagtatcggaaattgtttgttgaactcaatttaagttctcatcgtttttgaacggtgctgaattgatcttcctttatttatgtgcatgatgaatttatgctcgtgtctgccttttcaatggtttgactccgttttttctgttttctgttttagtgaggagtgatcaa

SEQ ID NO: 61805 - DNA, 849 bp, Populus trichocarpa
  Intron number 1 from transcript POPTR_0012s01770.1 (locus POPTR_0012s01770) derived from phytozome v7.0 (chr-ID scaf fold_12; pos 1340557 to 1341405)
aaggtacggtctgtattagattctgctttagttttctgcagccaatctaattctttgtgcttaatttggaactattggacgacatctttacttaagaaaatcaaatattttcacgagttcttcaattttagttatgaaacatgtgttccaggttatgatttatattattctctaacacacgtcttcaagtgaaagttttttgggtttaaaacttgcacggatccatactaccttgtgtttaattttttatcaaataaatagagatggtgagattcgaactcgtgaccgcttagtgtcaaaagaatcatttatataatatactactaattggaattatatcctagaaccttatctaataacttaagctattagataagattctaaaatatgatttatattattctctaacaacatgtagttttcaggttatgtaggttggttgcttgatatatacatgttgagatttagtaaactgcacaagatagtcatggtttacaaaaagacccacgaattatgattgtcgaatgcgtgctattaaagaagctaatgttaccatatattttctcttacagacagaaaaaggaagatagagggtgcaggtgagatttctgcaaatttggaaattttaaaattgtttctttgtcttgcttcttctaaactatcttgatgagttcttgataaagaaatgttttgcttgcatctgcaaccgtgggttcggttcttgtattactggtattgttcgcagcctaccgtgtctatagctccgataaagcagcgaaaaacaatcagaaaaggattgaaaactttctggcagattataaagctctcaagcccgcaagatacacgtat

SEQ ID NO: 61806 - DNA, 488 bp, Populus trichocarpa
  Intron number 1 from transcript POPTR_0009s09880.1 (locus POPTR_0009s09880) derived from phytozome v7.0 (chr-ID scaf fold_9; pos 8653829 to 8654316 reverse strand)
ccactttccctcagtacctccgtcgaatcatcaaggtcctctcctctcctctctctagatctcacttccatcttaacctttctcttcgctcgttttcatttttaccccatccattcattaacatttttaatttcacctttgaatttattaatttctttcacaaattgtaatttcccctgcaatgtgtaatttccggttgtgattgaaatcggatgtaatgacttttgcttcattcacaagtcttaaaccatacttggcacttgttcttatgaattaattatttttcatttttttgaggggcaagttttgatatctaattgcgattttaggaggattcattctttagtttatggtgcttatcaatgttagagagaaatgcgtgcatctatcctagactattgatgttgctattttcttcgatggtgcctaaaattaagtgtgggttgctgcggcatttacaaacccttgtgtttttgcagtggcagcaa

SEQ ID NO: 61807 - DNA, 628 bp, Populus trichocarpa
  Intron number 1 from transcript POPTR_0010s17600.1 (locus POPTR_0010s17600) derived from phytozome v7.0 (chr-ID scaf fold_10; pos 16119813 to 16120440)
ttttttaaggggaaaaaaagaaccctttctttctggtaagccccacaatcttactccatttatttttcaatgaaaaatatacattttgtttctcatgtgcccacatgttctgtttaatgctaacctcattttatttatttatttttgcaaattaatagtagaatactgttattaattaattttttcagccttcgtcactgtttattaaatcttgataatgcttatttattcctccaaagcctgaaacttggatattgaaactcaattgggaatatagtataattgaaaatcttaacatggtattaactgttgttgtgttttttgaactgggttctggttacgagtgcatataaaattatcccaaagctgctagtggagtttcagtttatggagattattcttttatggttttaatttcccttccacgcttttcagttctacaattaataatctattaaggtcttcatacgggaaatctctatgatttccatttgaaagtttttgttttgggccttgactgggaaaggaattttctgtgaagcgggcgctggaatcttatgcattttagtttttaacgcattatcctgtcgtctttcttttgctcatgtttcatgatgttgaaaagcag

SEQ ID NO: 61808 - DNA, 509 bp, Populus trichocarpa
  Intron number 4 from transcript POPTR_0014s17020.1 (locus POPTR_0014s17020) derived from phytozome v7.0 (chr-ID scaf fold_14; pos 13213500 to 13214008 reverse strand)
aaaggtattacaattattagtggcattaggcatttaataattcatctataattatcatttctttgttctattagtcacttactactaatctgctttatcttctggcgcagaataaatagctttatgacaggagaaatggaaggaaagatgccttattggcagactagttcatcagaccgttcaccttgttataacacggggtatgatctgatttaaattcaaactcattaatgctatagtgatattttagttattttaatggagtttaatttctaagtttgctattggttgatccctttaggatttgaatataaaaactaaatgaatttgttttaaattctggatttttgactgaatgttgtctggaacattttcattttctgccctttatggattatgagtctgtttgatatccatctgaacaggtttttttcttttttcatgcacacaactatcattgccagcgtgtgttctgatggctggttaatttaattgttgcagcggtcaat

SEQ ID NO: 61809 - DNA, 493 bp, Populus trichocarpa
  Intron number 2 from transcript POPTR_0008s04150.1 (locus POPTR_0008s04150) derived from phytozome v7.0 (chr-ID scaf fold_8; pos 2320775 to 2321267)
tcgttggggtccccacgactttcgcaggcctcctggtgcgttttccttgtttcttgcaatttctctacttttgtttttatattttaattgtacgcggcagtccgcagttgattttttagaagagatttaatctagggtttccatgcattttcgggcaataggccattgctttgattttaggtgtttcttttctttttatagtgaaaaatttagtgactcttgaggatattgactgtgtagtgttcaattttttcttttattgttcttattttacttttcatggtacagatctgatttgggtttttttggttgttagaatttgttaggttcatcttcattatttttttgctagatcggaacttttttggtctggggtatttgttttctttgcaaggttcttttatcccctttttcttcgaggtgaaaatatattcggtgcttgtgttaattatttgttttcccttatttttcttttgaatgccttgcgaaggtc

SEQ ID NO: 61810 - DNA, 727 bp, Populus trichocarpa
  Intron number 2 from transcript POPTR_0002s26300.1 (locus POPTR_0002s26300) derived from phytozome v7.0 (chr-ID scaf fold_2; pos 23274884 to 23275610)
caagtcaacgatcctgtaagtctctttatagttctcgttacaacgaattcagtttgtaaattgtaatgcatgtgtgcatgttgattttgacggaattacgcttgactgctcgcgccaacaagccactctttataccgtggacaagattttttacctagcagaggtatgcattcttttttttttggtataaaacaaaaattctagaattcttacaagcattaattggtctgaaatatttgtgaagcaattgatgttgttgaacatgtggtggccggagaggctggccaaaacaggaattctttttgttcgttttccaatgcttgaaaggattttttgcaatgtaattatccgtgtaagtttttgtttttcatgatacaggtggcccatctcaaggaaaagattgatcgcatgctcaatgggaagcatgcgagtttgattttttttctgcaatctatttcatatttacgtttatgagaaattggcgtacaatattttttttttccgcgaagaaattcgttgtcctttatgaatatctgaggtgtgctcctagatttttttctttataatgccttaacagtcccttttgttagagcaaagggacattacatgtccaactctcttgattttacttgttaataattatatcactgatgtttgcaattttttttatttttgtatttttttgacaatagggctggattctttattggagacggagctggtgtgg

SEQ ID NO: 61811 - DNA, 761 bp, Populus trichocarpa
  Intron number 3 from transcript POPTR_0004s15570.1 (locus POPTR_0004s15570) derived from phytozome v7.0 (chr-ID scaf fold_4; pos 16179561 to 16180321)
tggcgctcgtgcaacaacgatctccggttgttaaggtagtgggattcttgtcttttcctttctttctaataattatttatgtgaatttggatgtgggattggatgtcgttttggtgagcgtaagaatgtgtttgtttgggtgaatgttatttgttgattcctggagctagtaaagttgatgatatgtagcaaaaaagttgcaaagctggtaaatatgtgggaattgtaatggattatgtaatgttgaataaatgagttttatggaagggtggacattttgaactcatgtgtctgaaaccgaaactcatgtcaagggaattgtgtgtacttgaacagtggaaactacagtcccgcagatgaaatatgaactgatagtttaaatgttatgccatgcaagttaggtaaagtagttccatgctttgatttttatgccttttcagtttgctatacaaaactggaaactactgaaagcccagctgaaaggattttttcattcacaatcagtttttattcccctttggaacgctctcacaagcctgattggatgtattgatgagtcgctggaacctaatgggaattctaatcagagttttccacggctttcatatctttcatgtctttgaatcgccactgattttggataacacttttaaccatgcatgagaagttggtttcatttgtgaatttgatgaactttcaatataacaaccatttgctttttttggaaattagtaatggggacaaatttctttaaacagggg

SEQ ID NO: 61812 - DNA, 904 bp, Populus trichocarpa
  Intron number 2 from transcript POPTR_0014s18970.1 (locus POPTR_0014s18970) derived from phytozome v7.0 (chr-ID scaf fold_14; pos 16588284 to 16589187)
ctgatttcttgaagagaactattcctcacttcaaggtaaatttatgatccaggtgtgattaatttgtcagaacctgtatatcagttcaagttctcttatatccttgatttggtatatctacgattattccacttggcacaaagttacataattagttttgatgtttgcaccgtggagattccaattggttgattctggtaaccttctgaagttggcgcctttctaatttcgtcgctgtgctttatatcaaagaatgatctgcattgttacaacgatttagtaaaattttaaaagaaagcaattcaaacctttttctaactgaagacataggaggtccaacttgggtggtttacagtgtttttatacaatcttgccaatctgattggcaccccttgaaagttacatgattttatcaatgaccttaaataacatcattgcatgttacaacaaatttaacttggacatcatttagttgcatgggaaactccctatctttctctcactagttaatttaatctgccagaaggaaacatatcattaaaaaaatactaagtgctaaaatttttagtgtattccaaacaggaatttgtttgttaaattacagacctcagtttacaaataaagttcccttccctagatcttgtaaaatagttttaatgcagtgctatgcctcataattatgggtgtcaatactccatttttacattcaaggataatttatacatatcaatttgcaacaggcaacacatgatcagctggctggtttctcatttcatttccttaaagttacatgtactcagatgggttgcatgtaagaggatcaatgaaaacttagctttactttctgttctgatgagaaattatatgtccttgttctttgcttttctgaatttgaaggggaagg

SEQ ID NO: 61813 - DNA, 724 bp, Populus trichocarpa
  Intron number 1 from transcript POPTR_0034s00200.1 (locus POPTR_0034s00200) derived from phytozome v7.0 (chr-ID scaf fold_34; pos 84508 to 85231)
caaaaatattttgcttcaggtattttatgaagtatttcaagatgcattacaatcttaaatgccaagattcaccaaatgagtgaactcatggatgactatgcacaaaagacaaacacgttctcacatatctgaaggtcacaatgtgtattctgaattagttaattgctttcaagaaatatgttttaagcacctttgttgaactatttgccaaaattattgtgtgagcttctttaaacattgcattatttgtacaaaatattagaatgtttcatctttcaatactacatacagaatagatgtttatactttctccatgaattgacagatggagctggtataaattctttacatgatatgctactgcattattttcatcctttatttggctgatgttataacataattgaaacaagccattatgctaatgatttgtgattggttgtgtgaaagcctacaaatgcagttaattttttttccactgaggatggctgttagatgacagtacaaaaagggtggtgttaacattgatctgagaagcaaacttcatagtttctctgctgatagacctgtcctatgtttgtggctcttattttttgaaaagaaaattttgcagtgcttggctgtttctctttgatcttatctagttcatcgcaagtccataacatcctatttgaatattaatttcatcatttggcaggctgctaaggcatttggtgagggaaaa

SEQ ID NO: 61814 - DNA, 788 bp, Populus trichocarpa
  Intron number 1 from transcript POPTR_0005s27580.1 (locus POPTR_0005s27580) derived from phytozome v7.0 (chr-ID scaf fold_5; pos 25173679 to 25174466)
gcaattccctgttcatacttttcaagtacatttctttccttctttccttttacattttttcagcttttttgggttttgtttttagtttcagttgtagggattttggttttttagttagttaagtcaatttatatctgtttctaattatggactgatgggttttattttttttgcttttccccattaaataactatggtggaaggattttgctttgacatgacagtaacctaagaaagatttgtatctatttctactttggggtggcgtccaagtttgagtgtaaagtttctttaatgatggcttggtttatgagataaatgggcatttaaaattttgattttgagccagatagttgttgttatagggcttaatttagttgagctcgcgtgatgtgaccttgcgttagtgtaatttgcgtaatctgtttcaacttatgatccatgttgcccattttataagaaaagcaaagtgaatctagtcaaggagggacctacttgagttgttgtgataacaaaacaaagtcaaatgccgctagttaaagtccatatgagctgaatgtagatagtgattggtagtattttgcaaactgttgatggtatggacagggtattcatgcttgtgttcggttatatgagttttaaaatctttggttctgtatcctggggagatttgtgaataaattggatggagtcatgcattgctgttttcttcaaaaagtaatgtactgatgttgaacttttcatggtgcacagattgtggctgtaacagttttcttcctgctttctgt

SEQ ID NO: 61815 - DNA, 450 bp, Populus trichocarpa
  Intron number 1 from transcript POPTR_0013s13110.1 (locus POPTR_0013s13110) derived from phytozome v7.0 (chr-ID scaf fold_13; pos 13697165 to 13697614 reverse strand)
cccctgtccaagatcacatcaatttcactcttcaggtattgcttctatgtaaatattgaggtggattaatgtatctgtttcatgcagctgtgggttctttatgggctttctcatgtgggttttctttatttttttaatgggtatgaattggtttgctgtttagctaaggaaagtgcaaagattttttgtgctattttggtgattatttgtcgtggcgctttactcaactgtgcctaatttgcttctggctgttttattattattaatatttgtggagattttcttttcattttttgaaataaaaagatgaaaacttttcaaactttttattgttttatgggtttgttttttgaagagacaatcagagaattatgtttttttattattgttatttcatggggttgatttgattgtttgaaatgataatttcttgcagcaagcatacttcaa

SEQ ID NO: 61816 - DNA, 594 bp, Populus trichocarpa
  Intron number 3 from transcript POPTR_0004s23880.1 (locus POPTR_0004s23880) derived from phytozome v7.0 (chr-ID scaf fold_4; pos 22507534 to 22508127 reverse strand)
accgtggagtgtttgattatctggtgtgttcttgttaaactcttttagtaatactttagggtgtcattttgttttttaaatgttttcaggacttttggtgctctgatgctgtactactatatatagtgtgcattcatagaacgactattgtttgataatggaagaaacacataggataatagttaaattttgaaaaaaaggaatgctatgctctcaggaatcaggacaattatgttgttgtgttgtttgcagataatttagttttatagaattatctatgatttgtttggatatccctgcttattttcattggcaagcttttataagataaatagaccttgtgtttattcaacttatgtcatttttgtgtggctttctcagctaaaagaagaaaatataaaaataaattccagtattattaatttaagaaaattgaagctgatggtttcatggttttaattcgttgtgtgattgtctttacatattaactaatggcatgtgttctgaagcttgttgcttcaaaagttgaggtagttgactgtaccatttttcaatgcagtctgtttctctttggtgtgactatttgaatttcat

SEQ ID NO: 61817 - DNA, 578 bp, Populus trichocarpa
  Intron number 1 from transcript POPTR_0001s31480.1 (locus POPTR_0001s31480) derived from phytozome v7.0 (chr-ID scaf fold_1; pos 29774370 to 29774947)
tgctgacagaaaatatcgtaagaagtattcttgtttcttcttcttttcctaaccatggcattgaatacaaatcaaaacctttagttcctcttgaactgtaagttttccttattattcaattcaataacgttctaaacttggtttgttagggatcctgtgaaattgaaggcataattctagacttgcctaaagcagaaaagttgtgcttgagtgctgatactttcacaaagatgaaaaggcttaggatacttattgtccataatgtacacgttttcggagtcctggaaaatctacccaatgagttaaggtggcttgaatggcctgaatgtcccatagagtcaatgccatcaacgtttcatgctaggaaactcgttgtacttaacatgcaacgcagttgcatcagacagttaggggaaggcttcatgctcaaggtataataatgactaagattttgttgtggaatattgccatgggatctcctggatgctaattcgttttttatttttttctactctctcctctctatttatctctgttgtacaggattacagttatttaaagcatattgatttccggga

SEQ ID NO: 61818 - DNA, 422 bp, Populus trichocarpa
  Intron number 1 from transcript POPTR_0005s01710.1 (locus POPTR_0005s01710) derived from phytozome v7.0 (chr-ID scaf fold_5; pos 1136894 to 1137315)
gacgtgatcaagccctggtacatttcttggtttttttttttactttcgtaaccctgtttgtttaccaagaaaactgcaataagcaagaaaatggaagaaactgaaagctcaagtcttttcaatcatttccctttcaaaatttcatcttcactatccttttgcttttgattatcttttccatgtgtttattctttgtgctctccgattatcatttctaaaagtcaagtctttgtgcatgtttcttcttcttcttcttcttctcttagaaatggaagcttttgttaaatgggattgtatttaataagggattttatttatttatatgtattttgggtgaaaacccatttttgtttccaggatttccaggggtttttgaatgatttgcaggactgggagcttcttaaggatactgataaaaagat

SEQ ID NO: 61819 - DNA, 470 bp, Populus trichocarpa
  Intron number 1 from transcript POPTR_0018s09460.1 (locus POPTR_0018s09460) derived from phytozome v7.0 (chr-ID scaf fold_18; pos 10346955 to 10347424)
tgctgctgctgctaccaccaccactactactacaggttctctgtctctctttaacttcacctgttgtcttgtcgtctcaccgagcaaaactactactattctttttaagcttaatgtgatgaactgtttaatttggcgtttcgcatctctacactttccgattctttctatcaactatttggtttttcaaggagtacaagagaaaaagggaaattctttaaatggtttaaatcactttcaaaatgctaaaaaatcaaatgcccatttgaaacttttacgttaaagatgagataacgaaaaaactaatctttgcattgagaatggcatatgaatgcttcttttttcttattatttacttttatattagagttcaatttgttacttatgaatggaacacggcattgtaattgaatgttggtcttttcttttcttttctttttttgagcagtcgaaggggctgaacctgagat

SEQ ID NO: 61820 - DNA, 1031 bp, Populus trichocarpa
  Intron number 1 from transcript POPTR_0003s15880.1 (locus POPTR_0003s15880) derived from phytozome v7.0 (chr-ID scaf fold_3; pos 15559378 to 15560408 reverse strand)
ccttcttgtcgtctctctcatctggatcctctctggtttgccccctttccactgtttttatttcatcaagcctttcttttttccaagactgatagtgggttttcattaactataatgaattgaaaattcatatattcccttgaatcttgctggttcgagttttgatttatatagcagttgcagtaaatatagattttgaagcgcaaacaatcttgtatggcccactttaatttcaaccttcgattagatactggatctttttagagtattcttaaatggctacagaagctaaactgtttctgtctgtggatggtcttacagggaagtctctgtcagtttcccacttaaatattttatgcatagagctcactagtcagtcattaatggctgttgcctagtcgggctacccttctgacagagacattgcactaaaaagaaaaaaaaaaggtcaacgaaaaataaaaggtaaaaaaggaggcgaacttatttctcactttggatttggaattgcatttgaattagattaggatttgaactctgtgtttttcttctctcctcaagatagagctatgcggcctcttctaataagacctgcaagtgtaaagcaggttctcacaactttatggattaaaacgttatccgctgacagtgttcttaattgtcctggcttgtgatcataactgactgtcattatatggattctggtctatatggtcaagtcaagcaaagaaaggaagtgaactgtttcttgtttagatgttcttttgaagcttcattgtcggcttcaaattttcgcaaatgcaacattttctttgacccgtgttagtttttggttgctagcatatttccacactagattttattacaacatttgttttgaaccctgctcctttgtgattacagtgttctagcctgtactctctattttattaatttaatgaagttacatctagagaattgaacattctgtgagttattaattactataggctatttctccgattccaggaaggtctcgtaagataacaaaa

SEQ ID NO: 61821 - DNA, 709 bp, Populus trichocarpa
  Intron number 1 from transcript POPTR_0012s01690.1 (locus POPTR_0012s01690) derived from phytozome v7.0 (chr-ID scaf fold_12; pos 1279536 to 1280244)
ctcttcactggtatgtctcttcctttctctcttaagaccccttcctttattctttataaatcctgtctttctcttacaagtactatgtatctgcttctgtttgttgagtttcagtttattttcctctggggtgttttagttctgcttatcttagttccccccccccttctgctgatgttttctttttgctacaaattctgatcactgttaggtatctgtttgatactgaaaaatcttttttcccgaaacgtaactttctcaaaagaaaaaaaaaccttcattgtatgcacctgtctattgcttgtcaagatattattattggaaggatgccagtgtcatatctgcatttgtgtgtcttttggaatatctctaaaggtgtaacccttatgtaattctaaattttcaagtctttgattaactacaccatttccttgagtctataaaaattcagcaaatctgtgaggataatgtttctgaatttgttttatccagtgttacataacccattttgtgtcttaacactcgtttaggcattagagttattgtttctatcattttttagttaatatattcatgacctaggtagggttgcatttgctggagcagggttgaaacaggactgcattaatacgagttcttttaattttgtactactctattgttctttcttgcagaggttggcatttgagtactgtagtgtgcagtgtgt

SEQ ID NO: 61822 - DNA, 1028 bp, Populus trichocarpa
  Intron number 2 from transcript POPTR_0015s04810.1 (locus POPTR_0015s04810) derived from phytozome v7.0 (chr-ID scaf fold_15; pos 5000253 to 5001280)
agaggtctgttagcaggttctttttttcttattattttgaattttgtcttgtttctgtactactcatatgtgatgaaagctatttagatgatataattcgtttcaaaattctttgaatctaaaagtggttgtttttcttagtcttttttggactcatttactttgaattgcttcaaatgtattctcaaggagtaactgtagttggggtttccttatctgatggaagattgattggtcttagtgagattagctctagaagttctcttttgggtataaaagtggataaaatctaggcatgtttttgcactattgaagaatgccctgagatttgagccgatttttgaaactgcaattaataatctaaattgttcccaatctatgagggtagctatgaatacttgttgagtatctttaggttgttgatccctacggaaatgcccttttatccctttccttttgcagctgattggatactatgattgcctcatttcctcccaagattttcttttggtccttaatgaggcatgtgattctttattataatttagcaattaaaatgtgtagcccagccaagatgcaccgacatcaacttctgctatggattcagcatgtgtacactgtttcttgatttcatgtgtttcattcacaatgatgctagttaacctatagttctaactgcaaattaattacatgaaattagaattttttgtcccaattttaaattctgtcctgaattcagcatgcacaaaatgtttcttgcttcatgtgttgtttgtgttgacactgatattagtttaccttgagcttaagttccaataaattatatgcaattaccaattcccaacgcaacttcatgatttgagtattagttattcttggatccctgttctgacaatatttatcaagcagacttgatgagtactgttgcaaggacacttcttgttttcaaggcctgtagtgttactcttacttatgatattatcaactattcaggaagattaattccacaaagcttgtatagaaaggaa

SEQ ID NO: 61823 - DNA, 949 bp, Populus trichocarpa
  Intron number 1 from transcript POPTR_0014s08460.1 (locus POPTR_0014s08460) derived from phytozome v7.0 (chr-ID scaf fold_14; pos 6290041 to 6290989 reverse strand)
tggaaatttctcatctcttgcaagaactccttcaggtactatctctcttacaactatagctaaaaaaaggtctctctctttgtttttttttttttttttttctagatcttagattagagtattgttttttctagtaaaaatgattagggttagggtttcaatattttcttagtgattcttatgtttcgtcttgacttgattgctattctgatctaaggatctggtatttaggtgagttataaagtttgaactgttttgtgtatgaattatatgcttgtttgattgtgttttaattttaagaacagaaggcatgaattgaaatgagagattcatagatcgaaactttagattcgatttggtaggaaaagagttgattttttttttcatttaatttaactgatttttattttgattggtttgaacttgaaattcttgtgtgaatgagataaagagaaaatatgcattgattttgtgcctcttttttcttgctgtggttattgattttgaaaagatgtagagcggccaataactggatatgcataactgtgttctttatagatcttcttttgtctagcttttgttttgagttcctttttaaggtctatatgctgtgtaggttttttatttggttgatggggttggaatttgtttttctgagtatttgggaagagtttttctcgactttctctcaggaaggcatggaggcttaaagaaatacctttgttggagatatggttctttctcctgttttcttgatgaattgtttcattgtgatgataagttttgcaatttatcttgcttaagtttgggtgggtcctaatcgctatctattgattgtagatcttttgtttggtgtggttttttgttgattttgtgtgtgctcttttgatgttgtgtgcaacaagattaatgatttttttttccaaacttgttgcagtaaattgttgaa

SEQ ID NO: 61824 - DNA, 707 bp, Populus trichocarpa
  Intron number 3 from transcript POPTR_0008s11650.1 (locus POPTR_0008s11650) derived from phytozome v7.0 (chr-ID scaf fold_8; pos 7437635 to 7438341)
gatcatattctggtatgtgttttgcttgattaattcatattttgtggcattttttcatgatttatgtgttattacatgttaatgttggactacttttttgagggacaagacgtgatttttatgttttttttgttgttggcatcttcttccgatctttgatgaggattttttggctagctaaaggtcacatgagggtttgttgatttgaatttgaagtaattagaaatctgcgaactgatttcattctgtgagttggagttacagttgaaacttgaaagtcaactttctgaagagattcatatgcatgtacctgttgtttgtataccaaacttccttcaagttttcactctgcacttaattttacttgttgccttaatttaacacacacacacatgtatattttaattcacgccatatctaaaaagtcataaaaactgtcagagatgtgtttaatttgggaaatttagctagccagtgagattcttgtattactgttatctattgcaaaatattcaaagtttgaattgtattaatattgctatatgcatgacagggaatgtcttttgtctgtactatggctgcattaattctgaaacatgattttcttctgctattctactataattggcaaactaacagagtatccgtttcatttctatccttcttgtgaagcttgcctggtacaacgtagtggctggacaagagat

SEQ ID NO: 61825 - DNA, 863 bp, Populus trichocarpa
  Intron number 1 from transcript POPTR_0015s12880.1 (locus POPTR_0015s12880) derived from phytozome v7.0 (chr-ID scaf fold_15; pos 13070850 to 13071712 reverse strand)
cctctggcctcactgccattgttacaggtcttacatactcttttctgtttgaattatgactgtcttgtcttgtacttatggatgcaaaaagaataagggatagattggttcttatctgaatttattaggtttagtacgtccagagtccattttgatagatgaaagagacggtaatttaataaactaacaaatgtctccatgtttgacaggcctttccatctttctatggttatacataggatctcttagtgatacattgccatcttaattatagctctcaagttttacttctcttctatgctgtcccgtttgtgattaatgatgttaattcatgtagcacttggtgcaaatttggggtgatttttgaaaatttcaataagatttattaggatgaaattgcggtaaagtttgtgcttctgtagatattcaggaatcatgattatatcttacggaattcagattccatcttgtgccctttagttgtggtatttgtatggtgagacaatacccaaaaagcctcagttatttgcaagttcatttcatttgctagtatataatgctagaactgatagcatctgagggataactgacagggttttaggatctagttcttcacaattctatgaaatgaatacgcttgcacgtctttggaaagattacaaaacctttattgcggagaatgtaaatctatctacatgctttatgattaatgggtatattctatagcttcttattgttgactgcaagtattgcacagattttcttgtgttcaagacattcaataatttgtatttgcactatgaactgacaagcatcctctgattttaggagcatctagtggtattggcactgagaccgcacga

SEQ ID NO: 61826 - DNA, 802 bp, Populus trichocarpa
  Intron number 3 from transcript POPTR_0015s04520.1 (locus POPTR_0015s04520) derived from phytozome v7.0 (chr-ID scaf fold_15; pos 4657718 to 4658519 reverse strand)
gggctccctctacaaactgcagtacactatcagaggtctattctttttacttactatataaccttcctttgtctttcttaatggattaaggaaggctccttttttcttaaaaagagaaaaaatttagtacaatacctttactttaatccctaaaaaggaacataacacaaacattaattaagcagttttaataattttgttatgattagaagtgcattttcctttggttttaggtttatagagtttaaagaagaagcttatgtagtagggagatatggaattgaagaaacaacaaaaactttgtttgttgggaaatgaaaagggtttaaaagctgcattccttcctttctgtcggggctgctgttatgaaactagctgggttttttgggtcttgtgcttattatgcattcatggcattgtgaaggccagttctttgggcaccctttcttttctttttttattccatggaatatctgggcaccttgataatgaaaagacaaaataccaaccctagcagtagaagcaatttggcttcttacactcttcaatagttttgatttttgttgttgttattcagaaataactcgtatacaaaccgtgaccccattattacttgaatactgttagatagtagtatagattcatatgtaaacaacacaaggatcatagagttttttggcactattcaaattcttttttctttttgtttttttaataagacaatagcaagaaaaatcatgttttgcatggtcttcattaaatttcaggaatctgtttcaatatcaagggcaacaaaaggagc

SEQ ID NO: 61827 - DNA, 647 bp, Populus trichocarpa
  Intron number 2 from transcript POPTR_0014s02820.1 (locus POPTR_0014s02820) derived from phytozome v7.0 (chr-ID scaf fold_14; pos 2346465 to 2347111 reverse strand)
tggaatcgattatattacagtaatctctttcacgctttattatcaatttggcttagctttttttttaattatcattattatacgaatgtattgttgatttcccattattggttatcgattgaattgagaatcatgcatattgttagtgtatttgtgtgtgtttcatacatggaaattgggacttaagtagattatgtattgtttgctagtaaccaaactatctgcgaagtttgattctggtaaaaattcgttgtttaagtgttgcggaaaacacgaatagctgtttctttgaagagctgggagtgatctctttttgacagtgaaggcaaattcatgagtgcggcagaagaatgctgctgagagagtggctcttaaagttttggtgttaaagaagtcttgtttagactcgactggctttatctacttgtggaatactgctgagcagttcttagacggattctaatttgtttctaaatataaaacttgattgtctgcattcataaccttgcaaacttcagatagtgagttggttgcctttattggggttgggaattgtgattgatatgtgtttcctggctatggctaatcgtgtgggtttcttgtttgtgctgacaggttgggtatcatcctgattttgtagaatcgcg

SEQ ID NO: 61828 - DNA, 563 bp, Populus trichocarpa
  Intron number 2 from transcript POPTR_0006s13980.1 (locus POPTR_0006s13980) derived from phytozome v7.0 (chr-ID scaf fold_6; pos 11219364 to 11219926)
aaacccctgggtgcaccaaacaggtgactaaatccctgtccaatcaaagctttcatttttcttttcatggggagactaccaactacgaggcaaagttaagataatgtaggcaagataaacgattataattgcattttgagtatcatcacaaggtgtcactgtgagcttgattagaatatgctaattccgctataagaaagtttggtttctaggtctgccacttgaccaagagaatctttaacttttttccataacatttataaaacatgttcagcagccactgcccaggaagtttggtgatccattttaatactttagaaggcactatctattaataaatttgcaattgtgtgtgtgtgtggctccccaattacttcaaaggccatcgttaatgtaggtaggttttgcttaggagttttcactaggaaaaaaaaaactaattactagaaattgatgagaagagagctgggttggaatgttcatcaattacaggcatctttaggtagtgaatttatattaaaaaaatgaagtatttttgcaggcctgtgcttttagagattctt

SEQ ID NO: 61829 - DNA, 897 bp, Populus trichocarpa
  Intron number 3 from transcript POPTR_0019s14940.1 (locus POPTR_0019s14940) derived from phytozome v7.0 (chr-ID scaf fold_19; pos 15581137 to 15582033 reverse strand)
taaggctctcattagcactcttggcttcacttttggtgagtgtttatatttgcataccctctccttttaagcataatgtattttgtttgcttagattagatttgatttttgtgaagttatgattgttacgttgttgaatcactttttatgttgcggtattcaatatttattcaatataaatgtgtctttttttagaacatgatcgtggatagttggatggggagtttgctggttatattagatgccaaaattcattttaaaaggacaagttttatgattatgcatggatggtaattgtgtgaggtcatgaatgatggaataggagaccatatgctcatttttcagaaattatggaacggataaaaatggtgttttttgtaagtaaaagcttaagaccgcatggtcttcatcatttagtgtaaatttaaaaaactgtttatgatttgtcacgttgtattgtttccaatgcatctttgtaaggttttacaatcaattgatcatggacacatagcgcataagaagtcaatcttattagttactgatcatcaattgatgttttatagtgtgggatttcatttggtgactgtagtatctgatgtgttccaactgcaatatgatgcaatgaaatgatgatttcatatattcttgccttgcttctttcctttatactcagatgcaagcatatggcatataatcactggcagtttttgatgatgatagtaaatgggtggaaactctgtatgcggtcatttttctttagatgtgcttgatttgaattatcatcaatatttttgttgctcagcattttattttatctaattttcgccatcatttatactaacttattttttggcaaatgcagccacaacattgacaagctggcatcttctggtcacg

SEQ ID NO: 61830 - DNA, 695 bp, Populus trichocarpa
  Intron number 1 from transcript POPTR_0005s22880.1 (locus POPTR_0005s22880) derived from phytozome v7.0 (chr-ID scaf fold_5; pos 21766154 to 21766848)
ggaattgaagagtaatcgccctcagttacgtagaggttcgtccttccttttttaaccttcataattctattctttctttcttttcttttttcttttttttttttttattatggttagcttaaaaatttgtcggtgccagtatttttctcatccttttcaatattttttattgtggccctaatttacgaaagtgacagcacagtaacctcgcgggtcccacatatatagcagtgcacgtgttttgttctgcatttgcataattgcatgtgtttgggatgaatgatttagggatgtttgttattaaacgttaatctatttttcattaaattttaattttttaaattattttttaaaaattttatttaaattattttgatgttataatttaaaacataaaaaatattattttaataaatttacaagtaaaaaaaactttcaaaaataatttcaccacatttccatcactaaagtgttgtttggtgctagtactgtgggttatacagtgttttttattttttttattgtgtttacgttagaaataattttttttaaattaatctttaccctttctttgctaattaattagctttacctattactgtagcaatgtttaagtactattaagatgggaggaatgattaattagtgactaatttttttttttgggattaatgtaatgtaatgggaacaggtct

SEQ ID NO: 61831 - DNA, 571 bp, Populus trichocarpa
  Intron number 1 from transcript POPTR_0001s20710.2 (locus POPTR_0001s20710) derived from phytozome v7.0 (chr-ID scaf fold_1; pos 18817399 to 18817969)
ttttttgttctcatcttcgaaaaatttgagcgctggttggtctcttcctaagttcaaaatttttcttcgttttctttcgatttaaaagctggatttggtgctgtttttttgtgtgcacaaaaccgctcttgaagcagttttttgttagaggttttcgtcgcttcttcttcttgtttgtggtgtgtttttggtctgaatgcgttttctgtttcttttcttttaaggtttcagtttgaagcagaaagctttagcagcattttctttttgttttctttgagaagcttagctggtattttgttgccttttcaaatcttatcaaattgtaacaagttttggatctaataataccttggatctaataataccttgatatacatatatatattgtttttcttttaaattttggttccaatcaatacctacttttgtgtttgatctgcattttcttttgcactttccgagcaaccaaacaggaaaagaatttgatgctaatgtaaaatgtttcgacactgatctttggtttttttattttgcaggaagtctacgtgagcctgtttgatttcaaaaggtg

SEQ ID NO: 61832 - DNA, 354 bp, Populus trichocarpa
  Intron number 1 from transcript POPTR_0006s09580.1 (locus POPTR_0006s09580) derived from phytozome v7.0 (chr-ID scaf fold_6; pos 7040330 to 7040683 reverse strand)
aactttcagaacgggacgtcaacatttttatactggtaattctctagttttaccatatctttcatttattttccttgtagatgaagttggatattcgcttaggagtattataagtttatgatgcctttgttttttcccaagtagaataaaataaagacgcatcattttcttccgagcgatgaagttggacagaagtcttgtcttttcttcgttgattaccatgaatttaattaggtcatgtcacactattatttatttcatgatggacatggtcttacaactgttcattaatcaaatattaattgcaaatccaattcaggaaatatttctggccggttcagaaaccaccagcag

SEQ ID NO: 61833 - DNA, 907 bp, Populus trichocarpa
  Intron number 1 from transcript POPTR_0006s23610.1 (locus POPTR_0006s23610) derived from phytozome v7.0 (chr-ID scaf fold_6; pos 22322793 to 22323699)
caaatctatagctaccaacttctctttacttccaagtaagtttctttaagcttgtttcttctttgcatttgctaaagtttttgtctttctagatctttgctttcccgggttcaatttttttgtgggatctttgttttgtattgctctaacagtcgcggatcaagaattgttttctttttttggtatttctcttctgggttttatttagaacgttgatgggctgtttctcatgacctttatgtaattacgtgcttataattctcaatctgttcccttagaaatgaaaagtttttcatgagggaagttgttttttaatagtgaaaaactccataactgatttgctaaagacatcgatagttattatgaaacgggaagtgggtgataagtggctgaagggtgtgttgatgctatgtgcagccgtgaagtggtaaatgccaaaacctgtgtaaacttttactgggtattaattgtatgtataaatggaagatgagttcttggcattaatgtatgtgtgtatttattgtctctgatggtgtttcctagtgtttttttttaacttggagtcacgagaaatgatatgtagttctgggtacatggttatgttgtacaactccttaatgtgtgagtttgatcaaataaatcttaggagccaaatttttgttttagtactgtaaggcttagaattcaaatgaagcttgcttctggttagctaaaaatgatgaagtataaaaaccttaaaggaatataatttattatggtatcttgattcctaaccactcgtatcattatgtgaatttagttgagttggactggtgattgagcttaagcatttttacaaggaagaagtatctaatttttaatggcctctgcagggctgtagcactgtgatcaggtcaaattgaccgca

SEQ ID NO: 61834 - DNA, 837 bp, Populus trichocarpa
  Intron number 3 from transcript POPTR_0006s23610.1 (locus POPTR_0006s23610) derived from phytozome v7.0 (chr-ID scaf fold_6; pos 22324039 to 22324875)
agctgaaaagcatattcaaaaacttctgcttcttggtataagcaaatcaagcttgtttctcattgcattaattatttggcattcaagattgtttcatgctatgttaattgtttgacatgtaaaagtgtatccatagtattcaaagtttatcatggttgtggacttgcgtttaaggtctggatagcacaagcaccataggtactgtgaattacttccatgaagaggcagcctctctcatttagcataagagaaattatgaatcaatttgttttattaatttgaaagcttatgatattaaccaaggactgaactattaagttcttaatcgtgttggggaaagttatttgttgctttctgtactataccctttgacaacaagtagagataataaaaagtggctgtataatgcgtgactattgtctaaatgtaattaccctctgcatcttgttgcacacttcttttatttttttcctccattcatagtgactcttgctttggccccaccccccttggaaggactcatagatacatggtctttacttccctatgcaccccttggaaggaatcatagatacatggtctttacttccctatgcacagtgactggttgagaatatcattgttttgggtgtaagccttcaatttgagtttagcaattttcgttgcataactttggttctacccatttcgacttaggctgctcgatacttgtcttttctttgttttatttattttcaaatgcttcgattctttttctgtctttgggttttaaaaatgacgtgatcaatatctcatgatcaaggtgctggagactctgggaagtcaacgattttcaag

SEQ ID NO: 61835 - DNA, 970 bp, Populus trichocarpa
  Intron number 2 from transcript POPTR_0009s14840.1 (locus POPTR_0009s14840) derived from phytozome v7.0 (chr-ID scaf fold_9; pos 11550938 to 11551907)
ggtacgtgagctctcctgcctccttttgttttgtttttcctcttttctgtgtgatgaagaaatgtttttatgatttttcatcttttttctcttcggtagattggatttgaagatatgggttctagcttctgtgttgccagtctcctaagtctaagatctctaagactttggaggtctgaaattaccagtcttgcttctgagaagtagaaactggtcatgtctgtggtctcaaaaacaaggaaaagaaacagatttcaaagtgataattgaacagcaactttgtttgggaattttgttggaatatgctgtgagccaagtaaatttagttttagattctatagaagtaatcttgatgttgaactattcagatagagcaattgaaaaaaataagcaagttaatggcgttatggctctgttcatgataaaaaaatcaactcgctaatattgggagaaagtctcagtgttgatatagtgtcaaaggatctatcagggacatagtaataatcagtaaaaactatatatgagggccaaatctcttcaaacaagtaggaactttattgaggtgaagttttcttttttccagtatacaagaattggcatggagtctgccagttgatttttaaaaatatgactttctaactcaagtggaatgtttaaaaactgtcaaatcattaatctgtttaaattcgcacttgcatgcacacgtgatgcctgcatcttgcatgcaggcatatgttttaagttccattcatttcagcatatataaaagatttccaatttggtcattaagggttttggagttactggtttgttcataatgatttctttcttccaactatgaagttaactgcaaattgctacctaagtcatgcttcatcgcattcctttttcatattaagaataaatatttaacaaactttaaactgagatctattctcaatttgttgcaatctcttgtggtcttcagtcg

SEQ ID NO: 61836 - DNA, 1002 bp, Populus trichocarpa
  Intron number 1 from transcript POPTR_0013s08000.1 (locus POPTR_0013s08000) derived from phytozome v7.0 (chr-ID scaf fold_13; pos 6915516 to 6916517)
ctagcgtgtaagtctttcttgttaattttgtttgggattgttgtaatgacaagagaaatgatttgctcacaagtaaataaataaaataaaatctataaatgagctgctaaattgtgtattactccgtttagattggattgtaggcaggtaggaaataccatcaggtaatcttttctatacacaaatatgaacaaactcattctgtgcaagctaatcctaacatcccttttgctcctttttgcaaaatcttaaatcatattggattacttgggaatagtttgatggaatcattcttccataacctccctagtagagtttcattctacggttattgcttcattttaacagtggcttctagtttgatcaagtccccaaatgccggaggctttttccgaccaccttccttatgcattgttaatcaatataaggtttgcccaagtccatttctaacctcttggaattgtcacatgctgaacaaaatgaaaagttattgtgggatatacaaatcttctaaatgctttttaatgtccgtcttgaaataaaacaaacatgttgggtaaactgtcaagatcgactcccataaaataacgctctgtgcatagtccatagagtctgcaatcatctatgattttgtttcttgaaaacctaacaagcatcgcatttctttatgcatgacgcttgtttggtctttgttttgttaattttctgtgttttctctttcttttccatgcaataatagcttattgaggtttaaatattctcaaacttgacgtgatgaaaaacacgaacaattggttctttaagttattgatattcgaccaaatgttttgctactctgtttctccttttccctactggaagtgttaaccaagagttccttgcccttatttcaagttgttttatttccccatctttcaatatatctgtcaccttcattctgattttatgttattctgcttcttcacagggactggtacaatttagaaaagtcaaagcgtgtga

SEQ ID NO: 61837 - DNA, 735 bp, Populus trichocarpa
  Intron number 2 from transcript POPTR_0001s40460.1 (locus POPTR_0001s40460) derived from phytozome v7.0 (chr-ID scaf fold_1; pos 39901022 to 39901756 reverse strand)
caggatcaaacccaagttcaggtaagcatcattaactatggacctaaaaatgcaaacatgcgtcacttgcactgtgctttggggttaattatgtctagcattggattcttataagtattgtgttaattttatactgtggaatgaataacatcaggaggttggtctattagattcttttcttttctgtttttttttatagagtggtctattagattctggacttttggtaaccataacattttaagaattttaggctttgcataacttagattagaagagagttttccttcatgccctgaaagaaactcaggcttaaacattcttgaaatatgcccctgccttagctcacttctgtttgcattggtcagtaactaggtggaatatgaggttcattgcttcttgttcaacaggatctcaaagtcaaaacagaatgaatgatggtcaatgccaatattgcaatgagtattgatctggatataataaagaaattgaattttttaaacatatgcgaaggtgataccaaagatgatgcctccttgcgtcatatgctggaatttcttagcatgcctatctgatgtaggattgggatagcccggagaccaacaaaagatgcaatagatgctcttttacaaacctgatgggtgttgtgctattgtacatgtgaaaagcttataatgctagatgtgttcgttcttgctaggttttggtgaacagtatcaactttattgaggggtc

SEQ ID NO: 61838 - DNA, 755 bp, Populus trichocarpa
  Intron number 2 from transcript POPTR_0001s36070.1 (locus POPTR_0001s36070) derived from phytozome v7.0 (chr-ID scaf fold_1; pos 34541211 to 34541965 reverse strand)
ttctcactagtggtgtctgtatgttattcatccacaagtctgatgctatattcagttttgattcatcatttgattgtttgtgctttttctttgaattagtctcttcaatttcctgtaggtgacatgttctttcatgaaatgtaagtttttttttttagagctccatctcttttgtcttatgttttcttcttcaattgaatgtaagtagatatttcaccatcacagggcaacttaacggtttcattattgttgtaattctttatggatagagttgttgtctgtgcttctatttagtactttctgtgaatgtttaataacctgctccattttgttcaacatcaatagcatggatgtatatatcttagtttgtttcaaaacatcaaaatgaaaattctactgttcttttgctgtttccagtactgtctaggaagatatttttgctgaagtttctcaagaaaatacatcctaaaattaattttaatgtgttcagtgaaatgcttatgaatcatggagctttcatttttggcataaagcgcaactatctgtgatccagaaagtacttttagagttgaattggtgcaatcgtcatcctatttctgctccacctaatgcattcttgacttattgtaaacagtagtcttatgcatggatatttgtttaatctaaataacactaaatatctgtaacaacttgcttttctgttctttttttctttgtcagaacggcaggtggagaaatttgatcccttaattggt

SEQ ID NO: 61839 - DNA, 736 bp, Populus trichocarpa
  Intron number 2 from transcript POPTR_0005s04280.1 (locus POPTR_0005s04280) derived from phytozome v7.0 (chr-ID scaf fold_5; pos 2868823 to 2869558)
gctgttgctgtgatcggcctaatcctgttttgcaggcaattctgtcaaaacccacatttttttttaatttcttctctatattgtgtttttttttgagttaattcagtggtttttatttgtgtctagaagaaatttcttcatcaatgttttccatgctttgaagtgaataaattccttgttttagcacagtagtttaataggtgttttgagtgtgttgatttaataacaaaaacggaaactaagcattaaagaatgatcaggttgtttgtggattcaagagtgctagatatgaatgataaatgtttgtggatgagaattgagatgaaacaaaagcaggtgaaaaactggggattatggaaatgagagaagaaaaaacaatgccaaatttgatgtttctattagaaaaactaggaagatttttattcacgcaatagtttttaggtgtcttaaactaatggtttggagaaagagaagtaatgcggaacgatataaaatgaatcttttcatgaatggtttacagtttatacattgttttaatgtttttgaaagattagtgattttctgtttatttttcgtttttatgctattgaagaaaaatgtaccttatcgtgctaattgatgtatattaagattacttgttctgaaagagtttagattacacttagatttttatgtttttattttattttattttatttcaggttatatacttggcaataattggagcaacttatta

SEQ ID NO: 61840 - DNA, 1026 bp, Populus trichocarpa
  Intron number 2 from transcript POPTR_0003s12190.1 (locus POPTR_0003s12190) derived from phytozome v7.0 (chr-ID scaf fold_3; pos 12856086 to 12857111 reverse strand)
agatattggaatcatattccaacagaggaatctaggtgtgattactgaaacttttgctggaattttgattagaattgcaaaatggtcagtttttcattatttatttgttagacatggctggtcaagtccaagttgatcggggcattttcttgtcgaacttcttcaaagaggttttttaagtatctttcattcttcaaagatttctagtccatgatgtgtgagaatttggaatccagcaactatttgtagttgtgtaccatatgagcttggaggtaatttgattggatcttcaaggggtaagtgagttttggattatgtcaagagtttttataacttccatttcctggcatcaggaatttttttttaatgtagaagtagattcttttgaccctgagcgtgaaaccaataatgtgactggggagcataatttgataatgtaatttacagaattatatccctgaagccccaagttattgaacaacttgtcactaacgaacctgctctggttgcctagctgcccccatccccaagaatcctcttcttttttctcctccatagaatatggtcaacgaggaaggaccctggacctaagttaatatttctgcattccttcttgaaacaattaattggcatacacggctgagacctgcatctgatttggcagattggataattgtatcgcacctttcttagctatgcatgattttgcagtttgtttgtgtgtgtgtggatgataattccacgatccaataatgtttttatccttctcgtagccactgcttcttcactttgcatccatattatgattaaaggattctaatatctttgtttctgtcgacactttgcatccatattatgctttttataagtgggttgatgttaattggattggttgtttctatgtttgtgatcaaattggtgattatttcccatatagatgtagtcaaaatagcactggaattgatccaaagttcctttgtttttcttgtaggttcaactcagttgcatatcttcagcaaatctggt

SEQ ID NO: 61841 - DNA, 463 bp, Populus trichocarpa
  Intron number 1 from transcript POPTR_0003s12190.1 (locus POPTR_0003s12190) derived from phytozome v7.0 (chr-ID scaf fold_3; pos 12857191 to 12857653 reverse strand)
gcaccaaggtacgatcttttaacttttatttgtttggattatgagaggaaataacctctggtttttggtatttcgttattttgtacattaaaattggaaaatttgacaaaaaggtgtccttttgagttgtggctcttctctggtttttgcagcaactagtaatggaatttgcatgttttcttaatagtggaaccctgatatagattttttttcctgattttgtttgttttggtggatgagaaaatttaacggaaggcaaagataggatttttaactttatttactgcgccaggggggaaagaatcttttgctggtttgattttgaaattttcaattacatagaaatggatcatgattgtgaaaagacaggacggttattgactttgagtgttcaattctatcaggttttattcttctggcttttcaacttgttgaattaaaattttgcatttgtgcagaaagc

SEQ ID NO: 61842 - DNA, 775 bp, Populus trichocarpa
  Intron number 1 from transcript POPTR_0006s25540.1 (locus POPTR_0006s25540) derived from phytozome v7.0 (chr-ID scaf fold_6; pos 23934032 to 23934806 reverse strand)
tttctggtaaattttaggagttatagtgattttgaatgctggttttgacttcttcttgttaggaaagaaagaaagagatacgtgtagccattggtgattaaattgattttcctttttagtgtatatattgcatgttggttttgttttgctttggcgattatgatgtttcctagggaaattttctttctttctgggatttgtgtgaagtcaaagagtgttggatcatgcttgtttggaagggaagagaagtattaatcattagtgtgtgctttattgggggattttgttttttctttctcttttttccaggaattgggatttacttcttttttagtattttatcacttggtattttgttcttgtctctacaggctttgtcttttgtaaaatgcgtttagcctttttaattctgttttttcttgtggaaattggttacattaaatatagattgtccagcttattaacttttagttaatgttttaatttaatttttgagtctgtgctcattgttgataaacctgtgtgatttgcttgttgcttcagcttatttctttgtgcattatcgtagttgaactatcttcaatttatgctaacaatccagctgcctttcaatcacatttatcacaatagatttgagtactagctgtatttgaggagttagtgtttaggatttaagttcatctatgtttgtaaaatgtacttcatctttattgaagtgaaggattggaaatgatatgcagggcgcagggataatatttgtattgaaaggcagctg

SEQ ID NO: 61843 - DNA, 802 bp, Populus trichocarpa
  Intron number 1 from transcript POPTR_0005s09400.1 (locus POPTR_0005s09400) derived from phytozome v7.0 (chr-ID scaf fold_5; pos 6558386 to 6559187)
agtcacaaatactccatagatttccatcgctcagtgtaagtttattgaaccacgggttttgaattagttctcccaggaaaatgatattaaattgtcctgacgctcttgcatgaaagttaaaaagtactcttctaaaagttagtgttcctgttaatttagtatggctgacatttataggcgtcacttaaagtgcaatcttgcttttaaaaccattccattgaagaggtagacccatgatgtgtgaattgcacaaggtagaacttaagttgtatcattcacacccaatcaagatattttaatttgaggtctgatggtgactatgagtctaagcagcgagttccaactgcattggagactgattatgaaaacaagcattaatctttgtatagaaataattttgtgcaaggaaagagaaaatgctatttgagggtccgtttgaagtaaaacaaccactgctattgacagtaaatcttctttctgtgtttgaattcaagagagagaagtacattgggatttatgaaaatttattttaaatgaaatattttgtcttttgtggaaatgctaagttgtttcatgaaagaaaggtcaatctttgatggttttgtgttttagaaaagcaaacattctgaggcagttgttgtcatcatttaagatttttagctctcttaagcttgttgagttacctttattgagcttactttcagggttctctagcatttcttgatcattgacatcttttgttgcttttaatttatgtttttggatgattttgttttgtaggtggaagaaaattttaggggca

SEQ ID NO: 61844 - DNA, 1031 bp, Populus trichocarpa
  Intron number 1 from transcript POPTR_0014s08540.1 (locus POPTR_0014s08540) derived from phytozome v7.0 (chr-ID scaf fold_14; pos 6344681 to 6345711 reverse strand)
ggttggttagacaacgcaaagttcaggtaaattaatcctgttgtcattaatgcatctctctttgtttggatttttaatcagaaatagaatgatgggaaatttaatagttttgttttagagaagttaatcgaggaaatgcaagtcttttgttgtgtattggttgttatgttgtagggaagtgcggttgtgaatgttgtaggctttttgtttgattgccttatcgtgtctcaagttggattgaagctacgtgagttgagttaattctgattatgatttaatttaagttttgtataatgcaggtaatgtggattttgatgttgattgtgttgttttaagttgtagttctgcaatgtgtctgagcactggagcattaggtttgctggtccttgttctaaactgtgtccagtgaatgtaattgtatgacgatttttttcccctgaatctatctacggtacccacattttttatttcatgagaagtaggtgcagcctcttgaaccacttgtttatttggcgagagagaggaaggcagcttccatgtaacatgagtgtctcccttgaaattataactacctgtacaagtctatcaattgattacattgtggtgcagcttggagttggtcacaaatgatttgttggataatgtgctcctgtcttcttgaaataaatcatgcaaatacgtgttcctcaaaggaagcaattacggtcttctagatattcaactgtagatcagctttaagaagcttaacaaactcttgcacaggacaaattggaaaattttctgatatattgtggacatctttttttcatgtgttaatcaatgtgaatccatgatgtgcatagctgcttaggttgaatacaaggacaaacatgagcatgattcaatatatattgagtgattttctgattatgtgttttagaaaggttgttgacacctcagtttacttggaacagcatcccttcgtcagcagtttgtgctatttcaattgtctcatcaacattgggctcttgtgcagattactgaagctgaag

SEQ ID NO: 61845 - DNA, 749 bp, Populus trichocarpa
  Intron number 1 from transcript POPTR_0018s08800.1 (locus POPTR_0018s08800) derived from phytozome v7.0 (chr-ID scaf fold_18; pos 9724020 to 9724768)
tgcctcctcctcctggcccgaaaggtgacatttttctcctttaagattttaaattgttgagatttacaagtggttactgggtttttagctgtattacaaattttggccttggcatttccttttttctctccttaaaacgcatttttgggttcaatatagatttagttttaatgcatttcttagattcagggacttgctctatgactttgaatgcacatttgatgttggtttaatttcctaatttttaaatgtttaggtcgacggttttttttattcaaattctgactgcattgaagcactgatctggtcgatgttttaagttggctttttgcattacaagactagtgtgtattttttaaaatagttttcttcgaaattggtgaccctactgaatgtttttgctatctgcaattggaatcaaggcttcctagtgtggaaatgattgtctggagagatccacttgtaaagaaaaaggccctgcataatcgtgtttaaaatgtgttctccacaacacatgatatcaatagaaagtgaaggaaaagaggaagtagtttatcatttgtagatgaaattttctttgacaagttttcatgcatttgaagtttcaatttgtggcaaacccagatgcttttcttttgctattaagaaccaggtgacagtttgtttgactttcaactttctgatgccaccctctggtggtaattttgtgctcggtggctcattttctagcatttcttgatgattaccag

SEQ ID NO: 61846 - DNA, 521 bp, Populus trichocarpa
  Intron number 3 from transcript POPTR_0008s00440.1 (locus POPTR_0008s00440) derived from phytozome v7.0 (chr-ID scaf fold_8; pos 172122 to 172642)
aactactaaacaatctggtgcctcgttaccttctcgtttgtgaattattattaccatcttgttttctcatctcttcttgcttttttttcacaagtaaacttcttcagctatgtaaattctaatgtccctttgtctatcaactcagctgctatgctaattgctgtaattgagattgcaaggtctaatcattgtttttttataacatccctcctttttaattactgttgtacaacactagttttgttggaattaaagcctgatttttttcttatttgataactaaataagcacctcttacccatattaatcagtcaaaagctgaatggggactatcagactacttccattttagagcaccaacattttattttgatttcccaccttttctccgtgaaaaaaaaatgttgccccattctgcttcgaaaattttgttcaatctagtagaaaatgctcttctaataataccctttagctaaaatgtgtgttccttgtagaggcacctggtttaagttctcgttttg

SEQ ID NO: 61847 - DNA, 625 bp, Populus trichocarpa
  Intron number 1 from transcript POPTR_0001s04340.1 (locus POPTR_0001s04340) derived from phytozome v7.0 (chr-ID scaf fold_1; pos 3439923 to 3440547 reverse strand)
atcattcccatctccttaaggagctctctatacaggttaacagcactttgcttcttttttttataatattttaatgagcaaaggatgattcttttttaatttcttttaatctatccatgtttattttgaacaattctgggtatattgtaaattgaattttgattatttctgaagatattaactgggttttaattcttgttttgattgatttctgttctgttatttatttatagattaaaatgcatgtgtacatggttgttcttgtcttcttgaggttttagcttgcatttttaggtagtgttttcattaaattctatattttgatcaataattaatattccattattatccatgttgaattcagagagaattttgtgttttagagcttctttgaattttcgaattccatttcttgcacactctaatccttttgttttgttctctctgccattgaagttaaactcttttttatccaaggatatctagtttaaattgctgtatctttagaaaaaaaaatgataattactttctggaggtttttgaggagagtttacttgtgttgatttgggatagattattaaagtatgaagagattgatatgatattgcatttttgtgaagtagga

SEQ ID NO: 61848 - DNA, 655 bp, Populus trichocarpa
  Intron number 1 from transcript POPTR_0001s03990.1 (locus POPTR_0001s03990) derived from phytozome v7.0 (chr-ID scaf fold_1; pos 3171520 to 3172174)
ccttcttcttcgcttactatcatcgtctgtcactggtatgttatgtctctgttatcactcttgtacccctgtttttcttctacattgttgttaaatcgtttgagctgggtttcctttgttttgtctgtttgatttatttttgttctcaaaattaaatctttttttggtttttgatgatgatcatggttttgatcatctgggttttggctcttttgatgaacctgattgaaccgtggttgtcggaattgtgtaaagcaatgaggtttctgtgctttgtgtccttttctgtttggacgtagaaaccgaggaaaaacagtggtctttttaatggtttgatcatggttctggagtcatttttggggtccctctctatcttaactggggttttgttctcgattgatcttatagtgtagaatctcttggtcttgacggatgagatgagtccacctattcttgttatttgattttttcttcttgtttaaatccatttatgatggcaaagattgtggtggtgatagctcatagtgagaaacgaagcgatgattgctcctggcaaatttagtttttgtcatttcttttaccaatattgttttcctaattggcggtattttgtgtttcagaaattcactgcagtgaagagcttgtttgtggatct

SEQ ID NO: 61849 - DNA, 785 bp, Populus trichocarpa
  Intron number 1 from transcript POPTR_0018s01040.1 (locus POPTR_0018s01040) derived from phytozome v7.0 (chr-ID scaf fold_18; pos 958360 to 959144)
tagaggtgagaggatgatttgaacgattagagtatatataagtgtgtgtgtttatagaaacggattcaagagttcttcaaaattgatgtcggattattatggcgtggatgacgattttattatgttttggagtttgatgtattactggcatatgctatatgtgattgattgatgtgttatattgttaggtataagtattttttttgttaatccaatcagatttgccatacttgtttgtgtctgcctgttttagtttcatgtgcaatgctctaggttttcgtttttgcatctttttaataattggatttttggtgctgtcctgttatatactgtgattacatagtgatatatatgggctgttatgattgcctttccaaattggtggtatgctatttcactatttttatccttgaaatgaatagagaaggtacatctacagagaaaacaataagctgcgcatcattatatcctaaatacaagctcaacctgaggccgaagagaagttctggatgattataggaaggctcaattattgtgacagcacattattgtcataaaagattttgattttgtgcttctataaccatgaatagttattatgacacatttgtttcctacttgcttcatgcatatactatttttgtgttatttgtctttcaccaccccatacagacagatagaactttgaaatggttgataaagactttattgttcattggcattcactgattgctttcttttttctgtggggttgcaggaaagtgagagtgaagaagatattttgg

SEQ ID NO: 61850 - DNA, 778 bp, Populus trichocarpa
  Intron number 1 from transcript POPTR_0007s08240.1 (locus POPTR_0007s08240) derived from phytozome v7.0 (chr-ID scaf fold_7; pos 6835762 to 6836539 reverse strand)
attgcttcatcaaggtatgctattttcttcttcttaattcttttttgtgggttttcctcaattgggtttccttttctttaaatgtttgtggcttttcttttctctaaatgtcgatgtgtgcaagggttttgctcaattggggtttctttgttgtagttctttgagggttatttcaagtggccaggtttgtggattctgtgtattctttcctttctttgagggagtttgatcactacacagttgttcccaaatggggaatttggtttcttgtttgttgatgatcgtagggttcttatgaatttgggattttgtttttgtggtgtgcttgtttacacgcaaagtgtgtctgcctcgtgtttattagttttatgttatttttctgttgcagtaggctacttggctctttaacttttcaggtctgtataggccttaaattgcttgttttatgaaatttcttctcttgttattgtgcatccttgcttcaattcttggcctggtattctcagttgtttggttctgtaaattctttgtggagacacttttcgtgaggagctatcattgattgattgggcactctttaatttcttaggcagataaccacaaatttgatctggatgctgagtcttgctattaacaataagaattcttgtcattgcatgtatctagatattaattcagatttcttttcattgtatgtatctagatattgattcatggtaatgttttttatatcgttacttattactgatcttgtgggatcactacaatcagggttgtg

SEQ ID NO: 61851 - DNA, 842 bp, Populus trichocarpa
  Intron number 2 from transcript POPTR_0014s15260.1 (locus POPTR_0014s15260) derived from phytozome v7.0 (chr-ID scaf fold_14; pos 11329239 to 11330080)
aacctttcctcatctcctggtttgtttctctttatcatatttacaaacttcttgagtatctataaatatgtgtgtatttttatccagacttttcaatatcctgttaacgaattttaaaagaaaagtgggggaaatgacttcattttttgataaattcctaccattggaatgtcatgttttcttgttcagtttgcaaccattaatgccgtgcatgtaactgtaaggctacaggttatacacagacacacagtgactggaacttgtaggcacgtttggcgttggtttgggacaatctaatgatagtcagcgacttatggctgctttggtttcctgtgatcaaactggaagactggagtaaggttgctttggcaagcactgtgccagttatcactgttagcaggaaaaacttccactactagtggtataggacatacataatgtggatcacaaagaacgttgatcatggatacccagaaaaaaaagttctttttgattggattgttgaattggtggttatgaaacttagatttcaccatgtaggcttgctcggatctagatcaatatacactctggattttgtgtcttatctggatctctcagaatggattttaggaaaattaattcatgtccttgctgggatatggtctgaactctgaatattgtacttactttccattaggcaagtgtgaggagggagatcctatgagttaacctgtgtaatgcaaactgcaaataactaggatttgactctgatcatgccttttcttttgtgtgtggaagataggaaatgcttcggatgatatttcgtaaataatcgtaagtcttgtacttcttgtttagga

SEQ ID NO: 61852 - DNA, 606 bp, Populus trichocarpa
  Intron number 2 from transcript POPTR_0002s10260.1 (locus POPTR_0002s10260) derived from phytozome v7.0 (chr-ID scaf fold_2; pos 7369466 to 7370071)
tggtgagctgccatttaaattagattgatggtgcgtgatgcatccttatatgtcaaaaaacctaataattctttgcaagtttccctagtgtgaaattaggttttccttcttggttgcttgtttccaatttaatctcaatttctagtaactcctcgtaggtatagtagaaagtcctcaattcccggccttaaggtgctggattcttaattaaaggctactccaaatttcctgagttgtaatttaaatctcgttcttttcttcctgcgtcagttttttatagtgtacatttgtttgagattttaacaaacttctagaacttaaagagttaccattttcactaggtttacagtccatgcaaccttgtcttctcgcaaacgtgattgtcaaatccattttcaccgagctcttgttaactctctcgatttatgcatggtttgtgatctttgataagtttcttggactctataatggtggaaagtggagtttttcataaatttattgctggttctgctgactaaattgactgttaactagtgtcttcccagggcatccatgattttgttctacccagagcaccttaaagatactgtccatcaggtcaaaaac

SEQ ID NO: 61853 - DNA, 688 bp, Populus trichocarpa
  Intron number 1 from transcript POPTR_0006s03370.1 (locus POPTR_0006s03370) derived from phytozome v7.0 (chr-ID scaf fold_6; pos 2139085 to 2139772 reverse strand)
ttcaagggttcaacaacatcaacaagaagtcacaggtattttaattttattttctgtatttagttctgttcttttttttttatcgatcgttgattaatggttcttttatcgttctttataatgggttcttttctggtttttaatctaatattgggtgaactaaagatacctttttgatttcaagggtttcttttagggtttttgattaatcaacctggtgatatgattgaaacctaaatgcacatgtaaatttgttgttcttggtgtttttattttgtattagtatgattattggattttctgtttgatatcgatgtagtgattttaatttcgttagtatttaaattgtttgggagatttattgtttttctttgggtttatttgattacaatatttataggtttgatttaccatctaggtgtagtttgattagaaagataaatcttgggttagatttttctgttttccctttttggtttgttttctctgtagtttctgtttggttgctgagaaaaatgaaggaatcctaccagagaggaaacaaaaggctgactaaagttacttttctttttaatttccgttttagatttcactcattcaatattttgttgcctatttgatggggcttctaatgaatgataaatctgtcacaggtgaagcacttgcaggtgtaaacaagaacgtgaag

SEQ ID NO: 61854 - DNA, 1002 bp, Populus trichocarpa
  Intron number 1 from transcript POPTR_0001s37320.1 (locus POPTR_0001s37320) derived from phytozome v7.0 (chr-ID scaf fold_1; pos 36300593 to 36301594 reverse strand)
gaaggtatgcatttctagctcaataacttgattggttttttgatgtttagaattgttattgatgttaactggatgatttctatgtttaaactgtgcgtttgtgttttgttatgagaacaagtcctatcacggtaaagacacgggaaatgaaatgatggccttaagaatgaattttacataaacttcttgcatgataaatgtaacaattggtttaaataagcatcaagtgatttgtttggcataagaagagtagctgccacatcagtttctcagatttttttgtgagtagccttgcttgaaaaacatgtatggttttgctgaagaacttataaaaattagaagaaatgatcaggctgattcttatgacctcatttactgagttaatttattttggtttatggagggcagttttcgtattgcctctattgtgtggccaaaataagaagggatgtcactaagaagtcttagaaagtgatgtagatggcaaatatagccacttttatgattaacttatcatgcctaccatctgttaggacgtaggggtggttgacaacttgttgaagtgaagagagaatcaaggttttcatagatatagtggcaaatataatattctgtccatgtctatcctgactctaaatttgaaagtattgtcactttgcattgtttatcgaacaatattcttgatgaagatgatgattatcaatagattgcaacacccaagatagagtttacattaatcaaatctattagtaggaattgacatgtactttatattcaaattgtaattctaacctgcacttctaattcaattcctgtgctaccattttccaattactagaggtcttaaatactaatatcttacactaagaaattctgctggcttcttatgaccaagtacaccacctttctctcactattacaggtgtgaacaataattttttaatctaatttgtcctctgacataaatctatcaggtgcgtgagttggctgaaaaagagtctg

SEQ ID NO: 61855 - DNA, 775 bp, Populus trichocarpa
  Intron number 1 from transcript POPTR_0001s28490.1 (locus POPTR_0001s28490) derived from phytozome v7.0 (chr-ID scaf fold_1; pos 27246685 to 27247459)
aggcaccacaggtatcccaaaagaggagtcgaagcaaacagaatggtgctattgtgtgtgtgcacgaaggatagcaaagagcattttactttcagaggattgattctttgctcggaaggaaaatctctgttcttaatatatgatagccagtattcttctcttttctaacgaagatgggtgtaggatctcaatctttgaggcgcctccaggattttacaatacagacaacacaccaagtggagatgacctcacccactttctgtctatcttaaataacataaagcattggaaaaaagacagcacaatggttccacacccttttggccccatttctaactggcctcctcttcaatcttcatctacagagagaggaactagtgcatctcatgcatttttctctacttttttgctttataatattttctcattgcttctttccactttttatggaaagtgttcgcagtcaatatctagagtttcacttgaatacgagtggatccaagaacaccccttgatttgtgggcaaaaaaaaaacttacttgcagatgaaccaattggcccagatagaattaaagaactctgttcaaaagtccaaatcaaaaccttcaacaatccattatttaactaagtgaacccgtctcagctaccttcacatgcacacgacgaaacacaatcctcctaagtcctatctcctacttttttattattattattttaatcactctttgcttccattatagcttttcagtactccttccttcaacttttctctcac

SEQ ID NO: 61856 - DNA, 714 bp, Populus trichocarpa
  Intron number 3 from transcript POPTR_0010s12450.1 (locus POPTR_0010s12450) derived from phytozome v7.0 (chr-ID scaf fold_10; pos 12488605 to 12489318 reverse strand)
gcagaaagtaaagaaacaccttcagaggattgaaggtgctcagcttcttatcatcatttctatactatatataatgttcttgccttttcctttttgatgtgggattttggattgctttgtttgctcttttcatttttatagtgcagcagagtttcttgtagttttttattttgatgctaataattggtagcaaaagaggaatggttttgctcttgtataatagtttgaattccagttgaaaaccagagcacgatgaatggatgaaatgagaattaaaacaattatccctcaaatttttccagggacaagccagaacacttgtgttcttctatttcccatgtcatgaataaatttatgatctcgtttcattttgtcactttattgattttcctagcgtcgagctactaattaattttatatggctttttttttaaaatggagataattaaggagtcaaaatgtaaaatctctgcataaagagcatactatgtaatgatcggttatcagaaatgacgaaatttaccttcatacgaggaatgatcattctactagccagtgattttgagatatttgtactttagaaagataaggtgcttagatttagatgtcaaaaataaaaccctgacttatatttggtgatcaatttcttcaggcttttatttatttatgttttctgaaacccttttgttacaggagtttaccaagtaaacatag

SEQ ID NO: 61857 - DNA, 531 bp, Populus trichocarpa
  Intron number 5 from transcript POPTR_0006s00270.1 (locus POPTR_0006s00270) derived from phytozome v7.0 (chr-ID scaf fold_6; pos 48589 to 49119 reverse strand)
ccagatcagtgaaatctacaatccttcatttccaagtatgctgatatttttgtcccatcagcttgaattgaattattttttagttgtatgatctacttgataagattttcttgtcttacataatcatgatgtctgatctccatgtgttggtgggttgggggggggtgctggatggtggtgagatgctgatggattccttatttaagactgagatgagatgatttaaggacatagtattgagacattagctaatgattggcaactcaggatttattggaacttcggtatcttaggagccaatctagtagactttttgggaagctaagattttataagtatgcaaagaattgaagaaaggagctagatgtcaactaatttagagacttttgatcatttgaagtgttttgaatgcggaaaaaaactaaaaatgcaaaggttttaaagaatattgttcaaaaggctactttatgtatttgaaaactgttgttttggcattgcagttgcgaaacttggtttggtcaacatcaaagc

SEQ ID NO: 61858 - DNA, 609 bp, Populus trichocarpa
  Intron number 3 from transcript POPTR_0001s08640.1 (locus POPTR_0001s08640) derived from phytozome v7.0 (chr-ID scaf fold_1; pos 6584137 to 6584745 reverse strand)
gcaagggtatgtttgacatatcagaactttctgataagcattgtctactgtcagttcattttattggcaaagaacacccctcctctttgattgacatcatcttttagtttcaatgatgttgggtttaattgcttttttttccccttctgggttgattctatgtggagatggcaaacgatgcttaagtttcatgtatttgatttggagtcattaatccatcttctgcggggatgtaaaatttactactttagtgcgactttggtaagatttataattatatttttaaataaaatcaggaaaccaaaacaaattttgggctttcttcccagtatttttcaaattaaaatcacacatttacatgtaggtcattagatcgatagcagaagagaaatttagagggtggtacagttggtgtgggaattgtttcacttgattaagcatgtcaccactatgttgttgcggcatcctggtggtgacagtatgaagtccagtgttcttgtgcaccatagtgtataattgtgaagcattctctttatgctccctcaaggtttgtgtttttatttgttcatggatctgctttcttgtagatactatatcaactacaaatta

SEQ ID NO: 61859 - DNA, 599 bp, Populus trichocarpa
  Intron number 3 from transcript POPTR_0003s04380.1 (locus POPTR_0003s04380) derived from phytozome v7.0 (chr-ID scaf fold_3; pos 5095458 to 5096056)
tactggttgaggtatttgtgagcagagaaaatcttgttagattatgtcgtgtcacttgtcatcaaaccccatgaagattaactgaattcatactcttgtttgttttttattggattattcttgttctttctatctcattcgaacatgcacaatgataatcattgctctgccgtgctctggaaaataaatgaagaaactcgttgattttcagtctgttttatttcttcgtctgcgtttgtttgtgtaagagagagagagagagagagaggttctgaatgatgcttaactaaaattccttggtcaaaatgaatcaaggtgttgcacccttcttgttcaataacagcacttaatggaagagtacatccaaaatggacctcatttgttaggtgttctggcttgaaaaactcttaaaattaaagcgtgcactcttcttccttgtctttgttggtaaaactaaaagcctctagtatatagaatgatgttatcttttttattttattttattttgttgtttttgaaggcatctattgaagcctcgtaggaatcttcttacataggtgaagttgcaggtagtgtcactgggtgccattagtgcaccg

SEQ ID NO: 61860 - DNA, 729 bp, Populus trichocarpa
  Intron number 1 from transcript POPTR_0009s13560.1 (locus POPTR_0009s13560) derived from phytozome v7.0 (chr-ID scaf fold_9; pos 10760421 to 10761149)
acaagttattctagactctaagcagaaagaggtaggtgcaaaatatgtctcgtcgatcccacctaacagcatattgactaaaatctagctctggactttgtcctgacaaagttcaaattgtctactatgatcccattagaaatgttggtggtcctccgagcatgatttcaattaaatttcacctaaaaaaatgttgctttagtcttcttctcaattaaaattagaatttcgagtttttttttccaaaacaatgtgaattcaataataaaaaaaaaggttcttgtatcaaagttattaaaatctggtatgacacataactttgtaacaaattaacttgggctaattaattttttttaaaaaaattaaaataatattgtttttattttttgtaataaaaatcaaatcaaaattttaaccagttatggtttgacttgacaaattaatcatataaaaccctgttaattataaattatttaaaaaaaaacacctgacttagaccgggggctgattcctgcatcagcctacggtcgggtttataactttttaatgcgcctaaactagctgctagatatgtcatctctactctatcgggcctttatgaatgggctttttagcccaacgaatagtttgaatttcgacctatcaaatgcaacattaggcctttgggcctactctgcatcccgtcttctcttagacaaaggcttcagggaaaataaagtggaaaaacat

SEQ ID NO: 61861 - DNA, 230 bp, Populus trichocarpa
  Intron number 1 from transcript POPTR_0019s00790.1 (locus POPTR_0019s00790) derived from phytozome v7.0 (chr-ID scaf fold_19; pos 531273 to 531502)
aaatacattgaaagaggtcataaggtaattgttttcttctcttgtaactcctttgactttttttctgtttggttcctgagaaaatttcctttttctagagaaagtcttgtgttttttcatatggagcatccttaaaaagtttgataatgatatatctaagttgttggttctttgtttgtcttgtgaaataccaagaaggaagattgagaattttttgggttttcagatag

SEQ ID NO: 61862 - DNA, 265 bp, Populus trichocarpa
  Intron number 1 from transcript POPTR_0008s06790.1 (locus POPTR_0008s06790) derived from phytozome v7.0 (chr-ID scaf fold_8; pos 4073069 to 4073333)
ggggctccattctctccgatatctactctcgcaaagtattcctctttctccatttgtttattttatatttcacgtgctctttgaatgttgcttgatttatttcttttcgaatacatataaattgaaatgaagattttccctaatgatatttatttcactgttttggccaattaaccccagcactgattagttgccattttcatcgtctgattaggctaatctttttctgtttgcaggcagacatattgttgcgaggctactacgg

SEQ ID NO: 61863 - DNA, 1000 bp, Populus trichocarpa
  Intron number 1 from transcript POPTR_0017s10080.1 (locus POPTR_0017s10080) derived from phytozome v7.0 (chr-ID scaf fold_17; pos 9139861 to 9140860 reverse strand)
ggtttttgaccttctggctggtgttcaaggtccaggtacttctaaatcctttgccttagggctttagagtgatctgttccccagcactgtagatttaaattttgaattgcacctttgggtttttctgatgattcaaggagacggggtagggcatcacctccccccctcttcttagttctgtatatctatgctgatatttcagagggcttatgccctctgaccatcatgaggcccttctccttatgtagttctgattttgtgaacctcggggctagttttctatggctcctggatggtagaagctcccttttgcacgctggagctcttgtattgctcagctagttgttctattttggttaatgttgttgtcttcattctgttctgtctctggttccccttctgttgattaggttgatggagtagatgttattttaggttgccatgtctatactctcttagcatggagttctgctttcctgtattggatccttgtgttcaattctggttagttctctatctacctgctgctgtttgtatctgcaatgatgttcgttttccggagaaaatggagctttgtagggctgttgtctttcagttgtgtgagcactatgttgggttgttagaaagcctctgttaggtttcttcatcctgctgttcctgctgattgatttcggtggtgtctgcttgcattaggcctctggttgatgaccatctggtcagatttactcacaacaggtattgctggttatggctgctctgtttgtgtacagctgtgggtgtgaatttggatatgtctggagtcctgcttggtgaaggacttctttgcctgttgtgaggacctgtttgggtgaggctctctccccttctgggtctaggctacctctacttttgcggagtgggtctgtatgctggagttgtgtgctacttgcctatactctagtgaagtgtgcctggtttcctcctgtgttcgttagcttgatgctgctatttgcagcttggt

SEQ ID NO: 61864 - DNA, 581 bp, Populus trichocarpa
  Intron number 1 from transcript POPTR_0004s23910.1 (locus POPTR_0004s23910) derived from phytozome v7.0 (chr-ID scaf fold_4; pos 22538880 to 22539460)
gttctacaggataggtatgatcaaattatacgcatcccattcactacttgatctcgtatatatatatatatatatatatatatatatatatatatagtcgaaaagacagataaaaaaaatctttttagtatagttttgaggtgaatttcagtagtggagacatgtcccttctcttatcatctatcgagacagtaataaaaagcaatcttaaaatgatgaattgatcatttaggaaaaatatactttgcatatggagaggtacgtagaatcttaggctttaaacattttataatgatgcaaagaaaactgaagcagatgagctttccaaggaaagataaaaagaggggctgtgcagaaaagcataaacaattaatatattgcttttcctatttaatcctgcacaaaagatttcgatatggttagagatcctgcacgaactaacctgtctcattcgataaatttctttgttctaggaaaactgtaactttttttaacatcttgaatagagtttcgccgttttgttttttatttggttttgagttgcaggcacgagtcacaattcattggagacatagttgaag

SEQ ID NO: 61865 - DNA, 769 bp, Populus trichocarpa
  Intron number 1 from transcript POPTR_0018s02840.1 (locus POPTR_0018s02840) derived from phytozome v7.0 (chr-ID scaf fold_18; pos 2500639 to 2501407)
ttgcctctgacccatcaaatcctgagcttctctctgtaacattctccgccttctcttcttggtttcttatttttccttctgtttttatcatatttctattattttcttggtgacccaattgagggatacgctttttaatgcttttgtagaaggtaggagtgtttatttattgaaaaagattgaaacttgagtgggtatctcgagttttactggttggattttgttttggttgattttttgttatgcttgtttcttgtgtagaagcttctgttcattttgatgggtaacctcttaaaaagttgaattgtattttagtttaacaagttgggttttactatccattgctcttatgatgtttttttcgtgcatagaagctgtttttcttgttacttatgtgttcttgtaatgttttgtctaaggagtgtgaacacgaccgggcaaactctacattacctgattaatgctaaaaccaaaatggtgtaaaagaaatggtctttggtaccttcaatgaatgtttgcatctattggtttacagaattgcttcttttgaaaagcaccctttgtgctagaagacctttagacattggtgtatggcttgtgtttacaaggatgtgcaaataacatgcgtagcaatgtatattatgctttatgattgtggaaggtggactttctgtttgtgtcgtttccatcattttgaattatggtacaagttgtttgacgttattgttttcatctcaggttcaagaggagcttcttcaggtcattaaag

SEQ ID NO: 61866 - DNA, 973 bp, Populus trichocarpa
  Intron number 1 from transcript POPTR_0020s00530.1 (locus POPTR_0020s00530) derived from phytozome v7.0 (chr-ID scaf fold_20; pos 836416 to 837388 reverse strand)
catttccaaggagcaatttatagaaaggacgtaagtttctctgcctccctcattttattattttggagcatttatttcgtgatgttgctttgatgatttaaaatatattccgatcttaatatatacttgtgatatgcatgggaaaaaaagagaattttaaccaaattcattcggttgatatgaattctggacatatatagtagaatacaaacttgtgttgtttttccaatgtgattctggctttctacttactgtggatggaaactgctcagctaaatttctcatattagatgatgttgaatggattatctgacaacacgtgatctttaccatatgttcttctaggttaaagttacaatttggacgcaattgcattgtgttttcactatgcatgtcctcaaatccatgatccagctcatgaaaattttaattcttggtcatgtagaagaatattatagatcaaatttgaaagactacgcatttgattaaaaatttggaagattttgctggggagcacgcattcctaatgttccagaatgtacatccatttgcacaaattaagatgacaggaataagtttatgtcatttctaagttctaacctgcatgtctagtattctgaatcctgggaaccatttcaaaattagctctgccttttgcaatgctagaagatgaaaaccttcccatttagattttgttgtatttgcaagcatgcattttgtgaccttcccacattggatgatgtccaacaattccaaaaatcataaacccctgcgatgcatgtaaaattggcagctattggttccatggttattcttgatatcttttgaagcatgcatttttttatttcaggaagaactttttatatgcatgttttatgatttttatgttcaccatatcaataaaattggttttgcattttgaatgtatttcttttcagggaggagctattcgccaagaactttactaccttct

SEQ ID NO: 61867 - DNA, 999 bp, Populus trichocarpa
  Intron number 2 from transcript POPTR_0003s06870.1 (locus POPTR_0003s06870) derived from phytozome v7.0 (chr-ID scaf fold_3; pos 8414345 to 8415343)
ccaggaaatagtatagtttcttaggctgttttgtgaaattcattttacagtaaaccatttttcaaattttctcgtgtttgtttgtcgttagtcaataaaaaacatttttcgatcaacggaaaacactttccagtcaaaaaaaaatttagtttagttttcaggaaagtgttttttcttttgactgtgtttgttttccggaaagtggtttccgggaaaccactttccaaactttcctgtgtttgtttgccattagaaaagttggtcaacggaaaacactttccagtcaaaggaaaatttggcttggttttcaggaaagtgttttcctggaaaatttgggtggaaaacactttccgaaagttgtgaaaaatttagaaatgtcattatttgttaattatatcaaatttgatcctcaaacttttgattgctatatataatttgttttgtatatttatttttcaatccatctcttaaaagttaatttttatattaattttgattcttatttttataattgctatttgcttttttcttattatttttttattgaatttttttatctatcaaatttggtcctcattcttttgattgttacttattttatttgaaataatttatgaaatgttaattattattgttttaatttattcaccttttattttttttaattttttagatttgatctctattattttgattattatttattttatttgagataatttatgaaattatattttttttcaatttcattctcattcaactttttaatttataagatttgttcctcattattttaataaacttgagaaaaataaaatattaataagttattttccaactcattttcaatgacataaccaaacactgaaaagtgttttccaacttattttccattacactagcaaacatcgaaaaatactttcccggaattcactttcttcggaattcactttccaaaaggaaactactttccagcaaacaaacggggccttaggcttt

SEQ ID NO: 61868 - DNA, 939 bp, Populus trichocarpa
  Intron number 1 from transcript POPTR_0014s11410.1 (locus POPTR_0014s11410) derived from phytozome v7.0 (chr-ID scaf fold_14; pos 8488996 to 8489934)
gactgtatttttcttgtattctacgtataaaactggtcgttaaggtatgtcaagttcaaagtttgatgatttatcctttgtgctgtaatatttgatgatgatttacagtttggatgcccccaactatttggatttggatctgtatttttctgtacgcacgttggctaaaatattttttcattgtggaaatgcaatgtgttgattgtcaggttagattgcgcatctttccttttctttttttctgctattatgctcgatgtagttctgtaattgagcggattcttgcgttgcaagaattaatacagcatcatttggtttaggaaatgttttatgataattatgtctctttatggggttttccttttgaaggttgaaatatagaggggccattcttgtggcatgctaaaatttgtgggcttgctactgtaatggtgtcaatctgggtcttgagagctgccacttcatttaaaaacgcggaaaggatgtttcttagctgtcccacaaagaaccttgtgggatcataattggataagggcctctaaattttacgaggagagtttatatttatattaggtgtttttatatttaaaagttcatgaaaaaactgatttgagttctcattaattttttattttgggttaaattcggtacttagagtggttttttaaagttatgaatatatttatcatgttttttaaaatgttttataggtgttttgaataaaactaagttgaaaaacaggttttggaatttttattagttatttccatattttgaagatactgctgtgggggcaattgcttttgtagaacccagaaacacatgtattatctgtgtccatctgttgcgttattgctcaggaacttattttgttactaattcatgcaagaccttcagtcgtaagagtttgtttgccaggaaattgaagaggtggataca

SEQ ID NO: 61869 - DNA, 728 bp, Populus trichocarpa
  Intron number 3 from transcript POPTR_0016s01350.1 (locus POPTR_0016s01350) derived from phytozome v7.0 (chr-ID scaf fold_16; pos 593770 to 594497 reverse strand)
gttaacatacctgtaagtttcatttcctcttttgtaaaggatttgtacttctgtcatggctatttaatttgtttagggcctttaggccatgcattattcattagaagttttgatgattttgattatatgtttacagaatcaatctttttaatgattagaaaattagggtctatattattaatctttaaaaatctaatttttaatattttcccctagctagaacacaaaaggaatatcttgaaaccttaaagagccaatttttagagtaaacaaattgtatgctgttgaaaatagttcgtctaagacttgatttgattaatagtaccacttcattatcattgaagattaaaaagcttttaaaaggatgatccgatggcccttttgattatcaacttaattaattagagttaattgaataatcctgttgtaaaaaacttgtatatataaaactactctcatatgtggtgtgatccagtaaaagaagaacctttcccatacacttcgttctcattttagaattttccactttaagtgaaaatatcaagttgtcaaaaaaaaaaaatgtcaatagcgagcttgaatattttaacctcaaaactaaaaacaaatcaaatcaaactaaactttccattattttgtttatgaaattattaaagataacgattaattgctttcatttttttgatcctgcagagacttgagctttaacagcttaactggtggaatac

SEQ ID NO: 61870 - DNA, 658 bp, Populus trichocarpa
  Intron number 2 from transcript POPTR_0016s01350.1 (locus POPTR_0016s01350) derived from phytozome v7.0 (chr-ID scaf fold_16; pos 594523 to 595180 reverse strand)
acggaaatagaatacctgtgagtttttccttcctttgcttttctctaaagctcatactccaaaatcacataataactaacttgaaatttgtaattaagaaaaagaaagaaaaagaatgcttgaaacttccttagtccggcaaactattttagtcgaggtaagcaaagggatatgtgcaatgatgctatgtagtttgcgcaatttgtatactcaaatgcattaacttcgttataatttcaaattggcaaagccaaaatgttttgagatatgcatgaattcaaattgaataataaaaaccatgcacgtagaattatatttgtctaggagcgttattgttgtagaattaatttggattatgaccgatcttttacataaatatttttttcgagctatttttctttatatgatcttgagtttttttttatgagctattacatgctgtgaagactagttgtatctgggattcgggtttgacaatatacacacacacacgactatagtaaatttatcctggatgtaggcataacagaatcatgatattctcaatatttatgtacgtgactcttaaagatatgtatgcattggataaatccaaacaccaacttcttcaatggtttgtgtagggtgataaggaattgctcaataagtggtgaaatcc

SEQ ID NO: 61871 - DNA, 472 bp, Populus trichocarpa
  Intron number 1 from transcript POPTR_0016s06550.1 (locus POPTR_0016s06550) derived from phytozome v7.0 (chr-ID scaf fold_16; pos 4394153 to 4394624)
acaataatagtgtgtggaggtcattgtagtggtggtgatgttgataataattattgatattattagatgattttaaaaataaattaccatgtgaaaatattttataaaatttataaattttaaaagtgattgaattgattaattttcttataaaatatgaagaaaataaaaaatatatatattcatgtcaaagtttttacataaaacaaacgcgatgacatgttttcccaatgcaaattagttttccttgcttgatgctatattttaagtccggtgtttaactcacgaaattaaggggaaaaaaagaaattataaaagaacaaaaacgtttctttccatgcttgaaaaaaggaacacatcgaaacgcctaaagcaaccagtggatcctttggctttactaaaacccttgaacgtcttcaatctttgcctcctatcagaacctgaagaaggcggccacagcaccctatattct

SEQ ID NO: 61872 - DNA, 754 bp, Populus trichocarpa
  Intron number 4 from transcript POPTR_0001s04790.1 (locus POPTR_0001s04790) derived from phytozome v7.0 (chr-ID scaf fold_1; pos 3682037 to 3682790 reverse strand)
ctattaaggtaaatacacctagttataatgattatttgttttaattatccataattttactcctccaagcataactatgattgaaaacaggatattaacctcaaaacagtactgtcgatgcactcgtcttctcttgaattcattgctatggattcactctttgttagtccagaatttctgtcctgtgaaccaccaactacctagaaagttctgtgaatccaaacgaagcaatattgaacaagattagccatgcttaaaaatcataattctttggcgttatcttgacggatattacgtaaatcaagatggtaccaggggtgacgcagttgaacttaaagaataggaattaaagaaagtcaaaaattttagaagaatggatggcatatacaaacataatttgcaattttattattcaataattctcttataataattctaataatatggattatatctttttatcggtattactttttttataagataagaataattaaaaatctaattcaaatataaaaataacataaaaatccaaaatcaagttagaaatccaaaattaattagaaaaataatgaaaatactaaaaacattaacatacctaccttctaaggtttgatcccaccaattaattttctttgaaccataatgaatgatctctttctgtaactgcacattcatatatgatcaccatgattaatatcattccatcgttattgtaggttgtttgtaagtctcgtttgcgcaagttgcgcat

SEQ ID NO: 61873 - DNA, 542 bp, Populus trichocarpa
  Intron number 3 from transcript POPTR_0002s13160.1 (locus POPTR_0002s13160) derived from phytozome v7.0 (chr-ID scaf fold_2; pos 9788864 to 9789405 reverse strand)
atagctttgatccgtatcaggtgctctttttttatgtaaagattaatttttgacaattttgaagttgagatggagcaatttatatttgtctttgattagctgaattttgatgtataagaaggctagagagtgttaaagaggaaataaaatgcttagatatgaaggtaatgaaaactgattgtgttgttttacgatcaccaaagatatgcttgtgaggctgcttatcaagttttgtgtatgaaaaataataactttactggagcgatgaaaaaaaaacagagaaaggagaatgatgtagcatttaatatctttttactggccttcttttataatttcttgttttaaattcatcatatcgttaaatttcgctcttgagaggagtaacatgcaaacttattttcttttcacgctagttgtgcttgactgcttgctcttaaaggttttcctgctttctgttaagacgtgtattctgatttgggaatcacctgttgctaacaccgcctatatgcaggaactactgaaagcacttattggatttatag

SEQ ID NO: 61874 - DNA, 469 bp, Populus trichocarpa
  Intron number 1 from transcript POPTR_0013s15190.1 (locus POPTR_0013s15190) derived from phytozome v7.0 (chr-ID scaf fold_13; pos 15208131 to 15208599)
ctctgccccagattcaaaggccacacctacatcgggtttgattccttctttcacttttttctgctttctcaatcttaagattggtgtcttctttggttttatgtaatttttgttgatcaatctataaagtattagtctttgattgatttataaatattttggagttttcaattaaaagaaaaaaaatcatcgatctattaagggtttgattgattagtgatgttgtgatcatatgttttgtgggcccatataatctctgtttcagatttttgtattggcccattacttgaaacccaattttaatggacaagttttttcctttatgagtatttaatttgtgttaacaaaaaagatttgatctttagcaagccaggacaagattttttctctcttttttcttgttttgatgtgtgaaagggctggaatttttgcaggtttacagtaaatccgcggcggagaattaggcaac

SEQ ID NO: 61875 - DNA, 776 bp, Populus trichocarpa
  Intron number 2 from transcript POPTR_0013s15190.1 (locus POPTR_0013s15190) derived from phytozome v7.0 (chr-ID scaf fold_13; pos 15208675 to 15209450)
gtttcccaactaacgttgctgctttgcaggttatttctttttcttcttttaactgtttattcactctctgctttggtttcatatagtaagttgaagcagttttatcctttacctttgtcgatgttagtctaggcagaatagcttaccttcagccaacctcaagacaatggccttggcagtttacttacaaatctaaagtgaaattgaggtggtaaaaaaataatgcttggatctgctccttgctatcatgctttggtttttggaagttcgcatttgcttgctcttgtttcggagtttctttatggtattaacttcctgtttttattttcacctctttctcccagcaagagactataaccagtatttaagcagcatgtcttaaacattttgtgcagtagaatggttggttgccgcctgatgggatgatgcgctattgatcatcttatcccgaaaataataaaaagaagtggtttttttcttcaatgaagttgtgctttgtaggcctgtggaatgatagcaaagattttttttaatcaaagagattaattattttaattatacatcttcaaaactgtctttaggaatgggaccaaaaaaaaaaaactcttcggaaatgttgtatgacctcgagcaaagttttattctgccaaaactagtccttgtctttacctgtaaaaccagagttttaagatcctgtcattagttgcaatacataagaatttcactcatatcgtagttgctaacatatgaaatgtgcatgcaaacctgcagtttga

SEQ ID NO: 61876 - DNA, 828 bp, Populus trichocarpa
  Intron number 1 from transcript POPTR_0015s05410.1 (locus POPTR_0015s05410) derived from phytozome v7.0 (chr-ID scaf fold_15; pos 5771105 to 5771932)
aaggctggggtgctgtcattgctaaaactgtgagctttttcactttatctcttttcttttcttttctgttcaatatatatatatatatatattcttctgggatagttttgatcgagtgattttggaagtgggaacatatcaatgctaatgtttaagatcacgatgttaccgttgagttttggctaaatccaggggggatcgaatggttcgaagtttggttatgtttgataatcatatcgattattgctgactgtggttttgttcgatcagttcctagacacttgttcaaatgggttgagtttattttatgcaaacacaagaatccatgattttattgatgttatttcttccttttcctctctgatattgattgccttgtctttgtcaaaataaaacatttactttttagtatcaaaattgtgaaaaaaaaatgaaagcttttcttaggaataatttggctgtttatgcaagatgttgatcagtataaagtagttttgttgattgtgtgagttagtaattgatataggtattgacagggcagttgattgaagaaatcgaggggctctgtaacttgatctcataagttaaatgttcttacaaggactatcatttgcaacaaccagtttcgaccaggatattttaattgtctcattttgaccacgtcatatgaatgaagtgcctagggtcacagtttctgtgttttattggagaaatctttctttccatcttatctgaagcatgttgtcacctttccatgctaagctatttgatctattcataaaaggaaaaaaaatgatcttcaattcttgatttgccaggtgtcactag

SEQ ID NO: 61877 - DNA, 726 bp, Populus trichocarpa
  Intron number 1 from transcript POPTR_0005s10010.1 (locus POPTR_0005s10010) derived from phytozome v7.0 (chr-ID scaf fold_5; pos 7098376 to 7099101)
acacgttttggtttattggttatattgttttcttggtaattgcagggaagcttattagtttttttcttgtcttttgttctgctcttgtgactatacaagtttaagttcttcacttttttctttgaaattgtacatggcatctgggttttgtttggtttgattgaaaggaacttcctttttgtgaaagatttgaaagagattatattgttttggttttcgttttctgggtttataaaaaaacacttttttttgctttaaattttatgttctgaattggttcttgattaggaatctgactctttttgtttgagtttgttatattgacgtgcttggcttcaattttcctagcaatcaacatttcagtttgtctgttgcgtgaaagttctataatcattatgggtatgggattatatttcgctttgtagtttattccatggaatgggtggccttttgattgaatgggagagttagtaaagcttagaacggattaagcttccaattactacaagttgtttggaaaaatttcggattgaaattgaagcttgaagtttttagtgttagttaacttttgggcttttgtttttcttgattcagcgtttcaatttatggttctttttttagtttttttactaaaagatgatgctttcataacctattttgttttttatttgtattggcaatctgtttgcagggtgatattacctagcagcacactgatttcttcag

SEQ ID NO: 61878 - DNA, 998 bp, Populus trichocarpa
  Intron number 2 from transcript POPTR_0005s10010.1 (locus POPTR_0005s10010) derived from phytozome v7.0 (chr-ID scaf fold_5; pos 7099371 to 7100368)
agacttaaagtgtgagtctttacacattatgtggttccttttgtgcataagcttgaactaaatgctctaatgtctctgggttttcaatatggtattatatgagtgttcttttgtggtcccttataaaaaaatgaattaaaatgcattttatattttcaagtttagaatagttgcctgttccttttggttgctcagcatttatgtgcattttatatagttggagaacattctgtatttatgctttcatctcttgactttttattagataatagtatatggggattaataatctagaattttagagtttttggagtaagtgtaatgaagaagtcaaacaagaagagagatggtgagacagaattggtagagttttaaaaggagctatggttcttctgtttacaccaagtcaatgtttaaggagagttgatgtgcttttgcactgcacattgaatgcacactattctatgtaattatgcgtgggataatcatgtatttctcgaattgcaggccccaggtaacaattgctactgcaataattttcaatttggtattatatgagtgttcttttgtggtcccttataaaaaactgaattaaaatgcattttatattttcaagtttagaatagttgcctgttccttttggttgctcagcatttatgtgcattttatatagttggagaacattctgtatttatgctttcatctcttgactttttattagataatagtatatggggattaataatctagaattttagagtttttggagtaagtgtaatgaagaagtcaaacaagaagagagatggtgagacagaattggtagagttttaaaaggagctatggttcttctgtttacaccaagtcaatgtttaaggagagttgatgtgcttttgcactgcacattgaatgcacactattctatgtaattatgcgtgggataatcatgtatttctcgaattgcaggccccaggtaacaattgctactgcaataattttct

SEQ ID NO: 61879 - DNA, 706 bp, Populus trichocarpa
  Intron number 1 from transcript POPTR_0008s02620.1 (locus POPTR_0008s02620) derived from phytozome v7.0 (chr-ID scaf fold_8; pos 1321226 to 1321931)
tagctctactgctggttctgattataaagtcacaggtcggctacaatttttgctatatgacagtaactgcagactctgtttattgttttttttctccttcattctctgtgtttttttaaaagacactctcttttggtgtgtttgataatttttgatgagtaatgatgtgattttgtttgattgatgatctgggtaattgggttttgtttcattttattgacagaaagttttttgttaaaaaaaaaatatgaaattgttttttcgtgtgtgtgataaatgacggtatgatatttaatataattgtaaaaaaaaatttatattgtttcgtgaattcattgattctcacttttcatttattttaaacaaattaatttgcttgcatcgtttaatggatgctgctttaagtgtaattttcgaattttgatttttttcttcttaaatccctgtgtttggtagagtgacgtaaagtataaagttttcacttttcttttagtgttgcttagtttagttgataaagtgatctacagaatcttatttatattgcaatgatctttttagatatttctatttagagcatatatatgtaaaattgtggttttaattcattaacgttgtcgctgtttcttaatgctgtatgtgcacacatgcgtgtgattgtgtttggatggtagaatctaaaatgagggtggtgcaggggtgctggcgg

SEQ ID NO: 61880 - DNA, 982 bp, Populus trichocarpa
  Intron number 4 from transcript POPTR_0006s19280.1 (locus POPTR_0006s19280) derived from phytozome v7.0 (chr-ID scaf fold_6; pos 18266950 to 18267931)
attggtgagctgaaaggagcagctaccttcttcttctttttctcgtacttgaatacatttcttttcttttgatagaaacgtatttaattggaattacactgcaatcaccaattttatgttggatattggaagatgattctttcaatttcaataggataaaacttgtgctttcttccttttactcttcccatcaatatgctcccaatcatagagccatgccttctatagaaagtagaggaaataagaaaaaaaagtgaggttgaaacacctcttgctcccctaagatcttcaaaacaattgaaactactagtggcaaggcagtggctagattctgtctcttcaattgtccatcatttgttaaataatactgtcaatgtttctttttttttttccttggtgattatatcaacccagtggtgttatcatgtgttttgccttctaatttctgatgttgacggatggatgccaaagccaggagaggcaatgctcatgcggcaagaagatataaaatggatagaaagacttgatagtgtatactttggattctcagttacagataatgtttttaggtccgcatgaccatataaaatgaaagcgttttcaagtttaaattttcattgcttagacatttttttgcacttgtcctagtctgtcatttactcttttctggctgctcattagaagcaaggtgaataagaaaatttttaatctatgtgatgacatcttgaaagatttgttcttatcgaaatcatggagcatgcaatcattttgttaaaggagcttaggtactttatagtcatggagtcatgccattgtattagtctttggctatatacactttattctgtgtgaaatcctctcctcttcttggctatgtactctttgttcttggttataaacttcgttgtcttctccaccactgcgcagcacacgtgtgtgtctaatttgaattttttctttgtgagcaggaaagctgaaagag

SEQ ID NO: 61881 - DNA, 703 bp, Populus trichocarpa
  Intron number 1 from transcript POPTR_0018s11700.1 (locus POPTR_0018s11700) derived from phytozome v7.0 (chr-ID scaf fold_18; pos 12350164 to 12350866)
gctctctctctctctctctctctctctcttcgaaggtcaatactcaatagaagagctgaattttcacaaggaacccgctgagcaaacaaaattccatgagatcatttcatataagttcagatcaccaccattggatcatcactctgatacaaaactctgatacaaaacgcatggagagaaaacagagctgacatggagcccacatttacttgtatttatataaagctcaacaatgtctggtccatttggaaggaagaccaagggaaaaatagacgtggaaaaacagagagagagagagagagagatttcagatataaataaatcaaaatggaacaatattttttgaaatccaagtgcttcaattctccaattcctctctaccaaattccttaaaaattaaaaacccacctctaaaaaccttacctcttcaaaacccagatcttaattttccttattttcatcaaattctttacctttttgaacccctatacctgtatgtcccctgtctcaagctctgtttttgttcaagttttgtttttttgaacttctctcagttccagaatcaggccttgtggttcatgtgtttatgagctttctgtctctgttctcttcatgatcttgtctatttcggtttctctttttaaagggctagttttttctatttttagctcaaccaaactacatccaaattaacacaacacga

SEQ ID NO: 61882 - DNA, 487 bp, Populus trichocarpa
  Intron number 2 from transcript POPTR_0013s09120.1 (locus POPTR_0013s09120) derived from phytozome v7.0 (chr-ID scaf fold_13; pos 8679294 to 8679780 reverse strand)
tgttcagagatccaaaccctctaccccaaagcgtatactagctacttttactggttttccatacaattatttaatgtggtaaatacggattttgtctcgatatacattaattgagatcctaaaaaaaaagagctttcatattgtacttttcgctgtttaaagtctatagggatatatgctgtaatattttcagtaaatgttattatttaattctttgaggaaggattattagctagtattttgtggatattcagtgctgattagtttgtatattctgtttcaaacacattgacagtcgaatcaaaatgcagcatgaatattcctcctaaatggaggagattagttctgttctttcctatgcgagggtttttttttgtgtgtgtgtgtgtgtgatttgatcgaaagtgtgctagctcttcgctgattttagttgaaaaataatattgaatgtgctgtggtaggagcagcaggaaggaactttagggtg

SEQ ID NO: 61883 - DNA, 461 bp, Populus trichocarpa
  Intron number 1 from transcript POPTR_0014s13180.1 (locus POPTR_0014s13180) derived from phytozome v7.0 (chr-ID scaf fold_14; pos 9707322 to 9707782)
gcccagcaaccgaagaagaagaagaagaaaggtcagtagcttcacttgactgtttcttttcattatttatttctcgaattctgttcagtttgattcttgttttcaactttcttgatcaaaggatactgttgtggttcagaaatcttgatacctgtcatcatataatcttttaaggcaggcatgtgcaaactcaatctctttgaaattttgtggatagcttattaagtagctcgactttaattatcgggttattggattgttattccattctacagttctaaaaaaacaaaacaaagaaaccctttgaattagggagctaaaaaggactatcagtctatcaccatcttctttttgcaggatatgaaggctccccagttttgtaaattttcctcaagtataaatattgtggttggttttattgtaaaatgtatttttttgctagaagaacttcggtagacgaa

SEQ ID NO: 61884 - DNA, 738 bp, Populus trichocarpa
  Intron number 1 from transcript POPTR_0017s03800.1 (locus POPTR_0017s03800) derived from phytozome v7.0 (chr-ID scaf fold_17; pos 2806042 to 2806779)
cggacaatctgttgtcaggtccagtgccagaatttgttaaagcaaattctgcatgtggtgtttttttggtcaattggtggtttttcttcatccacaaatgtgaattatgcaaaccaccctggcctatgtggagggcctttagatccttgcaaagggcatagcaacgaattttattcttctttcagaactgggtttgctgctggttatacggttttttctgtttcagtcattgttggttttgtgtccggctgtgtgccatgggtgcatgtcaaaaaaagaaataagaagattacgatactaacgatggtaatgctggttttgaggaataacaggaaagaagctgataatttaagtgcttcgccatcggttgagaacatacatggaggaggcaaagaggtactgactatatgattatgtgcatgtcaactttgagtggtttgcttttgaaattgattgcaggacttcttgcttttctttttgtcctgttattagacttttctaattatctcttatgagttttgagttaactattcatctgcggttacatgatgtcttaatttacagatagtcctaaattctttaacctgcttcaatttcaaggttaatacttgtgtttcttcaacaattagtgagtaatggattgggaatttctgtcctcagatttatatgttggagaagaaggttacaagaatgagctatacagatcttaaagatgcaacaaataatttcagcaaaaca

SEQ ID NO: 61885 - DNA, 928 bp, Populus trichocarpa
  Intron number 1 from transcript POPTR_0016s07460.1 (locus POPTR_0016s07460) derived from phytozome v7.0 (chr-ID scaf fold_16; pos 5344372 to 5345299)
aatccaagtatgttagtgggattaatttggtgattgatggaggctacagtttgataaatccaacactgccatcggcagtgaaaagcctactttcttgaaccggagagtgctagtaattatatatatatatatatatatatatatatatatatatatatatatacacatgataatttcacattgttgatggtcagtctcgagtttgagttacttttatttccattaccctcttgtttctttcgacattatgatttgtacagtatccaaatgtgccccagaattaaaatctaaaagttctgtcatcttttatgctatttgagagtttatatgtctcataaagattaagcttctcaaaaaaaaaaaaaaaaaggaaattattgagagattcccctctgaagacaacacgagattcttttggcttttaataaactccaattcccggccaaaacacaatttgtagacaaggattctctacaacattgtagaattgaaagggatatggggtggttttggtggccgcgattgccaagtttcatatccctatcaattacatggcctctaatctaatcaataacaataacaaggggtcaattgtgttagagaataatataaatcatatcttgggacctcacctaacagtttaaactattgggttgagatggttctttgacatggtatcagagccttaatgaccaagtggtctcgagttcgaatctcaccatcctcatttatttgataaaaattaagcacaaggtaatgtgggcctgtgcaagtttcaagttcaaatggctttcacttgagggggtgtgttagagaataatataaatcatatcctgggacctcacctaacagcttaagctattgggttgagatggttcatctgacaaattgaggtagtgaagaaatcttcacgccaagtgatagaacg

SEQ ID NO: 61886 - DNA, 228 bp, Populus trichocarpa
  Intron number 1 from transcript POPTR_0003s14270.1 (locus POPTR_0003s14270) derived from phytozome v7.0 (chr-ID scaf fold_3; pos 14381124 to 14381351)
tcaatacttcgacgaatctgctctctcagctcaaggtaacaattaatcttcacacctcgaaaccccaatttttactcattttctgcttaattcatttcttttttgtttttctttcttagtgattttatttcagttgaattgactagtaattagcgttaattgcaattaattttgatttttttttttgctgcaggtcttgttgacaggatttcgaagcttgccgccgtt

SEQ ID NO: 61887 - DNA, 759 bp, Populus trichocarpa
  Intron number 3 from transcript POPTR_0003s14270.1 (locus POPTR_0003s14270) derived from phytozome v7.0 (chr-ID scaf fold_3; pos 14381659 to 14382417)
ccaggtaattttttgattggtttcagttttcaaggaatcatgcgtgcatgcttagttttgtatttggggtagtgtttttattataaattacctgacataaactgcatgcttcgttaattatgtttccatagtttggtagaatggtgacttgaattccttactgagtctgatgagacattcagcacctcatagtttcaataactttattagtttgtttgactgtaggcaatgtggagtattgttacatgtagggtgtcagaaatagatatccttactgtgataggataattaactctattcttaatatgtcagtttgtacaacctagtgcaaaccaaggaatggaactatgttgcacaaggctcataacaaataagctctcctacacagcttgtttgatgtttcgagttttgtttcaaatgcttcattttatctgtgaactcgatttacttcccttttgtacgactttctcatttcagagtagaaaatattatatggtttgttttttagttgtgcatttggctctttaagcttttggctctttattaactgatctgtctggtttttatgtattagacaatactaaggtcttaactaaagaaatcatagaagagaagaacatgtgtagcctagacaaggaagaatttgctgttatctcttctttatttgccaatgttgagtgctataatgttagagcttgatttttatgatttattttttgatggagcagtagctgtcttccccaatctcctcaggagtat

SEQ ID NO: 61888 - DNA, 939 bp, Populus trichocarpa
  Intron number 1 from transcript POPTR_0003s08150.1 (locus POPTR_0003s08150) derived from phytozome v7.0 (chr-ID scaf fold_3; pos 9572660 to 9573598 reverse strand)
cgagttccaaaggcaaaagaagcgttgttaccgtatgaactgttgacttcaattatttttatcataaatttttctcttttaggtttaaattaacgataaaatgcaattaattagtaatttttattgttattgtttaaagcataaacattggaaagtggataatctaactgttttgcctacacttgtggttggggctcgctattgaggatatgttactaatggaatcttttatgggttttgagagttgggaaaaaaaaatcgagctggtaaggaagggttgcactgtgtttgcaattacatggagttgagattatttgcgattgaggatttgttattaatggaatcatcttttcttttgaattctttgttgtgtcttcctattagggaaggagtttctttagccttttgttctgcatgacttccccagtgctctcatttcccttaagatgatgccttattttcctccttatatttttcctctaacaacatatgaaaagtcagttagctggtccatgatcgttcttgattgcacacacatcatctctttccttcctacatccaagacctgggataggttatacatacctttccagctgttgttgtccattcaagaaatatcaaagtttcaaaatttgttgacctaggagtggctgttattgcttctgttcatgttcgtaacctggttgatctctgaaataaacattgcgtttgttaccataaagttttttgcagtgtggggatttgacaagctcattagtttgcgaattttttctaaatcatgtatcaatcatgagttgaatctttacagcattctttattctatgttcatgttgagttgaacctttatttcaactatatcattgaaaagttctcataactgcaagctcttatttgtctgtttgaatatgtccaggttattccatataccaggggaagtgc

SEQ ID NO: 61889 - DNA, 916 bp, Populus trichocarpa
  Intron number 1 from transcript POPTR_0006s25030.1 (locus POPTR_0006s25030) derived from phytozome v7.0 (chr-ID scaf fold_6; pos 23480220 to 23481135 reverse strand)
ctagcgacttagctcctacaggatcctcaagccaggtactttctgatgtatttatatctgttgttatttatctttcgatatggatttttcctctctatgcgacttttcttgcaagtgatgtttattagagttggttctgagcaagagaagttctggtttggaattagatttagtaatgatctagaatgcttctggttcgttagagttggtcttttgacttgttttaatttcataccatggctgttatatggttgttgagttgtttttggttgtaaattttatagtttgaggaacccttcacttaaattggtccttttccgtgtcatgtttaaggtggtttatttgtgtattgtctttcagaatttcttctcgttactgcttattagaagaataaaagcatggtttctatgtggaagcatgcacaagtggtttagcattatttttccttaagcttgatgctatggttgttgactatggtgaaggagccaacaagctattttctgtttaatgagtaatatgactaggttgaacattattgccatagaaggtaatgaatgtgttccatatggtgatgctgctagttggtatttatgatgtcttaactatgaggcattcttatgccattagctcctcggagagataatgatggtggttgatactgggtctttattgggatgtttaagagaaactttcacctgagagaaactatttgtattacataatggttccctacaagtttcaagcactggaaggggttatggtggtctgatataaacttttattctttggatgcgtgcatgtgactgcttcttgcttttgttctcttttaatagggatagtggttttaccttttctgatcgtcatgagtaattgatatgcagggcagtggccttgaaagacattttccttaccctca

SEQ ID NO: 61890 - DNA, 508 bp, Populus trichocarpa
  Intron number 2 from transcript POPTR_0016s07440.1 (locus POPTR_0016s07440) derived from phytozome v7.0 (chr-ID scaf fold_16; pos 5307352 to 5307859 reverse strand)
atagttcgaatcgagaagaagttgtcaaagaaaaggttagtttttttattcttttttcttttttgaattacatttggtgctttctttgtagtgttttatatgtttatgaaaccagaaaaggtaaaaagggaaagacccagttgttttttcttaacttgggaattgaagattttgttccgtgcatttatacaaggatttggtcaagtgggttccatcgaagaatatgggagagtttcattgttttttgtgtttttggaaagtctggatcagtgttggaatttcaaatttgtaagctggggaaacataataatgcgatatgattgatgattatccttggtgcagtgttagggagaggaagaggtgggaaaacaaattgggctttctttttctttttggttctttcacctggatgtattagaatcagtgctgaagataattacttgtgctttgatgcgttctggtaattggaagagtgtcaaacagaatctcttgcttttcttttccttca

SEQ ID NO: 61891 - DNA, 252 bp, Populus trichocarpa
  Intron number 2 from transcript POPTR_0009s12430.1 (locus POPTR_0009s12430) derived from phytozome v7.0 (chr-ID scaf fold_9; pos 10148747 to 10148998 reverse strand)
ctgctcaggtgtgcttaagtttcgtgttcattctgtgctcttgagtattttgattttacgaagaattttaaatgcatatggtcctgttaatcactaccatgagtatctgattgcatttgccagtgtagaaatttttttttcagtacctcagatactagttatatgaatccattttatgcctggtaatgaagtgagatttagctgtggaaattttgatttttttcttcttgtaagatcaaaaaatttggagag

SEQ ID NO: 61892 - DNA, 712 bp, Populus trichocarpa
  Intron number 1 from transcript POPTR_0007s01990.1 (locus POPTR_0007s01990) derived from phytozome v7.0 (chr-ID scaf fold_7; pos 1150562 to 1151273 reverse strand)
agcttcttgctgaagagattactgccttgtaagtggtttttgtctggaattttgaatggaattgtttagagatatattcgtttctactagatcattgttttttctagttcatattttgatttggaagccaaaggaagatgctttggtgtacttggtggtttggttcaaaagtttgaatttcagcatgttgtttttggaacagaagggtgtaaggcttcaagttggtgatcttcactgccttaaaaatatttgaaatttagacttggtttctaatgggatgcaccataaatatgggctcagacgacaaataataatatattttgctgacgaatttgaataggttttggaatcggatattcacttgaggatcattacaattgtaattgagatggttttggacctttggtgcattgaaattgttagtgtttggatttaaagagtatccgaggacagattctacttattcattcatatttttcgggatgcttttaattcaaataataccttttgatgatggcctatggcattctttgcaaatggaagaaaagctttaacctttaaacttttccaatatttaaagtattactttgatggccataatacgatcagaattttgtccaggttgtgcccacttttgctttcattttatataaggatttacttttcacacttgtgtctttgtgttttattctaatcttgtatgcatttagga

SEQ ID NO: 61893 - DNA, 421 bp, Populus trichocarpa
  Intron number 2 from transcript POPTR_0009s14140.1 (locus POPTR_0009s14140) derived from phytozome v7.0 (chr-ID scaf fold_9; pos 11150114 to 11150534 reverse strand)
ctttctgagattggaggaaagtgcgcggatttgaggtaaaaagatgttagaaaagttttttttttttttccttcttctgactgtgcatgcattacttgcccgatgggaactgttatgaacttatggtaaaacgttcagaaatgcaatagaaaatgtgggttcatgttgatgtgtgtgtttgcgtgtgaaatgcaagcagtcgtggctgacactagacactagtagtgatcaaagtttaatgaatatgcaagaaaacatgggtttgtgtttgtgtgggttatcttggggtaattgagcaatgtgtgtgatggtgatatgtgattatctggaagtgttagatttgttgcgttgttattggttttgtatgtttttgaattttggttcaggtatctgtacttgggatcggtggcggaaaaaagag

SEQ ID NO: 61894 - DNA, 443 bp, Populus trichocarpa
  Intron number 3 from transcript POPTR_0013s02960.1 (locus POPTR_0013s02960) derived from phytozome v7.0 (chr-ID scaf fold_13; pos 1796290 to 1796732 reverse strand)
ggaagttcaatcttgactctagagaaaatctctttgttttataaaatcggaataatatgaagtctaacgttaaaaataacacgtatgctgttcatatgatggctgaaaccaaccactctatatatagaaaaaaccaaatcaaactcttcaacttggttaaaaaaaatccaaaaaagtaaaataattagaaaattaaaaaaacaacatctccagagtctattttgaggtcttcttgacctcagttagtacaagagggctggtttgagctcgtagaatgtcctgaaaaaatttaaatcccacccaatgatcaaataaaaagttacaactgtttttgtaagaaatcccgtgtgacatgtctggatttcttcttgagctttatcttacttatctagtcacagtgaaatttagacacacaacttctatactacaaggaggttgtttgt

SEQ ID NO: 61895 - DNA, 970 bp, Populus trichocarpa
  Intron number 1 from transcript POPTR_0010s17020.1 (locus POPTR_0010s17020) derived from phytozome v7.0 (chr-ID scaf fold_10; pos 15774241 to 15775210)
gcggttacattgtcatcaagaatcgcccttgcaaggtctagtttcctcatatatctcatttcccccctcttattttagatctcttttttttacccttttattttagatctgtatgtattccttctgttttgtttaattctgtttcagatttatacatattttcttgtctaattctgtttcagatttatgcacgccttttatatgaatgttggttgggaatggattatttatttttcttgtgttatgatttattttttgtttagttctgtttcagattcatgcatgccttttgtatgaatgctggatcggaatggattttttttgtgtgtgttgttttgatttggattcttttcgatagtgtttttaatggtttggagccttatcgtcagttatgttctgtgttggaagcggcagtgaactttacaagcgaacgtggaaataaataaatcatttagatctgataataaactgttaagaaaatttgaagtgtttttgtcgaataataacttgggtaaattaaattcacaggcagaaaccctactgctggtgttagttttgtgaggaaaaaaaatacataaaaccagcaacatgatcgaactttaatttgagtttgatagaataaataatttgcggaacctaggattttaggatggttggactaattatataaatacgagttcggtggaatctgctcataggctatagaaattattttgtctgctatatttggatatcttgccatggaacgtgctgcattttttgctatttattttgaaatctgaggggctgtttgtcgtatgtaaaattcattatatcatattattttaaccatcctattggttctttagagttgattgtccttttccttttcattcctcttattggttttttataacaattcttaacgaggacatgcttttaattttctttcacaggttgtggaggtttctacctctaaaactggcaagca

SEQ ID NO: 61896 - DNA, 443 bp, Populus trichocarpa
  Intron number 1 from transcript POPTR_0006s16000.1 (locus POPTR_0006s16000) derived from phytozome v7.0 (chr-ID scaf fold_6; pos 13775099 to 13775541)
caacttctgaccagtggtatagatatatatatacagcttggctttcttttcttgaaagttttaatttatgctttgattattactgtttcgaaactaactgtggattcaagattatatgcataaatggaattcatatatatacacagaagattaattggctagataatcatgtgatcatttggatggattttaattctattctttttctttatcctctttcgtttatagaaattctagttagctttctatcttaattttttactttatttattgagttcgtttctttgattttaaaagcagccagttaaattttgacatatttttgttaagaggatgtgagacctcatgcatagtttagtaaatggtaattccttaatgactaaatataatttccatctttcgactcagctgtggagacttcaaggcagaaactacaagcatat

SEQ ID NO: 61897 - DNA, 511 bp, Populus trichocarpa
  Intron number 1 from transcript POPTR_0001s07000.1 (locus POPTR_0001s07000) derived from phytozome v7.0 (chr-ID scaf fold_1; pos 5348338 to 5348848 reverse strand)
ccaccacctgcgcctccctcctccacgaattgcaggttcacgacttatttcgcttatttttgagctagtgattgaaaataaatgatttctattttattttatagtaaaaaataatggaatcactgattttagaagtttgtttttgtgtttttcttctcaattcttttattttactgattttaattggtggttggtagtgtggaactcaagtaattgaatttgaatttttaattttattttattataaaaaacaatggaatcgctgatttagaagtttgtttttgtgtttttctccttaatttatttattttactgattttcattagtggttggtagtgtgaaattcaagtaattgagttttaattgagtgaaatggaagagatcagacactaattttggtgaaaaagaagagttaagaatatgttttgatctatctttttttgtagtttttgagatttattggtttgttttttgattaactgtgtttatgctggtatgtagataattaggg

SEQ ID NO: 61898 - DNA, 471 bp, Populus trichocarpa
  Intron number 2 from transcript POPTR_0009s09320.1 (locus POPTR_0009s09320) derived from phytozome v7.0 (chr-ID scaf fold_9; pos 8300969 to 8301439 reverse strand)
ctaaggagattggattcatcaaggtaaactcattgactagcctttcgttatctagtttggctgtaatctagtttggcatgttaattgattagcctatggtttgttgataatcgttttcattctatgcttatgtctttttttgcagtaccgctgaggaagagctggtagctcgtgacccactagacgagcagaagatagctcgcttttgttttatgcagtacaagatacctcgtgtccactagactagtaggagatagctcccgcaccactagaccagcaaatgtgttttgcgcaaatatgattgattataatttttatgtttgaattaactattaagacaatgttttggttagttgatttgctgtggaacttggattgatgttggaaatggaatattttcaaataatctcctatagcattatcggtctccttttcataattgatttgttcttatccaagcgttccttttga

SEQ ID NO: 61899 - DNA, 549 bp, Populus trichocarpa
  Intron number 1 from transcript POPTR_0009s09320.1 (locus POPTR_0009s09320) derived from phytozome v7.0 (chr-ID scaf fold_9; pos 8301497 to 8302045 reverse strand)
caccccaagaactacggccctggttctcgcacctggtaatcgatacgagaaaatgaaagtataatctgatatcaaacctatcttgtttaccttatgacaaaaagggttctatcagttttccttcttatgcttcttcactgtgcagttagttttgaaagattgcttttttatattatttctaggaaattgtccagttgttgtcatgttttgattatgtaactgggatctattattgttgtgtttgaatatcccagaaataactatttcctgttttggatgatttagcgtttatgagcactatcatccagtgcttaagatgatggttttagctatttggtcggtagggtttaattttgaagttcgatggttgctaaaattgattttaccaataatttctggatagggtttcaaagtggatccatgttgttaatgtcttcttatttgtgacatggatggtttagatagaagcatgagatgttggtttatggattctgatgtctgtcatgttgtttttttgttgatttatcagccgcgtgtgtgggaatcccc

SEQ ID NO: 61900 - DNA, 510 bp, Populus trichocarpa
  Intron number 1 from transcript POPTR_0002s00440.1 (locus POPTR_0002s00440) derived from phytozome v7.0 (chr-ID scaf fold_2; pos 161873 to 162382 reverse strand)
ccgttctcctcctcctcctaaggtatgtgtgcgtgtgagaagtagattggattttgactctctcatttcactagattttcttccttgtaattaccaatctcctattttattctttcacagctcaaaattaacaatttttgcgacctctatttataactcaataataataataatttttttctaaatttatccggtatagaacgcacctctacatgaaccagacaactgcttgcccctgcttactttattatctgatagagaacatacttctacataaaccagacaactactcgccgcccttgcttactccagacttggattggaggctttctttttttttcccgcaaaaaaaaaaaagcaaaaagaaaaataaaggaaatttctttattcagactgatatattttatgagtaattctaattctgatagaaaacccatttggattttggtttttatctgtttatttatgtatgtaggctttattatttgtgagggcgaggccttttcaaag

SEQ ID NO: 61901 - DNA, 785 bp, Populus trichocarpa
  Intron number 3 from transcript POPTR_0006s07240.1 (locus POPTR_0006s07240) derived from phytozome v7.0 (chr-ID scaf fold_6; pos 5197446 to 5198230 reverse strand)
atatcttttcaaagaagcggggaaaagagtaagtacccttttttttgctcctttactatccttaatgcggcttgcttgcgattttgtaacaacagtatgacatgttttaattaggctgcaactatggttatgtttgattttttttcttatggatgaatgattaccattatatgttttcactatctatttgagttcttgtttcaattacttcgactagggtggttgttaatttcctttttcatcactctttcactaacttctgtttgtatttgttgcgttccttttcgtttgctgtatttagcagtattgcatatcatttctttgttcaaaatctcagatatgctgtttggtcttttaatcatttctttgtttcattttttcctcatgtttcttttttgttcactcaatagttcaagtgagggcatcgtatccttcaatctcaggcattcctttttcttggtcttatttattttttatttgtattccatgtttctcatttaattgaaggttactctggtgtagtggtactgcagcagttttgaagttatgtattgtgtattgtgtataatagatcgatttcatgttcatcttttggtgtgttagttgaatgggtattttatgatttctgtttttgtctgagatgttcagtgccctacaggcttttaattgtgttcttgtcacaagtagcatggttctgaatgttgtaccatgctggttgtatgtgaaccaactggaatttgtgcttgacaggaaccgcagaattacacattctgccacccccagtt

SEQ ID NO: 61902 - DNA, 735 bp, Populus trichocarpa
  Intron number 1 from transcript POPTR_0009s11290.1 (locus POPTR_0009s11290) derived from phytozome v7.0 (chr-ID scaf fold_9; pos 9439273 to 9440007)
gatcgctgcttttgctgctatgtaagcgtactttgaagtttgatctcttttgttttttaatgtactcagcacatatagggactatctgtttgttattttattatgatgatgttaatttaagagatgtctgcctgtcagtgtagcagcattaatctaccgaatcagtggcaaattaagaatttggttgtttgaaaagtgaacatgttagccttgaatttggttgcttatgctgatgaattattgttgatatttttgaataaccgtgtgaaaccattatcttaagctttagtatgtagcgattgcataattgagctatgcttcttaattcagtacaggtggtataattgtgcttgtgtctaaagaatttcttgagaattgggacttgcaaagattaacttcttgatctcctacccttacaaatttgtatttcacaaatataatggctggtatatatgagatttcttgtaaattgtaattgctctatcaaaatttttgaagaacatgattaattcagcaatgaatgctatgcacatgattagtttttcttcttttcctcgctgcaaattaaccatcttatattctgtttctccagtccacttcttttctgttgctttggtgctggattaatataacttggatcacttcgatgtcttctactatgttttagcctgatatgccatccttactgtgctccttgcagttatctactgatcttggatcgaacgaactggaaaa

SEQ ID NO: 61903 - DNA, 987 bp, Populus trichocarpa
  Intron number 1 from transcript POPTR_0014s06810.1 (locus POPTR_0014s06810) derived from phytozome v7.0 (chr-ID scaf fold_14; pos 5130168 to 5131154)
aacagaaaactgaccgcttccaactccggaacaaagtgaggtgtccacgcatacaagaaacacagagcatgtgctaaaagcaaactttgaaaagtataataaaggaaagcacaatcaagatgtttttactgattttttttgtgaattgaaattgttatgatatcccatgtaatcaccattggaattctggtgcacacatgcattgtaattatacgtaagttatggtttaactattaagtaaagctctacatatttcgatctatatatatatatattcggtggccaaccaatcatagacttcaaaataacagcataaaaaatgggcatattaaaaataatattacttcctcaaatataagtgatagtattgttgttggtatcggataataatctaaaaccatattaaatttatataatttataactatttgaactatagctagtaatatcaaacattaaccaattctctcatattcaaaaaaaataaaaaaatacataatttaataaaattcaaccattctcacgtattctcttaaaattattaattctcacaaattctcacaaaaaattatcaattacaaaaaaaaaaaaaatacataatcactaaatacccaattcattaaatttatacgtagttgatgtaatttataaattcaattggtataataatatctaattaatataatttatacctaagttactggattcaggtaaaatataacatcacaaagtaaaccctaacataacgataaacttgttagtgttactcaattaaccgtcactttccttccaacctacacagcgttgtctatgtgattatactacttctactgggcagaatccattaaaatatcaacatccatcttccttgtttcacgtactgttcaactccaacatgacctccattgattttctccctgatccgttcaaattctcagctttagttccaatcctatctgtactcatagcccaactattcactagaaaa

SEQ ID NO: 61904 - DNA, 770 bp, Populus trichocarpa
  Intron number 2 from transcript POPTR_0014s15780.1 (locus POPTR_0014s15780) derived from phytozome v7.0 (chr-ID scaf fold_14; pos 11845935 to 11846704)
aacttctgtagcatctgttgctacagcttgggctggtgagtttttgttctaaaataatttatgtttagtatctttgtttttccctttctttattgctttgtgggctttatgtttcgtctgaagcgatttttagggttttcaattttctattaagttaccagtgttttaaatgggagtttgatgcatcagtgtgaaaaccagaatgagtcccatacggccaaaaaccgttacttcaatttagtgtgtttagtttgagaaaatctaaagaatgaattctaatggattttgctattacaatgggcaaaattttattagcaatgacagcctcaataaaagaaaaccttatttatgcaccaaattcatttgggaacatcctcctcttccaagagttgcacaacttagtttaagtttataaactgattttcacggtccatcctccatccattgatcaatgtggccaaatattacaaaaagttttttttaaatagttagtgatgggcatcgtataaattgaataaattatgttgcatggttttgcaattaatctatacagttatggctatttccataacaaaagaaagaaatgtttgcttgtatatatcaatcatgatcaacacattttgctcagtgcatgtttatttttgtgtcaagataagtgtttgtttccaatttatgggtgctgaatattttttcttcattactccagagtatcttattagtactcataatgtgcagggtattctttacaccatctccgtgattcaaaagtt

SEQ ID NO: 61905 - DNA, 579 bp, Populus trichocarpa
  Intron number 1 from transcript POPTR_0001s41670.1 (locus POPTR_0001s41670) derived from phytozome v7.0 (chr-ID scaf fold_1; pos 41373872 to 41374450 reverse strand)
cttgaaatcttttggagaaaatctcatagggccaggtaaattattgtttgctacactctcatttgattattgcatgatgttcttataactgtaacattgatatttatttatttatttctcactggtaaattccctttgaacttggtaaaagagttcgaggttttgatcagaaaatggtccagaggcctgctagcagtatccacctaatcgcttgttgtggactcctacataatttgaagccatgatttcccttgaaaaataaaatactatgaacttattctctcgtatgttgattatttagcgaatacgcacactctttagctcaccatattctgcaaatttgtttctcagcaactacgaaactgatcctgaaaactcaagtttgggtttcggttttcaattgttcagttatcttcttctgtatgtttgaaaactgaataccttttccttcttacagtttaatctttctcttgttatctctaaacaaacgaatatagtgttcgtaattcctgttttagatatagctttccttcaccagtcagtgctcgtgtcttcagggctgcaaaagaaaagggagag

SEQ ID NO: 61906 - DNA, 581 bp, Populus trichocarpa
  Intron number 1 from transcript POPTR_0002s08470.1 (locus POPTR_0002s08470) derived from phytozome v7.0 (chr-ID scaf fold_2; pos 5923518 to 5924098 reverse strand)
ggcccaacaaggacttccttgtcaaatcgctccgtgtatgcgtatttttcctttattttcacgaaaaataattcctcgcaataacacaaaaacccttggttttgtactgactcgattttgttcactgtaggcgtttattcaactgtttttagtaattcactttagagaattcgggcttgcttccagtttctctaagtatttcgaattcgccttttcttcatgtttttattttttgaaaaagttgaaataacgtgtgagttttctcacatatattatttatttacccgttaatactagtattgttacggaatcgggatcgattaatttataccttttattttttttctatttaataatcactagctggtttctccaagaaaataatgctgatatgtaattattattttttgtctattttgaaaatttccggtactgaatcaaatctgatttcgattttctttttaatttttgaaagtaacgtgtaatatatgagattttctctgcacatcattatatatttatttgtcaaggttgtttagatttggttaattttaataatttttatttgtagcaagctgcaa

SEQ ID NO: 61907 - DNA, 547 bp, Populus trichocarpa
  Intron number 1 from transcript POPTR_0006s07130.1 (locus POPTR_0006s07130) derived from phytozome v7.0 (chr-ID scaf fold_6; pos 5121065 to 5121611 reverse strand)
gacttacaacagtgttggtggtgatagagctcgtaatttcaatttctttcttttgtttttttatagtttttgcctctctttttttttccttttctgtttttagatgtttgaagttaaagttttgtgcttttttattggagtaagttagaattgaatgcaaaattaaaattccattttgatttttacctcaatttataagattcctgatttctggtttttttaagggggttttgtgatttttatttatttagctgaaggggtaaatgcaaaattaaaaaaaccctgttaatttttagcagaattaaaagatccctgatttagctattcagtttttaaaataggttctttgaagatattaaatcttggggtttgttgtttgattttgatagttttaaaaacaaaagaaagaaaagatgggttttttaatggctgtaatgtgttaaagtttatttttcttaaaaaaataatgtgaccgagatgcgatttgaattgaattttcgtgatcgaatcagggcttttctttgcaatattgggagtggtgctgttt

SEQ ID NO: 61908 - DNA, 997 bp, Populus trichocarpa
  Intron number 2 from transcript POPTR_0011s16790.1 (locus POPTR_0011s16790) derived from phytozome v7.0 (chr-ID scaf fold_11; pos 18559274 to 18560270 reverse strand)
cataagcaaccctttgtcattggtgagttagtgagtgttcactttgtcgattttgtacttgtattgttttgatataggttttcagtgaattctttgattggtttataccgagtggtgttgtgtggttctcttcttgttttgtgagatcaatcattggtaatgtgctgactgactagcaatggtcgctgaaattcaggatgtatgatcggcatttgcaatgatcaagaaaagtcctttcatcaaaatgaatttttgaatttctcactcttaccacgtttcggcatgtccatggagatagtgagaagagaacagattagagaaagctcatgaattattgcatttatttattatcagctcaaaaacatgttttatgcctgggtgcatgcaaattgtcttatgtacattttgataatgccatatcgaagttttttcatattggtttggctgaacattgcacttgttatctaccttcttctattagaaacttctaactagtctactcttacctatcagttgaatgtttttgaacagcatatatttgccttctctaaccagaaaatgagaacaacagaggatacacgagtttggtgtgcagagcatagacatttgaagtgtgaaaaaatgaattgttatgtgggtaatgcaattggaatcatctaatagggagttggataacagggatgtagagtaatctcgtactgaattttgctcttaaacatctcctagtcaatcaagaaatgggtgacattggtttcgatgtagatttggtgaagcaaattaaaacagcaggattaggtgggcaggagggatctgatgttaaagaaaaaatgaaatatttctacatctataattgctgctgatgcattggtttcttctaattttttcatgggaccatgtattcccttttcacctttttgatatattttttatgaaatgtgccatttttactaattgtggtacaggagttgctggtggagcggcttctgggaagactaca

SEQ ID NO: 61909 - DNA, 988 bp, Populus trichocarpa
  Intron number 2 from transcript POPTR_0001s37450.1 (locus POPTR_0001s37450) derived from phytozome v7.0 (chr-ID scaf fold_1; pos 36440252 to 36441239 reverse strand)
tatcctgtcattgatatattataggataacttgctataatagatttccaatgtgatattgtgtatgaaacgttatgtacttggtccaattacctttggtcttgtatgagtaatgctttatgtattttctcaatgtgttttgtgtcacatgtaagctgtcattgatatattatatgataacttgctattattgatcttcaatgcaatactatgtatgaaattatatatttaggccattgatcaatggtcaattacttttggtctagtatgagtaatgcttaatgtatcatggtttggttgttattttatatccttgttcctcctttctttttaaaattatcttccttactggtcatgtataaggttattaactttcttcttctttaatgtttatagattagaacctcatttctgataatttgcaattgaaatctttctgaactagccttaggtgcattatttattaattgtctcctacaggaggctggtcggcgtgctatcttttacaaccttcagatttattcaatttgttgatatttttattaactagaatgtatgataagccctatcaaatgcagcctggaggcatgaaggctgctgaacacaaagcaccagtgtcttcaggttgcatttggaacaagcaccatatggatttgatttattgcaagattctggcagtattttctggaacaattatgcacagcatcatggaaactagttctttattttatctggtacaattattttacactttctcagcaagatttaatatgtgcacttttaataacagaaacactacaaggtgtagaatcagtaaatgggcttggtggtcaacatatgcaggtaagatgctgaatatactttttcttggcacatatctgtatcattctaatattaatgctttgatgtatctctatatgtgaattgcagggctgtcttttgaaaaatcccagtggacatgattcagacatcgtgtggtcaggcattgc

SEQ ID NO: 61910 - DNA, 576 bp, Populus trichocarpa
  Intron number 4 from transcript POPTR_0003s19820.1 (locus POPTR_0003s19820) derived from phytozome v7.0 (chr-ID scaf fold_3; pos 18442361 to 18442936 reverse strand)
ctgacggtattgttttgctttatccttgtttctattctggtttttgtcctttccttaatccttggcaaagaagggttttcttatttatatgttgaatgtgtgtggatacaattatctgcatagttccctttaaatgccatatttgtgaaaattggacatctctcaattaacaatccttgtccacgtgttgaaaatgtattatggatgctgacggtattgttttgctttatccttgtttctattctgttttttgtcctttccttaatccttagcaaagaagggttttcgtatttatatgtagaatgtgtgtggatacaatcatctgcacagtaccatatttgtgaaaattggacacctttcaattagcgatccttgtgaacaaaaatgttctttttgtagtagttaaaagggacctgtcatcaaagtttgacgtggcattctaggttattgttgggttgaacttttgttgtttgattctattgcagaaacttgcttttggacatataaaagattgctcactattttctcccctgatttttaggtctttagctgctttggtcagtatttttgtctaca

SEQ ID NO: 61911 - DNA, 978 bp, Populus trichocarpa
  Intron number 1 from transcript POPTR_0003s19820.1 (locus POPTR_0003s19820) derived from phytozome v7.0 (chr-ID scaf fold_3; pos 18444839 to 18445816 reverse strand)
tagtggggtttcgattgcaaccaaactgtgccaaggtaacatcttttttgtaagttaatctagtttttgagcatgttattcgagtatcctatctgggttttgattttttgttgattgatttggtttttttagtatttggagtcgtaaagtctgcttcttttttgatgtcaaagctccttttggaatattctagatctatttttttcctttagatttgcatgtgtgtgtttttttttcgttttttttttggcatttgatgattcttccttttgttttatttgatctacttagtggttatgatgtagtcttgaggaaatgtatactgtatatctctcatgtcaagtacagtttttgcttgagtggatattattatccagtctccttttatagttctctacttggcaaagtttttactggaaatggtcttgctgtggtgattttttttgtctggtgtgtaatgctgggagcgtgattaggaacttatggtgtcacactgtggtaatgattgtaatgtggtaattccggtgtgtaaacctgatgtggcttttttcaaatgcatgcattcgtgttgtatatatgatgactagttaggtcacggggaataaattccttaatttgggaaggtgagagtaactaagtaatttgtgttgtacatcttcaattccatgctctttatggtctataagggcgtttccttagattcgcatgagtagatgaatcatatgatgactggttaggttatgagccttgtttttgggagatatgttgccatttctgtgatctttataaagggtcccacttggttgctttgagtgagtgaactgattgatctttataatttgtcttgctcatcacctgtcatgaattgctcgtttttcctgtgttaattgtggtacatattgttgccttctattcctaactttttatttaatgtttttgatagatcgaggagccataaattgtcaatacgctgaaaga

SEQ ID NO: 61912 - DNA, 685 bp, Populus trichocarpa
  Intron number 4 from transcript POPTR_0015s03080.1 (locus POPTR_0015s03080) derived from phytozome v7.0 (chr-ID scaf fold_15; pos 2600800 to 2601484)
aagctcatacatgtattgtttgcatggactcaggcaattcttatatggtggtatgatgtgtcattagtgagcatggattctttgagtctgggtattatcatttatcaaaacaacaaattctttaagcacaatatgtgtaatggtctagagaggcttttccatatctcatggtttgatgctttaatatttcctagttagcttaagtcttttaattgaattagtattttactatttagaaatcctaatacttttaatgttgtatctcccttttggtgttttcatttttcagctctttattaactaaaaatcctatctcagccttccatattccataaatatcaaaattacccacataaccgaggccttccatattccataaatataaaaaataaccgcataactaaggtagaagaattttctcattccctcatgatatttgatctagaatgagactgttggaagatttgtctcttttgataggcatgttcttcacttctctcatgctttagaacttgttttgctttccgtttattctaaattcttctttcatcttaattacaacctgtcttctcctaatgatataaactgcaaaatgttgattgtcgatgtttatttttcatttttaaagatgcaagtgaacattatattctggatgtgcaggctaattgtgctgtttgcaaggtag

SEQ ID NO: 61913 - DNA, 585 bp, Populus trichocarpa
  Intron number 3 from transcript POPTR_0003s09980.1 (locus POPTR_0003s09980) derived from phytozome v7.0 (chr-ID scaf fold_3; pos 11127507 to 11128091 reverse strand)
tatataacaagaaagacaagtataatcggatcacagtaagcagtttttgctcttagtcttagtttctaaatttgtgaattaagatgctttccttttttcttcccagtagtccagttattttttgtgttgctgttttataaatcaaattataagaagctaccatctgctctatagcattaccttttcatttgcctttgcactaaagttttacctttggactcctgggtggtgcttgctctttactctgccactgatagattagtttaaattttggtttaagattttggcagctttctattgagagctaattctcttggtaaattgatgatcacctaagatcatcggagcttggaaactggaaaaaaaaatcatgagaccaccctgccttttcaatcctgaatattgaccctcatttattctagttattataacagcgcctcttcttgttatctgccataaaaatatgcagaaatgacatatttccatgattacaacatgattaaccttcattagttgttcatttgttgtggcatcataactttaagtgcaaaaatacaaccttcgtgcgctgttttcttgtttcag

SEQ ID NO: 61914 - DNA, 700 bp, Populus trichocarpa
  Intron number 3 from transcript POPTR_0018s07040.1 (locus POPTR_0018s07040) derived from phytozome v7.0 (chr-ID scaf fold_18; pos 7206466 to 7207165)
gagcagacactagtgcaatcatcagctacattgaggtctaaacgaattttgtttccttaaaatgttttctgtttttgtatcttatagtcatagatttcccatcgagattggtttgtacttgcgatatgggacatgaatctctgtgattttgttagctctggcaatcatgtagttggacttgatgtagaatacatatgggttgtatacatttgttttcttattctttttgagatatgagctagaattggacttgctaagtatatcatatgttaaactcctagagctgcaataggagaaagagaaccaatgcccttgaaatccctctcatctattatgttgtgcatggaaaggagagaagaaaattgttaatattcctctgattcataaacagtatcaggagcaagtcatttcatccatatcccacacccctgggcatgcctcagaggttgctatcctgagaaaggaaaattaaaggaaaattaaaggaaagaataagaaaccacgtttctggatgagattagtgaatgattatgaaaacgtaaattatgtaaatcaaccattagttgctcgttattatttcttatttaccattggtgatttttccagctctatgagttttaagaaatatgatgggtgtgtttgttttttctcgataattcacacagagaaggcaagagttaccacaaaattttagaaggca

SEQ ID NO: 61915 - DNA, 700 bp, Populus trichocarpa
  Intron number 1 from transcript POPTR_0003s12030.1 (locus POPTR_0003s12030) derived from phytozome v7.0 (chr-ID scaf fold_3; pos 12707671 to 12708370 reverse strand)
tggatatttacttccctcctacctgtgttcaacaggtgattttagatttcatccctctatctctcattctcaatatcatcaatcttgtttctgttttctttacatggaatggaggttttaagaaaattcaagaaattaatttaatttttgttttcaattagaatcaggattctaataatttgtagtcatgatatttaaggtagtgttttgttcggtagatattggttttttgaagagtttttttatttaaaaatatattaaaataatatatatatatatatatatatatatatatatatatattttaatattattaaaaaattaatttaaaataaaaaattcaaatcttttaaaaaatacattgccaccgaaaaaacaaacacatttagtttagagtatgttttttgaaagtttgatatttaaataaaaggaggagatctttgcctatcttccccatcattttttgaaattttagtatttattgattaaagttttgattgagattaattaactatgataataattgtcatttttgtttcttttacttatttattttcataactattaatttcacaaagaaaagggagtttcagattcattaatcgcttgtctctgcagcatgcaagagcatatctgctttgttttctcaattttgtgatttgggttttacatgtaaaacaggaagccctggaggcccacg

SEQ ID NO: 61916 - DNA, 636 bp, Populus trichocarpa
  Intron number 1 from transcript POPTR_0009s03920.1 (locus POPTR_0009s03920) derived from phytozome v7.0 (chr-ID scaf fold_9; pos 4515870 to 4516505)
actgtctgctgatgagctctcttcacttgctccttctgtatggagtactgtgtgatgaacttttgagtttttttttttttttaaaaaagggaccatgatggagcaccgtaacacagcagcagtgtctccaaaataaacgatggatctccaagagtaaggaggttcaagaatcaggagatcatatggtaagaatagagaccatgagacttcagaggaccagccaataagatgatgccatgagagcaaataaaaaaaaatatggatacaatgtgaccaaatatacaaaaattcgagtagcaaattgaacactggttcacatcttgaagcccaaatcactattactatataaaatatcaaagccccaccacagtcccaagtcccatccttgaccatatatctccctctacctctcacacactcaactgtttctcactctcatacacatatacatacaaagaagtatcatatcatattacttgctattactagctagtcgctactagtttccaaggtttagatggctgagaagtggaagctatcgaagaaagaaggttcatcttctttcacaagaagtttctcaacaaagagttcgtcatccaaggctcctctcttgaggagctcatcccttaaaatctc

SEQ ID NO: 61917 - DNA, 863 bp, Populus trichocarpa
  Intron number 1 from transcript POPTR_0017s09420.1 (locus POPTR_0017s09420) derived from phytozome v7.0 (chr-ID scaf fold_17; pos 8017378 to 8018240)
aaaaacaaattctttggtaagtttctctttaaatacctatgatagtttgagttttgtttgggttgaactttgtgcttaggtctaataggctaagaatatgggtcttacatatatggtgagcctcctcaagagattttcaagacctttaaataggcaagaaaacctataactactataaaataacttaaatttcaaaggcataaaaggaaattaaaatagtataaaaaatccaaaaaatcatatgaaaagtaataaaattggtccaaatagcaatttacagggttaattttgggatatccaatgattttataagcaaaaaaatagtttcacatagaaaaactgcttgtaaaatctcttagaaaaatttaaattcgatctcacgatcagatctcctattatcgtagttttaagttactaatctaatttgacataattatatcttcttttaaacttaaatctatttcactgttccatatataaaagcatttgctaaaccatgaatataggtttgatccctacatgaatgctcctaatctccactttttacaagcttgacttcatcgatcaaatatcccacgacacatcaatgaaagaagatgaggcgtactgatttttaggttgctatttcttctcgttgtttaggaggggcaggagaaccccaaatgccaagtacaatccattccttgctttctctgcataaccactatattcatgatttatcagaagtctaatttaatataaagtacaatataatcataattaagtctctatgattaatctttactgattattgaaaataattgatctatacggtaattgttttcttaatccttttacaagtacagccctggacctgataaaaa

SEQ ID NO: 61918 - DNA, 961 bp, Populus trichocarpa
  Intron number 3 from transcript POPTR_0012s09540.1 (locus POPTR_0012s09540) derived from phytozome v7.0 (chr-ID scaf fold_12; pos 10526239 to 10527199 reverse strand)
ccctaaagaattggcagaggtttgtagtcttgcaatgttgatactcactccattcttttatatggcgaaacctttatccaatatcttgcaaatgtcagatttgttttgtatcctcttataatgctttacttgaagcaaactattacggtttatgattatgtgattgtaaagcaagtttttctgttgttttttgaaaatgatggcagaaacgaggaaaaaaaaggaaaaagaatagaaatcttggaatcttacaggacagtggccttaagtcacagtaaaattccaagctttctgctattgttttgtatggttattgttttttgaaaatggtggcagaaacgaggaaaaaaaaggaaaaagaatagaaatcttggaatcttacaggacagtgaccttaagtcacagtaaaattccaagctttctgctattgttttgtatggttattgagaatcaatcacaaaagaactgtattttatcttcctgttgataaattcttttgtcaatgccctagtatagaacccaaactttctactaatctttcctatttttttttataatcaatcaggaaaaaagtttgctttatcaatttcacgtctctgttctgtaattgtgttttagatgtccatttagagcctgcttatttttgcatttcaaaagcgcttttaaaaaaaatgatttttttttctgtgcttcaaattaatttttttggtgtttttagattgttttgatatgctgatgtcaaaaatgaatttaaaaaaaaataaaaaaaacattatttcgatacatttccaagtgaaaagtactttggaaagcaaccgctatcacaataccaaacgggcttgtattgttactggagtgtggtcttttcatatcctcaaattactatatgtcttatcgttcttttatctactattttgcatgattaggagcactataaggatctcaaggccaagcctttctt

SEQ ID NO: 61919 - DNA, 776 bp, Populus trichocarpa
  Intron number 2 from transcript POPTR_0013s09040.1 (locus POPTR_0013s09040) derived from phytozome v7.0 (chr-ID scaf fold_13; pos 8605471 to 8606246 reverse strand)
taccattcaatcctttgagaaagacctcgcttctggttcgtgtttccttttttttttaattacttatttgtttataatttcttgcgtaacctaacttgttaagtttcaatattcaattatatgtttcttttcttttcttaattgtttagtaatcgatttagaataactctaaatattgctatcagtgtctattattttatctttcgtgcaattatatttcattttttttttctaaaattctctcgttctctaaatttaacttgcttgctatggaataactgagggaaactattttcttgttctttttatttgatttactgttacatttttggaaagcaaagagtcaaaagtataactgctaaaggcttaaaatatgagacgcttaatttttatttgctaatttgaatttttaaacatcagttgtgatttgttaaagctagagtgagctcgaaatattgaaattagtgacacctgtaatgtgcacaagcgaaacatcttgttgtaggttatgaagtcaaagtcaaagtcacttagaatgaggaattgtttatgtttaggacttgtgatctgcagataatgctaattataaccagccatgcctcagcattttgaattactttgatactgagtttcaactttcaaaaacaattgtgcttgaagttcaaacaagtttttgatttaagttgtttaatgatatctgatcgtcaatgttctcccaaccttctttttttatttttgcagcaaagtctgaaacaaagcgactcaaagaagacact

SEQ ID NO: 61920 - DNA, 481 bp, Populus trichocarpa
  Intron number 1 from transcript POPTR_0001s30090.1 (locus POPTR_0001s30090) derived from phytozome v7.0 (chr-ID scaf fold_1; pos 28664436 to 28664916)
ttgctattaacgactctgatctttaccatttcaaggttatttgccttcactttcactttctcttatcagcttaccaaatcaaatcagctctcttatgtctttgtaaagttatgatttgaaaacaactctcaattatttatttaaaactcaaggaccccttcccttctctgctttaggtcttttggatgaagttatcttcttccgttaccttttattgaagaattaaagttgtttcaatctgattatttaggcagaaaccctacaattttgtgggttactgtcaactattataaccctttaggtacccacatggttcaaaaaagatgattatggttactggaaactggaaagaatacattcttggatcttttatggagcagatataaaatcttacctaaatggttgaatctgttataactgttttgccttgtttctttttttactagcttctcaggttctataaaagaattgggttcaagac

SEQ ID NO: 61921 - DNA, 885 bp, Populus trichocarpa
  Intron number 2 from transcript POPTR_0014s18940.1 (locus POPTR_0014s18940) derived from phytozome v7.0 (chr-ID scaf fold_14; pos 16539157 to 16540041)
agaggcctcaaagtgaccgcaagatttctgtgaaggtacatatagtaataagctggatatatcttaggattgttttttaaaattaccatggttaggtagtgactgtttaaggctttgttttgttctgttctgttctagggtgggcttaggaattgtccagtattttgttgtgcttacaatttggaattacgattaaagtttttattatgagctttttttggcagtcatttgtattttgttttccagtatttttatgagctttttcggcagtcacttgtacttaagctaagcatggaattcatgtaattttatgttttcttcccagcttattttgttttgtagatgtatgagttaggtaaaatttaaagctagtgataggtgtgcagtaagccgattctctggattgactttgatgaaggtagcatggtaaggtacgcgtaaaatgcttttttgggccagcttgtctgctccctctgatttctctcatggaggtcttgatttggtggcctggtttagacccacatttctagttttgcttgttcacaaaccaatgcccattctaagaatttggagctcaagaacagtagttttattagtttttagcatgctggtgtgcaccaactttatctatgtttagtgatttaaatttgaatggtccgcaaaaaatgaaattcatgtttaacattgcactgctattgaaagttggatttacatgttgaatggtattttaatgtctaggccatgttttatcaatgttgattttttttaatcccagtcctgcaagaatcttttcattgcttcttgatgtctcttacatgccatgttaaatgcttactattgttgttggcagacaaactggaggaggcccaagggtatcgattcaag

SEQ ID NO: 61922 - DNA, 394 bp, Populus trichocarpa
  Intron number 3 from transcript POPTR_0005s06290.1 (locus POPTR_0005s06290) derived from phytozome v7.0 (chr-ID scaf fold_5; pos 4139101 to 4139494 reverse strand)
gtacagcttgggaaagaggtgtgtaataacttggttatatgaatcagcttgtttatggttagtagtgattgagcacgtgaaagggatagaataatcaacattattgatgacattgttaacatgaacaccatcactggcaatttgcagtcttcttgtcattgcttgttatgaggttgcatgaatatgtagattgttctttagatgtaattggaacagaaaaactgagttctagtaaaaaggaactttttgattggtatcagtcagtgcaaaagaaaatgagcttttaatctataaacccgtctcttctgatcactttccccccgtctatcattacttattgtatttcataaaaaatacaggggtccctttgtgctgcaaggcgtgctgcggcatt

SEQ ID NO: 61923 - DNA, 451 bp, Populus trichocarpa
  Intron number 2 from transcript POPTR_0015s06060.1 (locus POPTR_0015s06060) derived from phytozome v7.0 (chr-ID scaf fold_15; pos 6350869 to 6351319)
cagcgccggtatttcaacttttttcgcatctatatatttttctttattttgttttttttagcgttttggttgatctgatctcttcgttgcgtgttagctttttgtatatatatttttttctggaatttatgacgatgatgatatgcgtgcaattgaataatactggcgatgattaattctgaccgataagcttaagtatttaaggctaaaatccgatgcttttaagggaaagccaaaaataatgttgaaattttggttgatttttaataattatggttgaaaaccgcagggtaaaacatgaagatacatattatttgtttgatttgctttttcaaggtgtacgagtatgaggaattagaagctaattttcattgattattttcattttatgcttttttgttgatttgtttgctttaattatgggaatgttgaaggtcctgttgctgaagac

SEQ ID NO: 61924 - DNA, 453 bp, Populus trichocarpa
  Intron number 2 from transcript POPTR_0001s11050.1 (locus POPTR_0001s11050) derived from phytozome v7.0 (chr-ID scaf fold_1; pos 8563120 to 8563572)
gttcaagggcctattacaccaataggaggtaatacttgttcccttttctgacaagttatcttttcctattcttgttacatctttcttcgtgtaagaattgtttgaggtacttgtctatatttataatttacctgccaattttttctcattgaatcatctacagcttcttcttttttctccttttaaattgcacaagaactgggttatcatccctgaactaatctctttcccattactgattgtcctgtttcattcccattaatttttttttgtttttattatgaattagagactttcaagctcaaaggccgtgccttcttcttcttcttccttttttttaatctagttgtgatttgcttgaaatgagttctgcttcgatttgacttcttttatgcttgaaattaagctataatcttgtctgctgttttcagccaacctcccctcctgagtgca

SEQ ID NO: 61925 - DNA, 852 bp, Populus trichocarpa
  Intron number 2 from transcript POPTR_0004s12350.1 (locus POPTR_0004s12350) derived from phytozome v7.0 (chr-ID scaf fold_4; pos 11456389 to 11457240)
cttgaaggaaaatattcttgcccactggcctaaaggttagataaactttcaaaggtttttttccccctcaaatctcaaattatgatcttttctcttgactgtttcattttgaaatctggcacaaattgtgctctagaacagaaatgtactgattttgggcttctatttaaaattctgtgcaatttattcagaagcaacaactttgacaagatgaagtagaaccatgcttgtttccttctgctttgaatcaatatgcatacccaatccattattggaagaaatccttgatttcttcagttacaattatcagatacataaactgcatgcgtttttgttcttatgaatattcatgaaaatttgtaacaaaattctgaaatctgaactgatatcaacactgattgcctcaaaccaaaactgaagtaacaaattatttagttttcatgttcagtcgtttcttcatcgttgttggtaatttggattttaatactcttcttctttcttcagtcaagtaatttagaaatttactgagactctagtttgggttgtgagtggttgtttttgttcattggcaatccagtatgaatacggttctgtaaagcaattgcattttaattttcagatgctagttattaagaaccactgtcaaacttgatagcatagcatcagatttgtcatgtcatcatgctagatcaacaacatctttaagttttttattttttttgctgtttattctccagtataaacacaagagttctcccttctgaactttgatgctttctatggttttaagtaatttccaagaaatataattcgaggtatttaaacctgttaatatttgaccagaaaaggaga

SEQ ID NO: 61926 - DNA, 651 bp, Populus trichocarpa
  Intron number 1 from transcript POPTR_0001s21880.1 (locus POPTR_0001s21880) derived from phytozome v7.0 (chr-ID scaf fold_1; pos 20371162 to 20371812)
caacaatcccctcatttggattctgctcttcaaaggtcctttatcacttctcgtcttcttcaatgatacgtagtgcagtcctggacttgaatttggtttgagtcttttcactagtgccaagtctttactttcttatgcttttgtttgtgtttccctatgagttatagggtagttgagtgaaaatgtgacctgggttttaatttttcttctttttaatgtctttacaaagattgggatccctggttgtgatcaatgcctgacctgtttattacctcatatagcattttagattttttttcctgcaatcaggtacattagtagtcacactcagatagtaatcttgcccttctgtaatataccatggttcacataggggacactaatctcattgttattgataaagcggtctctcttttttgttggaggtatggtggggtgtggaaatgtaaagggccttacattagattaatgggagatttgggcagccaaaacatcaaaatgaggactcaaagaaatctggttgtgtttactcgaatgcctttctgattattttcatcttaaagtattgtttttatttctttgattagttaattaagttgtttgatgtaaatgaaacagtctgtctattactgattatacagattaggaggg

SEQ ID NO: 61927 - DNA, 858 bp, Populus trichocarpa
  Intron number 1 from transcript POPTR_0003s06820.1 (locus POPTR_0003s06820) derived from phytozome v7.0 (chr-ID scaf fold_3; pos 8360419 to 8361276 reverse strand)
tgctacccctagcactcctacgacacctctgacacgtaagcttactattatgtgtggttttacatgagtgaaattaacatttaggatatgtcaaccaataaattattgtgaatgattgtttttcttttccttttgctctctttgtttatctctactgtggtactttctactgtgatgttctcaaattcggttgctgagatgaggttagaaaagaaatcaaaattagaacctggaagttggtttcatttcaaataaatcttgaaattaagaatttatagaattaattatggatatgtcaaagaaccatctcaatctaaaatttaagttattatgtgaggttttaaaatataatttatattattttttaacacatccctttaagtaaaagctttttgaatttaaaatttgcacatactcatattattttgtgcttgatttttatcaaataaataaaggattgtgagattcaaactcgtaatcacttaattatcaaggctatgatattatgtcaaaaaaaaccattttaatttaaaaatttaaaagggaaagaaaagaaaaaagagatatctagagtcatgaatttaatagtaataaatatagtggaagggcacggaatttcaacttttcatcaatttctttcatgtctgttccatcacaaccatgcatgaattattccagagaagaccaagacttgaaatctttacactagtttggtgtattgcgtgtaggatttcgagtttcttctttccttctttcagtttaaagctttagttggcgtttatgtatgttaatgtcgaccttcggttatgatgcatgcatgcagctgggatcacagggacaccacgcggggatttcagg

SEQ ID NO: 61928 - DNA, 893 bp, Populus trichocarpa; identical to SEQ ID NO: 54846
  Intron number 1 from transcript POPTR_0013s03160.1 (locus POPTR_0013s03160) derived from phytozome v7.0 (chr-ID scaf fold_13; pos 1925243 to 1926135 reverse strand)

SEQ ID NO: 61929 - DNA, 618 bp, Populus trichocarpa
  Intron number 1 from transcript POPTR_0010s04640.1 (locus POPTR_0010s04640) derived from phytozome v7.0 (chr-ID scaf fold_10; pos 5788866 to 5789483 reverse strand)
attttgatagaggtttgttcttctacccttttctggcatggaatcgcactttgcttcccctgttggggttaattgacctttatttaccggtaatgaatccctcggttgggatttgtgccagcgtagacaccattaaagcatcagatggatgaataaccatctgacaaaccatgagactatccttatgatatctggttggtttgctttgtgtttttaagtttctctacaagccctgcttgctatgttttgtctgctgctagggctcttctcctagctttgttggatttatctctgctcttcctagagggctttgctgtggatttgtttctgttgtgtactgtttggtttgttgagcttcctgaagcttaccgttagcctttccggttgctgctctatatgattttgattggctagggtggttgacgttccatggactcactctctagtttttgttttgtggaaggtttgatgtgaagcatcatcttctttctgcttggttatgctagctgatataattatatgtgtctccatatggtttgctagaattgttccctctttagcgttgtgttgctgctttttgtagggttgtgtgtggctgctgttgttctcttcgactgc

SEQ ID NO: 61930 - DNA, 671 bp, Populus trichocarpa
  Intron number 2 from transcript POPTR_0013s03180.1 (locus POPTR_0013s03180) derived from phytozome v7.0 (chr-ID scaf fold_13; pos 1939238 to 1939908 reverse strand)
cgctgtatgtttcttgttttgagtctgccttaacatcttatggttttcacttgtactgtcttgtttaggggaagtgatccgttacatttattctagaaaatcaaacttgattgaaatgttgcaatgtttggatgttcttcattgtttcttttgccttctattttgacttggttgtttgatatattttgattttggaaatatgctataaacctagtaaaggtgaacatattggctaagtgttttttttttttattattctttatagctaagggttttatttagcatccatttcatgtagattggagacgtgcagaattgcctaaagctagatgcttgattaaaacaagaatgcgcccgccttttattttcctgctccttagataaaacatgacttgtcctgaaagaaatgctatgtgtatatgtgatgtttacctatgttattcatccgcataactttggaaaataatatggtatagtccgatttctataactatgtgaggtctgctgcaaataatttttacaaggcctatgatgtggtttgtcaatctgatgatccaatgtgtgattgtttgcaaatgtgctagttgaatttcttcacttgtattcatccattatttatcctttaatgttctttagcaggcaaaacctgaaacaattgataaggtgtgtga

SEQ ID NO: 61931 - DNA, 925 bp, Populus trichocarpa
  Intron number 3 from transcript POPTR_0001s10590.1 (locus POPTR_0001s10590) derived from phytozome v7.0 (chr-ID scaf fold_1; pos 8238894 to 8239818 reverse strand)
ttggaaactcaattcgaagctgcggtgttgaaccggttaagcattggacctactttttttgaaacgaagtctcggtctttgtaatcaaaattgggtttgtactcgtgtctaactctgtgttggttatttgttaattcataaagcacttgaaggatgaataatgagttttgccactgttttttgagtatatgctctttgattatcttagtttgctggtcaaatatttgtttttttaaggaagtcttctgcattttccgctctataccaatcacgctccattttgattcttcttctaagtatatgctctttgattatcttagtttgctggtcaaatatttgtttttttaaggaagtcttctgcattttccgctctataccaatcacgctccattttgattcttcttctaagtttctggaccatttaatttataggtttgctggtcatatattggtttttttaggaagctgtcttcttcagtttccaccctataccaatcacattccattttgatttttcttctaagtttctgcaccattaacttgtaggcatttttttttaccttctatgggattggatttcatataatgttggagaattccttcaaaatattccttctgaaatatgtggttcaacatactttttaattgtagagtgagggaactatgcattgtcattggttttcaatgcttaactcaaaaatagactatagcccttctaatcatactctaatcatctttaaagcttgattgtctatttatttacttgtttgtttgtttattttttggataaaaggttttgtttgattactgtggcaggcttcctcatcacttgctggtttttttaatttattctttctgtattagtatggtttcccttcttcgtgaagtttctgatttataccgctaaaactgatgcaggcctgca

SEQ ID NO: 61932 - DNA, 599 bp, Populus trichocarpa
  Intron number 2 from transcript POPTR_0004s04280.1 (locus POPTR_0004s04280) derived from phytozome v7.0 (chr-ID scaf fold_4; pos 3075151 to 3075749)
gacggtcaaaagaagaacgaacagacgatttctaggtcactatagtttattgtcgtttttggttagatatgaataggttatttgttttatttctaatattttcagtgatattttcgtggaatcatcgattttatgcgcgtgtgttttaatttcgatatatttttgtgagacgcggataataattttatcttagagattgaagaagttcaatttttgctggtttagctagaacttggatttcacatggtcttttactaattctctgtagtcttcaggtatcttagtggtattaacttgaatgaagtgtttgattccgtacgaataattaattcacaggtttctaatattttcagagtttttatttttattttttgaaatctgtgtagagactgatttttttttttgtgtttttaaataactttaatttttgatccgatacaggtttagtaattctagttttctaaaaactatttgaatttaatttaggaattgattttgcttattgtttttttttttaataatctattgatctctgtaatttatacaaagatttgactgtgttcttttatggggacagtgtgggctctgagatcaagtct

SEQ ID NO: 61933 - DNA, 395 bp, Populus trichocarpa
  Intron number 1 from transcript POPTR_0006s23880.1 (locus POPTR_0006s23880) derived from phytozome v7.0 (chr-ID scaf fold_6; pos 22604879 to 22605273)
gtcttttgctttgaacaggtttgtttgtgccccaaccacaagcatgcatgcatgccatctcaaactgcggtgcagcagcttcttttcttcttcttctttttgtcatgagttttaaggtttacgttagattttgttttcatagatttgatttattctaatgcatttttggagataaaaataaaataaaaaagtaaaactcaatctctgttaatcaagacaatcatattaattatgtcagccaactgcactaatcaattacaatagcgaaacaaacggccgcaatcgttactgggttttaatattttttctttaatggatttaagaaattaattttagaatcaactacatatctctcaacagcgtgctgtgcaaggtgactagtgagtaccaggaca

SEQ ID NO: 61934 - DNA, 694 bp, Populus trichocarpa
  Intron number 3 from transcript POPTR_0006s23880.1 (locus POPTR_0006s23880) derived from phytozome v7.0 (chr-ID scaf fold_6; pos 22605506 to 22606199)
tgtttaattcaccctgctctgctctgccaccctaagtaagtctagttttgcttacagattttagttttagatctgtggacgaattattcaacatatcaggtgcatcttctttcatctctctttcatatatatatatatatataaagaaaaaaaaaattgtacaagaggactcaaactcaaatcttagtgatgggaacaatagcatgtcattgagctacaatttatgggttagatacatcgatctttttacaagagataagaaccaacttatgaggtgggacctgcatttttttctaatggagcatgatctccaagtgagttgaattattctacatagatccttggctatgttattagttttggattgcactttcccttagtctttagctaggtgaaagcaacaaggaaagtggaactgattagtagtgaactaaatgatgaacaatgatatttggtaaagaagattaagaatcacaatcctaataaattatgactgcaaaacaattcattctaatgactaattatgttgctaggtgacttcaaattaaattactcgaggggtcaaaaataaatgattgttctatattggcaatagaaactccatttgttggtaattacattaagagttgatttgttatctttttgctaagagagtgatatttattttatattttatatcttttcagccctcaga

SEQ ID NO: 61935 - DNA, 985 bp, Populus trichocarpa
  Intron number 4 from transcript POPTR_0010s00850.1 (locus POPTR_0010s00850) derived from phytozome v7.0 (chr-ID scaf fold_10; pos 549178 to 550162 reverse strand)
gatattgttaactccagagaggtatgtttgaactctaatatttttaaaaatagtttgtggcacccgtcttattttgttgctggtgttattcggaatacatatccatgatttgtttgcggacagtgaaagctttctttcaaattaacaaagtgaataacatacattaattttcatatggtgatgacttcagaaaaatgtgaattttagataaataaatccagcatctctgctagctaccattactttgaactccaaagcaagggtctgctcggcatattcaccttagttcctacatgccctcttctttgtctctagtgcttatacatatatcagatgtggaaacttctgaaaaaacattgaaggcaacttttttttttcctcttgcatgtcacttgaggatttttttaatattctaacatatgacaatgatcaattaagctccacgctgtttttaaattggttacaagtagtttgagccaaaaacaatgcaccaggcatctcatcgaagcatcaattttcatacttgctcaatgtatgccctaatcagcaaatacatgtcttctcctcctgtgctgcctttggttgggtttgtctactttattgtcctttgcactcatcataagcaagcctgtagttcatttctatgtgatgcatcatttgaattgtcaggctgccattcatctgtacaacctttagaaacaccattacactcaaatcaattgatatctatgcagtcaggaacttgctctgtttgtgtggtgtgatgatgaaccgtttgaacctatcatagagaatttgaactactggtgcttccagttcaacccataattccaaagtcttgggtttttaacacctaatgttttaaaattgaaaatactctttcttttaatatttactgcttcttgattgctaatcgggatgcattttacaatagacaatttctgttgtaggtttgcaagtttttggaggtctcgaaattgtcctt

SEQ ID NO: 61936 - DNA, 601 bp, Populus trichocarpa
  Intron number 1 from transcript POPTR_0011s09960.1 (locus POPTR_0011s09960) derived from phytozome v7.0 (chr-ID scaf fold_11; pos 12407557 to 12408157)
ctcaataacccaactattattctctgctgattcaggtacgctttcgtttcttttcttttcttttatttccattatttgaaggagcgttctagggtttgttgtttcttcttctcccatcttgtttttatgcttctttctcttcatctacatcgatattttcccctattttcttttaatgatttcttttgaagaaaaaaacagagcttgctttttgttgttgttgttgttgttgttgttgttgtgtgtttgttactggctaaatttattgaaatcaagtagagagaaatccttgtataagttgtttttggatagttttccagattcaaaagaatgggctttgattttatgtgtttctgtataaaactggaatgttcaacaaacaaggttactgttcatttgttaaatgccttttgtacgcgaagatgaattcaagtttgcaaagaccaagtgaaaagcttcgattttggatgctttatttgtatgaagactggttctttttgttgctaattcttattattctggctctgttttgcatgcaagatgggtttaaggatatgttgtaatgagatgcatgatttgatgtgtagatttcaatttacaa

SEQ ID NO: 61937 - DNA, 208 bp, Populus trichocarpa
  Intron number 2 from transcript POPTR_0011s09960.1 (locus POPTR_0011s09960) derived from phytozome v7.0 (chr-ID scaf fold_11; pos 12408265 to 12408472)
tcgcatgtaagttctcattcactttcttttccatctggatttgattcttcttctcttactggaaaatcttttttgagaatttgtgtgatgttgcgctcccacttttgagaaacatttgctatcattaattgaataggatttatgccactcttgttattttgcattgaaactaatcctttttccttttcttactttctttctcagtgat

SEQ ID NO: 61938 - DNA, 433 bp, Populus trichocarpa
  Intron number 2 from transcript POPTR_0009s14510.1 (locus POPTR_0009s14510) derived from phytozome v7.0 (chr-ID scaf fold_9; pos 11364588 to 11365020 reverse strand)
gctgcagtaacgccaacgatagctttcaaagtaaattctagtggctttaatatctgttgttttcctctttatttcgagatttttggttttgatgataatcttgtgtttgtttatgaattattggaggaatgcttagaatattaaatattatcacattgagaaatttattaaaaaaagatgacgaagttggtcttaattagaaagcgggcatgtgtttaatctgggagtggcaacagatttcatgtctaatcttgttcatttatggagttatgctagggaatctttttaattttttgagatatattaaggagtattttttcttttcttttacttttgactgctaatctgatcagaagactttagacattaatttggagttgtgttgttatatgatgtagctgctgatttgaaaacgaatagtaatcggtacttg

SEQ ID NO: 61939 - DNA, 370 bp, Populus trichocarpa
  Intron number 1 from transcript POPTR_0008s11810.1 (locus POPTR_0008s11810) derived from phytozome v7.0 (chr-ID scaf fold_8; pos 7567520 to 7567889 reverse strand)
agaggttattgattggctcaattcaattgtttcaggtacataagaaaaaacctaattgaaacgcttttggttcctagttttcttaaattatgaaagctttgttattaatattcaaaatttccaagcttttggttttttttttctggtttctttcggtgttatgatagatctcgtggtatagttgtatgcgtgtttcttggttttgtatcgctctttttcttaattcaatccaaaattcaatatttttcctgatttgcaccaggaggtcatgaatcttcccattgtccgtgtttttttttttgaagttttaattcgttaaaaaataagtctggcagttcagtttctctttgcttcccttgctgcacggtct

SEQ ID NO: 61940 - DNA, 224 bp, Populus trichocarpa
  Intron number 1 from transcript POPTR_0007s06020.1 (locus POPTR_0007s06020) derived from phytozome v7.0 (chr-ID scaf fold_7; pos 4170827 to 4171050 reverse strand)
cttcgaaggtatggccttcacattttatgctttagtcactcaccttacattatttacttgtaaaaatcatttctgtgatcacttttgggtttcttcttgctgtataataactggaaaactttgatttggtgatcgagcttaaatgctgttttctcttctctcctctctctcttttgcgttgtctcgcaggtcccttttggagttatcaagtcgtcgtcaatcat

SEQ ID NO: 61941 - DNA, 623 bp, Populus trichocarpa
  Intron number 1 from transcript POPTR_0003s21080.1 (locus POPTR_0003s21080) derived from phytozome v7.0 (chr-ID scaf fold_3; pos 19376239 to 19376861)
cctaggtgtctttatttttctgggttttcaattttgttcatcaagttttaagctttttagtgtttgatgatcaaccagccaagtggttctttctttctttctttactgttctatactgtttctgttttcttttaccttttactgtttttgtatgtttatgttgataggattattggtattttgtttttatatatgtttgctttttgtactcatgtattgaagcatgagttttgatgggatcaagatcgttttgctcttaaactcttgtataattttaagtgttgaaatcaccaaatcaaacatcttcttcttcttcttcttttttaagaataattacatgtttggtcttcattgattttgattttacgttattcgaacatatcaactgtagaaaaaccataattttttttccaagatcagtaatgatttggcatttcaagagagattcactgaaagctagtgtattttgttaaatcggtgaatcttttgacattcaaagttgtagttatgatattgtgtgtttttttgccctgtttgttttttggattggattcatggtgcggttgctgacctaaaaaaggtgatgcctttttgcagtgacgcttcagtgggtgttgcacacg

SEQ ID NO: 61942 - DNA, 645 bp, Populus trichocarpa
  Intron number 2 from transcript POPTR_0015s09120.1 (locus POPTR_0015s09120) derived from phytozome v7.0 (chr-ID scaf fold_15; pos 10429832 to 10430476 reverse strand)
caggtacttataaaataattgcgtgcggagcttgtgctctaagagtgttaccgttttctccccccagttattttcaagtcaaccaggccttaatccacagcaatcaaattatcatgtcattttatcaattctgcttgtacggaccttttgtgtatattaaagggtctaagggggctttatcagttgtcttttatttttcttttaaacttgagggttagagtgttgatacatgtccctgttgggtttatggaagttcaatcagtcatttgtgtggtacacacggctgtgttaatagaagatattcttaaattgatgatgtagtggatgaattactctgctaaaatgttctaggtagctgagatgatttattctactgttttaattggttttccttccatgtttttgagatgtgaaatttagtgaaattgatagtatcttgtgcttgtatcacagcagttgtacttgccttgttgaaagtgtttgggtacatgtgaaaaaagctaaacatagatgctcacccatgctatgctagttcaagttcgtaatatcatattttcactttgttttgcaatctccattgtttagcactcctatatactgtaattataacatcatattgctttgtttgctgcacatagggttctt

SEQ ID NO: 61943 - DNA, 791 bp, Populus trichocarpa
  Intron number 1 from transcript POPTR_1432s00200.1 (locus POPTR_1432s00200) derived from phytozome v7.0 (chr-ID scaf fold_1432; pos 2504 to 3294 reverse strand)
tccccttccagcttctcaaattcgtcgatcacaaggtcagtttttcttttctccaattccaaatctatttcgcaaccgggcaactaattaccacctatatcacttgatttaagtgtgtttatttttctaatatatatatatatagtcttttaattttcaactggatttggaatgagttttcctttttatttaattgctttgacattttattaatgacgtcaaccttaaatattttgttagatgttagtatttatatcatcatttcatcaaaatacatctactttagatattttattttaaaaataaaaatatcgtataactatttaagtaaaattaaagatcagacgtttaattataaaaaatatataagtttaggcactcaaaatagttttatctctgttttgtggaattgtttaccttgtacccagctaataaataaatttttttttatcggtatcagtgttatatattttttccttttctttttctttttttttaaattgaagcataaatctcgtagctatagaatatagtttttctagaaatgaaccatgaaatctagataattttcttgaatatttcagccgtacatgttcttggaagatttatgcttcaaaatcttgataatggggtctaatatttcttaattttctatttatattttgcatttaattgatctgtgtatgagacgaagtttcatttttccttatggactcccgggaggcagattgatgaatctttgagggaattggacaggcaagtgccatcacaaattcacaagtgaagtgggt

SEQ ID NO: 61944 - DNA, 681 bp, Populus trichocarpa
  Intron number 2 from transcript POPTR_0019s12550.1 (locus POPTR_0019s12550) derived from phytozome v7.0 (chr-ID scaf fold_19; pos 13602362 to 13603042)
tcttttcaccccactccaaggacaaactagctagtgtaagttgctattcctgatgctaaatttgaaatcagcttctatcaaaatgagttttaccgacctcaaatgtgctttgtcgggttctttacgtttgattaatcagaccatctttctcaatctttagaggaaaatgaattaaggttgttattatggtggctagaagtgtaattgtaattcagtaatcttctaattttctggcctgataagttatcctaaaagtcaagtgattcctgctaaattgaaatttttgtttttgatgcttataaaaatgtaatacattagtggagcttgggaggattgaaaaaattaagatgaaagttgtccagatgcgtgaggaagcagaacatgtacaaggttgctttcattttttgcttgctcatggccttctatacgtctctattgtataggaagagaattagataacctgtttcctgacatttaatatttgttgttcatacttggcgtcttagattttcttgtcgttttctctattagtttttatatggccttcttcttcttgttcattctttgcttctttgtgcacaatatgtacttgaaaactgcttgcagaattgtagacttatcttctttactgttaattacattgcaggaatcagataagagaagcacgaaagaaaagaagaa

SEQ ID NO: 61945 - DNA, 903 bp, Populus trichocarpa
  Intron number 1 from transcript POPTR_0001s03020.1 (locus POPTR_0001s03020) derived from phytozome v7.0 (chr-ID scaf fold_1; pos 2385241 to 2386143)
cgtgcgttttttttcctttttttcttttaatatttgcaagctatttattgggtccttttaagttcttagatttgtatacaaattaagatcattaatgtgtttgtgttcgtctcttttatttcattcttttgatgttggttttctctttatttttggagttatgatccatctaaccatggacttgattttcataatcttgtttcttaatgcattttagaggttccatcatatacgtattgattcagtaatgggaagacccacaagtctgttattattattttcccctgtgatctgctagataatattgcatgcattgctctcgatattattttttcttcttttgacaattatcttgggacatcatgtacgtataagtttcccaaaacgtagttgtttttgttaggattgatcttcctttttaatcgaagcatgagtgctgttgataggaactggtggtggaagctagctaggatatgataggttcaaagtagttggttgctcccaaatctggaactgttggctatgaatgcttttaataagttagtaactgtcctgttatcactttaaatcataattaggagcccacatctttcatacatagacatgtgcctgatgaaacaagctaaaatggacaagttttttatatttttttttttcctcctgtcaaaatcatgtaatgttggaagaaaatgaatgacgagaaaggatattagtgactcaatctagtggcaaagtggttttgacactggttcttgatgctaaagtaactgcctgataagctggtgataaaagatttgtactgttcgccgtttgggattcttcattatttgatcacactcgtttttttgtttttttaaattggatgcagtacattctctctctccaggcttgctcctttggaag

SEQ ID NO: 61946 - DNA, 745 bp, Populus trichocarpa
  Intron number 4 from transcript POPTR_0007s11600.1 (locus POPTR_0007s11600) derived from phytozome v7.0 (chr-ID scaf fold_7; pos 11967440 to 11968184)
tacttattggtgattggtacaagaccagccacaaggtaagcaacatttacttttcttttactttgaaggtgttctcttttcttttctttactatctagatacgttctgtatttcttcaaaaattccagtactgatattttgttcagtaccaagacattcccattgacacgctttagcaagcatataggcaaatgctgaaacatacatgttttatgatgtttgagttgtgttatttgggtgtattttttgtttttatttgcttccaaaccattagcctattgcccagaacagcaactggttgatgagagcctgtgattatgaattttactccaattttctctgagattaaccgaaatgactgaattcttttctttcttgctttgcgaaatatgcctccccttggtggatgtgatatcactcgagatttattgtcgtttacaagctactatgttttggtttccttttcctttggaacacaacctattgaaccatgagttttctgaaaatcatgtcaattaggtgaaatcttgatcattatatggctggaaatgattcattgcagggccctgatgccatagagcagtggtttaataaattagttctacacgtttcctggaccaagtttcctgtgcaaatgtcatagcttcttttggaagtctgtcttcctgtcttggcaccaccgtccatgttaatcagtttttattttacagaccttacaggcatacttggactcaggcaaaactct

SEQ ID NO: 61947 - DNA, 723 bp, Populus trichocarpa
  Intron number 5 from transcript POPTR_0001s11370.1 (locus POPTR_0001s11370) derived from phytozome v7.0 (chr-ID scaf fold_1; pos 8825753 to 8826475)
tctgctgctgtgagttatatttactgcatgttggatggatttctcagttgaatttgcctatttttctgcttctaatgtgaaacaaaagccatattctcttgttagaagggactgcctagactaaaatttgtcatgcaaagatctccattgaatttgtttcttaaggttagattgctgacaagtaatgatgctcgataatagaaattcatgagcatgagatgttttatggtgggtaacagagaaccgtaatgttttcagttatgatgaacattgtgagattattgaacctgctagtgtttattaacctatcagcagctgaagtttatgccttgtcattggttttgaacttgctatcctcaccatattcgatatggtcgccacatcctggtgcagcttcgacaattttgttgactcccactcaagtttgtgttaatcgaccaatgaatggagaagtttcttcaacaacatgaatgtgtagcttacattggcattaaaatcttaaaacaacactttttaagcctataaatttaaacatttgtaatttggatgttgatttggttccagaaacccgtaaccagttggagaaacaatttggtgcctcaaaagataacaagaacaatgcaacttttcgttttcttttgtttttgtccccaagaaaagtatatgaacttagcttaacatcttgcaggaagcaaaacggcttgctcaagcacaaagctcgtt

SEQ ID NO: 61948 - DNA, 635 bp, Populus trichocarpa
  Intron number 3 from transcript POPTR_0008s02420.1 (locus POPTR_0008s02420) derived from phytozome v7.0 (chr-ID scaf fold_8; pos 1177058 to 1177692)
ctcggtaagagactttaccccctgattacttatcttcattcttatctcttttttattcatgctctgttcgtaagtcttccctttctttatttcccctggtaaattattatttatttcctgtaatttaataaaactaatcaatcattatggttttaaagattacatgaatcttaaaatctgtttatggcttaaaaaagtaataaattgagaatggtcaatgttggtcaagggattgttgaataatgttttacactaaagggactgattggctaatatctctaaactatagggactagcttgtaatttactctcaattcctcccttttttttcttttcttcttataatagattttctcatgcaagcatatgtgagagacttcacgttagttattgagggattatccactttttgtgtgagaaatttacacctgatggtacatagaaattagctgttcataaacaaaaatgagagagaggttgatttcagatggcttcatatgaaacaaaatgacttttaaattaatttgttaacatttcaaaattaaacctcatctttcttgttccttcttgtgctgtttcttttgaatattgcaacgccagatattgtgtttgattttctgcatcgcttcccgcat

SEQ ID NO: 61949 - DNA, 578 bp, Populus trichocarpa
  Intron number 1 from transcript POPTR_0958s00200.1 (locus POPTR_0958s00200) derived from phytozome v7.0 (chr-ID scaf fold_958; pos 5521 to 6098)
tggtcgagtgcaggattcggcattacaagttcaatgtaagttaaatgctgtagcaagcttccatgtgacgaaagcgtgaactgcttgagctttcggtcattagtctcattcatgtgacgaaaatcttctttgaaatgcatttcgttattagaagatagccatgttttgcacgatgcattgcacatcatgacactgccttggcttaaaatcatgcaactttacccatatctttttcctgactagtccatgattcaaatggaaatcatagagtttccacctacctatagccactattttaaataccagaaaagtttattctcatgcttactttatggttaaataattgcagcagaaagctctcactatatatatatatatatatatatatatatgttcaagaaaccattaaaaaaatattaaataggaaaagggtggtaagatctcaaagcactgtagtgacataatttgtcacaacaaattaaacaatatggacagtttagcagtcatgacctttgaattatatacatttgatgtagaaatgagcttaaatatttcacctatcatttcaacaggtggtg

SEQ ID NO: 61950 - DNA, 650 bp, Populus trichocarpa
  Intron number 2 from transcript POPTR_0001s03040.1 (locus POPTR_0001s03040) derived from phytozome v7.0 (chr-ID scaf fold_1; pos 2396986 to 2397635 reverse strand)
cattgtgggtagagattttcttccaagaggatcaggtaaattttcaatttatgtttttctttattttgttgattttagtttaaaatctgattggatgctgagaaatttaaaagaaataatagaaaatgtgaatgttttcttagttattaaagtttcaagtcaattgagtcaaactactttagcaaatagttttatatttacttcctggtttgttttgtggaacatttttttggtcctgcagtttccccttttctttctcctaccttcttagttttggactctgttttgttgtttacatgtgtgaattgaaactgaaacttaaaaaaaaatgcataaattgaaagttttggaattattagttgatgtgacttgaggaaaaaaagaagaaaagttgaagttttgaattttttttgtttctcgcttgtttggattaattacatcaataatgttttgcataaaatttgggttatatactggtatagtttgaaatttgattgcactttaagattgaaaagaaaatgaaaaatgaaatttttttaagtttccttggtttgattgacaagaaaaaaaattccttccacgttttatttcttatggttttcgtgcgattttcagggatcgtgacaaggcggcctttggttttgcaactg

SEQ ID NO: 61951 - DNA, 628 bp, Populus trichocarpa
  Intron number 1 from transcript POPTR_0001s25490.1 (locus POPTR_0001s25490) derived from phytozome v7.0 (chr-ID scaf fold_1; pos 24591942 to 24592569 reverse strand)
tttgaaagtcccagtaagttatcttcttttttccggatcggacttgttttccttttctttttgtggtaatcagggcttaattgccctgttaggcttactttggatgggctaaggtttttgatattatatgcaagcgttaagatctgttttggttgctggaaaaatgatggtgtgcgaatggaaaattaattttgaatctcttcagtaatttgatgtataaattgagttcctaatcgattgatgtatggttgtgcttttgcttggtagcttcgccttggaaataaaagaaaactgcatctcaaatataaaattaaattaattttggtttagatttctgaaattcttgaagaatgtaattgtgttttgagcaattgattttctatgaggtacaatcgggtgcttgggctatagctgcttaagcttttacagctttatttcaaaatgaaaaaggtcgtcttgaaaaataaaaataaaattctcaaaccaaatgggagtgactaatctttattgtgcttggacatggtataaaccattataagtaattgctgttaattttgactgatctttttgtttttgtattctctttttgcaatgaacaatagcacaagacaaaattgctgattttgag

SEQ ID NO: 61952 - DNA, 545 bp, Populus trichocarpa
  Intron number 1 from transcript POPTR_0001s20360.1 (locus POPTR_0001s20360) derived from phytozome v7.0 (chr-ID scaf fold_1; pos 18165387 to 18165931 reverse strand)
tagcaaggactacgtagagaagaaaaacgaatgtacttcgtaactatatgaagaaaaaaaaccattagatgcaggagatacttaccatcaagttcaaaagaatgttgaacgaaggtcgaatccaaagaacattgacgggttgataaaattcaagagaaaaaatgactaaaagatgtagcaaagactatgtagagaagaaaaacgaatgtacttcgtaactatatgaagaaaagaaaaccattagatgccaaggagaaagttctagactttttcattaatcagaccaatgataacttaatcattcaaatgaatgaaggagatacaaattcaaatgaaaaaacaacaaagcaacataagaaactaaaaagaactaataaaaggtacctagctaatcacaaaaataaggaagacaatatgtttgatgctttgttttttaatgatggagatgatttcttcgcacataacatgacataatacaacatggtgactctcatccctaggcaagtttatcaattagaatgttgaagttacaaaattggaaggag

SEQ ID NO: 61953 - DNA, 667 bp, Populus trichocarpa
  Intron number 1 from transcript POPTR_0001s34610.1 (locus POPTR_0001s34610) derived from phytozome v7.0 (chr-ID scaf fold_1; pos 32845067 to 32845733)
ccactgccatcaccaccatcagcctcactgttgcgtctttgcttcgcttttggttatttctaataaatttggtcagagagtgattctcgagaaagagcaagagagaagcagatgcttcccacatttcatttcacttcacattcccttcagggttttaattatctactgctatgactgagagaatcaagcttggtaagttttcaaccttctgttctctaagttaatactatccgagggttttacttgatgatgtacgatacaaacaaagaagctttcaattttttcttttccttttcaaaatttacttccagcaccctcctactagctgcttctattatcttcgagcgagcgaaagtgaaacagaaagcaagatatttgaggaacactacttttgtctgaaagatgagttgggtttgtttttgaattttataggtaagagagaaaatgatctttgggagggatgtcagaagcaagaagaaaagatggttgatggaagaacatagccatttgaagatgtcgtcatgggttccaaacgattatccacctcccctttctccttcctcgttgtcttccccatctacaactaatactgttttccataaagattcaaatccttcatcttctggttctagaattagccctgctgttcttttcgttatagtgattc

SEQ ID NO: 61954 - DNA, 330 bp, Populus trichocarpa
  Intron number 1 from transcript POPTR_0018s14610.1 (locus POPTR_0018s14610) derived from phytozome v7.0 (chr-ID scaf fold_18; pos 14751731 to 14752060)
aggaagtttacaagggtaagtgtctctattttacaaaggagaggttcgtccgtcttacaatatttatatatatattacacccacacatacagccaaacaatataattaatgaacttttggaaaaatccttctttctttcttagtgcttgtcgaggtcatcatgcctttattagatgaagcgacgggatacaagattgactgcaaaagctaccttcaataattaatggacaatattacttatttcttcactatattcttccttgttatgaatactactgaggtggctaatataagactttttgatttttgtttttactcgtgacagaacaa

SEQ ID NO: 61955 - DNA, 425 bp, Populus trichocarpa
  Intron number 1 from transcript POPTR_0001s08440.1 (locus POPTR_0001s08440) derived from phytozome v7.0 (chr-ID scaf fold_1; pos 6440135 to 6440559)
tcagggctcctacagcaactgttactcggacagtgcctataattgagcatgagtatataccttatccttcttaaattgttcattttctttatgatcattattcttttttgtaatattagatgaaaggacaaggaatttgtattaagaagaagggtagatcagccaaattcttttaagttctttgtattggtacagagacaactctgtctcttgagttctgtttcatatttttttttaccttccctttacttccttctcttctgtaatttgctgtgatgatttctgttcttagactataaacactagatgattcatattaggtaattaggacaataatcttgttttatgacaggaatttctagatcaaaataagaactaattcaaaatttgaatcttaaaataatatgaaggtgcattcatcatat

SEQ ID NO: 61956 - DNA, 456 bp, Populus trichocarpa
  Intron number 3 from transcript POPTR_0004s06400.1 (locus POPTR_0004s06400) derived from phytozome v7.0 (chr-ID scaf fold_4; pos 5146123 to 5146578 reverse strand)
gctcacccagaaggtatatgtcctctttacatggagttggaagacctttttgctactgtagataattctctcgatggaagtcgatttcactattcagtaactcttctgccttctagtggttttgggaaaaatcataaaactaatacaaatgagaggccagactttgatccattcacatgaatagtcttaccttttagcctctagaatagctttgttaatgtcattttctcagctcttacccctgctattcaagagaatagtgcaacatttcctgtgctcttagtatccaactgatcaataaacaattggatgtcttgttgtgattccttcaaaaacaaattacttcttcgtctcttctcatcccctgtcctttcttctttcactggtttttcaacatgaatagaaaagaagaaatagtttctgattgcaaaagtatatattcttatgcaggagagt

SEQ ID NO: 61957 - DNA, 923 bp, Populus trichocarpa
  Intron number 1 from transcript POPTR_0004s06400.1 (locus POPTR_0004s06400) derived from phytozome v7.0 (chr-ID scaf fold_4; pos 5146997 to 5147919 reverse strand)
ttagctgcaatctttctatatcctgttgggaaaaggtaggccaggtttgttctttcaactaccagttaacatctatatcatttctctttcttgtttttgttttttttttcactttccaatctcaagataatttcttgtattaatgtttagtttagttttactgatatgaatatcatgatcatctctatctgatcataattctgtctatgacctttgccatgttatctctgtgtttttttcgatgtgggaagttacgagaatctttttttttcttttctaattgccgctggatatgcatttcgatgttctgttatgtgcatgcaggttacaaacttgatcgaaaaacactgttgtttgtaacctccataatatgataataatcgcatgttgccttggattctgtgaagccatatgaactttctgaaggactccctttaattgtatataacctataataaggttatgagaagttgcagaatcatgttgttttgaattcttggaggattcatcaattttgtatgcatcataactggaaaggcagtcaaggaagaacctgtatatggttgacagtgacttttagttctgagaatttgtggtcttttgtttctgtgttactgcaattaattgaatagaatatggtctcctagagattctttctgctgttgtagaattgtcatttttcctgtttccttgttaactttcttcatgtgtgccacttttgttctctgatgttcatttcggggtggatttacatgattttagtatttacaaatcatgttcgttgtggcttgacaaggtgatatgtgttaatttgttttgattctctgaatatgagaagacactttgaaatcaaattgattctcatagtcaagtgtgaaatttgatcagattattggagaaagcgcaagcaaccagttagaaga

SEQ ID NO: 61958 - DNA, 419 bp, Populus trichocarpa
  Intron number 1 from transcript POPTR_0011s13490.1 (locus POPTR_0011s13490) derived from phytozome v7.0 (chr-ID scaf fold_11; pos 16237742 to 16238160)
acctcgctgctgtacttgaatatcttgctgctgaggtaataatgcctcaacttttttctttaatcttctctcttcgaagtgttttggtatgattttgtgaatctagggttcttttttttttggtgatcttgatcgttttttggaaattatcttcttgttctcggaaattatcctgttaattgtgtttttgaagatgtggccgtggctagtctgtgattttgcttattggtttttttggaatctagggtttgaacttgttcctgagtcaattttggtgtccttaaatttcgatgtctgaatctgagatttttgaatttttgtttcaaagcctaaatcagggaaagttaatcttatcaattggttttgtgtttgatgggtcctgtgtatgttgtgctgtcaggtacttgaattggctggaa

SEQ ID NO: 61959 - DNA, 542 bp, Populus trichocarpa
  Intron number 5 from transcript POPTR_0012s10270.1 (locus POPTR_0012s10270) derived from phytozome v7.0 (chr-ID scaf fold_12; pos 11080919 to 11081460)
caaaggtaacatcttttctacttacattttcacaggctttcttctttcatggattcctgttatgactcaaaatattgggtccaaaagttttcttttttctactaaaaacattgtcctggatggaaagttcaaaaattacactaccaaagcttgaatcagttttgttctgagtggtggattgtttatttcttgttttagctcatcctaatgcatgatttcatctgttgatgtcatgctctctatgtatgtttgatgtgctgttataaggatgatgataccacttaacaagtaattatactataattgcactatgttgatcagagtgcatattgacatttccatctaccttgatcacgaaagccttggtgataaaaagtggatggagaactgagcactaacctttttgacatttatagtatgtagttgcaactcacatgagatgccaaattgttgatctttttaatcatcctcaaataccatgcttttgttgatcggaggcactgggtttttttctgtttcttgttattgacagaaaaagacag

SEQ ID NO: 61960 - DNA, 379 bp, Populus trichocarpa
  Intron number 1 from transcript POPTR_0010s17130.1 (locus POPTR_0010s17130) derived from phytozome v7.0 (chr-ID scaf fold_10; pos 15859391 to 15859769 reverse strand)
cagcagctgctgcagcagaatccaaacagcacgaggtgtggattttctccgttgatatttttttttgctttcgattttcttatgtaggtttcttttccgtggcatcattttttttacttctcgatcaactttatgaaagtaatcaaaattaatcaagctttgcactagatttattttatttttaatcgatggtagcttcaaccgggagtgaggagcagtgtaattaagtcatattaatccatgattaatttgaagtaacaaagtgattatcatgtcttaattgtaattagagtgcaattttcttagggtgttaaatatttgtccctgttcttgctgcggtgtagaagttcgttcgtctttctcgaggttttgagattgg

SEQ ID NO: 61961 - DNA, 654 bp, Populus trichocarpa
  Intron number 3 from transcript POPTR_0007s15230.1 (locus POPTR_0007s15230) derived from phytozome v7.0 (chr-ID scaf fold_7; pos 14843216 to 14843869)
aggtatttttgcaccccctcagccccatcctaacttggaaactctactggcacacactcaaccagaatataaattcagggaaccttccatctgcaaagaaacaggaagcgcaagctgtttccaacaaaagagaaactcggttttacttgaatgacaggttaatggtacaccatttggtattgcggttctggttctttccaaagtgaattttggtttatgccttttcaggtgttattttttttaatggttttgagatccttatatcaaaaccataaaaaaaaaatgaaatgtttttcatatcaaaagcactttaaaaaaagcattttcaaccactataaaagcaaagcaagccactaataagccattcttttctccaaagcaagtgacaagttcccacatatgtcaacgttcagaacactagcagcacttttatacattctcaactctgaaatttgtttggaaatctctgataagtaaaatactgaacagtcaggatgactttatgtacggatggaaacataatcaacaattacaatcatgagagagatggcaattgacaaatgaattccattttcttgcagatatttacgtgcattcagtgactacagatcctcttaactccaatggttttgttatacagaaaattcaaggccg

SEQ ID NO: 61962 - DNA, 740 bp, Populus trichocarpa
  Intron number 3 from transcript POPTR_0016s02430.1 (locus POPTR_0016s02430) derived from phytozome v7.0 (chr-ID scaf fold_16; pos 1193676 to 1194415 reverse strand)
gtttaactggactatccaaggtaatccttgcacgctgtagatttcttgtatcgtggtggtttagctttgacaaatttctacatgtgttggctttatctttatgtagtcgctttgttttagataaccatttataagtgagctaaggcattttgtttaaatcctctcaccagctagctgcatgtgatgaggcaaatttcgttgatgtctaaattgctaaacttgatgttcgtggttgatcagcttaatttgttcttgcaccgagtaatatttttggataagtatggctacctgcatatttttagttgttagttttgattctttctttgtttttgtgctctaaaaaattattgatttatggatttcacaaaaatatacagtgttagaaatttcgtgtagtatgaagtattgatgaatgctaaaaatgaattgtcttctttgtggccataaaacggaaaaggatttgtgtttctctctgcgttggtagtcttgtaggatagtggaataaggagagaatattttctgctctctagtaaatgacagggcagagacagaaccataatataagcatacttatttcttgttgaagaaaaaatgccatcatcttttgttgccatattagtccacaaataaactacgaaattcatcatttttttctagattatgacaatagctttctaattataccttgtggactttctacattaggctgaggagaggcattgtgagattctaggccagct

SEQ ID NO: 61963 - DNA, 793 bp, Populus trichocarpa
  Intron number 2 from transcript POPTR_0019s02760.1 (locus POPTR_0019s02760) derived from phytozome v7.0 (chr-ID scaf fold_19; pos 2561665 to 2562457)
tcatttcctgggggtgtgtgccgcgttattgccatgtatatctcttcacttaccactccatgcttttattttcaattttaatttgaggtctgaaggattctgatggggccagttcagggaatggaggaatagttgtgctgtataaagtctcttcagaaccccatttcgatagttgaattttatattaagaaattcggataaattcattagcagtaaaattatctaaaaacaagtatgataaggatctcaaggaaaacttaatcatgctgaaaatgtcgtgaatagcaaagaaaggatctccagcaaagaaaattgagcaattgtctgaagtttaggcttaagagtttgaagaaaagctgagtttgtaggaaaataatataaatcatatcttagaatctcatttaacagtttaaatttttagattaaaatgattatttgatatagcaacaaagtcttactgatcaagtaatgatgagttcgaatcttattactcttattattctatatgataaaaattaaacataaaattgtgtggatctcgaatctcgagggttttactttagatatatattagagaatgatataaatatttcggcccaagtcaaaaatttggttttctattccattggcttttctattccattggctgttgtagttatgtcttatattttcttgacatatgattgttgatttgcaatggtttgaaagttttgaattcttaattaccttgtattgaggaattgatgggtccatcttttcttgcaatgcagatatctcaaaaggcaagatcttg

SEQ ID NO: 61964 - DNA, 672 bp, Populus trichocarpa
  Intron number 1 from transcript POPTR_0012s04870.1 (locus POPTR_0012s04870) derived from phytozome v7.0 (chr-ID scaf fold_12; pos 4283426 to 4284097)
gagagcgaaccagagtaatgttcgaattaacacagcttcaagtagtttgattttctgattttattcttttttgaaaatcctgtttgatttctctttcctttggaagataaaggaaagtgaaactgcattgctagggttttgctttctcttcatttcaattttcaattttctaacgggcatatggctttggaaatgacgataatgcccttagattccggaggaagaaacttttgtaatttctgaaactaattttcactctggaattacagggattacgtatagaagattaaatttgtcttgcaagtaaaaaaacctccaaattaggaatactgataacatgatgagatcaagtaatgactcaatcaaatcccaattccgaactgtttgagtttcagttcagaaagaaaaattagttgggattagtatttataattccagaattccttggggattgggatgagtgtttgagaatatcttttactccaaggctgggaagggttcatctcttctggggcattgatgtgggaagattgcattatgcatttttatggcttgatatttccggttgtggtccactgtagttatattttataaagatgaggtaaatagctgcttatgaaataccagataactttttttttttattctgatgtctttatcaggcacagaaac

SEQ ID NO: 61965 - DNA, 603 bp, Populus trichocarpa
  Intron number 1 from transcript POPTR_0008s02430.1 (locus POPTR_0008s02430) derived from phytozome v7.0 (chr-ID scaf fold_8; pos 1181467 to 1182069)
tctcaggtaccctaaatcttcatttcttgattcttctttttttggggcaaagtttgtatttttattgtttgttaatactatgttcctgttgttttgacttgttttgggacgtctatgaattttggctgaatttgggtggatatgttggatttcaagttcaaatcttttctgggatttctgggtttttgttaatttttattttgtttggggatcttagggagcttttgatgtaatttgtatagttaagcctgaatttgtagtttaaagcaagttgttgaagttgtaaaatttaatcttgagggaaaaagattgctgctttgttgtctaggaacctagaatatgtctggttttagttgaatggaaattgtaggataaaggcgatacgaaggttgacttctttctttgcgttactgttgtgagttagaaatttttttagggttacatgttaactgatgttttaacctgtttttggagattttatttgctttactgcctgcccctttttttttttttgatgacattacattgtggttattgctgatttttgcatgtctaatggttttcaattttgttaaattgcagactgttgtcctcaaggttggc

SEQ ID NO: 61966 - DNA, 931 bp, Populus trichocarpa
  Intron number 1 from transcript POPTR_0008s16350.1 (locus POPTR_0008s16350) derived from phytozome v7.0 (chr-ID scaf fold_8; pos 10952292 to 10953222)
aatcaacgcgcaactgcaaagtttctacattgcaggtacgcacccgatttttttattggtattattattagtttctcaattttttttgctgttcgacacttgaaaacgagagtgaaaggatttgagttttgattcttacgtgaaatcattctttcgtttggttgtttcctggctttgtttttaaaattgaactgaaccaatgatttattaggtttaacatattattttttgttaataataataatagtttgctaacacagcaatgcatgtttacgctgtaaatccttctctcttttttctcttggccatccctctttaatgactgtaaggattttttttctgatagtaaatgggttattaaggtttttcttttctttccactttatgacagtttttttactacatatatcatgtttggatattgcttgtcaataggtctctagatgtcatgtaatgtcagaatgttagatatttttctgaaaaataattggattaaatgtcagttccaattaaatgatactgggttcagggaatgtcgttcgacaaacttggaaaatgatctttatttatcttcgtggtggtgggttgttgattagattgttcttggctgctaactaccgggagggcagtgatttctagtgaatgaaagggtgtttccactaccttgcttactgtataagtcgggatttgtttgttttagactgttttagaattccagctcatggctgaagcgctttgtgtcacaaactcaagggtttcttaacctctaattagaatgaacgaagaataggggattgcaatagttttctttttccttttaagcgtgaataaagtgcttctgtacatgtattgttgatatactttttctaccccttcatttggtctatgatcgctcacttagaaatctcaatttctgtagctacacaatttg

SEQ ID NO: 61967 - DNA, 900 bp, Populus trichocarpa
  Intron number 2 from transcript POPTR_0008s16350.1 (locus POPTR_0008s16350) derived from phytozome v7.0 (chr-ID scaf fold_8; pos 10953291 to 10954190)
ctcaaggttaccgtggtgcttggttccgttgcaaggtatgaacataggtttgcagctacagattacgtttctgagttatttaaaggcaaccaaattcttgctggatgacaccaaggaacagaaagagcaacacatgattgtgacatcttcttagtcatctttttttagatgagatgtatatgctttgtgatgtcctggcaaaaccttttctttgactttgagattggatgtttccaattttttgaggaaattaaagttaatttgttaaactgctgattttgttttcctttcttcttttatttgagagtttgagctactttcactacttggaagcattatctcactaactgtgaatgcttgatatataaatgcaagttaaatccttcacgtggaagattttaaaactgtcttgtaatcaaagctaggtgggacaggttctaaaagccaaactgctccctactttctgtctgctgcaaagtaagaagatggagagcttttcacatcagatcattcttctcttctatgctttcaacatgcaaagaataactactgagaatctaacaatatcacatccaacagagatattatatgacaattctagtaatcttgttaagatgaactttttccagttatctgccatcactgtgtgtgaagaacctattatttagtggttaataggaggatgttagaattgaatattttgaagtaatagtaaatgctcgagtaggctactggcatccattcagagttacattttgtttcacaatttattagtgaagcctgtttctgtaaggtttttttttttttttactttgaacacctttttatttcaaaatatttctgcttttcaaattttgtgctttccatcagataatagatattgcccgaagagattctggg

SEQ ID NO: 61968 - DNA, 622 bp, Populus trichocarpa
  Intron number 1 from transcript POPTR_0011s13930.1 (locus POPTR_0011s13930) derived from phytozome v7.0 (chr-ID scaf fold_11; pos 16551191 to 16551812 reverse strand)
atcctgaatttaaggtatctcttcctatctatacatacattggtccctgtatatatattgcgtttctgggcttatttgattttgctgaaaaagaatgtttatttcattttcttttttcggtgcctataatatatagaaaagggtaaagaatttgcaaatttgaagcaattacttagcgtttctgatgaataaacattgcaagattttcagtgttttctcttgcgtatagtatattgcctgtgcagactttaagtgtctgtaggattcttgaaatgaaatacgactttgagttcttaaaatattgaaatttggatggaagatgtattgggaaatgttggttgattagggatataatgcaatggtgccataatgacataatcgcgctcttgtctggaaagtggtatcaccatgcattgtttgccggtcggtttataagtttttttttcatatgaaatttatttgaatttttttccattttcggtgcaatggtatcgctggatattttttttccattgagtagttagtatgtgcgtgcaagaaaaaggtatttttagtcccattgtttctattaatttgaatgaaatttatgatacaaatgtttttacatcgcagaaagaaataa

SEQ ID NO: 61969 - DNA, 950 bp, Populus trichocarpa
  Intron number 1 from transcript POPTR_0014s08260.1 (locus POPTR_0014s08260) derived from phytozome v7.0 (chr-ID scaf fold_14; pos 6141365 to 6142314 reverse strand)
gagcttggatcatgtatttaattttctttctttctctctttttttttttccataatgttgcttgatttgtgcttttggttccgttgtggtttgctgagatgttgagctgccacagtccttgagctcaatcattgttgcttctcaccatttatcttcatagatgtttcatttctccagtatcgatagtgacttagacatgttctttgcgtaatctttttacccttcgattatcttacaatcattcctataatttctttgttttgacttggcgtacatagtccttcattttctttgttgcctaagttgacttttgacaggctattactttctccctcttttttttctccttgcttttcctgtgttgtttggtgtgatgttgtccccattctagctttaatcttgtctcttctacatagtgactatttttgttccattcccccttgcattgtcacttagatttcctggttcttcttattttttatatttttttcccacgatgtaacttgattgctatcattttcccccttctatttccaggaatggttttttcaccagctgtttatctttctcatctgtttttttctttctgaactattgtttgctgagatcgtaagcttcttctgaaattcagtgttgcctttggtgatcgtttacaatgatctgattcgacattcccttctcccaatattgtcatttggtatgcgctagtcttctttcatttttattttttccttttcctttgcatggttttcagctcttttgccttttcttttaggcttttaggttttttgatgtccgttatatttgacctccgtcaaccttttacccccctttttagttttggtaccagttctttttttagttttgttaccagttttagcttattctttttccttgcacctttcttttaaccaggacgctgcttccaagttctctccttgcctaaagtc

SEQ ID NO: 61970 - DNA, 924 bp, Populus trichocarpa
  Intron number 2 from transcript POPTR_0006s13360.1 (locus POPTR_0006s13360) derived from phytozome v7.0 (chr-ID scaf fold_6; pos 10569273 to 10570196)
cagacaccaaaagcgaagtaagatcgtcatttccttagcagttttacaatgtttttacccactcttggtggttgtatgttttcgtgtgatctgttttcttattatgtcattaactgaatgggacctcaatattatgttcttcatgtaatgtagacctacttatttctgcactgtttttctgatctacattcagaaaaatgctttcattcaagtccatttaattctaagtctatatgaactttcttctgcaataggtgtatcagtgatttagagaatcatttggtaactaaatgtgaaccccacagataatttaattgaatagacttagtactggaaaattttttttacaaggaacaggatgagtttgagtatcacaccaagacaggaaaatgaagttttaacagggtaccaattgaatccaagttttgaagcaacgtttttttcctttcctttccctttccttttgtttttgaaaaaaaaaaaaaaaacctgttttcctatcccagcagtcaacaaagcatattgactagtatctcaaaggtaattagtgacagtaaatcagatgatgcatcaagatataagtggtgggggaatgttgaaacttagtatggttaatctattcaaaaagtggcaggtattgcaattatggtatcatcttaaaacacactggtgtgctatgaattcttgcatggccaatcttttcaagatgttgtaaatttatcatccagcagtaactgatatatagcctgattggtcctggcatttacacttttgaaacagatttgttttgagtttttcattgttgcaatttagtttttccttttgttttatttcattcttcttgtattttctcaagctctggttgtcattcccctaactttgagtgcagaaccatctctttggaagtgcctcggaagaaatctc

SEQ ID NO: 61971 - DNA, 615 bp, Populus trichocarpa
  Intron number 1 from transcript POPTR_0010s24630.1 (locus POPTR_0010s24630) derived from phytozome v7.0 (chr-ID scaf fold_10; pos 20741159 to 20741773 reverse strand)
ggtctttctcttcctctctctaattaattagatcagtaagtagaatttcaaaacctgtcgtttaaaccgaatcaaactgtctagtgttgtaactaatacctagaatcttacatcttttacagattctgtttggttgctgagaaaatctaggaaaaatcgggtagaaaatttgtggttaatgcgtgcttttactctttatcttctttaaatgaaaaatccaaacatgggtttcgtagttttggttgttggataatgaattccttcggtttctttgcttgtctcgcttttttttttctagtagccaaacacagggttagggttgaattctgtaaactgatgtttctattaggtaggtttcacttaagattagatggatacttgtttgcatatgtgaatttgatgtttccgttttaaatctgaggttttgctgactgttggagctgtatttgtggccaactagatatgtttgttgcatgaattttatggttaatctataataatagaataatttgtgaactggttttttttttactattgataagaattttgtgttttgttgctgaggtttgaatgttgtctgattttatagatactttgaaggaataattttgagag

SEQ ID NO: 61972 - DNA, 395 bp, Populus trichocarpa
  Intron number 1 from transcript POPTR_0019s08250.1 (locus POPTR_0019s08250) derived from phytozome v7.0 (chr-ID scaf fold_19; pos 9723075 to 9723469)
gtcatcctgctgaaactgggtttgtttttacctttcttttttgtattaaccacttccagttgctttcttgtttttttttttgttttgttttgtattatgtatatgtatgtattcttatgattataataatttggtattagcgttttctacctacttatctgataggttggtctgattttgttttggatccgaagttaagatcggttgaattgttttttttttttttgtgggggtttgctgtagttggtttgattttactgttgctttgaatattgtggattgatatatggttcttcatgatataattattgtatcgtttattctggctgcttatttggtttacttcattcattggttaagcctttacttcgcgaagattgggcttggcaatccat

SEQ ID NO: 61973 - DNA, 790 bp, Populus trichocarpa
  Intron number 1 from transcript POPTR_0001s47630.1 (locus POPTR_0001s47630) derived from phytozome v7.0 (chr-ID scaf fold_1; pos 47784418 to 47785207 reverse strand)
catcatcataccccacttcctaatttctccataaggtaaaacaattcattcttcttatctgatcctttctttcagggatatgaatagtacttttttttaatttgatttatttattttttgtcgtggttctcttgcttttctttgccaagctgactcctcctctttctgtttcttcctttctcatggtggtgatctgatcaaagtcagctaatcgatctctaagatcttttgttgggtcagatccagagttacatgttccccttatggctcagttcaacatgggcacacctcccatcttgtctctattttggtctctgaagacttttttctcgcttggcttttaatgatcatattcaaggcttcttcttggggttcatatgtttgtgttttttaatgattttctgtgtcattactcactgcttctaatctctgttgattatttttgcttgtgatttcatgtcactttgtacaaacaatctgtacttgttctagccatatcatgctgcaacctgcaggctttttctcagtcactagattttcgaatcttgccttcccttggattttgcttggctgttttcctactgttttgggattcacttccagttccatgaaccagattttcccttgcgaacttgttgtttttaacatatgatataattaagggttccagttcttatgtacataataagatcgttatagcttacatatataatttgatgtttttagcttattatagatagcttgatcttagttaatactaacagaaacagtggtttgcattgcagagatt

SEQ ID NO: 61974 - DNA, 334 bp, Populus trichocarpa
  Intron number 1 from transcript POPTR_0002s03390.1 (locus POPTR_0002s03390) derived from phytozome v7.0 (chr-ID scaf fold_2; pos 2101321 to 2101654)
gttacgttttaccagctgtgatcggtgattttcaggtgtggtggattttttttatcttcgtttcctttgattctttttgagtaaacacggatcgtttgatttgtagaaaagatgatcgtaatttttattttttgtctgaaagcaagtaggaaacttgagtttttgtgttttgtttctatttctggaaaagacacggtttacagtatattattcttttgatcataaattacaaaataaataaatcttcaatttcacctcaatttcgttgttaattacggttttaacctctgttattattcctgtttcagttaatttttttttttaaagaggagag

SEQ ID NO: 61975 - DNA, 277 bp, Populus trichocarpa
  Intron number 5 from transcript POPTR_0002s03390.1 (locus POPTR_0002s03390) derived from phytozome v7.0 (chr-ID scaf fold_2; pos 2102602 to 2102878)
ggttttgaagtaagttggtgtttcttcttctcttcccttttcttttcataaacaaagaaaataaaaaaatagagagagaggccaggctcaagcacgtggaagtgcataaacaagcctaatgccatatagcctacaccatagaaaatctacgaaggagatgcgaagtatactttccttattttctaccattgtaagtgaaatactactaatttacaccgatgttttgattatgatactcttttgcaggtcaaacttgttagagttacgaagagagtgc

SEQ ID NO: 61976 - DNA, 465 bp, Populus trichocarpa
  Intron number 1 from transcript POPTR_0002s14410.1 (locus POPTR_0002s14410) derived from phytozome v7.0 (chr-ID scaf fold_2; pos 10682830 to 10683294 reverse strand)
caaaatctctcaatttctttttcgaatcaattaaggtgaatgcttcatctcgatttccatttgatttctttttattaatgaatttctggatcgattttatttttgaaaatccttagatctgtttttttgttttgtttttcttttttgcatcagattgctgagatttgcccctgaattctctttaagaaaaaaaaactaggtattatgctaatcattagtatcttcatttagatctgcctcatgattggatctattttttattttgattattaagatttaaacatgttttatttcgtaagcaatttcgcaatcacaaggtttgtttgtttgttgaaaccgataggttttttagtgcaaaacaaaaggggggatttgttatattttttcgtgggctctacatttgaagatatggccaattaacatgtaacggggactgaactagctgctttgtttttatttatagaa

SEQ ID NO: 61977 - DNA, 808 bp, Populus trichocarpa
  Intron number 1 from transcript POPTR_0006s09670.1 (locus POPTR_0006s09670) derived from phytozome v7.0 (chr-ID scaf fold_6; pos 7105244 to 7106051)
gctgtgatttcccaattgccatctacggtcgcctggtaaattaattttgagtgttcctgttttgtcttatttatttatgtttttggtgacatcaataattaaaaattaacaatttaatcgaaactgaatggagaatttagataaagaaatgtttaaattttatcgaaaggggaaaattgaagaaacatggtagggggtaatatagtcttagaacattttcgagattcttggctgctaaatgatgttgatattcacccatctgaataaacatttcgggtttgtagtattgatattgataccagtcggagcagaagtgttggctaacggctgctgtgctcttcttttgtgtgtcctgaagctttttttttcttattaatgaaaaacttgaagggactataaaaacaagtgcagtggagatgggaatgttaaatggatgtttgaaaactaaaagcattgtaggtaggtggaggtggcagtcattgttaataagttgaatgaagagccactcaaaatggtttggctactatattgaaccatgaatttgagaaggtaatgcttcatatatgtgaggttttgaaaatttatactgtgttccagtacgaagcacagatcgtcaatgctcctttcagtgcaatctgtgtctcggaacaaatggtcacatctgtttgtgcatattaatccaagatcctctgtttaatgctagaagtgttataatagcttgataatatacttctgtgtgttgtgtagttattctaagagcttgatgtgggagctaacaaaattatgtttatgcagagtccttgcgagc

SEQ ID NO: 61978 - DNA, 875 bp, Populus trichocarpa
  Intron number 2 from transcript POPTR_0001s38250.1 (locus POPTR_0001s38250) derived from phytozome v7.0 (chr-ID scaf fold_1; pos 37345883 to 37346757 reverse strand)
aacatcaaatacagagacccaagattctattttaggtaatgcaaattgttgtcttgtctacttcttgttttgcatagctgaactactttattgttattatttaatgaaaacaggttatattcttttattggttgaatgcactttcaatttacaggtttccttataaattttcttgctcactgcttggttggtattttgggagtaaactttgagtttaccatgctattggctagttatatggtgtcagtatcaaaatagtactgtttcatgttttttaggtttcctgtaagttaacttgtggttgcaagagccacaaattcagtttgcttttttgttttaagagcaaagtatctgtctgtttctaatcatatttttcccttgttcatatatattttttggtttaaagattgttagtagttggagattgcttgaccatgtttgtacttttgcaagttgagtactttttcattctgcacgcttctatgttaactttcgactctttcaccttttcaatgtgtttaaatggtcaattgttcaagaaaggggaagaattctagaattcaaatgttgtttgctcagcactttgaaactgtttctcttatttaataacatgaacaaatgaaaacactttccttcaagaacccaggacaatggttggcatatgctagttaagggctgttcttgttctcctttatctttttttttctttgatttctcatgctctcttattttagatgcaaatgcatctgaatgatgtttacctttcataagcaagaaaagtactttgattatgcatcaatgatgccttcatttcacttcctatcattatttggctgagactattcttctaacagggaaacgtaaagaaagacctg

SEQ ID NO: 61979 - DNA, 534 bp, Populus trichocarpa
  Intron number 1 from transcript POPTR_0003s10410.1 (locus POPTR_0003s10410) derived from phytozome v7.0 (chr-ID scaf fold_3; pos 11402265 to 11402798)
tctggtaaagtttgcaattttcagtttaactttttttttttatggattcattgcttaaaccgtcgtttcttggtgtgtgctgttgtccataagaatgtggtgattttttaatttttttttttgcattttcttgttgcttgaatatgatgaagttctaaatttcactgatctttttatagcccagaaagtcaaaaaaggtttatttccttataattgtgttgttaaaataccagtgctgctagcaaagagagagaagatgaagtggatgtggattttagcttctatgctgttgaagttgttgaaactgtgtcaatgaactggaaattaactctttaaaatgttgtatccgtgtttctagcacattcatgtgtgctaaagatatttgtggttgagactaacgagtttaggttgaaatttggaacattttattctctatgcagtttgctcctttttgaaggcattttttttctcgcagttttaattgttgctctctcttttttacaggcaatcttttcttgtatctgtggctgctat

SEQ ID NO: 61980 - DNA, 312 bp, Populus trichocarpa
  Intron number 3 from transcript POPTR_0003s10410.1 (locus POPTR_0003s10410) derived from phytozome v7.0 (chr-ID scaf fold_3; pos 11403603 to 11403914)
tgatcagaaaaccaagagagtaatatatttgtgagttcacaaattattttcaaatttcaaactcatattttctcttttcctcccatgaactgtttgttccctgtaaataagcatggagccatggacattcaaagtaccccacatatttcttctcttgattttgatttgggcctcacacacacacatgtatttcaattaaattgtatttgttagctcacaatgcaatatgaggtgaggtgtcatgcaacattttgttgatcgtttttttatcttccaggaatctgaagaaccacaaattaagtggacctatat

SEQ ID NO: 61981 - DNA, 721 bp, Populus trichocarpa; identical to SEQ ID NO: 56118
  Intron number 1 from transcript POPTR_0011s14540.1 (locus POPTR_0011s14540) derived from phytozome v7.0 (chr-ID scaf fold_11; pos 16910527 to 16911247)

SEQ ID NO: 61982 - DNA, 221 bp, Populus trichocarpa; identical to SEQ ID NO: 56906
  Intron number 3 from transcript POPTR_0790s00200.1 (locus POPTR_0790s00200) derived from phytozome v7.0 (chr-ID scaf fold_790; pos 849 to 1069 reverse strand)

SEQ ID NO: 61983 - DNA, 608 bp, Cucumis sativus
  Intron number 1 from transcript Cucsa.002900.2 (locus Cucs a.002900) derived from phytozome v7.0 (chr-ID scaffold0003 4; pos 78995 to 79602 reverse strand)
ggtttcacactgcaggtaacttgtttgctcttctttcttttgttttaattgaattggtcgttagctatgttgaatctgacgttacttgatcggatctgttggtagcttttactctctcaattgggtttgccacatcttgtacattctctgtcctttgtttaatgctctgttagatctcgcgtccctccatcggtttaccctttattagtctcgtttgatgtcgaattcaattatgtttcgaatcgttttacttgtatttttggtgcccattgcatcgtatgtggccaagttatttaattttgatttctttcgccattttcttgttcaagtgctacttctccctccagttttataccctttcagattttcttcggtggatgccggtttaattaggataagatgcaactcaggcctcttctcactattagttttccatctgtctgttcttcttctttttttttttttttgctccggtgtctataattgggcttgacaatatttcctgttctttgtttctccttttcacgaagagaattttttccaccagtacatattttgttaaagagaagtatttgtctaacaccatttatattcttcttctgcaggat

SEQ ID NO: 61984 - DNA, 370 bp, Cucumis sativus
  Intron number 4 from transcript Cucsa.045050.2 (locus Cucs a.045050) derived from phytozome v7.0 (chr-ID scaffold0054 2; pos 1154227 to 1154596)
tcaatcagggcggtcaagcacatacaaaagaagtatgtttttcttctctttacctgcaacagtcttcaaaatgaaactttgttccctgcattcaaatgagtttgattaatcttatttcatttatccgcatattagattagtcaaatatcgaaagatgatgtttaggaactagtaagtggctttcatgaagtgagttattgtattttatttgttcttgctatcactgtaaggctagtcgcttatggtcgaatgtgtcttccatctcattctggtagagataagaaacatctgctgctattcagtacggttgtaaagttgtgttttatattacacaggaacatctgctgctattcagtacggttcaggagct

SEQ ID NO: 61985 - DNA, 583 bp, Cucumis sativus
  Intron number 1 from transcript Cucsa.049980.1 (locus Cucs a.049980) derived from phytozome v7.0 (chr-ID scaffold0055 1; pos 115273 to 115855)
ctttataacagcagcaatcttgaaacttgcacaaggtactgaaaactagttcatttctgctaattcttgtcgtttggttattcatgtaaaaaaaattcctctacttgtacttcacttatatttttaagttctgtttagttctttggtttcaatattaaagattttcttatgtttcttctacttccattatatgattttttattctaatatgttgtttaatttctcataaatttaaagaaaagagtacaacagacatagaacattagatcccagtgaccacctctgctacattagatcgtatgagaagaaataacctgtcaaatcttattgaataaccaacctcgcttgaagacaatcacacggtcggttaagcttgaaacaactatttcacaataattttaaaatctaacagaccgaataaactaactccagttagttgccgtctctattgtattttacacttgatatttaaacgaatgacaattacaacaatttgagcagtaaaatcaaatgttgtttattttttaatttgtttgtttcattttcagccattgttgatattatccttagctggaaagcaagg

SEQ ID NO: 61986 - DNA, 456 bp, Cucumis sativus
  Intron number 1 from transcript Cucsa.107920.1 (locus Cucs a.107920) derived from phytozome v7.0 (chr-ID scaffold0093 1; pos 176281 to 176736)
gcctccgatcacttggtttagctccatacgagaaggtacgtccaccaaccctactgcatgtttttcctttcttattctttccttctcccatgcccaataattcagctgaaaattttaccagatcgtttatctaccctagatttggactcttctatattgagtttatccttgaaaatcaaattcatttattcttgttcagttctagtgtctgtttctgtaatcgaaatcttcttagaatgctgtcttactgaagtttaatggccaagatgctataactttctagtgaaatgcactattattttctctggatcaaatgactatgagtaattctcaattgttttgtccgggtgaaaagtccgtcaagttttttgttctcttttaagtatatttgagcttctggttcgctgtgtattggttttttcttgtcttatagattatctactttttgaataggca

SEQ ID NO: 61987 - DNA, 797 bp, Cucumis sativus
  Intron number 3 from transcript Cucsa.079900.4 (locus Cucs a.079900) derived from phytozome v7.0 (chr-ID scaffold0079 3; pos 2822714 to 2823510 reverse strand)
ttgccccgttgtattcaatctactggacctaagtggtaagtttgtattcaatctaaaggcttctagggaaaataggtttaaattatgaattgatatctgagttaccatctcttatcaattaaatatgacataatattttggattagaaaaggaaatctagtaaccatcatggattgacatgtgatcaatagcaccaatgtacagtaaaatgtttaagaagaaatgggtttaaacaatgatgaccagatctaagaattattatcaacaaccaaatgcagtagacggcctaatggttggctaagaacagtcgagatatgcccaagttactcaagaactaatatatatatatatatgtatatataattatattgggaaaacatttaattaaaatttctgggtgtgtatctgcacagcattcttttacgtagtgacgaaagttacccaaatggtaaaaggtgaatggaaactgcaaaagtaaattgttttttgttatacctttttcaattttgataattgtggaattcaaataaccaatgaaaggcgttgttttcataaataatagaccttttgggttttgtataccctgtgattggaccctaatgtccaattggatatcttcggatatttcatttcatcaatgaaatatctgttcttatttttctttttcccccttgaggagaggggtttgataatatgatttcttacatttgtggctccaatgcacttgaacaaatcatattcaccaacttttatcttttacaggaaatacaagggcttgcaagaacaccgccttgagg

SEQ ID NO: 61988 - DNA, 1040 bp, Cucumis sativus
  Intron number 1 from transcript Cucsa.079900.4 (locus Cucs a.079900) derived from phytozome v7.0 (chr-ID scaffold0079 3; pos 2823898 to 2824937 reverse strand)
tttaacaccaaccagcaaaaatcggatttttttcagtaagatttaataaaattttcttttcgaattggattgaagtgtcggaatgtagcattcggaaccgttggaattcatgagttgttatgtgtgcctcagtttcgaagtgttcaattaagttctatgagtttaacatgcctgttattctttaactcgtgtaggtttgttgtttatagttttgtactcatatgcggtgattgattaagctttagggttgattttaggtaagaattgcccctcttgaacacttttgatttctttgaggaagttgacatttgttcaagaaagtggatttttaattgagaatggtaggattattgacagagagagtagttttcgtatccttccaagagagtattgtgatttgacaaatgtatgaaagtatgttttaatgggttttgctaaattaaaattattgattgctttgaaagatttttggaagtgttttgattgatttcaaattataagcgtttccatttaggtttctttacttcagattgaaaagttggattgtttaattcgatgaatctttatgttcaaattatttgaattgttttaaatgtttatgaaagaattcgtttgatttgaaagggctatccggatatgccatattttattttggggattgtttcttgtggttggtgggggcgtgtgctaatgtggcatcggtggagagaaggataacttagtgttgcagggttgaacaaggaacctagtgatgtatgtgtccttgttaggttttgtgtttcctttaggcttcaactttgattttctttataaaaaaaattattctgtaggtgccatcttacttgattgggactcgttccctttttggaggttggattttcgtactcttacattctttcattttttctcaacaaaagtggttgcttattttagttatctttgactcactgcttttattgtggaagattaagtttttgagattatctttgttgtctttccttctaggcatatttcgttactgaagttagaaggtcaaagca

SEQ ID NO: 61989 - DNA, 954 bp, Cucumis sativus
  Intron number 1 from transcript Cucsa.089670.1 (locus Cucs a.089670) derived from phytozome v7.0 (chr-ID scaffold0089 4; pos 1066890 to 1067843 reverse strand)
atcatttgtagccttttcattagcattggcagcaggttttttcccttcttttgttttgtccctttctctttgtttctcctacctctctttaaattccctctttcttttttcccaccataaatcatttttcaaattctttctatttctttcattcatatatggatatggtatattgtatttttcaaccacatttgattaattactgttttcgtgtgtttcgtttttaatatattttttaaaaaatttataccattattagttttggattttaattatattacttttatatatgacggtgaaatttcattaccacacaagtaatattttcaaaacaataaacagtaccttatgctatttttagaaaaagaaaaatagtaagtaacactttgttttgtttgatagttatttgatttttgaagttggtaaatttaaattggaaaagagatatttagaagtgatcataataaactagctgttcatttaaaaagagtcaatgtctacccattttataaaacagaccaaaacttttaccaacctatatatatatatatagtacaattattagattagattagagagattatgtcgtcgtggttattattacactagttaagataaacttgagaaattattatgaaagtctttagtttatatgaatctgctttatttaacttttataaatatttcaattacattcttcaatttttttatttgaatttaaaaacaattaaacttaatgagagtataccacaaggttttgatttttaaaatgaatttgctgcctgcccaagtttttaacccaacccatgtgagatacataattaacaatttttcttaatttagactggagataattaacaaatctcttgtgtcttgattgtattgaactcagaaatggaatatatacatgtggtttcaggtggtcgataattgcagcgcagttaccaggaagaa

SEQ ID NO: 61990 - DNA, 705 bp, Cucumis sativus
  Intron number 1 from transcript Cucsa.018320.8 (locus Cucs a.018320) derived from phytozome v7.0 (chr-ID scaffold0025 2; pos 755593 to 756297 reverse strand)
ctcctggttttcgtctacttcctctgaatttaccagtacgtgttgtctatttcttgtagtgtaattacacttgacttgatcatgttcttcttatgtcactgggatgtatggtagattgtgattgatgatgtatagaaatttagctgattttctttccttcttcgaccgcatttcgatggattggttgactttatgtactgtaagctaagttgggtttgcgcttgattgagcctaatcattcagtaatgattttgttcaatttttatgtatcaacaatggtggggttggaaactcctctctctgacatttttggctaaacccttctcaaaataaaccatcagatgctagttattgggctgttacccaacatttttgctgttccaatcaacttgtaagataaacgtttggttttgttcattcttaaactggcccttcaatgcttaattttgtcgtctattgaattgttgcattgactaatttgttgtatccaatacaatattagctgaagtttgatttccataacccaagcccggttctcgtatatgcttatgatgaaaaacatattttgggtctggatgcaagttttttttctttcccttgtgcaactccctgttcgtaattttatcactaattggtattgtcctgtgttcggtttgctttctctttctagatttcgattcaactcttatcaaggatcaaagatca

SEQ ID NO: 61991 - DNA, 907 bp, Cucumis sativus
  Intron number 1 from transcript Cucsa.053580.3 (locus Cucs a.053580) derived from phytozome v7.0 (chr-ID scaffold0058 1; pos 603477 to 604383 reverse strand)
aattgtcagaagagcaagatatttttcatagcgttagctttcaccatcattatacatcatgaacctaatcttatttttcttactgctatattaatgtctattgatctgtattattcattgggttggccccatacaaaattttggtccatactaaggtaaacattagttatcccaaggtcataagattttgattctatgatgactatcatttctaagctcagcctctaggtttttcatgtttctagtcaattgctcattcattgaactgaaaagcactcataaagtgcttcttaggcttagaacttggttaattttattgtgatatgtgtcgttgatgcttttctttgaccttcctaaggatattttcgttattttttgctctagtttgcccattccagtctaaactttctgttcctacaaatttaacaaagaaatgcatcaaataacaaaatttaacagtaaaatcaattaagcctaagaaaagactgttttagtgcttttaaggaactcatctggtgtacttgctaatttcactaaataccttcttcgggtgcatatgctttactctccacactgcagaagttggagtttagtggttagtttagtggttagagctctatatgcatcttctaatctcgctaaagatcatagtacatcaaaagttttgggcaaaacttgaagatcttgtcatattttgtcagaataattctcctttttgttgatgatctagtgcactcgtcgaatatcttattctgagaaccatttaagttttgaccttgattagaaacaacaggaatagttttaatcatgtcataccaatgattatcgtggggtatcttttctctcttgatctcacactacattgttgtacttcaggtctccagctagctcacgaatccgtgctaag

SEQ ID NO: 61992 - DNA, 685 bp, Cucumis sativus
  Intron number 2 from transcript Cucsa.101050.2 (locus Cucs a.101050) derived from phytozome v7.0 (chr-ID scaffold0092 7; pos 316788 to 317472 reverse strand)
tgaagcacgaacgcattgagactactgttgctaaggtattcctatccctcatttcaacccccccaatgactttctgcttatcattctgagatccccatcttctacctaactgaatatgccttttccaagtgatgaaatttatctgtatccgaaatttccactttcaactttccctgtttggttcatattgtatcttggtttattctgtgatctttggatttttcattaatcaatgaaatggcttctatcctaaaaaaaaagaaagaaaaaaattgaaattttccctgtatcacaatggttactatttttttttaaaggtaaggtaatttgtgggtttgttacattgttcatgcgatatgtctggaggcttgatgttttgtattgtctaaattgagcttacattttgatttttttcccctatgatccgaatttagagttttggttagttagatatatgtatgttatctcttttcccttggtttgcatcttttctgttctttcaaaatttaacacctagcttattgttgaaggatatgtagcattccttgagatcaaatagatattttggatttctaacatctaaactattatgaatttatgagttatggccatattttgagcttattaatgccattttcttccaacttgtttgaaggctaaagaagttcggcgacttgctgataac

SEQ ID NO: 61993 - DNA, 681 bp, Cucumis sativus
  Intron number 1 from transcript Cucsa.099840.2 (locus Cucs a.099840) derived from phytozome v7.0 (chr-ID scaffold0092 6; pos 519847 to 520527 reverse strand)
aggcccttttgaaatctaaaagaaggtatatgtttgtccgtaatcggtttatgaatctgtttgcttgcactttaatgacgtgaaaaatagattttgaattattgatattggattttcgactaccaatttagctctttcagagaattcagcgcagtgctcaggtgggatttgtttattttagtcatttggatgctcatgttgcagtttccgattttctggaaacaatttctataaatttagagtatgtgattggtaaatagcatttggatggttctgacatgattttggatgaatgacaatcatggaacgatgtctaatttcctttttttaatttgtagctggtggtggtgtttcagaattttagaaggaagatttaaattattgatgttgaacttttgacaaccaatttcatggtttgaaagaattgaacctagttaatcgaatttttcatatgaatgtagtgttccgatggtatttgtttagtttagttttttggattatgatagtgcaatttccaatcttctggaattggattctataaatttagtggaatgttcttttattatcgttttaataatttgttgctggagagggtgtcttagaattctagtatttgagaactcatgggagggtttgtacgtaggctggtttgttagaactgactttgtcgaatgtatgcag

SEQ ID NO: 61994 - DNA, 955 bp, Cucumis sativus
  Intron number 2 from transcript Cucsa.043420.1 (locus Cucs a.043420) derived from phytozome v7.0 (chr-ID scaffold0054 2; pos 241578 to 242532)
agaataaccctccccaggtaagctcttctactaaacctatttaagaagttactcaaagatcaatttagaataataagattaataattttttttacatacagttacaaatcatgatgtttatataagtaaagtattgaacaaaaagaaaagttttgtttttttttccatctatagtttccaatcattcgtgctaagtagacttcaatgagttttttcctttctctctctctctctcttctttttaatttgttaatttttgtatcggaaatgcaatttggatcagtagtaaaaattatcctttttgcacatcattttaactttatacagacaatatgatcaatatgtcaaattaacctcatgatcagttgatcttcatgaacatgaagaacttatgactttcactactttaaactgtgttgaaaaaatgacaaaaaaacaaaaacaaaaacaacaaatgaggaattgggacaacttttggtttctataattagtccactaaatgtacagttgttttaacaagaagactatttccataaagatgattcccccaccaaaaactccataagtcaaaagctaatacttacaaataaatacatataattgttttgtgtttgaatttatattcttttcaatatcattttagtccttcctgtttgtcaataaaagacaatttcctccaatcccttttcctagttttaatatcttttgacttttttttcaccactttcatcactttataaattacaaacatccataaaagagctacaccaaaagttaatatcaaaaagtccaaacctttactttattttacccttctggaataccattcatcttcttaccatcttttatttattcccacaaaatctcttatctttccctatgtacataaaattttctttaaaatattccattagggttttggctaatttggttgatttatatttcaggaagaagg

SEQ ID NO: 61995 - DNA, 605 bp, Cucumis sativus
  Intron number 3 from transcript Cucsa.058850.11 (locus Cuc sa.058850) derived from phytozome v7.0 (chr-ID scaffold006 14; pos 965721 to 966325)
aaggcaggaataaaagtaggtgtttgttttctttttaccacatgagtaaaatagctctttaagaatagtgagttgagcaatgagcataatacgagaagtgaagcttcaatgcacatggaaaatcgtacatgttacagttaggtttggtaactatttcattttttcattataaaaattaggcctattttcttccaatttcttacaatgatttatatcttacaaatacatgtgttgtattcttagtcaaatttcaaaagcaaaaactacttcctttagtttctaaattttgggtttgtttttttttatttaaacaatgataaaactgaaatgtagatagaaaaagcaagatatttagtgatgaaagatgtgtttataggtttaattttcaagaactaaaaaccaaaaaccaaatagttaccaaacttggcttctatccatccccaaccatcatggttggcccaactgtagaaaatgagacagtctacattgtcacgttcaacagtgtggatcccattctttatcagaatgagaacaacgaattcaatacttaaatttcaatgatcacaaagttaagttcctaatgcattctttttaacagaggattc

SEQ ID NO: 61996 - DNA, 409 bp, Cucumis sativus
  Intron number 1 from transcript Cucsa.104960.1 (locus Cucs a.104960) derived from phytozome v7.0 (chr-ID scaffold0092 7; pos 3265887 to 3266295)
aaggattgtgggttctttatctcttttactcatctgggtttttcatttttcatgttgggtttctcacattgtgccatatgatttcattttcggtcttctattctaaatccgactgagttttgatttgttattgggtgtaattcatgcgtgggaaaaattttcgattttttttaattgtttgggtttgtctgcaagtaagaacgagatacacttattgcttcttgccatggatgaaatgtgttagtatctgtttattctatgactattcgaaatgttgtggttttgttttgttcgtaatgcaatgcaatggggccaatgcaagttagataagacgctttttttttatatatatattgcataggtatgattatcagcctgtcgccgtgaagattatacagccaattagagc

SEQ ID NO: 61997 - DNA, 716 bp, Cucumis sativus
  Intron number 2 from transcript Cucsa.104960.1 (locus Cucs a.104960) derived from phytozome v7.0 (chr-ID scaffold0092 7; pos 3266367 to 3267082)
agaacattattaaggtgattccttttgctaaaaagtatataattcactgtagcttgcttactatttaatacttataacgattcaagatagcgataacaaattgtaatgcaactgtgtcttgtagtctttgattttgtaaattgagtctcatcaatgtattgcttttggggaataggctagatagtgaaaaaaaatagtctgtttatgaatttctaggccaatctcaatctttccttgttgagcgtgcactagcttcttgcttgaatataacattcttatgtaatatattagagtttaattaagcaaggaaaacttaaacaagaggcttttgactctccattaatagatacgaacagacgtatgtaaatggaaccaagttacgtgtctaaaattggagatgatggttacaagtctatgttaattagtgaatatacatttaaattgagctttttgtgatgtgataatattcatttaaattgaggtcatcgatatagagaatttttgttccccccttttcatttaaatatggctctacttcgtaaacacaaaagctcgttaactagctggagtttgcacatagaagttgtagttcttatctttttctgattactatgataggcaagcattcaaaccataaatgtccattcattccttgagttgttgatatcatattctacttaaaacagttcattggtgcttccatagagccaacattg

SEQ ID NO: 61998 - DNA, 929 bp, Cucumis sativus
  Intron number 2 from transcript Cucsa.032340.2 (locus Cucs a.032340) derived from phytozome v7.0 (chr-ID scaffold0042 9; pos 1674955 to 1675883)
gcccgtcgtcggcaagcgccctcgcgtcgattacggtatacccctcttttttcccccccgttttgtttcctacatttggaattagggttttcttaaggtgactgaatttgaggattttcttgaatccccagttgctgaattgtacaatctttggtttttaccaactcttagggttagatgggattgttagaaaaccgtagtcttttgagatgggtttactttttatgtcttgtcttcatcctttaactgttgatttgtttggaaattctcagaatggttctttgtgtattgttatacaccacccctcttcgtcgtttagtgtgatttgtgtatgatgctttaatccttcagcatattttcttgctccgtatatcgaaattttactgatttgctgatcacgttttgtggaacataggatctcctgaagtcaaatagccaaacttattggttttcaggagtcttaggattcgaatggccagtgggtgttcctaatgcgattttgaagttatccgtttttatataattgagttcttgcttgtggctttttggttttaaggcttcagaaatatgccacaaaaggaatgcgtatttatcaacaatttcaattttgtggtttctatacggagtgcaacactttttaagtatctttccagaaatgaaccaattcataaaatcttgaagttaaaatggtggacttttgatcttcataactgaaagtttagtatattaatgttcacgtgatttttgtggcttcttgaattagtagttttacctttttaagttatgatttcccgttgattgaagtgaggtaattctttgtgaacctcctttgtaatcacttgtttcattttcttttatttatttggcacataattcatgttcaatggcttgtagatacctctggtcttcacgagctgcccaactattat

SEQ ID NO: 61999 - DNA, 569 bp, Cucumis sativus
  Intron number 1 from transcript Cucsa.063760.5 (locus Cucs a.063760) derived from phytozome v7.0 (chr-ID scaffold0067 4; pos 163658 to 164226 reverse strand)
atcaaatttcagactttccgagtgccactgtttaggtactaaaccattcaactacttccctcttacttctttcctcccctctctgtgttatccaaaatgtaatgtctttgtcttcctaagttgaccacttttttcccatcacaacatttctagaagatgcggaaattagtgggggctgttcttatttcctttttcttgctctccgttttcagtatttcatccccaggatttggaaacaccttcatctctaaattcaatttattaaccccaaagttttcctcgcgtattcatcgcttgtatcatcattcccatatatttggaccaaggttgttactttttgtttttttttttttttatcccttattcttttacacccacaattgaagtttttcatattggatgaagtattttagatacttaagtttgggattctgttttgagctgatgttgtatgttaactctttactatgaactaattgtttgattgaatgcgcaaatgagacttttttttcttatgttcaacttcttgtgcagagtattagttagaggccattcgaatatagttgtta

SEQ ID NO: 62000 - DNA, 1003 bp, Cucumis sativus
  Intron number 1 from transcript Cucsa.129070.1 (locus Cucs a.129070) derived from phytozome v7.0 (chr-ID scaffold0102 8; pos 149012 to 150014)
acttatctctttcccttccctaattttggcttccggtacgtttttctttaatcctctttggtatttcatgtgatgtttttgtttagggttgattctcttcttttaccttttgagtcatactatagagatttgattttatgatgtttctgccttcaaacttcgctccaaaacttttactgtttgtcgaggtgaaaaagtactagagagagatctttgttgatgatttttatgcgtgaatcgaagtcagttaacatattaacaccgatgcatttgatgttgtgttgattgaattgttcacgcacgctacgttgacgaaactttgtttatgttgacacaatagtgactgtgtaagcccgttgatgatttctactcacataagatacctaaaacaaaaagaactttttgttcgtgtgtggacaaaagtatcatttccacatatgcacgatatattgatacaaaaaagatgtttatagaagtccattaatcctctctcaagagctatgttaagtcttggttgtgccttgtttaatttattcaaatattgacattttgttgttttttaaatgtttattgaaaattaaaacgtacatgtggaagtatatatatcacgaaattttttttttttaaaaaagacataatctaataagtaaccacgataattagaactagatcataaatatataaccgaaaaacaactatcaatccaataattagtattaaaatctttcatctaaaattaaaattaagacactatcatatactcaatctttttctatcgtcctattaacacaaacaatgaatttttcacactagaaacgtaagaacacaaaaaaaattttaaaaaatagagtgagattcactaatgttaatatgacatccattactactcacgaaaataaatctatagtatgatatggtatgatatgatatgatatgatatcccgatgcaaccaacccgagtttattagttgttggttttttaggtcaagtcattggtcagcgt

SEQ ID NO: 62001 - DNA, 640 bp, Cucumis sativus
  Intron number 1 from transcript Cucsa.106950.2 (locus Cucs a.106950) derived from phytozome v7.0 (chr-ID scaffold0093 0; pos 400955 to 401594 reverse strand)
atagaggctgcgaagctcattccggtaattttatttggtttctctttcttttttgtgtttttgttccttgctatttaattgtgggtctttaaattctttctcagtttttttcttggctaattatcccttcaatttaacatttgcatagttctgttttagtgtgtaattggccgctgttgatgacgatacttttttacttaactgagaattctatggactaatttgatagaagtttgacatctttcaacttctttttacgtaatagttttagtttttaacctatgaaaaatggcagcatcttgtgttatgtcaaattctattatagatttgaaaatccatgcgaagctatgttctaatgttggtgataagacttggatcttacggttattatagtttactattattcaattgattttgtacatttgaagtttggagtgtcggagatcagcttatttaagctcagttacctgcaattgatctgttgaatggagctcccatctcgtcatgttttttttagaagtgtatactataaaataagtaataacccaaagtttggtttttttgtctctgcagtttaaattttcctgcaacgtactcttgttaaattttgaagtgtttatttcttttgttgatttaggag

SEQ ID NO: 62002 - DNA, 555 bp, Cucumis sativus
  Intron number 1 from transcript Cucsa.106660.2 (locus Cucs a.106660) derived from phytozome v7.0 (chr-ID scaffold0093 0; pos 187580 to 188134 reverse strand)
ggtttaaccagactctcgatcacttctccccttatgtaaagattgaactctttcttacctcttaattggatttcgattggtttaatcacagttaatgaggatgctgaattttattctaggatagttgttcactgaattgcttccacttatcttgactctttgttcttcgtttttttcgcgtttgtttgaaatatcttttgacccattgagtttcaggaatttaatatttgctttagcggaaatgagtcacttgcgctagttttgacctataaggaagtaggaacatattttttaatctttgtatttttttggtcggtttgaagaatatgtgtgataatttattgggatggaaattaattttgatttgtttctttcttaccctaccaccaagtaatgtcataaatgagttcaacggtattgagttcacatttactgtacaaacgcaacagtttgtcttcaatttattttagagtttcttgtatatgtaaatgtgattcttattagttcaaggtaatgcaattatgctcactgttgggtgctaatatatgcagaatc

SEQ ID NO: 62003 - DNA, 460 bp, Cucumis sativus
  Intron number 1 from transcript Cucsa.116790.4 (locus Cucs a.116790) derived from phytozome v7.0 (chr-ID scaffold0099 5; pos 614493 to 614952)
aagttgatcaggttggttggaatttttttgttttgattttgttctatctattctgattgaactgcttaagaattttttttcatcggagttgaaatgtctccctagatttatcttcttgcttgtattaatttgaacttgtttgacttttgaggttggagtaatttttcaggacaacaaagttaattttatatctgattattatgtccacactatgcggctttgattgttttatgatgaatttgatagtcagagtctgatgaatttgatgatcagggtatatacaactatagatttctagaaactaaattgatttgtttgtttttgtttatgtaatttctgttacggatttatctctgcattatgatcaataattttccattgtgttttgtattgttaatttcaacggctttgttttgtcttcccagtttcttttgctgggtgcagtgcccttccccaaaga

SEQ ID NO: 62004 - DNA, 809 bp, Cucumis sativus
  Intron number 1 from transcript Cucsa.078160.2 (locus Cucs a.078160) derived from phytozome v7.0 (chr-ID scaffold0079 3; pos 394650 to 395458 reverse strand)
ctttcttaatcccactgctctgttcttctccagcggtcagttcttctaatttcaccatcttttgcttttctcttccatgtttatgtctgtttcgttgctgcgaaaattaggatttttgtgctactgtggtagatctggaaattaatttgtttttcttgtatgattttgttgttgtattggaattaatcggatatttttcattaatttttctctttctctgtttcaagatgaggtttctgtgttcttttctattattttttactttttttttggcattcgatttgacttttctagctgaattggaaaagtataatggtttcttggagtgacaagattttagttcttttataaatcttgattcaaatccaggtttgaatttttttgtcttaaaaaaaaaagtgttctaacaacaatagttttgtgtaaatccagcttcgaagagctttcttgctagcaacttttaaaatgatgaaggcactttgtatgatttaattgatgtggcactataaagttctttttttttttctttctgtggaacgaaaattttaaggaaagtgacttccatcttcaactttaaaagaaattgttagtcaaaactattgaagtattcttacaattaaatctagcttaaacttttgggttagtggttgattaaatatggtaccaaaacaagatgatgttttgtgtgttggaaccactgtaatattattttctttcccattacttacatcacaacgaatcaactagatgaatcgatgatttaatagaagtgttgaaaaatgtgtttttgttggaacagcaacggtcac

SEQ ID NO: 62005 - DNA, 745 bp, Cucumis sativus
  Intron number 1 from transcript Cucsa.111350.1 (locus Cucs a.111350) derived from phytozome v7.0 (chr-ID scaffold0095 3; pos 181789 to 182533)
ttctggttgaggaagagagttccacttccagcaatgtattagatgttttttacttttgatatttctcttgtggttaagtttttttgttagtgtgttgatttttctatttacatattcaatgaggttgatattatttctatttaagctctgttgggttattgccgaatggcacgaaggatggcatattataggagttcaattatgttcttattgaaatggtgtattgcataataaagtacgttctgttctttaggctgtttggtcaacagtatccacagttctgtatctgttcttgtagatgatacaataccaaatgctttttaatcaatagatggtttaatatgtattgacataccacaaagagcctaaacagacatttgatgcaaaaattcaaatccgatccaaaaatggtgatccttagtaattactatctttaggggcatgctgaggatcccatggagtaattcaagggaccttataatatttattccattgatggagtaaccacctattgtcaattgtcagttgttttcgtggacttcaatttcgaagattttttgtaactacccgacattcttttgcatagttggagtccctttttgtcgaaggtcctctcttttgtgggtttgattttttgtttgtccgtgcttgtattctttcatttttttcaatgaaagtggttatttctattaaaagaaaaaagactatataatctatttgactaattgatttgtgtagattgtga

SEQ ID NO: 62006 - DNA, 875 bp, Cucumis sativus
  Intron number 4 from transcript Cucsa.049900.4 (locus Cucs a.049900) derived from phytozome v7.0 (chr-ID scaffold0055 1; pos 63206 to 64080 reverse strand)
gagtaacgacaatttttgctggtgaactggtacatcactcataacatattatatgtgtactcttggttggtgcatcattcaaaacttgggagacagctatgttccatttcttacgtgttttccatttttgacgttccatttttttttctaatgtgctgatcgtggaggattgagatggtagattgttgcagctaccatatggatttttagttgttctggatgactgttacttcttgtcttcccttaaaaattacattttggggtaaattacatggtcctaagtttatgtttagtgtctatttgatcaaacaaaataattcagcccctgcggtttaaaattaattctgaaggtccctagggcagttgacctattggaaattccacatcatgtaagaaagttctttgccatctcacttcataatggtacattagcaaaggtccatcaccaattaactgctgtgtcatttttctttgttattaactaacggtcaactaatcctagggaccatttagaactattttttgatcttcaaggactaaaatattgcttttagaacattatttatcaaatagacattaaacctaaacctcatggctcaaaagtataatttaccctttattttttattggttccctctacagcatgtctttcatttggcttctaggctcttctatttcaaatattcaagttttgaatatattgaggatgatcatcgtttttctattgatatatttctgcttttttactactctgaatcattcatttatttctatgtaaaccaagtaaaatgttttgtccttttattacacaaagctttaataattttaatttccttatttatatgatagatagatcggtttggacatctcaaaat

SEQ ID NO: 62007 - DNA, 988 bp, Cucumis sativus
  Intron number 1 from transcript Cucsa.049900.4 (locus Cucs a.049900) derived from phytozome v7.0 (chr-ID scaffold0055 1; pos 65233 to 66220 reverse strand)
acggtatcatccgtttctttttgtggctttgatcaagtctttccattagatattttagtatttcaatggccacgttctcgatagattagaatcagagtatggcttatcgtcattctgtggcggtgcacgcataacaatgaatgtaacaggtcataaaatagagaaggtgaagaaagagaatcaaactaggcgatgtttgatgaaaaattcgaggctgatacttgtttacactagattttttatatccacttatctctcttttcaaactgaaccttgacttgggatgaatgtgcttttccttcaactataatacacaaatggaggcttcagctaggagctagggctgcatttataccttgcttcttctgtatgcttcgtttatgattgaattttcgtccattttgaaaaagcttattctggcttctgtctgtgcgtttaatttccatttctgtagttagaaatttctttgtggcgtttggtgggaacggggtggaaactactataatggtaaagttttggtataggcttattttgattgggtttcgctctctttttctgctcgttcaattcacgaaattgattggtattggtattgtaaatactgaaattgtttgtttaaatgtcacttgattgctagtaatttaaatatgacttcgtttgctggttccgtcgttaatttaggaactctcctttatttcttcggtctgtctttccctttcggatcgatgggatcgggtttgatttttaggagctaagattgctgtattgtttaatggttatatttgtgggacagcagaaaaatgatcttctgggttatcgtaaggaaattcgttttgtcgtaaataaatcacagttgatcttcccccctttttttggtgtttaatcgaaactcttgttgtgattacattctgtttattatttcaaggtgtaatttgtgactgtttatttcttttgtatcaggtgtcgtaggctgaaggaagggggacat

SEQ ID NO: 62008 - DNA, 961 bp, Cucumis sativus
  Intron number 3 from transcript Cucsa.100970.1 (locus Cucs a.100970) derived from phytozome v7.0 (chr-ID scaffold0092 7; pos 255741 to 256701)
gccagtcatttcctttgaatgtaataataaattccttcatctgttagctctctcattcattgttattgattcatgcactcgccttttatttttcttgttaactgaaaacagatattgcattgaattattgataatgagaagtatagacaatacaagtatgtaggaccagggaacctcaaaagacagaaactgaaactaaactttgttctcgtaggttaagaagtcatggcaaactcatacattacattttttgaccaatcaaaagcatagaaaaaaaaaactgaactctatccattaacaacttgtcattcttcatgttttctcaaaacatatgcttgtttgtctgagttttatgacctaattaagggtggtactgctaacattagtccttgacttgcaacattacgataaatatccctacaaaatagtgagtgtaaatcttctggaactacccggaaaacatataactgaaatactaactgagtccaccattgaaacattgatttagcccttgtgaaccttatcctgttattgttttcttgcattttctgttacacttcatatctgttgtaactctcaaattttaaatggaggaaatagctttcaatcatttgattgggaggaagaatgaaagaaaaacaaaaaaaaatcttatttctaacaagaactttgcattgacaccccacccaataaaaagattcttgccctgaagaaattggtctgccttttacgtctctatctctcattcctcttcatgtttgtatcataggatctatacaagggtttcaaactttattatcgcgtcatctttttcattcagggtttatattgcacactcttaacaactcttcccttacacttttcctttgatgctttccacttccatgcgggaaagcaattgtgatggtttttgtttacatagtcttgcagatcatagtgggatccttaatatttgccgtaa

SEQ ID NO: 62009 - DNA, 455 bp, Cucumis sativus
  Intron number 1 from transcript Cucsa.100880.1 (locus Cucs a.100880) derived from phytozome v7.0 (chr-ID scaffold0092 7; pos 168184 to 168638)
ttgaagattatcttgagaagagtaaagctaacaaggtgaactacctattcatattgcctttgtcaaatgctgtgtttcaatactttgatgaaaatgtgtttgatctctgttggtgttgaattttcaaagtatgtgaaatcaaaatattattttggatttgtatcttaaactagaagtatctataaggtatgctgaggattaaaactaggagtttaagtctttaagattcatgttgaatgtcatgctgaaatttgaagctatggactaatgttttaaaaagccctcccatgatcaaggccaaaagccttgagttttcttagaagactattgcactatatcgtgccttgaactttttaaaacactacaatggactaacataaacgtataaaacaagatttatatgaaaagtttttcatgtttctaaaccttttattgcgattttcaacaggaattga

SEQ ID NO: 62010 - DNA, 924 bp, Cucumis sativus
  Intron number 2 from transcript Cucsa.045770.1 (locus Cucs a.045770) derived from phytozome v7.0 (chr-ID scaffold0054 2; pos 1492183 to 1493106)
aaaaccttcttctgcatagactgcatcagagagaggtaagtgttgggcattttgttcaactcggcctaatccatcgatgatcactaactgttaatcagatgttgattggtttaatccgagtaggcattattgaagtattagaatgtaaaaaaagatttgtttgaggtagttaagttgcttagattggttgatacaaacgcttggacctatctccttatcaacacttctatgtcttacagaaagcgatccttttgaagctggtagatcgtacttttcttttatttggattttcctctccctcgaggagtaaattttatatcccatagttataatatatgaaatttgtcaacttgaggtaaatcgctttcttgggaaaacttacacaaaattcagattatagtgcattgcatcgaaagaacaacccgaagataaacttttgttagtacgctgatgaaacgagaaacatctttatgttccacactatgaactttactttgttgagaatcccaccttggatggccttacattcttaatgagataggtgagctactccttctattgccaattgattttgggatggacctcatgttatctaatatgatattagatctcataaaagccaaatggtattaggttgaataaaaaaatttaagatttgattaagaactgtggacctaaaagaggcaccatcttgaggggcacgatgagaatcccacgttggaaaaatcaagagactacccgctctcaataagatagatgtgctactccactcattgtccattgattttgagattctaatatacttttcacccttaccatttgttgagatgagatgattctttaactcacgtttatgatgattctttaactcacgtttatgatgattcaggtacttcgatacaccagacgaagtgaaaagggcat

SEQ ID NO: 62011 - DNA, 791 bp, Cucumis sativus
  Intron number 1 from transcript Cucsa.007850.1 (locus Cucs a.007850) derived from phytozome v7.0 (chr-ID scaffold0009 5; pos 35644 to 36434 reverse strand)
cacccctcctcccttacccaacacggtaattcaattttctcaccttttttcttctcagggtttcaacaaataagtgttgtatcaactcccctcccaatttccttattattattattcttattcatctctctgtttcatcttctttgcttttaatttccttcactttactcctgattttaatattttaaggattctaatagcttttcagattgagatttgattttttctaaatttcttttggggttttgcttgtgcttttaattgtctacgcttagttttgtgtatgtgtatacttgtgatcttttctgaattgggagttcattgatttgaatgctttccaaatttccctttgcagctaaggggttgaaggggttgaaggggtgaaggggtgaaggggttcaaccttctgctaattcctatggttgttgatctccattaaagacaaatcagttgtgcttcaaatctctggtttttccagggaatgctgaaagatgatacctatccgttacagcttttcctccaacatctataattgttcttctgcacttcaattgtcttctttcgcgttcgaggaaaacactctcataaatcacgaaaccccacctgatctctactttaaaacgctcgatttacgtgcaagttattttggagtcctcacacgagctcgttcggtgcttcatttatctgaggacggttgagcatccatttgttaactaaggtctgcattgttcgcctagttgatattgtattttgtgcctttctttttttactttaggatttgattgattggg

SEQ ID NO: 62012 - DNA, 940 bp, Cucumis sativus
  Intron number 3 from transcript Cucsa.078000.2 (locus Cucs a.078000) derived from phytozome v7.0 (chr-ID scaffold0079 3; pos 196605 to 197544 reverse strand)
ttaacatcaaagatagggtaaggttacaagcttgaaaccttttctgacaatttggcacgtacacgtaacagtgataaagtttatatgaagttactcccacatgcaagttgatacctttaatatctattcttgtttcttccaagaatattgatattggaagatcagttaagcttcctagattttgcttataaaagtcggtaaaacgatttatgcatttcattctttacatgttactttaaatagttgttctgaaatcttattccgtaccatatggagatctatgattgcttcacattttcttactaaatgctttgattctgaattggctaagaatattctaaaacaccatgtttttaagctttatcttgggtaaaatttttctaccttttaaataggctgccgaaattcaggaggatcggtctgagttctttaaatgctcttgcttctacaagttagatgaatctgcaatacaactacaatgtaaattaatctgactgaatagaaaatgttgtcaatatatacattgaattttctctttctctacaaaagcctgtgaagatctcgggctttcgaacttgaacccataactatggagggatggattaaacttcagtaactgatggaagttaaatcctcaattttctatttcgttcgactcttcaaatacacattttaaggacgcaggtttaaagaattcatgtgcctgacttgattttactgagtgctatcgttcagaggatctattcaatgaatacatagttctatcactatttgatttatttcactgccttccaaaaatatgggtctatatacaattcttatatattgggtgtaatttaaattttgtgagttcattatatctgctttttgaggatgatggcttataatctgacagttattttccaaatttggtcttttgttacagagctctattgtaaat

SEQ ID NO: 62013 - DNA, 824 bp, Cucumis sativus
  Intron number 4 from transcript Cucsa.129510.1 (locus Cucs a.129510) derived from phytozome v7.0 (chr-ID scaffold0102 8; pos 408094 to 408917 reverse strand)
tgctaaacagttcaggagtcattttaaacacaacagtatgttcctgtgcattttgaagtttattcaatggtttgaacagaagacttggtggtcaaatttgttctcatagcacgagatttgcttatcttgttttcttgaagtttatgttaaagtattatattttttcaatcatatattgttttctgttagtttctagacgtgagcaattaggcagcccatcagttataaaactttttttttgttattattgttctctttgtttccggtattgttattcaaaatacaactacaaatgttcgtggatgatgcttggcaattgtttgagttaaattagttgttcaatgtattttcgattgaaatatgttcagtataacgttttctgttgatagttttcacagtggtactaccaaacatccgtgttgcatgttagaattaggcacttagtatatctactgttgttgcttttaatctataattattgaaggtgtggggttttatttccaaaggttccttctctgttttctctttccttaaaatttcttgatgggtcacttttaggattgatgcatttcatatgctgtcaacccgtcctaaaactcatagaatcatgctttgttgttggcatccactgtctttcaaatttatagcaaaccatggctcaaagggagttcatgacccaataatcagttttgtgcttccttttgtaaggcatttatttctattcattgtatttatgagataaaactccaagtcactgcagttgattgatttcaagtttctatgagatttgttctttgatttcttggttgggcttgtttcttagg

SEQ ID NO: 62014 - DNA, 799 bp, Cucumis sativus
  Intron number 1 from transcript Cucsa.002610.1 (locus Cucs a.002610) derived from phytozome v7.0 (chr-ID scaffold0003 3; pos 143630 to 144428 reverse strand)
attgttgttgctccattttgcttcctctcttataggtactttttaactctctttctctcttcgtttttctttctttaactatactattttagttcgtacggacgttttgaattttctttaattttagtttctatacttttaatatgtttttatatttaatctacaaggctagtttatttttttatttttaagaaactttttgatgtttttgttagtgttgtcgttgaaatgtcttttgattatgtgatctaaaatgctcctaacaattaagtttagggttttacttgaatttctttcacatatttatgttatctataattttagtcttaggatttaaaaatgtgtgcgctataaagttctataactttggtatgttgttgatcaatctctattttgaagagttcctactctttttataaatgtaattaatacactatcagtgaccatgtggatctctatatgttgaatttctattgttttacattttttttttgtttatatttctcattccataacatttatcataaattttggaaatatattatattcacatataaatattattattattatttaatttctatataaaattaattttgataggtgaaatttaagatttattaaaagtatgaaggctaaaattggacaattgaaagtataaaatccaattaaataaacttcaaagcatgtgaaaacaaaaatataatattgttttctttcggtactctctttggaaagacttaacaattttatgaaaacactaactattataattcacaggaaaagaccaagaccgcac

SEQ ID NO: 62015 - DNA, 396 bp, Cucumis sativus
  Intron number 2 from transcript Cucsa.103280.2 (locus Cucs a.103280) derived from phytozome v7.0 (chr-ID scaffold0092 7; pos 2110826 to 2111221)
gtcctatattattctgggtttcttccaaattataggtatcttattattattatttttgttgttttcttcttctggggatttcttttcttctttaattcaccgagttctggacgtgtttttcgcttctaattttacatctgagcgtttttttggaaaaacaggacgtgagaatggttttgttgtctttgtttggtttgatattttggcatattgcattttctaatattcgatttcaagacttttgttcggttagtcaatcatggcgggaaaataggaggtttatgatattgcttgagacagttttgaattgtttcttattttgaatcgtttgacttggagaataatattggttggttatattgttcattgcacattgtttgtttggttgagcaggag

SEQ ID NO: 62016 - DNA, 862 bp, Cucumis sativus
  Intron number 3 from transcript Cucsa.103280.2 (locus Cucs a.103280) derived from phytozome v7.0 (chr-ID scaffold0092 7; pos 2111481 to 2112342)
tttggacgtaaggctttacacttcattttgctagctactgttctttgagggtttttaattaaaattagcaaaattttcattttcatgagattgagaagacgatagctggtactttttttgctttgacattgtgaaattttgatcaattacaagcttagactacaaaacatgaagattgcgaatcagcattgttcttaaatttaattactaattggatcgtcaaagtttatattagatatacccagtaatatgtttagatcattatgttatgtaatctgtggagcgttgtgcacaatacggaaattttgtttctcgaacgccatggtgcctactacatctttttttgatgtaattcttttgagattagtagctggagagacaggagtagttaattaataatattttctgataaggcattgggacttgtaatagaataaatctataaggagtataaatcaaagcttgaataaatctgtaattagcttccgctgtagagattaggttcatccactgttaaagaagttgctttatacatatgtcttgaagactttagttgaataatttctaacaatcgtcaactctcagttctatagtgggttgggttatttgcccctcttttcccccctttcctttggaaacatttggaacttgttttaaattatactatgggccataatcctttttattcatcaagaaattttgtgctttgcgcttatgttcagcatcaagttatgcaatgaatctcgcatattctttgctatgcagtaaactgatattttcttcttttcatgtcgcctcctgctgcatttgaatactgtacgtttcaggcatttaattggatttttcctctttctctccttga

SEQ ID NO: 62017 - DNA, 626 bp, Cucumis sativus
  Intron number 3 from transcript Cucsa.104180.2 (locus Cucs a.104180) derived from phytozome v7.0 (chr-ID scaffold0092 7; pos 2775415 to 2776040 reverse strand)
ggaaactttcagggtcagatgctcaatcaaattgttctttctactgtcgtatattttaatataaactcaatagtatttgacaagaggatcacattatttgttagttgtagtttattaatatatggctaattgtacatattgttcttgataattgtagttgtaagtgtacctatttaattcctatatattttgataattttcaaaatttgattctaagaagtttctgtcgttaatgatgtttactgaatgatggataatgtgacatgtcttttggacaaaccttgattttagattggtgagaagtaatatttattgatttcagcattcatttagatgaatcatttcctagagcagcctgtggcagagagtaccttaagtggagctagaaaagcttgttatggatgcaatggaatttgtgcattcaaccactttgcctgttgcttttaatcttcaatattcaacatccaatttcctgacttctgtgtttaagatgcttaaaggtttttttactcagagtcaatttaaaaaaacctgaagtcctgaaccagactatgtttgttcagtacaagaaaatttttctcctttgggattgacaaatggtacccctcttttttcttcttgcagtt

SEQ ID NO: 62018 - DNA, 400 bp, Cucumis sativus
  Intron number 2 from transcript Cucsa.121950.7 (locus Cucs a.121950) derived from phytozome v7.0 (chr-ID scaffold0099 9; pos 336721 to 337120)
tcacggtactcgacaatttcaaaacttatgaatattttattttgacgtactttttcttgtatgttttgtgaaataattagtttatgagtagtggtaatggggttttcttagcttcatagagtatcattagaactaaacatgtatggtacttgcttataaattttgttttcacttcagtatgaaatataaatgttttaaagaaatttcttgacattaggtacattaagtttcaaaaaaacattttctgctacattcggtgttggacgaataagtgaattttttgtatctccttgagcagttgagcatttttacattacaatgttattgtcttcttttcattcatatggatataaatgataggtggtcaatgactatatctgaaatcaagtgacaattgcag

SEQ ID NO: 62019 - DNA, 656 bp, Cucumis sativus
  Intron number 3 from transcript Cucsa.121950.7 (locus Cucs a.121950) derived from phytozome v7.0 (chr-ID scaffold0099 9; pos 337308 to 337963)
aaggtatgccaatgaagtgtttggcttacaaacaaccaatttagattgttgactttcttttactgtatcatccaagcagttatttatagtgcttctcataaaagatacagcgtttgtcaacttagaggccagaaggatcaaattttggtcaataataacatccttttatttaatgccacatgttagatgtatatgtttaagaacatatgtgtttatttgccattgtatataaatcttgaataccaaacagttcttggatagtgaaaataaaatgaattatcctcgaatcttgtaggatcaaccaacttttcatttgttagggatttaaaggaaagtgagcatgtaaatttgatctgcaaggtgaggaattatctaactcatcgtaacattttttcatgaattctacaatagacattttttgatctttttttattactttattattattttttatctttagtgataaaagagattttatcactacagataagaatgctagacttttttttgaattctttcctttggctttgttaggtgtggtaaccggttcttttaataatatcattaaaagtaatgtaacacacatcttattatatcctatttagtctaactccatctctatctctctcatgtgcgtgcacaaaaagattgtctac

SEQ ID NO: 62020 - DNA, 663 bp, Cucumis sativus
  Intron number 1 from transcript Cucsa.113230.1 (locus Cucs a.113230) derived from phytozome v7.0 (chr-ID scaffold0095 3; pos 1454544 to 1455206 reverse strand)
atttccaattccatttcctttcatttctttttcttgtaatgattttagtttgtattcttatgtttctttatctcttttttcttcattgtggatattgattgcttctgttttgtgttctgatcttttgtcgttctgtgtagagatgttttgtttatctgtctgagaaatattaagcttattctcctgaccggacttacatatgtttttgattttgaggtttcatttcattcttcttttgtgtttcatttcatacttccactgtaacgttttgggtacataagctctgtttaagaatgattcgttagttttctagtattctcttgctccggctgggactcttttaatctgttatgtctctctagaatgtctaatcaaagcgtagtttgctcgcatgagaacacaaattaatgtatgagactacattggatattaacgttaagcttttccagtagctagtttgctcgcttgtttccacagctattgtttgtttatctgttaattgtggattatacagtagtacgtaagactttctttttgattgtggaggtttgacgtcggaagttgaaaatattcgcaggtgctgtattatcctgtgcaacaactttttgttccctacagagtttaattttattttctgggtaattctttcaggtcgttaacaac

SEQ ID NO: 62021 - DNA, 935 bp, Cucumis sativus
  Intron number 1 from transcript Cucsa.114870.1 (locus Cucs a.114870) derived from phytozome v7.0 (chr-ID scaffold0096 8; pos 221209 to 222143)
atttttgaggggcgtcacaagtttgattttctgataggatagaaataccacccccttacctaaaagatccccagaaatggtactagaaaggggatgattctctaattcaagtcatgttaataaacaatatagagccacaaattggcaagcccttgctgtatgttgcaactatactaaggttatttgggagaccattaagaaattatattcaaagcgccagaatgcctcttgctcctacacattgtgaaagtaggtccaagaatattgcaaataggcctttggatataacatcttattttaacaaactttctctcatttggtaggaaatagatctttgtagagaaattgtttagaactaccttaatgatggtgtgaagtactctagaattgaataggttgatagaatataaatatatgggtcttgttgtccttaattcgaagtttgatatagtttgtgggcacatactagacccgagacattttccttccttgatggaggtctgttctaaagtccgattgtacaagtgctatgagtattctgatctcctgccactgattctgttaccttcagtgtgagatcctctacttatgaaagtgaaaagaacaacggaaaacgggtctctatctgtaagcattgcaagaaatagtggcacaccaaggaataatgttgaaaattacattgtcgtcccacgagaggtaagaaacattctctgaacgacaaacaaaatatagagtgagcttgtgtaagtgagtctactatatcttcttatgcatttggtcacaatggaaactagaacgattctaatctgaccacactaggagctattgtccagtcaggtatgcctcagttcctcagtcttgttagtgttgatagaaagaaccactggattctagattaaggtgttacagatcacctgaaaacttcatcttttatt

SEQ ID NO: 62022 - DNA, 949 bp, Cucumis sativus
  Intron number 1 from transcript Cucsa.098400.1 (locus Cucs a.098400) derived from phytozome v7.0 (chr-ID scaffold0092 3; pos 398172 to 399120)
tgctgtttcgattgagacatcccaatatcatcactgtatgtttcattacttgttattttttttcttttttttttttgtgggtctgtgtcatttttttgtctgaagcacctgaatgtttttcatgaaagggaatagtaatgtgttgtgctaaattcttcttatgttgtttaccccttctttgtgttgtgtcctattagtaacctcattccttaaaagggtttttgataagttcataaattctactgatttatgtagtgcctttttatggcagcatgcaattcttttagcatcttatcacgggaagagcagagaaaaaaatggcttctgtatttcttgaaaatgatgaagataaacttttcttttaccatagggaacctctactacataagtcagatttcctttggagattctatctgtttatcgaacgtgatttgattttgagatgcaaaaaagttgttttccccataaactctaatcttagcccaagcaaaaagatgggttgtttctccatcacccctcctagataagattgaagctttagttgcctttccttaatgtttcttgttccttttcccttctttatacacgacaacacagaaatctccaaaaagatgaactattggatgttggagctaaagaaggcaacacaagaatctttcatagttgcaaaataaagaatgggaaagttgatccaagttcctttcttacaatgggttatgagcagtggtgtattaggacttgacccactttggaattgtaaatttggtaatctcattagaacttgatcttccctctgctgaacgtgacctgcatttctaacctgttattgtataaacaactttgaattagtctctataatcattgatgagatcttttttactgctaaaatgctagcgtcttccttcatcctgcagttcattgcagcttgcaagaaacctccagtgttttg

SEQ ID NO: 62023 - DNA, 827 bp, Cucumis sativus
  Intron number 1 from transcript Cucsa.050850.8 (locus Cucs a.050850) derived from phytozome v7.0 (chr-ID scaffold0055 7; pos 66249 to 67075 reverse strand)
tctcaagattttacgtttcattggtaatgggtttcttctactgattccctttgtgtattctgttgttttttcatttcttttttttttgtctccttttaatgggttttctttatctggatggtggtattcttcggtaggatcattctgagtaatttatcttgattacccacttgttgatgtttttctttcccctctggttttacgttcgtttgtgtttcgatgatttttacagcttccgacggggttggtgggttattatctaatattttatgctgtgtttgctttattgttacctcgagtatttagtttctgtttatgttgatctatacccttgtttgaggccagatcgcattttgtttcttgtgaggatttcttgagaaggttttttttttttactgtttagagatggtttggatgaacaatggtttgagcaaaacttcgttgatgcgagagaatgacgatatgaagacgaacaccttttgggtatttggtttcattttctgcaagctggtcaatgaataaaaatgctgaaataggtttatgatttctgtagactttatagtggattcatgtggccgatttagcatagtatttttcttcttctgggtcctaggagctgaaaatttccgggaaagagcagtgtggaaagtttagtctaaattgttgtgaagtaaggattattgttccctgccagggttaaatagttgatgcagttcatattaatatttcacggaaattgtgtcaaaagggttgagtaatgtggtagatgatagtggaatgaagatatatgattaagttagcttatctgagttgatctcaacaggtga

SEQ ID NO: 62024 - DNA, 1006 bp, Cucumis sativus
  Intron number 1 from transcript Cucsa.017480.1 (locus Cucs a.017480) derived from phytozome v7.0 (chr-ID scaffold0024 5; pos 208868 to 209873 reverse strand)
ttttcattgctgttgctttcccattagtcggggtacgaatagttcaaccttaaatgtcattaatttgattgaatgcaaatcaacagtggattctcttagttgtagtagaatgatcaaggtggctgttcaatatatcacgcctttggatataaaagaatcatattactatttacccagagttattatattctaacagaggatcgtgtaggtcttagtttggattctcatagtcattgtatactccttgcataacattctcacttgaggatttgtaatgataataattgtccatagctaaacttgagagtgaactttgagaattttcatgtaacttggataaattatttctaatctagttgtttaaaatattaggattggtaatacttcagcataataaactctatttcattcctgaaaccaagttttaaataactgtagttgtagagtattgattccaaagtatgtcattttattaaagctatttgctgtttagctatttgtgaaaatcgatgatctaattttctctgagatttaagaactttccttttactactttgaggatggattttcaatcaaatgttaatttgtcagctttattctgcattgtcttgagtaagtaggacgaaacatcctctttcaggattctggaaatataaaaaatccatatctcaagtagcgagagtaatttgacccttctgtgtctcactatcaggtttatggcttctttagtggacaaacacacgttagcattctctttttctttgtagttgtagcgtttattcgattcatctctgttttgcagcctcttcaaaattatggttattttaggaagtgtattttaagacaccgtgatctaatttagtatttgaatatatcgaatctaaaatcatacgccactgtgttttgcagtccgttgagtattcatcattgtaatttttaaaactactcagtaatgtgccagtaattcgaattgttatgtcactgtgtcaggtctctgcttctcttg

SEQ ID NO: 62025 - DNA, 870 bp, Cucumis sativus
  Intron number 1 from transcript Cucsa.122290.1 (locus Cucs a.122290) derived from phytozome v7.0 (chr-ID scaffold0099 9; pos 572942 to 573811 reverse strand)
ctgtgttgttgcctcgtctggcatcgcgttcagcggtttgttccttaatcattttctttagctggttgtagattcttgctcatacttaatttgtactgaagtataagttcgatttcaagttttcgttatcgttttctctttcagctcgtcgatttgttgttttgttgtgtgttcttggcgctgatttttgtgaacttctgtgaacagttctgtgccatcatcgtgattgctctgatctttttttggatgaatggttgcttgttgcttgtaattaactttacatatctgtttatttttgtgcgtgtggccgtgcttttgttatttgtttcttctaatggaagtagctctgtagctgcaacttgcatacacaaacaattagaaaactttcgttccaatataaatatggttgtatctcctttgaaaaagttattagcagaaagtcgtcttatacaattcatattattaaagttatggaccaagatggtccatttgaccataccttggtagctcagctacttgactgttgtttttccttgaccggtccatcaccatgataggaggattctgacatccatttttcaattgaagaaaaactttactcatttgcccagaagtctgtgaaagttcttcattactactttgatctaaggctatttgtgtactaagctttcaagaagtgaacttctctttaataccgagtactgtttctggtgtgggagaatctcagaagactattattccatatcattggaaattatagaagtccatggacaaatctttaactaattcctggtttctgttgggctaaattgaatttcttgttttggattatttctattgacaggaggttttggaacttacttatttgga

SEQ ID NO: 62026 - DNA, 1002 bp, Cucumis sativus
  Intron number 3 from transcript Cucsa.005450.1 (locus Cucs a.005450) derived from phytozome v7.0 (chr-ID scaffold0005 5; pos 543912 to 544913)
aattcaccgtcactacttacacttctggtggagttgtgagtttctgaatttttcttccttacattttcagtcggattttgttgttttggcggctttttattgcaatcaacatatcgttgttccttctctgtgctgtaatttcttttgtgtgttgcttttgtttgattcttgagaaatgtttgcattggaaagctaagcgactcactgtcctacgccccgacgtaacgacggaccgactgaccgactgacctcgcttctttctatgtaattaatgtttgttcttgggtttgtaggtcggaggggtgtaatctttgttttgaagattcaagaattcatttctgtcggtattgtcattttcaggccggatatcgatattgttttttatctttattttactaagggctaaggcagaggaattaagagcgggaggattcttggaattcgtgtcaagagtattatgtagtttttgttagagattgttgaagaaagaatcgaaaatattaaaaggttttgcaatgtacattctttttttcgttattttggacggtttaatattttataattagatgtttttgattgggttaaataaggtgcaccattttcttagataactttagtcgaaagcaatttcttttcgcgagcattcccaaggaatagcctctttctagctaacaataaaaatgttgatacactgaagctcccgtttgtctaagcaatctcttacccaaaagcttttatttctattaattattattgaatctgggatgttcctataattgtttttgttttcatatgtaaagctataggcaggtatcgtaaatgccataatctagtttaggacataattgtttttgttttctaactatcatttgcttatctgacctttatatgatgcagcatgttacatctttcgtttttgtatttctcttatgttataattgaactttctctttgattcacttttcaggctatcagttctactggaattaagaaaggtgagat

SEQ ID NO: 62027 - DNA, 623 bp, Cucumis sativus
  Intron number 2 from transcript Cucsa.029920.7 (locus Cucs a.029920) derived from phytozome v7.0 (chr-ID scaffold0039 9; pos 168848 to 169470 reverse strand)
ctacttcagatcaacgaagagcagcagaaatccaggtatgatatttgttcttctgttctattttgatatatgaaactaaaggtgtattgtcttgcatatatacctaatgggagttagaactagatgtgagaaattattttggaggttgttcagtgcagaaactgcagctagatttcgaaaacggataggaggtgtttgactcatggattaggtttgtgttaactgaggcttaggttgagaagtcaatcctatacttggtgtgtgactcttcttgtgtgtttgttgaccgtatggactacataatcccaatcatagaagaatgtccatacagtttgatataggttaccaaaacctggatttttacgacttattcctttgtatagtcctaacttagattatgctaactcagatctctcgactccaggtctcataaacccaatttcgtcgagatcgtgtgcgaaacatcaaattattatgtttaaagaggataaacaaatgtctttgcctttactaaaacgtatggcttgcttttgtttgagctgatatgtttgtatctctgtctccgtatcttcaactttttcgatctagaaaacgttcaatcacgataggcaaggtggtcctca

SEQ ID NO: 62028 - DNA, 508 bp, Cucumis sativus
  Intron number 1 from transcript Cucsa.029920.7 (locus Cucs a.029920) derived from phytozome v7.0 (chr-ID scaffold0039 9; pos 169569 to 170076 reverse strand)
gagcgcaagattctggtattttttcttccaattccatttttttttctttgatttttccgttccttctttaaacttattgaaacttttttggggtttggttactttcatgttttctgtcttggtatcctctgtttatggctggttgtatcttggtgtttggattttgtttgatgaagtttttttggttggagatggttttttggggatcagagtgaattcccacttatttttctttattaaagatggtcgctgactgggtgtttacgatagattcgttgaattttgttggatgacaaaataatctcttcatttcagtttggaatctctttttctcggaagaaaattgggggttttgtatgttttcttgttttggagctatgaacttttgaaattctctaatttcatgtgtagttgttagtcaaggtaatctcgtattattgtctggtaatttgattgatcttcatgggagtttttctcttttagggtatcctaaaagctctggtgttcc

SEQ ID NO: 62029 - DNA, 477 bp, Cucumis sativus
  Intron number 1 from transcript Cucsa.061690.7 (locus Cucs a.061690) derived from phytozome v7.0 (chr-ID scaffold0065 1; pos 190146 to 190622 reverse strand)
tttaattggtcttactatcgtcccggaaagaccaggtttcccccttttttctctattctccataaaattactcttcccaactgggttttcacttttatgttgttatcatgtcctccttctattttcagaaatctggatgttctttaacgcttttcgccaactgggtatttctcgtattgtgcgtttgtgtgctttatcctctttcttcccccttgcgtggtttccttgggggctggtgtcattagaatgattgctttaggacgccccttcaatttcatgctcaattgttgtttatgattgtcatctccggatactaaatcaaaaaatcgtgttctatactttgtgttttttttcttcttttctcttggtttctatggactacagctcacaatactgaaggttttttactcattcagaggtttcttctgaaataattttgcagtcagaaggaccagaggtacgctcgagcctacatag

SEQ ID NO: 62030 - DNA, 440 bp, Cucumis sativus
  Intron number 3 from transcript Cucsa.089630.2 (locus Cucs a.089630) derived from phytozome v7.0 (chr-ID scaffold0089 4; pos 1040320 to 1040759 reverse strand)
aggtatgctggtgtgatgaatcaaaaaatcgtttgtctttgtatactgtaatgaattctgcctagaatgttatataaattcaattcgattatagtttctgcaagttttacttttttttggataagtttgcattattttaagggcctgtttggattggaaaaagtattttttaagtagcttttttttttgaactcttttgataacaacaatattctttggaagtgtttcaaaagattttttgagtaatggaatgcaccctaaattttcatggtgtgacaagttcgaagtgattttgaaaactacacttatacattgcttgcttgtccgaagatgataatctacgcataccataccataagtaacaaagaactcttttttttttctttcggttctttccttatgtatcagggtcccactagcaaaaatccactggcatataa

SEQ ID NO: 62031 - DNA, 798 bp, Cucumis sativus
  Intron number 1 from transcript Cucsa.095300.2 (locus Cucs a.095300) derived from phytozome v7.0 (chr-ID scaffold0091 9; pos 1215657 to 1216454 reverse strand)
ctacgccacggctccgcctagaaaggatattccaggtacgatggcctgttttgatgattttcatttgaacctcaatttcgctttcatacaattttgttttgtttgaatgtcttgtcatcaattctgaatcttagaagtaaatttctcttcaattgttatgttaaattctatgtttctgttagaattttgtcttttcttgaaccccaatgatggagatgcctttatgtcctagattctgaagatcaaccaggtttttcatatgattgaagaactaatcgtttggggaaagaaaattgtcttacaaaacagataaagcaagggttcctaacagtctatatttcaaactgtacaatctcagaatagaaaccgacgaagaattacaaatacaaatacatatacgtgtcgtagaagtgttggagtgctcaagtatttggtagggactaaagtgtgtgctttttaagtaaccgattttgatttcttttgatagctaggttatggaccttatggttgatttttccaaaattgtgtcactttcacgatggccttgtagtgcagggcaccatgatatggactaaatatcttacacttttttcttttgatgatctttctcttttcttttttgacacctataagagttgcggtcagcgtctaggtgtcaaggatattcttagtatattaaatcctaggtaggtcttcatggatggaattcatttcatttttcgaattcatttcctttttcttctaacctttatcaaatttagttttttatttatagacgggttgctggaggaagcattg

SEQ ID NO: 62032 - DNA, 527 bp, Cucumis sativus
  Intron number 1 from transcript Cucsa.085190.11 (locus Cuc sa.085190) derived from phytozome v7.0 (chr-ID scaffold008 67; pos 38974 to 39500 reverse strand)
aaggcatgtaatcgcttttcaaattagggttcttttttttggatgatttttttgatttgggttctttttgggtgtttgattggattgtttcttgttcttttttgggcatttcttttttaaataacggattggttgcttattttcttcaattttgtacgacaatattctgtctttggtggctctgaaaattgatggtttgttttgtgttttctgaattagggttcttttttggcaaacgggatgtttctcgttttgctccttttttcttttttttttttaggattgtgtgtctttgtgtctgctagagattttgcaggtgttttgtacgatttttttttgctgttgcttttaagagatgtcaatgcttgttgttactggtgtttggaaatggtggcgatgcaagcttctttatgctgtgattttttgggtttcttgtgaatgtaagaggatgattattaatgtcgtttctccttgctttttagattacaccagttttaggaggaggcagtcatcgcacacaagggagt

SEQ ID NO: 62033 - DNA, 556 bp, Cucumis sativus
  Intron number 2 from transcript Cucsa.123160.1 (locus Cucs a.123160) derived from phytozome v7.0 (chr-ID scaffold0100 0; pos 453209 to 453764)
ggtttttgtttttggatcctttgcagtcagtagaggtttgttcttttctatctcattactgatttgttgggttattgctcaattatcggtgggtatttttctgaacttgttggttgatgactgtagtgtaggaccttctcttatcagatgaatctaaacactaagtagtttaacatttatttcaggaatttgtagtatctaaatctttgcccctttctcaagtgaggctcttgcagtatgaatttgagaccaatgcatgagcttattgttcacctcttggaattatatcttgcaaacatggagcttttctcatttgttgcacaatggttaatttgattatcagtaaagttcttgtggaatttgtcaccgcgtgtcaaatttttattctttttttgtcttctgtcagtcattgcttgtggcaatagcttcattcgtttgtttagttgcttcatctgctgtatctttctgcttttgactttgcagcaataacatctgctgttttgtggtttcccttgttgtgatgattgaccagatagcagtgatttaaaggcacctt

SEQ ID NO: 62034 - DNA, 928 bp, Cucumis sativus
  Intron number 1 from transcript Cucsa.112900.1 (locus Cucs a.112900) derived from phytozome v7.0 (chr-ID scaffold0095 3; pos 1252971 to 1253898 reverse strand)
tgtggattcctcagtggagttctgacccaggtatttgattttgaacttcttggaaattactgcatgtttttttgcctctatcttcaagctctgtgtttgaggcattgtgttgtgagtttcagtttgaattgtttttcattcgttgtctgtcaagtgctagaagagccacattgcattcattctgtttgtgaaatttactgaattagtatcagcgtttaagctctcaaaatgatttggaaatttgtgggaagcgtcttaaatatggcattccagaaacattctgacaacagttagattgaactgcaccaagtttattacaaatgcagcactttcacttgcccctactcttattttatttccatacatcattgtcagtggtgtttgagttctggcttattcatgctctgttgacttttcttactctttcttcacgatggactgaaccattggagaggaagaatgagaaaaaaaaaatccaagacttctgctataatgtgctgctttatatgtaatctaatgatttgatatgctgatttttaggaaattagttaaagctgtaagtgggctttataaacggtcttctcctgttaggctgttaccatttacacatcagaatgctttcactacttccgaagttaatttagttttcgtttgcttttttatccaaagatgttgcatcatatatgtgtaagtgcgattgacatcctgtttttcattttgcataggtcaagttccttctttgctattcataatttctctatcgctatattgtatactgcttttgctgaattccagtaaaaggtggtctaatctttaccagtatgaaatatgcacttcattccatgtataatttgttggctttctcttatcgtccttttattatattctttcagtagattctaaggttggagatcttcaaacagttgta

SEQ ID NO: 62035 - DNA, 644 bp, Cucumis sativus
  Intron number 3 from transcript Cucsa.047750.2 (locus Cucs a.047750) derived from phytozome v7.0 (chr-ID scaffold0054 2; pos 2649390 to 2650033)
cctggagctgtggccaaccgtaatacggtgactatgtatgctgtttctatcaatttctgttaacaattatatccttcttttcattagggaaaccgctgtagttcagttgggcctggcagtagaaatgatagaaaaaaatcttatggcgctcagggcaggctttgataacgtagcttgacatgttcttagcaatgaaaactattggcatgttttttcgtcaagatgatacaaattttgtcgacggatttatgtacaaaattttaggtttcattactctctttagatttgatgcttttatctgaaatctggaagaaaaggaaacatctgcctgactgtgtgtcaccatgctctcaaggaaagatgctcattcttgagttgtattaaatgctagttatgttagtgatttttctatcgtagatttgaacttttgattatcagtagaaactgtagttagcttagaaatttttgaaaaaactatcaatatgaaaacaaattaaaccagaattgcatacttgaattcaaatgagtttttgttttaaggattagtgatttcctgtaatttaatttgtgcctaatcattcttattatttttatttttcaccatatcagacagaagcctttgcttcctccattggaatctgcag

SEQ ID NO: 62036 - DNA, 819 bp, Cucumis sativus
  Intron number 4 from transcript Cucsa.103020.1 (locus Cucs a.103020) derived from phytozome v7.0 (chr-ID scaffold0092 7; pos 1901744 to 1902562 reverse strand)
ttaaagtgaggagaaagagaaatctaagatttgtggtgggtggctgggcaatggatggattggatcgatagttaatttccaatttgggtttttgtcaaaagtatctcataatcttccatggctacatcattgaaaaattttatacagatattttttttctttttatcatagtaaaaatgattttaccgtttcaatgtctaattcatggtttctcctcagaaccaaagggtgtcttgatgaattaactgcataaacttatgtttaatccacatcttcatttcccattttatctccagatttaacattaattttattgggttttttagaagaaaaaaaacatttgttatattcacacgtttaaatttatttttatattgagttaatttacaagcttatccttgggaaaaacaagttttgatttttgaacataaagtatttaaagtatgtaaatgaaatttgaatttctgtagttaacatactcctaactataaaagctatcttattataattttgtgtttaatagattttgacaaattaatttttctttcctcgaacccatgagtctatttaacaaaaaaattaaatctaattttatttccggtcaatttgttaatttaaaaaagtattgaatgtgcaagatgtctatattaaacataaaatttatatttaatattttttaagatacaacatctattaataaacacaccattcacatattaaacctacaattcgaccttatatttaatataattcatattctaaagttgggaaggaatattggcaggtacaagaactacatcgactttatcgaactcaaaa

SEQ ID NO: 62037 - DNA, 600 bp, Cucumis sativus
  Intron number 2 from transcript Cucsa.103020.1 (locus Cucs a.103020) derived from phytozome v7.0 (chr-ID scaffold0092 7; pos 1902949 to 1903548 reverse strand)
tgatcggtagtcgttaagataacggattgtttcaggtaattccgaaatacccttttggtttttgttactttcttgatcgatctgtgtgtttaatttaatgtttgatccaacttcggcattgcaatcttcaatttgagatggttttggtttaattttcatttgggttttttttggaatgtatgacagagtttggaactatcagtattatgattattgtgggggtggggagcgtgcattaagtgctcgacgtaatgactgaatgagaaagggatatttaggatagcaaacaaaagaccaatgggaaagactttatcacattcacaagtttttatttattcccactgggttgttctgtttcctgtcctcattattgctgttgggtaccgaattcatgatggcgttggccagtgatacttcaaggaaatataaaattaatcaaattggggacctttgggtttagggtattatgtttttatcttcatgatagaatttattccagaaccaggttctaaatttctgaaccacttgattgatccaatttttttaatggactttctttttccagactgtttttaagattcaagattcaagactgcatca

SEQ ID NO: 62038 - DNA, 293 bp, Cucumis sativus
  Intron number 1 from transcript Cucsa.111520.1 (locus Cucs a.111520) derived from phytozome v7.0 (chr-ID scaffold0095 3; pos 292444 to 292736)
tcgtcccaacttctcttctcaatattaccacattggtatatctcgttattattctcttcttttttaaaaaaaacctaatctgttaaagtctaaaacattctatgttgagaaagaattttgtacattgttgtatttcgacctgcaatcattagtaatttaagtatcaaataatttgttatatatatacaaatagatttttttttgacgtaatgttattagggttggaaggtgatgtatgagtttagttaaagttttgagttggatgatgatgattggttttgttaatttaggta

SEQ ID NO: 62039 - DNA, 496 bp, Cucumis sativus
  Intron number 2 from transcript Cucsa.111520.1 (locus Cucs a.111520) derived from phytozome v7.0 (chr-ID scaffold0095 3; pos 293029 to 293524)
ccgtcaaactgccgccgatcaaaccaaatattccggtaaaaccattttcatatattatagcaaagaaaaagaaataatctttgttgtttatttgcatttttactataaaattattacgattatataaccatcttctaatcttctaatctataatctaagtatacttttaaaaattaaaccctcaaacttaaacaaaaacaaatgttaccatatttttataattatgattgttaaaaggtctatttggacaccaagtgtgatatttacaaaataaaatataacacagttgtatgaaagtactttgaaaatttgctaatgttgcatcaaaatataatatttaaaagttattgttttgggtctttttttttctttttcttgttattctaattgtcgtaggaaaaagttaaaaagaaagaaagaaaaaggttgaattgtttgagtgttggataatgtgaatacagagagagaaaaagaagagtacgaaattgaagagaca

SEQ ID NO: 62040 - DNA, 744 bp, Cucumis sativus
  Intron number 1 from transcript Cucsa.091520.1 (locus Cucs a.091520) derived from phytozome v7.0 (chr-ID scaffold0089 4; pos 2514340 to 2515083)
ctgggtaagttctactgttgcttagttagttgtaattcatttaagatgaaaagattttgagcttggttaatattctgcagtttagtttctttatagttcacatcacactcactttacttcagttggcttccccttcattcgttgaactgagatcatgggaggaggaatccttaagttcaagtttttatagatgacctttttttagtgaagaaagatgaatatatgattcagtccctcatgtttgcttcatttttcaaaatttgtccacaatcatttaaaggtttatggttatctactttattaccaagcctttattgtcacaaaaatgttaaaatttattgatgaaaatattttattgtactcgcgttggatcccccaccctacatatgtatattagagaaagacgcccacccacatcacacacatatacattattcttctattaaagttcaatgatgctaaggacttaattatagtcaagatatgaaagatagaaatgaaaattttaaacgatttttatacaaaatgtaatagtgattcaaacactggtttgaaagatatcaatagctagtgagttgtttgttcgatgctgctatacagatactgtgcatctcatcagtcatattctgagatctctgaaaacttccttccaatttcttggatgttataacaatactttttatgtatacaattacacaacttaatgtgttatgattctatgcaggtgctataacaatacttttt

SEQ ID NO: 62041 - DNA, 378 bp, Cucumis sativus
  Intron number 1 from transcript Cucsa.115500.1 (locus Cucs a.115500) derived from phytozome v7.0 (chr-ID scaffold0098 8; pos 107791 to 108168 reverse strand)
cccaactctacgaccaactaaagcttcccatcacggtaagaatactttgaagattttaaattttgatcctctctatgaatgcttgttatatgtgtgttcgcatgagtaagattagaatatatatataaaaccctatgatatcatcatatatatcagataaagttttgatgaatatgcaaataatggatgatattaagattagagaatagaaatgggttaagtttttatttaaagggagagatatcgacgtgaccatttttgtttttttttgtttaatctataacttttgtgtatatgtttgggaaattctcataaaattttggtacaattttttgtacttcaggtgttgaagcaccaaggaacagcttggaattagat

SEQ ID NO: 62042 - DNA, 839 bp, Cucumis sativus
  Intron number 4 from transcript Cucsa.112310.1 (locus Cucs a.112310) derived from phytozome v7.0 (chr-ID scaffold0095 3; pos 941305 to 942143 reverse strand)
aacactgactacattgacttactgcaaatacactggtgagtttatacgttgtagcacattaattttctaaattggtagaaaatagctaatgaataaacacaaactttctctaagaggttgtgcttgaaggatgtaaagcgaacacaattttctccgcattaattttaccatttgctcttgggtcgtcctttctttcatgtgtgtcctcttaaacttatgagaaccactaaatttttcatggagagcaacttataggatactatctatcagatgtagttcttaggaaggaacacacagctcaatttgctttgaaattgattttttttgtttgaagggaaatgaaattgttgatcttttcttcctagcagttcatgaaattgagtggcttatagtcattgagagtgatatacacactttggatctctggggggagtgcatgtgtttagcgggtgggaaagggatcctagtaaagtatggttctttgttagatttaatgtttcactttgctggttcgtatttttgtacgagtttctcttttgtactttcacatttctcaacgaatgtggccatgataaatttgtatgtatgtgtgtgaagaaaaagaaaaaaaggggacgaataagtagcaatttatttgtgaaactacaagcacctgcacaaataaaaaataaaattccgatccatttcttttactttaatgcttgctgtgataaaatatctgatcacttttattaacttgtcttcctttattttaatttcgtactaatacttgcgtcttttagtgcttgtttcctcttgatatatctaatgtgtttgatttttgttcaggccagaccggt

SEQ ID NO: 62043 - DNA, 796 bp, Cucumis sativus
  Intron number 1 from transcript Cucsa.018120.1 (locus Cucs a.018120) derived from phytozome v7.0 (chr-ID scaffold0025 2; pos 421054 to 421849 reverse strand)
gaataaggtttgatctcctacttctctctacatatcaacttcaaggttctagctaattgcatattacaatgatatttgttcacttatatttctactctttggagctacttttgttctgctaatttacaatcttccctactaattaagcatattagaaaaggacttagaaccttgctgaactcaacctcaaaccaaccatattattgatcttcaaaaacaattctacaagaaagataaattctatccctactacaagaacaaacaaaacagcttaaatctttcatcctatatgtacaaactacatatagctttatgtagcctcaaaatgaaaccttaaatattctgtgagacatttcaacagttgttgccttatgactataatcatccatttatgtaaatgtaacatgaaagatgcataaagtgacataaaaactagaaatacatttaaaataaataccataatttctttaaccctaaatgtatttttcttgatttcaattcctcttctcttcccttagtgcacatgtgcaattttcataactttggttttggttttgtgaaaaaaggtatatgattgattatattaacgaagatatttgtacatactcgtatacctataatcatcctcttatctaatcaatgtaaacatttggttgcatcttcaaaacattcttgacatctttgtcctatttgaatcatgtagataatcggatttaaattgattttttttgggtgtggtatgaaaattaggttaatttataaattaaaaatagtattgtaacaaactttggtagat

SEQ ID NO: 62044 - DNA, 957 bp, Cucumis sativus
  Intron number 3 from transcript Cucsa.100970.4 (locus Cucs a.100970) derived from phytozome v7.0 (chr-ID scaffold0092 7; pos 255741 to 256697)
gccagtcatttcctttgaatgtaataataaattccttcatctgttagctctctcattcattgttattgattcatgcactcgccttttatttttcttgttaactgaaaacagatattgcattgaattattgataatgagaagtatagacaatacaagtatgtaggaccagggaacctcaaaagacagaaactgaaactaaactttgttctcgtaggttaagaagtcatggcaaactcatacattacattttttgaccaatcaaaagcatagaaaaaaaaaactgaactctatccattaacaacttgtcattcttcatgttttctcaaaacatatgcttgtttgtctgagttttatgacctaattaagggtggtactgctaacattagtccttgacttgcaacattacgataaatatccctacaaaatagtgagtgtaaatcttctggaactacccggaaaacatataactgaaatactaactgagtccaccattgaaacattgatttagcccttgtgaaccttatcctgttattgttttcttgcattttctgttacacttcatatctgttgtaactctcaaattttaaatggaggaaatagctttcaatcatttgattgggaggaagaatgaaagaaaaacaaaaaaaaatcttatttctaacaagaactttgcattgacaccccacccaataaaaagattcttgccctgaagaaattggtctgccttttacgtctctatctctcattcctcttcatgtttgtatcataggatctatacaagggtttcaaactttattatcgcgtcatctttttcattcagggtttatattgcacactcttaacaactcttcccttacacttttcctttgatgctttccacttccatgcgggaaagcaattgtgatggtttttgtttacatagtcttgcagatcatagtgggatccttaatatttgcc

SEQ ID NO: 62045 - DNA, 589 bp, Cucumis sativus
  Intron number 1 from transcript Cucsa.100380.3 (locus Cucs a.100380) derived from phytozome v7.0 (chr-ID scaffold0092 6; pos 879510 to 880098)
gctccttgggctcctcgcttatccgtccttgcaaggtattactaccaccattgctgtatatgtctttagcttgtcagagctttaattttactcatttcagtgtgtctactcagtttttatatttggttcattgtccacagtggtaactaagttcgtttgtgcgagttgtaggtaacaaggtgatgaaatccaatagttattcgttgaaatgagattaccctcttggtggtttttttttctttctctttttattcccgtttatttggtaattggagtgggttgatggctatctttagtggtagttagataattgttagaacaagaataatctgaccaagtataaattataatgtgcctcttgttttttgattttccttgttgatttggtgtggttcgagagtgcttgtaaaatgtgtattaaggatttaatggttaacaatttctgttttaatagaaaggtgttttcactcatttgctcattggttgctacttgtcttataagtcataacttgtttccatgtggagaatgtttaattatatcttttttatcttcctagaatttcaccagttaatagaagtgataaggaag

SEQ ID NO: 62046 - DNA, 518 bp, Cucumis sativus
  Intron number 1 from transcript Cucsa.072550.1 (locus Cucs a.072550) derived from phytozome v7.0 (chr-ID scaffold0076 5; pos 5969 to 6486 reverse strand)
gactacaagacttaccctcaacgccttcttaaacggtaagtacatggtgtcttttcgtttattaaatctgcttcaaatgacttacgattaaacaagaaaaaatatatattcttaaacacttgaaagagtcgtaacaattttatatttgaaaaagtaagcttattaacacttttcaactttcagaactgctatgttatttatttttattaattatttcatcaaaatcttaataaaatttaaaaattagaaaagctactttaaaatctttttaatttggcaaaagaattcaacttatccaaaaaaagaaaaagactatgatgagaaattgcaaagaaataaacataacttttgaaaaccaaaaacattattgtcttagtttttcttattttaaacatataacactaagaaatgtgaaaatttcaaaagtttaggacgaattcccaaacttctttttagtgtatatgtattattcaagttaatgaggaaagggtataagaattcgtggatgtggcagggag

SEQ ID NO: 62047 - DNA, 593 bp, Cucumis sativus
  Intron number 1 from transcript Cucsa.134630.1 (locus Cucs a.134630) derived from phytozome v7.0 (chr-ID scaffold0104 3; pos 243563 to 244155)
ttgttagatggcactcgaagaccacagcaaaaaattcagctacatttaacatgaaaaaattcaatgctttcataaacagctgcaatctaattgatcccccctcaacaattctaagtatacttagtcgcatctcagaaatcagcccacaatatcaattaagacttgacagatttctatacactttggattggggaagtttctttgcctcacttttcaagaactctttctagagtaactttagatcatttttccattgatttcttaaatcaaacaacttaaaatggggcccatctccctttagatttactaattttaaacagaacattgaaaagttggtggaacataacaatactgcacaagaaggccattctggttattcctttcatgaggagactaaagcaggtatcatccaccattagaaagtggaacaaaaatctcatagaggcaaatgaagaggaaaagaaggcatggataaaggaaattgattccatagacaagatggaagaagaaaatagtattactgaactccatatcatgcgataactgctatcaaaacagacctaaaccaattggctctcaaagaagcacaaatt

SEQ ID NO: 62048 - DNA, 749 bp, Cucumis sativus
  Intron number 1 from transcript Cucsa.109980.1 (locus Cucs a.109980) derived from phytozome v7.0 (chr-ID scaffold0093 4; pos 888078 to 888826 reverse strand)
ctctcccagggcttctctcagcttctatctgataagtaagacctcctcttctggttatacattgctggagtttcttctcttgatttttctgtaccgtttttcactttgtggtgcggaaagatcgtatggtatttttggcttcgagcttagagtgcatatacattttttcattgttgcccttttttttctatctgtgtggattactcatggtctctctagaaatgtgcttattaacgaattggaattttgagcaaatccatggtgactgggccgccaacctaggatttaatgctatatgggtttctttagtacctaaatgttggagggtcaaacgagttattcgagagattagttgaggtgcgtcaaacgaattgttcgtgagattagttgaggtgcgtcaaaagaggtgttcatgatattatttgaggtgcgtgtaagttggcttagacactcgtaaaaaaagaacgggaattttgagcaagctggggcaattatcctttgtgttgaactcaaattgaaaattttggttctaagaaatatactcaaatctcattttcttcaaaatttttggtacttttgctagtagtataatgggaaaagtaggtttttgcctattgtttccagttcttgttttatatacgtaaaacggggatccataattttttttactgaatgttattattgatgcaactatttcttgattccacatattaggtcatacccagtgagacaggcggcagccattgctt

SEQ ID NO: 62049 - DNA, 941 bp, Cucumis sativus
  Intron number 1 from transcript Cucsa.121110.2 (locus Cucs a.121110) derived from phytozome v7.0 (chr-ID scaffold0099 8; pos 3136790 to 3137730 reverse strand)
tcggcgatatcatcttggggtcaacgtcattctcggttacacttccatctcatttttaggaattattgttgttaaatgagctgatgatccccgattttcttatcgtataatttgaactagtttcttctatactctttatgtttttcttttattatctcttcattttgtacttgtcgcggaaggttgaccaaatttttgtttagaagtcgttgatttgaatagactctactttgagtccactagccaactaacaatctcagaattttgaatttgcttctttactctgtaattcatcatttctcccatttgcattaattttataatcactgaaaatttactctatattcgtttccgaatcttgaatgcaactaaaaataaaatttatgaaagccctattgtggtttctgcgttctagaaatttactattgtgtgtttcttcgactcaaatgtgctccgtttaaggccttagacgctaaagtttctgcacactttacccttaatccatgcttttctatctgtttgtaataatattgatctgattcttgcaactttgcgaaacaaataacctatttgaatttggagttttgttggctcgttgaattttgctcttattttaagtattggtgcactgtaaaggttaaccatatcatataaactatgcgtggataatctttgtttacgggttcttttctttgttaatgcttgcatcttcccacttttcggattcaagctgttttggcaccttactgacttagaaagtactgaattttccaattcattatagagttaatttttttggacgtattctatatgtttccaacactcatacattaatccctttccttttcatggttgacctcacattcatctatatgcagttatgacatatttcttggttgttaaactggattttgatagtgaactttccccccctccaggtg

SEQ ID NO: 62050 - DNA, 635 bp, Cucumis sativus
  Intron number 1 from transcript Cucsa.061510.2 (locus Cucs a.061510) derived from phytozome v7.0 (chr-ID scaffold0065 1; pos 47616 to 48250)
cttcgctggtgcatttggtggcctccttttcttcagtaatgataatcataattccttctcaccctttctctttttttattttcacctttttatactttcctaatcttcacatggcggatgttacagttttaacccaagcatttctttctctcgctattatttcctataaattggaattgcatgttattacattggatcaatcgtatattatgattttttttcgtctgtcgatttggaatgtatgtttatcaacaaatgaaagagatgtacagatttattctgcgacgagactgtaaacttaagaaatttaggttcgcttaacttggctcttcacatatttggtgagcatttttttctgtactactcgtgtatccatttacaaatatcaggattttctacgtttttgttaagcaaacttgtgaatttgaacccagtcagccaatttcggacatgcaggatttttgcaaaataaacggcctcttttgttgtttatgttgaagtaccgaactcgttaatcaatgttttatcatgtttctgaaacttcagttgtttgattctaataaactcactaatgagcactgtatcgtgatttacgactagggagtccggtgactcgttgggcttctatagctttt

SEQ ID NO: 62051 - DNA, 957 bp, Cucumis sativus
  Intron number 1 from transcript Cucsa.050020.1 (locus Cucs a.050020) derived from phytozome v7.0 (chr-ID scaffold0055 1; pos 171462 to 172418 reverse strand)
atagtagcggtaaagtttactctcacgatgctttcattttctgttattagggtttttcttcgaattttaggttgccggttttgtttttagaattgggtttctaatcttgctttatgggggcgtagggaagttgtaggttgcttggaggaacacccgagtttttcaaccttttacactagttcttttctttgaagggaattctttatattttgcatccttcttgggaaatttgtttaactacataggggttgctggctgtttccttgaggatgtgttgcatatgaaaatttggatcctttcttctgtgtatgatctttagcctgataattgttgcaatacctacccagagcgtgacaagctgttgaaattgaaatattgttcgagttatctttagttgtattttctcacggcattgttgttccttttctttttctccaaatttcttcacttaatatcaactcaaagtctgttcgtataaaaaataggcaagaaacacctgattttctcattatatgtgatttctcaagcccgagtcatgacgaggaggctaagaacagagcaagtatgaaaatagttgtagttgtttggataattggctatttggtttctgagcatttaaaaatatctatgaaggaactagtttatcagttttattcaatttacgcagttcatgtctaagctattgccgcacttgcacacatgttaacgattctcctttgaatgcaagacttagactgaccttctgcctttttgaaggtatccagtacttccttagcctcaaacaaatcgttttttaacctgtttatattagtagccagttcttgattattgatccgcgggtttagttcttcaacatttttgtttcagaaaaagaattactacacttgttcctggctcctattatttgaattcagctgtttaatttttttgtggtgctatccgtttcaggaactgacg

SEQ ID NO: 62052 - DNA, 379 bp, Cucumis sativus
  Intron number 1 from transcript Cucsa.086150.1 (locus Cucs a.086150) derived from phytozome v7.0 (chr-ID scaffold0087 0; pos 415712 to 416090)
aactcccccgccgtctcttccttcttctccaccgggtaatagtggttctatgttccttctatttgtgacaaaaaaaaaaaaaaacagtgtaaagacgaagttttgttgaacaggagaaaacaaagtctcacgggtgtcaattgtggccattgtggttccaattgcaattactgtctcgataattctggttgctgtgggatggtggttcctgcaccgaagagcaaagaagaaatacagtccagtaaaggaagacagcggtatttgttattctttattttattttattcttttttatcgtacttgtggaattcaagtagatttgagtctgtgaaatcatgttgcatgcttattattagtaccataatttgtgcagttattg

SEQ ID NO: 62053 - DNA, 452 bp, Cucumis sativus
  Intron number 1 from transcript Cucsa.048940.1 (locus Cucs a.048940) derived from phytozome v7.0 (chr-ID scaffold0054 2; pos 3536606 to 3537057 reverse strand)
ctctcgtcctactatccttcttctcgatcgtggaggtaatctttttctttttctttttctctttcccatcctacaatctattaatcatcttatgttatgttatgctatgcaatatcgacttttcaatttccatcatatctgttcccaaaataccaaatctactcattttgctttacgcctcttcttcacttcactgtctcaatacccccttcatcttcatccctacatcatactttgttttttcaccctttacattattttatttcttttttctttttctcaaggcttattgctctgtttataatttgacttttttttttccatttataaaattttgtgtatgtgacttatgttctgattgaagatttcaatctcaaaagcacaatgcatggtgtgttctcacgatttcaactttctcttcaattatcagattgctactttgcattgaaagt

SEQ ID NO: 62054 - DNA, 618 bp, Cucumis sativus
  Intron number 1 from transcript Cucsa.051030.2 (locus Cucs a.051030) derived from phytozome v7.0 (chr-ID scaffold0055 7; pos 218638 to 219255 reverse strand)
aaaagcgtgggattacccacctcttccctattcaagtactatcccactctctgacttcgctttatgttccatttctcattcctgtctcattttacagttaatgtggttattagattttttttctttccaattacctgccaaatgctatccacaaaagtgggacacagtttctttctttaaccagacgcactgctataagttcgtagttatgattttctccgttctcgttccatattttttttctgtttttttgaggctattactttaaatttagttattatctgttcgcttaaatttaaatttcaaaattttatagatgtgggaaatgctaacacgcaaaatctattgtgcacaaattttgagaatgatggatatccctgcttgtttgagaactttcatttaggatatagattcattttatccttaatttaatcttccagttatgttaatgattaatttgttttgaaccttaatatacgtttcgttacaagatatttgttgttgaacaatttgattagtcaagtggtgtgattttatctctaatgtttttctttttttttatttgttcatttgaaacacgcagagagctgttcttgtccctgcattagaaggtcgaga

SEQ ID NO: 62055 - DNA, 764 bp, Cucumis sativus
  Intron number 2 from transcript Cucsa.094170.1 (locus Cucs a.094170) derived from phytozome v7.0 (chr-ID scaffold0091 9; pos 394125 to 394888 reverse strand)
gtacaggtaggcacttttattttataaagaaattgacgtgggtctaaatgtagatatttgtgctcaaaatggagtttattggcttatctttgaatagatttgttgagcagttcacggggtgttttctttacacggaaaatatattggatttgccaaaagttttggatagagatgcaatgagggttttgaagtagaggttactttctgcagtttatggtaatgtcccctcctgcaggagtgtttagcaggaaaaaagtatggatgcactatgtattttatatcaccatttcacctcaagattgttttcatgaaaacaattttattgtattggttggttcactttattttctctagtggacctgttagtaggattcaagcctgaaggtctcaccatctgtaagagaaaaaaaaaaaacaaatagatcttgttgggttcctgagaaattcttggatttctttcagaagcggatgatttttcatctacttcccatgtttcaagaatgattatcatgacattgagaaatacccaaaaaggcatttaggaaataaatatgattcaatctctgcgcggttcgtttcaagaaaggaagatccctaagaatcaatccttcttttagttgttgcaatgcttcaaaattttctccatagaagcacattttgctattccgggttggatgctttaatatacatcaattaatatgtgcatatgaagtctcttgtttaatgtagtttgctatgtacagttggaccaggtggaagcccgg

SEQ ID NO: 62056 - DNA, 777 bp, Cucumis sativus
  Intron number 2 from transcript Cucsa.025320.3 (locus Cucs a.025320) derived from phytozome v7.0 (chr-ID scaffold0034 5; pos 174105 to 174881)
caaacatcgaccctgatattgctctctcctacatcgtaagccttttgtgcatcttgtttctatattgcaacttctagattctcgatttgaccttgtttactgaattagatccagactatggtgttttagaattttgggttttattatgtctttttgtagcagctcaagctcccaaaaaaatgggttttccctctcttttcttttccctttttgaatgcttctgtagtcaatgtgtttgagcccatagtcgcagttagaccgtagtgaatgtgaataagaggaaatgtgagaaagaatgagtgtatataggtgaagaaacttgaatattgttttgctgcccctattgaaaaaagggtctgtttatcagtggagcaaatgattcatggaatcattcaccacttgatccattcagggaagatgaataattttgactgttatttcttcttgaacagtcaagttctttgctatgggatctctttcttgtattggaagttacgtgtcacggaggaattgaactctagctcatgaattgtggttacctcttgctgaaaaattcagtgaacattctgttatctgtatgttatgatattcatcagaaatgtaatcattgaacttcagagtcttcagttgttgatgcatttttttcctgtgggtgtaagagtgatttcagtaactcatctcccagatagagaatctgtgctgatttgactgaggtcttattatgtcttctaaggtcttgttatatgtgtttgaggggtgtttaacttgttgatcagg

SEQ ID NO: 62057 - DNA, 510 bp, Cucumis sativus
  Intron number 1 from transcript Cucsa.121510.1 (locus Cucs a.121510) derived from phytozome v7.0 (chr-ID scaffold0099 9; pos 71230 to 71739)
ctgagtggccgatcgttgccttccagcgccgtcgagtatggtcctttaactgctctatttcgccattttccctttgctattagtcttcagtgctctgttctcacatcattctttaggattttttaaaacttttgtatattcttcattttccgaatcgttccaggtttgtgattgtttggtgtagttagcctgctagacgaaggagatggttaatctattactgatcgacttcggcattgttatttaactttattcgtttgattgagtccttgaatttatttatagacagtgagttgttaaagacttagattaagaaattcctcacaaatgcctgaacaggatatgtgtgttttgctttcgtaattccttcctacaatggatttcattagacgagtttgattagatactatgaattttcattttcacaatgtttagctgcctcttatcaatggtttattgggttttttttttcatcttacgttgttgttttgattatctagatttctcaag

SEQ ID NO: 62058 - DNA, 386 bp, Cucumis sativus
  Intron number 1 from transcript Cucsa.010870.1 (locus Cucs a.010870) derived from phytozome v7.0 (chr-ID scaffold0015 4; pos 246158 to 246543)
aaacgccaaaggacttcgaggcgcagattttctgggtattgctttgtcttcattttcataccctcttctttgcacaaattgtacctaccctttcttttgatacctggggcttcttcacgttctttctatttttccattttttggggtttattcttttatcattagtttacatgtaagaagaagaattcattttttcttcttgtaaactgttgttagattacattacaatctctggtttctttatattgttgaatcaagctgtttgatctggataaattaagtttgtgaattgtgattcagctaattttatgtggataatgactatgctgttactttcttattgatcaaatgatttttttctcgtatggcaggtagaattgaccctt

SEQ ID NO: 62059 - DNA, 467 bp, Cucumis sativus
  Intron number 2 from transcript Cucsa.010870.1 (locus Cucs a.010870) derived from phytozome v7.0 (chr-ID scaffold0015 4; pos 246560 to 247026)
taaaggccaagaacacaagagcagtgttgccaaaagttagttctctctctcttttgtttccaatttcataaatgatgaactattatatacatggtttttctttcttagaatctctcttacgtattcattaacatttgattcttaatcagattctgtccactatattgctatataatatgctattagtacattttttccctcttgaatactttatatatgatctaataaaggctcttctaggagtattttccggggaattggagttgaatacacaaattttcagtttggtttgtcgaattaaagggttcaatttgtcattctggatttagaattttagtcataagattgaatttggttttgggtaagtgagatgtgctctagaggttgttagtagtgactgagaaacaaaggatgaggaaattcaaagcgaagtggcattcttatttgtgtcatttttaatggtgcag

SEQ ID NO: 62060 - DNA, 789 bp, Cucumis sativus
  Intron number 3 from transcript Cucsa.084850.1 (locus Cucs a.084850) derived from phytozome v7.0 (chr-ID scaffold0086 2; pos 519229 to 520017 reverse strand)
ctgggttcatttcttttcttttgtcaatcatctaggtttgtagatagtaccatttaattcgattattagcctttttccgttttgtaagattatcactccaattcaatatgcatgcatacatgatagaatttgatgcacttttgccaaagtacagaatgtatgggggaaaaaagcatagattgaccaattttgaataggaaatttctggaagtgaaccatggtagttggaagttgtggagtatatcggggttaaaccatttcagaaggggagagagcataattgtttatgcacttacatgcttcaagtaatgaatttaatatctctctctctctctctctctctatctatctatgaagtcatcgaccgccttgattttagcctctagatctcttcattctcgcaatattaaaagcactttagcacaagggtccaatgcaatcatgaatcttttgaactaatttatttgattaaatcaactttagttcagaaaacttaagccttttgttgttgtttttaactttttcttgggggaaggaggatcaaagggtacaaagcagttgtttattttctaggataatatatcgtgcatgtaggactaattataaatcaacctgttctgcacattaagcactttgcactctatacacatttgttaagtcttcatttgcaattaaattttgtcttgactcttgagatttcttcagaaaatgaaatgcaagtattttttttttttttttctgttgaaaatggcaggttctcatctaagggttgcttcttgtttgctactt

SEQ ID NO: 62061 - DNA, 522 bp, Cucumis sativus
  Intron number 2 from transcript Cucsa.042520.2 (locus Cucs a.042520) derived from phytozome v7.0 (chr-ID scaffold0054 0; pos 913578 to 914099)
aaataagggtatgattctgtttttcctttttctatgttgacccagttcctttttattgacttatgtgcttttaatgctctttgttttgatgttcgttgaatttcattattgaagctgctcattcttcaacgttgtcatcaattttgcagaattctagcaattgtgttgtagttttttttcggttttttcgacatttcttttgaagaaagtaagttagagaggaaatatgttttcaacgttcttttatttgaaatggggtcaacttcatgagcttaagtggatatcaggttgaccggctgttttacattttgttgtaccttatcaccattcatactttcttgtcatgtcttttatggaatgttgaaatgtctatttatattgttttcaaaaaaagtttcagtgtttatatgtcatcggtagaagacaatttctgaagcgaatgttgtaaaataattgcgttgtttttatgcaatgtgggatgttttagagtcacagtgaaccaaagcactcgaggtggagacc

SEQ ID NO: 62062 - DNA, 741 bp, Cucumis sativus
  Intron number 2 from transcript Cucsa.043150.1 (locus Cucs a.043150) derived from phytozome v7.0 (chr-ID scaffold0054 2; pos 66037 to 66777)
ctcaggttcatcgttttatacccctatgttttatcacctgcccagcagcatccaaatcattgaagttcaattctcttggttttcaggctttatttaatcgctctgtacattctcatcattatatcagcccaagtttttctaagtattaggaggttgatatgtactaaaagatttttgacgtgaacataaaatggttgcttcatgtctttgaagctttactgagctaaaacgcttgaaataatgctatggaaatttgctttagcagtcatggtggtgatacagattatgattttttgattagatgacgaccaatttatttcagctttgagaaagtattggctgaggggagattcaagatcttcctacttctcccctgtctcccttagatttcaagcaagatattaccaatacgtaccttctcccagaagttatcatctctacatacttcccgtaatggaaggcagctgcagccctaactaactaatatgcttggggcgccacacgaatataaatcatattacatattacccagagtcccctttcttcattgtcttacatctctctacgtaatttcgtgattggggtctatcttatcaaagttgatcgttacatagtgtagggcaagcatcgtgtcaaacagaagcatgtgttcatcttcttttcagttttttatgttgtagtcttaaaaaatctcctttggacacagattcttgaaggccaggaagtttgatattgagaaaa

SEQ ID NO: 62063 - DNA, 754 bp, Cucumis sativus
  Intron number 1 from transcript Cucsa.100140.1 (locus Cucs a.100140) derived from phytozome v7.0 (chr-ID scaffold0092 6; pos 732761 to 733514 reverse strand)
gccccttgtcatcgccgccgttgctcatttttcaggtctccaaggttttttttttcgctttattttgttttgttgggctatgttggtttattctcttcaccgacggagaagaaaaatcgatagtgttttttttggggttgttgattgcttcttcaaccaatgttcaagtagtctgaatgaaattataaagttaagaatttttattagagggaaaaaaagattgaatcaagaggaataagggaaaaaacttatcattcctatcggtgttagtaaatgaaatgataaaatgtttaagaagatgaacaaagaaaaagagaaaattcacttagtttgtttggctataaaaagacttgttggaatagaaagcctgtgtttaaatatattaaagttattgttatcaattaaaaacaaaatcaacattggacaaataaactagaaagataacattgagtttgagtctgatcgaacgacatcgaatcttcttgaatattgaagaaactatgaatgcctacgaactggcatatggtggtttttgttagacaggcgtaaattaaatttatacatatataagaaatcttatgaggtgttcatatatattatggggtagaattgtaaacaggtgtgtgtatattagtttcaactgatgtcatttttcaaacaattggtttcatttttttgggacatccgaaaacactgatttgtaatccttccaaattcaggggtttcaaacaggggttaagatcttttggaatat

SEQ ID NO: 62064 - DNA, 187 bp, Cucumis sativus
  Intron number 1 from transcript Cucsa.025130.1 (locus Cucs a.025130) derived from phytozome v7.0 (chr-ID scaffold0034 5; pos 19074 to 19260)
tttccccttttcccctcttaacgatccactcagtacttcttcatctcttttgttaatcgtatctgctgattacatttaataataatacccatttgagtgattttggtgtttctgttataaaattttgaaattttctctgggatctatattttgttttatttccacaggtgatacggattctcggggt

SEQ ID NO: 62065 - DNA, 689 bp, Cucumis sativus
  Intron number 2 from transcript Cucsa.025130.1 (locus Cucs a.025130) derived from phytozome v7.0 (chr-ID scaffold0034 5; pos 19274 to 19962)
agaagatagaattcttggagagcttgactgggaaggtggggtgattgtaaatgttcgaaattttctttttggatcgtcactccatctggactgctctgtgaactgcttgcttaagtttcttgtattgattgtagttctatcagtacgatgcttttgcaatgtgcttttgataaaatggaagtttaacatggttacctgatgatgaatagttacaaaatatttggattttaatctaggttttttgttttgttcaatatctcatatcattggcttcattttgaaggaaaactagtaaccgtctggtcattttttcagttctcattttttcaatattatttggagtagttttcatgtggtaaggttatctaacatttactatttattctcgaatggaaattggaattacattgtgaataaaggtgcatctcaatgcctaaatgggttacctgagtgaaaccaatgccaactctcttaatatatgaagtgcctaagtgttcatattcctatcatttctcccaaaattttactaaaaggcttcagtttaagcaaactaattttcccccaagttaaatcgatactgcactttcctatttaccttttgacaatctttgtccacagaacttctcttttttgttaacttttaatttttccccctactcttctcaggttaccaataggaagtctcgcag

SEQ ID NO: 62066 - DNA, 971 bp, Cucumis sativus
  Intron number 1 from transcript Cucsa.091610.1 (locus Cucs a.091610) derived from phytozome v7.0 (chr-ID scaffold0089 4; pos 2569392 to 2570362 reverse strand)
cataaatcaatcttcctatctcgacaagtgctttcgtaagtttttatttctcttaatctgatctttctttcgtttttcttaaattttcctgtcatctaaataaaatttgatttagaaaaattattcatttttatgaattggggtttcttttttccgattcctgtagtgacccatttggaaatattcctttatgtgttactgtatcaacagaagaattaagaatcactctcttctccttttattaggagattttagctattagcttttagctcttcccccaattatcaaggtttctgccactgttattcgtatttgattaacgaaattgtttgatgactatagtatcttgtttgataattaactgaattcatttggtatagagatgaactagctaattccttagctttgagcgtataaaaatttcttctggagatgcttaatttgatttaatatactcagttctttagtggctgtatcctttaggcaaggaattttgcgtgttaatatggcttcatcttcttcgatgaaatggaaaacagaaacagcagcgagaatgctttagttttctttgatttgttgaatttgtaatcattgatgaactccttcactgtctttgagatgaatatgttcatttaatttatttttaatatacttgcttatatctaggcatgaatattagtttggtttatgttgtgtgtaatgcatggaatatcgaaatgaaagaggaaataacacgtagcttaagattttacatttggtatcatgttgattaccagtaatttccaaagtttaaaccttgaagttttggtgaatttgatcatttagttaactctaaagaatctattagttcattcatgttgagtacgatgtaccatttagaaaaagaggaatgttaagaagtttgaatggttttagctttcaactctatttatatgccttccagataacttttgttacaattgcattgtaca

SEQ ID NO: 62067 - DNA, 850 bp, Cucumis sativus
  Intron number 4 from transcript Cucsa.029410.3 (locus Cucs a.029410) derived from phytozome v7.0 (chr-ID scaffold0039 7; pos 25822 to 26671)
attcaacaaggtaaaatattatatgttacacccattcattttatttgatttcaattttagtataaaaaaaattcaaattatagcctatttaattaatatctattttatttttcggtataaaaaatgaagccgaatttatttaaaattttacgacgtataattttcaaatcagaaaacaaaatgataaattagttattatttacttacttaaataattagactatttctttgttaggatataatgttgttattttggacatagactctagtcattttatttttaattttatttgaaagacttgtctagcgaaaatgataatatatttaagtaatcgagttttttaaagtattttatggtttaataagacgatcattacgtcgtaattgtaattgactctttattatttacgacttcttttagtaattatttcatcgatttaattagtttgttttttaattgaacttattttctctttatttattaaatttttagttaaattttaaatgtcaaacaactatttgtttaaatttcaaaaactcaatataataaaattttaatgattataattctatgtgtgtgtttccttttcattgcaacgtgaaggaatcacaccctatgcaaatctttaccactacgatcttcccttggcattacaagaaagatatagaggtttactagacaagcaaattgtgtaagtttgatcaaacttatgtgtataacttatattttcatacctacattgggttatgattgcaattattttcaacatatatatgtgcatgcaggatcgattttacaaattatgcagaattttgttttgaagaatttggagatagagtgaagaattgg

SEQ ID NO: 62068 - DNA, 768 bp, Cucumis sativus
  Intron number 1 from transcript Cucsa.065630.3 (locus Cucs a.065630) derived from phytozome v7.0 (chr-ID scaffold0069 6; pos 313642 to 314409)
cagagcaatttgctgtgagctaccactagcttttggtaagatcaaaaagcctggcaaaaaaatttgttgagaatgcttggtttttatgcttattttcatatcttgaaatttcctgatttgtttgagtgaggaaaaattttcttttaatccccttttctgtgatgagtttgaatttaggatcatctgggttttgagttttctttttgtttctttttttctctgttcttgttttttttttttttgtttctcatatgatcgttagctgcagacacacgacaaccatatctgatctactgggtttcagtacaaaattttcatgatatgctttactgtttctcaaataaacaaaccaaaagtttggcccagggagagggagagagcgttgaagattatgccacttttacatattgccatgatttgttggggccaacagagcactgtgaaagaaagtaatgaagtgaagaaagtagagaaaagagattcgagtgaaagcattttcatataccttttcttttggtttacgtatatttttcttttctgaatatcttacgaaagtggctttggttggtagaagtgggggtggtttctcaggagtttctttgaagggagtgtttgttatttggttgtttcattttttctgttgattttgattaagctaccatctaaatttttgtattcagcttttcttttctatgtttgatttttaatgaaataattctctgaactgaagcagttcttgtgggtcagagagctttgaaggtgaacacc

SEQ ID NO: 62069 - DNA, 330 bp, Cucumis sativus
  Intron number 2 from transcript Cucsa.105350.2 (locus Cucs a.105350) derived from phytozome v7.0 (chr-ID scaffold0092 9; pos 78344 to 78673)
gccttgcaagtggtggcttcgaggtcacctacctggtaaactgatttgatttctagtcacatcttcttgtttactctctctttttcttttttttttctgttttcgactctgttgataatgtaatagcatgactcattaattggtaaactacttcctttgtttggatgaattgtgatgagaattgggtactcgggaatccttgagtaggaattcacgaagacataattgcatggaataaattgagtagaacaagtgttgggaggggtttctgataagttttgattgtctgagtcagttttaattgactttcattgcagactttttgttgaa

SEQ ID NO: 62070 - DNA, 988 bp, Cucumis sativus
  Intron number 1 from transcript Cucsa.002530.2 (locus Cucs a.002530) derived from phytozome v7.0 (chr-ID scaffold0003 3; pos 4400 to 5387)
ctcgttccgcaggtatgttcgttcttttttttgttctcgaagtttgattcagaaatgatttgtggtagttcgattttttttttccttttgtttagttgttgaggaagataggaaagaaattacgagagatttgagtgttgtttggtagcttaaaacaaagaataagtcaattatgccaatcgagtgtttttgtttttggaattttttacgttgcatcccgattggttgtagctaaaaattgaacagtgttttaaaccgaaaagaaaattcactgaagtgtatttgctgaaattcactaaatctgtttcaggacacttttgattttttttttccttttttgttcttttttcatgggtaagtaacttcaagtccggttcctcatccttaatgaccttaatgatttctggagccatttactttgggtgattatgaatgtttttgggtttacgtccactctgtaaatagtttaagttcaagtttagtacgagtaccacaattggcagttcctttaaacgttcagtcttgtttatggaacaagaacaaattatcaccattggatttctagttcaatcagtcaagcaaggaaatattgatgtttgaacaatcttttcttgacatcaactatcttatatttcccatgattcagctcttcaatcatgttgcttgttatttcaaaagtttcatttcatcgattttgcaagttacgttacaatgtaactgatgatttttgaaaatgagcaatgaacattaaaatctgtacaagttactactaagacagtcagattgaattgtcaccatagatatcatttttgttttgtatagattagtaacttcaaaagatctattatggcataatgtaaattttcttaccatagatcaagtttctgttgttgaagattttgacctgtcttagactctattttacttaaatatttcacaatagttgacttaagttattgtctgaccgcttgttctgatttaccaggca

SEQ ID NO: 62071 - DNA, 935 bp, Cucumis sativus
  Intron number 7 from transcript Cucsa.114390.1 (locus Cucs a.114390) derived from phytozome v7.0 (chr-ID scaffold0096 2; pos 213818 to 214752)
cagggaaacaggtactgattttctcaattatcctcactaagactaagagtcaatgactagacgaaagatatctgtccacagtccaaaacctccttgcatatattatccggttgaaagcaagatattttgaacttttgtattgttttcaagttatgaagcttaccactggcctcgttttaggtcagagcaaagaaagttttcttgagagcaacccaattttatttagacttgtaaataagaataagatcgacttcctgtggccctcatggtgttctcaatccaaagcttttgcgaattattctaatcaaaacatttgtttgaattagagtgcttttatttcccaggtttagttattgtattacttttcttttgttatggtgccttgtattttttagcatcaaactcctttcactataaaaatgaaagttttgtttcctttttagaaaaaaaaatcaaaagtggagcccatggctataataccaagaatggtaaggaaattctgaagtcatgagcttaaattaatccagatcctccacgttgtcattgattcaaagaattatgccttgaacgtggggtgctcaataagctttatttgactgagaagattattaggcttggttcgtcttctgttatgtgtatgcgaactaaaattttatgtgcaaataacgaacgaacaaacaagacttcccaattcacgtttatggttgcccaatgacaaaattataaaactgttcttccagatatcatttttggatagtattgcgcgtagctctgttagtaatttctcctccatcctcctacaatctacagtcttcactgttggtcttttgtttgattttttttctgtctggctcactttggttccccccctttccagctgactttgaagtggtgttttgttgttcattctggggattttctctatgacagataat

SEQ ID NO: 62072 - DNA, 847 bp, Cucumis sativus
  Intron number 1 from transcript Cucsa.090870.3 (locus Cucs a.090870) derived from phytozome v7.0 (chr-ID scaffold0089 4; pos 1990792 to 1991638)
aagcccagcaactccaaacttccactcactcatcggtagtagaaaagaaggtcaatctttaattactttagtttataactgtattgttcatttctggattctttgtttactttgttttttattttttttcatgtgcgttttggaggttgtggttttgctgtttgaagtttggtttttgtgggtgtttagggtttgttatttgtgagcttaggtgggatcgcgttttattgagttgtttttttaggagaattgatttttttttaatgtaagggagtttgattctgcttgaattcattttgtgaaatcgtgtaagatcagattggtagacttttttcatttcgactgctggggaagtgggattatgttgtgttctattgtagctgtttgggaaattgctaattgaacttcgatactgagttgtaagccttatagttaattcgattatccagatagttgaaattggatgacttgtcttttcagcattacgttgtccgatttttatgcactgatattggctttgcactatgcaagtcgagtttctctcttaccctccttgggattttttaaaagatcagctatgtccatgttgctgaatgtagttgaagtgagattcttacacgaaccatgtggtagcttctgtgtttgttattcaaatgtcagtttcggtcaagaatagtattttctgtcgtgtaaagctttcctttatttccccttcaacgtctgtgggctgaatatgcattatgcagagtcagtttgaatttgaactttgagtgagtacttttgttactagagaatcatgtttgttaatgtagaatttgtctaaatgcagttggaatatcttccttcc

SEQ ID NO: 62073 - DNA, 948 bp, Cucumis sativus
  Intron number 2 from transcript Cucsa.098140.1 (locus Cucs a.098140) derived from phytozome v7.0 (chr-ID scaffold0092 3; pos 248837 to 249784)
ttgttatatcaacatcgaatccaaagcttaagtgggtgggttcctgtaaatttagttatatctttactttacactccctatccttgtgagtttgaaaaattgtaggaggttcaacaaataaagtggatgttagttggagaggaaatgatgttgcacgaatcacccttttaactaaaaagcttaaactgatggattacaataaatttaattatatctatcttttaacaatcctcttctgttttaggactgaatttgtgtagtatgaattgcagaattgagtttttgtttagtgagaaagttaatctatggtggattttactctttctagtgcgttccgttgtattggtgcaaatctaagcaaccttttaatcatttgagtctttcttatttagtttccaattgggaatctctttgtttacctttttagatgcattggggtgtttcccctttcttttctaaaaaaaacaaaaaagaacgttaatatatggttgtaagatgaatcagtattcagtgtgattctaataatttcgtatggggaattagtaaaccgatacttcggaataataactcttagtttgcggtaactaaatctacatgcttgacaagacttttcaaagtttaagtcaacctttgacttgctcgaatttcatggttaccttaatctggactttgtgctacttatttgaggatttctggtgataagataagaacttattgtcttcctctataggaaaagcttaagcaatgcctcttgactatctggtttcatggactttcagttttgctatcattcatctgccttaacacatcattctctaataatgtttgttagatacttcattggtatttaagcacattcaagattcagaggtctgcaaaatatttgcatcatgatacctcttgaaggactaaaagggtcgtggcttctttttgtgcagaaaatcaaca

SEQ ID NO: 62074 - DNA, 679 bp, Cucumis sativus
  Intron number 1 from transcript Cucsa.066840.2 (locus Cucs a.066840) derived from phytozome v7.0 (chr-ID scaffold0069 6; pos 1260554 to 1261232 reverse strand)
ttcttcacagcttagggggtttggagaagacgaaggtaactccgcttcttcttgtttatgagttaatgtttgtgggaaaggttattaagaagaagaataaaaagaatagttttttgtttgtggagaaaattgaagaaaaagaagaagatttgattgttgatttttcgatccgggtcgggcttcattaccaccgcccctactcttccattccttttctctaccgaaacgaatcgaacttgtgaccagcggatagcacgcaccccccaccactaacaagctaccaacgtttcggtaccgcccccactcaagttgactctataaaactatttgtttctggggttggatttgtatactcttgtcttaactggaattcgaatccactcggtcattatatttcaacattgcgatatgctggaatttgatatcattgattcttgattagaaactttgaaaatttcacttggagttgtatgtttgcatctgatgctccaatctgaatcaagtgtatgtttccaatggtgcttaattatattattctttttcttttaatattagtttgtctgttattgtttaagacttggagatgacgcttctgcgcaatttttctacataaaactgagataatatcaatattgtagttttttagtttgtttctttttctttgtttaggttgataaaa

SEQ ID NO: 62075 - DNA, 510 bp, Cucumis sativus
  Intron number 1 from transcript Cucsa.100950.1 (locus Cucs a.100950) derived from phytozome v7.0 (chr-ID scaffold0092 7; pos 232818 to 233327)
tagaggaagacgacgagtctgctcagctattcgaggtttttctcttcttcttctccttcttctaatttcagtgtatgtgtttggcgtcggcttatcgactaagtggaagaggtagaaatggtagtcgaggttgatccggagagagctgttcttcagttccttaaattgaaactcgtgtttagtacacgaacttgtacttgacgattgaaacttaaaagtaacaatcacaaggaaggtgtttgttgcgtaaggttgttgtgttggtggtcttttaagttttgacaatgactatgtttgttgagaagacatcattatgtgtaatgaagacgaacgtaagtcatataattttctctcagatattcaatgcgtgactgcacatatatttatttatcaaccattgaagtattttatttttttagtgggcgacagtcgatactaatttgattcacttaactttttttctttagtaatctcacatatgtgagtcttgagtttttcagaaagtaaagg

SEQ ID NO: 62076 - DNA, 1060 bp, Cucumis sativus
  Intron number 1 from transcript Cucsa.045890.1 (locus Cucs a.045890) derived from phytozome v7.0 (chr-ID scaffold0054 2; pos 1572082 to 1573141)
aagaagaggaagtcaaccccttcgctgtgagttctctctaccttttgatcatcatgcttctgcttacctcttctaatcttacttttatctttgaataatggaagtgttgctcgactctatgtactgctttgctttgctttgctttattaattccatagactaggtcgtttgagtatgcggtggatgcggatttccgtttagcttagtgctatttcatttctattaatttatttttgatgctcggatggatcccttttctctttccatatctcactaagagaaactcataaaggattttcccaccctaataatttggttactctcaacatgatttacggtcctcatggtgcttcaaagatgcagtagttgataagtttagtttcattcagtatccaattactggaaatttaagcttgttctgggtttctgcatttattggcatatattgtcggcgttctattctagacaattgggtgttcagatttttaacgatccatctgcagaccagtatctggcctttgggtgaaggtaccggggcagtcatattatgacggaggtgctttcttttacatctgaaacaaggaatctaatcttttagctagttgcccctcaccaacccaaaacaaaagtaaaatagaaaggggaacgagattgaagtattcagttcatcgagtttggataaactttgcacttgcgtttttctcttaagagctatacatcttggtttaataagttcctgccttcattttttttttcagctccaaaatttcaattttgtagggaaatttctttttcttcttatttttgtatggcttcttattacgatatatatcccttagtttatggataatctgataactgataagaaattgacctatgggtttaaatacaaccttgttttaatggtttcattaatctgttgaatctattaagatgattgtttgcaacatcacattagttggttaaaatgttatcttatcaaattatttactcatttaaccaaagatatatatgcaatttttcagaatcctggaagtgttccccctgccacaaattccag

SEQ ID NO: 62077 - DNA, 640 bp, Cucumis sativus
  Intron number 2 from transcript Cucsa.118190.1 (locus Cucs a.118190) derived from phytozome v7.0 (chr-ID scaffold0099 8; pos 12185 to 12824 reverse strand)
gcaggcactggcacgtgcgagtacccatcaacaaggtgaacccctacaaccaattaatataaaggtttaaatactgtttggtcatatattatttttcttttcttaacttcaattccttttactctcttacacttcccaaatatttatcttacttcttttatttttaccttgcttcactattcatccatatacatttcaccctcattccttttttgaattcacatttttaaaatactgacttttgtttcgatattttgcatcattataattgaatccttaacaaaattttaaaaatgaaaaacttcttttttagttttcaaattggttttgatttgatattttaaagcatgagcaaaatgtagatagcaacccagaaaaaagttagggggaatgtagtgtatataaacttagtttattcaaaatggaaatgattaacaaagatcaagtaagaaaaaaaaaatagttgtttttgaaaaataaagtatatgtatgtatagataaaaatgaaccaaaatcataaatggaggtaacaaagtagtattttaaataaggataaaaagaaaaagaaaaaaaaatttattgaggtttttgaatttattttgcagcacaagttcatcggttttgaacactacaaattcaa

SEQ ID NO: 62078 - DNA, 753 bp, Cucumis sativus
  Intron number 1 from transcript Cucsa.111570.1 (locus Cucs a.111570) derived from phytozome v7.0 (chr-ID scaffold0095 3; pos 330622 to 331374 reverse strand)
ggaaagcaagtacgtttttctctctcttttttctttcatgatcacctactttttttttcttctttttttttttgcttcgaattggaggttttgttgttttgattgtttgagcctgttgatttacttctgattttcatcgtttgttgaattttgtagtacttgatcgatttgtttgagtaatggttagtgattggttgagtttgaggctcaattctttatgtttgatggttttcatggacggagtttttgaaacatgcgagcctttagctaaggctccgagaagtcgcctataggtcatgtaacttctggatcgttttacgtgtatggagatttgggaggtgcagaaattccttgcgtgtgtggtggaactgagctggcttttaatgcgagtttttatttgaggaatgagatgagttaaattcttaattcataagtttcgttgctatgaaatgaacgtcacgagaaatttctgtaatgaactgtggttttttaggtaggttaatcaattactttgaagatgttaatggttcattgaactatggcgttacaaaaatttgaaagttggatatcttaatattagatgtgaaatcctgattgctgtcattattcgttcgtctttgttttttattacaaggaaaaagagagtgagagagtgagagaattaattttcatgtattgcggctgcttactgtttttttttttttttttttgaactttggttttagaaattgaagacacgggtgataaagaagg

SEQ ID NO: 62079 - DNA, 501 bp, Cucumis sativus
  Intron number 1 from transcript Cucsa.087960.1 (locus Cucs a.087960) derived from phytozome v7.0 (chr-ID scaffold0088 8; pos 428691 to 429191 reverse strand)
tcggtggcttcggattccgtcgcaaccctcgcgaggtaactttgacttttgaaattgctttgtttcaatttggttataagctttgttattgatgttttagtattggctctagtttacttaaatctctcttaacaacctttactatttttggattgcgtatacgagaatgttaaactggttaattgtattaaggtttgagtgaaaccaagttggaagaaaatgaagattaaactgtttaattctcattgcttcctgagaaggaaagaaaacaaggatatggtttttcagctgttttttttctgtttggattatcatagttttgccagtaaattggttagttgtgaaatttaaagcttaatttcctcaaaaacgatacagattagtttcaagatcacatttctccctatttttcttgagctctgataaccagtcttctaataggcaaaagaatttgtaatctttacagtgatattccccctaccaattcgtgttcttcagttg

SEQ ID NO: 62080 - DNA, 933 bp, Cucumis sativus
  Intron number 1 from transcript Cucsa.123970.2 (locus Cucs a.123970) derived from phytozome v7.0 (chr-ID scaffold0100 1; pos 44273 to 45205 reverse strand)
cttcattttctttaccttctgcttgccttctcaaggtgagagacttaacttttcttttcgatcatctttttccttctgctttccgatcgtaatttcttagcgttttttgaagtttctgattatggattgggagttcgtttgaatgctaggtttttttctgggggtttcggggggttttagtctttaaaatatttgattttcggacttagtttgttgatctggaaattgctgtgtgcactatgttttagcattagttttccgcgttatctgaatttgtcttggcttcggatagtcatgtgtttagaattccgtgaagggattttatttctgattgatgaacgaattgcttagtgtcgagtttcgtttgtacactcacttgggctttgtcacgtgccaccttcagcttggattttgctttgaatactaacctctgcacttcaattatttacattggcttaattcttcccttgtttgaaataattgctgtaagttcacatgaactgttttctgctcggaaaggcttagtaaacaaaggaaactggaaggtggtttgttgaatgtatgatgtaagttaattcacccaatgggttttgagtgttaagtcggaaactacaatgaagtgtgcaggatggtgcggaccaagcttgtttgatattagttactttcttaaaccttttttcttttgaggttcacgttcccgccttctgtattactgcatttctccttcacttcaccattcacaattctgtctttctggtacagcatatttatatgattttgaatacctgacctttactaaggaaaagttcaatttttctagttcattactttccattttgatcgagatagtattaagtgtagtgttccactttcaggatacaaagcttctttttcaccagcactaagttgagatgttttattccatgtagaaga

SEQ ID NO: 62081 - DNA, 828 bp, Cucumis sativus
  Intron number 2 from transcript Cucsa.049550.1 (locus Cucs a.049550) derived from phytozome v7.0 (chr-ID scaffold0055 0; pos 29785 to 30612)
tgctgattcgggtgatagtttcttcgccgttgaacgtaaggttttttcttttcaagtttcttcagagatggatggagttgggaaacaaaatataaataacaaaccatttttttataatcaaaatgaaatcgttgagattattacaattattttaaattttatctttaattttgtaattttagattagattactgtgttttgaattctcttgtaaccatttatattttttacttttgctgagaatttttcaaaaaaaaaaaaatacaaactacacaatttataaacacaactccgtatttgataaaagattaaatgttaatttgtattggtagagtttgacataaaatgtctaatttcaatctatatactttggtagtttaatatctactagcattctaaccataaattttaataacacattcacgtaaatattataaatattattattattgtcaaaccaaatagaataaaaaataattttgagaactatattaaaaatgtattgaatacattcaaacaaatactaaaatataattttcttaaaaaacaaaaaagtgacagaaatccatgaagatccttacacaagacaactagattcaaaatgacaaaatggaccatcaaaatcaaacaagtcaacttagaaaaggacaaaatttgaccatcaaaatcaaactaatcaaattcacaaaaacataactaaactctaactcaaaacaatcaaatagacaaaaaaaaaaataataaaaaaaaaaagagtttgcaaaatctaaatatttaaatctaatgttaattaatgtgtactggttggagtttgcagcaggttcgtgg

SEQ ID NO: 62082 - DNA, 680 bp, Cucumis sativus
  Intron number 4 from transcript Cucsa.121920.3 (locus Cucs a.121920) derived from phytozome v7.0 (chr-ID scaffold0099 9; pos 312378 to 313057 reverse strand)
tacttatctgataaagaggtattacttggctttcggtgctatagtagccattggatgcatgctgcatgcgattagtctttgatttactaattatcaatgactagtgatacgttgttggtggaattagaaaatccgaagtcggaaaatggtttctggttggttatttgttgaaattgaattatttagagttgttttctagttgaagacataaaaatccagatccatgctttcctttgaagaaaaatggtattagcctattgccgagattgagaaagctgtggctaattcttagtttgacttattagtgaactgaacagtatatgcatttttttgtatgctattgaacacaataacaaggattttggctagcacaaactatttcagttttttattttggtatccagatggcacaaagagtttcgtgtttttcctcctgtagctgttgtgtgcacatgccacattttttcatagatctattctatttatctactgttttcttttgtaactaggtgaaatttcattcaattatttccacctcggcctacaaatttatactattggagatgttcttcattgcaacttttgttagattgagcctcttattatttattttcctttcaagtaacctattttttgataacataggtggagagtttggctgcaaggataattaagtggtt

SEQ ID NO: 62083 - DNA, 598 bp, Cucumis sativus
  Intron number 1 from transcript Cucsa.102110.3 (locus Cucs a.102110) derived from phytozome v7.0 (chr-ID scaffold0092 7; pos 1195232 to 1195829)
gatcttgtctcctcaggagctggtacatttctcttccttttttgttttattttgttttatctcgtggcggtttgggaaaataactgctcatactagattctcgttggtttctgatcaaaagaacttccagtagtgttagaatacattgtttgagaaattgatttttcttaattttcacgatatgtagtttcgttggagaatctttatttatttagtttgctttataaagcaactagagtttcttacttctatggtactcgtgccatgtttatagcctcatttttaattgctttagttggacgcgttagttttattgttatctgttctatatgacttaagaagtacgtaacaaagtagaaatgcagaatggagaattaattttaaatttggcgcagcatgtggtcttccagatggcaactttatttgataacttagctggatgattgttggcttttgaggagtttttctagtttttaggactcgatgggagttaatggtgtgtctaaactgtcaatttactgttagatagaaagtaagatcatttcaattcctgtgttgtacagggtggcaggtacaacgctgctaaccagagagcaat

SEQ ID NO: 62084 - DNA, 786 bp, Cucumis sativus
  Intron number 5 from transcript Cucsa.102110.3 (locus Cucs a.102110) derived from phytozome v7.0 (chr-ID scaffold0092 7; pos 1196586 to 1197371)
tgatgtaagagtttagatgtacatctggtccattgcttgaatcttccctttatttatcgtgttacaatgatatttgactttgctgaaaatcattgagtggaatgaatgtagttgaaatgcctagcattagatttagatatatgtgtgtcagtgtgtgtagtaataataataataatgataatacttaccactttattatggaaaattattttatatgacaaaacttcttaaaatatttacaaatatagtaaaatatcaccatctatctgtgataggccacgatagaccaagatagactactatggtcagtgctggttcatcgtagatagactgtgatactttgctatttttgtaaatattttgattcattttgttatatttgaaaataatccttatattattgttattattttattttattattattgtaatttgtatacttcactcaattggtgtaaattcactcccttcttttgtgattaagcttacatctctcatttcataataggatagcattatgttacgcaacacgacatcttttgcccttttgtaatttcgtatcatcataaaattatgactcgtgtttctcataagaaaaaaaaaagactgccttgtactagacaaattgcttagacgtgggatttacatttgatattatacgtcatcttaggaagttttgctccctgcaacttctttccctctcattatcacttattactatcatacaagtcattgagtagtttctcgatgtagctaactgtcttctacacaggttaacctgcattt

SEQ ID NO: 62085 - DNA, 698 bp, Cucumis sativus
  Intron number 2 from transcript Cucsa.119280.10 (locus Cuc sa.119280) derived from phytozome v7.0 (chr-ID scaffold009 98; pos 1160406 to 1161103)
atactcttgcaaagcatttattccactgtatgtttgttttcttttgtttttaagtttgtttcatctctggtcttcattctcttttagttcaatcatcgtgaactttacttgttttactggaagtgtttaagcttaagcacacatttagcagaatagttgttctggagccaattcccctgcatcttttgcatcttctctgtctaatctcaataattattccggctcttgattgtgctatatgttcatttatgggaagtatgggaaaggaacgtgtttgttagctctggaagaatgatactattagcatcaggatgcgaacatagtcctataatatgaataggcctaagccggtgtgatgttacttttggttagaagtgggcatgattttggagaaattaggtgaaacaaaagcatcatacgggtttaggcctgatgtagactatatcatttcatcgtagagatatgggaggtccatcgtccttgggctagctacatcagcctcgtactaccatcacatttctattttgaaggggtgacgttttgcattatgacaatgacctctattagagttgtgtaggagtgcttgtggctaaattgtgcatgtaactacgtaattttgattatctaatgtgcttgctatgttcttaactttctataaaaaacttctgacaggggaaaatcaaaccattgagtgggcc

SEQ ID NO: 62086 - DNA, 560 bp, Cucumis sativus
  Intron number 1 from transcript Cucsa.040670.2 (locus Cucs a.040670) derived from phytozome v7.0 (chr-ID scaffold0052 9; pos 120351 to 120910)
tccaccaccgaaaaacttgtacttcactctctctatttttctctgatttctcactgctgacgaggacctaatggggtctgggagttttaggttttagcttccatttggtggaattttttgtttatagattttccattggcaaccatgttcttgaatttggctttgcggcatttgggtagagattaatttcttcaagtagtaaactttactctgactgtgaaagttttcacctcgcttttaaagaattagctatctcttcaccgctagagaagtttggatatcaaatgtagtggagtggtaacagtacaaattaaatttgcttcagttgggcgattttgtttgagttaggaaaaatgaattttacaaaattccttatgtgaagaaactttttgattagctagacgggttattttgtttgttttctgctggtgcccttatgttatggttgctcgatggtatgcttttctttgatctgggctgaactctcctccaccctcttcctgccattgttgctcttgtgtgcaggttgagatttacgaagataaggatagcgccaggaa

SEQ ID NO: 62087 - DNA, 670 bp, Cucumis sativus
  Intron number 1 from transcript Cucsa.132120.1 (locus Cucs a.132120) derived from phytozome v7.0 (chr-ID scaffold0103 7; pos 165121 to 165790 reverse strand)
ggatcttgggtctctgaaattcgtcatcctcttctgtaagtctactctatcttcctcgtaattagtgtttgtttgtttgtttgtttctctccttcaatctaaaagcctttaattaatttaggttaggaaagtcgtacccaacactttcttttcatcctcttgatctctttttttatttctatagactcttcaccatgcataccatctctctcaaactcaccaaatggagattggggttatgatattacttctcatttttttccttcaatgataatatctgttattttttcttatttgattttggtaacatttttaaaaagaaacatgaaggtatagaattaatttttgatataaggctaagatttcaaaactggaaagcaaaatggttatcaattttgattttactgtaaacaaaagtaatttaggctaacgaattattaggttagagaactcaaattataatgatcataataaaacaatataaatattttatctatggatttgaagattagaactcaacaatgtgatttaagattcataagcttcacatttttaaagagttagatgtcaatttggtttatcaatcaatgagtagattttactacatttgaaaatattttttatatattgtataggaagagaagagtttggttggggacgtttgagacgg

SEQ ID NO: 62088 - DNA, 1001 bp, Cucumis sativus
  Intron number 1 from transcript Cucsa.044390.1 (locus Cucs a.044390) derived from phytozome v7.0 (chr-ID scaffold0054 2; pos 765384 to 766384 reverse strand)
ccttcttagatctgggtatcttcttatcctctttctaaacctgtaattttatctttcttttacatggggtttctagtttaagtttttctatgctttgcaactgtaaccccagcccatgtttctttgacttaccctgattgtctaccctagaaccctagtcactagttcgattctttcagtctactgttcttcttttctctttcgcttgttagttcgtttgtagcttttaacatttctctgaaggcgtttgtaattagtttcgggttttgtatgtgattaccgattggaacacggatgaggaggggggtttgtttctttgtttgagtgattgaagcgttggttacttacctttgaaggaaataactgatgaggttcaaatgtttattttttttttcattttggtgttgcttctaaagcatcttaacgaaaacgaatttggacttgttttaatgctcaagtaaccatttcgctggctttaattattttcaagattacatcgatttgattagttggttttttttttgtgtgaaccaatcggtggtgagaaggcatctctttctttggcatatttgtaattatcattaaccattggtcttttcagattctaatctattttctttggtgaagataagtgtgctggggtgacatctctcttgatgtcatgccctttgctccatcattgctaaattactgttgattttcttgtatattctccagatactccattttttacgttgtgttgggtataggtttggtcaaggaagaatgccccttctgaagatcaaatgatccaaacatctttgaaacccacgaaacccaattaaattgccaagttttgaggttttctgtcattaatcttggcagaaaatatccatatgttagcaaaatcatgaatctccatcataactcacttttattcagattttgaattcattaagatgctctgttgttgaactctgtcttctttacttcatttagacttggttattgtttacaggtaa

SEQ ID NO: 62089 - DNA, 541 bp, Cucumis sativus
  Intron number 1 from transcript Cucsa.130790.1 (locus Cucs a.130790) derived from phytozome v7.0 (chr-ID scaffold0102 9; pos 838897 to 839437 reverse strand)
cctccaatttttcccctggccatctgcgatccaaggtagttttatttcttttctttttcctttttttcactcttcaatcttgaatggatcatccctgtttgattcacttggatcgtgataagaaataaggaatatccgtcaaatctcagatttgattctgtttattgctatgtcttcatcgttcacgatcaatatgatttgaattttcccgatgaactgatcgagttacattttgatcttagagtttaattttgccatgatctcctcggttttggcaattgttatgaattctatacgtcaattttgattttgttgaggatttcggacgcctttttcttttttatttattcatcttaatctatcggaagaatgattgcatctgttgatgattcattttcgtctttgaattcttcagcaagctctgttgtttttgttggtcattcaaatatgccttttagtatagctcccaaggaatatgtatctgatcctatacctctattttctagagttttgctggtgagaatatattcaaaagtgattc

SEQ ID NO: 62090 - DNA, 386 bp, Cucumis sativus
  Intron number 2 from transcript Cucsa.067300.5 (locus Cucs a.067300) derived from phytozome v7.0 (chr-ID scaffold0069 6; pos 1710489 to 1710874 reverse strand)
agaaacttttgtacggctcaacattaccccatctggtattgctagttggaactttcatgtgacttgtttctttattttcccttgtatttagataatattactgtacagtcataattgtaaggtgcttaacatggtggcatggtcttatttgtttgtgttacgtataagtgattgttagacgtaatattatgtcttctatagttgaggtaagcacgccattttttttgttgtgttggatggattattagggattttgttcatatgcaagctcagcggtcaatagttgaagtacaattgaattgtatttttctttctgacatccatgcagatttgatttttaatatgcttctatttgtctggtgattttctagaggtaccgttacctg

SEQ ID NO: 62091 - DNA, 526 bp, Cucumis sativus
  Intron number 1 from transcript Cucsa.121730.5 (locus Cucs a.121730) derived from phytozome v7.0 (chr-ID scaffold0099 9; pos 183158 to 183683)
gaaaaatcgatttggagaagattaatcagagggaggtactcactcttctttgtcctattttgttctgaatttatattttgaatttctttcttcagtgtcgatgtgtccttctgttgttgttattgttaagcattcgtgtcgattccttagttaaagaagaatttggatgtttattttatttcggcttttgtcattttattatccagatgtgggtttcttctgggtttttttaatcgaactttatagtctccgtttttttttaaaaaatttcaataggtttcttctaattcagttttaccctgttcgacttccattcttggaacttgtttgatttcattcttcttcgtaaattcgagtaattaatgcaaatgggtatggattagattcgattctttggggctataaaaatgagaaatcacttgttcatcgttgagtatcgataacaaactctgtttaatgtgttttaacttcctctgctttttctatttcagcgttcttgtttaggaagacgaacagtgagccccga

SEQ ID NO: 62092 - DNA, 527 bp, Cucumis sativus
  Intron number 2 from transcript Cucsa.130150.4 (locus Cucs a.130150) derived from phytozome v7.0 (chr-ID scaffold0102 9; pos 98124 to 98650 reverse strand)
aggaggaactagctggttggttaataaaataaaaggttagttatttctttttttatttggttctgtttatgcttttaataatgttgtcacatgttgttacagttagttttcttttttccctttttgataatagtgtcgatttttttactattgaatgtttggttctttaaagtatacggggcctaatatgatcttttggtgattgcaatgttattttctggactcgaacggcagtacatgtcatagtcatagcaaagtccactaaagttatgcgaaaatttacgaattagataattttgtgtgcggtcgctatagcgattctggaatagtggtcatatggtactttcttgctcagggctaccggctacgtgttattagtgtagcaatggagctataaactggtggatttttagtacaatggcgtcatgccattaccatgtactggccacgagacatcattttagtttctctattgcaaaaaatagtacattattttgattcatcttccttggtctttcgtaggaaaa

SEQ ID NO: 62093 - DNA, 566 bp, Cucumis sativus
  Intron number 1 from transcript Cucsa.048230.4 (locus Cucs a.048230) derived from phytozome v7.0 (chr-ID scaffold0054 2; pos 3079946 to 3080511 reverse strand)
gtgggcaacctgtaagtttgtctcttttcaatattgtcaataacttttgtcaacgttatccatcgagacaccaactatggtgtattgaccaagtctagagataattttctagtgtccaagaggtgcacattaatttatcctttatgtttgttggcttcgtactggagaaccttctgctttgaggagaaaaactgaaggaaattcacaattataactataagtttactgtagacagataaagaaaatgacccccttcccctccctccacatacacacacacacacacacacaatcaaatgatagaagtaacatgcaggtcggaatggtataattactttgcttgagctgggaggaatggttaactcaatatagatacaactattcaaggatcatggatttcttaagccaaaaaaatgaacggcatcaccatgaaaggaagcatagtttatcagattgtcttctcaaatatgaattatgactgactgattttgatataaatgtttgttctaccttttctagtcgtttgattactagtttattgctcattttaggttcatcttcaatta

SEQ ID NO: 62094 - DNA, 240 bp, Cucumis sativus
  Intron number 1 from transcript Cucsa.026020.3 (locus Cucs a.026020) derived from phytozome v7.0 (chr-ID scaffold0036 4; pos 14441 to 14680 reverse strand)
ctgttcgattcttcatcgattttggtttcttacaggtttgacttactgtatttctatgatttgatgcaatgtcgttgtggaaaatgttccgtcaatcgctttcttcgtttgtttattgcttgattgtgataccttctctaccattttatttatttatttatttatttattgtatattttagcagtgaggttttattttctttgaattaatgtggatagtgtgatggaatttgatttagga

SEQ ID NO: 62095 - DNA, 506 bp, Cucumis sativus
  Intron number 1 from transcript Cucsa.029550.6 (locus Cucs a.029550) derived from phytozome v7.0 (chr-ID scaffold0039 7; pos 195249 to 195754)
gattaggatttatttcgtgagtcctaaaacctcaggtcagaggcttatctagttccttctttctttttcttatcttaccatattgtttttcgctcttttcatccagtttttggcctattctcagggttgggttctgtttctgtatcttacctttgtttaagacccatttttgttgattgtttgtgagattgaaactcaggcaagctgtcccttttgggcatgtttcattttttgaatttgttggatttgttttttggaatttggtgtttttgttgttggcttcttctgttttagaaattggtgtttatgaatgcgatgaacttgatgaattaatagaagttggcgcaatcccgctgttatagtttttcttattcaaatgtaggttctaagtgaattttgtttaatcttcttggatcagtagctagtagttgttgaaatatgtgacatatttgtcagcacatttctcaacagattttcttgctaatttcagttgaagctttatatcc

SEQ ID NO: 62096 - DNA, 1011 bp, Cucumis sativus
  Intron number 4 from transcript Cucsa.029550.6 (locus Cucs a.029550) derived from phytozome v7.0 (chr-ID scaffold0039 7; pos 197850 to 198860)
catcgtaagtttttcctgggactatggttttcccttgatgaaagatacagttcaatgtttgttaccgttaagatagttatattaattcattaaacttgctgatagttgaggagtttttcttctcactataattgatttgacgtgttaatacatagttaatgcttttaaaacttactcgtcctgttctttcttgacaagtcttttcttgccccataagaacttatgatatggaatccaagttattaattacataaaagtagtgattggtgaatcaaatttctagtatttccatataagcaggtggtctgatttgtcaatgacagtttataattgttaatggtgtatctgtcttatatatgctaatttcaaaacaaaattttcattcttacgtgaaaagctacaaagtgaaataaaattccacgtaacagaatcggaaactggagcgaaccaagaattctacagaaagcgctccccaatttgaggaaagaaagaaagaaagaaaaaaagatgataaatggaattttgctatgttgaacaccttgcttcaattttttagcttttccattggcaagtctattatttctatctaatcaaatatcctatggactatactaatatttcatacacctggaattcttactaattttaaaattgttccttcccgcttacagtacaccacttttatcattcctgatttcagtttcactcgatgtcctcaaacaaaccagtacacctcgtttatctctaaatctcagagaactaacatctttggatctcatatgttatatgagtttttggctaatcctgtatgatccttaacttagggtattttgttattatgagtgacttactgactagaattatttgattactcgtgcttgccagaaagtatatttttaatctatctccactatcacattgctgattggttattgattttgttgacagatgctcactctatgctttttggatgcaggttgacatccaactttctactgcagtcaacttata

SEQ ID NO: 62097 - DNA, 1046 bp, Cucumis sativus
  Intron number 3 from transcript Cucsa.109580.4 (locus Cucs a.109580) derived from phytozome v7.0 (chr-ID scaffold0093 4; pos 498047 to 499092)
ggcactagaggaagaagcttgattcaaaggtataacttaaacttggcaagttttctgtgggattttggttttctgactcttacatgtatttcattttggtgtttttatgttcaactttttatctcacttgatgatgcaagtgttttaggatatatgttttggttgtgacattatttgaagttttggatgaatgagccataaaaggacaaagatttaaaaccaactattgaaccaattcatgaacagagtcaaaagatatacaagtataagtatacaaatgaaataagatcaaaactaaactaaaccaaaacataacctcttgggtgtttggcttatagattgggctcatatatggagagattaagaagttgagtatagatttgatgtatgtattcgtctattttacttcctacttaaaatttagagtatacttgggttgagtttctagaaagtaaatccaaataagctctttgacccatgaatcccagaggtcaaggtcgaccagtgagatgttgaagattatcttcaacatctagcgggaaacaaccctagagaacacattgcaattgaatggaaagtagcaactctagagaacgcatggcgacctgttaggttatcacctaagaaagaaacactcaagaatactcaaatttggaaatatatagaatttgttgtaatatcataagaaaagtaacaatataacctgccttttgagagggctagtctcttcagaaaaaaaaacccaaagaaaatcctacaaatttcttcacaccttgctccccccaactcactccctttttttataacgaagaaccctagcaaacttactagcatattttctaatatgcccctaataatcttagttttcacatcgcttctatatacctatacatacattcatgcttttatataagctctcttcatacaatcgaactcaccttacaaaatcttatgcttgacatctagaagtcaagatatttcctgtagacttagcttattaacacaatgtagatttgtttttggctttgttttattttcagtgtttt

SEQ ID NO: 62098 - DNA, 930 bp, Cucumis sativus
  Intron number 1 from transcript Cucsa.046170.1 (locus Cucs a.046170) derived from phytozome v7.0 (chr-ID scaffold0054 2; pos 1750368 to 1751297)
aattacttcacccaacttttaccaatcacatccaggttacttctttttcaatgatcttatgctcttgccgagcttatctggctttattttttcagattaaattttgtacacgtttgtctgtgattttcagttctagctttgttaactctgcatctttatcgggaatccgtttgacattttgattctagtgaactattatttctgttgtgttatttagttccgagtaatttcctttttcactttctttcagacctttatttggttttcagcttggttgcatggccttcatcaatcattacatgagtgtgaatgtatatagagaaagaaacagcgaaattaagtattgtcacttagatacattgtagatatacaaaaagaagaacgggtgatttcttccatgaaatgctttgacttaatataggcttcagtgggacattggattgcacgaggtgattgttttagtgaaaagatgccgtcggatcgatgcaatggacacccttagagtcatagtatattcttcacccacttgcttttgagcatcgtagatcaacttaatgacatagaaaacgttcaatcatccgatagtttttttttcttctttattaatgttttctgttccttgtattggttagaacttgttttatttgtttatggcatgttactgcctcactggtttatgtatgaatctaagacgtccaataacctttaccatttcgatactttatttgattatggaatacgcttgttaacaaaagaaaaaaaactcttatcattatgattttattagaactcatttcctttgtttccgtcatggttaaccccggacataacgaaaatactttcacatttcagttttaacttttggtgttagttgctcactgtagaaatgtatttgatttttgcttgaccactttctatgatttgaaaaga

SEQ ID NO: 62099 - DNA, 977 bp, Cucumis sativus
  Intron number 2 from transcript Cucsa.046170.1 (locus Cucs a.046170) derived from phytozome v7.0 (chr-ID scaffold0054 2; pos 1751819 to 1752795)
caggttgaaaagggaagtgatccgagaagttattggtaggtttttatctttatctctgccagttatcttcaatcttattcttacttctgataacacattggaattttacatttattgtattgtttgttctttactaaataccttgaaaatttgtgtgcatgaagactgttagaatcaatggctgtctttaaaatcatgttagaagtcagtgggtaagaactctacaatgattatcatagttgtatcaaatattcatccaagtgtaagatgatcatttggctgtttgaaatagaagccatgttgagattcaatcaaatatttcagaactctttacttcggtagttttaaagaacccttttattttattgttttatctcaactttaagcattgtgaagaaaaaggaactttgttagttagcacttcaaatttaaaagcaatgaaccaacagcaaccttgaaatttctgtcctagtagtcgtcattttagtgctttaactagtttctgccttttgaggaacatatgcttcaagtcaacattatcggttgcaattaatgttaaatattatacgcaataactccactgactgtcaacctaccggaaactttctatcatattaagacacaaatttcattgtatttctcaattctaggattaggcgagtgattaagatgaaattaggttttcataccatgctttcagtatttgccccagccagccttgcaaaggaaagttggtgcagcctgaggcaatttgatttggaaaaaaaaattgtttcagtatatatatagagtttaaaatgaaaaagtaacattaatataaaaattgcaatctattgcaatagaattttacttttattgtattgtttgttctttactagtataaatatggatacaggcttcttattgaaatgcatactattgattgaggatattaccgattaatagggtttgcatttttactgcaggcacttgtggat

SEQ ID NO: 62100 - DNA, 899 bp, Cucumis sativus
  Intron number 1 from transcript Cucsa.077940.1 (locus Cucs a.077940) derived from phytozome v7.0 (chr-ID scaffold0079 3; pos 125521 to 126419 reverse strand)
aatttcgtattcaaaaccctcgtttccccccaaaggtatccctcttcgtctcttagcgctcttttattcacttttttgggtttacatgtcaatttagccgtgcattgtccaagtgacttacgtatatatacttttcgctaagaattcatttgggtcgagaaccatataatactatgataactatattttgttacggtaaataccatttaaaagaacttatttagcgagagtaaacattatttataaaatgttagtttgttataatatttactattttatattcatcatttttgttttttttgaagtgcttactattttcctatattaaactaaaatgatttatacatcaaacacgtattaaactgaaatccaacactcaaatacaaactatattgtaatccaaatataataacgtactctcgactccaaacacctcgtcagtgggttacaatttaaaatttagattccaatcttgtttgagaaaaaaagaaaagaaaagaaactcatatggatgagctgtagacaatcatcatcaccttcaatattcatgtttttcttttttaaattttggaagcaccttaaccctccctatagctagaaatgagaaactccaaaactgaaatgattttttctttttattgtaattaactttttcgtctattaatatttgaactttactagtcgtttatgaatatactatattttagttgagttttatctattttaacagtcaaaatgttctaaaatttgaaaatagagcttaggaaactaaatagagatactaagagaaaaaaggtgaaggtttctttctttaatcaacgtcaatttgaaaggtttatcctaacaatttcacatcaaatacaggaggactgggttttgtgcaaagtttttcataagag

SEQ ID NO: 62101 - DNA, 652 bp, Cucumis sativus
  Intron number 2 from transcript Cucsa.047480.1 (locus Cucs a.047480) derived from phytozome v7.0 (chr-ID scaffold0054 2; pos 2490274 to 2490925 reverse strand)
gacggtgattcgcttctccctattcaaatgtctttaggtttaccatttgatgacgtgctgatgatgtttgaatcgaatctctatgttattggaattcttcgcgttaaaatttcattgcatgctaggtgtttgattatatgtctgactcgctcatttgattgctttattaatctgtaaacgagcgatagcggttgagaaacgcagtgtttcgcatgtggttaatctgcgattcttttgtttggcttacgtaattaacagtccggacgtccgatcatcaaagattaataaaaaaaaaaggtgtagaaaggatgattatgtgtgttggttgatggattgagtgttcggaaaacatgtggcctgataatttcaagtggaatgcatatggcctatgaccttagttgctttcatattatcacattaggaatcgtattttttatttattctggacactgcacacatgcgtttgcctatacctgattattgaagcctcatgtgttgggttgaacccgcatgtgaagccattgtggacaaccttctttgagcggatagttactgtgatgtttgtatgaatagcaatacagtattaaagtttcatcactatgggcttcgttttagtttcagacaaaggtaatttgtgtatgtgtacagtcca

SEQ ID NO: 62102 - DNA, 806 bp, Cucumis sativus
  Intron number 1 from transcript Cucsa.094130.1 (locus Cucs a.094130) derived from phytozome v7.0 (chr-ID scaffold0091 9; pos 345352 to 346157)
ctcttgttcgactcttactcaagctcttctcccaggtataagcttgtaagttgatggttaaccacatatatgtttatgttgtttcttagctttggaatttttttcacactgttgagattctgttagttcgagggttaggaagtgaagggggtgggataatgcaggaagatgaaatgctacgggttttgagatgtttgggggttgcgaggctttgttgaggttgtgggtttttggaaataatgagttaggttaagggtcgaggggtttatggttcgaattacactaatttctagtttaggcgtgctactcccctaatgcaatgctggattcgcaaaacgtccattctcattcctctgtactattctctgtgaattgtgatagttgtgaatgttctggcattcttgttccccttttgatttcgaatcaagggcaccgattgttgttcaaatcttctggattcagcagcttagaacgcatgagttgccctgtatacctttttcttcgttgatttcatccttgaatggtctaaatacctttttcttcctcacttcctgatccagcttaattgggttttgctatgtcctgtcatgtaagctctcctttgctgctgcttattattattgtaaaaatatatatttacttttcgaactttgtaatccatgtgcatataagtgtgttcattttatttttgggctggggaggaaggatttatgttgattcacaaatggttacccttttaaactttgacatggttttttctccatgtttctctgccgacggctcattgtctccatgtttctttgcag

SEQ ID NO: 62103 - DNA, 958 bp, Cucumis sativus
  Intron number 1 from transcript Cucsa.089940.3 (locus Cucs a.089940) derived from phytozome v7.0 (chr-ID scaffold0089 4; pos 1339249 to 1340206)
tggcgaatcttcgtcgccttatcattgcctgcaacgtatgaacttctatttcatcattttctctctattctttttcacttttttatccgttgtttgtgatttattatgcgtcttcataaataattctacttgttggcagatttctggagttctatcgatttttcatttgtactatgtgttttacttttggtgatttgacttgaaatttggaggtggaagtcattttgtacgattgtatgtttttttttcataaaggagcagcaattgattttgtcctactgttgataattgaatattcttgttgtaagattttctggagtttctcgaagtaatcgaaatcgatcggttttttgtttcgttttctttaattgatttggaagtaattgtagggtaggatgagctgtttgtttcatacacaaacaatttactatttcgttctctgtccatctactgaaaattttaatttatcggtttcacttctaatgctattgataacaagaagtgaagaaagttttttctgtttatttatttttctaaaatccccaaatgcatgttctccgaatcaaactattgttaattaaattagagcaggtatcaacaaatgtgaactagaaacgtaggaatgtaagatcgagggagattttttgtgatttcttcaatgctatgagattacttgagaattggaaggtggagaattatttagattgtctttgtttcatgcagtaagttcagagtttgtttttggtttgtaaattcttgtttaggttttctagcatttttcttaagatttgtcaaaggtataaccgtacaacttataagcaccgttctgagcatatccagaaacttcatcatttttgctctaatcacgattcattaagcctacaagcgcagtgtggcttatgttgtttactttgtgtaacttaagttgcttatgtaggttatttatatattggttcgg

SEQ ID NO: 62104 - DNA, 889 bp, Cucumis sativus
  Intron number 2 from transcript Cucsa.011560.1 (locus Cucs a.011560) derived from phytozome v7.0 (chr-ID scaffold0015 4; pos 780072 to 780960)
agttctcgaggtacgggtcataaatatcgaacatacactgtcaaaacaaagtacaatacttaggtgcatttcaatatgcactaatctttatgcctctgatatcataacacataaaaaatgaattaaatatttgtgaaaagaagtaaagaaaagtatgataggacaatttggtaggagccaggaacataggtgttccttcgtatatttcagtattttcccaaaagatttactgtattcatacgtggaatacaataaacaataatttgtttcacttctgtcattttgtcaaaatgatgcttgtttatggggtccagctggaaagtatttgggtttcatagtcctagagttgatattagaattgaacctccaaatataatggggtaagggagtgacttttctgtataccccactaaacttttgacatttcactttatataagacaattttttgttttttgtttgatacttttttttttttaatcttgtgtctggttatgcttgttcaatgaaatcatgaactgtttcatctgtcatgttagaagatgctcaagcacatcggggtctacaaactgagaacaattttgatttgctattagtgtaaaatgacttttgagatatgtattcattttcttgttctataggtgaagaaaagatatgatagaatagaggtcccttctgggacatccggtacaattggaacgatatgatagaatagagttttttgtacatatgcaataagtatttcataatgggatttaaatttaaacttctctttaggcatttgaagacaattttgtgtgttacatgggtgggtgtttaaaattcttcactcctacagtttgataccatggacttcagtttacttattgtttggctctactatccaggtc

SEQ ID NO: 62105 - DNA, 885 bp, Cucumis sativus
  Intron number 1 from transcript Cucsa.133690.1 (locus Cucs a.133690) derived from phytozome v7.0 (chr-ID scaffold0103 7; pos 1358493 to 1359377 reverse strand)
gttttcctagtggtgacttgctttggcgcctccaggtaacatcattttcaagtttttaagaatgagaataggtacatttaacttttatggtttcaaattgatcattttttaaaaaaacaaaaacaacacggagtcagacacattttcactaggtggacatctccttagaattttcatcttcatatataatatcgccagaaaatgaaaaatacatttctttgtaaaaagaatctaaatctaacgaattcacatagtctgtttaagacaattttactcgctctaatgaatttcattggtaattttctctcgtaataaaacaaattaactctcatagaagtgctcacaaaatccgaccaatactatactttgaaaaaataaaccaaactggaaagaaaaaattaaaaaataaataaatgttttatgagagaaaatgattgtgaaaaagttattaaaagcaatttaaagaagaaacttatttatcttcttggaaaagatggttattttggaaaagacatattaattcaggaaatcatgcaactgtatgaccatttattacatcaatacatcattttcaagattattttaaatataacaaaacatatttaatgaaataataaaaatattttctctcattcattcttacttacctcttactctccatcccgtcttcaaaacttatatatatatatatatatatatatattacagatataatatatagttcgttacgcaagaaaaggaatacatatcgattactggctcactttgatatttttaagttattatattacaaattgttatatgaagttgaatggaaaaacaataattaatttaaatgatatgggtgcagtttcttagagagaaaaagttcaaacaaagtatacc

SEQ ID NO: 62106 - DNA, 914 bp, Cucumis sativus
  Intron number 4 from transcript Cucsa.032180.2 (locus Cucs a.032180) derived from phytozome v7.0 (chr-ID scaffold0042 9; pos 1579111 to 1580024 reverse strand)
tgaaggacaataaccttagcaggtctcttttgcttctcatctcttaagtaatcatccagtctcatgctaattttcactgatatgcattgttttgaaatcgacagacaaagaaattagaaaacgtaatgagtagagaaattaacttagagattttacctggtacattaatagtttgttcgagatgggaccaataaaaacttcatgcataattttttttctttgaaagtgaaggttgatgacaatgccattagccttgggggtgggataatctactgttcttgaatgtagaggcaaacatgagatttgaacatactagctaattcattttgggttatgttatcgttttagtttatggtttttgtttgaaagggtattggaagtattgattacttgtctcgtcgtcttggtaaagtctctcaaagtgtccatcattactagaaattacaatatttggcacgtgcttttggatgtggtagtgagacaatgagctctaatattgagtacttagtataccatgtccaagaaaattattaacaatggcgttacatgagacttaaccaaactacaggggccaaatttacaaactttgcacgaaccacctgctctgcagttgtacaaccttcattttgccactatcatctagtaaggtcacaagttgaatttgagcttaaagataggtgtttcataacacacgaatgtggtttgttcttagcaacagatttgtagatatagaccgtttaacgagagatggatattgggttttgttcattttagtgttttttagaagaataactcatatttgaagatagttaacaaagaatgtgaccattctatactttgatctacatattctttctttttgggtttctggtttggattacagccttttatcagagtacctaggaacaaagacc

SEQ ID NO: 62107 - DNA, 603 bp, Cucumis sativus
  Intron number 1 from transcript Cucsa.120350.14 (locus Cuc sa.120350) derived from phytozome v7.0 (chr-ID scaffold009 98; pos 2422190 to 2422792)
cctctcacctctcccattcggtctgtgttccttctctaaaacatgaaattttctgtttctattcgttttctccttgtgatttgatgcttgcgatttgattttttaaatctttcaaaatccaacatttctgtgtgggagtgctctgaaaccaggcataattacttggagtgttcctcttccttccatttatgtcatttctcaaagttgatagttcgtaataccttaattgaatgttgatcaacctttttgcgattaaatagtaatagtgttccgtatatgggtaggttttcttggttattgttccattttagttcaatgttgtattcgtgattagaaggcctctcctaaccgattctagattgagatattttgttgggtcgtttatatttgatgattaaaatccgttttatgctccctggtcgcagatggcatgttttagagtttgaagttctccttgttgcctccttatcgtgctttatgtaaaaagtttgtttttgtgcttcttctctgttttggtgccgatctttgtgttggattgttagttttctgaataatggaatgggtaatcacatgcgatgaaaagttttcaggtggttgagagtg

SEQ ID NO: 62108 - DNA, 894 bp, Cucumis sativus
  Intron number 1 from transcript Cucsa.102050.6 (locus Cucs a.102050) derived from phytozome v7.0 (chr-ID scaffold0092 7; pos 1163600 to 1164493 reverse strand)
aggtctttcttcccggttcttgcactcttcatgtaatggtttctccactcagtttttttctacttaatcatccacattgtgccctaactatagattttatcccctcttcctttttttgggttgatcagtgaagtttgacagatggctctgttacttgttctgtaataggtagaatagcatctagggttgcttccttttttttttttgtagtattttaccattatggattttgtgttgcacatgcgcataaaatagtctacaagcttgcttgatatttgccacaaaaactaggcccagatgcgttatttgcttctcttaaagggattttctttccctgtttttgttaatttaagtcattgtgatctatttttctgacatgcttttgttgatcatttagttatagtcatgctgggccaacgagttgataaatttcgtggaaaacaacaaaatatcatgaaaaagttgaccaaatagcaaaactgtttaaagttatcgacaatgtgttgttagatttatatataaacgggagtaacttttatgagcttttgtgattcccgcaatctagtccaaatagcattggcgtataactcattgatatatatttttgagggaagagttttaatctatttggaccagaggtgcttattcctgtgatcgttaagataattgaggtgcttattcctgtgatcgttaagataattgaggtgcttattcctgtgatcgttaagataattggttttcttaatatatgacagtgtttattaattttgaaaacaagctattgttaaatataataaattgaatgtggttgtgagatgatttgttttgtctagtaatctgtctgtctttatttcattcctgatctcttatttccagagcataccaccagctttt

SEQ ID NO: 62109 - DNA, 682 bp, Cucumis sativus
  Intron number 2 from transcript Cucsa.043520.1 (locus Cucs a.043520) derived from phytozome v7.0 (chr-ID scaffold0054 2; pos 294278 to 294959)
ggtctgccacttttgagaacagttttagagtatgttctaatttttaccatactaaattttcattatttaatttcatcagggtgttttttccctttcacgtgttctgaagtcaagaaatggaaatttttttatctttttttgttttgtttttttgtttgagagaagcaggaacaatcacttcagaaaattttggaaaataagatcatagagtgaaacatttgagtttttttcttctattatttatagcgatttctgtttggaatttctgtttgtttctcgtcgttttttaaattatgaattttactttattgaagaaacatttgaatttgagctgctagttgaattttggaaacaagaaattactttttagtttccatacttggttcattcaaagtctagtaaaaagtgaacaaacttttaattttcgtaaagatcaaaggttttgtctttacaagaaaaaaaaaaacattttctttttctaaaaatcgaacagttatcgaacaaatttagtatttggaatgattttggatacaaaatataataaataagtgggtaattttagaagtggttttgcaaggtgtgggatcttttgtcgattaatccaaatttgatctgattctgctacgccacttcttcccgtttctcaggagtgttcaatatcgtcgggaggaaatagcagtgt

SEQ ID NO: 62110 - DNA, 992 bp, Cucumis sativus
  Intron number 2 from transcript Cucsa.090630.1 (locus Cucs a.090630) derived from phytozome v7.0 (chr-ID scaffold0089 4; pos 1842531 to 1843522)
agttgggagctgatcctcaactagacaacttcgtactttttgtttgtttgtttgctttaatttcctgttgtaattttctgggtctttagaaacattcttgacaagaaaatcaaaaaacaacttgtactttagatctgcaagttgggaactatgttttattttagtttctaaactactagattaatgttgcttttccacttacaagactaacgacagttaaaaaccgtcaactgctcgagtttagatcgataccaaaaagcttagttgacaaagactagtgatggcggaaactgttaagggatttgaatcattgcactatcatttgtttttgttaatgttctaatgttgctgttttcattaaggtgcttatgataatgtacaagaaaccatcaacggctcaaccttagattaatacgggacatcttaatttgacaaagactaatgggggtaaaaactgtcaaggaattgagatcattgaactaacaacagttacaaactgcctacggctcgatcctagtttgatatgggataggtcaattggcagagactaacgatggtgaaaccaattcgaatcattgcactatcaattgtctgtgttaatgatctaatgttgcagttttcattagggtagttataaattcttacaggagtaatgacggttaaaaactgtcaacagctagaccttagttcaatatggagaatcttagttgacaaagactaatggtggtgaaaaccgcaagagattcgaatcattgcactctcaattgtctttgtcagtgatatattgttgcagttttcgtgttcatttccattatggttcttctgattaatttatgtatggaaaactgaacttgtttgaagtttgaagcatggaaataatatattcttgttttctgtttttctttgattgaaaattgagttctttctgactttctccttgtttgttttcttctgaaggaatcatattgtgaggttcttcatcaatataagaa

SEQ ID NO: 62111 - DNA, 719 bp, Cucumis sativus
  Intron number 1 from transcript Cucsa.097500.4 (locus Cucs a.097500) derived from phytozome v7.0 (chr-ID scaffold0091 9; pos 2707326 to 2708044 reverse strand)
gtcgatcgtggaggtaacttttgttttggggttcttttgattgttgttactttgtgtgttttaaggtaaagttgatttgttgttggtgattttgagttaccattttcttgatctaagaagccatttgtgaatgggtttgatttagcttatgaattgatattcctacttcctgggtttgaggtctttctggtatgttagtttttttcttttcttttttttcatacttctgttgaaattgaactgggtttttagctcggttatattctggcggcttctcatggcttattgatgagatggtgttcaaattaccatttttctctctctctctcatagaaacctgggctatagttttgctttcattggtcttgcacattgggttttgtagagcatatactcaaggcttttagacttttatttgaactgaagttgcaagttcttagtttgtaacttgtctctttcttcgatcaaaatttctgtggatctttttgagttaaaaaaataattcttgcgcataccatcgtcagttcaaaacctcatatatgtatattatgtaggttttgatgtacttttgctcaactttttgttcttttcttttatcttttgaacttgcagattttcttgtgaattctgtgacagctcctttggatatcttagcaacttgtctgatagcttgtcatgttgtctttttccagattgtttatttgcccttaaggtttgga

SEQ ID NO: 62112 - DNA, 970 bp, Cucumis sativus
  Intron number 2 from transcript Cucsa.032140.2 (locus Cucs a.032140) derived from phytozome v7.0 (chr-ID scaffold0042 9; pos 1552556 to 1553525 reverse strand)
taccctcccattcatcaggtttgtctttgttgcccttagttactttcagaatgtagaggggctgatttgattttcaatttactatggtggaggggtgggggagggctctttctttattacataatttcttttgatttatctttcctactgggtttttgtttttatttagggctgatcatcgatcattcgatgtcggctgtaagtttggggatatgaactgttttggatggatgtgtcaaatgggaacttgttattgagtactaaaattttgagatgtaaagtttagaactagattatattgagatgtgcccaatctttggttagatgtgttttatcatattgtatccatagagcattagccatcatctcttttacttcttaaggttttctaacattaggctatataattaagagattagtacttgtcctatttttgcttgaaagtattttttctagcaagatgatgttatttttattttctgacggcttgaattttatttttattctagcataagatgatgttatctcttaattctagcataagatgatgttatgtcttaattctagcataagatgatgttatctcctaattcttaaggttttctaacataatattaggctatataattaagagattagtacttgtcctaaggagatctgttgggttttgttataaacatgatgttatctggctgatgaaattttattttccattactttcttagaatagaataccatttcctgtcattgcagttatctttatctttctccctttatcattggcagcatttgagttcgtaccctcaggatgatgaccactgttaagatttaagaagattattgttttattccaacattgtcttaaaacatttaatacttttcatgagatgtatatttggttgttgatatatatccaatgattgtatgtgagggttaactgtataaccaactaaaatggtgcagtgccaca

SEQ ID NO: 62113 - DNA, 790 bp, Cucumis sativus
  Intron number 2 from transcript Cucsa.088140.1 (locus Cucs a.088140) derived from phytozome v7.0 (chr-ID scaffold0088 8; pos 555526 to 556315 reverse strand)
agccaggcttaacaactcacaggcgagcattgagagtatcctctgtgaaatttataacaaaagttattgttattgattttttattattctcttcttttggcctttaattctcttgttttgttgacagaattatgtattaagttctttgaggtatttttcacctattgtttctttggtagtgtttttgtggtgaagttggtgtaataatgagcttgcttaatgttgttgtgtgtaaccctgtgaatttgtaatgaattactttcatcgttacacatttggaaattaattaggttccattagtgtattagtcaggctgtctgtatttaattttatgctttaggagaagttctacttctcttcattattggtgtctttgtttaactgtcctgttgatgttcctttttgtttgcttttacaagatggggtttggatgtacgttctcagtttgccctttaggacttattgtggttttctctctctctcagttccaccttcatttcaatgtctctctatgtatatatattatatagtataatggtatagtactgtggacctgtggtactgctgtattggtatctaacagtccatttctggtatgcttctatgacattataaatatatgaaatgagaagatgagaataaggttaatggcactagccactaggtgaggcactaaaagtgcattagagagtgccaaatgccttggtgtgtgtcttattactttgtctgtttggtatattagttccatccttaatgtgattaagctttatcccactggtgcatatttcac

SEQ ID NO: 62114 - DNA, 487 bp, Cucumis sativus
  Intron number 1 from transcript Cucsa.083370.2 (locus Cucs a.083370) derived from phytozome v7.0 (chr-ID scaffold0085 8; pos 243404 to 243890)
cgacgatttttggtactattcaccagcattttcaggtccccttttcgaaaatgtagatgcccttttccctttccccttttcccttttcccttttccatatcttgctttgaagttctatatctttttttctgctccagtttgttttccctagtgccttattgtattgggtttaattgtcttctgctgttgaatttggttgataatgtgtaatggtttcgaattttcttccacactttttgagttttgcattttagagttcattttattgtttctgggaaatattgatttctagaatttaagtttttgttcgttatcgatttaacatttcccttggattgcccttttttttttactagtcgtctcaatttgtgtttgtttgatagggacacatttaatcgaacagtttgaaaattctagacctgttatgtatcttaatttcttttcattttcagctgcattgtgtaagggtgggagattcagtgttgga

SEQ ID NO: 62115 - DNA, 982 bp, Cucumis sativus
  Intron number 2 from transcript Cucsa.083370.2 (locus Cucs a.083370) derived from phytozome v7.0 (chr-ID scaffold0085 8; pos 244514 to 245495)
gtttttgtcacggtaagtcaagttgttttatccctggaatgtactgcttctatagcttcactgtttatttcctccagcactgttttagcagacacaattttcacttccatgaaatcatgatttttttttagtatatagttaaacggacaaattaaagcaatactatgtaagtcactttcttaaatcactgattaactaatagcttaagctcatgagtgagggtagagttaattatatatcatctaacactccctctcacttgtggattgaaatatgtgaaaggcccaacaagtggaaattaattttaaatagggtggaacaatattatggaggcttgaacctaggacattttgaaacaacctgctctggtgccatcttaaatcaccgattaacccaaaagcttaagctcatgggtgaaggtagatttaattttatatcatctaacgcacttggttatcggctaccttacttgaccattgcttaaccaataattctacatctctctggtggatgtcatacttgacataggaacggttgtagcgctggaatatcaaggaacgaggactatggatttcttttaatagcttcctctgcatgctattcttttattgggtgtctatttttaattttttctggttcctcgtctccagttgactttctgcagttttgtactgtattttgacttcaggataatactttctagaaagttgatcagagtgctaaatcccattttatatccacttcttaactattttcacttgttacttaagcattattctcttgaagatcgaaacaaaaacaaaaagacccatgtaatgtctaatcttgaagagaatggtgctttacacatgctacttggttcatagcttagattttggttcaactccaattattctttgactataatgctcaaccacatatgctagactgagagatagcttcttttctaactttgaattaacgtccatgcttgtagtctggg

SEQ ID NO: 62116 - DNA, 852 bp, Cucumis sativus
  Intron number 2 from transcript Cucsa.108150.1 (locus Cucs a.108150) derived from phytozome v7.0 (chr-ID scaffold0093 1; pos 358029 to 358880 reverse strand)
ttgaggcttttgttggatcgaagactgtcattcaggtaatgtaagacactcgtctcacgtcttgcttttatctgaacaaatctggggatgttttcattcttttttcgaattttggtctttcaaaataccgtttctaaattctaagattatagacatgttcgggaaattggatcctcattacactatttaaagattatgaagtaaatttctatctcttgttctgttcgattaaaagaaatcatttccaatgttcatgttattctcaagttcatacaaatggaaaaagaatatatgagaaagttgctatctcctcctgacttggagatgtaggaagaaatggagaaatagaaacgtatacgaaactgattttgtctctattttaactaatttctgtttcagttttggatttagaagcgatttaacactctgctcttgtgaaagaaatcccacttctttcttgatttgccctccaaataaataaattaaggatgttggcatcaactcgggtccgctcattttgatagttgaaggctcaaattgttattacacatttaactgctctaaaactatttaaaaatcctcattgtctgccatgtacaactttgtatattgtaatcatcatctctcattgcaccccaacacagagaaataactgcttagttctttcattggaacgacaatcttcattcaaaatgttaacattctatcttgttttcccttcagtttcgtactctattaacttctattgctacaagctactgaatatcttgaagaatgctccaattcttcaagtgttggctcatctattataaatcgttctgaatatgatggttcttgattagatacgcagtc

SEQ ID NO: 62117 - DNA, 768 bp, Cucumis sativus
  Intron number 1 from transcript Cucsa.053300.1 (locus Cucs a.053300) derived from phytozome v7.0 (chr-ID scaffold0058 1; pos 57402 to 58169 reverse strand)
ggtggctgagcccagtactaaccttttcgtttccggtaaatcgttctttcttaatctatctgccttgcgtttatttactttaacaatcatgtatttgcgttatgtatattgctccctttctgttctgaaactgctaacgttattttgatttatggtttcattcttgccaattttttttggagtctggaatttcatttttcctgttcttcttttggtcctattttagctgtcttagtaattgagaaatgcttagttacctttttttttaataaatattttctaaccttcgattgtcaattttatggtatctttttagttagtgttgagatatctttttttattttttatgcctcttcttgttctttgcctttaatttgcttcacctctcggttttgaattgttgagatgcatacgtatatttctagatggggaagtttagtaattggtggaatagtaagtattgtgagtacaatctatgcttgactggacctaatgaggtggctatccattctctttggatgttggcctcctctacgtttatctttttcaatgatcgattcttggaagctggaattgaaatttggctaatgtgtttgttgagctgtgtttctgtttcttttcaagtagaggaattgttctgtcttttaatacagaattttcaagttttattgtgtttatgaaattaatgaactgtttgtgaagcacgtaattgttgatgtttatcttctttcaggcctcagtaaacgcactaccactgaaaaacttcat

SEQ ID NO: 62118 - DNA, 809 bp, Cucumis sativus
  Intron number 1 from transcript Cucsa.081270.1 (locus Cucs a.081270) derived from phytozome v7.0 (chr-ID scaffold0081 7; pos 129303 to 130111)
ccccgacttggttcttccctcgagatcattattctgtgagtatgatttcttaccccatttcctctttcttacatttggttcgttttttcatcactcaagtgagtgttcagattctgattccgattctgggtctgattcccgtttgtttacgttattttcctatttcttgattggcagttttggattttgggaatcttagctctagattttctcttctttaattgttattttgatgtgttttacccatttcggttgattactggttttactgtttttgcttatttgatttgaattcatagcgtttttttctatcgcattattagttttcttgtcatttggggttctgggtaggtctaattttaatgtgtataggcgtcgggttggcttgacttttctgtgaaatgtagattactcaagttacataggccgtattgattggttttagttgttggttgggatgcttcatagattagaatggactattctttattctgtttgtggggattgttggaaagtaacttactgcaaaagtttctttcagtgtacagtgaaaccttgtgctgctcatgaggtgtttaccataggagcaattcgaattacgatactattgagttctataatcatttgaagctttaccttttccattttagctaattagatgattctttagaacttgcgataaaatattttgtttgctatctgattgcagatttccttcatcagtgatcagtcaattttcagattttttttaactttttgacatttattcctctcattggaggagtgcgtattggtagatagcaagcgaa

SEQ ID NO: 62119 - DNA, 696 bp, Cucumis sativus
  Intron number 4 from transcript Cucsa.093780.3 (locus Cucs a.093780) derived from phytozome v7.0 (chr-ID scaffold0091 9; pos 87374 to 88069 reverse strand)
ccgcgaattggaagtataaaatcactttcaactctgtgagtagtgtgtttgtatatataaaacttacagccctgaatacttcatgttgctagattttagctgaaagtttgattatacatttctggattttatcttgatttgtactttctttgtcatatattttccgtgagtaagtcctaattcttcaaaccaggtgcttagacttgcttaaggttgatagaaacttctttttgttcgagaaacagaattttgtattgcacgtatttgtagtgttaaaatttcataattggaacattctttttggtcttgagagagtttgggagctgttggtaaataaaaccaaagcatcatactattaccattaaagcagtaaaagttaacgactgctgaagtgtattcttaatattgaaggttatgaaattcaccaagcctaatattttactgtctatatggtataattgctggcatcacgtggttggaaagtttcttttatgtttgtagtttcaggaaagggttagaaattagtcgtgacttgtgaaaagcatattatgattttttttttcctattaaatttgtttctctaaactggtgtttgaagaaaatctgcttattagcgatgaacaaccaagcatcttcattaatatagattcgtctgcaacagcattttgcagggaaattacataagtggggagatac

SEQ ID NO: 62120 - DNA, 1007 bp, Cucumis sativus
  Intron number 1 from transcript Cucsa.093780.3 (locus Cucs a.093780) derived from phytozome v7.0 (chr-ID scaffold0091 9; pos 88938 to 89944 reverse strand)
aatcttcaggattattcttctgtccctcttcacaggtacttgttttggatcttctcttattcaccatcttttcatatcttttttcttcctctttatcttctggagtttgttgatctgtggtttgatttttttatgatgagctgtttgtttctttcgtgtctttttggataaagctgcgttgagtgtgatttcgcttgtggcagagctaagtggtgaactgttgagagataagagttggtcgattggtttgatgagtagttgggcggtgggaaataatttgatttcgaagtccaaggatgcgtttggtttcatattagtctttgggatttggtttgggagtttcggaagtacttcgtttaatttgttttcagaattaaaaaaaaatgcgtttggtttggttttgtttcattttagtcttctagatttggtttcagagtttgaaaggtacttcttaaacgaattttagaaagtcgcaatttaaatattgagagtagaagattcactttatcatgaattttatatatttctggtacaatattacataattttaaatattttgaaatattggatttttaattcactaaaatgtttattatatcgatcaaactctttaattgttgactaagcttttgttttttgaagaatgagaaaaaattagggtggcatgaattttgaaatgaaagcacgatgtacttccaaaatgtctcatgtttttccatcaggtgctattttgagaaatgtgattgtaattcttcgtggctcttatatatgaatttaggctctccttatttggttgtcgttctggttactacttcgtgatcataactacagggatgtttctttttgggatttggttagtctttttgcttctacttgatattctctttcattgtttttttgctttgttgtaattatagacacaaactagctcatatttataccaattgggcctctttcaatatatttgactgtcaatggatggttgtctttgcagatatagcatagca

SEQ ID NO: 62121 - DNA, 610 bp, Cucumis sativus
  Intron number 1 from transcript Cucsa.122970.3 (locus Cucs a.122970) derived from phytozome v7.0 (chr-ID scaffold0100 0; pos 261224 to 261833)
gcaagaaggagcgttccaagacttcttcatcccaggtacttcatttttcatccctcactcgctgattgttttctttttcttgatatctcaattggggcttggctttatttgatttctcccctattttgttggatgttctgtttggtcgctgtgtaatgttcattgattaggctgtaatttgccataggatttgacgattatatctgggtatccttctgttagtcgatttacatgcttggattttaagtttggatgaaggagtttttccttcgtctttccctttctaagtaattttttgttttctctcggttggcaactgaaaatatcatgttcgtattgtggttgccggtaaaatatggatgttttctccctctttctccccttttgcctcgtataagtttgctttgatgccgatgcgaatttcttttgcatccattcttttttttgtgttttatttttttgggtggaaccatgaagagaagtaggagaaagagtaaaagtagtaggaaattgaagtccaagaagctgcggtatcgccacgattctccctcttgctctgacactgattttgaaagttcaacttcagtgccttcttctagctcggagcatc

SEQ ID NO: 62122 - DNA, 984 bp, Cucumis sativus
  Intron number 2 from transcript Cucsa.010610.5 (locus Cucs a.010610) derived from phytozome v7.0 (chr-ID scaffold0015 4; pos 39458 to 40441 reverse strand)
tagcgattcaggctggtaagtatttctgagatttaatggagagcaattagctctttttattatctttgggcataaagtctcaatactcaatttttttgaaacttgaactgattataatcttcttactaccaatttctctttcagttaacgttgttattcctgtcatgctattgtccatcacacttgcaatgtaattttgttgattgtagtgcttagacatatcatgtgaagttaagaatacctgaatgcctgtgcatgtatgtgataagtattatggattcaagtttctataaaataaaagtattatggatttaagtgtgttgcttataaaattcactttaggcagcttaattgttagtgtgtatgtgatcacttagccttgggagcatggatcctgcaactctcactctctttgagatttctttaggatgtggacacagttgctctaatacttaatacttaatatgattgctgtatttgaggtgtccaaattctcaaactcccgctgtatgccatggattaacatttgatgttggagatcattttaaagtaaattcagaagaaacaatatccacctcttgcaaataagcttgttcctggaattttttttgacctttgttgacatttgcacctgaactggtacacctgaaagtggagaaaagcgtccatttattgattttttcttcaggttgtcaattatgcctaggaaatcttagaaccgcctattgtgcaccttgagtcactttccattctttcttaataaaaatttagtttttatccaaaataaaagaaataaataaattctgtgaccttgagacactttttttttctccttttacaaactttttccatctcattttagaagttttctacctgtcatggcattgtgaaactgtacatacttcagcgaactataattttgatggtatttggtggcttgctatgatatagtgtcacatttaaatgccctaattcattgtagat

SEQ ID NO: 62123 - DNA, 633 bp, Cucumis sativus
  Intron number 1 from transcript Cucsa.046610.1 (locus Cucs a.046610) derived from phytozome v7.0 (chr-ID scaffold0054 2; pos 2018396 to 2019028 reverse strand)
aacacagcactgtctcgactcggctggttagttattttttaacctgactgtaatttggtgctcgttttagctcgcattcgacggcggtgtcttatggaaccgatttccgtgactaacaactatgaatattcttcgtcatcgctacaattttcatttaggagactgaattcgaatattgacgtaaacgccttctcctaaacttttgcacctggcatgttagcttcaggagcctctattttaatttggattctttataaaaaaaaactatgaccgattttgaattccaccgtcgaaacaattaactccatgattgatgaatgggattgatttgatggcgttcccttctctggttcaatgctgactttaagagctccttcactaatatgtccgtttatagtattgtttgatgttctcttaaaattttgtctgactgtagtgcgatgttgtcatctcatgaaattgggagtgttgttgtaaaacactgctcatttctagaatccgtccattgtatctcctctcccctctctggaatattgtcgttagataaaatttagctatccggttgtatttttcattcccaagttgactgtgttaacagtttttacctgccagaaaagtcagggaaaaggccac

SEQ ID NO: 62124 - DNA, 587 bp, Cucumis sativus
  Intron number 1 from transcript Cucsa.019360.3 (locus Cucs a.019360) derived from phytozome v7.0 (chr-ID scaffold0027 6; pos 229149 to 229735)
cgcctctctgtctggactgtggacccctttacaaggtttgtttattccccattaattcggtttctcctcatcagaatttcacaggataaggcccgcatttcgaggcattttgtctgtttctagctattaagggttttattgttcttgtcgttttacgcaactgataacactctctaattcacgattgtgtttgattatatttctagtttcttgtgttgaatctttccgatttcatctgggttgactctcccttgttgggggaaagtatggaaattgaagaacagttcaatagtgctcccgtggtttgtgattataattgacttcaactattcaaaggtttattgactctttggagatattattgggttattttttttatgcttttcggtgtcttttgttggaatttaaaagacattcttgctgaaatctcttatcgtttgattcttgtagttgtcttattgaatctatagatcaaggaagaagggttttggttgaatttatgtccttttttttttcttttcttatgttactatttacattttttttttctgtggttctgatttgatatttgtgattgcaatcagaat

SEQ ID NO: 62125 - DNA, 479 bp, Cucumis sativus
  Intron number 1 from transcript Cucsa.090400.2 (locus Cucs a.090400) derived from phytozome v7.0 (chr-ID scaffold0089 4; pos 1720357 to 1720835 reverse strand)
gccgtagaatccccaaccggagttcccatgtgagtgtttctgatatccttaactctcactattacttcttcaactcatgctctgtctctcacttgccaattttgcttcctagttgtttgatcttcatgaaagattctagtttgttagaattcctaactatgttttggaaaaagaaaaaatgacgattagttgaaaggattgaaagatcttctccacaatatgttaattcaagttgcgaaagaagtggtgttcataagaggaaagctttatctattaatcctttgatcatatggttgagattttagctttgtaaatattataactgaagaagtagaatgggggcaggaagactcattaaaaaaattggggatttcccttttatttgtctatataaatagcactctctcaatgtgttaatcaaacttctttttactaaacttagtaatgggtgtctttttgtttatgggttgatgtagatt

SEQ ID NO: 62126 - DNA, 496 bp, Cucumis sativus
  Intron number 1 from transcript Cucsa.124950.1 (locus Cucs a.124950) derived from phytozome v7.0 (chr-ID scaffold0100 1; pos 767433 to 767928 reverse strand)
cgggtttcgccattgcagaaggccctctctggacggtaatctttttactaactattctgttcatcggcaaacattaatggacaatttttcataatgtctttgctttttcaataactattaatttacggttcatttatgattcttgtaaatcatcataatgtctgaattttcactttgttttatgtttaacacttcgacaaatatgttgcttgcttgcttcttcttcttcttttttatttttttgtgtgtgtgtttttttataaagttaaatattaactgaaaagttgtatagaactgagtttaatgctattgaagttttatattattgtaaaacatgaattatgggagaaggcaaaaaaaattggacctatggggtatatgctcgtttaactggatgtgctccaatcattcaaattcatccgcgattctcactggattttgaatgttatattttatattaggttcgccgtagggctgtggttccgtctcttcacaa

SEQ ID NO: 62127 - DNA, 632 bp, Cucumis sativus
  Intron number 4 from transcript Cucsa.086100.1 (locus Cucs a.086100) derived from phytozome v7.0 (chr-ID scaffold0087 0; pos 388361 to 388992 reverse strand)
cgctcctatagatagagattcatcatctccaacaggtaccatcatcgtctttaataaaattaaaagtacaaaagaaaaaaaagaaaaaagaaaaagtacttttggtttgtcctcgttttttggtctaatgttagtgtcagtcttatttcgaataatttattgataataatactgtatatattaaatttgaatggcagcaccaaacattgaaatataattaatactagaaaagaacaaataggccacacaaatccctgatgtgcgcaactagtgggttctagccaacctgtattgtgatggtcgattctgattcactctaatcaactgaattatatgtttagatttgaataatgttttttgtttatatatttgcatttaatgtacacgtttggtggggatttcctgttggttggtgtagctaatttttctcatattgttaagattcacgggaaattttgacacaaattttctaatcttaactcaactcagaatattaccacttgtttgaatttgaatgattcaatttgaaaaaagaaacaaagagtttaaattaggaaacttgtagggatcgtcctttgaattgatctttggttcaaaattgtggtattttttcaattgcagttggagctacc

SEQ ID NO: 62128 - DNA, 524 bp, Cucumis sativus
  Intron number 1 from transcript Cucsa.024040.1 (locus Cucs a.024040) derived from phytozome v7.0 (chr-ID scaffold0033 0; pos 52051 to 52574)
aaagcaatctcagaaactcaaaggtattctttcctttttctcttgttcattcgattttctgcctttttttcctcacaacccaaaacccatttcatattttgcttcccttttatgtttcttcagctcttttgtgcacatttagtattgggtttttatttctttcattttctgctctttttctgatacccttttgctcagaaacctaaaccatttcatattttgcttccatcttatgtttcttcaatctcttgtacagatttataattggttttttttctcttcttcttcgattttctcctttttttccgatacccttttgctctgatgaaaccaaaacccctttaatttttttgcttctattttctgtttcttcaactcgtctgttcagatttagtattgggtttttgcatctttgaggtgcccatcagctgttcgtttaaattcttgagtgatactgtctggtagttcttttaatctgaaccgtttggtttttttttgttgttttgatttctttcagatctttt

SEQ ID NO: 62129 - DNA, 795 bp, Cucumis sativus
  Intron number 1 from transcript Cucsa.079350.1 (locus Cucs a.079350) derived from phytozome v7.0 (chr-ID scaffold0079 3; pos 1985423 to 1986217 reverse strand)
ccaaccgtgacactgagcaggtctcgattttctaatttctttgtttcgacattagtttgggaacatttcagagttttgtggtctacctttgaattctatttagtttcttctctttttgtagcttgctggtgtactgttcctagtttaggggaattttaccttctaatttggtttcgtaactgctgctgtttgtcgattatttgaactgtaatgcgttactagtagacattctattgagccgaaattgttctcatcgcgtgtgctgcagattttccgaaagcattttttttggaaatgtgcatttgtgattgctataacatggatttcagatcccctaaatagtaatgttgtttgagtccttccaaaattggaatggaaaagttaaagaatatataataattagaaacgtttcaagtgtccctattcgtttgttgtttcttcactaacttagaatacactgtaaggtggtcgaaaataaataaataaataaaatgggcggttactcaaccatgttgaattttaacagtttgttttggtagtcgattcgtgtcaaaatgaactgatatttgcaggtgataacttcctatgaaatctcatgtttgtttcaatttaattgcaatatcaatcaagtcgatgactgcaagaaaaagacctttgtaaaatttaattagtttcttgagtactgtggtttgcatttaaatcttatctatgtttacaatcttttgacttttgacttttattctttcataataatttgcaggcactaattgctttgaagaagggttctcaacttct

SEQ ID NO: 62130 - DNA, 671 bp, Cucumis sativus
  Intron number 2 from transcript Cucsa.112910.3 (locus Cucs a.112910) derived from phytozome v7.0 (chr-ID scaffold0095 3; pos 1255632 to 1256302)
cctaactctcaaccttcatctcttaccgtttcgaggtaatttgattcatggggtggtgcccctttttcttatttctttgtttgaactttttaagctttcttagattgccgtgcttatcaatctctcaacctttgtgaatacttgactgtaattgaactaggattcgtgtcttttgcttgccctgaatttaggaattcctaagtaattttagtttgtttatggaattagaattgagaggtaggttcgactttccctttgtcttctgattcatgatcatggacctcatggtatgaggtcaggtgatagtttagtctctttaacatttttagagtttgacaatgaattccatatttcagttgaaatctattgtcgagatgccacatccaggctagatagggtaatttggggtgggtgtgacaaattctctttcttatctatttgaattgtgtgttttgcaagaccttctgtatgtgtgataagtcccctctctttacattgaaaataggggagattttgtgacaaccattggggttttttggttccactttcaactcagttacataacctttctgtgtgataagtccctctgtttatgtttatgaagaactatttggtatcttctgtgctcctatttactttctgttcctaattttctaggagaaggttcagaa

SEQ ID NO: 62131 - DNA, 990 bp, Cucumis sativus
  Intron number 2 from transcript Cucsa.016410.1 (locus Cucs a.016410) derived from phytozome v7.0 (chr-ID scaffold0022 7; pos 87909 to 88898)
gcatttccaaagccaatcctctctttggtaaacttcattcgttgtcatttaatactcccagtatgtttcattcattaccatttaataacgttcactattcttttagatttctagccttcctctctttcatgatctatgtattatattatgcataccataccatgcatacatgtaaaatatctatcaccaaacacaccattaaatatgcgaattgtggttatctaaattaacacgagtatgtgtcgataaccaagagaattgtaattcgaattctcatctccattgcactaaaacaaaaacaaaaacatatcaaaaaagattatatgaaaagtccttgcagtaacttttactttaatcaatggtgcaaataatattattatctcaagagtcgttctcatttaaaaatcacatcaatgaatcacatttatatatgtttagtgtagtgattgcaggaacagagatcaaaacactaacttatgttcatgttaattaagggagctaaactcactcaattaccttaaattacttatttacctattgtatttgtcaattgttaaataattgatttaaggtgagtaatgcatgatcatttcatccttgatgaattttgtttgaaccaaaatgttgtctccgtttgtttggtctctcttctcccatcaacacttgggagaatatagctaggatcattgcctaggttagaacctactgaaaaactatacccttctctaatttttctttcaagtaatcattgggtttaataattatttgattgtcatgtcattatatggaaacagtatcatcaaatggtcacattttttatgttagtttattataaataagtattaaaattttgcttttactattattaattcatctccatattttcattttactattataccctcaatcctcccaactatattgcccttgacacatagtggtgaacaaagtgcagataaaagcattgctaccacaatccaaattagcaag

SEQ ID NO: 62132 - DNA, 738 bp, Cucumis sativus
  Intron number 1 from transcript Cucsa.002320.2 (locus Cucs a.002320) derived from phytozome v7.0 (chr-ID scaffold0003 2; pos 80051 to 80788)
agcattacaatattcataaaagattggctctcaatgtgagttcttaattcacatttcttttttgttttcttaatttttcctttaatatataatttcgtttgaatagcaaattattgttttgatattgggagacactattttccgcgttcactcttacttttggataactactcttttgtttttattattttcttacctttaaattaattgtatttgattttttttttttttggaaacgtattgtaataattttttaagtgattattacaatttttgtttagtttccaaatgattaataaataaagaaaagaaaattaataggtcagagaaatgttggttaagattgattttaaaattcggttcataaagaattcaaatgtgaatatagttttaaaaaataaaaataaaaagtggtcaaatacagttttattaactagttttggtccaattaggagttaaatttgtgaagcttaattttcaaaactcatacaagttgttttccatatttaaaaaagtggttttgatgagtttgaaagagttgataaagcttaatattaagaaattagaggaaacgaaggtttgattacatggaaaatcagagaatccaattgagaacaagtttggcaagaaaaaagaatggagaaatgaatcccatgctacaatgtctccctcaatcaatttgaaccattgaataaatgttcaggtaactcttcttttctgtggggacccactgaaccc

SEQ ID NO: 62133 - DNA, 965 bp, Cucumis sativus
  Intron number 1 from transcript Cucsa.095480.1 (locus Cucs a.095480) derived from phytozome v7.0 (chr-ID scaffold0091 9; pos 1327064 to 1328028)
tggagtttttcagtgggctcatcttctgcaggtgggcagttttctcttttttagcttggacgaagatggttatagggtattttttctttcaatggaagctcgattttactgctttgtggtcgttgtcctgtttggttgagctgttctttctgctttctgtagttactttttaaacttctgtgttcacgggttagtcatatgaagatgcttggaatttggattcacgaaaacgcttgctatgtaactgatttatatgtatttatgtgtttggattttggagagagattcgtgtgtgagagttccaattgtttagggtttctgaattgtgatttttctgctctgaattgttgtgtattttggttttgtactgaagtctataggatatttgaatgtagcttgtgaatattaacctattaagcttgacatttcttgaagatgataatctatgagctttactttgacttttacatacttacaaattacaatgtaattcaaataattctctccgttgagtttttcagttaagaaagccatgtgtcctaagtagccttaagaagtaatcctccaagaacaaagagtgtaaattaggaggaaaactcctatttatagaatttattacaacatgggataaaaaggaattaacctagaattttacctaattaacccttatttttctaaatgtttcctttgcaattcttcaccatttagttattgactatcctttaagctgggaaaattcatgagtttggaataatagcttattggtcgttcctttgtgttttcaagtctcatgttggtgtatccaaagttggaatgaagttttaaaactagatactaacctctagttatggcagtcaaagttgtaaatctaaagtaagttcaacaaagaaaaatttcttagatgttgcttgcttatctaattcgtaaatctggtgtcttgatggaaaaatacaggccctgttggc

SEQ ID NO: 62134 - DNA, 982 bp, Cucumis sativus
  Intron number 2 from transcript Cucsa.130700.2 (locus Cucs a.130700) derived from phytozome v7.0 (chr-ID scaffold0102 9; pos 757165 to 758146)
tcttactggtgctgctcaaacagagccatctggtaaagttttctcggctgtatggtctttcatgaatttgcttctatggtcttgggtggtttaagtggatatggctggttttacttttgctatggtctcaatttttgtgatttcattattgtaattgtcattttttgttttgggatgtgatgggggtgctatcggtgtgtaaacatagccggttgcatctattgatcctagttcttgttatttattgatcctagttcttgttatttaatagtttctttgtaatttgagtattagtctcctttcatttcatcaattaatagtgttgtttccatttcaaaaataaaaaagggttcttggtagcatggtatgtgggatggaattccgtgtatcaactttgggagcttttgagcgtttgacttatattaagttgcttatgaataatatttttgagtttgaatggtttattcatcaccgagtgctcaataaggactactgtaagtcgcaaaggacgtggaggaaataaattaaagttgcgatgaccacatatgtacgtacagattttcttggcaaccaaatggactcgggttgtggttgtcttgaaggaatagttgagtgcattggtgtccaggaaactcattgatcaaaagaaaaaaactcttattatatggtctactaaacaacgatatgcatcttccttcatatacaatttttatgcatatggtacaattatttttaatatgaaatcagttctcggatgatcaagcatctgaacaatttgatctgggaagttgactaccctccaattgggctctctctctctctctttcggttctggtgcaaatttttgttctcctaaccattatatagaaaggccatgtaatgggggaaatatcatatagagtctttttaagtctcctcatcctatcttatgatttatatatccgcagttaaagcattgctagcagttaagaggagtctaatt

SEQ ID NO: 62135 - DNA, 510 bp, Cucumis sativus
  Intron number 1 from transcript Cucsa.078450.3 (locus Cucs a.078450) derived from phytozome v7.0 (chr-ID scaffold0079 3; pos 804579 to 805088)
ctgcttgggtattatgccccttcaagcctttacctcatcctctgcaactattgtggtcctataaatttaaaacggaagctttcagagtcagttcctttcgtttctttacagtcaaatactttattttgtatcttgccaaacaacaacagttagatatcagaggattctttgtggatcctatgagccgagttgagtgaaaacaagtttagattagaaacacaagaacgaaggaaaaacaaaagagacagtaactttttaaaaatgaaactcccaactttctccattgttcaaccaaatttttttacgacaacaggtatcaagcttggactgttgaatgacattccatcttgaatgttgaaacataagctgtagaggaagactttagcatatgaattacaagtgatgaaacgttataagaatgattttttttcattttatggtaatttaaaataatcatgttttccttgttgacttcaagcttattttcttgagaattgtatatgtaggact

SEQ ID NO: 62136 - DNA, 792 bp, Cucumis sativus
  Intron number 1 from transcript Cucsa.051300.4 (locus Cucs a.051300) derived from phytozome v7.0 (chr-ID scaffold0055 7; pos 471072 to 471863 reverse strand)
ttaccaatctgctcttctatcacgatctggtttaggtgaatctctttcatttctttattgttattattattattattattttttttttttgtttatttgtttcaccgctttacttactttggagtgattcggagctccccactttataaattggttttctgagaaatgaactttttccatacattgttttttgttacctcaatcttctctttctggtctcggataaatggataaactattgacgattcctaacacaattaaggctatcctgattctgccttgtgttaaatttattattattattttgctcaagtgtggtgaaggtggcgaattaaatcaaagtcttgaatttcgatcctgccttgttgagatatggaaaacaggtcgattgtttcatgccgtctactttttccgtctttatttttaactgtgcaatggctgtagggtgctaaaagtttgttttgggttatttttttttaacacgagaaattgattatgcttcgtagtgtcttctttgtgtaactagaagtaccttatgatttaagcaagcctgattgtcaataagattacattatgtggaactttaagattttgatattaagacacagtgcatctcattttctgctgtaatccatgacatcacctgctgcttcagttttttatacatcgtcctttgtatgtgtcagtgcttttatgtatctctctactcctttttataattattatctcggtatccttttctgccttcaccttcagttttggactgattctgttgtagctcaacattcaggt

SEQ ID NO: 62137 - DNA, 875 bp, Cucumis sativus
  Intron number 1 from transcript Cucsa.098280.2 (locus Cucs a.098280) derived from phytozome v7.0 (chr-ID scaffold0092 3; pos 343843 to 344717)
agctgggattttcacgccattgcgatcctgtccttgtaagaatcaaccccttcccttttccctttctctttgggggaaaagaaccatttttcattcaaatattaatatttggtcaagtgggtaggacgtggatcttcaaacaactcctgttttagaccatatcgaaagggattagattttgggatgtctgtctaatattatttccttcttgtttggtttgatatctggtgaatgctcctatttggttgagtgggggagaaggaaaaggcttatttctttatttattcttgtcggcgttgtccttttctccttgtctataagttaaaagaggggctatttgtttagaaatattactgtggatgatggattataccctttgagtatgccatcgcttaggcattggagtcatctatcagacaactttaaatattatcttcttctgtatatgatgttaaggattgaactctgatcctcctgtttaatctagatcttaatgaacaaggagatctagtttcttgtaaggccttgtcattagatggtttatttcaaaatttgtatagtttgtggagttgcttaaaaagttgtaagtttgctttatttgtttctgtggatgcattggcaactatagttgtataatacagccccttgattatcatgttcttttgtttatattgttaaaactctgtggaagtcttgtttctatagtttgtctatataatttggtttatttggttgatgcaaaattttctgcttattgtggagcatgtgggtgagattatatgctgttatagttttacttgtctgacaagagaagtaatgcaattgagcaattcttggcaggctttctcttgaaatatttgaggtgttggaatttg

SEQ ID NO: 62138 - DNA, 599 bp, Cucumis sativus
  Intron number 3 from transcript Cucsa.065790.1 (locus Cucs a.065790) derived from phytozome v7.0 (chr-ID scaffold0069 6; pos 428104 to 428702 reverse strand)
atcaaagaaaacaagttcaataaggctgcttgcaggtcttctcataaaaccttgttatctttaattttgccttttgataattcaagttcaagggtagttataatgcttttttagtaagaatttaaacgttcgaactcaatgaaaggtgcgagtagatgcccgcagcactttgatttaaggtctctactttcaactggagtacgttgatcaaatgtacaaaattaaggactaaattcaaccacaaagagacgaaagtaatattcaaacttcgaaaagctaagttgtagaataactgggataaaagggagaacaagcttagaaaattaagaggaatgaaaaaaataatttacaccccttacctggtttggatcaaaaaccaacattgcatctatttgaaccttaaactttcacaagtgaattaatttaaaccttcattgtaatttataactattttcacttttaaatcaactgaagtcctactaaagtcgcgagggaaagcctcaatgctttctaggattaccaaattcttgtaaatgccatggtttggctaattcttcatcttttcttcagtagctgcagggacactataaaagcaatct

SEQ ID NO: 62139 - DNA, 1049 bp, Cucumis sativus
  Intron number 1 from transcript Cucsa.042310.1 (locus Cucs a.042310) derived from phytozome v7.0 (chr-ID scaffold0054 0; pos 759838 to 760886)
actcttttttttcttttcaagttgcttcctttaaggttagtgttctttgcatttgtgtatggttttatttacttcatccttgatgctaattctctactgtttctctcgtttcttagcttgaatcttagttctgggcttgatttcttttttgtttttaatctcagtttgctgtttttgtctcttgattgtttaattttgagctgtttcaatttcaacccctcctctcttttttcttttttgttgcttttgcttgggaatatgcggatcttgcccttgctttgaactccacaagctttttctttactgtttttatgccttttcatgttcttagatggtgagggcaagatttcccccctttttccttgtatctctacttcaattagagtttgtgtgtaagattttgtttatgtgacagagggcaaaggtatttctacttcaattagagtttgcctgttcaggattctgtgtatgagagagatagagggaaagggtattgcgtgctctgttggttatgtagagttttttcttgttcgaatcttcagttgaatttagtgaggaaaaactttcatgtgtcctgagatttggcattggaaccttgaaagaggggttttgtttgtaatgtttggttattttttgttttgtttcttagaacaaaatatctgttgttagttttgtctaggatagagcttatactttgggaagtgtatgattctatcttggtaattctcaaagagatggaaaagagaggaccatggaattctatgaataattatcatgtttgtgatgtaatttaggttaaagctgtttgaaatattggtttttgtttatattcatccacaatcgaagtttgatttgggtatatgtaacttgaagtttcgtaggcgaattaagctcaaacaaacatgttcttgaatctttctgattacaatatctagcttaagactctttaatgcatcaaaatgttgcgtgtaatttcttcttctataatagtttacctctgattttgtttgttaggttacatcaggcatcgtagtctgcattttctcgga

SEQ ID NO: 62140 - DNA, 543 bp, Cucumis sativus
  Intron number 2 from transcript Cucsa.083900.2 (locus Cucs a.083900) derived from phytozome v7.0 (chr-ID scaffold0085 8; pos 588503 to 589045)
ttctgacactcaatatcgatcgaattgcttggcaggttgggattgaagccttttacattgacatttccagtcttaatgcgatgccaattgggttgatttgatgtcctcacttctacgtgcaccaacattgagctaattgttactattatataggcagcaaccaaaaaatacggagagtttagctagtgggtgcgtaattgataaaattgttttttctcgaattggaggagtaaatacgttttgtttgtaacatttaattatataagtggaagtgtttcattaaataaaagtctccaatgcatcacatagcttggttaaggtcacaagaaaattatttttcttttcatggtttcttaagaaacaagataacattacaatagagaatgtggagttacaaaaaggatctctaattagtcaacaaaattgtgtacaattaccaaaatatttagattccaagggtcaaaagcgatggcacgaagactcctttaatctttaagtttgatttcagccttgcaatccagcagtaggcgggcctgcaaaatc

SEQ ID NO: 62141 - DNA, 985 bp, Cucumis sativus
  Intron number 1 from transcript Cucsa.122860.1 (locus Cucs a.122860) derived from phytozome v7.0 (chr-ID scaffold0100 0; pos 196212 to 197196 reverse strand)
atcaaggtatggattttttaatcttccacttcctgctgtttggtttcgggggaattgggggaaaattaggtttttttttgttttttaatctatcgtagctgggggggctaaatcaatggttttttaggttgggatatttgaattatgtaccctttagcgatcattttaatgcacttttaaaccaatgtttggcacaatgatataatatgaattctgagatgggttttggagaatgacgtagttcttgctgatgtgcttaaggaaacttggaagtagaaacaagaggcatctgttttatgaattgcataaagaagcattggttttactctaatctgaactggatggggattagaaagaaatttactgtcttgcactaggatttgtgttgggatatgcatggctacgaataatctaatccctttgttttcatgatctttattcatacgcgagcttgtttcgaattggaacattaatttttttaatactaactttatgctaatgccccaagggattagcatacattcacaaatacatagccttgtgaagggcttgtgtctcttggttatagaggttccaattttgatccttcgagtgagcttagtaccaaaaagtcttgatgtctccaaggtccaggctccaaaccttagggcgggtgcggggtggccttgggtatagtgaagaaagatccgattggtaagttgaagattttaactgaaactgaaagtttgatgttaaatcctcacaaatacatagccttgggtctgtgaactgttgccacttgagtttttagccttgaagtggaatctttgtaaacaaggagaatgggatattgatattcattagaccgatttatcatggttaccaatacttggaaagcatacttaaattttttttatacctcagcatttaaacttctctaaagttttgaatgggttattttgcttcctcagttgatcaagtaaaacctgggacaactatcattctt

SEQ ID NO: 62142 - DNA, 734 bp, Cucumis sativus
  Intron number 1 from transcript Cucsa.124880.1 (locus Cucs a.124880) derived from phytozome v7.0 (chr-ID scaffold0100 1; pos 712006 to 712739)
atttagactttcattcataatcttctacttttcaggtaaattcttttatatatatatatcatattatcgtatatatttaactttagcatgaatctcaatactatttagtttgcatgtttttagaagtatttgaagatttgtttattcgatcgttatatgacaattgaatttgatttaacacgttatgtggggtttgttaatttaacatatcattgtttaatttttatgtttttcaatgtaattcatgcattttaggtatattttatacatgtgtatatatatatagaaaatatttgttttaagaaacaaacttaaaacaaatttcttattttataaaataagaaaaattgagtatgtaattaaattatgattcaaccatttggtacgtaacaagatagaaagaatttcaactaaggatgatgaatgtgtgtgatgattccgttttcatatattaactttagtattttcatatattaaatacaattggcaactttaccgagatatattaattaaataataacaattatttgtaacaaatttgtttagtgcaacattgggtagagaattcaaattatttttatttctctagtgatatattttgattaattatttgactagaagaaatggctaatacatcttgggatgcaattaaatattaatgaacttttaaatatttacaattacatattatacttgcaggggcttactctgttcatttcatcgttcacaataac

SEQ ID NO: 62143 - DNA, 449 bp, Cucumis sativus
  Intron number 2 from transcript Cucsa.109290.1 (locus Cucs a.109290) derived from phytozome v7.0 (chr-ID scaffold0093 4; pos 213158 to 213606)
atcggaaggctgaagccgcgattttccgtcgtaaagtatgctttcctgtgcatttgtttctatttgattgggttttgagttagattgtgaaattcggatgttagggagcacaaattaagtagatttgggaggaatatgtaatatgagttatatttggggtttcttgattttttacttattcacctgggatctaagttctaaggatcttacttatgtcaatcaagaggaagacaaatcataaaggttcaatttcataacattatgaatcagtttaggatttctatttggaaagaaattttgttaaatcgttgcctccattcttttcagatgcacatagtttattcacttcattaatttctgatggttcatttcgtttatgcatcagttcatgccagtaagaataacctcaggctctttctattgttgttatccataggactggaggtgca

SEQ ID NO: 62144 - DNA, 561 bp, Cucumis sativus
  Intron number 3 from transcript Cucsa.109290.1 (locus Cucs a.109290) derived from phytozome v7.0 (chr-ID scaffold0093 4; pos 213669 to 214229)
cgtttaccaagtcttcaaagcacccctggaaacaggttggtaaggccgaatagataacaattttgttcatagttttctgtgtttgacatgtatgcttggttctcctaatttcattactatagttttcacctttcttaaagaaacatttgaatttgaattagtagtcaaattccaaaatataaacaagctcataaaaacttctttttgcaattttcaaatatttgcttgatttttcaaaacgtgggtaaaaaaatagatggcagaacaatgaaactcataggtaaatgtaggctttgtaagctgcattttcataaattaaaaaaatagcccaaatggttatgcagcggacctaaaatttaattcaaagacttaaggtatctatttcataatttgattcgtcttctcatgtctcccctttaccagttacaatttgctcttttatctcagttgcaagatatgattttgaattgtaatgatgaaacctcctatttaaggttacttttaatgttaaattccacatgactctgacatcaagtttgttggttcatgcatcagtggaag

SEQ ID NO: 62145 - DNA, 332 bp, Cucumis sativus
  Intron number 1 from transcript Cucsa.125470.2 (locus Cucs a.125470) derived from phytozome v7.0 (chr-ID scaffold0100 4; pos 214748 to 215079)
catcgttcgtgcctttctcgactttcttaactccggtatctactttgatctcttttcttcttctcattgatacaattggaactggaaacttttcatttcactgcaccttttattcttgttatgtttcttgaaacttttaaaaatgcatgttagaacatgtctttgttggatttgtgtaaattatgcggttttagtggagtgaagcggtgtgttgtcttgtgtaattactccattactgctttgatggtcttttttagggtttccactaagcaattccttctatgattatgttttcttctttttgtgcgtagtggaacctggcccaggtgttg

SEQ ID NO: 62146 - DNA, 734 bp, Cucumis sativus
  Intron number 2 from transcript Cucsa.125470.2 (locus Cucs a.125470) derived from phytozome v7.0 (chr-ID scaffold0100 4; pos 215290 to 216023)
ccaatttgtcacagtcgaaacatcaggtcgactattttttttaatgcgaatttcagcactattaagtcattatttctctgtgttaatttccctttgtttctatatccattaggttccacaccatttgtatctataaaaataatatgtgaagctgatcatctgttatcactaggataacagtgaaatatgaacacctgtctgtccatatataatacagacaaatgtggccagaatgaaattctaccattttacattttccccccatcgttgttgtaagccgaaagtagaagccaaacagacatcccccggaatttcaaagtagtgtttaataaggcattattgttttggaaatcaaaatagagcctgttggtagttaactgcctcgagtttaagatattagtttaatcccctttcttagtgattgatctagtgtattaattttcttatttattgcttttttttcagggagtagtttgtttatttattatactcttataaaattgttcttgctaagtattgtttttctgcacttcagagcatccagattatgtaattttgtgaagagtcacaaatgtttctattattagtcttcatgttcgttcgaaaatattttgatttcaatcaatttttatctttctgattgattcattttgtagatttgattttttgttgagttttgacttaccctgtctcaattaatccagggcggagatagctcgagagaatctcatccc

SEQ ID NO: 62147 - DNA, 461 bp, Cucumis sativus
  Intron number 1 from transcript Cucsa.106860.6 (locus Cucs a.106860) derived from phytozome v7.0 (chr-ID scaffold0093 0; pos 335625 to 336085 reverse strand)
aaggtagatggacttctctgctagatcttgatcttttgttggtatattttctaaatttctttagaagggtaaattcaagagatgatatgcttagttttgttttagaattggcttcacaaagatagtcagtttaggaatggtaagtggaaataatagtttctgagcaaatcctgtgttgtgaagtgatgcagagttttagtgtgttactcaagtagtgggatcaggatcttgataaaatcatgcttctgtttctgcttttagatcaaagtttactgtatttttgtagttatgtttctatatctggctcaagttatatcaatttgctgagaagaaagaaaaagaagaaactctcagaattacaattggttaatgtaatttatgtatagcctgtgactgggatgttcttcgctttctacttttctctagcatcggctcttaaatccttcaaagatcaaatatct

SEQ ID NO: 62148 - DNA, 792 bp, Cucumis sativus
  Intron number 2 from transcript Cucsa.052820.2 (locus Cucs a.052820) derived from phytozome v7.0 (chr-ID scaffold0057 7; pos 236968 to 237759 reverse strand)
cttctctgcccggaagctccaattcaaagaacccagtacgttctctatctgttttctttcatgggtattttttggttttagactataagtttcgtattttggtactgggagttttggggttttaaagacctaagattttgggatatagagtttggcgagatcgaggtttttgaatcgtctacttcttctgttgcataggtatccttatgtgactggtacatccgtggttgctatcaaatataaagatgggattttaatggtttctgatttgggaggttagtggaaaatccttcccattttattatatctctgtaagaaaattgatgacggctgtcagcatgtctatcactttttgttagttgattggataacacttcttggaatgatgtttatttcgttatgtgattctgaatcttagatgtatgtatggccaaattataaggcaatcccgtgtttttttattacttatatggcgttttaactaactacaggctcctatggttctacactgcggtataagagtgtggagagaataaaagctattggaaagcattctcttcttggtgctagtggtgaaattagtgactttcagcagttattgcgagatcttgaccagctcatgtaagcttaggacggttttgcttttattctcatgctgctttatatagatgtattcacaagggaattggatggtgttctgcattggaattcagttgcttgtagttttactgtcatctattttgattcagaaattgggtgaaatctgttgttgtattgaacggtgcagcttgt

SEQ ID NO: 62149 - DNA, 252 bp, Cucumis sativus
  Intron number 1 from transcript Cucsa.029190.1 (locus Cucs a.029190) derived from phytozome v7.0 (chr-ID scaffold0039 6; pos 1700 to 1951 reverse strand)
gagtttataaattttgctatactaataatactagaaatggttcttcttttctttttaataaaaaaaatacgtttttgtttttattccaataagacattgtcgtatctcttagacgataccacaatatcagaacaataagtttgaagcaaatatatatatatatatatgatcaaaagtagccatagtaatttcttttaagtaaataataatactttaggtttgtccaacttcgtatatcttcgttactctcat

SEQ ID NO: 62150 - DNA, 844 bp, Cucumis sativus
  Intron number 1 from transcript Cucsa.040400.1 (locus Cucs a.040400) derived from phytozome v7.0 (chr-ID scaffold0052 7; pos 87635 to 88478 reverse strand)
gattacaggttagttaatgctaataatgataatgaattgttatggattggacttaaagactatgtttggtgggaaggactttcttgtgtacaaaggtttgagaattttgttggtaatggttgtttttagagtttgaagtactaaccattggtgaaaaggattcattagaaatctagatatttagagatcatgattcaaatatattggccacattgcagttttgtagtcttagatgttgttaggtcatacgagcacacaagcatatgttaactcccacttaagatatttattttatacccctgagtgtctttggacacttttaaatgcacttcgactaatttcatgaaccaacgtgtctgacgttacaacatttgagtagtaagaaaatttgtaggatgttattaatcttagataggtggccaccatggattgaattcataatctattagtccgttatcaaggtcataccccaatttatcactagaccaatgcatgatgattctagctttgcagattgttgaactaaaaaaatagatcatattgccatgagcatagaccgacacacataaaatatataccttaaacaaagaggtcaaaactctaaaagttcaaatctttcaatcggcataccgttgcactaaaaatatgttgttaggtgatagtgtttcttaaagattgcttggctttgaggtgtacatctaaatctatgatgaagattaacaacatgcattgattttgagcccctacgagagtatatttaatccaatcttttcatttatggcagccattgataacctttgctttcaattttcaatcaggacttgatcgagttaaggcaaggatc

SEQ ID NO: 62151 - DNA, 797 bp, Cucumis sativus
  Intron number 1 from transcript Cucsa.121020.1 (locus Cucs a.121020) derived from phytozome v7.0 (chr-ID scaffold0099 8; pos 3066425 to 3067221)
tcttccttccaagcctcttccacctgctcaggctggtaagattcttcgttgcttaatttttggtttcgttttgaatatttatgtttttctttttttaaaaagtatccctttggtcgatcgattttacatttttcagataatgtttattcgtttcggttttaggtgtttgtttttcttatttaattctacgtaagagcgaaggatggtaattgtttttaatttggttggagtgttgaaaatttcctcttttttttttctcaaaaaatttgtgggatggaactgttgtcttcgttttattgtgtgtttggcagttgaattttgttcgtaacttagataataccgaatgagttgtttgttttggtattgtgattggaggattaacgtattgaagtattgcttttggctgaaatctgatgtctgaaatgcagttgtgaataaataaattttattttaatgtttcaaggcttaaataagattttgttttcttactatgatatgttgtttttctttacgttgatttttaatagtcatctactgatagcagttgaacattaccaagttgaatttgtgattgtttatcgatttgggatcttttttgggaacttggaactgtgcaaacaattcttcgttatcataccagtaacattttttttgtctttcttcgtcctgttagattataatttaccgacctactattgtttatccttcaaattcttgtgagtgtccactgaaacgaattatccattaagtgattaagataatctttttcttactttgtgtagtaagagaatcaagga

SEQ ID NO: 62152 - DNA, 471 bp, Cucumis sativus
  Intron number 1 from transcript Cucsa.083290.4 (locus Cucs a.083290) derived from phytozome v7.0 (chr-ID scaffold0085 8; pos 196132 to 196602 reverse strand)
ggagaagctcattatcgataccgatcctggaatcggtgaatttcttcttaatcctgtttctgggcattctcttccctttttttttctatgttttttgtccgtttggcacatatcttgttactgttttattatattttgttttgtctgaatgtctgttcttctcaactaggctctgactgatatgaattgaacacctgtgatccagagttttaaaatttattgtgcaaatctgtaaggagggtctgatttcttctgtgcggattggcttaaatttctctggatttgtgctgttgggatgtaaatttgcttgtatatatgtgtgtacacatatgcatttgtgtagaatctttgtatgaacttagaattgaatctcagaaaaagctgatggatgtacttttggactgttgggctatttctaggaagttttaccattggcgtgctagttaactctaaattatctttgattgacag

SEQ ID NO: 62153 - DNA, 389 bp, Cucumis sativus
  Intron number 1 from transcript Cucsa.099800.1 (locus Cucs a.099800) derived from phytozome v7.0 (chr-ID scaffold0092 6; pos 486679 to 487067)
tccattgctacaccaccatcaccaacaacaatccggtaccttcttaatcttctttctttttcatattatctttttgtcctttattcctcaattatcccaaactccttcattttgactcttgttattattattattattattattttttaatttgatgatgatgatgaatatgattctgatttcatatatatgtccgatccagatctcttacttacgtcttattactacatcctttcatctctttaatcccaatgaatttcagaacgaatccccaatttcttcgatttagggattattgattattgattattgtttgatttatttatttattgaatttgtttgtgtgtttttcgtttttcgtttttcttaggggtttcgtgatttgattg

SEQ ID NO: 62154 - DNA, 574 bp, Cucumis sativus
  Intron number 2 from transcript Cucsa.099800.1 (locus Cucs a.099800) derived from phytozome v7.0 (chr-ID scaffold0092 6; pos 487888 to 488461)
tattgattttggcctctctgttttcttcaaaccaggtgaaaagaaagtgcattagttactctgtttatttatgagttttattttattgatgaatcaagtatcccatttgatatgtggttcagcaatattggccccttaattctgtttatagcatgtgtagtaactattctcatcctcacagtaaaatttattactaactaatcatcgtcctcattaatcatcggtggcatatcggataagtcatctgataatccccacaatgggttagaaaacatttgtattgaaatattcagcttctttaaggaaaaggattgggattctgggaataaaactatgcattatgcagaacaattgaagtaggaatgctgcaataggtcaggaggaggtaattcctgatcctttactaaaagatgctgaatatctcaactgattgaaccaccatgtttcaatgctagaagattagcttgcttgacttacgcttctttttcttccattcgtatttcttttaatcatcacatcaaatattttttcattactcatatgcacaaaaccacttcaggtcaaatcttcaccg

SEQ ID NO: 62155 - DNA, 394 bp, Cucumis sativus
  Intron number 2 from transcript Cucsa.063140.1 (locus Cucs a.063140) derived from phytozome v7.0 (chr-ID scaffold0066 7; pos 6888 to 7281 reverse strand)
gttggaaaggtaaatgtctatctacttttgttccactgtattggttttttcttctagaatgggatgtgatggggaacttgtggtcatgctgtcattgttgaatttgagtatgcactaatgtcttcagcaacattcagttttatacctcacttgtaattggctttatgtaaacattattatacagaaatagggccatttagtaatttattcagttcctcattattattatagcataaagtacatctagcaaaacgctaaccacttgaaaatgctgagggaaaatgggtaaaacagtaaggtgatttcatgtcatattctcttgcagttttcatgtgtttataaaattataattgaagaagcaacatcttttgcatgcagggaagtaaaaatttta

SEQ ID NO: 62156 - DNA, 867 bp, Cucumis sativus
  Intron number 2 from transcript Cucsa.076260.1 (locus Cucs a.076260) derived from phytozome v7.0 (chr-ID scaffold0078 9; pos 671434 to 672300 reverse strand)
tagctccatcatccaataatgtaagtttgtagcccactttactgatttgagtttcttttttgtggatttcaaaattaggattctttaaagctggatggttgattaagcaaaatttagcagaaaccaaacattctctgacaaaaataaccagcttcaggcagaatgccgcagatatgaataaaacagtaattagacatttaaactgaaacttaaggaaaatggattagttttagatgtattgtttaataccaacttcgaggaatgtatcccccaagactgggagagtgctgtatggcaatctagatgtatggcagacataatttctgggaacttcgaggaatgtatgtatttagtgagaagatcaacagaaaaaaaactctttaaaggatctttactgatgatgggaactggcaaaagaagaaaaattaatgaacttaatttaattgagtactagctacaagatttccactccatcccaagaatcaagaaagggatgaaactctgaatcaaattatttactattaatctactcatgcatttaagttcatcaacatgctaattttctctttaagaaattcatcagtctgttataaggcaaagcattcccttcatctatagaaatgaccataatttttacgatcttgaattaaatatcaactaaagaactcaaaactaataaatgttcattttaatatgtttcctattgttattcttatttttgaggctccgtagatttgtaatatggacatttctgcatgattacccttttctctaaataaatacataagcaatatggtgccatgtttttctcattgtttttttcacaacataagcaggcccttcattttcatttgcatctttcatcat

SEQ ID NO: 62157 - DNA, 598 bp, Cucumis sativus
  Intron number 4 from transcript Cucsa.111130.1 (locus Cucs a.111130) derived from phytozome v7.0 (chr-ID scaffold0095 3; pos 26668 to 27265)
ttgtgagagagcttgaaaagaaattcagtggcaaggtaagtagagaacctctttttcctggtgtagtttagttattgtttgtacttaatacacggctaattatgtctagttagcatcctcatccaaatagtatctaaatccttgtcatagtctataaatcaaactacttatgtcatctgtgcctatagttttttctttttcacgtcattcctcttcctctagaaatgttctcttgaacggagaagtttatgcattatataaattgatacaaaaagaaataaaaaaagatgatcgttataattgaacataatagttaatattaacaataaacacttgaaaaaatagtctttttctttaatttgtactcaattcttttaagcctttttgggtttttctgcagtaagtaaattaggttgctttgcatttttgaagccaaattgatagtatttacccaatcgtttaataaaaactaagtctttaagtctcctgagaggtttgaggctacatgatccaagtatttgtttttacatatttctttcctctccattttcatattctatttgacattaatgataaaccattgttattctatgatagg

SEQ ID NO: 62158 - DNA, 254 bp, Cucumis sativus
  Intron number 1 from transcript Cucsa.032490.1 (locus Cucs a.032490) derived from phytozome v7.0 (chr-ID scaffold0042 9; pos 1791538 to 1791791 reverse strand)
ctctccttcattggtgctcttctttggatcttttggtgagtttcttctctttaccctttttcgttttggaaaaataaaatctctacccttctcaaaatcggttattaagtatttgcatatgaatcgtaactttttggatttttgttttattttggttaatattatttaacgttgatatgattttgataattggatatatatatatatacatatatataggtctcttttgagctgcatttgcccttgctgtgtat

SEQ ID NO: 62159 - DNA, 750 bp, Cucumis sativus
  Intron number 2 from transcript Cucsa.091050.1 (locus Cucs a.091050) derived from phytozome v7.0 (chr-ID scaffold0089 4; pos 2133056 to 2133805 reverse strand)
tctactccgccttagtgctcctattcgcatctgtggtcagtattgactctctctctttctgcttctttttcatctgtggattataatgttttctaattctgttttgaacaatcttagcgaagtctacggttaattgttgtttgaatgtttggcttggagttcttataagcttgcgtttgtggagctgggagctttggaattttgtagcttgaagatagtgcattagactcgagttttatatagtctacgtttggtttatggtactatgatttgtaaaggatagtgtgtcgtttggtgggttttaagggttttggtgtgtggagttggtagaatagacaaatttgtagtttgtaattggatgaaaaaacctatgtattatgttggcttgattttataagagtcaatggagttggtggattttaagggttttggggtatatagggacgatgttgtgaccaagctatatgaactcaatctgcaagataaacatcaaacattccctcagggtatttgccagtgttctaaatgaatcgagctcttgtgtgtccctgaatgctgaagttttgatacatttttcttcttttggtttgatatttgagctttctttcataaatcaggaaatgaggttgaaatgctaaataaaaggcatccaattctgttgaattataactttgtttcatagttgtttaatcttgtctctgctggctttgtccaggtgatatacacggtcaatacaaggatcttcttaga

SEQ ID NO: 62160 - DNA, 445 bp, Cucumis sativus
  Intron number 1 from transcript Cucsa.091050.1 (locus Cucs a.091050) derived from phytozome v7.0 (chr-ID scaffold0089 4; pos 2134041 to 2134485 reverse strand)
ctctcgtttgaagatttcaaccagagaaaccaaatgtaagataacaagaatttcccttctctctcattatcgactcatcttcagagcttgattctctcaaatttgtttgtaaatatctttctctcatgtgggttttcttcctttttcctacccgagattttgtgaatcggaatcattacgtgtaattgttgcttggcttctttgtgttgacttgtttctgaaaactctttcctgttctttcatctgaaaactttttggagggttttttttttgtgcttcttgttcttgttgttttgttgtgtgaattcactgtatctactttgatttggttctctgcctcttttgaagacttgggtgtttacttttctccaatttggaagatacccttttgatctttcttcaatttgaagcagccaagctgattttccctttttgaagagtcatt

SEQ ID NO: 62161 - DNA, 933 bp, Cucumis sativus
  Intron number 1 from transcript Cucsa.133060.1 (locus Cucs a.133060) derived from phytozome v7.0 (chr-ID scaffold0103 7; pos 866402 to 867334 reverse strand)
tgcattgcatccaactcttttctatcccaattgtaacatctcatgaattacccttttcaatgttttcttacaaaatttatagcaagtatggaagtatggaaggaaggaaagtagtacaaagaattaataccataatggttttaattttcttttaaagaaagataaagtatagtaatatcaaggtttttcaaaagagaggtttttatttaagtattttgttgactaggataataatgttatggagtctttctttatgaaataagacatatattttttcttttttaaatttgaagataaagaatttgtggttgtgtatagctagggttgaactatcaaaataaatcaaattaataaacttttttcctttcttttgttgacttgtttttaactgtccttttttttttttctactttactaattaggatttaaattataaatttagttggcaaactttaggatttgtgtgttttttttaaaaaaaatcttaaatctcaaattttaaaaatttctataaaaatattaatttatatctccaaaatttccacaatttcatttgatttaagataaattaatttgttagagaaaaacttgagtttattaatttaacattgtgtttcttttaataaagtttaaacttggatgttcacttgaactacatcaattttgttgcaattcaaggaattgtctatttcattatttctagttttctaataagaggtataaatgcaaattactgtagaaagaattatgctccactagtgaagttaatttagtggtaattggtttgcacatccttgatcttttgagattggaggcctttcaatcggcttatctctaaataaatattcaacaactcactgcccattttctaaattaattctttttttttttttttaatgtttcagactttgaaataatcaaattattcgtgga

SEQ ID NO: 62162 - DNA, 726 bp, Cucumis sativus
  Intron number 3 from transcript Cucsa.099720.2 (locus Cucs a.099720) derived from phytozome v7.0 (chr-ID scaffold0092 6; pos 424115 to 424840)
caacaaggacaaattgtgacccttgaaggtgtgggatctatatattgcattaggggactatcttaattgaatgtgccatgcaaattgacaaattttcaatctaaattgacgaaaatgtcaatcttagacaaattttaattttgtccatctttgcttggattggatgtttattccaggctcaactggtaggatccaccatatcgtaaaccaaaaattagttttgattttacatctagtaggtttagcagcccaaagtctatgctaatcgtaaattcagagcatagcatattcctcagctctttaatgaaggtcagaatgtttttcaagatagattctgttctagctcacaaatttatattgtataaaaagggtaaaatgcggctacttcattcaatatcattgttccttctcatgcttacctggtgactctggattgccttgatacggagattgtttattcattttcttttattcatcattttcatttgcagcatttttcttagtttcttattatcttgctagaatatcttcctcactatgatatggtatgcttcttgagcagcaaatccaacagctttatttatttcacttattttaagttcgttagcctctagttttatttttatttagttaataagaatcaatatcttgttactctttctgtgattggaggcaaaagcatcagaattattccacttatttctaatagaattgctaaatcttcag

SEQ ID NO: 62163 - DNA, 866 bp, Cucumis sativus
  Intron number 1 from transcript Cucsa.133410.1 (locus Cucs a.133410) derived from phytozome v7.0 (chr-ID scaffold0103 7; pos 1106241 to 1107106 reverse strand)
tgattccagaaagcgatccggtctcggccaagagggtgagttttagcctgtttgttcattcttcgatctgggtttgaattatcttttgaagtttcgcttgctttttaatgtttggatttttttatttatgaatcaattcggtttggatcgttatctagtaaattcaacttatttgaggcttgcttcttcatttaattaagttgtgtactgttacgcatggtttgtttgtttgagtttgaattcagtggtggagctcttttcattatttcattatgtgctgtgattttgttttggatttctgcatgattactgcttaattgcggattgtaatgtgaaaattagcgggacgaatgatggcgtttgctttaaagaaaagagcaactgtaaatttatgcatttctcactaaattgttggatggagtaactgtgttttttgttgaattgtttattagaagaaaccttaaatgtaagttttacatttgcttcatcacgttctttaaatttttggttcatatgccttttgtggctgaagtatgaattaatcttcttctttactgaagctctggtccaggggcaaatataatttaatttacatatgcatttccatctaattgtacagctccaggaattgtttttcttagtggtagggaaaaacttgaacgtttttttaaacaaaagtgagacgacattctctctctctttctcacacccctctttttattactttcgtattgaatggtagaagatgtgttattatagattttcctttctcaatgactcaaaatttttggaaaaaagattctcctaaccttattttattgcttggtgtagagtggaccctgtacgaacaggtagctattgcagca

SEQ ID NO: 62164 - DNA, 995 bp, Cucumis sativus
  Intron number 3 from transcript Cucsa.101660.2 (locus Cucs a.101660) derived from phytozome v7.0 (chr-ID scaffold0092 7; pos 888894 to 889888)
tgtggagacttcctgttatcgtgagaatatttcaggtagcgtgagattttggagttctagtgtgatataagaaatgtgagagtatactctattgcttttcttggcggaacttcatttatagtgggaacttctgatctgtttcatattttattttatttttttaggagtagtactagtatttggattggtgaagtcctttgcgtccattttctgacctgaattagtttgtatttctctgatgaatcataatcatatagtatggatgcgcgaactaaacagtataattgaacaacttgtctgaagcagtctaattctacatctatcatgctatgttatcatcagttttttttcttctgaagtttcaatagaacctttcacattatcatgacatcaacatccctcatgcttactgcactgtaatcacatttaattggtaacgtgatggaaatggtttgaaaaatgaatttgatatcatgctcagaaatttgtgtggcttcttttcgatgcaattggtccccctagatcaaaaattcacattgtccccttcctaagtggaaatgaccagtgttatcccttgggtttggccaacgaattaagaattatgtaaacaaaagcaacaaaattcatctcaggaaccgatcctccttgtaattatacttcttacttaataggcctctgagtgagtaagtactttatttagatgttatctgttggatttttgagtgccttcaaatctttaagggagaagtgctatgctgagcggatacacattctttcacattatcacgtacgataccagtagtgactttgttgccatttgaaaggctgagagcccagaacatgctttttgtgattgtcatgcatgatgatcgatgaatgatttgtcttcctctttattgtctacagcttgcaagtaaccagttgatctttggcttatgcttttcaatattcctttcgtaggtttgacattggaaactgaaaaatctcatcccttc

SEQ ID NO: 62165 - DNA, 723 bp, Cucumis sativus
  Intron number 2 from transcript Cucsa.041610.1 (locus Cucs a.041610) derived from phytozome v7.0 (chr-ID scaffold0054 0; pos 199098 to 199820 reverse strand)
aggtattggaatcgtatctccactgaagaatcgaggtaaatcagattcatctatcaatattgaaactgaactaatttgtttatgtcttttgattgcattgcaatgaatcttgtggaattaggatgtggttatcaatctgtgcttgttgttttatcattcctgtttaaaatggtgatggatttcatggaatatttttctggatcttgctttttattaatatcattttgttacatctgtttctttgaggcataacgattcctgtggaatgttagaataatgattgacctgatgttaggttttatcttgattcatgtggaaattatatttaactctctacccctagacatcctaaagggaatgcttattcaaagcgtttcttacgtgtatccatatcgttttcagtagtgttctggatggagccttgttatctcattgacatttaatgatcttttgaagctgatagaactggagggatatgtataaggaagatgcatggtttgccttgttcaaggctcgtacggatatgaaattgatagaatccagatatattaaaagataactaattgtttgaagtacttgaactatctaaatcttgagatcactcttgagccctaattcacattccattcaaggttttattgcttgcgctgttgagttggaactgacaactgtttttcgttttcttgcttgtaggttccacaccgttgcatatcttcagcaaat

SEQ ID NO: 62166 - DNA, 570 bp, Cucumis sativus
  Intron number 1 from transcript Cucsa.083250.1 (locus Cucs a.083250) derived from phytozome v7.0 (chr-ID scaffold0085 8; pos 176110 to 176679 reverse strand)
gctctgcccaggtaattccttcatcatctccataactttctctactttaacattgtttatcactattattcatttttaatcatcacttgctttctcctctctcacaatacagtactgattatgtttgtttatcttaatagaatctcttaattttacgctgaaaaatagaatagagagtggacagaaatagataataaaatggacaatccacccattctaaataatctatacccatatagagaatttaaatggggggcgtggacaaggacgactatttgttgtcacaatttattagataatacaaaattttatgacacagccaaattgacgagtcactgactaggcggagattttttactttatgaaatttttaatatatcttgaagatgatatctttttggttcactgtttttagtttctatccaaatatttatttcaatttttttttatgacgtcgtgggtcttaataccatattatatagtctatcgatagattattacaaggctatgaaagttaatttgtttgattgtacagggattaaaaccattcataaactcggtggtgaatca

SEQ ID NO: 62167 - DNA, 677 bp, Cucumis sativus
  Intron number 2 from transcript Cucsa.088320.1 (locus Cucs a.088320) derived from phytozome v7.0 (chr-ID scaffold0088 8; pos 680915 to 681591)
actcaccaaaaagtatcactatcagccaaaaatcagtaagttgccataaaatctaataatggtaataatacatatagagaattacaagtttattctttaaaacttttatcagatggtttttaaattttaagaacgaataaatctttaaactttcaattaatataagtataaattatcgttttataaatcctcaaaattgtaatttttaaattagcaaatttacctaagttgaattttgtatctaataaaacattaaacttttaatttgtaggtttatttttttaaaaaaagagcctaataattttagtttcaaaatttagcttcgtttttaaaaaccttagtataaactagataataaaaacaagaaaatttggtgcagataattttcaaacaaaaacaaaatattacaaaacagaactatagttttcaaaaacttattttcattcatacaatttgactaaagtttcaagtggttcttcaagaaatctgaaaataaccgtaagcaattgaggagaaaacaagcataaacttcaaaaataaaattgttacccaaaggagcttttaaaaattaaacatgtaatagaacaaatattttcattttttatataaagaaacttaaaatttggagtgaaattaacgatcgggttggattggtttggagtagattgtaaaagtga

SEQ ID NO: 62168 - DNA, 698 bp, Cucumis sativus
  Intron number 1 from transcript Cucsa.042710.1 (locus Cucs a.042710) derived from phytozome v7.0 (chr-ID scaffold0054 0; pos 1070040 to 1070737 reverse strand)
cctattataaaggtttgtttcttttcaattgttgtgtttccccatgagttttggatgatggagtgttgttgcttgaattttataggattatctctgattcttttaggacttttcttctctctcttctgtcagttggaaattttttatgttttctggtcaaaagtgtttgtttttggatatgggtgcagaccaaagtcactgccccacatcatttgttaattcatatttcactacactgttcatgatttattgggatttgcattattttatctctgtccatgttttttcttccctgcgtttgtcgttatcatgtctttttcagtctcctctctcttcgtactctcttccggaagagattgcaaaggctccatctagatctgttctgctttttatccaaatttagtccattgttttcagattcatttgttaaatgaattctgggaatgtctagttggtatctcggtttagattctaagaaactaataacgatcaacatgttttatattaaatttgatatcaagcacgtattcaaaagcctcgaaaacataggatacagctctgtttttagaatttggaacattttcttttgaaaccgtggcgttaagctttgcgttgtaatgtaaaagatgagaaatgttttagtctggaatttatttgatgtaaatttggtcaaccaactgcgttgacaggtaggaaga

SEQ ID NO: 62169 - DNA, 503 bp, Cucumis sativus
  Intron number 1 from transcript Cucsa.116530.1 (locus Cucs a.116530) derived from phytozome v7.0 (chr-ID scaffold0099 5; pos 414466 to 414968 reverse strand)
catcaattccaataggcaattgaatattggtattcttactccccaatttttttacttagcgattttctgttttgcctggactttctagctatctctgtcatcatttttcagaactccattgttggtcatgactgaaaaatgcaactacagagtatttagattactgtagaagaaaagtagcttctcctttgtctaccttcaaacttatttacttgcggggttgatttttagtgggttcctgtagttgatttcaaattggagaagaaagatttttatgaatggtttgagttgtttgttaaaattttggtttcaatcttattggaaaacttgaattttatactattcgtcctttccatctgaaatacagtattagttgaactcaaaaagtacagattagatcattagaataagctataaatggagaaatttatcttctctgcacttcagcgtatgatagaatgaacttactgaactttttacttttgaattgcttttaggtagag

SEQ ID NO: 62170 - DNA, 712 bp, Cucumis sativus
  Intron number 1 from transcript Cucsa.095920.2 (locus Cucs a.095920) derived from phytozome v7.0 (chr-ID scaffold0091 9; pos 1731742 to 1732453 reverse strand)
cccttcgcaaacaggtttgaattcttgtttccttttggttgtttaattctatttgccttgttacctttatttttttcgattcggttttgtttttggctttatttctgattgtcggtaaccttgaatcttgtcgtttggataacggtgaatatgacccgtttcttgttgtgtgtgatttggggaattattaatgatcgatggtttgacttttaactcctgatctatagttttttagttttgaattgggattctggaatgtgagatgtgaatttggtcccgttcttgttttgattatactgtgcaagttgttaatctatggattgtaattcttggtataattgttttatgcttctttgtacagaaatgttatacagattgataagcatttttaaacaattgggagtctgggtctatctcataatctttctctaaccttcattttattatttttcttttaaattttcattgttggtaaaattgattaatttataatgaagataatttattgatgctcgaggattttgcagtgaagttggactggactacattgttctgcgttcccaattatatatatatatatatttcttttgtatgtatgagaaattgagctttttctcatttctgctatttaatttgttgttttttttctcttttttgtaatgataaagtttcttatgtttcctacaggcaaggaaacttgaagctcagttgg

SEQ ID NO: 62171 - DNA, 404 bp, Cucumis sativus
  Intron number 2 from transcript Cucsa.079810.2 (locus Cucs a.079810) derived from phytozome v7.0 (chr-ID scaffold0079 3; pos 2671084 to 2671487 reverse strand)
ctgactcgatatatagattcaagccgcacgaacatgtaagcatttttagttcggaagtatcaagcatggctggattttataaatttgttttttttaaaatcttgaaagacaatgaaaaagtgtagggagctcacttgagaggttatctgattcagttaatgcgtaatttttctttgaagaattgctaagcatggcagttgttcaatgaacttatatttggtttagcgtttgtgcaaaatatttattgattagtggccatcatggtttcaacaaaatgtagtagggtcgtgtagttgtctcgtgagattagttattgcctcaaaactagcaacataggaattcctgttgaattttgtgagttgttatttattctccttactactatcaacaggtgcgaaaacagg

SEQ ID NO: 62172 - DNA, 678 bp, Cucumis sativus
  Intron number 3 from transcript Cucsa.055300.1 (locus Cucs a.055300) derived from phytozome v7.0 (chr-ID scaffold0059 8; pos 27947 to 28624 reverse strand)
tgtggcgtgcctgaattgcaaacttgcattcaaaggtattcaagtcagctctttcttgtacggaaaaaaaaaaatgtcatatgaaaagtttgattcatcataccagtgatttctctttatgcatttgttaagatggtatcagttatacactctagaaagaatgagctttctattaacaaaacatactatggtagaagtcattggaatctaagatcaatgagtaccttatacattgaatgagataaaaataaaatgaaaaagtgactagggaattgaaaaggagaagaagcataagaaagaaggaattcattctctgaggtcttgctatccatatcctatgttcattgttgtatttaatagtgaaattttagaagttcgtccacgacctggtatttcaattcattaggagggaccggagggtgttcactggttggaaattgctatgttcatcactagcctgaaagaaattgtatgagctaaatgtccatcaatccatatagcaactcttaaatgaacatttaaattgtttattcttcattgtagatcatgtggcagaattaccttgctagcgacgttttattggaagttcatgcttaatttatttaaacattattttgcttttcttcctattttgccctctgccaaaagaataggctcctttggcacggtcatcaggta

SEQ ID NO: 62173 - DNA, 745 bp, Cucumis sativus
  Intron number 1 from transcript Cucsa.075930.1 (locus Cucs a.075930) derived from phytozome v7.0 (chr-ID scaffold0078 9; pos 459406 to 460150)
tacgaagaaacctgtgccaaaggcctaaatattaggtttgatttttttaacttatgaaaaaaaactttttgaattctttttagaagtaaacttacattctgcctctgttgcttccatactctctattacatgagagccgcaactttgttagaattgtttcttcaactacttgtgttagtcagtattctgttcttctattggaacccttttcaatgttgaatattctgatttggattttgttttctcgtttctttattctgactctaggtgttgctatgcataacttgtgttttgtttttgaagccttcattcactacatgttgataggagatttgtctatatggcattccccacagtattttgggatgactaatattgttcctaagcagttttcagtcacaacacaaatgctacagatatgaaatgacttccccactattttaaattgaatattaacgagtataccttgatatattattccaaataagagaagtggagtttccatttctcttcctttgtttgtttgtttattgctgttgctgttgcatgatgatcctcttacaatgcctaatctttactatgttcatactatttctcacctttttccttgcatttaaatgacttgaagctgctgcagctctagtctagtatcttgagatgatgattaattttgatagagttatgcttttgtctaacattcttctttccccaaaccatgaacagtgtggaagaagcaaaacagaag

SEQ ID NO: 62174 - DNA, 482 bp, Cucumis sativus
  Intron number 1 from transcript Cucsa.054200.1 (locus Cucs a.054200) derived from phytozome v7.0 (chr-ID scaffold0058 2; pos 511322 to 511803 reverse strand)
tttcttcacggatttcgttttgcttgacttttctggtaaaccccttttgtacttttcactcaccgttttatttttatttcttttggttcgattttatatctgggtttcttctgtaatgatttgtttggtgttttggtatagcctgaaactgtctcaagtgtttgatttttgttgttttagagctggattttttatctgttttttgcggttggatgtgtttatttaaaactggctcttgaggtgtttgtgttctttgcttgactaaaaagtgatttgggatctttgtggtagagttcgtttctttgttccttatgtaagtgtctctttgattatttagcatctgggaattgttttctttgaggtggaatgcttcgaattagaaactgatgaattgattgaatatttgttttggaaacatgttctgtttcttatcttaagggcatatgtttgtatttattgattttgtattgcagtgttgatcg

SEQ ID NO: 62175 - DNA, 722 bp, Cucumis sativus
  Intron number 2 from transcript Cucsa.123090.3 (locus Cucs a.123090) derived from phytozome v7.0 (chr-ID scaffold0100 0; pos 392768 to 393489)
aaggttttgatttcacaatctttgaattcttgttcatttcattcatgtaatcagacgacatattactaacattttctgtcaattcgattaaacttctgagagctgcgaagtcttgtgtgtatatctatttttcatgtatttacaatataataatatgtaggagacaatgtcaaagattcttaatcagtgggtgcaaagaaatgtttttttgggtctctagttaaaggacggaaagataatctggcatagcatcagtcggtaattgcaaaacgattgcaatttttgcattgatagcatactaggctggcagagaactgaaccttttgggctagaatttccactataatgaagatgataaaatgtcttatcttcataagctggattacgtttacagtttacaattcggtgtctgtttctttctctttttttcctcttccaaaaagaatgcaacctggctatggccttttttccttttcttactttcatcaccaaaattttcctaaaaaatattattgcatgaagctaaataccttggtgcctttccttattaagatacacaacatttgttgcattgaccagaaagtttacttataaagtaaaggtttactgacttcaatcaggctgaccactttctacattttgattcttgattgtgcatcagtttctagattaatatctgataattttccatatttcctccccttccaatccaggcatatcaa

SEQ ID NO: 62176 - DNA, 602 bp, Cucumis sativus
  Intron number 3 from transcript Cucsa.115650.2 (locus Cucs a.115650) derived from phytozome v7.0 (chr-ID scaffold0098 8; pos 237362 to 237963 reverse strand)
gaacatcaccacaaggaaatctccctgcggtgaaggtacttttgaatcaatgccttattttaagattaactgcaaacctggttatggaatcctccatctgattgttagtaattgctaccctggatcaatccctcaactgatttttcccccatatctctctttccccatcatccatttgtatttatatatttgcaggcatctgcgaatatcattgctgtttctagtcaaatattcatgcatcatgcatcatgtcaaatatcattgatgatatgttgatcttcacacctagtgtcttagtgtttttaatcctgttatcttcgtatccctcctccgtgtgtacaactcttagaccggttcattgctattcatacttaactttggatgggtagctttggtgattctgctccatgaattcgtctttattatcaaagtagggtcaaaactgaatcattgtttgactcttcaagtatagaaaattgtctttggattcgtactttgacgagtttccctacagaatttttagtttattattcatattcacattaatattcatcagaaaattggtcaaggatcttattactttatgttccaggtaccaacac

SEQ ID NO: 62177 - DNA, 435 bp, Cucumis sativus
  Intron number 2 from transcript Cucsa.115650.2 (locus Cucs a.115650) derived from phytozome v7.0 (chr-ID scaffold0098 8; pos 238008 to 238442 reverse strand)
tgaagaaccttgaaaagggtatctccttatatctctcttttgaagcaaattggatttttttagagctaatattgcatttgaactcatatgttgtttgtctcttggttttgcttttttcttttgtaaattgtttctgaaatgtattgattcttcctcacttgctttgtgactgctgttgtcgtttgtaaatcgttggctttttcactgttcatgttcttctcgatttttaacttgttagttattgctgaaatgaacttagagcatccatggggggctttgactttacacaacaacaatttttcttgcccttaatttctgtgtttctacaaataattgaacatttatttgttggtgccttcagttcaattcttatggtttactttgttttttaaaccaacagtttgtgctgatttggttcggggtgccaaagataag

SEQ ID NO: 62178 - DNA, 731 bp, Cucumis sativus
  Intron number 1 from transcript Cucsa.094120.1 (locus Cucs a.094120) derived from phytozome v7.0 (chr-ID scaffold0091 9; pos 337657 to 338387 reverse strand)
gggaggttggagttctctgcttcatttttccttctgttcgtaatgttttctttattgccaatttttactatttgaaagatgttaaccagccgttaagaatctaattcaactgcatttgaacagggtttttaggttgattagattattttgtttcttcaaatttaagaatcaaccatgatgtgtggtgctgttgttgaatctgggctttataattcgtttggtggttttctagtttgctgatttatgttccacaacacgattgcttgttatttgatcaagttctgaatgtacttttaatgatattcttccattgccaagcttacaactgttccatctggatgataaatgaataaaatattatatgtacacaccatgccaactttgatatgtatcatctttttgtcggttctatgccttgcgattttcaaccttatcttatttatttctctggaatgttgtatctagaggaattcaggtcataattgagggaaggttctgtaaacttttaagctgttttggagggtaatgatttgatttcccgaaaatgaaatatctactttagcgttgcttgaattggactgctcaaccactcgggtgaaagctgtttttaatcctctgtttcgagttaactatccacctcgcattttatcacaaacaacctgtctgcataatttttttcattttattcaaattgtttcgaacttgtttgtgcagttccacagattggcggt

SEQ ID NO: 62179 - DNA, 782 bp, Cucumis sativus
  Intron number 1 from transcript Cucsa.024060.1 (locus Cucs a.024060) derived from phytozome v7.0 (chr-ID scaffold0033 0; pos 66750 to 67531)
tccgatcatcagtctctctgttaccggatctatttgtaagtttttctatgattttcttggtttttttaagacccttttgtccatttttgttactttcatcgtaatcggatcattactgcttttgggtttgtctgtttatctgtggatgatcggtttctttttaatatcttagtttgtttgtgatgttaattttttttttttttttttttttttttttgtgttgggttcatttactttcatgtatgatcgcttgacgaaacttgttttctttgtaatttttactcttgcttggatgtttagtctgattcgtgttgttgttatttttcttatcagactttgtttatgatttatcaacttatgaagggtcaagaaagcgtaaggacctttaacattttgcaacggaatcaagcaatattttttaggtacattttgctactactctttggtgtttaaatgaacagaacttttcaactgtttttactcttgaatgtgttcttcccccatttttttttgatagttttcttttttactatgtggtttttgtttctttgcttgatatttggatacttgtaatcgtcaaaagtagagagtttctttctctttgtttttgttttatcagattctttttgaaatttatatcattggtctcaaaatataaggggatggtgtgcaacatgtttgtttttatgcccagcccggtaagggctctatctttgttttccaatattattggatttgaaattttttggatataatctaattttttgggtgcataaagcagg

SEQ ID NO: 62180 - DNA, 501 bp, Cucumis sativus
  Intron number 1 from transcript Cucsa.075340.1 (locus Cucs a.075340) derived from phytozome v7.0 (chr-ID scaffold0078 9; pos 77397 to 77897 reverse strand)
gtacgtatttataattatattatcttttatggtagatacacattaaacttttactttattagaaaaataaaacccatatggagttatgaattacatatgattattttaaagtatagttttatataatattttgggtttataaattgaattcacattcggccatcgttattgagccgccacttttgagccctttgaaactctctgacgcgttgaacatagcccacaatcctctataagaaaccccatatttcatcttcttcttcttcaaccacaactctttattcttcttctccttcatctgctgaactactctttgaattacccatttcctcaaaactgcaatattcttcaattatggcttcagtaagattccgctttcccactttctccattttcgtgtcatgctttgctacttcgttttttttttcttttctttcatttctgatttgttttgttctttttgtaggctcaaaagggtccatttcttcctaaatttggtga

SEQ ID NO: 62181 - DNA, 1003 bp, Cucumis sativus
  Intron number 1 from transcript Cucsa.012810.1 (locus Cucs a.012810) derived from phytozome v7.0 (chr-ID scaffold0016 4; pos 566941 to 567943)
tgaggcttggttgaagaacttaggattttaccaaagtaaaaaggattgagctgtgtggctgatcgagaagcctgaatggcacgctcagctctcactcgatgtcaccgacctctatgtaaggttcgccccttttttgtgattttgtgataagaatttgtgtttttcaatttgggttttttttgtttatcttttaattgcattttctgatcagggttatttcgtaagttgcaatgggaatgaattgttcgctgttgttttggttttagaattttgttagaattttcttttttcatgactgccttttgggttgtttaacttatgtaagatatcaatggagttgaattcaggcattggactctggggttgtgttcattcaagcaagcatctatatgtaactgcctctattaggttgtctaaatgatgcttgttttatgtattaaatctccatggaaagaagataattatgccttgctgttgtctttattgaaactatggtcaaaactgagctgggatgatggacaatcctctagcttttatcctctggactggttatagattaataataaagtggtatatccagttcaattcatccttgtggagtagagggtagtgaagattcttgggtgagaatgaaaaataatgtcaaacaagtaagctaagaacgaaccacaatccataatttgttttttgttaccataagatggcagaatagagcatggagaattttatagcttggctgataccttttgtttttttttttttttttttacacttcattgagttttaaattctcttgggtgctagtaaacgtcttgaactgcatcaaaatatttaaaacaaggaataaactaccctaactttttggtagtgagagtaggagagagactagctggtgtatttccttccaagttccaatcatggcgttttagtgactgactctgatactttgttatctatcagtgtgtaagaatactttcttacttacgatttgattatcaaacgc

SEQ ID NO: 62182 - DNA, 397 bp, Cucumis sativus
  Intron number 1 from transcript Cucsa.120640.1 (locus Cucs a.120640) derived from phytozome v7.0 (chr-ID scaffold0099 8; pos 2731499 to 2731895)
cactgtaacaagtgtcgcaaccgcttccaacattcgtatatctcttctgctgctccttttcttttctttctttctttctttttatcatcacatgcatgttttccatcttcaattcaaatccttttagtttaaatggcgtgccttaaattcttgttatctcttcttttttttttttttaattggaaatagtaattcttaataactatcttatattgtcatcattttgttggattttgggtttcgtgccaattttcccactcataaaatagctaaataactaattaaaattaaattgtttctgaaataaaattgtaaacatagtaccggagctaatttgttttttgtttcttggaatctaacagctactgcagcaattactatagtgaatcggcggagc

SEQ ID NO: 62183 - DNA, 673 bp, Cucumis sativus
  Intron number 1 from transcript Cucsa.026500.4 (locus Cucs a.026500) derived from phytozome v7.0 (chr-ID scaffold0036 8; pos 60158 to 60830 reverse strand)
cttgcttgttcttggcatagttcttggatctattggttcgtgactcttctattcccacattttttatcttcttcctcattttctgttgacgagttcgtttattgttgctattcttgtaatctcatcattttcagtttccgttatttctggtatcttaatcgtttcactattttatagtcggttttgatcatgacctttttacatgttctacagttctcctttaatcctttgatttaagctcttatgttttctaattcgtacttgagctccgaactcaacttctttgaagatgaaacagtgaggtatattgccgggaaagaaatggaatacgtttgacccgttggaaagagagtagatcctaggaaaattgactcatcggattgaattagctgggaatgtgtaaattcaagtatgtaggctcaacatcatttatgtattgggagtcgaggactgaaattgattttaatgactaaaatctgagatagatttaaatattgctgggaaggtaacgttatcacttgtttgctcattactgaatttctggacgatattattgtgtggctgcgagctatatatgtgtataagtctttcaattaatgatctttcaaacaccttctaccactaccactcacatgatgcttttcttttctcaaaatgtcataatcggcagaat

SEQ ID NO: 62184 - DNA, 348 bp, Cucumis sativus
  Intron number 2 from transcript Cucsa.010990.1 (locus Cucs a.010990) derived from phytozome v7.0 (chr-ID scaffold0015 4; pos 334713 to 335060 reverse strand)
aaattggtctctgcttcgttggctctgtccattctgttttaggatttctttgttcgtcatcttcaagatttcgtttgggtttattttttttatagacagttgttgaaaatttaaacttaatttccattttatttatttttgcttctttttcttctccctctatttaatttatttggaattcatatttttttcccaaatctttttaatttaaattactttagagaaaaattagtgaattgtagtctatgaattatccaattatcaaatttgaagaattccatccgtaattgagttatgcttaattgaaactatatgactttactggttgaattaggactatatttacat

SEQ ID NO: 62185 - DNA, 918 bp, Cucumis sativus
  Intron number 1 from transcript Cucsa.133500.3 (locus Cucs a.133500) derived from phytozome v7.0 (chr-ID scaffold0103 7; pos 1184202 to 1185119)
gccccgctctcggattctcagataagctttcactggtgagactttcaagcttgtttgcttgtcgttttcatcatcttttttgttgggttctttccattttcaggtttattgttgtttataggaagtttttgtgatttgggtatcagtttgctgtgaaaatcatcaacatttcgactgtttcttgtgaaattgctttctgggttggttttatttctcttggctttatttgtttttttatttaattctatacgtttgttcttttttcttttttttttttttgttagaatttcttctgttttagtgtcggatatattggatcgcctcgttttacatctttatctcttcctcaaacctgttttttcatatgaaattgagaatagaatggctggatgaaagaatatatgttcgttttggaattggttttatctttttgttcattttgtggctttaagacaaaagttcctttaaacggattggagtaaattttgagtgatctgattggaatatatcatacagatggttggtatatatatatactggaagacgtgctctggcctgttgggttgatttatatgttttgttttttatgagaaacgaattagcagtacaaacgagacctctggattcctgtttgtatatctttctgatcttttcttctgctcttaatctctgtcttaacttagaatcagatatgatatgtgttatcctccgtagggagaccaacgtgaaaaggaaatggttctaattgtgtttatgttacatttccgaatcttagttattcaacaatttagaacaatggaaagtttatttctgtgcagtttgtgtcaataactatacatcaggcatgtttgaagtgtattttctttgattttctgacttttagttattttttttccagctgcatagttgttgctcaaa

SEQ ID NO: 62186 - DNA, 746 bp, Cucumis sativus
  Intron number 2 from transcript Cucsa.025140.1 (locus Cucs a.025140) derived from phytozome v7.0 (chr-ID scaffold0034 5; pos 24426 to 25171)
gttcactactgttgctgaggtttttccttacaacgaatgctctgattctgtttgattaaatttctgaaacgacgtattttggcctattattttatcaaccaccttttagtttcttctttattacacatccttgcttgtctgtgcgactgaatgaaggtgaaaagttgcagtattaccactcaacttgttgggtttttagtaaaatattagaagcgcagatgcgtcacattgaaaaaattcaaaagctcaaaacactatacaaggcgcttattcttttggtttcaaaaaggtgtcccagttgtgctaagtctagttaacataccttttgtatactttagtttgagagtgggaaaatgttgtaagtagtatacgagtaatttgggtctagagaatttttttttgtgtggttataacacaagtttcataaatgtttcaaaagtaccctggggaagtagaatttagaatttttaagaattccgaatggaaaacaagacttaatgattgtattgtggtccaattattcattctatgtcattgctacaccatttcatatcacttttgcatacaaaactataaagtacttctactgtaaggtaattttgagacattagtgaaagtccgtgagtaatattgtaacttttttgaaattataggaatattttttaaacaaatgaaatagtttggttgatgtaaatcttgttgtttctgattaagacaactttttttacaggtagagctttgtggtc

SEQ ID NO: 62187 - DNA, 706 bp, Cucumis sativus
  Intron number 1 from transcript Cucsa.075320.1 (locus Cucs a.075320) derived from phytozome v7.0 (chr-ID scaffold0078 9; pos 68343 to 69048 reverse strand)
ctgctacgaaagcgtatgtaatcaaattctcaactctcttccttaatatattttcttgttcttgttcttgtcgttcttcttttagggaataaagaaaatgaagaaggtttgagggaagaagtccatctctttctctatcttcctgaggaaataagtgttcactgagatgggcctccctcacttaccccatgtctcaccaactaccatgtcttctgccaaagttcctaattaatttttgagaaattattgacgtcttctctgctttttgaaataagaaaaagtacaggtacggttgaaaaggttttggcatgtgctgttgtcagaagtttattcaaaatcactcccaaatatgttgttagtccttctaaatcaaagttgatgatatgaaaattggctttaaaggtgtaattaaagtcatgtttcctagtcatttttaacatgacatgattgatttcaacaatttcaaaaacactctcaaacgtgggaaatccaactcatttttccatccgtacacgggtccccaacttccacctctaagttaaaaacctctactttttctgattatgggataatcgaaaagctgaaaagcaaccctccatttgatccttgttgaatgttgatgatatgatataatcatgttgatctttctaattctttctttcttttttcaggtacgttgaccaactctcaagatctctacacgtgg

SEQ ID NO: 62188 - DNA, 895 bp, Cucumis sativus
  Intron number 3 from transcript Cucsa.034600.1 (locus Cucs a.034600) derived from phytozome v7.0 (chr-ID scaffold0044 4; pos 442483 to 443377)
gcttgccaaaataggagttcaccactacaacggaagtaagttctttttaaatagtctacttctacttggtagatggttgtttattttttccaagttgcaagctttataacattttggagcctcatatgcatgatttctggtttatgggacttggctgctcctttttctttataatgttagcacatctttcataattgtagaataagaaaaacaactcttatacttgacacaaattagagttagcatcttggataatctgggcaagtatttactctgtttctaattgtatatttgagtaacttgataaattaggtaatggctgggtattctgctacgaatagtgctcataatggagctttctgtgttcaaataaactaataattcagtgtgtagtttgttcaattgttcacactataatctttgtagaactatttgcgaggtaggagctatttgcatacctgtgaaggaaggcacaaatagacacaggaatgttaaaatttagggctctaacacaggaaaaacatttttatcaagtgtcagagtgtccagataagaaggaggttatggctaaaaaaatatgcttagttttgtactttcctactgatttgctaccattatctttcaacagttgttttgatcttggtatgaagcctattgaattaaacaagtgggtttctatcattggtagtaattggcttgcttcttgctcataatatttatgttggtcaatcaatttaatttgaactcgttccatttatacgtgtttagtttaaatcttactcagttaattagacatgtattgtcaattgttctgctttacttctatgtattttcaggcactgttattatttgtatgttttatttattatttttgttatttatgtatgcttaggta

SEQ ID NO: 62189 - DNA, 535 bp, Cucumis sativus
  Intron number 5 from transcript Cucsa.055930.1 (locus Cucs a.055930) derived from phytozome v7.0 (chr-ID scaffold0060 2; pos 107425 to 107959)
caagggcagggaaatccaaggtaagcatgtttcttatttttgttagttttttctgtttatttttttaagtaagaaaccacactttgggacaatctgtcctccatgccatacaatgaatgaagcttggagagaaaggaaccctttcaagctgcaatattaccagaaattacacatggattaattaaaattcttgttatttttcatttgccttttaagactaatttattatagcatttgagctataaaacaaaatagcatttatttgatgctatcttcaagatcctgtaaatatattgtttttttgttaacaagaaactacattttattgataaattaaaaggaagataagtgttcaaggatataatttctaaagggaatgaaggaaaaaaaaaaaaacaggcttacgcacatgcatggaaagtcatacagttttctttctattgccctaagcaaatacatttcattaaaaaaaaacaaaaatatggccttcattgtaattgtcatatgtttaaaaatttacagttcattattggtg

SEQ ID NO: 62190 - DNA, 817 bp, Cucumis sativus
  Intron number 1 from transcript Cucsa.075300.2 (locus Cucs a.075300) derived from phytozome v7.0 (chr-ID scaffold0078 9; pos 46961 to 47777 reverse strand)
aattctcgttttcatgtaatttcctttctcaataattactaatcgatctgtgatgatgatcatcttgtacaagctggtttcttttttcttttctttttttttttggaatttgaaggaaaataattttgattctgtaaattgtgtgatctgggtctgaagagttgtttttgtgattgatcattggtggtgatgttattattgtaaaccctgttctgggtcattaaggatgatgagagtttgattttcaagtaattgttattggtttttgttagtgtctctgactttttgctccttatattgagtttgcgtgaacagatgtttttcctctcttatggtaattccttcctttttgggttctttttggggttggaatatccattcatagacgattggtattcttcttaacaatgctttgccttctgctctgactcatttttcaccatcatcttccttattttgttttccatttccttaacttgttttgtttcggagtttcttgctgctcttttacttggctttgttttttcttttcttaagctcaaatggtagtgatcgagtgccttatttgggttgtttttggttaactgatctaatctttgatcgtggtttggaataacttatttgggttaaaaactaagttcttaaaaaactataagcttgaaacgtcaaagcatccgtaaatccattattggactctttttttttttttttttgccttttcatttgtttttctcctttgtcttacgagtaatttatacaggtgtggtttgtttcttatgtagattcaagagtggaagtttgttgaacaatcctgtta

SEQ ID NO: 62191 - DNA, 897 bp, Cucumis sativus
  Intron number 1 from transcript Cucsa.105960.1 (locus Cucs a.105960) derived from phytozome v7.0 (chr-ID scaffold0092 9; pos 389550 to 390446 reverse strand)
atccgtttgtttggtgtacaattcacggaggtataatgaattctacactcgttgttagttttttattttgatttgtttagaagggagttatcgaagtgaggcttttgggttgagtatggatttctcttgtatttggttttatttgaatcttgtgcttgctttgtaacctaaaggagagtttggtagacggagggagggtggttatgagaaatgaacatttcgatgtgttttacttgggatgggaggggcggatttcatagtgctccctattaatttttcatggttaagagtatttttgtcatgttcaaaatcaaaccgaaactttcttttaatcctttttttttggtttaattttaaatgaaaatcatgccttcaagtgtggcataagaaattggattaattttgtaactacgtgtttttaagtgattttgaaagcaatagaagtgaatttagcaatttcaggattactcccaaatatgtccttagtctatcctttgttgattcgggtgggtagttttttcgtttattgattaacaactagctttgatggctactttcacgaaccacttcactgatagtcagatatactgttatgaattatgaagttgaatagctttgacaatttcccgaattgacatctatgcatatgacgggtcaatgcattaactgattctttagttcaaacttcaaaccacgtgcatgcttcttatcttttggaatgggtgttactgaaacaacaacataagttgtgaaggcttgaggggcaaaatagttgaatcgtcaaattttcttttttcttccccttggaaatgatgtgaacgtctgcttgcaagtgatttttctgtgaggggtgaccttttggtgattcatggattttatctaattccagcttggaaa

SEQ ID NO: 62192 - DNA, 571 bp, Cucumis sativus
  Intron number 7 from transcript Cucsa.066990.2 (locus Cucs a.066990) derived from phytozome v7.0 (chr-ID scaffold0069 6; pos 1369613 to 1370183)
gcataatcccagtaattatgcttttgctttcctgcacatattttttaattgcatgcttttttcttttctgttctgttctatcctaaatacaggaccatttgtaacctcttagaaatgagtacaggtgaaagtaaaatagttaatgctattcaaacgtttcaaaattttattaatttgtttttcttttagtttcttctctcctccacaataactgcaactctaaattgaattgcttttctataacttcctgtagtcttgaatttaggctttcctcttacatcttattgtttggatgaaaggttgtatgttaattgtttttttcttttttttttgtttttttcttaagaaacatagctcgtaatagtttcaaccatcattgagcattgaatttaactttaaattgatgtttctccgtaacttcttttagcctcaggttgatgaggcttcctttgtatatttcattattttgagaaatgtggtctgcttttccccgttttttcattttaatgattattttgtatctccaatgattttaagcatgattgtttccaggaacctttgggcggcgcgc

SEQ ID NO: 62193 - DNA, 873 bp, Cucumis sativus
  Intron number 2 from transcript Cucsa.101180.1 (locus Cucs a.101180) derived from phytozome v7.0 (chr-ID scaffold0092 7; pos 446942 to 447814)
atcgtcttacttcctctcaccatttattttgcaaggtaagtaaatactccatattattactcctaaatccttttgttttatttttttatggtttgatttacaagtgtgggttgaaacaacgaccaaaatatctatcttaaaccaatgtcgcgtttaggaaagtaatcaattatcaatcgtaaggactcacacgaagtcttgttttgggagaaaccaaaaccagtgatcactcccaagtgaacacacaattgagattattatttgatttccaacatctctacagcagttattttttctgtttttaccttgtattagatttatgcttcatataaatttaacccatctcataactcatctttgtagcttcaagaaaataaactccttcccgtcgatgtaggccatagtttgcccaaccacgtacatctttgtcttcctcttcttcttcccttttacatttctgcctttgctgtgtaatttcttcttttttttcttgctgaaaatcgccatggaagatggaaggttttagtcctaccaaacaaacaaagagaaagtgaacaactttacctgtgtgctgtaaacagaaaataaagaaagaagaaaagagagagggtgtaaacgtgtgaggagtagcaaaggctttttctctttgttacatgagagtattattgagggagagtgcgatagaagtgtttcatattaactaagaaagaatcgagagacatattttcatcgacatgcaaccaatctttgaagtgaaattaaagttaaatcataaaatacttatgctatgagttaacaaaaaagaaagagatctaaccaatttgtttgtttcttcttctttttctttccatggagtattatcgcagaaaggag

SEQ ID NO: 62194 - DNA, 821 bp, Cucumis sativus
  Intron number 1 from transcript Cucsa.091840.1 (locus Cucs a.091840) derived from phytozome v7.0 (chr-ID scaffold0089 4; pos 2725598 to 2726418)
gccaacttggctggttgggatctcggaacaataaggtacatatgtttttacaagattgagatttgcaagatttttttacctttatttttaaaatgtatagttgattaattctctttctttattgtatatgtgttctttttagcgttttataaatctaaacaatttttttttctttaaaaaaaagagagatctccaagacttattactcatagaccaaagtataagtcgtggactaggtccatgagttgttttgttgtttttattgttgaacacattgatgcaaacacggataagagatttgaattatggaataatgggacccctacaagtacttgtactcatgtcattaaaatttttaaattgtaaaagcagcaaatttaaaaatctataattttatgattatcatctaatagacgtctgatatcactaattttgatatatatatattcgcaatataaaaaaaagtttgtgcattattttttctaaatatttttgtcatttgatataattttcctatagcaattgtggacttggttcactatttttcacacctattctgttaatacttttttgctttttctgtatttttatcaattatttatattttcactttatttaaggaccctatttcttgtaatttatttggccaattacattatttttggaattagctctgttttttattcattagaaattctcacactatataatttaaactcagaagattattctctctcaagatgcaatttaattaattatgtcctctgactctctcatcatctattaattttgcaatgattatgtactaattaacaacagaa

SEQ ID NO: 62195 - DNA, 622 bp, Cucumis sativus
  Intron number 1 from transcript Cucsa.130040.3 (locus Cucs a.130040) derived from phytozome v7.0 (chr-ID scaffold0102 9; pos 44432 to 45053)
gtacaagattttccttcctgctcaatccacttttggtactctctttctatactgattttcctctgatcttcaattgaatagcactcgttttaatttagggctttgttttgctctaatgagtttgagggatttgatttcttgtattgagtgtttttagggttttagttcttttgtgggtgaattgatttgttttgattgaaaccaactgatttaccgtgtttttcctgttgtggagggaagatttgatatgggttttgtttgatttggcatgggtttttagtttttttcttcttaagagttcgtggagtggtctgatttaatggacgagtttgagtttggggggaggggggctatggcttcaacatatatgtttgtttgtatgaatactgactttctcgatgtcttcttacatttgtctggaactaggattgggaagttgggaactaacttgttttgtttgacattgttgttttgttctgttatgaactaacttgtggattgatggtaaatgaactttccccattcatggtatctggcacatgctgacttgcgtacttataatggagtttggactagtttccacgtcggtgattttgcgtgtgttgcttcttttgcaggcgat

SEQ ID NO: 62196 - DNA, 736 bp, Cucumis sativus
  Intron number 1 from transcript Cucsa.089160.6 (locus Cucs a.089160) derived from phytozome v7.0 (chr-ID scaffold0089 4; pos 458942 to 459677)
tccttcttcgcgacccacgtggtagttctgctgaggtattgctttaggatttgagatcatgccttgaatttaattttacagtttccgttatcttgtgaatttgtttttgagggctttgttgaaatgtggaattgatctgattttggactgtgggtcttcggtttctttcgattttaatcgagggtgtggagttggttgggatcttaatttctttgtttgctttgattcgttttttggattcctggattgaattgtttgtatgttctttcggtttggaattttttgatctgctcttgtttttatatttgtgcctgtcatgaggttcttgggctctgccattttccagctatgtgtgtttgtgtggaatatatgtaaactttaatcctacatcggcttctcgttttacgtgtatgacatttctgatctcttattttcacgtgcatccaaggttttagttactgtaatgaattccaggaactggatattgcttgacaatatttcctccttcagaagggggggtggggggggatgaagggaaaacaatcctgtgactttgaaagaccattaactcctgttaattctgaatcctagactgtttattactcaatgactcattgcttatcattctactgacttcttgaatttcatttttccatagtgttgtttagattttcgcagaataattttgtttctttgtggctaatgattaatgtttgttctctccaggtctatttat

SEQ ID NO: 62197 - DNA, 460 bp, Cucumis sativus
  Intron number 2 from transcript Cucsa.050030.1 (locus Cucs a.050030) derived from phytozome v7.0 (chr-ID scaffold0055 1; pos 174570 to 175029)
ataagaggttttcttctcctttcttatgtaccacggattatcttgaaagctgtatcgtcatacattgacttagatgtttttgtccaaaaaagagatgttggtttgttgtgtttatttgaaactttgcagactgttgatgatctctatgtgaacattttgtatatcaaaattcattttaccgtgttcaatcttcaagttttggacttctgaaagaactgtttcttaagccttgttcagtaatcttcaagtttggactactgaaaaaattgtttcagaaacaaaaacaaaaattaaaatggttacaaacaggacctaaaagtttcagcttgataataaatattcttaagggttaggctaatcatcactcatctagtttgttttatgggaagcggtattacttaaagtgttatttgaaacatgaagtttcgttgtttacagggaaaaaacaatcttctggaca

SEQ ID NO: 62198 - DNA, 951 bp, Cucumis sativus
  Intron number 1 from transcript Cucsa.093900.1 (locus Cucs a.093900) derived from phytozome v7.0 (chr-ID scaffold0091 9; pos 154146 to 155096 reverse strand)
cttactggtaatttcttcttcttcacatttctatgatatcgattagtatataagtgttgaatgtatacaagataagatgaaatggtctcaattcattagattctccctaccgatttcgttcgtagtttcctgtttagtgaaaatcatgcgcgtttgtttaattctcaattcgaggaagatgaaaggaaaggtaaattattgtaaatgcaaaaactatttaaattttttacaaaatatatgtaaatttcaaattttatatcgatggtagtgatgataggaatccatcactgtttatagaaaccaaaatataattcttcttaatttttgaaaagtatggttttctttttcgtaatttgttggcactttttaatggtttttcaaagcaagtttgaattctaaccaaaattgcaaaatcaatataactttttcatattttcatgcattataccatattttttgtatacttttcttaccgatataatttattaccgatatacttgtttgatctaaattgtgatatattttacatatttttatgcattataccatatttgcatgcaaccatttgtgtttagaaatataagtaaaaattgactacaatatatggaaacatatatagatggaagtgtttcaaaatcaaaattgttaggttagaatgttattttcaacttagttttataatattctctttccaagaataacgtgtcaaatagttaatatcgtgctcatgaacctaaagatgaactctttccttataaataatcaaactatataacgggctgagttagttaggatctatttaaattggttttttaagtgatcaaatattttgttacactttgaaagtactttttaaagcattttaagagccgatccaattcaggatttagtttggaagctaaacaaaaatagtgttgacaactcctgacacttgaattgggattaatgtag

SEQ ID NO: 62199 - DNA, 436 bp, Cucumis sativus
  Intron number 3 from transcript Cucsa.125010.1 (locus Cucs a.125010) derived from phytozome v7.0 (chr-ID scaffold0100 1; pos 822150 to 822585)
acattctcattacatctttctcaaacttcgctcaggtttctctagtttttttttttttaatttctgtttcttcttagttacagatatataatgcatcttgaggaacctgagaacagattccaacagtttctctttctcaaacctcaaatttactttcataattctggactagcttacgttggctaaattgctatatatcaagaattctttgagcttcatgaattgaaatcatgatgtacaaccattgaaacaagttttttgtctgagtgtttttaacatcaaatactacaacgttagacaattgttttgaataatctaggtatatgcaagctggtacagacagcataagaaaagtcaatttttattatgtaatatttctacattgatttccttgaaaactacaacatatcaagatcttcactttgacagaacttat

SEQ ID NO: 62200 - DNA, 820 bp, Cucumis sativus
  Intron number 2 from transcript Cucsa.004710.1 (locus Cucs a.004710) derived from phytozome v7.0 (chr-ID scaffold0005 3; pos 204671 to 205490)
atccttactatcaagctttagatatcagagttcaagtaagctttgtttttttttttttttgctttttaattttggctgattatttttgttaaacttgagtttgtggatataagagtgacctagtactttaataaaaacatgttttgaaaaactatacccatttgctaattaccatttcattttctgactttaaaatgtaagctattttctctcaatttcttacaatgagttgcatatttaagtacaagatttgaaatcaaatcttagtcaaatgcacaaaaacaaaaacaagttttaagaactgttttttagttttcatgaggtggcttggtttttaaaataccggtgaaaagtagattgcaaaggaagaaatttagagctgtaatgaatgtttcaaatggttactgaactacacctatatttttttgcttttcaaatattggcatgattttcgaaacctctgtacaaatggttaacaaaattaaggaattgacagggagaagtagtttttgtaagcttaatttttttaaaaaattgcatggttatgaaaatagagccttagttttccgtggattctctgtaacattttacccttttttttttttctaatttactctcctgaaatttagaatgagattttaaatgttacttttcaccatacttgaagtaattagaatattaaaattagcatcctggtatacatattttggttctacgttttactattcttgtattcccagaaaatgaaatggaaatttcttggtcaatttgaaaaatatcattctaaattttatgtccacctgtgttctctcctagaacc

SEQ ID NO: 62201 - DNA, 734 bp, Cucumis sativus
  Intron number 1 from transcript Cucsa.122260.2 (locus Cucs a.122260) derived from phytozome v7.0 (chr-ID scaffold0099 9; pos 549854 to 550587 reverse strand)
gcaccaaagtaatttttttgttttggtgcatcgtgatgttttttaatgttatgatttctgttattcagttttttagattgatttcggcaaataattttatagagcatcgttaatgtgtttgcctccataaatttcccgctttctgtccttagaaatgggaaggtagtatgaaattatcgttccatgatccttaatcatctgattggattgaactgtgtggcactgctatatatttgatctgcaattcgatttggttctcggaaaccgctggatgtgacggatctggcttaacgtcggacagtgagctttctcgttatactggtgagaaatgaactgaaatcaaaatacgagtgtggagggaacagtacttaaataaaaaaatcttttgggcgtgggatgttatttcttaactgcaagtattggcttagttctcctggtgtatgtatgtttgtgtcccgaaccgaagatcatgagatctggactgaagagtgtctcgtttgaatcaatgattccgttgcaattttttctacttttatatgctcatccatatatttataaattgacttttaaagtcgggcattcccacagttttcatttttgttggttcctgattttctgccggctcttcttctttgtcgatcgtctgttgataaaagtggaaatcatcaggacttatgttctgcttatttgttgagttaggttggtggtgtaacgccaaagaagggtggaacaga

SEQ ID NO: 62202 - DNA, 810 bp, Cucumis sativus
  Intron number 4 from transcript Cucsa.126420.4 (locus Cucs a.126420) derived from phytozome v7.0 (chr-ID scaffold0101 7; pos 321158 to 321967 reverse strand)
atttgaatcctgaggtttgattcctaaatttaaaacttcatttggtacttggatttctatgggcttcaagatcttaagaaataatagtgtaggaaactatgttctctttgtggacgtgctgtgatcatgaaaatgggaaatcaaatgtttgttcgtttaactgctgttggctctccatgatgaaattctttttgaattgtaacaagactatgcacttggaatttttagctgatgacatgtgatagaccagctaccgatcaaagttcttcacataattattaccttacgtgcctttggaattttcatagttgttgaactaaaatctggtgtgtacttgaaatcttagacggatagccatttcctttagcatctacgcatagtatattgcttgatgagtgcacatatttgattcatctatttgggcattatcaatgagcctattcgtttcccttttcttgctgtggatgggattccactccacttgtggtttgagcttaagtggtctattgactcttattgatattatagaatgggaagttggattctcaatcatcttattgaagaattatatacatacatatatatatacacatatatttgaagaaaaaatgtagcacacatgacgcaactgaataaatgccattcattacaataatgccacctttctgattaagtcatatagtacctggataatagtttgacttcgtatgtttgatgttctttctccagtccttgttatattgcctaagcatttaaaacaaactctctcttgcagatattggatacaaatccccaattgtttttccatct

SEQ ID NO: 62203 - DNA, 828 bp, Cucumis sativus
  Intron number 1 from transcript Cucsa.134340.1 (locus Cucs a.134340) derived from phytozome v7.0 (chr-ID scaffold0104 3; pos 44439 to 45266)
gtagatttggagaggttgacgttaagtccagccgcattttcaaagagatgaattgcaaattaaaggtttcttaacaaatcatcattgtcctccacaaagtgtagtatgtcatctgcaaagagaagatgagttatattcataccaatcatcacaatacctttgattttgtttgtttgttcaagatgctgtagaatttggctcagatagttcatagcaataacaaagataaaggggagatagaatctctctgactaatgcctctgtttggtttgattattccacgaggtttgccattttgtaataatcgagtattgcacagtacatatacatgagttgatccagtccctccattttcttggaaactttttcttcataagtataaagtttatgaacttcgaaccgatagactttatatgagtgctcatcaatatatagacgcttttagtgatagaattgaaacattactattttaaaaaaaaatatttagatcatttttgtcatatttaaaaattacatatacctaatatattaggaaataattaaatttataataattattaaagttaaaattaaattaaattaaaaccatgaactttttaaacactattaaaaaaaaagaggcatttttaactattacataaccaatctaaaatatttatcaaatatagcaaaattttaaattcaaacacggtctaacatgaatagaatataaaattttgctatattttggaaatatttttaactatttcttttccacttacaatgatttttttattaaacaattatttatatatagatttgtgggagataaatttaaagttgaggtat

SEQ ID NO: 62204 - DNA, 943 bp, Cucumis sativus
  Intron number 1 from transcript Cucsa.012960.1 (locus Cucs a.012960) derived from phytozome v7.0 (chr-ID scaffold0016 4; pos 742057 to 742999 reverse strand)
tgctaatcaagcacatcaaagctcctgttcctcttgtgagactcctctcttcccttcccttctttctatgtgttcttcttctttctctattatttcttgattgtttaatgtcaattcctggttggatcgaaccactactctttcttcctttttttttctgtgtttactggagatctacggggtatttccattgttttgtgtttttgtgcttacattaatgatccattgtgtgtgtgtgtgtttttttttcctctgtttgtaccgaataatcgacagtgattataatcctttaatttcttgtgttcaaatagtctggctaaatcactacaagtcgtaaaacaaaaatttaagttcgtcgcttaaggtgaatctatttccagcaaaactttccttccttcactttgttagcggtcgcctttttctgttctcagaaatgagcataaccatagatctattgcttgtttacttgtttttgtagtctgatagttgtgctgttaggtgaactatgttgccaaaattttgattatgtaactgtttcagtatttgaaaaggatttattgttgtgaagaaatagaggttttagctcagctaaactagttaggagtattgagccaaaccttttcttttcaattcatttttactaacttgcgaggtttgtggtttattatcactagtacattggacaatacgcaatactacgcatatggggactctggaaatatgtcaaactgaaagactatactcaaaattgaaaaagtgaaacaaaacttggagagaatcaattttaaactaatttagaactgtcctaaacttcttttttcttttttcggaatttggttatttcaatattcctaccaagtgcaactggatttgctgggaacagcacgttctaatttaattttcatcaggtttggtctttggtgagaagatttgatcaacccca

SEQ ID NO: 62205 - DNA, 566 bp, Cucumis sativus
  Intron number 1 from transcript Cucsa.126870.2 (locus Cucs a.126870) derived from phytozome v7.0 (chr-ID scaffold0101 7; pos 691169 to 691734 reverse strand)
acgtcctctctcgagtactttcatctcttctcctcttccccttctttatttcccctcccaattctcccaattctcccatacatcctacaattttctttcttcaatttccacccgcaactccactttatttgctcctttcgaattattggtttcgattgatttgtcttgtattagcgtctgggttgctggtttaattcatatttcgttcgtattttattccaattttgctgtttgggccgtgtgttgttaattggaatctcaaagcctatgttggttgcatgcttaatttgtctgttgtaactacttggcgttaaactaatgctactaagtctcaagtgctaaattggaattatagttcccacgatattacgattgatttcgtattatatctttgagattgttagcggatggttgatcttagcgctgctgtatattgtcataatgttgtatttgtagctctcttttttggcataattctatcgactcacttgcccattttgatgaacttttatggttctgtttttctcccagactttcaattgcagccaagggagggcgtatctttt

SEQ ID NO: 62206 - DNA, 294 bp, Cucumis sativus
  Intron number 2 from transcript Cucsa.042430.1 (locus Cucs a.042430) derived from phytozome v7.0 (chr-ID scaffold0054 0; pos 827015 to 827308 reverse strand)
ccgcttggccttccacctcacataatcgtcctgtcgtaagttcatctttttctttctttctcacagtactatatatatctgtttgaagtaaaaataacttgtttcctcatctgtttgtttctattatattttaatgtttcttttttgtcaatttgacataaaatttacttgtcacgttgtcaatgaagatgtttatatgatcatttcttgtaagtgctttaaaataccatccaacacatattcgttccaatctaacatgaattttttgatattgttattaattctatgtagtct

SEQ ID NO: 62207 - DNA, 963 bp, Cucumis sativus
  Intron number 2 from transcript Cucsa.048510.2 (locus Cucs a.048510) derived from phytozome v7.0 (chr-ID scaffold0054 2; pos 3193547 to 3194509 reverse strand)
tcaccaagaatcttcttattaagtattttaacgaggtaacgtaagatgatgcaaattgccttttgtttctgccatgttactttcttactttctatctgcctgtcttggaatccattgtgtaacttttacgaaatcgtgttttccttggtttttagcttttggtttttacttcgtcttcgtgcaatctgcttggcagcttgaaaggtggacatgatcatatggatagatgttcagttttcacaagagtggctagaagaactcttattgagctgtcggggatttaatgctcgtttttttttcttttgtttttaaaaaaacgtgtattgaagaaccaaacgactgatgaatattgtggaatagctgttcaattaattgaattgcagcgcttccatatcttttttaacataaaaggaagtaagatcacaaacgtttataggtaaagtaaccgtgtggaatttagatggaattttgatgcttttgcgccaataatccagtgaacgtaaaattggcggtcggatgaactgtggggcatcctgtcttctttctatccacatgaaacactggaacgttgttggatattgttatacataagataagaacaatgagatcaataaccgcctcactctataataaatttagtttcccagtgcatacccctatcagaataccattattgaggttgggccatttctgtatgaccatttccttgacttcaaaaaatggttttccggttattgacatgctctgatgtagactgtcatgattctggaatcaatggtttgttgtgactctatatccaattttcccaagcatttaattccacattatacttcatgtgaattgcagcaagatatcgctgttttgttttttgatgtgaaaactttactcctacagataatttgtttatttacctctttttgagtcttaggttgatcttcttgaacctgtatcacatttcctaga

SEQ ID NO: 62208 - DNA, 685 bp, Cucumis sativus
  Intron number 1 from transcript Cucsa.107790.1 (locus Cucs a.107790) derived from phytozome v7.0 (chr-ID scaffold0093 1; pos 72425 to 73109)
tcgaacggtgggaagtgaaggcgagctgggtgtggagaaacagaaacgacaatcgacaagtctcgagagctgctttgtgtttcagttcatgttaccttgccctagcaatcaagtggcatctcttctcctcctccactctctcttccattcaatctgaagaaggaactttcatcttgttttcaagcgttctctacaaaatcgtaaaaccccagataagttttcatttcaacttcagattttccgatgttacatagaaattcaaagtgcacattccttctcaaatgaaaatcttctgttgggattcgtaacctattgcaagattcggggtgttcatggtaaatgggtgcctcccaatttggggatacaaacgcttcggcgatttcccacttgcctatttttgctctgttattcgattacttgttttgtataagttttgtgagtctttagcgataatgggtgtcaatcatgaactctttatcgcttgtgagttcgcggatagtctgcagattattttcaacttcttttattgtgcgtcgaacaatttggaatcggaacttctgcagtgacgatcggtttcaattttttgtggaaccctttagttacttggctgatgggaactcagattcttttgagactgatagtcgtagatgggatgatttttcatttagaaggagttttctaaagg

SEQ ID NO: 62209 - DNA, 354 bp, Cucumis sativus
  Intron number 1 from transcript Cucsa.114350.1 (locus Cucs a.114350) derived from phytozome v7.0 (chr-ID scaffold0096 2; pos 189830 to 190183 reverse strand)
ggcttttgacctcggcaaacgagtttagagaatttgtgagtctatcttcttattcctttgattcttttcatatagtttcgcagctcccttttctacagtagacgtaggcttcggctcaaccactaaaacattttgtgttcctcttcttcttcttcttattcctcttctgctttttacatttcgattactgttctgtatcctgtcgtcttcaacagtttgagaacatctggaaattaatttctttttttgcttgtgtttcttttggctgaaattgcaatgtgtaattcattaaaatttgtaattgtttttttttatatagttggaaagaagatagtgaaggccatttacaagaag

SEQ ID NO: 62210 - DNA, 783 bp, Cucumis sativus
  Intron number 2 from transcript Cucsa.084500.1 (locus Cucs a.084500) derived from phytozome v7.0 (chr-ID scaffold0086 2; pos 227579 to 228361 reverse strand)
tcctttggtccatatagttcgaacggagtcgccttgtatgatacagattttcctccttttttcaacacttaacttaactctctcatgttgtacattcacattttattttcgctactacagtcatacaatctcttactatctatccattgcaaaagttttttttttcttttgtaatttctttggcaatgcttctcagcctcatcttatcgataaatgaaggaatcgtcaaagaagttgggtttagagttggtggagtctcatgtgaaattagtaagggtagggcatgagcataatgctaggagtgagttcatgaaatagggattgaaaggaaaattgtttacttttgatgaatagtttatatacagaagggtcatccacttagattcttgaatgtgctgagttttcctgtgattgcaggaaaccttttctcattttatcttgagcttacgccgaatatactacatagtttagttagttttgagtcattctcagttgaaaagtttactggaacttgtgtgaagactttgcaaaaaaaattcagccaggccttgaaatcatggtttacttgaggcgtttaactgataaccttaagcagtctttctcttccacttgtgtttaaaaaaccaaaaatttgaacgtcaatctgccctgtccttgtctttgaatagcgtttcttctgtttataatcattcaattgtatatcaatgaactcgcatctggatttgcattgctgtctttggcttacttcgatcactgaatttaacaaaaattttactatgcagt

SEQ ID NO: 62211 - DNA, 940 bp, Cucumis sativus
  Intron number 1 from transcript Cucsa.084500.1 (locus Cucs a.084500) derived from phytozome v7.0 (chr-ID scaffold0086 2; pos 228402 to 229341 reverse strand)
cccatttactctcttccattattattccctcttctgtaagtttcttcttctttcttcttcttcttcttcttcttttcttatgtttttcagatttgatttgggttttattggaaattgttggactcattgaagtttctgtttttgggatctgggacttggatgcaaatttgaatttgttttcaactttttagggattaggttaccctgttggtactaggatttggggtttgtttcttttggcttccttagttgtatgttggttcttgttaactttatgaacttgagttgtgtaatattcaaatctcttctagtactacagagaatactggaaatgatttgtttcccctgtttttcttttttgttattatacttgatgatggaagttagatttggcttgttctaggctgtttttggataagaacttgggattcctggtcattctaagttgaattgaaagtgaaattatatctcagactaaaacttgaaggaacctgaaattcctgttggctaaacttaagaacatgaaagaaaagaagaacttgtaacctctaagttgaaaaacttagtctccttttgataactattttatttttagttttgggttcttgaaaattaagcttatacgcacttcagtctcctaagcttttgtgtttagttatctgtttgctactgtttaagcaaagttttgaaagctgaaagatagtagttttggaaaaggttgtttttgtttttcgaaattgacttggaacttcaagtgtttctttgacgaaggtgaagaccataattaaaatattggaaaggaaatgagcataaattttaaataacatacaactaaaaacaaaaaaaattcaaacatgaccttaatgaattaacaacatccttggtgtttctcaatgtcgatttagggtggacgtaacctttgagttgggaacttagttac

SEQ ID NO: 62212 - DNA, 846 bp, Cucumis sativus
  Intron number 1 from transcript Cucsa.018400.1 (locus Cucs a.018400) derived from phytozome v7.0 (chr-ID scaffold0025 2; pos 803732 to 804577)
ttcgggagaagtatagttatcatctctccccatttcttgaaattagttgtttgtgtttttgtgggcttgtctgatcgtcgttttcatcctttatagttcgtttcgcttctgcttctttgtagtttttgtatagcgtttttatggcgtcatttgattcttaggatcattcctgtttgtttgtatgttgaatgttatcatttattccttctgctactttctgcattcgatggaagatgaaatttatggatcgtgcaagtttgaatacgtaggtctttcttactttcgacttttcttgatttcgtacggattgctaaagactgcttctggttgtatttagggcttcttttaaattgcttcaggctatgatcggttttattcttcaatttcacgttgacttttgagttggaatcaatttcgttatcttctgtctgacataaacaaagtgattaatacgaatctttagaacttgtagaattgccatagattcggatctttatggtttatgtatgggtggatgacaaattcgattactgtttaatattgaatgttgcaatgtttgatgtatgggtatttcgcaatcatggatcgcttcctaaaagcatgtatttgaagactttaatcaattatacctccacaactaagacgtctacacattcatttaagtcggagttcaaatcctcgtcttcacatttgttttataaaattccaaccaactgtgtttctcatattgtacaatcactcatattctattaatgtttgtctcttatcatcggggtatggacattttaacatcccatgtttttttctctctcttccctttccatctacaggaggattcgtttgccc

SEQ ID NO: 62213 - DNA, 261 bp, Cucumis sativus
  Intron number 1 from transcript Cucsa.032420.4 (locus Cucs a.032420) derived from phytozome v7.0 (chr-ID scaffold0042 9; pos 1720690 to 1720950)
atcttttggcctttttgctgttcattcgtaagaaggtaactaattttcctgccggatgtattttgttctataaggaaatacattcttgatatggagttgaaaattgtttcagtcaaatgaagtttttctgttcttgctttaaggctgctgctgtagttgtttcttttctgggcattataatctcataggttacaattccttaaaagtcaaaacttccgttgaatgtaatattcaattcttatttttatcaaggtcgcggag

SEQ ID NO: 62214 - DNA, 315 bp, Cucumis sativus
  Intron number 1 from transcript Cucsa.083560.1 (locus Cucs a.083560) derived from phytozome v7.0 (chr-ID scaffold0085 8; pos 349915 to 350229)
tattgaactcgcaggtggaggattgaacatttcgtgtaagttccaactttttttgactctttggtattgcttacgtattattgatcgacccatttcttcgttttaaattttctatgttgctttgctcttcgtttgattagttatttgggtttaaggttttcgggggttttattcctctgtgtagtgaattttgtttctgggtattggggttatgtaggatattgttgtttttatgattgcaatcaaataatagggttttggggtgtgttttctgtgataggttacggtgaagaagcttctgatttggtggagtgg

SEQ ID NO: 62215 - DNA, 511 bp, Cucumis sativus
  Intron number 2 from transcript Cucsa.085770.1 (locus Cucs a.085770) derived from phytozome v7.0 (chr-ID scaffold0087 0; pos 169734 to 170244 reverse strand)
ggcgaaaagctccttcaagctcgaacatcccttaggtttttcttttcacaattttttacccttttgatcatttcttgtactttttagtttttggcatttttattaaaattttgcacttgtgtgattcttttctttttctttttctttttttcttgcgctcatgagagaaatttaataggggaaattcaagattgcaaaggggcttctttgaactgtgtaattggggttattttatttttctttgtcgtcctcttttcgcgggaatcttgatgtgaaagagggatctttgtggtgaaaacatgtttccgctgtccatttggtctccggggttacttgaaaacgagtcttttgattcttttcgctctctcttagtcactctctgatattgtttcagtctcacattttctaaactcacatttcaactccagtcttgcatgttctttactttgttctaaaatattcctcctatattatagaaaggagacaagctgaagctgctcgcatcagggag

SEQ ID NO: 62216 - DNA, 856 bp, Cucumis sativus
  Intron number 4 from transcript Cucsa.091790.1 (locus Cucs a.091790) derived from phytozome v7.0 (chr-ID scaffold0089 4; pos 2695686 to 2696541)
tgaaaagtaagtaagatgaacataggggacattgaattagatctcacctttttattaaatgtttttctgtgaaaaagatgtccatattattggcttagaattgggagattcttttgaatgtggatggctaagtttctcagagaaacaaaactattgccttttctcttgcctgtgtatttagtactcttacgtactagtggcaccttacaatgcttttatatttttatctctattggaagaaggaggctttaaaatcatggtctatgattttatggctgcataacttttgctggatatgcattgttcttcgttcataatcttgaggttatggatgcgttttaaactcatttacaacttgaaggtttgaaaatagggttttattttgggtcatgtgtttttctttgtggataaatgctagtcatttagagtttttgattgctctatttctgcaactgtctaagaaagaaaattttaactaaagattgaatgcatgatccttatagtctacttaggatgtttgttatgttggccaccttgaggccctaaattcaattattttgtagatgagtttgctctttaatttgtttcggtgtacaaggatgcaatttaaatttgtctccctgcctcagctgcaaatacatgatctaacaatgacattaaactttcatatgttactgtacagataggtatagtttaaaatattacggtttggaatcatgatcttaaactttgtgatatatggaagtttcctctttatcataaaattctcaatctatagtttgttctaattttccacttgtttatttttgttttcttatgacttaactgacatatttgcttgtccagttgtggagca

SEQ ID NO: 62217 - DNA, 946 bp, Cucumis sativus
  Intron number 3 from transcript Cucsa.067240.2 (locus Cucs a.067240) derived from phytozome v7.0 (chr-ID scaffold0069 6; pos 1642007 to 1642952 reverse strand)
tattgaattgggaaggtacaattgttcacttgttttgtacttcttttatccaactgtttgtaacttcatttgatgattttcttccttttgtacgatccatattatcagtgcaatggtttccaattcaaagaatttaacaaaagcttaatggctcggcattgaaatagtatatttagtcttaaaatattaagccctgattgataataattttgcttttagttttcaagttgtgcttgtttcctcccaatttttgttctacctatggttttcaatttcatccttgttaaggaaatacttgagtaactttttttagtttcaaaactagccttgctggttgaaagcatgagtagcaagtggatagcaaaacatgagaaaggtgtgggagtagtgttttaagcttctcttatttatttgtttgtttataaaaccaaatggctaaattttttgtcttagtttttaaattctgtacgataaatttttcatcaatcaagtaataagcccattttcatcttgaattctggtactttgaaatactgcattacatattgcttcgaacgctcggccatatggaatatagacaatttacttcccaattaaagaaaaataatttcaacttcccattgaatagcttacaaaaatgttaataataaggattcagatagtttgttttgatgcatacttaagaggactaaaataaaatgtttgaaagtttgagggaccacatttagtaagtttgaaagtgtaggaactagaattcaatttaaaccattttcaaatttatcacacacgcatctctctctctttatgcggtctccttaatcttcttgtatccactattcttttttaatgttcagcctccccattcctctatggatatgcaccttcaattacttctgcacctgtttttgcagtgggaccggttcattggcaatattcttacgaaaat

SEQ ID NO: 62218 - DNA, 988 bp, Cucumis sativus
  Intron number 1 from transcript Cucsa.103730.2 (locus Cucs a.103730) derived from phytozome v7.0 (chr-ID scaffold0092 7; pos 2470390 to 2471377 reverse strand)
atttttcttcccttctgatctacagcttcttctaggtaataatctctacactcttccttccttttttttttttttcttttctttacacgctattcaacatcatgttgcctatctttccaatccatttttcttcaatgtctaagctggagctgtgttctccagttttgttatgatccaactcttcttctctctcgcccttaacgtgactgagaatattcaacacacgaagagatggaagatgatgaccccttactctcatcgccatgttttaatgaaaacctttcagccaactactggtgcattagcagttgctgttttttttttttgttcatttctgtgaaataagggtgtcggaaatctgtgtatctctttttctgaaaataagagaagttttattgattagtttcttttgattttctcatctccaaacacatggacgacgtcttgtgttttttatcgactagtttctgttgattttcttttatcttgctcttcattccgatcaaaagaaaagctgctgccggtgtatatattcattttttttcgtttagctcgtttttattttctgcttttgcttctgaatcaagccatgcagttcgggtatttcatggtgttaattgttggtcaaagtcaagctgtttttacaatgtattttgggccataacgtttgtatcaagtgatcctcaagggttgattctcgaatcgcaatactcctctacaattttttcagaacttcagattattggctagtttgaaagggatctttaacttttaactcgaagaaagggagatcaatcgtgtgatcccttgattttaattccaatactgcttgtataaccacttttaaacctaaaaatttggatcctttttgccttgaaagctatctactttcttttttaattcagttcccatctttctgtaatattgatctagttttgcttatttcatttcagggtttaaaacatttttattagattgtatagatatt

SEQ ID NO: 62219 - DNA, 424 bp, Cucumis sativus
  Intron number 1 from transcript Cucsa.101790.1 (locus Cucs a.101790) derived from phytozome v7.0 (chr-ID scaffold0092 7; pos 977965 to 978388 reverse strand)
cagaatcaccgaggttcagcccctccacgccgttggtgagatcgcgccgccttcgtttattgttcagatccccaaggttttagattttttttttgtttattggttggttatcttcacccacagagaagaaaataaaaaaaaattgtttataatttttttttcaacccccagtctaaatgataacataaaattgagaatgtgtaatcacaggctagagggatgacaaggagcatattaatcttatataaatcaataataataataataataataacttgttggaactaaaaagttgctctgtgggtgaagaaatttgtatttgaaaatattggaaaaattgttttgatgttaattgttattagttgagggtactgataaatgtcttgttgtgatgcggaacagtgaaaaggtaggacattgagaa

SEQ ID NO: 62220 - DNA, 1066 bp, Cucumis sativus
  Intron number 2 from transcript Cucsa.097290.1 (locus Cucs a.097290) derived from phytozome v7.0 (chr-ID scaffold0091 9; pos 2589800 to 2590865 reverse strand)
gcaaaccgaaattttgtcctttcaggctttccgtaaggatatacaacattagtagagtccaatagttgcctcatgagattagtgaagatgtgtgcaatttacagatactcaaaaaccgataaataacacataaagtacttgtgtgatctggcagcacagttcgtttttctgttttcttcttaagaacttggttagctgccattcaggaatctacagaagcagttgaaaattatgtaaaattgcaacattgtttcacttctctgtcaaaatcgtcatctggttggttcaggttgtggattttcagaagtctcgtgatcgttacaaccttacttgaacaggatctgttctaaggttgtacaattgtgtctttgagttctaagaagtctcgtgatcgttaatgcggcgagttgttgttgatatgtttatctcaccatcatggtttcttgcgccactttacattttcaaatgcagaagaaaaagaaagtattcactactttcgatgaacttgtttgatttctctgttttcaagatcttgtgctgataaacattttggttcagtgtattttagtagcgataagtgcataggttctagataatcattataattctgaactcttactttacattgttttgtacttttgtccaagtctttaactttgcttaatctaatgtctgtttaacaataaaatatgaaccaaactttgttgcaaatgatgctttgtaaagattttataattattaaacagaaggaaaataatttcatttctattttattttgatgttggaaatagatactcacttgttcaaataaataaaatccataaacctttctctttgacccagcttcttttaaaattttcatcttatttatttgtgcttttttttttaatgattttatttgctgttatagtataattgattacatacttttcttgtactgattttaatttgtatgatactcagcattaatggtaaaatcaaactttgtttttaatattttttttataaagaatttatcctcttgatttcaggacgagaaattcttggtttggtattctggaaacca

SEQ ID NO: 62221 - DNA, 919 bp, Cucumis sativus
  Intron number 1 from transcript Cucsa.097290.1 (locus Cucs a.097290) derived from phytozome v7.0 (chr-ID scaffold0091 9; pos 2590909 to 2591827 reverse strand)
acagagcagtggagcaggtatattttccatctctgttttgaaatatgatttcctctcttcttcttcttcgttttttttttggagtgttgaggaatactcattgtgttttgttcttactgaccttatcttttgaaaaaacttcgcattttccacttttgatttaacattttcagtccatttctcttttctaatgatgaaattttggattgtaaattttgtgaagctcatgggtttgttttgttggcatacattagccaatggcctaaagtggaagattacaacaatggttttacaattgtttaatccacacattgttgctattgacaaccatttcgattttggtatttggttttttttttttttttgaagttatgcctattttctctatcctccttttcttaggatggtttgtatctttcttagtcaccagagttgaattctttgtcagattcaaaaaataacaaaaactaaatttttaaaaacttgttctttttttttttttttagttttcaaattttgggttggtttccgaaaatattggtaaaagatggataacaaaatctggttaaatgtgtttacagacataatttaaaaagaaataaaaaataaaaaactaaatgattacgatgcagtacctaagttgcggaattctatgttcttccttcttattgctaagtataatgggcagagctaatcacaaaaccaacatttggcaatggcatttgccaattttttatttgaagtattttggtatatatataaaatataatgtagagaaaattaaataattgcttaatttattgttgcaaacgggtcaaaatagttagatttgcagaaggtggtgttttttttttttttcttctctctctcctttgtttagaatatgttttgaagttttattttgcaggcaattctgtct

SEQ ID NO: 62222 - DNA, 474 bp, Cucumis sativus
  Intron number 3 from transcript Cucsa.106630.2 (locus Cucs a.106630) derived from phytozome v7.0 (chr-ID scaffold0093 0; pos 160795 to 161268 reverse strand)
ctgtttttaacaagaagaaaccaatcaggttggtttcttcctgcctgattttcatttcgcgttttcctcattttctaaatttatctgtagcaccttcttcaattccaggaacaatagatgaatcatcgatgtgttccaagttttatgcccaatagttgaatccatcccttcatcttgaattttccaattccaagaaaataaaatcatgtccgctctgtacactatactaatggtgagaaaaaaatgggggaatggaggaataattactagtcccttgtgattgaatcaaaagattgacgagcgtttgaatctgcggctgctatagcactttttttataaaaaaaaaaatcgagatgactgttctattaatagaaaaaggccgagattacctgaaaaagacgtttttgtcaaagtactgacagcgctcttcttgtgctagtggaggcattccacattgtttcccacaatttggac

SEQ ID NO: 62223 - DNA, 580 bp, Cucumis sativus
  Intron number 3 from transcript Cucsa.011510.3 (locus Cucs a.011510) derived from phytozome v7.0 (chr-ID scaffold0015 4; pos 741638 to 742217 reverse strand)
acctagtatgtctatcaatctcctgtatttttcctttcattaattgcacatttctgaacctttttctatcctttcagatacggtttgccttgcttcataagtcataagtgtaactttctgaaaaagattatacgtgtcttttgtttcctaacttaaatgttttattttatctagtggagtttctgttatcaagtattcattgtcttcattgtcttcattttgggatcaagattctgaatgaccatgaaagctgggattttacgattgatgattttattttgtctgctttaatgtgtttcttgatctgatgttatgttaaactcatttgatcattcaatgtactttgaagaaattatcatggtcactgtattaagaatattctttgaggacattctctctctctctccctctctctcttttctagtagaatttacttatgtattcctatattttaattttatgtcaggaacatatttgtagtcttacctactcaaaatttgacatattaaacaacaaactcttttctgtcttttaatatgtaatgtgtctttacaactaatgttggaggaaattgtccagg

SEQ ID NO: 62224 - DNA, 843 bp, Cucumis sativus
  Intron number 1 from transcript Cucsa.105260.1 (locus Cucs a.105260) derived from phytozome v7.0 (chr-ID scaffold0092 9; pos 28534 to 29376)
gccttctgttagtgtttctctcttccattattagtgtttctctatgttgggtccttttgttttgtttatttacttaccagtcttgtgcatgggtagtatcgactgatgtattcagctgagattatgaatgtatctgggttgagttttgctttaattcttgaatgggttcaaaatcaaagctacgttgaagttgtattcttgctggaaacatgatttatttttaatgaatgtgtatcacttcaaactctttttctgcaattcccacttaatctgagggttgaatttcaacgatatgaaaggggatgagaatgcatgaatcctctcgatatagcattttaagttttaatattgttgtggaacctgtttgagattctttcttcatttagttttaggctaaattataaaagcttcccttatattttgatacttgttttgaaaatatccgtattcttttaaagattgttatattgttcttgacctttcataaagatgtcaaaactaactttggagtataaatcctttcagatttcgtagttggaacttgtaatggtgtgatggtgacctagaaatgagtcacgatcaaaatctttgttctaggtcaccaccaaatatatctaggtcccaatcttcgttttaaattccaaagaaactgtaaggtagttatgaaagggcaagggtaacattgcaacttttgaaagaaatggagtattttgtaaacaaacgcaaaattcagtatatttattattcaacttcacttttattgtgatcataggcattgtttcactgttgttgtctactcatattgcaggcagcttgagagctgcagatattaagttctcaaag

SEQ ID NO: 62225 - DNA, 589 bp, Cucumis sativus
  Intron number 2 from transcript Cucsa.105260.1 (locus Cucs a.105260) derived from phytozome v7.0 (chr-ID scaffold0092 9; pos 29505 to 30093)
ttctggtgcatcgcccaaggcccagagtatgtgccttttgttactcgtaatcttttcatcttcatgaaacccaacattatgtaattgtagtcaaaagttaatgtctgcatttttcttcatgaagattttttagttttttgtttgaccttggatttttttttgaaagaaaagtataataggaattttgtatgaacaaactgaaagctgatatgattagatagaactgggcacagcttgtgaaaagccaacaagacttctttaatcaattttgaagagccaattactgttgaactctttaggttaggttattcatatacaccttcaaggtgtacacacatttttggattctcgagtctcctggagtttgtcaacctggttaactttcatttaaattgcactgatggtagttacataaagtacttaacagttaacacaaaccacattttcaaaactatgtgcatcactataactatactttttttcctataaggtcctgttggaatgttaaacttaaactctcgctgatttgcatctgtcttattgatgaggtacagccgtaatcaaatcagaaacaggttctgaagaaata

SEQ ID NO: 62226 - DNA, 784 bp, Cucumis sativus
  Intron number 2 from transcript Cucsa.002260.1 (locus Cucs a.002260) derived from phytozome v7.0 (chr-ID scaffold0003 2; pos 25598 to 26381)
aggttctttccaccctctttttttcccaatgtagtatgcgatgtattttatatcaaaaggaatgcgttatgtgatgtgagtctgttatgacataccaaattcgcttcattaaacatttttggggagtaatcgttttagaatatatgtctatggtacttctttaatggcataaggtgtagaaggtttagtttctctctcgggattcagttttgggtatcaagtgcagtcagaactcttatgggagctctttattatttctgttagttttctaaactcagtttagtcaagttgttcatctgttagtcatttttgtttgtgattgatttattgaaaatttgttactgcttctcctcttcaaagcttgtaagttctctgttgatatctgagacttgattcaataattcaattttcatttcatggtatcagagtaagctttatacagtttatgagataggaaacttatttactctaccatgggaaaacaagcactaagttactaaagcagcattcagggttcgtcatgtagagtatttatgcactttccataaggttttataggttgtaacgtgtatgatttatttcatccctgaccatggtgacatgtggatgtcgtgtattgtttaccaattttgggaatccatgtctgagaatggttgcaattagattgtatcttttattttagaatggttttgatgtaactatgatgttctaagtagcacaggaggacaaagaaacaatctaataacctagatattcatattccacgtatgcaattggcaggaaa

SEQ ID NO: 62227 - DNA, 855 bp, Cucumis sativus
  Intron number 3 from transcript Cucsa.089620.2 (locus Cucs a.089620) derived from phytozome v7.0 (chr-ID scaffold0089 4; pos 1034029 to 1034883 reverse strand)
ggggaggttgtctccactattccaagtttgtattctctccaaatgtgatcttctggttttcctgtaattagagcatttcgttgttcatgagaattagaattagaattttcggcattcgggtttaataggggttgtgtcaaattaccatagtagttgctgcattagttttgtagatcacataatactagtgtttaacctttaaaactatggttgcctcattcatttctctttcaagacttctagtgtttgaaccttttgtatcttctcttactttttctgtgggcttcctattctatttagagaaggggaagagattggaagttacatcttgaattttaaaatttaactacaaaaagctttggtatcaattttatttttcaattgtttaattgtagatagtgaaaagtgcattgaaaacaaccattagtggttaacctagagtcgcaggctatagatctagtttcactaaagatgacgaattcaaactatggtagaatgttgtgaattttacatgagaattttctatgacttggtttttttctgcggaaatatcaaactaggttgtgcgtaatgctacaccttggatttgtcagtatgtctttttttccttcttctattgctattttatgaggttttacttgtgtaaatttggtggggtatttttgttctgtatccatttggttctttgatgcttcctaatgacttcttgttacagtatcttcaatatttcttaatggaagattcattagtgaaaagttgaattgaaaataattgtttattgtattggcattccttcagctactgttcaaatgcctaataaactttatcctttttttaatgcagcaattgggttta

SEQ ID NO: 62228 - DNA, 952 bp, Cucumis sativus
  Intron number 4 from transcript Cucsa.113090.2 (locus Cucs a.113090) derived from phytozome v7.0 (chr-ID scaffold0095 3; pos 1347701 to 1348652 reverse strand)
ggagaaggagttaacaaactgcactcaggaaataggtacagccacttctaagttggacttttgtaattgaacatttgaggaaccttttaaaatcagttatggaccaaattgaaaagtctatcttaccaattagcttttctgattgaaatagacatttaataatgatagtcgaatacgtaaagactaatataatttattatagaggttgtgtttgaatagatattggaatgaatgatatgaaaattctttcaatggtagttatacaaacgacttcatttccttatttttggaactctggttgctggtcaccatgaaaatcccgatcctcttcaccattgaaatcttcttttctaacccattatttttgtcactgaaaaataaagggtgtgatttgttgttgttatgatatagtgtgcagaaagattctttatatgattttgttttcactactctctggacactgtgaagagagaatactaaaaaactttccatgtttggtattggggtttatagatatccataggtatgcccgtgcatatgaacttatgtgatttttgaatttttttttcttaattgtcaactcctagaattggagtttaggaatagtcattttctttctcttttaaaccttcttataaccctaaattgtagcaatattgagttatgaaattatttgttcttttatttattgtttcttttttagtgtcatttttttacgtgtataattttttctgacaactgattgtttgcgttaagggctgacatgtagaatattattgcattttttagtcgttaatgattctaagaaaatgatgattgttgaatttctggcatgctcaatgtctgtgtcagcatgctaccctcctttcttgacgtcatattcattcttatgagtctttttttaacttagtccaacaacaacattcatcacagattacctgcaggatcaact

SEQ ID NO: 62229 - DNA, 855 bp, Cucumis sativus
  Intron number 1 from transcript Cucsa.089040.2 (locus Cucs a.089040) derived from phytozome v7.0 (chr-ID scaffold0089 4; pos 315899 to 316753)
ctattttttttttctttctccaacctcatttcaatgtatgtttcgtcttttctttttaatctgtttttgcttttttttgtttaatggcctttcggcgatttgcatatactttgcttggattgcttgctaaagtgcttcctgccttgtcttcctttttcgtttatttattgttctgttcctttttttgggaattttttgtttttctaagtctgttttaagatttgggttttgctttcatggagtcaatcatgctttggaatttctgattttggctttgggcttcatttcggaatctgcttttactgtcagagttagctctgaaatgagtgttctcttacttcttccttcgttttaatctctttttggattttccttttcggggttgatgaagttcctcgttcttggttaactctggtttttttttaattggttttggtaatgggtttactatggaagtttgaaatcttgctctaacctctgtttctgtttttttcatggttgggttctttttatacttttctaattttttttttttttttgttcttcttcttcggcatccttctactttttagtgtgactgttgggacacttagataaagttgtatctctgatttacatttgggtgttgagcggttctttttgaaatctcttggacttgcttttgcttgaaatgtaaacttactatttcctttcagttaatttgtaatttttcacgatttattattattgttattatttattttttttattgggtttgagcttttcttcattgtgaagttctcttgtttagtctattgattttgatggattttgtccagatcttgatctgaaattaccttcttgacactgtagaca

SEQ ID NO: 62230 - DNA, 379 bp, Cucumis sativus
  Intron number 2 from transcript Cucsa.043530.3 (locus Cucs a.043530) derived from phytozome v7.0 (chr-ID scaffold0054 2; pos 302923 to 303301 reverse strand)
acattcagagactatgtattttctttcttttctccatctcattactgaatttcacgaacactcaattcttccgttcaattttcaacgtttagtggttagaaaatggaatagctgaccgatactccgatattgcttcacctccctttgttttgtttttcaaatatggggaatccttgagcgttttgaatccggctgtgacaaaagtggagaattaaactcatttatctgtcaataataaaaaatattgagttcattcaatctaactgacgaggggattgttattttatgatgtctaatttgatgtttttgtcgtattgttgcttattctacttgttttaattttaatgctgtctgttcctcttcaattatttacctcaga

SEQ ID NO: 62231 - DNA, 795 bp, Cucumis sativus
  Intron number 1 from transcript Cucsa.037070.2 (locus Cucs a.037070) derived from phytozome v7.0 (chr-ID scaffold0047 6; pos 47488 to 48282)
ctacatcttcccatttctcaccgccgaatcattttgtgggttttcagattctattccccaactctttttcttcaaaggcttcttgcttttttcttcttcttttttgtttcttcttctcctttctacaccctttctctttggaatttgggtatgaatttacttcttattcttttgatttcttagatatctaatttcatttccattttcacctggtcctttcttcttttgggattcaaccatttgtatgctcttatttcatttttattttcttaattttttttttacaatgtgttgtccaagtcagttttttcagctacttcatcgtttccttcaataattagtctacaggtttttatattttacttgtttcctttgaaattcttgttaatttggctggtgtgtgtgtgtgttgtgctgaaggtgaagttgtagaatttttgtttttcaattattataattggaagagctttgacttcatgtcatctgatggtaagaagctcacaatttgggttttattgaattcatatggggaaaaggttgtttctgcttctgttagtaatcaaattgttaggtttttggaacttagctccaaatctaatcatatgaactttggtgattgatggtttttgtatatccctttctagatgagatgtatatgctttggttcattaattttgtttctctggatgtatttgtatatatgtcttccctctatagatgtcaagattgatgttttctctttccctctttccatttctagatattgggcttagcgataagctgacgtaaattaag

SEQ ID NO: 62232 - DNA, 911 bp, Cucumis sativus
  Intron number 1 from transcript Cucsa.103660.4 (locus Cucs a.103660) derived from phytozome v7.0 (chr-ID scaffold0092 7; pos 2417244 to 2418154 reverse strand)
tctggagctcaccctcgaacactctgttgctcaaggcgagtttcttgttgcggtttccaatcccattttgtttgttttcttttttggtttcagttaatctcatggacttattgtattcatactgagtttcatgcggttcttatgcctactgttcagttccaacatgaattctccagttcagtttgttgaggtggaggttttatatggatgatgtgttcaatttaaaaagaaaagagaaacagcccctgtattggtctgcggaacaattcgtagtaaccagtagaggagaacatcgtattctcaaaatagatctacacttacttatggctttcttgttctttttccagttctgagtttacatgtaagagctaatttgtgcttagggtcacgagtttacactacctctgacttcttgtttatatgttttaaccagttatgttgaatccactcattagtagttcattggaattcttgtttatttggctgttcttgtagaagttctgttgtatcagcttaatccattcacagtcttcctgtaaattcttggaaattctgtttgatcgttatcaacaagaaatacatttctttgtgaattatttcttgagttctctgatagtttttgaagtcatactcagggtatgatagttagacagcaatttaatttccctcttttataaactctaagtgtttggcgtcatgactattttaactatctattcatttcagtggagatgaagatcttaatggcttaattaatgtgtcatcactatcggagtaatttttcctagttttccttggcagtcatctcttggtgcttttcgtacctcaatagctttgttatctatgacagcttgagtttttgttctataactctaggtcggaaagacgtgagggtgcacagatcgtggagg

SEQ ID NO: 62233 - DNA, 757 bp, Cucumis sativus
  Intron number 2 from transcript Cucsa.132590.1 (locus Cucs a.132590) derived from phytozome v7.0 (chr-ID scaffold0103 7; pos 488851 to 489607 reverse strand)
tcaatatcgtaagttattgcttggacttcggtttttttatgatgattctgcctttcaaactacttgttgggtttctctttgtgttcaaatgttgtgttgtttttcaaatattggttcatggttgtcatggtttggttttccattttgtgaatcttgtgtatgcatgtgtttggactttggacatgatttgatttcaaatatagcttttggatctcttttgagagatttctatattggaaatatttaactttctggaaatagcaagttcaaattatggacttatctgattttggattgttttaggatattgatgattaccttgctatgtctttaggagttaaagagtgagttaggaatgattttgagtattgtgtcgaaccaaccacctttttttttataaatacttttagggagaatctctaattattgttcttctttttaagtgcacttttggtgtgctatttttagaatctttaaaatctcttttgaatacatgaccaaacatcatgattaatacacacacacacacacacacatacacattggctaaaagtacttttcaaatttcaccctttccaaaacacgtcaaactcacactaaatctaacaatatattaagacattaacttagaaatttcagggtgctaatgaattgattgttctttatcccgattgctttacattacgatatttatgtgttctagtttatgttctttattgcagttacaacaaccaatcaggcagttcaggcacttaaa

SEQ ID NO: 62234 - DNA, 472 bp, Cucumis sativus
  Intron number 1 from transcript Cucsa.087050.2 (locus Cucs a.087050) derived from phytozome v7.0 (chr-ID scaffold0087 3; pos 382901 to 383372)
cccaggtttccattgtttcaaattctcccactgacacttacatgtcctttcattgaagtcaatgaaggtcaattgattgtacctcatgaatcaaacatacaaatgatgtatatttgacatttgctacaatcatacaaagacatgttattatgtgttaattgtaatgacatctttatattttattcaaaatggtaagtgtatctcgagtatgaaattatggtgtttgcacaggcttattgctttaatgttgtatgatcccacattcatctattatcgatgtctaaggaaataaaaacatttaaatctttgatgctttgatgtttatacatggtctatatgattcttcaactctagctgtggcttgtttgtagatttccactgtatgaacttggaaccatgcatgaccatcacttctatgaccgatttttagcgatttagtgtttttttcttgaactcagagttgggtactgct

SEQ ID NO: 62235 - DNA, 704 bp, Cucumis sativus
  Intron number 1 from transcript Cucsa.047150.6 (locus Cucs a.047150) derived from phytozome v7.0 (chr-ID scaffold0054 2; pos 2298412 to 2299115 reverse strand)
agaagtttgggtttcaagaggtgagacatttttaatataaatgattttagatcgcattttatggtttgaggggaggcattgtcaatgcacacaattatttattctgtagtttatatataggacgagcctaatcagttcatattttccagatttcatcagattaggcaatttgcatgtgaaattaaaaccatggtgatactttgttcatttaactgtaaaagttcggattagtgcaagcctgcaaaagcactagatcattgtgtaaattctcagaacctcgagcagtttacttgactatgcattgttaaccttagtgggaatatgactactgtctagataatctgatgactggttcctttaacgaacaatccgaagaggtctgctgaaacatcattgttgaagataaaattttgatttagttttatctccctattgctcatttctgttgattgacaggatacatcttgcgatgttaccttcataggcatgctgacttcacttttgttagtacttgttaggaatgcaataatttttcttgttattacctcataaaaataatccacattgtttcttttatccaattcctgtttagtgttttccatgttctttctatactagcaacaatatgtctcaatagaaaatgatatttctgaactttttttgttctagatattttgggcgttttcaatatacttggaagccgt

SEQ ID NO: 62236 - DNA, 492 bp, Cucumis sativus
  Intron number 2 from transcript Cucsa.058560.1 (locus Cucs a.058560) derived from phytozome v7.0 (chr-ID scaffold0061 4; pos 714996 to 715487 reverse strand)
ggtgtgggaggaggctataatcattttgctggaaggtttgtgatctcttattttctcattgatctcctgcatcttccgttttgtcttatactgcatgacaaagcttttgaatcatctgttctgtcaatggttcagttgtcattgtttttttttctttgtgcatttgtgtttcttttgtggctattaatttcaatattaatatcttactgtgccattttatctctgctctacttgccactcattttccttctgctatattttccaccaaggacagtatggaagacttttataaagcataaatttccaatgtaaattttactagtttcttactgatccaaatatgtttgatttcttttaacaagaccttgataattaattgccactttgttttagtcttccaatgtacatatggtaatgcattgatatttcttttcattgtggttgtttctaagaacagagacgcttctcgtgcatttgtatcaggaaacttcg

SEQ ID NO: 62237 - DNA, 473 bp, Cucumis sativus
  Intron number 1 from transcript Cucsa.058560.1 (locus Cucs a.058560) derived from phytozome v7.0 (chr-ID scaffold0061 4; pos 715514 to 715986 reverse strand)
gacaagggattgcctatccttcttggaattcttgggtactctccaccttccttccaactcaccctccaaaactctgtctatgttattttcccttcccccctctcttcttcttctagtgtctgatacatgtccaacaagtctcatacaaagacacaataatcaaaccaaaatgttcatgtttcttaatttatgatttatgagactgtagaaaacagagaaaataaattctgataatttatagcgttggctgttgaacctctaagcctcaattcttttttgtggtggttcttttgaagttatatcattagtctgaacataagaaatacgaaaggtcttgggttaaaacatccttaacccgacagcgtatcggaaagcatgccaattgcgacatggttaagcaaaagggttatttcatgagaatcaatcccttgctatttaacctctaataattggatttttcagatctgtatttg

SEQ ID NO: 62238 - DNA, 960 bp, Cucumis sativus
  Intron number 1 from transcript Cucsa.003950.2 (locus Cucs a.003950) derived from phytozome v7.0 (chr-ID scaffold0004 6; pos 99271 to 100230 reverse strand)
gtctttttacgatcccacttctggtaatcttattcaactaattttctccatatattgttgaactgattttctttgtaaattttaggtagctttggtgattgatttttaggccttgggtttccttggaatttgagggaaaacgatgagatggaagtcatcaatgtagttgtagtagtttatcatagtgttcaaactttgctcacactctctagctttagcctattttagacggccatataatatccggaatttgttataattccaccatgatcaatttcgttgtgagtacatctttaataaataacacaaatgtattccatgctgggtttgaggagaaatggattctggtcaagctcattctaatatgttttttagagatcttgcaaggatgtactgctaactagtcgctatctgaaatgaaaatgtggttattattcggtactggctttattcagttttactcaaactgatttgggtggacttgtcaagcagtttgctgggaaaggatttagttttgctaggcttggctagtctgctgttgttgacattgggagcaactggatgtggatatcacattaataaacagctagcaaaactgagtgatggttaattgtgactatggtgaaatgtttattgtgcattaagaaacgtgcaacatgaagatttaagccgcatcctttcatttatcttaattacgttcacgacacacttctgatttgaaatttcttaaaacaattttttcctgtgtaccctgatgcttgtgatgtggtatgagaaaatgctttcaattgtcaacccaacgtatcccatttcaattatgatgtatagtgttagttctgaaatctgacattctctgtctgttataaaattttccatcttctattgaagagaaaagtttggtgttgttccatttctgtttccagtgcaactaacatgatctagtgaaacaggtgagtctgt

SEQ ID NO: 62239 - DNA, 631 bp, Cucumis sativus
  Intron number 2 from transcript Cucsa.050530.1 (locus Cucs a.050530) derived from phytozome v7.0 (chr-ID scaffold0055 5; pos 178341 to 178971 reverse strand)
ctcaaactatttctaccaattttattttttggcaggtcagctccatacgttctgtaatttttctaagagttaaatcttatttgtagtcgcacatggcatctcaacactttgcataaaagttgacgtagaccattttatttgtttttgaaaatgaaacataacaattgcataagatcatctcattaaatgaaaactactaattaaataaaagactcaaagctcaaactgaaattgtactaacaaattgtacgaagacttggttttattattgataatattggttcagaagaactcatggattaattataagctatgaaccaacctgtgtattcaagagcaccggtgttctctcccctctaaaaacaatgcaaaattcttttaagtttcaattttcctaaacaaacctaaaatggaatggcatgtcagagctgccattgtcccatattagtttcacctgttaccctttttttttttttttttcctcttctggtaagattgatttcgtcagttgcagaactgtcttgtaatggaaaatttatcgtttctttttccgtttatgtaacattggtgtttctgggttatattcagtttcagtttttttaatcatatcatgttatttgccctcaggtgt

SEQ ID NO: 62240 - DNA, 391 bp, Cucumis sativus
  Intron number 2 from transcript Cucsa.109400.1 (locus Cucs a.109400) derived from phytozome v7.0 (chr-ID scaffold0093 4; pos 312820 to 313210 reverse strand)
aggtttgtatttcttagttttctttttaaaattttaattttctttcatttagttttagaatcccattatttgttttactatgttttgaatatcaaattagtttaattattatccgtttggattcacttaccgaaaaaaatatctttttaaaaattctttttttttgttaccatgactcattgtttctaacactctattacactaaatcttcattttataagaagctttctttatgaacgtttttcttttttttaagagagaaaatttgactttcatttttaaaagccttaattatatatcaaaagatcgagaactaaatgattatcaaacaaccaaacacgagcaataattgttaagttaaagtttcaaacgtaatatatttatcatcagg

SEQ ID NO: 62241 - DNA, 793 bp, Cucumis sativus
  Intron number 1 from transcript Cucsa.109400.1 (locus Cucs a.109400) derived from phytozome v7.0 (chr-ID scaffold0093 4; pos 313230 to 314022 reverse strand)
ctcaacctcttttttatccaccatctgcattgcaggttggtttcttctttctatgtcctctcttaatttcttaatttgtttattttaaattcactttcatactttgtcaaaacattattcaacgtaatagcagtatatcactataaaagtttttcgtgaaaattcttgatgcatttttcttttaattaaaatcaccaatcacaacaaatcatagaagattaatgtacttcttatgatatatattaccttgcatatttccattcgatttcatttgtcgtgtatgaatcaaaccgatcttagtccaatactaattaacttgtattttctgaaaagtacttgaaagttttatcagtcgaatgtagtaaaaaaaaaaggagccataatgattagaaccatgttagttttgaacaactaaacaaaatattattatttgcatgcgtgtatatagaatgtataagtggtgcaaattaagaatacaacttttatggttaataagttttgcttttttttttcttctttgttggtaactgagctgttaatttatttaatggctgatttttagtacatagatgatttgaagttttaaattctttgaaatcaatctaccgttttaattcgtactatatgttagactagttaaaattgttattggtttttaaagtaacaaaaataatctttacggtttcaaaatcactcacaaatattataaacgtatcttctcgtataaaaagtgatatatgatatttttttgtgtgtaggtcgaccatcaaagttggttcctgaggttgttgct

SEQ ID NO: 62242 - DNA, 1038 bp, Cucumis sativus
  Intron number 1 from transcript Cucsa.047440.1 (locus Cucs a.047440) derived from phytozome v7.0 (chr-ID scaffold0054 2; pos 2460217 to 2461254)
gaggaagaagaagacggactctgttgcttcttcaggtattttgattttcttcttctctctctctctctctctttctatcttttacttcatctccggtttctcttctctctgcttcacttcaatttcataattatgtctggtcaatcaacactctgtttctctctctttcggttcttgttgaatgattgttatgccttgccttcaacttatctggacatttctagggttttaacttcacagagtttagtttccagttttctttttctagttctttactctcttccaccaaaacttgctttggttgactttaattgctgtgaggttcacttcatgacttccaaattcttatctcctcttgatttccgttttcaatttttccgatactgtgtccggaatttgtgcggggtttcgctattcgagcttgaaagattttgaataattcaacatgttttttttttactgctgttactgttttacttctctacgcgggagtaagttagttcttcgatatgaatgttaattgttaatattgtttctgaattttcttgtagtttaatttgaatttcttgtttcctatatgtttagatttcattcacgcgttaattgtttatttattgcttaattgattgttaaattttttggtatttcattcttgcataaattctgtactaagaaaagggtttttttttaacaccttaaggttttggatttttcttgtgaagaatcatgatcgtcactttctcacgatgctttcgtgccatgctgcagcaagtttttggattgttgacattcttgtaattaaatgtttacttgttgctacccctttgatgtttctgattgctttgggttgaatgtgaaatggccttgagctgtgatgtacttacaattttatttccctttcggagtgttacatatagacttttttattggggagcacatacaaatttcagatggttgctccgtctattaatatgttagatttttatctttggatacttacgtctcgacttttgtgctctacagttgtgttttccactg

SEQ ID NO: 62243 - DNA, 415 bp, Cucumis sativus
  Intron number 3 from transcript Cucsa.047440.1 (locus Cucs a.047440) derived from phytozome v7.0 (chr-ID scaffold0054 2; pos 2462296 to 2462710)
gagtatgaagtggtcttttttaaaggatcgactgaaaatacatattttgatacttctctagattgtgagctcacccttcatgtgagcattgttagtttctagattaatatgcaaaaacaatttgtgtagtgcagttgtataatattggagtgagggctttgatcctatactttgggtagggaaaatgtggaatccctgcctagtatcatacattgactttaccactcatcttgtttgttgcgtcatttattaggtgcagtttcaaggttttatttttagtatatcattgtgtagcaccattcttagtctttcttttctttcaaagactatcttcatcattttattattattattatgacattttttttaaaattttacaggactgcacctcaaccaactcttctgaaatagaagc

SEQ ID NO: 62244 - DNA, 744 bp, Cucumis sativus
  Intron number 3 from transcript Cucsa.058930.1 (locus Cucs a.058930) derived from phytozome v7.0 (chr-ID scaffold0061 4; pos 1022787 to 1023530 reverse strand)
cattggctctggttctcaggtactttcctttttctttgcaactagtgaccaaaaaactcacaattatacgaaatagaagtgcttaaatggcataagaaaacacgagggaagatttgagagattgatcgacaactggggctaaatgtgaaattcccaactaattatgcaggcatctttcaagatcatcttgtttcaacatgaatctgttccaagatactttatcttggcccaaggattaagtaatgagagtataaatgattattaggattttttgctcatgtgttggctctttcctgttataatctttgccaacgttattacataaagttgttttatatactcgaaaatgagggatatgtcctaaacccgacgtgtgcatcttaacatgcctagcaccagtttgaaccgattacaactttggggagtaatggacctgtactgattagtgataacatcatgggtgattttagcaatctctgtgctgtagtagtttctaaatggttggcacaaatggctgtttcataagctcaaaagttggtagtacttgctcatttttcacgtcctttttggtagactggatgttttagggaatttgattttaaaggaaagtttgcctgcctagctgcctaagtttatcctgcggcatggcttaaattctaggcatgtccttataaaaaattctactagtatcagtaaacttgaatctaattctactacctcatcaggtggccagtcaagagacct

SEQ ID NO: 62245 - DNA, 499 bp, Cucumis sativus
  Intron number 1 from transcript Cucsa.067590.1 (locus Cucs a.067590) derived from phytozome v7.0 (chr-ID scaffold0069 9; pos 181948 to 182446)
cgaaggtattttcaccttttcgtttccttttattaccatactaattattaaatatatatttcttttttcgtttaattgcatatttagtccatacctttccaagattaaaatttaactcaattcttctttttctttcacttttttcttttctcttccacattattttatctaattaacattttaataaattccccaacaatttacctatttactgcccataaaattaaactaaagtaataattttttttaatatgctagaaatttattagaaccaaaattaaaacaacctatttggttaaagtttcaagtgaacacaaaattgaaattttgtgccactttctttttcttgtagtaacttttttccaacttttatttgatcattttttttaaaatgtaaaatgtcattttaagaatttggtaattccaaaataactttcgaaaccaaagatgataatttaaaatcaccaagtggtaatgcagggcggtggcgggtttatcg

SEQ ID NO: 62246 - DNA, 351 bp, Cucumis sativus
  Intron number 3 from transcript Cucsa.000290.1 (locus Cucs a.000290) derived from phytozome v7.0 (chr-ID scaffold0000 9; pos 80793 to 81143)
gttgccttgtctggtattcttttccgtttcatctattctcatcattcatttcatttcatttaaactgaaggtctatcgatttgaaaacaactttttaagtacttaaaaaagtgattcataatcaaacatagttaaattaatagaaaaataatttattaaattagtttctaaactttaatgtctagagtttttcgttacacatgaaattcaaatttgtcaaagcttgtcggatacaaaactaaaagtttcaaaaacctatatgttaacacatttaaaaattccagtgactaaatagaaaataatgttatgcatgtaggtgcacacacgataggccaagcaaggtgtgtaacc

SEQ ID NO: 62247 - DNA, 678 bp, Cucumis sativus
  Intron number 1 from transcript Cucsa.049080.2 (locus Cucs a.049080) derived from phytozome v7.0 (chr-ID scaffold0054 2; pos 3639447 to 3640124)
ccattccctcggagttcccttggctgccctcacaggtttgtttgtcctcctcatcctcggcttcttcccctccaacaatggcaatccttttcgccgcccactatctgcttttttaagcttttatttgcttttagatttttcttcgttgttctccaaccaacatgccggtgttacataaatcgaacaaaaaaaaatcgttttttcaaacctctctaccctatctctcacgcttagttttttccgtaactgcatctttgtttttttttcttcacctctacaaaacaaatgcatgaacttcaggaacacattcattaaataaataaatttctctatatcatctttcttgccttttactatcctctttaaacgttgttatatcatggttcttccttttcaccatcctttttatttaggtatgtttgccatattataaatacgacttttttgagtttatcatgatgtagcctattcttttcattttttattgtcagtgtttttcttgtgatttcttctattgaatttagtcatgaggagttggggattgaacatcaaatctttagatcaaatgtttaacctcttaatgagctatgaacaggctgacttttttcttgtgatttctaatatgggaggattgtgttagcagggggttagtgtgaacaagcaacaaggaaagggcta

SEQ ID NO: 62248 - DNA, 546 bp, Cucumis sativus
  Intron number 4 from transcript Cucsa.053910.1 (locus Cucs a.053910) derived from phytozome v7.0 (chr-ID scaffold0058 2; pos 40210 to 40755 reverse strand)
tctacaaaaatcttttgaaggatctcattgttcaggttagtaaatttcaaatattatctatatttgaatgtcacaaagtttgatgtatccttaatgattctttgatttagtaaaacttcttaaagtcataaagttttctgcgtatgggctagttcttatagttgtctgtttattacacttaaagagttcattgcaagtgctactaattgtttatgctagataattaggaattttaaatgtcctaaacaaatctttgtttcacatagctctggatggataaaattctcctatctgtaaggtatcaaattgaaacactcatcatcctgataaacaatgattgagttttctttttttcatctctttgttgatggttgctgcttagaaggcattgtgggggttgatcttccctttaaattttggttagtatggttgctgtaggataagtatgatgctggatatacatatactagatgtgttgtgcactgcctaaaggttttttgttattttatagagcttgcttcgactgaaagagccagctgttttatt

SEQ ID NO: 62249 - DNA, 846 bp, Cucumis sativus; identical to SEQ ID NO: 62212
  Intron number 1 from transcript Cucsa.018400.5 (locus Cucs a.018400) derived from phytozome v7.0 (chr-ID scaffold0025 2; pos 803732 to 804577)

SEQ ID NO: 62250 - DNA, 940 bp, Cucumis sativus
  Intron number 1 from transcript Cucsa.132630.1 (locus Cucs a.132630) derived from phytozome v7.0 (chr-ID scaffold0103 7; pos 518163 to 519102)
tgtacaaacgtgatcctcacgagaatcctggcattgtaagatttttttttctttttacgcttttgctctttacctcgtctttaaatgttatggtggcaagaataagatgtatgtttgattgtttattgtatttgtttggttgaaattaattgcttgcttgatacactgccggtagttaaagttttctatacgtgcttgttgtaaattagttcctctttgatggtgatcacacccgttgttattttaagatgaaatttccaagttgattgggttattttcttttgatatagcttgagaatgtacaaatgttgatgcttactgcaaataaaacctctcgtgatgggtggaagtcgatcatatgagcaatggctttatattagtctataagctctcaagattaccccattttggtttcaaactttttaaattaactttcggtgttattctattttcatatttgaacttttaaattatccatttcagcttatgaacttaagaaaactactaatacgttccttaatcaaaacagatgacatgactatgagcatgtctatttatttgttgataacttggagtcacacaagtaatggctaagaacgattattttgtggaccaataggtaacaaaatagcaaaatgtaaaatgattgttcttctaccaagttaagcgattgttatagacatttgaaatagaattaaaaacctcatcgtatcatcaacagtgagactgcgttctcatggattggattggagtcttgtccttctacaataatgtttactatggaagtaacatttagtacatgtattcagaacttggtttgccactttctgtcttttttgttcttgctcatcaatgtctctatactgctatctttttttatttgttcatttgtacttcttttgtagaaacctatcaggagaggtgttgtggggccgtcact

SEQ ID NO: 62251 - DNA, 474 bp, Cucumis sativus
  Intron number 3 from transcript Cucsa.134510.1 (locus Cucs a.134510) derived from phytozome v7.0 (chr-ID scaffold0104 3; pos 165653 to 166126)
tttttcttcaaagctcaccataccatctgcttctggtaatatcctcttgttcttttatattgaactttgcattttcttttgaatgctttgaattttgttggtatgtggctagtagtatgcttgagagatcgactttggtggatgaaagacatgaagggaaatgttggttgtttccgataggcagttagctgagttgttaatctctaaaaaactcaaggctactatcatttattaactctgagatttttcttcttcttccatttggagcttaggtttcagtttctttggttttatgatgtaacttgactcgagtggaaacacttttgtatcagttatggttccataggaagttctatctttgatatttttttaatataagatctttttatagcaatttaggcatatcaatttaacaattgtttgctattatgttcttcagggaaaaaactagctctgatatcgttgtcagacaag

SEQ ID NO: 62252 - DNA, 1031 bp, Cucumis sativus
  Intron number 4 from transcript Cucsa.111540.2 (locus Cucs a.111540) derived from phytozome v7.0 (chr-ID scaffold0095 3; pos 303103 to 304133 reverse strand)
tatttatctgatatcgaggtaaactattaattacgtactccatattattttttttgtaatgttatattttagtttagcatgctcttctttttcttacacagtaaataataaaactaaactgagctaaaaattttcaataaatgttattgttttggtactttcttttctttttggtctttgacgtttgatgggtttgtacgttcagatttaattgacagctttgtaagtgagttttattaaattgttaagagtgtgtttaggaaaggatttgtagaaaaactccattccttcttttggctcaagtaattggtggtgtttcactacaaaaagaaacgttaacctttggacactaattagatgcatatgcatccatctcataacttctccatctcccaccccattttacctttttaaaaataaaaatatagccatgtgttagatttttattgggtggagcaagggttgcaaataagatgagttttttttctcctaaactttatatcaattctggatttcaagatttcataactcagttcataatttcttactatcttgttccaaacccttccttgaaaacctattttaatttatagtttttttttcatgcttttattatccacttttatgtttatattctgttgggaatcaaattatgtatatataaaaaagttaaaatttgaaaattgatgtattttaaagaaaggtgaaaaacttaccgataaattgtgaagaaataagtatacaatttaaaaacaaaatactcattcgagatgtattgtaactttaaattttgtactaactaaatataaaattaaaaattgaaacatttattaagcacaaaattgttgaagatgtgttgttaagttaatctttcttcttttttaatttttgttttactagttagatttagtagatttgtctaaaaaatttggtttagaagaggtcaaacttgaaaggaagcatttagcctttcaaaaataaataaagttaatgatggaaaaataatgcaggtgaagaatctggcagaaaga

SEQ ID NO: 62253 - DNA, 893 bp, Cucumis sativus
  Intron number 3 from transcript Cucsa.076480.1 (locus Cucs a.076480) derived from phytozome v7.0 (chr-ID scaffold0078 9; pos 823467 to 824359 reverse strand)
ctggtatgctatttatgaatacagtaacttgtgtataattctcagcaacaatatcaagtggcatttgttaagtttcttatgttttatattaaattactgtatacttcaagaaagtggatctttttgtaacatacttgcatggggagatgctgtctttccctgcacatttttccttccataattctccatttctgagtgcctcttcataaaagttaaacgagctctctaaaatctttctagtcaactcttacagttactacatctattgtgaagagctgttgtccgtgtatatttcatttaatcatttcaactttgtttcttattgaaggaccttctgttctatttataattgtaaggacggtgacttgtaactgtaatttgtaaatgaggaatcattgcaacctaggcccgtggttgttattagcattcgcccttagggaaacagcaaaggaccatcattgaattgagactcaattcactgcttggaaatgttggaaggatgacatgggaacactgctcattggcacaaaagttaggggagctaggtcagagataggaatgtgactgaagataggatattcatagattgttggacttagttagtttgactatttatcttagagatctttatttttccaggaattaaaactcatttttactttttgatactgaacaattttaattattgcatttttccctttctcttgcatgtaccctgctctatgcagtgtctttggcgtatattttcttcttcttttgtattctcttgaccctggttttcttactttttttcccaaagcaatccattaaaatgaattattgtcagcaaaactttgtttgtgtagagctactatttttgaacttcttttaaatcttattttggatttagttga

SEQ ID NO: 62254 - DNA, 655 bp, Cucumis sativus
  Intron number 3 from transcript Cucsa.060630.1 (locus Cucs a.060630) derived from phytozome v7.0 (chr-ID scaffold0063 5; pos 114361 to 115015)
aacggaatcagtaaccttttgataaaaaagaacaacttatataaaagaataataagctgcatgctcatagcatatcaatgtaggttttcggcacggtatttgatcagttgatatttactacttagcggaaacaagcaaatttagttcctctggttattttcgcctctcagttgcatcctggactatatcttcgagactctttactaagcaggtgtaggatattttgtttgttattacacgaagtaaaagattggctttcattatcattgctttcccatttatcaattcttatcagaactggcgttcgtatggcttaatgggctacatttataattttttactgcttcttcatttatttattcattttatccgatatgctgctagcattgatcatgactatgtttcctcaacaatgcgctgataggatcattttcctcatcaaatggtgatatgacttctatgtagggagtgagaccatctaatagttcaagttttatttttctaacccaataaaaccagcgattacaagtggttacagccgtgttgtgagtctgatgtgcaatgttattttaaccttttgcacttttggttttctcttaacgagttgcttttaggattgctgatgtaatcgattctgcaggtactgtttttgcat

SEQ ID NO: 62255 - DNA, 871 bp, Cucumis sativus
  Intron number 2 from transcript Cucsa.126920.12 (locus Cuc sa.126920) derived from phytozome v7.0 (chr-ID scaffold010 17; pos 734701 to 735571 reverse strand)
tcacattcacttggagaaacgataaagctgtaagctttgacccaggagttgataaacaaattggagtttgaaaaatattttgtttatatgtattactgaggctgtacatggctgccgttgtataagaatgacaaagtgctattttaggctaatgacacaatctcgggaaaaagatcctgcaactactctcattaaataggcttgacccataattttcttcaccatttatctgattgattttctttcctacaacatttcaaggtctattcggacaaaaatatcgatctctcgcttttatagaaacaaatgaagcgtcaaaggcaacgaagttatggaaaggaaaaaaattgcagtgatcacacactcaaaaaagttgtttacattaataaaattaaatttaagaatgcttaagaaaattatatatcatcaccattatatttataatctatcatcaaagttctattatatctcttcatattttgttattatatgatgtatttaaaagacatttattctggatgttgttgattttgaaccctctaatttactaagtattaatgaaaatattggcatgtaattgtatgtgttgcagcatttttttcgtatactaaagtaatcagagcattgttgtttttgtagatatcttttcctaagcatcatgtcttgtgacatgtatgtacgtctttctttctaaatataaaatacagaagcatgaaaatcctgagccacgattgtattagttttggcaaattattgttttcattattatttgcactcgtattgactattattttcatcattatttaataattgattttaaagaatggtgtttgtaggctttatctcattgcataagagatagattgattga

SEQ ID NO: 62256 - DNA, 851 bp, Cucumis sativus
  Intron number 1 from transcript Cucsa.059960.1 (locus Cucs a.059960) derived from phytozome v7.0 (chr-ID scaffold0062 1; pos 522587 to 523437 reverse strand)
gtataagtaagtaggtctaaataccctttcttttctatttctatattttcctttcttagattgcatttgatcggaatgagggtctttctttggcttgcattttgaatttctagattttttcacttatttgtttttaaaaatttgttctctttgtttctttgtgcatttcctgttccattgatcaattttaattaaacagtattggaagtatgaaagtacagaagaacttagcatctaacttattttgaactgtggaaagccagcagttttctaagcccaccgttgagcctttgcaattgagtttaaaaattgtatgccatgtgttgttttttagttttttgaaaattaagcctccgaacaccacttctacatctaaatatcttgctttgttatctactttttaaaaatcaagtggcctagtgttaaaaaatctgtctcaataactaatgaagaataactaagagttcatagaattaatttcctactactttccttgacacccaaatgttctagggacagttgggttctctcggtgagattagttgaggtgcccgtaagttgccccaaacactcgtggatatgaaaaaaacttgtttttgtttttggaatttgacatagaattcaacttttgtacttgaagaaatatgcaagacattgtaagaaaatatctttttgcacagttgtactcaacattaagtggatgatgttcatgagaaatggagagaaagcgctcatgaattagggtgatacataggtagctgcctttgttgtttataggatgaaacttctatcattggacatatacagctcacgcaattttcactctttggtttgctagtgaaagagaagag

SEQ ID NO: 62257 - DNA, 391 bp, Cucumis sativus
  Intron number 2 from transcript Cucsa.118850.2 (locus Cucs a.118850) derived from phytozome v7.0 (chr-ID scaffold0099 8; pos 720670 to 721060 reverse strand)
tttacagaaggatcctcctacgtcttgcagtgctggtatgtattatttgcccccgcacccccctttttcttccgttttattcctcaactccgctcatttggcatcttcttgttttcgctcttaacatagtggaattcctgtaatgtttgttttgttgttaatgcgacaatgtatttttggtttcttatctattttgaatttgtcaaatttattaattctttgtttctccatcaagatcattaattttttaatggtcagattataagtttcgggttccttgtttgtttttaagtattcttcagtttaatcttgtggactacaaaaagtaccttgaagttcttatgggttattgtcttcgtgctgttttttcttaggtcctgtggctgaagac

SEQ ID NO: 62258 - DNA, 764 bp, Cucumis sativus
  Intron number 1 from transcript Cucsa.050070.1 (locus Cucs a.050070) derived from phytozome v7.0 (chr-ID scaffold0055 1; pos 203517 to 204280 reverse strand)
gggctgtggagaaggctgaagtgagtaatttctgcttggatttgttattttttattttattttttcattttcctcttttgggtatcctgaaatttgttttataccatgcgtcgtattgttgattttgaggcttgctggattctccagggtttatacgtgcttagtttgttttgaacctttgcattgattgagtttacttgtttataaattcatcaaaactgctgaatgtagtttcattttgggctgaatttgtctaccctttacttcctgaatgttgtttggacaagctattgagggttcttttacatttgaagttggattggttcttgtcatctgtaatttgagctctagaatacgataagatatacttcgattcttgctaaagtaactctagtttaaatctacgagtgcatgtcaattactgttaaaactgtgctttctttgggcgagataacacttggtaatttatgtttattgcttatttgtaatttcctttccaaaatgtgctctccaacttgaatatcttatgccatatggtcattttgaaaaactagctaattttttctcttgaactccgaggcaaagcacttgaaccgaacggtcctttaaatcaagtagctagcagcaacatttttattttttttaatgaattagctcttgcaatctattgatttcaagaattctagcatccctttgttcttaatcttcacttggtaactgttggtgttggccttaagaatcttattttgttccatttccaggtc

SEQ ID NO: 62259 - DNA, 431 bp, Cucumis sativus
  Intron number 4 from transcript Cucsa.094800.3 (locus Cucs a.094800) derived from phytozome v7.0 (chr-ID scaffold0091 9; pos 881122 to 881552)
ttgacaacaacactgttgggtaagcttagttttatgatagtgcatatttatggaaaacttggcattattaattgggtaatataaggatgtaaaactttaccccggcactttggttagccttggttaatttggtttggataaagacatacttttgcgaatttgaggtatttaaatgtagacttgatacttcatttggcttttcttttggttgggttcatgaatgtaaaagaagtgtactgttttttgtgctccacaatggaagttaattattaactgacaatgtcatcttggtgagctcttctgcttacttgattggcattattgataaataggctgaaactaatttcttctcattattcatttggattggttgacattttgattaatcatattcaggtaccagtcaaccttcttaggttcatatcagactg

SEQ ID NO: 62260 - DNA, 852 bp, Cucumis sativus
  Intron number 2 from transcript Cucsa.005230.1 (locus Cucs a.005230) derived from phytozome v7.0 (chr-ID scaffold0005 5; pos 317273 to 318124 reverse strand)
tggttctaagaaaaagcaacaattggaagctttaggtaactattctaagtgccttgtcctgtaatcctcttccatgtcaagacccagttgggtctctggatttgatgcttgacttgactgctattcgatcgttatgctcttaactttaacgttttgtatttttcagttatcacgtggcattgacaatatatgaatatcattgattgtctaggaattttgagttgaccagtttactgtgttgatttaaatgagatgtttgatatttcttacacatatatctaattggctatttatatagtttggtctgactttaaaatatggaaaaaacagtgatatcaaaaactagatgttggattctgttatctcctagataggattattgtcatgaattacatatttgcccttcttttgtcttgcattggctactacgaatcttagttgttttgaccaatatttatttagttgcatttacgagaatatccattagtttttgttatggaaagctaattattgttgagaaaatgcatcttttgtcatatcgtttaaccaatcaaacataccttttctggtggaatagaggtcagctactcgtctacaactgtattttccttgcctgttttgtcctctttatgtgtacaagatttaaattatagtgttaactgtaataactatacagcaacgggagaaaaggaagggaatctcactttggttgacttttagtgtccaagcaatgctattgtttatattctaaattattgtttgataattatttaacttatgactttattgaaaactgagtgtcttacagagaaattttaattgcaggatcggctgggattggattcaccccac

SEQ ID NO: 62261 - DNA, 691 bp, Cucumis sativus
  Intron number 1 from transcript Cucsa.005230.1 (locus Cucs a.005230) derived from phytozome v7.0 (chr-ID scaffold0005 5; pos 318601 to 319291 reverse strand)
attatcactctccccctatttttcctattttactggtaagtttttagtaatttcccccttttttttctttttttttcccccattttttcccttcgtttcttctgtttttttcatacttaatttcaatttttttttctttgattatatatttttatttttattttttttatttttattatatatttatatattttttcttcctattattaagatttaattttatcatattttgcatgatctgttctgttgtacttcacttgttaaccttcatgttattagctcttttgttttcttcttctataatttcgttggatcttgtttactgattttgaagaaatgttgaagttttgggataagggtttcttttaattcttgtaaactttagcttgtttgtgtttgatttcacatttgggaaaatctttaatcatcttcttaggttttttttttttgtttaattctttgtttgcatttctagttctaatttggttaagttatacggtttacgaactaaatacattccgaaatctgcattagtgtgttatatgttagatcttacctactacgcttctgaattttatcggattatgggtgatgatcgagatgaagattcaaaatcacgtacactttcttcgtgtgtttgcaattttgttttccaggctttagatagagttttggttgaagctgtagggga

SEQ ID NO: 62262 - DNA, 685 bp, Cucumis sativus
  Intron number 3 from transcript Cucsa.112790.2 (locus Cucs a.112790) derived from phytozome v7.0 (chr-ID scaffold0095 3; pos 1196659 to 1197343 reverse strand)
tggaggttccttgtgcttgcagtggcagcttgaaggtatgtataggtaccatttgctaacacttctattgcaatggtccttgtagtttaacaaaatggttcgccgatcaatagacagtttattaaaagaagagtatattttgtgaatgtaacacgtgttgtagagttattgtattactttactccccatgaagttgtgaatcctttggtggttggtttgcattgctcccttaacttaaaggggcacgaagagccaatcctgattgtctttattgcttctgcacaccatttctagcttctaaatgtgaagaggcatttacctgacttgactcgtgtcagaagagagcacgataaaagagttattttcaatttttaattgtcatctgtatttttgcattagttggtttgagttgagagtatgggatcttatagtgtgatggcaatgtataatatgttctttctgttagaagttatattggaaagaaacctttttttttgggctgtggtagtgtagttccctgacagaggacataccacatttcaagccagacccttgatttgttgtttaattaaaccccgtgccttgattcctttggagaagtctgattttatcattgttattattattactgataaatttgttctgttttagatgtttctgattctattcatttctcttttccagt

SEQ ID NO: 62263 - DNA, 644 bp, Cucumis sativus
  Intron number 1 from transcript Cucsa.112790.2 (locus Cucs a.112790) derived from phytozome v7.0 (chr-ID scaffold0095 3; pos 1197763 to 1198406 reverse strand)
ttttttttttttttccaacctctttgatttgaaaggtttcttcttcaacttcaacttcaatctaattcttattcaactttcattttccttcttcatgcttttacatttttgttgtctgctttttcttgtgatcattgggttttaggggtttctgtggaattgcatgttgtgggtttgattttttttttttgccttttttgttggggtgtggttttgggttcttcttgtgaagcttagcaattggttgaaatttgaaaattttgaactttgggggttcttatggcttgtaagtataaggtggggtgagggaaagttgggggatttctttctacttttttctgtgtacattttagctgcgatcgttttgtagcagaaaggtgctgattttgtagttggattgttttagaagaacgggttttctcatcttttgtttttagtgggggaatatactgtttttgaaaaatatagtttcaaaagttgttgatcggaaaaatgatatcttttgttctgggggaggagttgattttaagaatgtgacccttgccttttatgatgcaattagttggagtttgaattttttttttttttgtggattttctttttctgtagctgagggtttcgagaattgagggaaattgaacaca

SEQ ID NO: 62264 - DNA, 591 bp, Cucumis sativus
  Intron number 2 from transcript Cucsa.132500.1 (locus Cucs a.132500) derived from phytozome v7.0 (chr-ID scaffold0103 7; pos 434264 to 434854 reverse strand)
cagtcaaaggtttgaattcctttagctcctggactgttttggcttacagttttaatgaatctagctttataaagaagtaagaaagtctttatgatctgcaaaagaatgaaataaaccctaggcttatctaatctatgatgatttgttgaagctaatatttaatatctattataaaagataggtttcataggttcaatttatgtgtccaaacataggtttatatcatacctcaagtaattcaacgttttaggggagaaagatcaaaaaagtgttaagagttgtagaacggaaccttaaagtttggtcctcggtgagatttcatgtttcttttttatacttcgattttgaggactttttctaattactctctaggcaacatcatacgtagttgaacctcctttttctagtggggtttttgtgggctcttctttcatttttttttttcctgaatgaaagaagttgtttctattcgggaaaaaatcattctacctatgaagtattctctatatatttgaatgtgaaagttaaaactaatgtctcttcatgaatggcgcagaatttaaacccctaaagcttagattgggtggtact

SEQ ID NO: 62265 - DNA, 752 bp, Cucumis sativus
  Intron number 1 from transcript Cucsa.132500.1 (locus Cucs a.132500) derived from phytozome v7.0 (chr-ID scaffold0103 7; pos 434858 to 435609 reverse strand)
cttgcagttggggccaagcttctctgttgaatctggtatttgttttttcttttctttcttttagattctaatcatttccaaactcattaatggcgatttacttttcttatgaattacgagagttcataaattttggcatctgggtttcattatttgatattcttctttaagttttctttatgggtttttagagtatttattgctaaagaaaagtgagaatcctttcatcttttcgaacagtctcactcctcagttatgcatttggaagataacaaaacaaagaaaactcgacattaattggtttggaggagatatcaaaacaaagaaagttcgaagattaattttgagtataactattggttagaaaattgaacctctaatctctatctaacaggaggtcatgtcaatactactaaatagagttcattccggcaaaaactcgaaaatcaattaaatttcaaaagtctcttaaattatacatttcgtttacttaggtctcgtttggaaagtagatagcagaaagaaaaaaaaaaaccccaattaattggattttaaatttggaagtatgtttacaattatttaatgtcttttctactaggttctattgactaaagaataataatagttatgaggtcacatctactattaaatatactttcctataatctatctagtgctatactatctgaaatatttaaatttgttctgatttcattttcaactgcaggacctgggcaacaacattctattaa

SEQ ID NO: 62266 - DNA, 802 bp, Cucumis sativus
  Intron number 1 from transcript Cucsa.004580.3 (locus Cucs a.004580) derived from phytozome v7.0 (chr-ID scaffold0005 3; pos 137553 to 138354 reverse strand)
tggcctactacagaaaacaatcacttctggtaatttcattattaacatagatacgtacacactatatatagtacttatttttgttgtccaccatctgtatatatttagtaaattcagtttgattcttatgatatttggaagagtcattaaacttcaccatatatgattaattcctcgatgatttatttagaatattatatcacatatgtgtgattgaaaatttaagacttctttttaaacataactaaaatgatcaaattcacatgtcggttgtgcataaagatgatttaattgtttaattatttgttgatttctgaagaaaaaaattattattttggaaaatcacagtgcctaacaaattgtgtttattttcttcttaaactttaaaaagtgtctaatgagtaattaatttttttttcatatataggtctgtctaatatttaattcttttccttttaattttataataatttagtctctaaattttgtaattttaatctaacttttaaaacaattcatcaaaattaaaggttaatttttagaagtataagaatttagactttatagcttctcacgttaataattagtttattgatctgcctaatgcaagacatctcacgttaaaacttaactctgattttcacttaaatcgcaacaaatcttttagagaaacaaaaattgttacttcaatgaccaaaagtgattttgaaccaattttaataatacctcaaactttcaattcggtgtctatgttgatgacagtgtagctgttgaacgtttctcgacattggtggcgaaattg

SEQ ID NO: 62267 - DNA, 1002 bp, Cucumis sativus
  Intron number 1 from transcript Cucsa.130320.1 (locus Cucs a.130320) derived from phytozome v7.0 (chr-ID scaffold0102 9; pos 243324 to 244325 reverse strand)
gttggtgtcttgcgccagctcggtgatcttgctgagtgagattttctttctttccttttctttttactgctgttttgtttttttttttaatggaagtggatagttctgattcttcttaattgtggatgtttagtgatggatgagttttttttcttggaattgagaggtgtgagagatggtttgttagttgagtgatttgaaatgagcgttgaattgagaagtttgtgtttgaatcagagttttgagagtagattgtttaattagttgacctttccttcgttaggtttttaatttgaattaatgtagcgagttaaatgctggaagcgagggatttataatagttcttggagttatcagcttcaattagaagattcatcttctctagtggctgcgcattccttttagttcttcagattctttgctttcctaattacgttctcaagactgttagtttacaacttgcgatttgaattgctactaaacgctagttgattaatagctgattaagtacttcgcaatttgtaggagtttagtgtaatcttggattcgccgtttgttatgggtaaaatatttacatgtactctgatcttaaccttcgtaaattttgtgcccttctatttgcaactttggtactgttaacttcagcaactgggcttctttaattttctttcctgttctggcaattggcccaaagttactcatttggaaggattctaattttatgcatgatatttcgctatattgtattcggattcaattccaatgacttaaatgttatatttttagaaatacgattcttgtatttctgttggagagtctgtaagacaactgataatacattagctatcttactggtacttggaaagattgtgaaaaactgaatagatcggctctaagaccactttttaacttcataatatttgatggggatttcacgtctccagaaacatgccctcatctgtgtctttttatttgttgaaaggtttgctgctgaggtattcc

SEQ ID NO: 62268 - DNA, 1018 bp, Cucumis sativus
  Intron number 1 from transcript Cucsa.129070.2 (locus Cucs a.129070) derived from phytozome v7.0 (chr-ID scaffold0102 8; pos 149012 to 150029)
acttatctctttcccttccctaattttggcttccggtacgtttttctttaatcctctttggtatttcatgtgatgtttttgtttagggttgattctcttcttttaccttttgagtcatactatagagatttgattttatgatgtttctgccttcaaacttcgctccaaaacttttactgtttgtcgaggtgaaaaagtactagagagagatctttgttgatgatttttatgcgtgaatcgaagtcagttaacatattaacaccgatgcatttgatgttgtgttgattgaattgttcacgcacgctacgttgacgaaactttgtttatgttgacacaatagtgactgtgtaagcccgttgatgatttctactcacataagatacctaaaacaaaaagaactttttgttcgtgtgtggacaaaagtatcatttccacatatgcacgatatattgatacaaaaaagatgtttatagaagtccattaatcctctctcaagagctatgttaagtcttggttgtgccttgtttaatttattcaaatattgacattttgttgttttttaaatgtttattgaaaattaaaacgtacatgtggaagtatatatatcacgaaattttttttttttaaaaaagacataatctaataagtaaccacgataattagaactagatcataaatatataaccgaaaaacaactatcaatccaataattagtattaaaatctttcatctaaaattaaaattaagacactatcatatactcaatctttttctatcgtcctattaacacaaacaatgaatttttcacactagaaacgtaagaacacaaaaaaaattttaaaaaatagagtgagattcactaatgttaatatgacatccattactactcacgaaaataaatctatagtatgatatggtatgatatgatatgatatgatatcccgatgcaaccaacccgagtttattagttgttggttttttaggtcaagtcattggtcagcgtacgagaagaaccaag

SEQ ID NO: 62269 - DNA, 1039 bp, Cucumis sativus
  Intron number 3 from transcript Cucsa.095400.2 (locus Cucs a.095400) derived from phytozome v7.0 (chr-ID scaffold0091 9; pos 1287304 to 1288342 reverse strand)
cgtcaagctacagcacaggtagtttctgaaccgtgtattcatcatttcccccctgcctgctctacctttagcatcgtcctttaattctgagccagcagtgctgtttctcccctttaaactttttttttataatttattcaagattcagataatcaatggaaaattagaagttggaagtttcatgttattaggaaacatgacacaaggatgctaaatagtgaggtgttaaccactttaatctctatgaaacaaaaagaaaacattataccaaaggggaagcaaatacaatgtttttatagctcaagacacaatcaagcgcaatggtcatccaaggggaagtgcaaggcacaaaaagtgcgcccttttctttttctgaggcacgttatatatacaagtactacaaacagaagagaaagcatattaaagttgaaatatgaaaaataaatccttaaacacaatatgtatttaggcttagtaaatttgactcgtttagttaatattgaaggaaaacccctaattattactatttttaaagtaatgaaaaagccccatggctgtggggtttgagccttggggttttacaaaaggtgcgcacttgaggcacactttctgtgagcctcgctctttgagggcgagtcaccagtcttgcatcttgcacccacggaagcttttacagtgagtgaatatattttttttccatttagggaaaggatatgagacttttcattaagtaaataaaaaggtaataatgctttgagatacaaaaggatacaaggaacaaaatattacaaagataattaaaaaacaaaacataaagaacatataattataaagagaaatgggccctccttggctcttccttctggatgtgagttgggtgtgtgtactttatgggatatgtggaacttgacatttggcaatggacaaaccgcaccacaacaaaatgcaatgccttatgtcgattttccatttttcatctgtaaaactgatcatttttattgaaggtgctagcttctcaaaagcgcttggaaaacaagta

SEQ ID NO: 62270 - DNA, 471 bp, Cucumis sativus
  Intron number 2 from transcript Cucsa.048280.1 (locus Cucs a.048280) derived from phytozome v7.0 (chr-ID scaffold0054 2; pos 3103001 to 3103471)
ggtatgttgagtttttgtcgtgttgaatgtagaatggtttttgtggaagtacatgcgtaattgcatataacagtaatgatgcctctcagtgcgtatttctgcttttgtgtttggaagtcacgttgatatctccgcttgcatgcatgaatttctgtatgtagaagaactttgtgctatacatcttttggtattcggttttgaagggagtgtctagtttgatgagttgttctttttcattcggtgcttgatgaacgtgctagatgtttgttgttgagatttctgaattcaaagggttgcgtggcacaaataaaacgatcaatagcctacttgattccgaacctgaaaattcaatatatctgcaaattgtttgttctgttacttctgttagtttttcttggctcttgccattaattgacatgcgtggaacatacttttttcgacgtgtagagcttcgaagaggcactatctgca

SEQ ID NO: 62271 - DNA, 501 bp, Cucumis sativus
  Intron number 1 from transcript Cucsa.047810.2 (locus Cucs a.047810) derived from phytozome v7.0 (chr-ID scaffold0054 2; pos 2710159 to 2710659 reverse strand)
gcagttcttattcgtttattctctgtttcattgatgtgggtttggattcttttagattgacgttcacttctgctctatgaatttgattttgatgatgatgggtgggcttgttttctgtttcattgtcggtttatctatggaacttgagtgaaatgaatctgatattcactggttcaattagattcatatcttgatactcgatgaatgttcgtttgcaatagttttcaagcatggaataaagtatcgataaacgcatcttctgctggtttagatgaataaaccttaaagtaataaactaataactagtttactttgttaatcaatgattatctcgtacatcaatcgtattattcatgatgagacttgtactttcttggtcttgatgagaattgttgcttcatcccttttcatcaaatacctgacagatcgtttcaatttgttgggttttgaattaatttgtctaattttcttaaacacagctttaagtaggttgctgaaaag

SEQ ID NO: 62272 - DNA, 264 bp, Cucumis sativus
  Intron number 1 from transcript Cucsa.085570.1 (locus Cucs a.085570) derived from phytozome v7.0 (chr-ID scaffold0087 0; pos 44405 to 44668 reverse strand)
ttccacttcttagttctgtattttacaaactcaaagacatggcttcttatcttttctctcagactaattttaatgatctacaaactaatcagcaacttgatcttctcttagctacagtggacagtgattactatggttttacttccaaatcccttatttgatatataacaataatctttaactaatactatatattcaatgttcttactcttcatttcttttgttgtagatatagcattagatattctgaaaaagaaacctgat

SEQ ID NO: 62273 - DNA, 859 bp, Cucumis sativus
  Intron number 6 from transcript Cucsa.094480.1 (locus Cucs a.094480) derived from phytozome v7.0 (chr-ID scaffold0091 9; pos 693644 to 694502)
tctacaaggttagtagtttttttcccttttctttcgactattaggattatcgtgtgttgagattgaacaaatttaaaatttccattttgatatgggagcttttattccctcttctgtatagtttttccccttgttagttgaaagcgcttttgataaatattactgtttgtgactctgaatacctgaatatgtaagttacaattctctaataagtttccaattaaacatttttctgtgaagatgttttggaagatttttttaaattatttttttagagtttggggttttagaagaaaagtactgcctcatgtacgtcaagaaaaaaaaaacttctcaaaagggaagatgttgatttcattaccaatacaatctgtaagcagtgttcttttattacttcaatcaatttgaataaatgtatttttctcatgtccaccccttaggattttagagatttcatgttgacatgcctgtttttctgcttttaaggacaaagatcgacagaaaacttgtagaaactaagtacacttattcagggaaaaagtacgtgatgaaatattcagactgtttggaatcaaagaaacaataaaaggggctttccttttctatgcccttgtcttcttccatgctttttctcaacaaaaattggtctttcatccccctaaaagaaaaggaaaagagaaaagccctgcattttgccacaaaaaaaaaatattattgacaatgtggagtttatttgccggtttcaagaagtttctgtattagtagaacttacaaaagagaatgtctattttatcattttattcctacccaaacttctatctatctcagggtttgaccgttttggagtacttggtgggtc

SEQ ID NO: 62274 - DNA, 793 bp, Cucumis sativus
  Intron number 1 from transcript Cucsa.133230.1 (locus Cucs a.133230) derived from phytozome v7.0 (chr-ID scaffold0103 7; pos 963934 to 964726 reverse strand)
gctggcaacgccggttctggtagttatttctcttcacttcatttctttttttcccttagataattccatggcaatatctcacatcgctcacccttagaaatttgttgttatcggagtagatgaagaggaagagataacggtggggttgggtttgtgatgggaatgtttgtgacgaagagagttattgtgaacgccaactgcattcattaattacatgcattctagtggattccataaatatagtacgaaagattattcataatataagctaaatatcaatagattatagaagcaatctgttagatagtactaaccattatcccgtcaagaactccataacttacaaaaatttatctaccttaatacttcctgtttcgtgatcaaatgatttatttatttgtttcacctagatctcaaataattctagatgatgctttagtgcggcaaacaaagaatatagttgcgtacacatcaatgtagaatttcaaattttattttgttaatttttccttttcttctattgtcatggaattaaacaaaaacaactatgtcacgttcatttaattatgtcatatatatcaatctagttatcatttgattaggttaaagttgagtaagacatcattataaatattattacaaacttcataattaactaaaacgtttttaagccataagaaaaaagagcaatacattcaaaacaaaatagttattaagcgacactttaacaaaaaaaaagttatcctaaatttgtgcaggagtcgttgtttctcttttgaggattctaacaaaa

SEQ ID NO: 62275 - DNA, 1041 bp, Cucumis sativus
  Intron number 2 from transcript Cucsa.111340.2 (locus Cucs a.111340) derived from phytozome v7.0 (chr-ID scaffold0095 3; pos 173553 to 174593)
tttcctataaggtcggttcttatgtttctgcagcattattttatttgtctccctttgtattgctattgattgaaggggctttcttctgggtagtcttctttttcccttgattctactgccttgaagttgaattgataaatttgtggctatgtttgatagatgatctaaatttggttgccttgttattttcttaggtggaaatgctgctattctctgattttagacaattgagattaggatagcgtggttggtttctaattgatcaatatagaatgaatagtttcgtgttctttgatgacaacataggctcctaacgagtgtaacttccattttttgaatgaacgtttacccggaaaggaagaaaagtacggtacttttatcattactactttatgaaggataagaattaatagttgtgtcatgtatggaattaaaagaactgaatgagtaagaatctctcggggagaggggataagcttgggcctacctaccactgtgaacatccacggaggataccttcttggctgtttacagtagaaaaagaaaagaaaagaaaagagaaaagatcattaagttttacaattatattataaaacaatagaaatagtcagtagacaagcatgaaggaaaaaaatgaaaaaaccaaaattaagatcgttgtttaggttagtatacacatgaaggtgttggccaacttaggtggactccagcataaagaatttcacagaacagttgatatcttaattggtaggcatcgtggttagaacacatggtttctagactatcccttttgcaccttgcccatttgattattgggccaacctaacatcacataatatttaaaactatcttttaacttcaacctattgatctcaaaatatggtttggtagtgcaaattgatgttgaatgaagattttgaaagttagtggttgatatggagctgtaggaattgtttggtttctcccatttcatcatgtcttattatatctaacattgtgcaagcagggatttctggaaaaggcataagagaaagattttaa

SEQ ID NO: 62276 - DNA, 628 bp, Cucumis sativus
  Intron number 3 from transcript Cucsa.107740.2 (locus Cucs a.107740) derived from phytozome v7.0 (chr-ID scaffold0093 1; pos 49191 to 49818)
gctttgcaacttgtgatcaattgtggtaaattaatcctttgctctttcccaaaattaaatttgcaagaaatatgtttattacatgatatcatatattattaattttgatgtacatcattcatcgacttaaaattttgttttaattaaaattcaaccgactatgtattcaaactaactcgagcgcaagagtaaaattctgttaggtgatataatattaagtttatgtgtccaaacctcagccgacaagtaacagaagatgttttacgatataatattaaatttatttcactcatttgtttaagttttttattcaacgaatgattttaaagttacatttgaattgaaagaagattatcttctctacaaactgtacttatcatttttctaagactaatttggtagaaacaaattaaaatctacctgtatcttttgatagtagtattatttatgaaagcaaaatggttattaagctatgattttagatttgaaaaagaaaccgaatgacaagccttgaattggtcttctaaaagggcatatttttctcccacatatcaatttgtttgattggaatatcttttctggttcgaatgtagtcgagagcaaacgggctaaaaggaggaagcaagaa

SEQ ID NO: 62277 - DNA, 908 bp, Cucumis sativus
  Intron number 1 from transcript Cucsa.086930.1 (locus Cucs a.086930) derived from phytozome v7.0 (chr-ID scaffold0087 3; pos 290989 to 291896)
aggagaagtacggtgtttccacgaaagataagtaaaaggtgtgatatggaacttatttttcttaggattttcttaagcaatcctggaattgagtcgaattgtttgttacttgaagttctctctttttagggtttaatagctgtaccgatgtttttaattgctggtcatgagtgggcaatggtttactatttttgcttaaattgtcttttttttcttagtctttatattctttgatcatgtcattatctgtttccgttaattatagttaaattgtaagcatttgttcttaatacctatctggcttttttcaattctcttatatggttggagtgcttgggtagtagttaagttctaagatatgaatgtggaagttattactttgtgagtgtgtagtaagcttggtatctgtcaggggtgtgcagccgttggtcggaaccattttttcaaccacgaactgccaccgaaccgaatacggtagtaaaccgacctcgagcatcaagaagtaaaagtcggtcaactatattctttaaaacattttccaaaagaatccagtttgttttttcccaaaccaacaccaaccgacctctttcttctccgtccaacctccttcagttggttgtctcagtttttcggtctgtcacactcaccccctctatggtggctctcatctaattggaataacagagcataaagcattcagtataatatatactttgggattatcatctgttctttcagaagctgataaaatggtagatcattgtttgtgcttgtcagtgtgctaggaagaaatgactatgatattgcattagaaattgaaattcaggccgtctttgtggaaatctgtttgcattttgcatgattaaatctagtttgttgctcaacaggtaattgttgggagagtaata

SEQ ID NO: 62278 - DNA, 504 bp, Cucumis sativus
  Intron number 1 from transcript Cucsa.004460.2 (locus Cucs a.004460) derived from phytozome v7.0 (chr-ID scaffold0005 3; pos 23325 to 23828)
acctttcgaatcaactcactggaagtaaaattcaggtatcgtttcgtttctaatttcaatcatcatcttcctacaatctttgccggtttcttgctaacctacccgatcacgatacgctgtaatgccagtggtcaaatttcacttcagcttggcgactgcatatcaaacttaatgcactgcttaatatgttttgacctcgttgagcttaataccttccattttcctgtcggttcgctaccaaatgttgtgttaattttctattattattcgtaattatcttgatatgaagtggcaacattagtttttcaagttcgatcgggtattgagaattgatgagatgaaattgacatgaactcgtttaggtttggttaggttttgtaactagtgcattttgattctatgtttgtgtcacctggcaataatttgaagttgtttcagtattgtaaaacagcgtccataatctttgtaggctcttactcgcacctctttagtgctttgagaacg

SEQ ID NO: 62279 - DNA, 782 bp, Cucumis sativus
  Intron number 3 from transcript Cucsa.133430.1 (locus Cucs a.133430) derived from phytozome v7.0 (chr-ID scaffold0103 7; pos 1121596 to 1122377)
cctactttgttactggtacattcattttccacattttccttagctgattctttgtttcctttatcatattttgatttctgagttcttcctttataaaataattatcattcaatctatagttgcaaattattgacaactattttcagtttgtttgaaaaatactccaaccctgaattttcttctctagcatgatggtgtgttgtatatgagttcaatcaatggttgccaactacttgccacctatctggaaattagtttactacgggtttaggtataataaattcaattcaatggcttgcttacaatttatacagtgggattgtaaggctgcaaattagtaacctttattgagaggtgctcctaagttcgcctttttgggagctagcttctttgttttattaagaggttttgctttagaggaacaataggatttttagagaggtagagaggttcacaatgcgttcttgtgggctttggtggaaaggcctttttctgtaattatgaccttagtttgactttgttggattggagtccctttgtgtagattttggggtctccctttttatgttgggctgttcttttttctgtccttgtacattctttcatttctcagctcggtttcataccgaaccaaatatatagatgtatgcgtgtatgaatgggtgcttgtgtaactgactgcattaaataaaaaaatgaagcttgtggaagtgtattttgtgatgggctagcttatactgaaaacagggatattcacttctgcaatttatactgacgattgt

SEQ ID NO: 62280 - DNA, 459 bp, Cucumis sativus
  Intron number 2 from transcript Cucsa.029920.20 (locus Cuc sa.029920) derived from phytozome v7.0 (chr-ID scaffold003 99; pos 169012 to 169470 reverse strand)
ctacttcagatcaacgaagagcagcagaaatccaggtatgatatttgttcttctgttctattttgatatatgaaactaaaggtgtattgtcttgcatatatacctaatgggagttagaactagatgtgagaaattattttggaggttgttcagtgcagaaactgcagctagatttcgaaaacggataggaggtgtttgactcatggattaggtttgtgttaactgaggcttaggttgagaagtcaatcctatacttggtgtgtgactcttcttgtgtgtttgttgaccgtatggactacataatcccaatcatagaagaatgtccatacagtttgatataggttaccaaaacctggatttttacgacttattcctttgtatagtcctaacttagattatgctaactcagatctctcgactccaggtctcataaacccaatttcgtcgagatcgtgtgcg

SEQ ID NO: 62281 - DNA, 684 bp, Cucumis sativus
  Intron number 6 from transcript Cucsa.122370.10 (locus Cuc sa.122370) derived from phytozome v7.0 (chr-ID scaffold009 99; pos 625786 to 626469)
gttatcaaccgaaagtatcagaaggtattttttaggcatatagttcatatagttttcgttactttcttttcccttttcttttaaagttttgtaacctttaatgcataatacatatatatcaaatgggctatatgcgagtttcatttgtctcttctcaagccctataagtattgcatataatatggaagaatgagtgtatcaaaatgtttgtgttaggtaatcggtaacatgctattttgcagacaaggcatatttctaattgatgcacgaccatatggcatgttagttgcattcattttccttactttcttactagttgctagaagcctcattgagatgatgatgtaattataattttttttaaagaaaatgacaaaatatttcgcttcattaaaggatgtaattcaagctaaaaaggtaggtctctatctgttgccattatgtggtccaatctgctttctaaatatgaatttatgtatggtcaccattatcgaaatatcagacatattttctgtgtatttggacatgtagtttccatttaaggcagacctgcaattttcaatatgacaggctttctttctacttcatttaatcgttaacaatgccctggccttgttactaatgaacagtggtttctgtttttttgcagagagtaggcgagcctcaattgacatttttgtaaaa

SEQ ID NO: 62282 - DNA, 252 bp, Cucumis sativus
  Intron number 1 from transcript Cucsa.050830.2 (locus Cucs a.050830) derived from phytozome v7.0 (chr-ID scaffold0055 7; pos 54871 to 55122)
tgattacgacagcaaaatattatccaaaaaagtgggtgcgtttttaaatattttttataaaaatcaatgatcagatttaataattttggttttggcgtttcgatgcgaactttccaactcccaccatctccacgttctctactatgctatttatttaatcttttgtttttcttttctttttaatatattctctgataatctgatcgtcttttactaggtaaagaatagataagactggtggttgagtttttg

SEQ ID NO: 62283 - DNA, 773 bp, Cucumis sativus
  Intron number 2 from transcript Cucsa.050830.2 (locus Cucs a.050830) derived from phytozome v7.0 (chr-ID scaffold0055 7; pos 55110 to 55882)
ggttgagtttttgccttcttctccaatcgttacaggtaaacacgtctaaattttctttcccttctcaggatttttcttttttctcctctttttgttgaacccatttctttattttccatttctgttccaagttagattttttaattattgttgtttctgatcgttttggggtttttgattctgttccattttaaaattttaaacaaaaaaaaagaaaaaaacttagcatctcgatcgggaattaattcctctttttccttgagttttcatgaatctgcgggatggttcggtttctgtattcttcaacttttacatgggatcattactattattctattgtcatgcagttttatgaactgggtttatttatttatttattttttttcattttcccttctcgatttgtttgatttctgaggtatttcagtggaaattgctgctgttactctggtgtaacttccattctttgttttcttttttgagtttgtgtacacaactagtgaagcgggggctggatatgctgtttatggtttcagaaatttgttgttaacagtacaatattagtgagctagtgttgtgtaattttttgttgttctaatccttgtctaagagaaaaggatggataatagaatgagattttggtgttggggagtatgaagtgtaaagaaaaagattgtttctgctgagagttttagtttcagttgcaacaagttaatcacttgtgttcatatcttgcagattgttggggacaattctctctgtagcagtactgt

SEQ ID NO: 62284 - DNA, 932 bp, Cucumis sativus
  Intron number 3 from transcript Cucsa.050830.2 (locus Cucs a.050830) derived from phytozome v7.0 (chr-ID scaffold0055 7; pos 56138 to 57069)
gttctgaacctaccaattctagaagaatcatctgggtcagttattcctgcccctagctcaaaccttcctctacataagacttatttcctgttttgcttatctctgaagttgccttccattttatctagctactcttattgtatgtgccactacaagttatgatctgcttgtcattagttcttttcgtgttagtttctgaaactggataatcaaagctacaacagaaattactcggaggatacactacttccttttgttatggtttaactttcctttatttttttacaaagctttcgatcttcgtctgagaaacctcccaagtgtattgttgtctaaagcatcaaaacaaattagtctatatcattataacttcagtgtctctacaatcgtaagtgcatagagaagaaaatgaacagccacttaaccatcgagtgatatagcctagtttagtattgggggctctgttgtagatcatgattcacttttcttatgaaatctggttaggtattttgcacaggaggactattataaggtaaaaaaccatgttaatgtttcagtcagttgagaagacaaatagaacatacacacatgacacaacaaggaaaatactaggaaaaaagttggttttatataaaatcatataaatggaatcgacgtcttaaacaatttagatatgtgtatcataattctgaaatacagatcatcaagttcaggaagcatttagctgtcttcatttgccatttcctcacttgactgtgattattgagaagagaaacagcaaaccttaaagcagaacttgtgcaagtttgggccttgcatcatgttaataacttaatattgttatcctcgttactgttctgagtgatgactcagaaattgttactgttcttccttcagcttcacttgggagtgaatagtggtgcttcaagatt

SEQ ID NO: 62285 - DNA, 909 bp, Cucumis sativus
  Intron number 1 from transcript Cucsa.074590.2 (locus Cucs a.074590) derived from phytozome v7.0 (chr-ID scaffold0078 5; pos 413548 to 414456)
ccaagttgcttaccatcgaccaagattattggcatgtgagtcattcttttcaattccttcgattcagtagttttctgtgtttactagggaagtgaaattgtatggtctggaattgctttgaataaggttgtgaagctaagttgaatatactgtcactcttagactcataaatgaaaggaataaactatgctactgtgtagttcaatcttagctatgggaagaagaaacagctagaactggaatttttctgtttgcatgttgttaatcgaaagttatgcggtgattggtgatacgaatcatatgatatctatatcaagtttgctctactaaaagacaggaataaattggttaaacgcttgtaaacttaaaattagcgtgaaacttcactgcttcagcattttggaaaactgtgaagagtttcatgctttgggaaaaagtaaaaaaaaaaaacaccttcaattgttgtaggaaagcagttgtagtgtaactacgtttctttttttctttttaaattaaaaagaaaaacaaattcttgggtcagttgccaagaattacttgcaagacgtagtatcaagtaccaaagttattaaataacacgaagttccatcataaaatcaattgacattgaaaagagcaacctagatagaaaaagagttccccttgatttttctaacgtgggattctcaacaaaagtaattacttattgaatgcactctacgttagtcttttgctaaaagcacttattttgaaaggattccctaacacaacctattctgggaatcaataagtttagcacttagacaacggtctaaagaagtgtgctgagtaatcttatagtaactcacagttcaagcatgttatcgaaatctatgcagcattctaatatttcttttccttttaactgcaggg

SEQ ID NO: 62286 - DNA, 828 bp, Cucumis sativus
  Intron number 2 from transcript Cucsa.047260.1 (locus Cucs a.047260) derived from phytozome v7.0 (chr-ID scaffold0054 2; pos 2354005 to 2354832)
tttttgtaaacattttgatttcaaaagctctacccgtaagttcttattctcctgctgaatttttagtttcccaaaaaaaatgctatattcacattcaatgcagtatcttcttaaggatataaattttgactttgaagtagcagttttgtttgttgatttgctaattcaatcatgaattacattcagaatgatgaattggttctactatctctctataaaatcaaattgatatatgcttcaaccagggtgagagtttctgcgggccagcttatgtaattttagactaagattacctgatgatcatatttggattttacatattttgtgttaaagatccctcaatacttggttaattaatgggtcaaggaagattcgttaaacttgttgtgattattcatcttgatggtgatagtaatggcaattatctgcaaaatgatatactcatatacgtgagcagactaagaagttgagctaaatttcttctttaagatcaaatgataatttaattggattagttatatgaaggtaaataaatgcaagcgtgttttctattcaattggtgaagtttagcatcttttgcccttctttgtttcgaatttctttacttagagatgaacagagaatcccttgtatgagatataggctgctactcctgtattgcaactttctttaaattggtgaggtttgagttttaaaatagatcaagttctctgaaaggttcggctggagtagaatagaacaaaaagtatgcttgtttagcaacaaggtaatgaggatgcttctcgaatctcaactaataacatgaatgacatttctgtatcagcttac

SEQ ID NO: 62287 - DNA, 433 bp, Cucumis sativus
  Intron number 3 from transcript Cucsa.062930.1 (locus Cucs a.062930) derived from phytozome v7.0 (chr-ID scaffold0066 3; pos 6779 to 7211 reverse strand)
agaacctctcacgccctcgccaagacctcgaaaaggtcagtggctctgtcgttatttcacttttattttcggccattgcttaattctttctcttttataaccacgagagaatcgatcttcttacgtccttttgggaaccaaaaaatttgaaaatgggatatgtcgattttgtttggcaagttgcgtttgattcaagtaatcttactctctcgtgtaattcctaatttactttcctggtttttaaataatataagataaggagatattattcattcactttttcggaagccccttgcatactttcctttatcccgtttcagaaattgagaacaaacactttcatgattgaagaataaacttttaaaccatgttacgtttatttatttattttaaaaaataagttggttttcttgccctttcttgttaaacagga

SEQ ID NO: 62288 - DNA, 807 bp, Cucumis sativus
  Intron number 2 from transcript Cucsa.094610.1 (locus Cucs a.094610) derived from phytozome v7.0 (chr-ID scaffold0091 9; pos 773844 to 774650)
gagggattggctatcggaggctttgcatccagagagtaagacattgcttcccttgttttgtttgttttctgtttgttctttgaagaaatatgtttgagtgactaagttttgttccagaagatagattattcactgtttatctttattctaatatttgatattaaagtgaatttggggaagttttgaaatttgattgaaatcttctcaataacccactatataaaagaagatttaacatgtattttacttttaactaagataagtattttagttggatttagttatcttagtttttgatactgaaattcatccatgaagagtctgccattatgtaaatgagggttaaaatatttgtcttagttcttgtatttttaactaagatactcggtgattttatggggagtatctttagtgtttttggttatcattgggtacaaaattattaactggtgttggtatcctgaccataaaaaactccaattggtttcagctttcaaattctagaaagctcatagggatgaaagaagttaataaaactggaggataaaggaggtgataaaatctgctgaaggagaaaaagtgaagcagttcgctctttataaattaattccaagtgggagaaatttaataaatgactgatcttcctttcattggtctgattgcgtagaaggaaaatagttttcattctcatatactgtatattaagtctgtcctcttctagaatgggaattattgctctgtgctcaagaaaaattatgatccattgtttcaggagatctgggataagagcattttattctgcagcga

SEQ ID NO: 62289 - DNA, 558 bp, Cucumis sativus
  Intron number 1 from transcript Cucsa.112680.1 (locus Cucs a.112680) derived from phytozome v7.0 (chr-ID scaffold0095 3; pos 1141417 to 1141974)
actttaatacgcacgcttttaagatcttgccacgtgtaaggaaagtgggtttcgctttcgtctctcccttcatcagttcatcctcttcgtcttcttctctttgttctacagcctccttttcagaaccctaaaccccaactctgtttcatttaacctaatgctcatttcggcaaccgtctactggagcttcgaagtacctagcttttttcttcttatgaaagttaattggcgcaatcatatcaactttgatatttatgaatcattaatatcggaggaagatgaaaacagagagataatggcaccaagatctcctttcctagtttgcaaagtttttctgtaactaatggactttgctggagtctattcctgaagggtaacaatatttaagagctttgtgttaatatatcaagtcctttattgagaatgaatcgagctttgcagccaaaacatgtagctgctgtaataagataccagaatgatcccctaaacgcactcaaaatgttcaaccaagtgaaaactgaagatggtttcaagcacacattggaaacgtacaagtgc

SEQ ID NO: 62290 - DNA, 887 bp, Cucumis sativus
  Intron number 2 from transcript Cucsa.092210.1 (locus Cucs a.092210) derived from phytozome v7.0 (chr-ID scaffold0090 5; pos 149613 to 150499 reverse strand)
tgtgaagaagcttcctgataaggttatcgtacaccgtaagtgcttactattccatccattttatatactctctttgataggttaccactttccatttatttttctagttcgaaggaggctgtatgcattttatgctaagagttctgttatttttagtgtatttacaataatgtaatgtcaaaagcttttgacaaaaggggggttacgtttgggtcaataccaagattaatcgcattacgcaaacactattttcggctgggagatagtgatgctttaccaaataatcttcgtaacagaagaattattctaaattttttatttttttcaaaaacaatcttgaatgtgaaacaaaatcatatcacaggattggatgaagctagcttacctctgggtggtaaatctggatccaatttttttgtttcaatgttgcttaacctatgggcgccatgttgagtaatagtgagtgatggggaaggtgaatcactgtcagtagggcgactggtttatctgttaactataagtgcaattttagacaataaaattgaacacagcccttcagtcaaaaaatgaagactgaagaactaaagggatatctcttggattgttttgtttaaaattatgatttagttagtactttctgtctctctgttttttttttgtttttttgttttttttgtttttttttattaaagatgtttgtaactaatccaaattctaatccacattcatagtttaaccttttacaatgttgaacttattggcaatgcattgtgtgggaactcctctatgtcaacccttaatgcttacaggtcatattaattttttggcttctaaaattatcttcttgagcaggcagtgagtgtaattcttcaagatcaacatttgat

SEQ ID NO: 62291 - DNA, 412 bp, Cucumis sativus
  Intron number 2 from transcript Cucsa.019360.10 (locus Cuc sa.019360) derived from phytozome v7.0 (chr-ID scaffold002 76; pos 229816 to 230227)
tggagttgtggcatctgccattgacactcattctggtgagaaagttgctatcaagaagataaataatgtgtttgagcatgtttctgatgccacgcggattctaagagaaattaaacttcttcggtttcttcgacatcctgatattgtcgatataaaacatataatgctccctccatcccgaagggagttcaaagatttatacattgtttttgagttgatggagtgtgatcttcatcatgtactaaagactaatgatgatctcactcctcagcatcatcaatttttcttatatcaacttcttagagcattgaagtatatacattcaggttgggcctctcatttttgtatggctttggtgaaatatttttctacgcacttatcgcctctgatttcttttgggggttttcagctc

SEQ ID NO: 62292 - DNA, 931 bp, Cucumis sativus
  Intron number 1 from transcript Cucsa.058440.3 (locus Cucs a.058440) derived from phytozome v7.0 (chr-ID scaffold0061 4; pos 601702 to 602632 reverse strand)
catcaccttgtttcaccctctggctgtttttcgaggtatttgattcaactaattgagttgggaatttcaatttttttcaggttcttgtattcttatcttcgaaggatgtaaatcgaagtccgttaagctggggcatttcgttttctgttgacctttcgatgtgcttcttcgtatctatttcttgatttcacgtgttttttctgttggactaaagacaattgaagtttttagaagcatgtatatagattcaatactaaaatttagtgctcgggaattggaggaaactgagcaatacttcgactttatccgcattagtatgaagggtgggggatatggacattaaagttgactctcaccttatagccaacactcagattacattattaactaccatggctatgggtaatgaagttttttagaatctgagagtaggtgaacatggattgagagatgtttactcctctttccattgagagtgttcttcacttttttcttagtatagctctttttaaaaaaagctcccatgaaagatgcggcttcttccggctgtggacacattgtctacaaagattgtagtaacaattttttttaaaaattaaacatggatatgtgagtcagtttctacttagtaaactatgatcatgcatctggatagcgatactcgtattttgtttccatcaacagatctacagtcttgtagtacattcagaacttgattcattaaatctaatgaacttttaatatacgctagccttctaggtaatatctaaattcaagttccctgatgtaaaacagtggaacagtaagatgtatatcacaatgtaacttttttctgcttcctcaaaaatttgatacccacagaacctgttccttgtgaattctcagggatctttcgtaaagcaatatttatgttgaatgttatattttgccc

SEQ ID NO: 62293 - DNA, 634 bp, Cucumis sativus
  Intron number 2 from transcript Cucsa.037200.1 (locus Cucs a.037200) derived from phytozome v7.0 (chr-ID scaffold0047 6; pos 172930 to 173563 reverse strand)
ttaaaattttctgctgcttcaaattcttctccagggtaactttttctttcaattctactctgaggtttctttttactataattttgttttggtgttcatattcaacattgctttagaatattctggtatgattgctagtttaacatttcttctgctctgttattggtaggagtaacaatttgctttaagaacagattcctgtatgttaacgcttttctttttatttttaaattttctctttttgtcctgtatgtataaatactacttccatccataagtttcttatttctgatgtagaatgttttcataatattgaaaactaagcttgtttccttttcggaatttggctaaatgtttcctcaagaaatgtgaaaacggtagtaaagaaattagaagaaacaagcacaattttcgaacagtaaaacaaaaaacgtaaaagtacaaaagtgttatccaagggggccttactcatttcttttccagttggcctcttcactatttgttttcacctatattgccatttatagggttcctctttttgaatatttagttaggagttatagggttcctctttttggtattgactattgagtactattatacagaggattcttttctgttatgtttcagatcg

SEQ ID NO: 62294 - DNA, 420 bp, Cucumis sativus
  Intron number 1 from transcript Cucsa.094260.1 (locus Cucs a.094260) derived from phytozome v7.0 (chr-ID scaffold0091 9; pos 463676 to 464095)
aagatcaagaacctgtagttacttggaaatctagagtttttgtaggaggttttttttctttttctttttctttttcttgatcatgtccaccaaccaaaacccactgaagagaaatcaatcatcatcatcatgaaacactctctgctcaaatcaccacttgtaaaaagcacttctacttcaattcatcatcgtcgtcaacaacaacaaaaccttcatttccttatattttcttctcttcttcttcctttcttcgtctcgcccaaatcaagaattcagcaactgaaatgaaagtcatgaacccagattattctagtttcctcttgtttgttgttgtagttcttttgattatcaacacttttcttcttgaggttgttgtttctgtaagtactccaacagctttaccacttcaacttctgtctc

SEQ ID NO: 62295 - DNA, 558 bp, Cucumis sativus
  Intron number 4 from transcript Cucsa.129390.3 (locus Cucs a.129390) derived from phytozome v7.0 (chr-ID scaffold0102 8; pos 353052 to 353609 reverse strand)
gtattgttgctgttgtaagtaagagatctctgcgtttttactttttaactccaagatggataaatcaggtcaagctatattattatggagcaattaccaattagtcaatcatatgtattgtttgttttcaaccctccatttctcctataaagacggcattgccccagaagttttttgtcttatttaataagtgattccccaataaaaagaatttgcatcttttcaattccaacgtcgaattcgagcaattagctatttttgggaacatgatactgctcatatttctatttttagaggcatatagtattagataatgtaaaacctagagcttgtctgttggtgctccaacttggtcgtcataacattgtggctaaatacatgatgtttgattctgtaaagatactgcagcgattcttcttattttgttttaactttttatatttcagtcacctaaataactgatatttcctctgaaagattttgcaagttcctgctcttcctctttctctgtttgtgtctctatcttatttttttgctgtatttgtccccagggtggag

SEQ ID NO: 62296 - DNA, 924 bp, Cucumis sativus
  Intron number 2 from transcript Cucsa.007360.2 (locus Cucs a.007360) derived from phytozome v7.0 (chr-ID scaffold0008 9; pos 287086 to 288009 reverse strand)
cctatttggatactgttcttcagaatcatttggtaaacttgaatcagcacatggccttcttgattaggattatttattgcttcattagtttttttgcttacataatatcatctcaagccttttgcatgaacttacttgaatcattttctacaaaaaagagaaaagcgatcaataagcactggtgtttaatttttgtaatgcatcttctttggacttgcttatcccttttttttgtaagagtgatctttgtcaggttcgaatcctggccattcagcctatatttatataatatgtatatatataataaaaaaatgcctttaatttcagcattaccatagtccaagttatgatttttaaatttgatgcaactgtacaactaaataaatgcctttcatcgttttttaaaaatgaatcaactacatatgtttcttcagctgctttgaattataattttgttcattcttataagttattaaatcaccaattcactcaaaagcttaagatggtggttgacggcaaatttaattatatatcaccaacactcttcctcacttgtgtgcttgaaatatttgaaaggcccaataaaatcaatcaattttacctcacttgtgggcttgaaatatttgaaagacccaacaagtggaaatcaactttaattggggaagaaaacgacaatgcaggggctaattcacccaaaagcttaagctggtggttgaaggcaaatttaattatatatcaccaacataagtttgtcttgatgacattgaaaatagttcacttgtgacactttcaaaagcttctttttctcccctgatgtcaccttttgttctatatagtgttctgatgcatctgaatctgaatttaaaatttataatatacgtaattccaggatagctgtatcaaaacgattttagagggtatttc

SEQ ID NO: 62297 - DNA, 922 bp, Cucumis sativus
  Intron number 3 from transcript Cucsa.042390.4 (locus Cucs a.042390) derived from phytozome v7.0 (chr-ID scaffold0054 0; pos 804706 to 805627)
tggctcgtgaacttgaagccggtgatacgacctcggtaaaggttattttgtttagtacttcaactgtttttgtatctgtcatcgttaaatgtagcctaagttccatctcaaaaccaatactagttttgttgttttggctttaaggctctaatactatatgaggttttgagtgaggtatcttgattttctcaacatgggattctcagcatgtttcttaaacatgctgcctcttttgtggaattctcaacatgtctgttaaagatgatgtctcttttgagatcactttgatgtcaaattttggatagaggtaagagaaaagatttgcacaccgatgtggtacttgctgcagacgctctgatgcctaagtcaaagagtgtggatgttagagaaagtttgagtgtcgaattcaagttaccccgtaatgatgtgtttatagagaaattagttgacctatggtgttctctataattttcgagttaccctaggataattagatgaccaagcagttgagagggcatattgtattcatgtttgctagggttggccaccacctagtgtcttccttggactatatatttgagcttatagtggtactttgggttgaggcatgttgggcatttgccaagggtctacttcgatttttggtcgtcactttcagcttgtataaggatttttgtagcctctaaatatcatttatatcctttagtcgaaaatcacacctaacaaccatcattgattgaatctcaatttatttttgctcttgaaactggatactcgtttgagatatcttgataccatattagaaaaatttatctatctctaggagcaacctacttatcttacaaagcgtgtgagctacttgattttttatccaatgttcagattcttaaaacaacctatttttcaggtctcgtctgaaggt

SEQ ID NO: 62298 - DNA, 1030 bp, Cucumis sativus
  Intron number 1 from transcript Cucsa.041530.2 (locus Cucs a.041530) derived from phytozome v7.0 (chr-ID scaffold0054 0; pos 83814 to 84843 reverse strand)
gcataaactttagtgtgtcaaatcagcaagatatagtaagtattttaattttgatacataaatctcatatactactttaggaaataaataattttcaagaataatcacttattatatgatgtatattgataaagttcagggccagggtttgtttttgtttgtaatgggttcttgcgttgggtaagaccttataatttggaataacctggatgtctgtgtaattaacatggtattgaatattgattaccttgacctcttccgctttgtgtagtttgcctcctttttgtgagctttttcttctagatgtctgtgtattctttcatttttcctcgataaaatttcaattactcattcaaaaagaagaaccacttcttgtgtcatgaaggactggggtttggagcttttcaacaaagtaacaatgccttactgttgaaatgactttggaaattcactcaagaagaaggatctctagggaagaacgttttttctagcatatatgggaaaaaccaactcttgcgtgcatggtcagtgtgttatataggtagaaaagatacccaataacatctctcctcaggtttatattttgttggtgtcacatttgctcagatatgaaagcaaacttctatttaattccaacatttttggttgggaagcaatgtcgtagcaagatattgacccacatagggtctcctcaagcacaaccaacactctaaaccataagattaacgatgaaaaacaaaatttagttgttggaaggtgaacacttgtcttgttcttctttttccccttcatttatcttaatttttattgtattaatatttgtaaggaaagtaattttttatttatttttgtttcatatataaatagtattgttgttggatagaaaactgaaggtgacttaaacttgtgagtttatatgtgcctttaattttgtatattgtcgtgttgctatacaggatttggtttttaatattctgatgtgaagaatttttattaatgtaacaggagaatatagcggtaataacagttg

SEQ ID NO: 62299 - DNA, 769 bp, Cucumis sativus
  Intron number 1 from transcript Cucsa.106510.1 (locus Cucs a.106510) derived from phytozome v7.0 (chr-ID scaffold0093 0; pos 97473 to 98241)
aaccaacaacacccgccttcacatccttacttccggtatgtttcatttaacttcaaccttcaaatatatatccataaatatatataaatttaagctttaatttcatcccattatttgtttaatgtctaaatttaataatcgaactaaaaaatttataaaccattgcaaaattttctcattcgatagtgtgtatccatgataaaatacaaaattttactctattttaaatatatttttggtcattttattttttttaagactacttttcaatttatgctttaaaatttatttaattttaatcataagttttcaataaatctctagtatcattacgtgtttctcacgtgttaatattattattattatttaaaaaattagataaaaaaataaatttcaaacactaaatttgagatttattaaaattctgtagattaaaattagataattaactgtataaaaattaaaatggaacaaatttaaataattgaaagtatataattcaagataactagtaaatagtatgatttaataataagaaaaagaaaaacaaaggttagccatcaaatttaattaacttatagattacaataatttattgatacgatcgtgtttaaattttaaatgataagaatgtaaatagaaaaaaattcttaattattgtgcgtgtgtatataaggaagcatagacacattgatcagctaattcaaatcatattgtttttaacatttggctctatcagcgccaccacaatataatacccaattcagca

SEQ ID NO: 62300 - DNA, 880 bp, Cucumis sativus
  Intron number 2 from transcript Cucsa.021430.1 (locus Cucs a.021430) derived from phytozome v7.0 (chr-ID scaffold0030 7; pos 56141 to 57020)
cttttgatactgaattgcttcctgaggttgggtctgtttcattgctttactctttctctttctaatattgaagtcccgtagtatacggatgactttgtgccatttgttaatatcgatgtgttttgatggcttgttggccttttagatcgtggggtatttccagacagttgaaattttctcttctctttctctttatgtattggagaagagatacatccctttcttcttactgcagattttcagtactgagagatggaagtctaagagcatgcttttatcagtgtttaatcactttctttttttttacaattgtgcgttgcttatagccctgtaattgaataaagaaggcatgggtgctcgcttaatcttctaaaatttgattccatttcaagtcaatttcatcatatagattagggatatgaactgggaattgtggttcctgcttgatttctcttcgttcttgttaagtttgtacgaattaaaacttggattaattcaaatagaatagagtgaatggatgcttttgattgaatcagatttgatcacatggtatgtatgattccaaaatctaataaaataatccttcatttctcaagttaataattgatgcactctcagccccctacgtccaaaatcctttgcgtttataacatgatgaaattcaattttcttttattattaatgtgattgctattatcaatatttgcatcagtattataatagattcagaatcatggtccggaatggcatccagagggggagatctatcctttaaattttcttatcttttgattcaacaaattatatatcttttttacagcttcatgtttactccaccatttacttcatttttatcagaccacctatcgcaaaagtctgg

SEQ ID NO: 62301 - DNA, 1011 bp, Cucumis sativus
  Intron number 1 from transcript Cucsa.085670.2 (locus Cucs a.085670) derived from phytozome v7.0 (chr-ID scaffold0087 0; pos 123490 to 124500)
cctcacttttctcgttcgttttgaatccttttctggtgggttctttttcttttcttacattttgctttcttacattctgttcttagttttttttatttggacttcattgtttacttgatccggtaactcggttttggttactttttttaatttagctttcttgttttgataatcttgatccttcttcttttttgtttttttctaacccttgcacggtttgttgttatctgattaccgtttcgacgatcgtggtttgttgggttcctgatcatgttcttgggttttgattttgaagctatttttttcttttgcatgtgtttgtgcttagtatgctatttgaccgtacatccagggttctttcttatctctctgttctgcaatttggtattgttcataattttcatttctcctgggttccctggattttgttggattgattacttgttaggtgggcgtaggacgtaggagtgcaatgacacacgatggttctgccaaacaattttatcgtcaaaagttttgtcgttaattttgtgtagaagacttgattcgattgatctggtctactttttgtggatatgttttgtctttttattctttaacctcaatccagaacaatttggatgttccatcttctgaaacttgattttgaaacgttgtttttattgtaaaaagtccataattttgggctcgtttgattaggatttttcatttaatcatttgtttctttgttttttatgttaaaagttgttaggacaaggcttgtccaactttatttgtagcaggttttggtgatacgttttaatttattttacatcttgaaagctctaggtaggaatccattgagtctgatcttatcgttttctttcccgccttatgagttttgacttttaagtgacagaaaatcccattgttctatggttttgtttcctgtcttatattcttattactaatcatcaatggactgttgagtttcatgttttctcaacctcactttgtccttgtaggtcacca

SEQ ID NO: 62302 - DNA, 750 bp, Cucumis sativus
  Intron number 1 from transcript Cucsa.085990.2 (locus Cucs a.085990) derived from phytozome v7.0 (chr-ID scaffold0087 0; pos 301853 to 302602)
ggtgccgctaattttctttttcttattataccttcttgtttattagtttgattggtacttttttttatttatttatttatatatatatataagacgtttgattgatagtttgagaagttacactgctgtttagctgtgtattaatagtataaatgtgacaaaacgacttacatgtttaaattgtttgaatgtttatttagttgtttgtgggaaatttcatagttggttattctaagatttctggtttatttaaatcgatgaattgggttagtatcttgtttttcttgtggtaaaagttgcagaataaaagctaaagtggaaggaagaagaaaaaagaaagtttgtattatatttggactacaaacttacaagcactgaaaatttgcattaactgacttacttgtttgtaggtccaatttagtttgccttctgctgtcagataaaaggggaataaaggggtttcctagaaccatcaattcaccacaacccaaaagtttaagttgatgagttggaatagatattaattgaaaggaaatgacactataagtttaaacgcagaactgacctcctaccttgatagtatgttaaatcaaatcaccattcaattcagaagctcaagttgaatggtgattggatttttttcattctcccaaccccttgtattggcttcccattttatgattcttttgggattgggcttgctgagactgaaattaatttcaggtatcctcaatatcatcgtttgcttcc

SEQ ID NO: 62303 - DNA, 918 bp, Cucumis sativus
  Intron number 1 from transcript Cucsa.083990.1 (locus Cucs a.083990) derived from phytozome v7.0 (chr-ID scaffold0085 8; pos 667639 to 668556 reverse strand)
taggatttatcaagaatagagacaatttacaaaaggtgacgaattacattgaacaaacttcaaagtatattaagaaccaacaataaaaatggtacgttgacttcagtgttattctaattcaaccatatttttcaatattctatttcataacttctttcttaattttctattaagtacgaatttatagaaatacattggtaactaattttcacaaatgatactaaaaaaagtgtaccattcacaaatagtattcataaaattaatccattgatagaaaatggttgtattttcaaatactgtgaaaaaagaaattaggttgtttctaacaaatactcaaaattaaattgagctaatagaacttaagagatctatcttggacctcaaaaataaatatatatttgtttgcaaagtgaatgaaaagtacttgcatgtcccctttataaaagaaacaaatcttaatttgttgataaggttgattttaagtatatttttaaatttaataaaaatgaactaaaaaaatttcaaattataacacaacatactactaccgttgtcttttttgtatcattatattatataatttttcttagatcttgtttcaaacaataaatcaaaagagtgataaatggataacattagtgaattagagataattataatatctagttaagatattctaacttatcataatcttaataaataaataaaaaaggaagtaaacagaattagattcctaacaatagtgattactattgactgagttgaatttaattgctaaaggaatagaagaataaattggagagcatattactataaatttgaaacaattttttttattggaaagaagcacacaaattaaagcattcccttattaagtagtaataattttgaaagggtaatttagaaagatacatagat

SEQ ID NO: 62304 - DNA, 814 bp, Cucumis sativus
  Intron number 1 from transcript Cucsa.026870.1 (locus Cucs a.026870) derived from phytozome v7.0 (chr-ID scaffold0037 0; pos 23154 to 23967)
taattgacatttcttcagtactcccacttccacaggtgaggtcagtttcttaggacttgacagtacgtctactttactgttaatttgttagcagcctttgttaagggatcattcattcatgtacctgtttgattcaatcttctccccctctctttcttcaaatgggttcaactaattgttagttcctagctttcccatgccaatttcaataattcaacatcaattgattactacttctctcgaaatttccaccttagctactgggagaaaattattggttatttccttgttatatgtgcatggcagtcagtaatatgtattctcttacgcttaatcttgccatgaacaaatttttttcagtaggaattaaaatgtgatggctagcctaaaactaatttctcgggtaattgaatttgagaactgcatagaaattcaattttcttttatatttagttctgtggttctacttttttcaaggtttccagtgaaatgatgtgctccttatgcatgcaaaatccccattttctgctagcttactctggaaatatttctatggtattcgtcttcagatttatacattacaataataacacaaaccatatttgtaattactgtgggatgatctcaacttgagtgaagcatacatttatagtgctggaatgtgagcttgataccatcaactgtatgaaggattgatttaactcttgttgaggttgaaaaatatgtcaatcaacatttatttctcaaattcatttgattttgatgcgtgaactgtcctgcttttctataatttgcccaggtggtgattctgata

SEQ ID NO: 62305 - DNA, 611 bp, Cucumis sativus
  Intron number 2 from transcript Cucsa.032390.2 (locus Cucs a.032390) derived from phytozome v7.0 (chr-ID scaffold0042 9; pos 1695168 to 1695778)
gcaaagtatgtaatccttcgtgactcccatatcttatcctaatcaaaatttaatgtttaaaactaaggcatgtttggaaactatgtgttttttaaaatttagttataagcaccccttctacaagtgttttcagaaacaaaactaaattttgaatactaaaataataaatttttcaaaaacttatttttgtcttttgaaattaactaagaaattaaatatcaaatatcagaaacatgacatgattaagaaattttgacaaaacaaacacaattttcaaaatccaaatggttatcaacaatgacggatccagaaattttattggtagatttaaaaactaatcttgaaaaacgttgtaaaaagtggggattgaacttggttctagagggggctgagagacaattttaccagtaagctaacatttagaattaaaattacaatagtttttttgtattacgagcataaagttgaggggggagccctcctggggcctatgctaaattcgttgatggttaccaaattggtctgaacttgaattgaaagcaactcagaagaacatcatcttcatttctgtgtcaggaagcaggttcgtgggtttgcgaaatacttttcat

SEQ ID NO: 62306 - DNA, 621 bp, Cucumis sativus
  Intron number 4 from transcript Cucsa.077190.1 (locus Cucs a.077190) derived from phytozome v7.0 (chr-ID scaffold0079 1; pos 331290 to 331910)
ataagttgaaggcaagtatgccgtatcgtgtttacatgtttcattaagtgcatatctttatacctcagatttgttttttagttttaacacttgcagagtggcagatcaaactatagatcttttgaatagtctcttatatactaagcaatgtttgcttgtagtatagggttgtcgcttataatatgcttgctacaacactttatttggtagccaatccttctctaaacattttttttatatctataagcaatctcttagattataaggaattctgttcctgcccaccacactctctttcgttttttgttaatttttttattctttttctaggtagaactctcaggaacatgaatctattttcttatttgtttctccctctacacatgtttgtctcttaaatttgaaaagattccaaaatctatgagaggctgtagttttagcttcccacaaaattagcacataacatcggactcttccatgctccaaaaaagggatgtttatttatgtagataatatgttcttgtgttcaagactcactttctctaaaccatctccacatccctgatatgcaacctatctattgtaggctgtccagaaagaaagagaagaaaaacttgcacg

SEQ ID NO: 62307 - DNA, 846 bp, Cucumis sativus
  Intron number 3 from transcript Cucsa.009200.5 (locus Cucs a.009200) derived from phytozome v7.0 (chr-ID scaffold0012 3; pos 158696 to 159541 reverse strand)
agagcctcgacaagcttctctttagtaagtgacacttagaaattatgtttcttttttcttccaatgaagaatgaattattatactctgtcatctatagaaatgtctgggcatcttcattttctgattgtatgttctcaagtaccttaagtttgtttgttcaagttgaactcttttttcttttcagagtgccattgaattttccatctaattgctctctggcttgaagttgtgcaaatagaaaagagttcccattcccgttagtttccattcatttgcagtgataattatacataattttgaactttccagtaaaaagttgatagtgctgtgtaatttcaagagattaatgcactacatctctttattattaatactgtttcatactatagtccatttattatgaccatttttcttcatgtgtttcaatctacaagtcaaaatgaagtcgtcctgtattattttaaaaatattcttttgtataaaaaaattattacaattgttatttatttttaatgagaaacaaaggcatcatggtaacagccttcgccttagggatgagagatccctaagcctaatggggataagcgttaattaattttttttgagaaaccacattaattattatttttttttttgaaaaaccacattaattacattgcagaggtcttaaaatcagtttcaacaaaatattcattccatcgatctagaacatgttcttctctttctatattattgtttttgttgttgatatgatgcttactcttcgaagaactataagtgataatagttacttttttgttgttatagcagaatccagcagacgaggagaacttgattggaagagg

SEQ ID NO: 62308 - DNA, 586 bp, Cucumis sativus
  Intron number 4 from transcript Cucsa.005500.3 (locus Cucs a.005500) derived from phytozome v7.0 (chr-ID scaffold0005 5; pos 586619 to 587204 reverse strand)
tttttggtatactttgaagttcttttgttcaatactttagtcggaatttaatttcatgtggtttttattgtgatggaccctttcccccacctactacagcttgatgagtagtactctagtactgccagaaaacatttttctttgggtgcaatatctgaccaatgggatggaataaataataattttccagggaatgaaattctaattagcatctctaatagcaatcaatcttcagtttactgtatcttgttaggaaactttgataggcacatcagccatttgttattgctctatcttgttaagaagatttaaggcttgcattttttttccaaagaattttttaagacaatatcttatattctattttaagccattttttgaaatcttagaggccaatttggagttgggctaatctttcaaaaacgttattaaactatgattgagaagatatggcaccaagtttttatttaaactcttgtcattaaaatccaccctaatttggtttgttgagctgtaactaaagtagatgttgcatcgttttgttgttttagttattagggcaagtgttccaaagttggacctagat

SEQ ID NO: 62309 - DNA, 692 bp, Cucumis sativus
  Intron number 1 from transcript Cucsa.134560.1 (locus Cucs a.134560) derived from phytozome v7.0 (chr-ID scaffold0104 3; pos 210205 to 210896 reverse strand)
aagggtatatgccttcaacctttttctcaatcccctccatttcttttctagggttacaatactattgtctccactttctcctttgcttcatccttagttcacatggttttaatctttgtttatgttcgaccacatcaaattatttgctacttattctatttttatttcttagttctaagttttgttacttaccttgtatttatatttttttaaatcaaacctaaaatttgaaaattaaaaaagtatcataatgtaaaaaaaaaaaaaaattggctaagaaacccaaaataaaattagggacatgaaaatcaatagagaaaatacaggttttgaaaataaaaaactaaagaataatcatagtgttgtgttcattttggtctgaatactttaaaaacaaaatgatcaaataatttattttgttttccattttatcttgttttttcttaaaacgtttagcatgagtcttggctaattaatattttatatggttgaaataaatttgtttagggtttttcattttaaatagaaatgtgtagtttagaatgcacctaaatttgattgaactaaaattaaaaccatgagtaccaaaaagatagtttaatttttaacttttgttttcttcattcagcaacgataataacaacaaaaaagaaaatatttgtcaggtacttattcgatccatacgacgtggc

SEQ ID NO: 62310 - DNA, 644 bp, Cucumis sativus
  Intron number 3 from transcript Cucsa.132820.1 (locus Cucs a.132820) derived from phytozome v7.0 (chr-ID scaffold0103 7; pos 674562 to 675205)
aaaggaccaaatattgccttacttccaaggtaaaatgtgctcattttctctttcatgtttatgtttggatgactaacacttcatcttaatcatttgtaatatactttattactctgattaccctataaacctatcttttcttcttaacatctattttcattctctcactaccttttttctctaaaatctgcacataccttttcttatggatcactttttactcatacattctctcactgactttttaattctcccatatgatacttttttagggtaaattacagaaagtaccccttaatttgtccatttgcttagttttttccacacataaatactcttttggtaatctctctcctcgtgtacaatttgccactaatctttcttttcacactccttttttgttacataattttcttttgtaatattttgtgttcgtcttgttgatttttttattatcttaattactcttctaatttaattgattttccaaattttaaactaatttttaagaaaaatgttgatcattagaaaataaagacagataaaaacaccatttgattcaagttgctaacctcttctgtgctctatttttttacttgaaaaattcagatccctcttggtgtgattttagccattcctccatt

SEQ ID NO: 62311 - DNA, 896 bp, Cucumis sativus
  Intron number 2 from transcript Cucsa.038510.1 (locus Cucs a.038510) derived from phytozome v7.0 (chr-ID scaffold0050 7; pos 52597 to 53492 reverse strand)
cttttatcaaatctcacggtggctgcttgtgatgctggtcttccgatcacaggagataaagttggaatgggacagggcttagctaaaacacgagaagcagaagctgaacttatggagttagaactcgagaaagatagaccatttgcacggtcacgtgtgtttaaaaacataactttttttttcttatttgaaatagtatttttaagactaaaaaattcaattcaaataaactctaattctaaatatgtagataatatgtatattatatctctcatcctaattaatttctttattattttagacccaggaggtgctgttaatcaaattccagaaagatataccattgctggagatgtaaggtatatatacaaattcttcatcatgattgatgccaaatgtggtttatttaaattctttaaggctcgtgtttggtatgtaaaagattggagaagcttataagggattagatttgtgaaagactggattagatttgtgaaactcctttcatggatagtttttcgtttccttgttatatcatatctgctattcaaatgggatggaattctatgacattttgtctctttctcatccccaccagtgtgatttctaagttgaatagtatatcaatgtcgtcaggtctatatatattccatatagaagtctgttttgtttgttttatgtattgagttgcttgttgagcttgcattatgtttgggttaagcttgcagggatggtgcgtaatagaacatgaaagaattattattattattattatgttaacaattatgtataatgtttattatttttttatgtatgttagattgcatgtgcttttttttttctcattatcttgtgccttgcacaaacattgactatttaaatctattataggtgga

SEQ ID NO: 62312 - DNA, 647 bp, Cucumis sativus
  Intron number 1 from transcript Cucsa.038510.1 (locus Cucs a.038510) derived from phytozome v7.0 (chr-ID scaffold0050 7; pos 53527 to 54173 reverse strand)
tcttacgggctaatcttaatcttcattccagcactgtttgagctctctagcgtccttcgagcttcgttctacaccgtttgagttgtgttcaaacgtcgttgaagtagagattttttttttcatttatggatgcttttcattccaattgacatcacattctcccgtcttggtggtaataatttcatttaccatctttgattcttgttctttgtgattttgtttcatttcatatttcgtctattgtttgtttgaattgttcttgtttattttttaactatttgattgaagttgattgatataaggtgctttgcattgaatttatagtttgagattagaagtaatgtttttagatcttgcaaaaaaagtgtttttaacgattttgaaatggctttctaacatctgctttaacattcaaattcaatgtagctatcacaagtttaagaggtatagtttgatttctcccccactcctttttaaaacatatattgtgaatatgaatatgaagaggagaacaaatcccaataaaatgtttgacaagtatttcgtaatcgttgctgctcatatttttgttcctactgtgaaaattggtagttgttgggagtttgaccgtaagtgttatgatttaatttaaaattccactttagact

SEQ ID NO: 62313 - DNA, 414 bp, Cucumis sativus
  Intron number 3 from transcript Cucsa.104540.3 (locus Cucs a.104540) derived from phytozome v7.0 (chr-ID scaffold0092 7; pos 3028474 to 3028887 reverse strand)
ctgtgcttgctttgactcaacatcgctgcaaaaaggtatctatattatgtcgtgttctttacatcttgaaaagtggataattttttattagcctagacctgattttcatgaattcagaacttcatacttgttgcccaagacggtcgtaagatataattataggaggaaagaaagcttatgaaattttcttttcttccacaaagacatttttatcattgtatgaaaatactttccattttagaattcatagttcatttaggggaagaatactttctagtactgattctgaggagaacaataacaagggacttaacctctatagctacatttaaagttttgattattattatgttttattattcagaaaagacgtttcaaatttagacaaacttatgctttcaggtgcctatcatt

SEQ ID NO: 62314 - DNA, 778 bp, Cucumis sativus
  Intron number 1 from transcript Cucsa.096840.1 (locus Cucs a.096840) derived from phytozome v7.0 (chr-ID scaffold0091 9; pos 2309858 to 2310635 reverse strand)
gattttgattactacaaacaatccaacggttctccttttttctccttttctcttttcttcgtccacttattttttgacttcttgtttatcttcatcactttttctttattctcatcatttaatttaatttaattttggttagtctatacacaaatttattaagttttaatttacaagtatagcgcaataataaatgaaagtaatggaattttttttaaacattatgtgtatgttgtaatgtaattaatttatttattatatataattcttaggaattttgacataaaaatacttaacattgtttttttaaaagtaatttaggtattttacttttgtgtacaattataacttagatggaaaacacattttaatccaatctaataaaaaaaagaactaaaaagatatataattttaattttatttaaaaatggttccgtataaataaattgagaatacaaataaaaaggcaaatatatagattatatatgctctcgttgtatatgcttaaacatatagattagtgaactaaaaatgctcaattaatatagaaatgtcaaacatcattaaccttattacttcaccactaattttctcttcttttttttttattcggattttcattattctaaaatcaaatccttgttatagattttattctcgagtaagtaagattatgttttatatggatagttggatattttagccaattgatctcttaatcatctcgttgtagcgaatatcagattcagagcgttgaagcttcatttgttcgtagaat

SEQ ID NO: 62315 - DNA, 1000 bp, Cucumis sativus
  Intron number 2 from transcript Cucsa.079220.1 (locus Cucs a.079220) derived from phytozome v7.0 (chr-ID scaffold0079 3; pos 1828467 to 1829466 reverse strand)
gagatttctacaacttggaattgactaatactaatgtgagtgcctcttctttcttcttcgtccttggatcttcctttctgcctttttgcttttctttggtcccaaacagtgtgcctttcgtttgattctttctactttttccctaaatctaaaaaaagaattaggatccttttttgttgaaccgagtcaaatgattttgttggttcctttcatttagtataatcaagttatttcaagagtttttgaatggatgattattgatgacccacttctgacaaaagtaaaagtatagtttttgagatgttcatgcgtcggcctaatgcaatctacgacaaatatggtcatcacaagcgggttgggttttgtacattaatcataaatgcccttctccacaagttaccccgtcaaaagaactttaattttagtatgggcaaaacctgcaaatgaacctgattcgactatcatatggatgtgttaataaacccttttgtccattgttatccaaacacaagacctccattttgattctacaatggattgaccctaaaatgttaaacttatgggttaacattttaacaccatgtttatgtgaaccttcaaagccaacataccaaagaaaaacttttgccctctctctctttccaaacaccagacagaagtttgcacatgtttaaagaaaagaaagtaatgatgatttagattaaagtagttgtattcttttaaggagattgaagactattaaattcacaatccgaaagcatgtttggtttaaatttcaagtaaggtctcccattaacttctttttaactctgttctttcttaatttgtaaatatggtgaccgtttggcaatttcctttcaacccatcaatctctttgctttcaagtttgttaggattttcaggtatattataaatacaataatttagtatcacttcaatgatttcttttctgtatcttgttgtagattgttgatcatacttgttacaacattggagaaga

SEQ ID NO: 62316 - DNA, 979 bp, Cucumis sativus
  Intron number 1 from transcript Cucsa.091530.1 (locus Cucs a.091530) derived from phytozome v7.0 (chr-ID scaffold0089 4; pos 2519539 to 2520517 reverse strand)
gccaacttagctggttgggatctcggaaccataaggtacatgttttttactgttattaaatgatttttttaaaaaaaacaaaatagtattctttcaataattaatgacaaaaatagtgtgggagcaaaaatatgagaaaaataggtagtgaaataaatggtagatgtggtttacaaccttatgaatgaaatcatcgtgaaaggaacttcactctttttgtttcaacctctcaactgccccagggtgcaggaactggtttttgtatctctttttgctttgtcttttggttttactttatactttttgtatgcactatttgtgtttatactttcctttgtatatatatgtggaggggcgttggattggggattctacttttttttccatcattttctacaaatgtaaacaagttgattaaatatgtggtctatgcatttcgaagatttagtgatcattttttttaataagggaatggtggggatcgtgatattgaggtttgcaagacttttttagctttattttaaaaatatgtagttgattaataattctctctctttgttgtacgtgtgttcttcttagtgttttattaaatctaaataatttttttaaaagagtgagaactcgtgcaaaggtgtatgagttagataaaagtcatgaattaggtccatgagttgggttgtttttggtgaagatatcgatgtagacatgaaaaagagatttgaattattatttgttttcttatatttttatcatttttttatattttcactttatttaaggaccctattgtttgtcatttatttggccaagtgcattatttaatttgtggaattaacactgttttttcatattcattagaaattctcacaatgtataatttaatctcagaagatttctctcatcatctattaattttgcaatgattgtgtactaattaacaacagaaaggaggctgatcttattcaagttattgttgaac

SEQ ID NO: 62317 - DNA, 571 bp, Cucumis sativus
  Intron number 2 from transcript Cucsa.106810.1 (locus Cucs a.106810) derived from phytozome v7.0 (chr-ID scaffold0093 0; pos 308280 to 308850 reverse strand)
cagcaggccgccttcaagaatctggtaagtgaaactgtgaaataaaaaagggatgattttgactgacaggaatggtcgagtatatggtagttagatgtgtcattgtctaccactgatgctgctaaacttattatatacatctggtcatttttgtgtattaatcaaaattcaatctgttcattcatatgttccttgttctgtttgagatgtggttgttgaacttagtgattgccttgagattgtatgttatgttactgggttttgtgccggtttttcattataaatttggagaagaggttggttgcaatcagactcgtgaagacatagaacttcttcaatgcaaaagatatatgcaagatgcacaaactcttagcattacatagctttagtcagattgtgttctattgtgaattttagtataacaaaggtcaaaggttattctacattcctcataactttcattcgtcatatccacagttatcgtaggttgcttctataatattaacaaataccctttttatttgatgatactccacatgagttttttgtactttcaaccctgtagtgcttg

SEQ ID NO: 62318 - DNA, 1004 bp, Cucumis sativus
  Intron number 2 from transcript Cucsa.047830.3 (locus Cucs a.047830) derived from phytozome v7.0 (chr-ID scaffold0054 2; pos 2730547 to 2731550)
gattttgacaattttgctgtggtatgtatatattgctcccattcaaactttatttaatatcatttttttctgttgatatcatgcacctcccatccacatgatatttttgtttttttccatgtgtattaattaaccatcagcatggaatgttcacggcagaaagttaaacaaatcaaagcctattattgtctactataaaaaagcctattattgtcatcatgttttacaggtaccagcattgtctacaattgggagcctgagaacttaactgggctttataactacatctttttggtgtgtgcttgtgtgtaaataaaaaaaaccattcgttagtatttaaaaccatgccaaaaatgatgatattatgttatgtcaatacccatattttctaagctcataaagttgcagaagactgggtttattgcacatgcctttctttacctctcaatattttgaggtgaaaattctgggtacctctgtgttgtttggtttatcttttgaagactatatgcctaaggagttcttcaacttatcaatagaccttgtactcttcttggtatctaggtgggtagttagtcatcagttttcactgtaaaatggaaataatcaccagtgcttccaatgatctagagatatatgacttggtggatttaaaatgtttttgttacttgaaatcaagtaattcatgttgatggtttgactgccaaaagttcatcgtgcatttgtcttctagttcttattatctgactctcgatcaacttatagattcttaactttctgagaaacaggtctcaaagaaccaatgtgttttgttaactttcccatctaaatagcactttagaaagctataatgagatgtatatcaaatcctgaatgaacgttgactctctgtttctgtttcttttcaacatttttgtggtgttgtttgctgatcaacaacaccaacttgcttttgtttcttttgagtagatagctggagaacctgagggagtaagacgggcatt

SEQ ID NO: 62319 - DNA, 566 bp, Cucumis sativus
  Intron number 5 from transcript Cucsa.120130.9 (locus Cucs a.120130) derived from phytozome v7.0 (chr-ID scaffold0099 8; pos 2112015 to 2112580 reverse strand)
caactgagtaatgtttcttcaattttagatacttgttctagttatgaatttttagaattctttgcttttgaatttggatggtatggtttggactttggaatcaatagttttttggactctcgaatctgatttcatgtcctaaatagagcgtaatactatttgagaatcctcttagttgttggcacttttttaaatactcaaaacatggctggtttataagttgtaggtcatatctttctttccacctcattcttttttaaagagcctctatgctttacaaacacttggttgggtacgatttgctaaccaatggtgcatccgtgcaaccaactgtctattagatttaactagtcagtgatccaacaactggtttggtatatcgaagttttataatgatcaactatgtaacaattaatccccccaattctttaccaagtaaaattagaatgatcttttcatttttgggttattggatattcaaataacatgaacctgtatcactttttccttttaagttgtagatgtcttatataacatttggtctctctttgatgcagacaactggc

SEQ ID NO: 62320 - DNA, 442 bp, Cucumis sativus
  Intron number 2 from transcript Cucsa.051610.1 (locus Cucs a.051610) derived from phytozome v7.0 (chr-ID scaffold0056 0; pos 3683 to 4124)
gaaaccctagttttagggtttccataattctcgatttacccctaaaccctccattcttccttcatcaaccctctcgtcttcttctactcaacccgtcttcaacattttcctcaatcaaaatcttcccttcatctctttaatcgactgtggcctttctaataaatctcatcgttcgttatgttgccaaaaaaaattactatccgtgcacaaaatcaaattcatctctttaattcggttgtggtcttcctcataaatcatactctggcgttcgatttcttgccaaaaaaaattcgtttagggcttccacccttttgtgttttctatcaacttcatgttatatgtttgtttaacattcatttgaaactaattgatgtggctttcatggtgctattattaaatttcttttctgatccaattgtaggaggagttcttgaaagttgtt

SEQ ID NO: 62321 - DNA, 926 bp, Cucumis sativus
  Intron number 1 from transcript Cucsa.067200.3 (locus Cucs a.067200) derived from phytozome v7.0 (chr-ID scaffold0069 6; pos 1603737 to 1604662)
attccttttggatcggacggcttgcttcatctaaggttatcgattctctcctttctagatctcttctcgtctttcttccttttatttttaatctgatgctccttgtttttcctgtataattatcgtctgttctacctaatttcttccgtttttaaggtcttgttgcgtttttccttctaattctctggagaacgatcgccttttgagctatttgtgccgtgtttttttttggtttatttattatcataatagtttctgctggagttgttttgagtgaagtgaagaaacaagtagctgtaggagtttaagagttaaaattgtggtaatttaattacattttaggtttatttttcagcttaatgctctgttagcgatttaaacagatgatttttcttatgcgaaagacttggagtcgacagagtttagacttttgctttattgtatctagttttctactgtgaattatctgtagctggttggttgattgttacttcgtcaattctacatatggcttttaaaattgaaatttagggattctggtctcgttaaggtcaaatatgttcaaggacatgtatagtattactgtttacttttgtttgcttctggatgtctggatgttcacgttcagcagtcattacgtatcatatagacttagtgttcctttgacttttgtgaaaacggtttctagaggttgctttcactgcatttctgcactttggcatgtacttttatgttagaaattgtctttattgtttcctgtactgtttgaggtactgctccttcttagtttggctcaaatggttcttgttcttattctcgtgcatgtaggttgttgtttcttaaactattggagttgaactaacttgctgtattgttgtactgctgctcaatgagtagttattttgtacaggtatttgcctttcata

SEQ ID NO: 62322 - DNA, 461 bp, Cucumis sativus
  Intron number 1 from transcript Cucsa.097420.1 (locus Cucs a.097420) derived from phytozome v7.0 (chr-ID scaffold0091 9; pos 2663031 to 2663491)
cgattatttacacggctgctgatttgtcgtctcaggtgaatagttttggagcttgcaactggttgttttgagtttgatgttttgaaatggaatctcatggatttgttgatgtgatgttttgtttctacttagcttgtttgggaaggaaagtttcttggatgagatgttttctctttaatttgattgttcttgatggtatacttgtttttggattttcgcgggagggggttgatgtttatctctaatgggggtccacattttgggcggttgtaaatagaaatttctttgaagagttttattttctccatttctttctttctccattttgttcatcattgcaatttttgttcttgtttactaatcaaacctctccttcattaaagattctacttttacaatggtgatctgatttaggaatcaaattttctttcagaccatttctctgtcatcgtcagagtcat

SEQ ID NO: 62323 - DNA, 333 bp, Cucumis sativus
  Intron number 1 from transcript Cucsa.104320.1 (locus Cucs a.104320) derived from phytozome v7.0 (chr-ID scaffold0092 7; pos 2878588 to 2878920 reverse strand)
ttggaccctcttgcttggttaacgatcttatcgatgtaagtaatgatgcacttcgtttattcttcatttttgccttgaaatgttgaacgatgctcttttttggtttttattagagttagtttcatgtagttaaattgattttcactcgtccgcttgatcctttagttaaattcaggatttaagatagtactagaacaagtgatgggaggatcctgtaatgttattaaaactatttacttttctgttgtcagcaaatagcttacttcaaattttaaattctcaattgattttactataggaattgtgtactgaataccgtgaacaaaagaagga

SEQ ID NO: 62324 - DNA, 462 bp, Cucumis sativus
  Intron number 2 from transcript Cucsa.115650.3 (locus Cucs a.115650) derived from phytozome v7.0 (chr-ID scaffold0098 8; pos 237981 to 238442 reverse strand)
tgaagaaccttgaaaagggtatctccttatatctctcttttgaagcaaattggatttttttagagctaatattgcatttgaactcatatgttgtttgtctcttggttttgcttttttcttttgtaaattgtttctgaaatgtattgattcttcctcacttgctttgtgactgctgttgtcgtttgtaaatcgttggctttttcactgttcatgttcttctcgatttttaacttgttagttattgctgaaatgaacttagagcatccatggggggctttgactttacacaacaacaatttttcttgcccttaatttctgtgtttctacaaataattgaacatttatttgttggtgccttcagttcaattcttatggtttactttgttttttaaaccaacagtttgtgctgatttggttcggggtgccaaagataagagactgagggtcaaaggacctgtgagg

SEQ ID NO: 62325 - DNA, 646 bp, Cucumis sativus
  Intron number 2 from transcript Cucsa.104220.1 (locus Cucs a.104220) derived from phytozome v7.0 (chr-ID scaffold0092 7; pos 2825544 to 2826189)
ctttgaagcatcccaatatcataagatttaaagaggtatatgatctgaagttgtgaattttgttttttttttatggttgttcagtttctccacagtggtcaattttttttttttttgggtttcaacagagcgtgttcatcaccacttgaccacctacctccacattaaatattcatgattattgtttgttttttcttattgttaatcattgatcggtcagatgcagttgtgagtttttatttgaaatgtatgaatgaaagaatcagagtatttatgcactgagaagcagttcaagtacatttcgtttttcttctaatttctggaaaatcgtacacttttttaagctgcttccccagaagcatttatttgattccgggtggatgtaaaacctttttgtacaaacattttcagcttaattgttttctagctaatttccatttttttgttaaaactcttgtttcatctagaccttcctttcttggccaagactacttattgtagttgacaattgaatgttgtactagttgtctcattttgtttaggaattttacttttatttgctaagaacattttcttgttaaatttttgttcaaaggggttctcttatgcaggtcctactcactcccacgcatctggccatagtcat

SEQ ID NO: 62326 - DNA, 952 bp, Cucumis sativus
  Intron number 2 from transcript Cucsa.056520.1 (locus Cucs a.056520) derived from phytozome v7.0 (chr-ID scaffold0060 3; pos 32539 to 33490)
tccactccgccttttccttgcattggctctctcaggtttttctctcattatgtatatattcttttgctttctaaattttaaaagtctaggaactctttgattttgagccctttacttcaacaaaatatcttttgggagttttttttttctttctttctttgattgaaatgaaggttgaaaatttgcgagataacaaagattttccagacttttaaaattatatatatcaaattttcacttataaaatcattcgcctaattaattttttaatgctattggtaacatgccatttatatatgacacatttaatttattttaaagtttaatgacaaatgaaaacttgattgatactttgtataatctatttattttttattattattgttttggttatataatatatatgcatggctattgatattttaaaaaaatcgtaaattttgactttttgtttgtgttttaggtggggtttaattttaatatccccgaggagaattaaagaaagtttttttgttttttaattattgaatattttggaattttgagaaagagaagaaaagttcatatgtttaattaaccatctgaaacttttttttgcattgaatataccgaccaattcaatcaattaacttcaacttttttctttcttgtttatatcatttttttatgttcaagttttaagaatattgaattttataatgttactgttatttagtatattcatgcatatatatatatatagcaaaattctgtataaatgtcaatctaattttattatggacattaatttttcttttgatttcatttgaattatgtacctagttcactatataataatgtctggaagtgcttttttgacctgatcaaccaaataaataaaaaaaaacttgaaaatggaagaaatacaagagataatttatgattgagatgtaggtgccggagacggtggtgg

SEQ ID NO: 62327 - DNA, 559 bp, Cucumis sativus
  Intron number 2 from transcript Cucsa.065960.3 (locus Cucs a.065960) derived from phytozome v7.0 (chr-ID scaffold0069 6; pos 556158 to 556716 reverse strand)
ttatctcattaagcttctcctcatcggtgatagtggtatgtcaattcttcactcttccaccgcattattccatttctatttctatttctgttttttttattattaatttgatcatcctgatttgtttgttcttaatccagcgttgagctagttcttttaagtaatgtatgtaattttttaaatttaattttggttgattcacgaccattataaattgattacggtataatgtgcattttggtatctgctcgagcctggtatttcctggaatgtgtataattttttttttgttgacttcgtatttgcttcatatgtgtaacgtattttgctggatttttataagaatttttatggaactgttggattaggattatatttagaataggttgaaatttggtttgattacttaagatgatgtgagtgagatggtgttgcttggatttttttgtgagagcctatggtggaaatttgtatggttgtcttaaatggagtttttcttcattgtttgaatgttatcttttcaggtgtggggaagagttgtcttcttttgcgtttttca

SEQ ID NO: 62328 - DNA, 653 bp, Cucumis sativus
  Intron number 1 from transcript Cucsa.019660.1 (locus Cucs a.019660) derived from phytozome v7.0 (chr-ID scaffold0028 2; pos 76296 to 76948)
tgatcacggtcacggttcccttttggactgttcctgtaagtcacctactcctttttcttttcttttctttttttaattctttaacatattcaactataaattcagctattaacgttaccgatagagaggcttaattaatttcagtatacattagtgaattaaagcattcactgatcatcattttgattcgagttcaacaattatattgtctaattgagcatcaaatttaagtcttgttttgatttatcccaagtttaatttgatcaaattttgcacttttaccttgttcttttagaaaatatttaatttcaataattgaatccaacgaagtgaaaatttaaatttaatgaattttaatattgataaaaaaatagtgaaacctagtaagtaataattctttaaaattaatcagttttacttttaacacacaaaaaaaaaaaaagatgtatatttattttacatgctattgtatatcaaaaaagatgtcttaacttatcgatggctcgaacttgagtcctaattgcttttatgacaaggacatttatatttagaaaacttagctaaaaacaaagtcattttacagatagatgacatgaggaaaaatagaaaggagaggctgataatttgtgtatcgcatggtgtgtattagttat

SEQ ID NO: 62329 - DNA, 308 bp, Cucumis sativus
  Intron number 4 from transcript Cucsa.090100.1 (locus Cucs a.090100) derived from phytozome v7.0 (chr-ID scaffold0089 4; pos 1495862 to 1496169)
cagttcatcggaaacgagttttaggtatattattgcttgatagaggcattgctcctttaaaatacgctttgttaagtgcgattttcagcgataactgtgccaatcgattttattattgcattaatgcgtatttcaaaagtaattcttattttcatgaaaatttaggacatatgtggcgtttaacctaaaaaattcttctgtttaacatatattttgggatttttagctactttttgatcatgcatgagtttctgtctctctcgcttaattttttattctgttcctttctatttgaatttcagacttca

SEQ ID NO: 62330 - DNA, 551 bp, Cucumis sativus
  Intron number 5 from transcript Cucsa.117370.4 (locus Cucs a.117370) derived from phytozome v7.0 (chr-ID scaffold0099 5; pos 946886 to 947436 reverse strand)
cctatactggctttgacggctactgctgttcctaagtgagttattatcaccctttcactttaaatttttttgtgggcatcatacacttggtttgagcataccaatccttttgtcaagttattatagttcttaaccttgtattaaaatttaaaccatcttttgcttttttgagtaattttgtcaattgttatcctttgcacgttcatgagatggacttcaggtctctttttctctcactagcaaaaatttgatgtatgttcctatgctgatggtgttcttatgaagagaaagttctacacttatagtgcacaattcagttggatatgaatttttttctctgaaagattctgcaagcgagcatatctctctgaatatcctactgttcattttttcatagtcttgccactatattggcgacagtttgttgagattttcccctcactttctagtttctatatggatggtagaagtcagtgacatgtagatactgattttaaaattccgagagattaaatcctggttttttctttgtttccgcagagtgcagaaag

SEQ ID NO: 62331 - DNA, 559 bp, Cucumis sativus
  Intron number 1 from transcript Cucsa.042440.1 (locus Cucs a.042440) derived from phytozome v7.0 (chr-ID scaffold0054 0; pos 833271 to 833829 reverse strand)
gaataacagataatagtaaggtaaaaaattttattttcaatataaaactaaatatgctttaaattttttaaaagattttgatcttctagtcttaaatatttatatcaatggcatatcttgtagtaatttgcaaattaatgatgataaagaattgttatatagaggtagttcttgttttcaagtttttgagaaacaaaaggagaattgtgtgtacatatatgtatgtgtttcttgttggtttctaattttattttttcttcaaaatgggtctcagttttcaaatctatacattcaatagttatttgcaagtataattaattcataatacgtattattactctattattagttgttctttttcaccaaacttacacaaaagccttcttaatattggacttgtaatatacaaaataaatataaatcaaaatatggtcccatacgtctctatatatttggagaattattataaaaagtaaaattgtcgaaaatatttataaataaattctatcacaatggtattagttgatttgtttgtataaatataggcattaagcagtgc

SEQ ID NO: 62332 - DNA, 736 bp, Cucumis sativus
  Intron number 2 from transcript Cucsa.031800.1 (locus Cucs a.031800) derived from phytozome v7.0 (chr-ID scaffold0042 9; pos 1012499 to 1013234)
ccggattattctagcaacagctcacttgagaaagggtcggtacactctgcttcaacaaattttcaatgatgtttaaattgattcgatcttcgaaatggtttttaatagattttaactttggtaattagggatttccaatcagtagggtttaatgaggttgcccgaataactgtttcacttgtagaacattgcttgtttgttttgcctgttatgtcttgctgacctaattatacacttacagaattttttgtggagaaaatgtatgatctctatgtttattccatgagacaacagattcaaaattgtcatatcattcatgtggatggagtaagaaattttagagggtcatgtgtttgttccactaaagaagttcagaattgaaaccatgtataaacccatgaaaattttagagggctgttttcacgtttgttccactaaagaagtttagaagcatatttgttaatgtagcccagttatcatgttgtaccattcacaatgtaggttgtagtctaattgagcttaatgcgagtcagcatcatttaagaaaaacagctacagtatgaaatggcaatacaaatcaaatttggactgcatgtgaggacgaataatattaatgtttttaatttttctttaaggcttgcattgtattgcatactataaactcacgacaatggttttcttttttttgtttgaaatatttgttaccttttgtattatatctccaggaccaaacata

SEQ ID NO: 62333 - DNA, 844 bp, Cucumis sativus
  Intron number 1 from transcript Cucsa.057650.4 (locus Cucs a.057650) derived from phytozome v7.0 (chr-ID scaffold0061 4; pos 40963 to 41806)
ctacttctaattctaaagatttgatttctggagaggttagttttcgtgcaataactggattaacttctatttgatctctgtggtttcttgtttaaaagcatccattttgattgcttttcactatagaatgatgatacccgtaaggataatgatgtcaagctgcaagtagaaaacgcagataatgttgaaaattaaacatgctttaaattaaccagttatatgtgaattgatttatgagagttagaaaaaagttaaaagatatgagttaaaatgtttagagttaatttagtaagagtttcacattatataagtgtaggttttaaattgttgtgtttaatttgtggtatgagttatgccggtgataatcctataaataggattgaaatgttgtaatctatatcatctaagtgtgaatagaatatatgtaaaaaagttagtcttccaataaagtgtatttttcctcctaaatattctattcggtaattatctatttggggtgttcatcgtacgcttccaatagataattcagtttcaggcatgggagaaagcaatggagaaattgataatttgccagtaagatgatcttattgcatttgctcctttcaaatttgcaaggtcttgaagttttgttaatggagaaaacaatctatgcagttttgaactaagctatattcggttcagccattcaggtgttctttatgagcacgcagttacttgtcttatgttaattagaaaaaaaaactaatggttccttggcagcagtaaccgaatgccttgttcaaaatatgtagtttctgctgatgagcatttaagtcgaaatgttgcaggtaacgattttgagagc

SEQ ID NO: 62334 - DNA, 632 bp, Cucumis sativus
  Intron number 1 from transcript Cucsa.124790.1 (locus Cucs a.124790) derived from phytozome v7.0 (chr-ID scaffold0100 1; pos 611347 to 611978)
acaggttcggttttgtgtttggatcaataccaacaatgtaaataccagtgagaaaaagacactaaatgaagatcttaacctccatctttgatcttaacctccatctttgctataataaaggcaacattgtagaacgtaatacgtaaaggaaaaagaaagaaaaactcatttgtagttcttctcctatgtgaaaagttccgcttttactccaatgccgttcaccctctactccaatgaacgtctcacacaatgtgatttgttttgttttttctttattcgaatcgtgttgtgtttatatatatatgaatcttaaatgtataaatcaaatataatttttaattgtttccagttaatttaggattatttcaaagaatgtcagcaagttatttgttttttttttttttattctcgcagcgcagattcttaaatttaaatgtttaatctcaaatgaattatacttgttcttatgtgatttaaggtacttttaattattgtttttttatatcttgcaatctcataaacaactcatagctgccaaactttaaatgtctaagattgaattagtcatatacttgcaactatgcacgttttatttagtgtttaactactgttttttaatcttgcaaaataag

SEQ ID NO: 62335 - DNA, 451 bp, Cucumis sativus
  Intron number 1 from transcript Cucsa.129150.4 (locus Cucs a.129150) derived from phytozome v7.0 (chr-ID scaffold0102 8; pos 205185 to 205635)
gttgaatctgatccttctgataaaacttcagccaggttggtgaattcttgcttctggtacctctgtatctggttgtggttgaagcattttgaggcaacgtctaggaagtgatatgaatgttggtttgttgtgttttatgttgatttatgtgtggaattgtaaatgggtggatagtttcttgtgttctttactttttgagcattgctacttgaaaatgctcgtgttatggttgaaggattggattggatttgaagaatttgttatcagttcaatattgcgaataccataagttctgtttttatcctacagactttttttgtgcttattaagtcaaccatctctttggttttcttgttgtgacaattgggaataatttatctgtagattaaatgttaacgtgacatgattttatgcagcttttgtatcatagagggaccggaaacagtacaag

SEQ ID NO: 62336 - DNA, 1034 bp, Cucumis sativus
  Intron number 1 from transcript Cucsa.093670.2 (locus Cucs a.093670) derived from phytozome v7.0 (chr-ID scaffold0091 9; pos 15692 to 16725)
aggctctggtcgacgatagcaaggccacttttcgggtattttctcatttcttccatgattataactgaattttcggattctgttgaagattttcagtttgctgatggactttcttggcggcttatttattttttgaagaacttttctattaatttcacaatccctagcattttttctttctttctttggcttctgaatgaatgctgtgcagaccttttataacttatgattgtttgtttgtttttcgttatttatcataattcttcacgatatttaaaaactcgattgtcatccgttgaattgaagaacaattttatatgttcccttttcatttggtttcttctcagctgccaaacccatcacagcagagaaacatttatgatttacttacactgtttgtcactttatgtccttgagataatttatattcgaaagagttgtattaacaaatttactcacattgtttcttatccaaaaaacaaaaacaaaaaaacaaaaacaaaaataaaaaaaaacaaagaaaaaaagaaaaggaaaaaaaaaaaagaaaggaaatttactcacgctcacaacaaatttgtacagtgaaggggaactttttctttcatctttagttgtgttggctgctttgtgggtgactttgaaattcaacttaccaatatatgagacttgaaagatttctttttaagactcctgagatcattatgagatctccagagatgattttagaatcatgatttgattggttgcatttaagatttgtccggatctcctgctttaaacatgggttacgttcatatttcacagagtttcatgtgtattcttggaagaatgagaatgatttaatgccccttcttggggtcccataattagcactttcttttattttactttatcttattagaaagcctagatatcttctttgctaaaaaagtattaagtgcatattaatacaactttttacttgcataactgaggcattttaactcttgcttttaggctactgactttaaggagtggaggctagttgtgca

SEQ ID NO: 62337 - DNA, 916 bp, Cucumis sativus
  Intron number 1 from transcript Cucsa.120360.2 (locus Cucs a.120360) derived from phytozome v7.0 (chr-ID scaffold0099 8; pos 2434440 to 2435355)
cagactgcttcttctgctcctacttcttacctctggtacgtacctttttaacacactaatttcccacttctaggtgttctatcagtatctaatttccggctggaccaaacatttctgtccacccttttccccctatttacttttattcatacttttattgctttcttatgtaattaaatccattgcgcagctttgctttctctgctaatcttctgatttgttaacaggatttcagggatcctagtcctgttaaattggtttttttttctctgtttcaaaaacagtctgtttcaggatcttcttgtttcgttatgatatcgcatgtgtccaaattcaaggtgtctttttatctgttaacaggatttgagcgatcctagccctgtggtttccttttcttttctttctcaaaaaggtgtttttttcgttggaagttgctttgtgatttaagctgaactattccagagggttttgccatagtgaacttaagtgaatgttaattggcatgtcttttttcttagaggagtcggaggtttaattccctcatctctgccattgtttattcaacaaaattcgtaacggttttttttttttttttgtttctttgtgatataagagcttttgaaattcaagatatatttgttatgcttttgaaattgttcccctgagggaattatgcctgtctctaacttggtacttgttatgatttatttttatgaactttcccccttttccgtttgaactctttgttttgtttgagaccacctttcatgcttgacttcttaccccgccagttttcagtctttgtgcactgttttggttattaagtagaagtagacagatatttcttttgttttattacaattcattcatgcgttcaatctctggttcttacatccagcaaccacttgcagaaaaa

SEQ ID NO: 62338 - DNA, 400 bp, Cucumis sativus
  Intron number 4 from transcript Cucsa.106620.1 (locus Cucs a.106620) derived from phytozome v7.0 (chr-ID scaffold0093 0; pos 153682 to 154081 reverse strand)
gttttggtgcttctgtatttcattggaggtctgatttagttgccttttttgggtttgcttttacttctaaatcattttttttttaatgaatgagttggaaaaatattaagttcaagtttttggtattagatcttcagttcaaattctgtatctttctgttccttcttctatttaaaatcaataatctaggtattggaactgttgattacaataattatttgagttcatgtgtaatcactgtgttaaaaaagtggattaaatcaatgaacttgaacatctgtgtcttgtggcaaccgactgtatctttgttttctttatcaattgagtgattccatgatattttatgtttttccccctaaatgaaggtataacataccagagctggctaagaagtacaagg

SEQ ID NO: 62339 - DNA, 582 bp, Cucumis sativus
  Intron number 1 from transcript Cucsa.112120.3 (locus Cucs a.112120) derived from phytozome v7.0 (chr-ID scaffold0095 3; pos 815229 to 815810)
cttaatttatctatctccgtatctttaagaaggaggtactgttgtttgaattgtttcgatcagaaggagaaaaaagagggcattgtgatacatattagaattgtgaatattctgttatttcatttattcacaagctaaatgccaatttgaaggctggcttttgcgattgaagaaattggtattctggatttcaccatttatgacgtgagacttaacctcatatcgatctatctatcgatataatttttcaatcttcatatctgttagaagaaaaaatgctgatgcttagattgatggaaatgtagtttcgagtttcttttgattgttattcggattagatacttgtaaagttctggtttttatagttgacgattggtcgtgtttggttgacaaaatggacttgttctttgttcggaagtgacagagacaactctaggaactctagaaattgagttgtgattcaattttgttctatggttctaaatttctactatcaaatatcacattttatttatatgaattttattttacgttaatgccaaatgacgttttttgttatttatagtgtcttgaagcctaaca

SEQ ID NO: 62340 - DNA, 575 bp, Cucumis sativus
  Intron number 2 from transcript Cucsa.026900.1 (locus Cucs a.026900) derived from phytozome v7.0 (chr-ID scaffold0037 0; pos 57670 to 58244)
ctgcttcttttggggactacgtgcattaaggtttgaaacttttccttctcaacacatctctgtttcttcttcattttaaatggctattaccttaagcatcgactattggtttgagtatatgttttttacgaggacaataatctacaactcaacttagaactagatcaaatggtcgtctgagtttacaagttcaataatctcattatatttttttcctctgtatgtgttggtcttcatcatcaaaacgtagtctgagcaaatacggggagagaaaaattagacttaaagcattccaagtttgagattatgttagatctgttagaccaccaccaatccatgctggttaaatgataatgttctcgagtatgagtacctttcgaatatataatttttaaacgataactcgaagtaactcttctttgttgaaattatgagatcacttttcaacttccagaactctcatctggtacaaataatttccttgtttagaagagattgaaatgtgatagtatcatctcatgtttggtcgaattcaatttgcagctcatttgggtccaacctgactacaagtagct

SEQ ID NO: 62341 - DNA, 917 bp, Cucumis sativus
  Intron number 1 from transcript Cucsa.113340.1 (locus Cucs a.113340) derived from phytozome v7.0 (chr-ID scaffold0095 3; pos 1511889 to 1512805 reverse strand)
gggaggcaggtaatgtgtttgttcttttagcaagtttgcaacgttggctgttttatctgaaaattaacttcttacatgtacaattgaattcatcgctgaagaatgcgaagtctttgtttaaatcaactcgttcagcgttgaacatcataatgtccataatttcaactttcaatggtgaatttgatttcccccatttgcactgtcctgttgaagtttgcaaacggtgtgcctcacgtcgcctaacattatgcatttcaattagattgactgattgcatgagctattggaaagtctaaatagttcaagaaattgtgaaatttctacttggtcaaataagttaaacctctccaatttctttgtgcccaatcagtgcagtttcattaaatattatctgggttttgtgcaagtattagaacataaatggttattctttgatcttgggagttcctgaagtttgaaaatttttaacctgaactttacaaccatcgggatgacatcgtatgatgctttctgtttcataggagactagcactgtatttttggtgttcttcatggcatgtagactcttactgcttgctgttatgaaacttccttttttgctatcttaggattagcatttttattatcacgtgttactttaagttcttgtataaccctatcaaaataacttcatacacatttgaattggctcgatgagtttagtttctttttttcttttcaatatcccgcttgaccctacaacatttgacaaggaaactcatagaaaattactttttgggtgggtgaatcttttagtattgaaaacagtaaaataggttataatctttttaacaaaggggaggatgcttgatatctgataaacagtgttgattactggggataattattatttttgtttctcctattcacaggcgatc

SEQ ID NO: 62342 - DNA, 951 bp, Cucumis sativus
  Intron number 3 from transcript Cucsa.096420.1 (locus Cucs a.096420) derived from phytozome v7.0 (chr-ID scaffold0091 9; pos 2057039 to 2057989 reverse strand)
ttccaactgcatttgtaaatcgtaagttttcctttgattaacttgtgctgctacagcattaaaaccaagattgaaggttccaaattcatgttctattcttaaatatcaagtctcaatccatgtctgagttgatgcaatacaaccaccaatacaaagtgtctacattttgtagaaaatgaccaagtaacttattgcaatatggcaatatagaggaaattataatatcaatagcttttcgagacggttatctctttccaccaggcatccattatagactgatttcacagactattctaacctccaccctctctaactttctctacttgtaaccaacctcacccaaacaaactttcagaaattacaattatgtcactacaaacattctcatatcaccctagccttttattttgaataaatgaaaatatacactggattgaaaaaagctttaacactcggaaggaattcccataaaagaagggaacctcgattgagaataaatgaaagaatatactggaattgaaaaaaactgaactctcagaagtcagaaggaattcccataaaagaaatgaacttcagttgtgcaaaatagttacctactaaatagctacaaaatgccgttgaaattgaagcctaaaggcaagtgcgagaaatgagcttcaattgtgcaaaatattacctactaaatatctacaaaagacatttgacattgaagcctaaagacaaacgtgagaacttataaagaacaaactgttacttggatctctccctaaacctctaaacactctattattcttttctagcgtcattattctatctctttagcatacaaaagtttacagttcaggagagtttctgtgttcaccaatgttgtcatggtattagccattaggtggtggtttgacgattgtagttgtaggtcttcttctctggaatcaaaataggcagcattgg

SEQ ID NO: 62343 - DNA, 505 bp, Cucumis sativus
  Intron number 2 from transcript Cucsa.096420.1 (locus Cucs a.096420) derived from phytozome v7.0 (chr-ID scaffold0091 9; pos 2058105 to 2058609 reverse strand)
gggtaagttcttttttgctgttttggattctgaatgtatttgattgatgtgattgtcattgtatttagttttattataatgtgtgcgaaatgggttataaggtttgtttttggttagcaagaaaatttgcttaaatcgaaagaggggtttaaattggttatctacaaccatttctgctgctttagtgttcaagatttgtttttaattgagttaatcatagcatggaaatcaaagattctatggtttagtggattctttcaattgtaaattgtaatgcaatgcacatatgggaaaatgtgactaactacttaatgagcatcatggaaagatttgtttcatgctagagtcaatgcctcttctccttttcttttcctccgcctaatgttttctttttaccattgttcactatagtttataatagagcattggttgccttgaaatccgtatcaagactaagcttacgactgcagtaggtagtttaccgatccgaggcttctggtaacat

SEQ ID NO: 62344 - DNA, 637 bp, Cucumis sativus
  Intron number 4 from transcript Cucsa.108760.1 (locus Cucs a.108760) derived from phytozome v7.0 (chr-ID scaffold0093 1; pos 1029443 to 1030079)
ctgttgaccttggttgtgctgacttatttttagaggtaaggttttttatggacttgattttctgttactgagtggaaagacaatgaatgaataaaatctatgaggcttctttattgaaaccttaacttccgaagtgattgaggagttttctctatattgttaatagcttgtgagcttagttcgctctctcttgtattatgcaaagttccgaaacagaagactattttaagtaattaaatatgtgttttagtccctaatgttggggtgttttatcaattttttctctattggttaagagtttccattcatgttttaacaattttcgtttgtactatttctttttactgggtgctaaatttgtgactgataataagcttatgtggcatggtgcttgcttaaagtacctaggagagcagaagtcaaaggttaatgccaaagttttaggaatgtaggtgcagttattttagttgacatcaattatgtatatatagatacacacacattgagtcaattaatctagtttatctactgctttttaacaacatggtttggctgtaaattataatgtatcatatatgctttacattcaacccttatttctgagtttttcttaatctagcagagcaatcttggcata

SEQ ID NO: 62345 - DNA, 991 bp, Cucumis sativus
  Intron number 1 from transcript Cucsa.112000.1 (locus Cucs a.112000) derived from phytozome v7.0 (chr-ID scaffold0095 3; pos 656616 to 657606 reverse strand)
tccgccggattcgcaaatctctgccttaactgcgggtattttcccttctatttcttcatttgattttcccaccccagtttccttaaatgcattcctttctttcccttttccctctacccatcttatatatcaaaattcctaatattgcccttccccctttaactatcttttcatttaccgaaaattactcgcatcctcctatccaaaatttccaattaattaactaggtcatttagatttatcaattggtgaatattcgttatgactactttgagttgagcttgtactacttaatgtccaatttgagtgtgtgaagcataagatgttccatccacattgaccgattagatgagagtttaatttcaaagtttggattatgcctccacattctctctggaaaatgggttgctcaaagggcaggattgacaaggaaagtttatacatgcatacacatagaatttaatttcctatttctttttaatagttataattaaagaaaatattctcttttctagtttctattcattgctgtcgagaattctattaaagaatttaagaagcgtgtataacagagtttcatacggtgcagaggatttttcatttccttttattaccacccatacagtttaatctcttcatgtgaatctcgctatacatattgaagcttaatttctctcagttaatactgatgtttgtaattttgttagctttagagggcaacatgtttgttttcttttattttaatttctttttaaatcactttttttgttttgggctactttttttacccagtttatttagttccgtaggctgtttaggcttttatttcatgctacgagggatctatctttactttttttttttttttattcattgacaagaaaagatttatatattgtagtgttatgctatattaaaattgatgtcactatcttctgtatcttctaatccttcactgtcccttcatactgtgcgtgatttagatccgctt

SEQ ID NO: 62346 - DNA, 953 bp, Cucumis sativus
  Intron number 1 from transcript Cucsa.101700.1 (locus Cucs a.101700) derived from phytozome v7.0 (chr-ID scaffold0092 7; pos 916956 to 917908 reverse strand)
gcaactcagacctaacttccttctcttattcacaggtttgatttcttcacaacccctttttccttatcgattttcggttttcttccaatttctagctccctttcacttcttgtttctctggattgctgtttatcgccttttttcttcattcaattctgtgttctctattgggtctttggaatatagcctcttgattgctttcttgtaattacaaacgtgattatgttttgattactcgcggaatcgcattgtaattgtgtcggctctggtttcaacttttttttttgttttttttgtttttcgttttataacttaagatttgagtattcttatttgtctgggacgatttctagtgttgggattgtggataatatgattagttttcattcgagtttccggtgggttttgttggtatgttcgattctaagtggcatgttctttgttgagaggttttgggaggatcagaatcccaacccttttgacttttttgtttgccatggagatttagtttgggtttttgtagtcaattgggtattgggtttacattggatcttagtgatgtcacaagtccatgactcagctgggtgcttgaagaggttttgtttgttctctttattgtgttgtaaaatttttccttcgagaggatcggaagggtttttgaaggtttggagggagacttatttttatttctctaattggatttccttaaataagttgtttattaaactctccttctttctctctcataaagaacattctgctggggctcatttttctaggtgctgttctggtattggtagcccattctatggtggtttgatcttgttttttcgtggcatatttgttttgtttcattcttgttattgaaagttggtttctcacccttagaggtaatttttttaaatagcataacatatgcaaggggtgtaattgcatattttgctgcaggagat

SEQ ID NO: 62347 - DNA, 361 bp, Cucumis sativus
  Intron number 1 from transcript Cucsa.069280.1 (locus Cucs a.069280) derived from phytozome v7.0 (chr-ID scaffold0071 4; pos 111484 to 111844)
tttctccgatctcctcggcctcaattattcctctggtacgttcatgttcttcccattctccatttttataattgttttcatttcgtttgattcctaaaagttctctctatattatattattctacgtatttgcaaggaaggaataacgatgaagatcgatttgtttatattttattcaattaactttaaaagtaatacaattcttagtctcgctacttctatttatttattgcttctagtttagctatagtcttttaaaataaaatattagagaagggaatgaaaatttcaatggtcatgggtattgaagtgtgactgatttgtagtgaaaactgagacgcctaagaaaagaaaccgatct

SEQ ID NO: 62348 - DNA, 682 bp, Cucumis sativus
  Intron number 1 from transcript Cucsa.063180.5 (locus Cucs a.063180) derived from phytozome v7.0 (chr-ID scaffold0066 7; pos 45199 to 45880)
ttcaaacccctctctctggctcctcccccgcccaggtttgttttactttctttctctcaaatcctcaataccccttttttaatttttactctagattcattttttctttatgggtcattgatgttttcctgttttgattcgttttccttggttttttgaaatggaatacatgatgggagattttttttttctttttctgaatgtttttttttacttggtttcttgaatttcttttgggggatgggatggtttggtgatggtgagaagtggtttctgaatcttgggtagtgttttgtttgtggggtttttgaagagttttggtttattgtggctgctcttgggctgtagtcataggggaaactttttttaattttgtgggggttgttttgaaatgtacgtatttttgtggtctctcgttgttcattctttcttccatggaggtttgaaaggggagtccaagggattgaaatgagttataatttctcaagtgaagccggggtccttacattgtttttaacgacctttgttattggatgatgtttaacgagatttcgtctttggatgatttttgattcagtaagtttctcaaaataatttaaacagtttcgaggtggcttattgtgatttattttctttacccccagcaggatcaattgatagtcaatctcttaaggtggtggtt

SEQ ID NO: 62349 - DNA, 785 bp, Cucumis sativus
  Intron number 2 from transcript Cucsa.063180.5 (locus Cucs a.063180) derived from phytozome v7.0 (chr-ID scaffold0066 7; pos 45907 to 46691)
agttttgctggctcttctgttgctgctggtcagtgtacttgtccctctgcattctcctgctgttgattagttttcttcttttcttttgatttttagatgttttattatattgtatatctcattttggatttatctccttttccatcttttgaatccttaaacattactgttttattcaacaaacgatcctgtatttcctgttcgtgggagtagctctgtatcattccaattttatgggacatccccgaaggaagagttttttttggagattttcgctctttctagaggacgtcccatgactttttcttttcacgggataaggggaaaagttttgtggcaggcttgttgtgctattttgtggggcgtgtaggtcgagtggaatggttgattttaagaggtctcgagaggtctttactctttagagtagctgtaggagagatcaaggtttattgcatctttatgggtgtttgctatttattcttcttcttcttttttgtaattatcagcttagtttcattcttttagatgggagacctttcctctcttgtggtttctttctttgtttttctttttcttttcttttactacttatctatggtcttctttattctttcatttttctcgatgaaagctcgatgtctttgaaaaaaaatgatgggagtaactagcctctttgttggcttcgctttaagatataatattttgtggaaattgaggtatcttgcttgagcatgtcatggtcactttcaggtggtagagctgccaaaaaggcaatcgagtttggt

SEQ ID NO: 62350 - DNA, 993 bp, Cucumis sativus
  Intron number 1 from transcript Cucsa.104940.1 (locus Cucs a.104940) derived from phytozome v7.0 (chr-ID scaffold0092 7; pos 3249073 to 3250065 reverse strand)
acaggaactcaagggggcggccaagagacaactgcgtaagccaattctttacaacccatttttatcttgcccgtgtagcaattggaaatgcgaaggctaatttcgtttgtggttttcattggattggatacctatcaatttgatttggcctaggggtatatggatgagttaattatggtttcacatataatgtaatgatcaattcaaagtggaacttccagcttgtttgcttcattaggactcttaatgcactaaacattaggtaaacgatggaattacccttcattgttgttccacacattgccattcattcggtctctgactcataaagaggaattttgagtggaggtaatcaaactctttgagtgttatacatttgttaatcgtgatttattaaagttgagatttcaacttattggatcacgagattacgaagaagctttgatgaaagataagtgagaaaccagatattcatggccaatcctccgagttgacttctgaattaggatggatataagtaccgaatcactagtttgtcttcctttgaccaatagaatcccctagccttaggtttaacctcttgacctggataaattgtaggcagctatgctttcattaaatgatttagttgtccatgaggcttgttttgaaaagttctggaatgtcctcaattcataacttgatgcatttcttgtccaatttgaagtctgttagcacttagcagcgaatctcttatatagattttgacttttgagatgctataaaatattatatcctatttattgtatatagttatctcgatcatcattttaggtcctcttgtaaaagtgaaatacacttcttctcaggtcaaaggattatttaactcttctcaggtcaggtctgttagcaattgcacgactttaagaaatgattagttggttcaattgaccatggattgatcctaaatgattcttgcagtcactttctttctctctcttttttctgttgcag

SEQ ID NO: 62351 - DNA, 771 bp, Cucumis sativus
  Intron number 3 from transcript Cucsa.096910.1 (locus Cucs a.096910) derived from phytozome v7.0 (chr-ID scaffold0091 9; pos 2367671 to 2368441)
aggttggaacaactctgtttttattttgattatgaagtttcgagagtgaaggattgtacgtagttagcatattttaggatttttcacgaatcattttctttggagaagttattgaggcaggcgtcacaatgtgttttccatccttgatagtttttcctttttttatcgatatgtgtgggactctggttaccatcgaaatgctttccagaggcatggaagcttatgtcacgcttcttggtcgtttttgcgttcttataaacagcaagacggcaggtgtactaactcatagtaaccagagaaatgatttgcttctcttgggtagtgagcttcagtcagtgttcggatttactttgcccctaaactcgattgctaaaatttattgtacaatgttacgtgaagtaggcagcttcaaaactagtggtcaataatagatgaatttaaaatggtgtaagatgacaatagtccttctcctcttcctcttcttcatcgtgtcaaattcatgcattctctaagtataatctcttgtaaaataaaatcctttattaaccttcattaaaatatttgaagtgccccataagaatgttttgtgcccataatagatgaagatgtatactatggtaatctgtaaagtaatttttttagaatgccccttagggtctactttgttggttgatttgaatgttagaaaatacggacctctactgcacaattgacgaacatcttacttttgtggcaggttattgctaacagagcatctgagattcttggcca

SEQ ID NO: 62352 - DNA, 843 bp, Cucumis sativus
  Intron number 1 from transcript Cucsa.127410.3 (locus Cucs a.127410) derived from phytozome v7.0 (chr-ID scaffold0101 9; pos 56779 to 57621)
cctctttccctgctctcttccgattggagtgtcaggttaatttgtcttcctcttattatttcacatcagttttgcaattagcaatgtgtttccagacgatcaaaactaaagttgactttctttgttctgatttgatacatttctgaataacgtatggcaccgatcggttggacggcaactctgaatttccctatttcatttgcattgttgaaatatatcgccgtttgatctcaattctcctctcggattcttacgccttctagttttttattagttagcttagattatgaatgcgattaagttagcggcatcaatcgattttgattgtgtgtttttggttcctctttgagtctcggagtagcgttttttaggggtttagtcaaagtagtttcatattatgaatcaaccgtttgctctatagagtggccagtagcgattcttcccaagcactttcgtactgaatgacctctaatcctcttgaattaaattttgtggttgtggctgctgttatgattttcggtgattttcttttgttttatttttgtgtgggggagaggctggctcactattcaaccggattggtcctgcttctttgacaagttatagagagtggtcaattctggttggctgtttttaagtaccaattgaccttgagtgatggtctttttctccttgtttttcataactattttgaatattaagtggaaaaggatatttaatgttttcgtcccaaatgctaaagaattcagttgtgactttgtaaataaattacaacttctttcatgcgcgtggtataacctattgaatgttgtaggttgaatttgctgttagtgtggattgagc

SEQ ID NO: 62353 - DNA, 784 bp, Cucumis sativus
  Intron number 1 from transcript Cucsa.068300.1 (locus Cucs a.068300) derived from phytozome v7.0 (chr-ID scaffold0070 7; pos 58120 to 58903)
tcaacgaatttcgctaattcggtcaaatatatcatgtgagtattctaaatttttgtttttgaatgtattactacttttgttgattctaatttggaaaaagaatttgttagggcagtagaaagaaaaaaagaatgttgaattgtgtgggcggctgctgaaatttaaaaaatgtaacaaattatttttgaggaattttaaaaaataaaagtagatgaactaccgtatgacaatgaataaagtttgggagcaaacaatgaattttttcaattttgttaataataatgtgtaaagaaagaagaggtttaaggaaatagttccatgttcgtttcaatcgtgctttaaagtatttcaattttagaagcgtatcttttgagaggacaaaattgataccatatttgaatatcactattatagtgaaaatgaaaagataaacttgtttttatatttacagaataatatgcaccaagatagtcgagatatttgttgtcgaaaagaaaaagtggaaatgtaacattccaaattttaggtatttttctcaattaagttttaagaattaggagtgtttttatttgagttttgtatgaaagagaatttatttcgatgggaaagaaagaaaatgtaatattaaataaataaataataatagaatttattttaaaacctacgtccttctgtgtgttccaaacttttcatctcttcttcttcgttattctacgactgcccactactctcccttcttttcttttcagttcaactccttcaacgatcgacgaccgacgaccgc

SEQ ID NO: 62354 - DNA, 505 bp, Cucumis sativus
  Intron number 1 from transcript Cucsa.037180.5 (locus Cucs a.037180) derived from phytozome v7.0 (chr-ID scaffold0047 6; pos 138198 to 138702 reverse strand)
ccctcgctcttcttttacttttgggaaatcgaaaggtgcttgttcttcatactctttacccttcgtttctctgtttatttttgctctctgtatcttgttctgggttctgggtttttcccaatttttcaatttccccatcgtcaattctttgtttttctattttattttttggtttttctctgatgggttttgcttgattggggctgtcttgatttttaacgtggggttttagaatacttgaggaagttcaagaacaccatgtttagggttttgaaattttatgtcagaagttctctgttgcttgaaatgattttgctatttgttattcatcctgaattcaattcctcttaattttgacattgatgaaatgtttgtgttctgtggtttaagcaagcggggctgatagatttccaatagaagtaagagaaatttaggaaggttttgatttatatttgatggtgggtggttttttatgtttgaagatatctggctgcagtcgaacaat

SEQ ID NO: 62355 - DNA, 793 bp, Cucumis sativus
  Intron number 1 from transcript Cucsa.048740.3 (locus Cucs a.048740) derived from phytozome v7.0 (chr-ID scaffold0054 2; pos 3372012 to 3372804)
tcttgagctcggtggagttgcaattacgaaaggtatacttttcttttcatttctatttatcttcttttttttcctgatcgcttctgtattccgagacatcaactctttcctaatttgtgagattttctggttcaaccccggtgatttcgttggtctaacattggaacttaggaaatggtaatgggctctgttgcttggttttgggagaatcgtttctgaaaaaagatccctatattttttttatattgtatctattttctaatttagaaagctgttggaagagtgagtttttatcttctcgtctgtattcattttctctttgatgccagcttaaaaatacagcatataaagactagtatatacacgggagaatcaagttaaagagctgggtacaacagctatgcttatttccaatttctaaacgggaaagtaacttttaagttcaatttctaaacatccccaaagtgtttggttctgctgttttgagtcataattaatcctcttcttggattcctgtttatattgccgttgaggggatataagacaacttcttccagaaatgtttatggggttgctatctgtagcttcattttccccctgatttcaagtttaataattattcattaaagttcatgattctcttttgtttactcgtcaaaactatgtctatggatttgattttcttggtgcttgttgatctgttctgctaattaagcatatttttatgaaatttataccgtctgaagttaaattttaatgtggatgagttactaatattattggaagcttgcag

SEQ ID NO: 62356 - DNA, 728 bp, Cucumis sativus
  Intron number 2 from transcript Cucsa.088560.2 (locus Cucs a.088560) derived from phytozome v7.0 (chr-ID scaffold0088 8; pos 837659 to 838386 reverse strand)
gcttctgcttttgcttcaaagttttcacgtggtatgtgattttctgacacaatggatacttaaactaagttcattgatttggagctgctgcggctataagctttgtagcctaatattttagaagtgctttgcttgtgttgaacctagatgaaaatctgattctcaattgtttttgctcacatgtatatttgtttgatcctgtttcactgttactgatttgttttttgaattcttttcaggttatactttttttagttattctatttgttaagaaacatattttgtgaaaagagacaatgtgctaaaaagagaggggacctccttaatgctagttttctgttgtcatcaactatccacagaacttataagctgctagtcgcctctactttccctcccgttttttgaccctcaagaaatcacatagaactattgagtagaagtggaatttatacatcgttccatatgtgattaaaaaaaattagttttaaatgattctcaaattagtttttttcataattattgcccatttgaacttgataatttgtgtacacactgtacaccttgttgtaaaatttatcttagctatgatatttcaatcttttatttgtcttatttaagttttgtttttctagttgttgtgaaactcatttagctcattgtttcatgctgaatgtttctgaaaaactaaactagttggtcgttcattgttgggaggacttggaaacaat

SEQ ID NO: 62357 - DNA, 515 bp, Cucumis sativus
  Intron number 1 from transcript Cucsa.076400.5 (locus Cucs a.076400) derived from phytozome v7.0 (chr-ID scaffold0078 9; pos 767259 to 767773)
accctgacttcttacggtatgctgtctttttcccaagaaaagtcaaaagaagcatgttagaattgataaaggaaagggttctaagtcttaactaaactaactatttagcagtccactgttgactctacatgttttggaactctccaccgaaaaaattactgtccatttcttttcttcgttaggtatggttttctttgtcctagaaattccatggtaaagaaaaccaagcaatttagggatggtatgaattcaggattaggaaaaatcaaatgggctcaccccccatctgggatttcttcaatatgacttttactgtggagaagactgggtttgaagatattagatttataatgctaccattttttttttcatttaaatacttttgaatatgaaccgaacaatgtgattaaaaggtatacaagtgacaagcaatgtcgcccctactgattttggcttactgtattcactttgtttttgcaggtgatctgtggtcaggagctgagggtggtattatt

SEQ ID NO: 62358 - DNA, 718 bp, Cucumis sativus
  Intron number 1 from transcript Cucsa.129210.1 (locus Cucs a.129210) derived from phytozome v7.0 (chr-ID scaffold0102 8; pos 246225 to 246942)
ttagaaaacttcaactggtaagaatgtctacagcactttgatatgaatctacagtttcctggtcactaattgaaggtataaatggtactcctttaccaatagttcctagctattgagatgatcttaagggaatccattggagtattatcagtgatcaccatcgttgtagcttactgaatcatgttaacttagtttcttgtttaattttattgataatacatcctgccgtaccgtggcaattattcttaggggtctttgtcattcaaatagatttcagaatatgtttaaaagaaagagcaatcatgtggttttcaattgaatattctgcttttctccttggcgtttgtccttttttgttgggctcaaatctaggagtaatttcctgttttttcttcttctcctccatcgcatattctctgtgtagctgcttattacgttgtgactagaccaaaacaaagcaattaggatttatgttcaatatggacaaaatcatactattgtggagatagataggtggaggttcccttgtcatgatcttagtttgtacatgtgttgcttgctctagtcatgcctatattctgaagactatattttacacacttaactttgttcgtactctgggatatctgcaagttatcttggttctgttccatccatttatgtatttatttatatttacctaggctttgattggagatccaagaagaaggattcaagt

SEQ ID NO: 62359 - DNA, 1031 bp, Cucumis sativus
  Intron number 2 from transcript Cucsa.129210.1 (locus Cucs a.129210) derived from phytozome v7.0 (chr-ID scaffold0102 8; pos 247015 to 248045)
tgcacacgattcaacaattatgtgagcaaacctctgactttcgcatcggaaactatcatatattggaactctctgctttagtatgataatgtagtattcatttaaatcataattttttctttgaactgataaagttgtttttttcatacttcctgttgttttacacggaaagaatctgtattcaactattgagagaatttcacagaatactatagccccagatttaaaggaaatggtttatacaggaatggaaattgaaccaacagtaaaaaaaataggtaaataaagtattgagtcaataaaatgtatacccattggcttaaacttttgggttgattagtaattaaacttattactggggtttaacttgtttcctatcaaaaaaaaaagaaaaagaagggaccagcacaacaactgactcactagcttagtcttacataatttaagaattaatagaacttcaactaggtgtcaaatttctagttataaactaatgaaatttaggtatacatctcaactactggtgacttagcgagtttataaccacaaaccagccacttgaattagtttttttttttttttgggtagtatttttagctttctcttcacgagtgtaaaaccagggtagtaacgtccatttctttcccttgaatatgattgaaaattcatgctttgctccaatttaaatttgatttcatatatacccaactctaaatgcatcatgaggacaacataattaaatggtattgatgcatattagctggtcatcacaagtagcctctctctgaagagagcaggtagcctgtgaggttgtatatgtaactcaatggaccacccctccccattttagggcatttctttatataattgtaaccgattcagagttcaaaaagaaccatatatttatgtgtgcaggaagatgaaaagaaattaatattattggtggatgttgaagtcttactctgttgcattatttagtttgaccaaagattttttgtaacaatcatgtaggtatagtttagcgcaagagc

SEQ ID NO: 62360 - DNA, 467 bp, Cucumis sativus
  Intron number 1 from transcript Cucsa.042510.1 (locus Cucs a.042510) derived from phytozome v7.0 (chr-ID scaffold0054 0; pos 906950 to 907416 reverse strand)
gacaaaagtgaggatctctcttaccatactacacatttcttcttgggttcctaccattttcttggacatttgttagataaagaggaattttatgcaagaaatttacacttatttgaaatatagaagcatgccaatagccgattgacttttttttctctttgagtgaaaggtgattgacttttatctgtatattagatgcacgctgttactatctattgctgaataaatatctaaaatgattttctatcatacactgggaactaatgtactgtgtacatcttctgtaggcattgaccaaatgaaaaactaaaacgtgttttttcataatatttttgttgctaagttctaagagacaaaatgtaaggttatcttggtaaaaggaggacgtaaatattcattaaatatttttgaattgtaagacatgcatggcttagcaagttttcttctcagagtgggagtttcatact

SEQ ID NO: 62361 - DNA, 448 bp, Cucumis sativus
  Intron number 1 from transcript Cucsa.091050.3 (locus Cucs a.091050) derived from phytozome v7.0 (chr-ID scaffold0089 4; pos 2134038 to 2134485 reverse strand)
ctctcgtttgaagatttcaaccagagaaaccaaatgtaagataacaagaatttcccttctctctcattatcgactcatcttcagagcttgattctctcaaatttgtttgtaaatatctttctctcatgtgggttttcttcctttttcctacccgagattttgtgaatcggaatcattacgtgtaattgttgcttggcttctttgtgttgacttgtttctgaaaactctttcctgttctttcatctgaaaactttttggagggttttttttttgtgcttcttgttcttgttgttttgttgtgtgaattcactgtatctactttgatttggttctctgcctcttttgaagacttgggtgtttacttttctccaatttggaagatacccttttgatctttcttcaatttgaagcagccaagctgattttccctttttgaagagtcattagg

SEQ ID NO: 62362 - DNA, 931 bp, Cucumis sativus
  Intron number 1 from transcript Cucsa.100840.1 (locus Cucs a.100840) derived from phytozome v7.0 (chr-ID scaffold0092 7; pos 152287 to 153217 reverse strand)
tttattctatagcggctgccacgggtcataataaggtactctgagtctacttaagactctgtatggtcaatatttctcccaaagaagtgatgtgatggtaattttagttttttattcactgttcatggtttcttgggaggtccttagtaccttggagtaatcacttctgtctcaaattcatcagatattccatgtcaaattataatttttttctttgtttggaaaaagctattagcttaagcagtctggctaagaaatcatttcaagtcttgaaattaggattctagatttgtagattaagaatcacaaacactttagtttgtctcgtgtcttttgtttacatactggatactcgtttgcacaatatacatgtgttagacactaaatatacaaaatcaatataagtcttcaaacatttgttagacatgcattgaacacttgtaaataaacaaacactttataatgtaggacaaaataataaattttgagagagaaatacatcaaacttatgtttcgcttataaacaataaacttattgactttgagtttctttgtcctagaaaaatgatacacatttcaatagacaagtccttgccatactcatgctttagatttcttagaaatgatttgccgccatgtccctggtgtgtcatatctgtatccatgcttttaagttgaaatggacggtaacatttttatcagataacagtgattcacagcgatggaaaagaatattttggtagcttaattcacttgaaagcgttgtattttgtgaaatgaaatttctatcttattaacattgtatttgaactataatttactggaccatcaaaatctttctgctttttcctacattcattcttgtatttatttgttagttaaattttctgtaacaggaatctcatccagaatctcatctcagggttcctgc

SEQ ID NO: 62363 - DNA, 600 bp, Cucumis sativus
  Intron number 1 from transcript Cucsa.095090.1 (locus Cucs a.095090) derived from phytozome v7.0 (chr-ID scaffold0091 9; pos 1055157 to 1055756 reverse strand)
ggacagaaggctgtgaagaacaacaaattcccaaggtataattccattctttattttttacaattcttactttcctactactccacaattcaatttgataaaatataatatatacacacttcaattaaaattgataaattttatagcaaattaaactaactttgagatatatgataattaattatttcttggcattaaaagatatccaaaaaagtcaattttgatggttagcattgaatgataccatcaattatttctattagcactacttatctttttttcttccaatgggtatatatatatatatatcactttcttcttatgattttttttcctaaagttatttataatatttatgagttggtcggaatagacctcccaaacacaaacataaatcttagaactatatatttacaaaactagctctattataaatttaactatggttttcatttttgtggagtaaaaattgaattattagcctaattctaaaaatgaaaatatgggtttaaaaaatatattttcaaagttttccaaacttcacttgtgggtattgatgaggaagagatgtatattaaacattttcagaagctactatag

SEQ ID NO: 62364 - DNA, 825 bp, Cucumis sativus
  Intron number 1 from transcript Cucsa.048860.1 (locus Cucs a.048860) derived from phytozome v7.0 (chr-ID scaffold0054 2; pos 3479038 to 3479862)
gactgcttctacgttcaaggttccgattctctttcacaacttgctacgcttccattctggaagctattttgagatattccttttaatttctactttcccgctccaatgcaatctttcgaaactaccatcaactttgaattcctgcgtgaggggacttcgaagttcctaattttgttttaaggcttcaagaagaccaacttcgaagcacagtctgaaattgctctttgtaaaatgaaatgcaaaatttccatctagaacacattggttattattgaagtatcgatttaatattacatttattttaaccaattagctaaagttctcgagtcttgtgatttagtaaggtgtcagtgaggggtcctgtgtttgaatctctgtaatgtcattttctcattactaatattggttttcacttgttggtcttctacgaatttttaagcccacaagtgtgatggtatccaattttggtttgagcgttaagattcttgataaggatttatatgacaagaaaatttagattgctgctgcatagcttgtgatgaggtgttagtggggttcacgtattcctttgggcgcaaaggttagcattagtatcatggatctgtagatttcctcatccactcttgtggaaattagtattgtatgatcagaaaagtttatgaaaaaatttgtctgtcacgttatgcttttcatactttatttctgttatcacgctagacaacatgtttttatggttggttgcaaaatcgtttctttctctcaagcgttttgttaattgatatttctgcagttgagcaacggaagcagccgtgcttaaggggctta

SEQ ID NO: 62365 - DNA, 665 bp, Cucumis sativus
  Intron number 1 from transcript Cucsa.046240.3 (locus Cucs a.046240) derived from phytozome v7.0 (chr-ID scaffold0054 2; pos 1809098 to 1809762 reverse strand)
tggaggatctggcttgggattggctaaggcagattgttggtgacattcttcttgctctatcttgggtcttctttcttgtttattcctggagagaaaaatatgattagtttccctaactaaattgtcgagtcttttcttttgattccaagttacaaattgcattgagatttttctgggtttgggtatctgttcaaaattggggaaagaacgctactgattcaaacattcatatcgcagaaaggggacaatccatcccactttcccttgtgtgtgttgtgtcttttcttcttttcatttcttgttgattgaacaacgtttttcagctttaaaaaccacaatcctttttgtaaatattatgtgattattaataagtccaatgaaatataagtcatacttgatgctttgttgtcgagttcattagtatagtaagtcaaatgaaatttaagtcatacttgatgctttgttgtcgagttcatcggtatagtgaaagataagagctgtgattgatggaaagaatttaatgaacttccgggccactgaattgtcatgagatatgattattaactttgtgattcaagagctgaagttctgtattaatctgatgtcttaagttgaacggatttgttgtagaagccgatatcactgattcacttgatttcggttgg

SEQ ID NO: 62366 - DNA, 271 bp, Cucumis sativus
  Intron number 1 from transcript Cucsa.117080.1 (locus Cucs a.117080) derived from phytozome v7.0 (chr-ID scaffold0099 5; pos 800207 to 800477 reverse strand)
catcttttcttgcccgctctcttcttcagcgcgaggtcggtctttttcacttacactcttaatcttctttgtttcactgtataactcttggtgtatgcgttcgttgtggccactcattattttttactctatttacagtttagagtgagccctccttatttatagaaggactagagacaaaatatttcttagcttttacgtcttttggtttgagtttttgcttgctttctttgcagggctacaggagaggcgtattggtgacgtctactcc

SEQ ID NO: 62367 - DNA, 759 bp, Cucumis sativus
  Intron number 1 from transcript Cucsa.120570.2 (locus Cucs a.120570) derived from phytozome v7.0 (chr-ID scaffold0099 8; pos 2635963 to 2636721)
tatcaatattcaaccctccgagctcaaattcccatgtgagtatatcctcctttcccactttcccccctcctcctttttgtttcttcccaactttctccttttcttctctccaaaatctcctcaaaatggcaaattgtttctttttatgactttttgcacttgtataattgatgaatcctttgatgggaacatttttcttttctgggttttcgtctttgattcctttcctccctttattcttcaatttttacccttcttttgtttgtgatcatcatgttttgacctctttggacgttgaaaagcatttttggatgatgggttttcgattttttattttttattttttattcagtaatccttcaatgttatgattctccatagttgtgtaaggataggatgttgtcaaaggaatgacctgaccgtctatgtttagttgagatgtgaagggtaattttttttttttagtaaagaagaaacggtttcatcaaagagggttggattgttgttaatcacgaattgcaaacacaaattgttgttcttagaagcaattgtttaatattagtaatctgtctctactttaagtttgatcatgactgcattttttgtctaattctgatttatggatgtttgctatgtcctcttatttgtgtgtgttttcgtttctttcacttctgtaaaaatgtaaaaactttgctcggtgggtacttttcatgtgatggaatagttgaattgaggaagcaaagttcttgttccttgcaa

SEQ ID NO: 62368 - DNA, 441 bp, Cucumis sativus
  Intron number 1 from transcript Cucsa.104720.1 (locus Cucs a.104720) derived from phytozome v7.0 (chr-ID scaffold0092 7; pos 3124602 to 3125042 reverse strand)
agggagaccgcacctttgctagcttctgaggtaaatggtactccgcttttttcttcttctttgttagatttccaacttaatcatttttcatgaagaaaaaaagaagcacaatggtcatatagtcttcttgctcattttattgttgttggaaagctcatgttgttcattcatgtctgaaattcaaatgttgtatagtgattgatagtttgatggcattgaatagtgttatttaagtagttcatatctttcatcatcattgtgttgaactttacacgagcatatgcttaaaagtcttttgggtgtaacttttgagttttaacatttggaaactgatgaataatgagttgttatcaattggctatacacaacctgataacttcactcatccaaaatttctcattgaatcagtttcttaaatttttttgcattcatatacagaat

SEQ ID NO: 62369 - DNA, 573 bp, Cucumis sativus
  Intron number 1 from transcript Cucsa.135550.2 (locus Cucs a.135550) derived from phytozome v7.0 (chr-ID scaffold0104 4; pos 379217 to 379789)
aaccagcaaagttcattccaatctgtaaggctcgtaaacaaatttcaatatgttcacttaattttgctcaaccgtgtgatgattttcattgcttttggtggacacaagttaagatattactcttttctgttgatatcttttgcatactaactaagatgttttttactttttcttgagtggacagctatgaaagttgtttctaaaatacaactttttatagattaatacgaggaagtatatcctaattcaacgttagaaattcttgagactagtagtatcgtaatatgatatcagattaggatcttttctatgtttaaatttctgtatttgttttttgctctccatatcaagaagaagagttaatccagcagtttcattaactaaaataaagttcgctcccagatgtttatggaatgaatgaaattgaacacttgtatgaattggagtatttcttagagttgtttgagataatagctagagttgactcactattagtagcttgattatggaaacatctgattaattttttctgaactctctcatcaagtgggaacaaaatttttggcaagttca

SEQ ID NO: 62370 - DNA, 587 bp, Cucumis sativus
  Intron number 2 from transcript Cucsa.135550.2 (locus Cucs a.135550) derived from phytozome v7.0 (chr-ID scaffold0104 4; pos 380218 to 380804)
ggtgcagcagcagataagtattactcaaggtacactctagctacttgtattttcttttccacgtatatctttttcatctctaaaagtaaagggtatcattttatttcctttgtacttttttgttattccatttgcacacaccatgcactctgctctgcatatggtccacagctgaaaactcggatgaaatgatggttaaaagtaaaaaaaaagtacaaaaattaggaggggagatgaaaataaatgtaaataatattagttgaaggaaattaagaggacaatttttttttttgataaacgtaacacttcatttagtttgttgctgttttggttttggcatagcagtcattagtctataattaagcgaataagaggacgatgatagctacttagttgccctttaaacaggatataccgattactgatcaacaatattacaagtttttaatagcttaatcattgtgaggttatcagtctttgggatggttcagggttggaagtaaggtgacatcaaatagttaattaaatcgacgagaatacatcatatcttgatgatgatggtttatcttttctgatgtcacagaaaa

SEQ ID NO: 62371 - DNA, 492 bp, Cucumis sativus
  Intron number 1 from transcript Cucsa.046150.2 (locus Cucs a.046150) derived from phytozome v7.0 (chr-ID scaffold0054 2; pos 1739736 to 1740227 reverse strand)
attcaattgagagtatttattgagactgcagataggtgctattctcttcccacattttcttaagaatttgatactttttcacaattcttcaaaaatgcattcttagttagataagtccaagaaagctgtcattcaagagttcaagagtaaggctacgtttgtggagtgttattttgttatcatttttatcttcatcttctttgtggatgtttctttccaagagttgatagattgccttcgtgttcataattcaaattacgatatcatgatatcatcagaattgagaggttcctgccaggagaactttaattatgagcttgtgtaaatgcttttgcgttacttctgttttgatttcacttaaatcgtttgtaattctatcagcagttttgcattgtttgtagccctcaacccattcctgtattgtaatcttttctgtgaatccctattttatttataggaaaagagaaacaacctaccggctaaatccaactt

SEQ ID NO: 62372 - DNA, 818 bp, Cucumis sativus
  Intron number 1 from transcript Cucsa.130710.1 (locus Cucs a.130710) derived from phytozome v7.0 (chr-ID scaffold0102 9; pos 767465 to 768282)
tctcaacttcacattccctgaccattttcagactggtatgtattttgttttgcgattttccttttaaataatggtgagtacaccaattaatatgttgtttaactgttcttgtgagctagtattagtcaaaagtgaacatttattcttttgtatactagagtccttaattagtagttgatcatcttttgtatacgttgatataatcttttgaaatcttcatcaagtgttgaagccatctggtatactttagacaaatttgacacatcctttacatctaacggttagatccttttaagttcacaagttttatttaacaagtaataagaatctaatttttatttcactgataaatgttgtagggtcaagcgggttattccgtgagattagtcgaggtatgcgtaagctggctcggacactcacggatataagaaaataaaaaaataaaaaaataataagaatctaactttaaaaaagtcatttgtataaaaatagaggtccacaatatttaaggacatctgtgacttagtgttgtgtcccattagctttgatgaacctatttatgctcaacgtattttgccataacagaatcttatctaagaagaattatatccagatatttgttggcgtcaccgtctctataatgctgactgagttttgtttaatgtgtatgtttatttccaaatttgtgtccttatttgcttgaaaatatgagtttcaattattattatttttttttttattctttgattttctgttgcagtattctacaaatctaaccttacaagtttatcagtgcagtcattttccagacagagaag

SEQ ID NO: 62373 - DNA, 930 bp, Cucumis sativus
  Intron number 1 from transcript Cucsa.058740.2 (locus Cucs a.058740) derived from phytozome v7.0 (chr-ID scaffold0061 4; pos 858991 to 859920 reverse strand)
gttgtgtaattcttaggcaaggatttccccattattgtttcttttattgatttggaagggtgcttcaattccttgtttttgttgttgtttggattttggatttgttgtgattagttgattcactgattattattgcactgccaactggaaatgcaggaaatctagttgatgaacttcaaataatgtttgtttttaagtcaaagtgatgagaactttgggccttttgccgcatgttagattgctgcttgcttgcttaagatagtgttttcatatgagttctcttgtgttttgtatttttgtaattttgtttgtggaaatggattggttgaattgtttgagcaaatgtattggagtagtttgagatatttgttgcttattggaagtgaagttgttgaggggaaattatatgaatgaaatggaagtttaactctttttgttaagatgggatccttttaatgattgtttgtgaacatggtaattttcatgtgtttgaaatcattgcattgcagttgcagcaaatagttgcagtttagtgaagaaggcttgatggagctgtattattcagttcagttggcaagcaaccattttaaaagatcaatggtttatgctggtttgataggacgttgatctttcagacagtcgtagaaatctcaactgaaaaccaataacttgaaatctgatgatagcatatttggaaattgatgaatattcacgtttagagagggtgtttgttttcatatgttcatgttcatatgttcgtatgttctctgttattagttttttctctctttattatggaagaggcactaggtccaaacttttgactcttttagttttaggaatgtgctcttttggaatcatttagctaatttgattgtttaaaagtaaaacggaaattgatttgacatttgttcaattatgtagatatat

SEQ ID NO: 62374 - DNA, 444 bp, Cucumis sativus
  Intron number 1 from transcript Cucsa.047280.3 (locus Cucs a.047280) derived from phytozome v7.0 (chr-ID scaffold0054 2; pos 2368835 to 2369278)
ctcagacacccaatcacaacctcgacgaaattaaggtatcagtgcatcggtaaaggaaataattgatatttaaatctgggaacttttttctttttaccttaaaccttacattctgtcacatctattgagagaggcaattcactctatgaagtgatttctttcattaattttactttttgtgggggttttcgtgaagaattcagttaactcagagaattgggttaatgtgacagtttagaaacatgttcttttttaacaataaaaagcaatgtttaatgctttgattgtatttttttatacttctgttaatcataattttactttaatcgacgttgcatgattaaggagtctcaatcaacttgaaaatggtgttgatttgggttataccttggttaattgtagtgtgaaggcaacaattgatagatataagaaagcatcctcaga

SEQ ID NO: 62375 - DNA, 386 bp, Cucumis sativus
  Intron number 1 from transcript Cucsa.019880.3 (locus Cucs a.019880) derived from phytozome v7.0 (chr-ID scaffold0028 4; pos 27998 to 28383)
cagccgcccgttgaattctcgtctttttcgaacgggtaaattccctttccttatcattataatttcggtgtcgtctggtagttccattaattccttcttctgggcaattttcgctgggtttgttggtttgttctatggtatctgttgatttcagggtttgattctatggttttttttttttgcctcaatttccatgtttttgtttgccttcggtttgtttatgtacggaaatatttgatccgtcagttgatcaatttgtgggtgactcttctgcatcatttacaagggttcactctaccttgtcttctgctcggacgaactaactgcttgtttaatgattggcaatgtgaaacaactcatttttatggtgtttggattgaaggtca

SEQ ID NO: 62376 - DNA, 787 bp, Cucumis sativus
  Intron number 3 from transcript Cucsa.024070.1 (locus Cucs a.024070) derived from phytozome v7.0 (chr-ID scaffold0033 0; pos 83425 to 84211)
ctcctaccacttgctagatttctcccacaaccaaagtacgtaacccatctctttcctttttcccacctcaaatgaggtctagaatttgagtttgatcatcgagatgtttattagcatcaatttccaagttattgcttatgttcatttgtcttgagaggtttcatagtggcttttatggtaccgcaataaaaaagaagagcttttttggtgcccattgcacatagctttaggtttattgttcaggagtatggtttggatagaatttcaggggtttttttttttgcatttttctttgtttttgttgaatcttgaacagaggtggggtaattagtaaaacaatctattatagttgaaactttggcctccgaattgagtataatcacgagtaacttgaaatactggtgccatcctgaatagaattttgtcagttttattttattttattttttaatcttttttgtttagatagtagatacatcgttctctatagtttccaaattctcgtaatttaaactaacaatgtaggttcatattatgggtctgatgtgacgatgaaaaattccaaaacctgtcttttgtgcttctaatatcttattgcttcattacgcggatgttatacttcagtggccctattttgtgttgagaaaaacaaatttttaaaattgaaaaaatcaaggaacaagtgagcaatgcttcacaatgtttgtgttagattcagtatagaaataacatttgtctgttgattatttcaggggacagtttccctctagaggcggaggtcgtggag

SEQ ID NO: 62377 - DNA, 783 bp, Cucumis sativus
  Intron number 2 from transcript Cucsa.130360.1 (locus Cucs a.130360) derived from phytozome v7.0 (chr-ID scaffold0102 9; pos 342809 to 343591 reverse strand)
aagctctggcttcgaagttaccgggagatcttaaggttcgctattgcttttgtttctcgactggaagaaagtagtaattaatagaaaagaaagtaatattagcgccatcactgtttttctttgttcttgcaagtagtgtatcatagttgagttatactcgtttgtttcaccgtaaatctcatatggtggaacccacctgccaaaattagttttgggttattttaagatacaaacaagcttttgggttgtcctgtttacagttgtagttcaatgaacgttactgctaaaacaagagccgtatgatacatatacacgtattacaaattaagcaataagatataacttagtgtatggaatcttgatatgtacaggctctttgtatgaccagcaatattaaacaacattatttaaaggaaagataaacatgttgcttatcttttacttagttagcttgtcttttctttttttcttttttctttttttctattttaatgtcacaattattgggtagataagacaagaaccatgtggtttgagtgtgaattattttgcatttaggtaagggggaaaggaaaaatgatcacttggatattaggtagaagaatgagatgagtatcagtaggattgcacttattgggtaaaccctggatatatattactcattttgtaactatgatgatccactatagttcaaaaagttgaatatttaattaacttttggagcttataatttgattgtactaattaggtggtcttcttcactaattctgggacggaagccaa

SEQ ID NO: 62378 - DNA, 486 bp, Cucumis sativus
  Intron number 1 from transcript Cucsa.130360.1 (locus Cucs a.130360) derived from phytozome v7.0 (chr-ID scaffold0102 9; pos 343775 to 344260 reverse strand)
tcagccctgcaatatctcactactaccggaatcctgtcagatttcctcccttttctatatatttatctctctcttttttgctttttttttctttttcttttcttcttttgttgttgttgttgttgttggtgataggaatttaggaatttaggaatttaggaatttaggaatttaggaatttaggaatttaggaatctaggaattaggatcgttcattttgtttttttaggatttcgaattcttgattatctgctactgatctaatttaattattgcttgcgttttgccttcatttaggcattgtaattgtgtaattattgtgtgaacttgtatttgttttgatttccgacgctgtttttgcttgttgtttccgtaattgtttttatttgattttggtttctgacacgtttgttcatgtatttgagcacttaatcgggaggactgattgtttttttactatttgttttttatagttgcttgtggtag

SEQ ID NO: 62379 - DNA, 796 bp, Cucumis sativus
  Intron number 2 from transcript Cucsa.124220.2 (locus Cucs a.124220) derived from phytozome v7.0 (chr-ID scaffold0100 1; pos 217474 to 218269 reverse strand)
gaaacaaagcttgtttgaaattgtctaagcagcaggtaatttttatcttagctgatagtcttccgtatgtcgtaatctttttaatcctggggtgtatatgttaaagtttagaaattcaattcctcattgtgatgactaatagcttaaattttttggtctgctagtgatttagtatgctacaagaccaatacttctctgttctaagcttgctctaattgattgcttagtcctgacttttggccatggggagaccgatacaatctttcatgttggcactatctttttttagtgctagtagttaacttgggatttacaaaccaaagttctccctaccatattgtatcctaagagttttgtgctgaatacttggtcattagtcatttaacctcatcttcaaattagtttcatcaatatacctcaatctgtgtgtttgcttgtttttcctagttttaagtagcagatgagatttttataactagcaagcatacatattgattctgttagaattgggatatactgaggtaaatatattcaccttggttaaatccttgtttaatcatttttaatttcctatttgaacttttgttctcctttttagttccctttcaaaattttattttgctgaaaatagagatccttttcatcattcaataactttcatttgggcttgaattttgattctgggagaattccctcctttaatttctaaggctataccagtttcttactatctctctgtgtataattcaatcttgtttcaggaactctatcgaagtaaactcttatcttcgttcaa

SEQ ID NO: 62380 - DNA, 676 bp, Cucumis sativus
  Intron number 3 from transcript Cucsa.090850.1 (locus Cucs a.090850) derived from phytozome v7.0 (chr-ID scaffold0089 4; pos 1979145 to 1979820)
cgtttgcttttctcgaacccctgattcggaaagtggtaagacaacggggcttttatgtttggttataattgaactgaatcaattacatttgattttagaatttactttggctaccttgtttctttttagcttttgccttttaggtttgcaattgaaactgcagtcgttttagataaaaggaaactattctgatgccttgatggaaaacacttctattatatttattttattattatttcaatatttggctacagatcattgtgtcttttctctatttttttttttgtctcccatcaagttaaagagtttttttttggttaaaaaaaaatctcccttgggcacttgagatagtgtaggaagttgcaccaatttacgggccacctaatcttcaacgccacttcaaaatataaatttcaaatttggggataagatattaacatctatttaacaaggataaatatatggcgatgtggcttatactgtcatgctaaaatgttcagcaagctgcagccttagttagtggcaaacttttgatttcgttcttcttcttcttttttgagaaggaaacatgagagcaaaactttgatttcagacgtttgatattctattctatgttttttttttttgtttttggttattaggtaagagaagagacagaaggtgccatttccaaatt

SEQ ID NO: 62381 - DNA, 694 bp, Cucumis sativus
  Intron number 5 from transcript Cucsa.119950.9 (locus Cucs a.119950) derived from phytozome v7.0 (chr-ID scaffold0099 8; pos 1908636 to 1909329)
atctggggaagtgaaggggtgactgaagataacaggtaatttcgccagcttccttttcttctctgttatggaaattagatttagttcatggaggagttgatgcaatattttattttcatttcaaattagcacatactggacaaaactcaaactgtcagaaaaatctactgggtagattaacaggccatcaagagccacagtttctcttttatgataggaaacatgttttgtataccatatgaagggatcttggttgtacaccttttgaaagggtcttttttatacatccttgggtatttcatttatttaatgaaataatttcttatacaaaaaaaaaaagagaaaaagaaaaagaactgggaagacgaggaaaatgcaaaagaattcaagaattcaaacttgaaacagtttagttattagaattaatctattaggacaacgtccttacggttcattattctttacttttgtggtttgatgggctagacaagaaatatgagtagagaggtggtggaataattctcagtttaactgatctcagtcgggatggctatgaccaattgtgctgtttgtattactatttatttactgttcttggccaacatgcttttggcaacattcagtttagtgacgtagtgagcattctatatttttcttctcatttgttcaaatttgactaggttgagcacaacgt

SEQ ID NO: 62382 - DNA, 729 bp, Cucumis sativus
  Intron number 2 from transcript Cucsa.090620.3 (locus Cucs a.090620) derived from phytozome v7.0 (chr-ID scaffold0089 4; pos 1828398 to 1829126)
tcgtttcctggatctgggttcttggtgttggccaggtacttttgctcttcacaatgttgttcttgtgtttatctttcaaaagggtgtaatggggttgtttgaagttcttccattttgtgttttctcatttagttttgggcttttctgtgaaatgggttttggttttttaaactgttttcagtttctgatatagctttgtttgtggtgaggatttggtgttctgctgcagcgtgttgttaggatggttcttcaactttgatttttcttgttatgtagtcttacagtgcagatttttagcttcttctaggtggtttttttttgtttcctttggtcttcgttcacttttgtactttgtcttaaactataaaagttttccttgatttcaagtttgttctttagctcctcatttcatttttactgttttggattagctttgatgtatacgtatcagtatcacctccttttcttctctggaatgctgacctccatacttgccattcttctccttcgttgcaagatggatattatttttccctcaactagtaaaagacaagtcacgagtattttttttttcctcttctcgaaatggttgtgtttccttgttaaatgggctccagatgatatttcagaatattttaccccttctttctcctgctcttatgagcatggagtggaaatcttgatggaaagaagactcaagatatctggtgttttcctttgttgcagtaa

SEQ ID NO: 62383 - DNA, 519 bp, Cucumis sativus
  Intron number 3 from transcript Cucsa.090620.3 (locus Cucs a.090620) derived from phytozome v7.0 (chr-ID scaffold0089 4; pos 1829227 to 1829745)
agaaattgcttgcagacatatttcctaaatcgcttgtaagcatttgctagtcctttttatgcctaatcatcagtagtgtaggattattgatgtgtgaagttttagatcgtttgttgatctgcttgttttaattttatgttgtacttcgactgtgataatggaattagggatgacttgatgttccttaattttttgtcagtaatttagctgtcaggaccagatttgtttgccttcgttaatgtgtgaaattttgaatggtttattgatctgttcaagtttggtgttgtactttgactgtgttaatggaatggaacggatgatgacttgattttcctttcttctagttttctggtgatcaaatggaaaacaaaccacattgtaattcattttttatttctaaatttggagaagttaaaacttttaaatgaacgaaacgagtctgcatgcttcggtgttactattagttgtatgaatcaatagttgcgttgaatgagctctggtggtgaaatccttcgcagg

SEQ ID NO: 62384 - DNA, 553 bp, Cucumis sativus
  Intron number 2 from transcript Cucsa.121810.3 (locus Cucs a.121810) derived from phytozome v7.0 (chr-ID scaffold0099 9; pos 234384 to 234936 reverse strand)
cttactccgtcatcaagtgctgaggtgaagtgttgatacattttgattgtgttctattataggcatttaagatttgtcttttgcccaacttaattttatggagatcagtagagtcgactacttgaacgcatacagctcttctaatatctgcaatcccgagtcaatatcttcatgggtgttcttaagttattaaatttatggtttatactgggcccaaaacaccgttgtgatagccagctctgagtacttaatgttactgaccctggaaatcactttgctgcatgtaactctttcccgttggtcatatttatgtccattttcttggttgcagtgggtttcttatatctagtttgtgtacatttgggccatgcttatgagaggtgtgatgtgatttatacagttttggtaagaaaaagcaaaatactgaagattatgcgtccaaaccctgaaaagaaacattagagaggtcttgatgattcattacgaaataataaggaacctaaccactggcggtgcatttttgtcatactgtaggctggaaaatttggatctg

SEQ ID NO: 62385 - DNA, 459 bp, Cucumis sativus
  Intron number 2 from transcript Cucsa.011170.1 (locus Cucs a.011170) derived from phytozome v7.0 (chr-ID scaffold0015 4; pos 468538 to 468996 reverse strand)
ttactttgtcttacgatactaatattcctcgacaggtatagtgcattgtagattcacagtcatttgtggtcattgaaatggatgcttttcttttcattttgttagttgataaaatagcaatgcattaagcttatcaaacctttggttgtgttgccggtatggatttgtgttcttttaatgagattgaaaaggggtcccttcctgaaattttgactcaatcaatgattcaatactcaaatttataccagcgttcatgctcaactttatttgccataaatgaatgcttagattgtgtcatagttcttattgatctgtaatttgctcacttatttaattgtgtttgtgttcatactgatgatacccttcttctgcatcttgacttgttgacaaaatatatcaaatgtcttaagttataattttgacattccaggcaggactttcaggttccagtgctattgt

SEQ ID NO: 62386 - DNA, 1019 bp, Cucumis sativus
  Intron number 1 from transcript Cucsa.084310.1 (locus Cucs a.084310) derived from phytozome v7.0 (chr-ID scaffold0086 2; pos 72649 to 73667)
cacaattctttcagcttccttggttttgttccgaggtgaaatcaaatcctcctgtttctctatcattcacccaatttagagttgtctagtcatttttaattccatgttgtttatcaccaatttcgtggaatgttcacttaacctgcgaatctgtaattgcttacaaatcctatttcgggtttgatggcctgaataagttattggggttttcgtttgtactgcttatatcctatttcttttgtttgaatattggaaattactgaaattttccgggattgtctgataaaacattagataaaccttgagtttaaggtaaattattgcaaaacatgtactcagattcaagaaaagggatttctaattttatatacttgttgaacttaatagttgtacaggacgtgcttctcaaaacccatagcagattttacccagatttgattgttgcattatgcattttttagtgtggaagagttggttgaaatgtgcttgtattttgttggctaaattctccgagtgaagttgggaaaatccttatgaaacaaaggcttcatttatcaaaactttgatacttttctgagattaaaaattaagttttgcatttttggaaatttgtctcttgcagatataaaaatggctattacctagagacacaaccaatagaacgtgcttctaatccatttattttcattataaaatttattctttaaccgcagccagcaaaaacagtttcattgatccctctgcttctttatcaatatcgtgtatgaagctctttcattctttctctaatgtttcaaaactagaggaaggtattggtttagttttaattttctcattttttttctcttatcctagtttaattttgttggattggagtcccttattgtatgcccctgtacatcatttcatttctctcaataaaagttcggtttcgaaggagaggaaaaactatcttgggttcatatggatttcttgatgtttcagctaggtggctttctaagtaaagactaattcaataa

SEQ ID NO: 62387 - DNA, 871 bp, Cucumis sativus
  Intron number 3 from transcript Cucsa.097480.1 (locus Cucs a.097480) derived from phytozome v7.0 (chr-ID scaffold0091 9; pos 2687417 to 2688287 reverse strand)
acctgtgcggtgcgtggagtattcttacgctgcaggtatatctttgttgaggttttgctttttaattgagtgttctcaatttttattttctgaaggaagataggagttctgtttcattaatcatttgggaagtttattacattacattagagttgtgtttttttatttagtggggttccaaaatagtaagtgaggatcaaattaaaacttgtcacgaccgagaacaatgttacgttggagtggcaccagttgagttgatggatcatttcttatatgtaagaacacagaaggtttcaaaaattagtcatttttaatcgtcttctatgttattcaaatgggagtgaagggaaaggtcagctagttgtatgaatggaaaatctagtgatgttttgactaagttgttttaattcaccttatacggatgaatttcaaggaggaatccatagactcagtgtctttttatcttgccttgtgaaacatggttacttttaaaatattgtgcatactaccttctcaataaatgtgtgttcagttgaaaatgaaagtggaagggatttgtgatgatcatttttgtttttggatgatagagttatgtactctttagagtctagaatttgaatttaattgcctggttcaaaatatgagttgaattattgtttctatggttttttttcctctaaaaaaagaaatgatgaactattctctcacattcgctggactatggtgccaaacttcttttcaagaaaatatgccctacactgcattttagatatcagctatttattgttgttatcttaatgctggaaatttgacaacgtaggtcaatggttttccagggcaattaattactggcggttgggataaaacactg

SEQ ID NO: 62388 - DNA, 833 bp, Cucumis sativus
  Intron number 1 from transcript Cucsa.032880.1 (locus Cucs a.032880) derived from phytozome v7.0 (chr-ID scaffold0042 9; pos 2127717 to 2128549 reverse strand)
gatcttccttcttcttcaatcgctacacacaaaaggtttgtttttctctcttttatgttttgtcaaacacatgaattgtttcccattttcccgcttgcatttttttttattcaattcgttctgattttatgccatttcttccccacttttctcgtttacccttcaaatctcggctttgtttggttgtcttctggatttgttctcatctctgaaattgtttttcaatttgattgaatttttaatatgtcctttgggtttctttattttggttgctgagaaaatgtaggaggggattgaaggggaggaatttgcatctttttcttttcgttagttggtgacgtgaagccttacaaatcttattcttttgaatgacctgatgcttctatttagttgaggagataatgattcatgatcgatattaatcttagggtatatggttttttattacctagggtaggtattgttgtgtaggatttcgatttttatttgaattgggttccctttgttttatttatacgttagccacttccacttttttcataatttgtgaagttttggtgtccagtcctggactatttgatgtattttctttttttgctgatctgctatttgaatgttctttgtttttgagtgccactctgtggcatagttaatagtttctgagagtttattaatttattttttattctgagtgagcaacataatcgtgcaccatatactgaatgctaaagcaatacgttattttagcatatttcttatcatataccacatactatatttattttctgacatatttcatgttacaggaaaaggaatttttcacatttcttact

SEQ ID NO: 62389 - DNA, 587 bp, Cucumis sativus
  Intron number 2 from transcript Cucsa.081370.1 (locus Cucs a.081370) derived from phytozome v7.0 (chr-ID scaffold0081 7; pos 190851 to 191437 reverse strand)
tggcaagtggcgcaggtaagaaaatgctgcactttcacgctctctctaactaatatcttgtttgcattttggaacttcaaatttgttctacacgatctcaatttctattacattaacaagttcacttgcttctccatcttctcaactttattccgtggaactttgcaatcagaaacaaaacttatggtagtaattattattgtatttcaaatttaggcaggatttatcctgtctattttgcaggactttcttccttctttcacagaagattaaacttatggtccttgttgtttaggttattatgtgttcttctcgtggctgattgtttaaattaatttctttgaacgcttgccatgaaatgaactttatgctcacgcattcatttgttgtcatagtattccaatattttctaaagttgggggatgaaatcctgatcttcttctatttcttctttttcattgttttcttgattgttgttcatgattttgaatctttataattttgtgaacatgccgaaccccggggtacaatatatttttaatttaaaacttggcactgtagggctcctctttttgaagtccaaactg

SEQ ID NO: 62390 - DNA, 580 bp, Cucumis sativus
  Intron number 2 from transcript Cucsa.121970.4 (locus Cucs a.121970) derived from phytozome v7.0 (chr-ID scaffold0099 9; pos 346056 to 346635)
gatccgtcaatttgcaggtattagaaagaagcacttgttgagtgacagaatcatggaggattattgcttttcatgtaatcgtaactttattctctttcttcatccattggatgcatttcatgggggaaaaggttcgtggaggatctgcaggtgttattgagtcggtttacggtgttatcaagcctatttcgatagtgtgagttggctttttttacgttgttttaagtgaattctggattctttaggtgtactagtatacgaaagtcatgtaatatttgaatttgattgcaaatttgttccaatttttgaagacgatagcaatctctatatcgattacataatttcagatgacattataagcaatactatatgaaatcatttaggatatggttaggtattgaggaatttagtgcttccactagtgttccgacctgaaatttatattggaaatggttattgcatcatttttttattttacttatccaacggttatactttatcttgctcttcaattgattttgtttcctccactctcataataataggaataggagcattttggttagcccatctggaaagc

SEQ ID NO: 62391 - DNA, 551 bp, Cucumis sativus
  Intron number 1 from transcript Cucsa.113180.2 (locus Cucs a.113180) derived from phytozome v7.0 (chr-ID scaffold0095 3; pos 1429062 to 1429612)
gctggccattcaagtaagctctacgactctagctagcttcccttcatcttcttccttggtttgtgtgtgtgtgtttatatggttaaacttatcataagacatcagtatatgatgttaagttcatcagatttcgtgttttaaaatggtatatgatcgtgaggaattagtctttcctttctcaactaatatggagttaatttaactggtgatctaacattttttatatttcctttttctggagtgatgctgaaattttaaaaaacctcaccattttttgagttaaaaattacgttagaataatttccaatatattttctaaagtttggtttcacgaaattgatttgttttgttcttttgaggtgaagaatgtggagtgtacaagttgtgtgtatttttactgttctacaacccgataacaaaaacgattcaagcaatactaatacaatctagactgcacataattgaagatttttcaagtttgatcttttgtttactgatctgggactaaatgttgttgtgtatatatgtgtcccgttctgagtaggtgcaac

SEQ ID NO: 62392 - DNA, 560 bp, Cucumis sativus
  Intron number 1 from transcript Cucsa.099130.2 (locus Cucs a.099130) derived from phytozome v7.0 (chr-ID scaffold0092 6; pos 16257 to 16816 reverse strand)
ggttcacttcaatcgtcttcccactcggtatctttaacctactctttgcttccgtactctcccctacattccttccttctttcttctttgactcctttctcgcgtttttcttgatcgaggttttcgtttttcttttatccatcctttgcaagcttgttagccggttgttgatttctggattacgttttcgttttgcttttttttttcgtaatcaatgttgttgtttttttttgcatgtattgttcgaatttgtgttttatcggattagtattggatcaggttttcagttttggagtagagaataaaggattgtgtgtagattttgatcattttacattctttcttatgttatcttcaattaagagattcggtatgagtttgctttgaaagttctttttactttattgtctcttctaccaatggtaattatggtcatcttgaacacttcctgagtttggtagatgactttaaccgcttagtctttgtgtatactgtcttctttctatcttccttgttcggttgatgaatagtcgatcaattagatccaatgctatgcagat

SEQ ID NO: 62393 - DNA, 350 bp, Cucumis sativus
  Intron number 1 from transcript Cucsa.029920.1 (locus Cucs a.029920) derived from phytozome v7.0 (chr-ID scaffold0039 9; pos 169727 to 170076 reverse strand)
gagcgcaagattctggtattttttcttccaattccatttttttttctttgatttttccgttccttctttaaacttattgaaacttttttggggtttggttactttcatgttttctgtcttggtatcctctgtttatggctggttgtatcttggtgtttggattttgtttgatgaagtttttttggttggagatggttttttggggatcagagtgaattcccacttatttttctttattaaagatggtcgctgactgggtgtttacgatagattcgttgaattttgttggatgacaaaataatctcttcatttcagtttggaatctctttttctcggaagaaaattggggg

SEQ ID NO: 62394 - DNA, 771 bp, Cucumis sativus
  Intron number 2 from transcript Cucsa.098540.1 (locus Cucs a.098540) derived from phytozome v7.0 (chr-ID scaffold0092 3; pos 503398 to 504168 reverse strand)
agctaggtataaggtcattgaattggatcagaaaagtaagtatcatttttgtcttagattctgctacaactttctatgcttttgtctaaatgtttgttctaggtgttctcttactaaaacataacctttatatatcatgaaagctgaaaactgaagttgaatgaaagatatttgctatttgcaactgggaaaatagtctttcctcttttattgagctcatagttgactgatgagattcaaattttgaaaggagagttagttttcagtaatacccttcaactttagctcttatgttatgaaatcatgacacaccaaattttccataagagttcattgaaaagtttgctcgatgaggaaaaaaaaccatattgtagtttcaagagtgaggagataatattgcacattaacccaggagtaacttttgcaacttattctaagtggaaacaaaatgtgggctggaaaaccccatagttgcttggaatctcattcaatgtcctgcacaatcactatctgcagttttcttcattgttgagtaaaaataattaaagccaaccacacattctcgatgaatccattcacaatatcaaacatgatgacatataatgaatgtttttctggctgagataacgcgtgtgtgtgttagctcaattttcaagtcgtctacaataacttggtcgagttgtataattaccccgtaacaagttatttgagctgctctgcttgtaactgttcttggaacattattttgaggaatacatctatatgaaggtg

SEQ ID NO: 62395 - DNA, 500 bp, Cucumis sativus
  Intron number 4 from transcript Cucsa.066110.1 (locus Cucs a.066110) derived from phytozome v7.0 (chr-ID scaffold0069 6; pos 667771 to 668270 reverse strand)
aaatagcagtttatcgacagtgtgctgaaaaacgggtaagactatagtttgcacatttttatagtctcagtttctctaaattaaggtttgtagcaatggtaattcgagatgccttttttctttttaaatgttattttttttattatttagttgattgcttctagacaagcatagagacttgtaagaatgagatttgggaatccattaaattcaatggtttctcttggagttttgactcttaacatttcttacaatttctaatctacttgaacaatgccaactggaagaacttttcaccactcccgtgatccccttttgggttgattccttatctcccattatattttgttcccctaattctttgatgaagttcggtttctctttcttatcagaaagatatgtcaatttgttctattcatcaatgcctacctactaattatttggcgctcaataaacacactgtaggatagagaactaagacaacggctgcaagacagtga

SEQ ID NO: 62396 - DNA, 784 bp, Cucumis sativus
  Intron number 2 from transcript Cucsa.087740.3 (locus Cucs a.087740) derived from phytozome v7.0 (chr-ID scaffold0088 8; pos 304225 to 305008 reverse strand)
ctggttccattattgttcgtcagcgtgggactaaggtaatttctcacctcaattccctatattacatccacttctattttctaccctttcccccccattctttagggcattcttcagcatacctccaacttttttttttcttttgtaattaaccctctcatgcctccattatgaatcattgccattaataaaactattctcttttgcccgtgacgtagttagcacattgttgttgaactacataagtatgtgttgattcagtattgttttgtatgttgttactgagtcacctagatcatatagaatcaaatttctttctggttcccccattgtttagggcactcttgagcatacatcttgttctgaatcattctcgttctctctgcccttgacttagctaacacatagttggtgaattacttaaatctaggttgattctgtattgttttatacactgttagtcgatcaactaaattacgtcgagttgaagttcgtacatgttcctcccattgtttagtgcattcttgagcatacgtcgaagcttctttgaaattgagtcatgattctgttatctgggtgcgtgctatttacgttattaatctagagaagtgcacctcccttctgtgttcagaattattcaaaaagttcttcctctacctggtagaggtagctaacattgttagtaaactatgtaaatctgtgtattttgtattgttttacattttttttttaaatttctcgattctataacagtttctgtttctgtaccaatcatttcagttcc

SEQ ID NO: 62397 - DNA, 1060 bp, Cucumis sativus
  Intron number 2 from transcript Cucsa.079280.1 (locus Cucs a.079280) derived from phytozome v7.0 (chr-ID scaffold0079 3; pos 1877968 to 1879027 reverse strand)
agcagctgcagcagagccttcctttggctaattcggtaattatcaaaagcaaaataattatacacagattcaactttatgaaaatgatcattcagattaattttaggaggtggccatttaagtcttatttttatcttattcttttaatggattaaaatggtcagtcttttttcttgatcaaagtttaaagtatataataattcatttattagattaaaacaaactatagtttccttaattctttagattgatttgtatgtgtgacaaaatgataattacctttttatatcattcacagatttctaatatggattaaacgtagccttttgttttcccattggccatgtatattctaaatataagattacatacaactacacttttacacttaattaaattagttaattatttaggtgttggataaccattttgtttttttatcttgaattttaaaaattaagcatattttctcattatcattgtacctttcttaaatacaatagttaaaatttttgccaagtttccaaaaataataaattattgaaagttactttttggagttggaatagttacatatatatagcaattaaattcattttattgacacatatataacaatatttttttaaaaaattaaatatagcaaaatttgtcagaatctatagcaatagtagtctatcactcatagactacacctgatagaagtatatcgttgatagactttgaattatcaccccttaaattattgtactcgttacctttttagtttctatgatttggcttgcttttttaaatcattgatagaatgtaaatgaaaaagaagaaaattattctagatgaaagtatgtgtttataaattaaaattttgaaaacaaaaacaaaaacaaaaaaaatagattaaaattttgaaaacaagaacagaagaataaaatgattattaaatgagaccgaaattgttttaatcgttaatcaagtagtatggttattaaatgataaaagaaatatgagttttggaatacatgtagatctctagatttcacagcaaagctattggagaaga

SEQ ID NO: 62398 - DNA, 881 bp, Cucumis sativus
  Intron number 1 from transcript Cucsa.120910.1 (locus Cucs a.120910) derived from phytozome v7.0 (chr-ID scaffold0099 8; pos 2943134 to 2944014)
agggggccaaatcataagtgtcatcgacacccctggtacgtaaccaaaacatattattggtcgtttaggctctatttgatagctatatatttgctttaattttgaaaataattatgcttataaacaatattactacttacgcctataaattaaatttctttgtttcgttgttttaaaaataaagctacgttttgaaaactaaaaaaagttgataccgttcgataaccattttgttttttgaaaatggtgtcttgtttctcgccatatctaaataattccaatgtaaaaggaatagttgaaatgtggtaattacaaatgagtttagagtcaagtgcaccaagaagtagtcagtgtgagaggatactctccaaagaggtctagctagaatcttgtttgttttcctcgaagattatgatgttggttttgcttgagccaaattaatcgaacactacaactttgggttttattttgacaaccaaaattgtatagtagtgaactttggtccaagaattaatggtttgcttaaggaattaagatgaaaattatggtaaaaaaaattatttaaaaattttcctaactacaaatttggtttttattaatgcaaaagttttttttgttccattgatgctgtcaaaaaaaccattaataaaactttgaattgtttcaaatataccaattgagtgaattatttttataaatatagcaaaattttacaacaacatcacgatagaaattagggttttgctatatttgtaaatattttcaacatttttaatgttcatagtattatcaccaaatgatcacttagtatttgtaaataacttattttctttcttatacaaataactcaggagtgtttgatttatctattggagtagact

SEQ ID NO: 62399 - DNA, 750 bp, Cucumis sativus
  Intron number 1 from transcript Cucsa.100190.3 (locus Cucs a.100190) derived from phytozome v7.0 (chr-ID scaffold0092 6; pos 775253 to 776002)
ttgtgccgccttctctcgttatctctgcagaatcggttagttttcttcattgggagttcgtaaaatggcagaattttgcaccaattgttatttaacggtactcttgtgggaacgttttagttgtctgcaaactgttcggtgaattttgtttaagtcgttttcattgtggtacctgattatggtgttgggttgtatagcgaccaatcgtgtctaagtttagcttctttttatttattattattattattatttttaaagatatgagtagttgtgtttgaatggaaagtgggcagatgaaaccaatcctcctctttcaaggagcaacagaggagcaaaattagaaatttgcactggcaaaccatttttttatggttcctttcttttgtaaatttcatacatcaattaaaattgtttctcataaaaagaaaaagaaaggctaattgcccttggactaaccacgttgcaattttgggatggttggagtaaactacacgaatgattttaagtgaactaggcttgtaatttgacttctttggtggggagtgtgcaagcgttgcctttgcaacttaacttcaaggttatggtttttcattatcatctaagcttataaaccaacaatatagccttttccaccttcttccaataggaaaacgaaaaatgctacaccagtaaatgccttcccaatctcagcttgtctctttgttttctatgttaggagtggagctgccctgaggctggggaggtgttaaa

SEQ ID NO: 62400 - DNA, 710 bp, Cucumis sativus
  Intron number 1 from transcript Cucsa.099600.1 (locus Cucs a.099600) derived from phytozome v7.0 (chr-ID scaffold0092 6; pos 339731 to 340440 reverse strand)
taccaggtgattaccaccgaatttaactgattcattagcttccatccttccatgtttcatcggagtagctgaggcaaatgaagccttctctgaaaataaatagtatttttgaaatttactcgtgatgaatctatgtgtctagcaaattcgatttattttctaagaaacaaaaacttcattgtcaaaggggagatagaaaaggaggagatgagatattctcacttaccaaaggatcacgataaacttctcatctagtgagtaattgaggtatgctataatttctagacaaattagaagaagtcgatcaagtagaaggaaaatgtttaacaagatcccagaggttatccctgttagatttcttttatcatgaaagatttcctgtctttgtggagtagcgatttagctatgaagtcagttcttaaaatgttttgagttctgtttagaattgtaatttaagcccaagtttagatagaccttgtgatgtaaaattcggttcattcttctaaagcattgaaagtttattacttgtttctgtgtattttttagataggaaagatagatgtggtaccttcttaatcaacgattaaatgaagatgtttggttgtgcgtattaataacactgtgtgagcatttcaataggtttaatgatttactcctttcttccaattgaataaggtaattgagactccagactgaaactgtcaagtgaa

SEQ ID NO: 62401 - DNA, 909 bp, Cucumis sativus
  Intron number 1 from transcript Cucsa.132710.1 (locus Cucs a.132710) derived from phytozome v7.0 (chr-ID scaffold0103 7; pos 586230 to 587138)
aagaggaaaggtgagatggaataagaaagataaccatttttttttcaagactaatgtgcatcatgtggtagagtgtattttttatggtagaattgactactgatcaatcacaacctattctagatagataaatattagtttgatcggattaactttttcgtaactttaaattcaatcatatggtcggccgggtaatatattcaactcttttttgcaatataatttattagagactttttgaaagaatagcataagattaacactagatccttcttcctcaacaatttgttttatatacggaggataacaactttcaaagtaaatatcatatttatcagagtgtcagatgagtttatcactttactcacataaattttatcaaaccacatgtgctatacacaatatatatgatgttttattagatgcattaaactgatagaatattataacaataattaaaatgttttataaaataaatagggaatattggccacatgtcatgaacaaatttgtgaaatgaaatgcacaaagatacactatgatccaaaagtaaaataaaaatttagcggtgacttgcctactcctatgccattactagcatctacaattaaacaacaaacaaaaccaaaatccattataattatttttagtttagtggaattaacactttttagtcgtgaaatcatctcctgtagatcttgaaggaagcttcttcccttcttcctcttcgtcgtttctctcactacattccttcttttaagagtgagaaaaagagggaatgattgagcaaatcgtctcgttattgtacgttttgctcttaccaccttcaatgcgcctgtccccacttttgtctgttaccttcttcactccccagcttcgttggccttcatactttatcctcattttaat

SEQ ID NO: 62402 - DNA, 936 bp, Cucumis sativus
  Intron number 2 from transcript Cucsa.096160.3 (locus Cucs a.096160) derived from phytozome v7.0 (chr-ID scaffold0091 9; pos 1895461 to 1896396)
ttgctaatttgcggcctgcaatcgtttttccccaggtaaacttctataatatcctctcccttctacaccaaactatttacaaagaaattgcaagctcaaggttcatttttactctattcacaaagaaattgcatgctcaattttcatttttactttttggcctgtggtcggttatattccgcattacgagattggtatcttgtcaagtcccttatgcaacgaatagatgttttggttatttgaagactggggaaagttgcttggtttgaagccttatagatagtcttgttttatgttgaattttaggctaccctcttgctaactcgatagttaatatgttcataaccgctatgggtaagtttgaagccctacagatggccttgtttcctgttagtttagacatctgaattaataaaacatgatctgatttaatgttcgtaatcaccaatgggttagcctattggtctataaggttatgtaaataataaaaggctgtgaagaaatagtttcaaccatgatgatcaccttctcaagatttaatatctgacgagttaccttaccaatcaaatgtagtagagcgaaacggttttcccatgaaaatagttgaggtgtctgcaagttgattaaactctcatggatatctaaaaataagaaaaattttgctggtaacttcagtgatcaacttgtaaagactttcaatggcttgcattatatttagaagcgcagggtggaacttcaaatttcatgggtcctaaatgaaaacatgaaagaatttccctgttaacatttttaatttagatgcataaattcatgttcatgaagatacaccagtgagtatgaggtagaagcttatatgtgggactctattgcctattgattactccgtttcttaattcttcagttggtggaggcttcaactttgaagagagaggttgc

SEQ ID NO: 62403 - DNA, 357 bp, Cucumis sativus
  Intron number 1 from transcript Cucsa.117310.4 (locus Cucs a.117310) derived from phytozome v7.0 (chr-ID scaffold0099 5; pos 909939 to 910295 reverse strand)
tctctcttcaattatttattggggaatcatcgaaggtttgttttcttctttcatttcatttccggcttctttcattgtgtttgtgttctgctttcatactaatttatctgatacgacgatcgaagactacttctggtcttttcaaattgaagtttcggcgaattcaataagtttctttcgaggatactttttttcaagagttcggcttcggattcaatttcgttgctaacgaagaagtaaaataacctgatcggtgttgtgcagaatcgtgttattgttgctttttatttgtttgaatttgttttgggctaaatagttgcatgattttggtaggaggagaggagaagggttttagtg

SEQ ID NO: 62404 - DNA, 479 bp, Cucumis sativus
  Intron number 2 from transcript Cucsa.016360.1 (locus Cucs a.016360) derived from phytozome v7.0 (chr-ID scaffold0022 7; pos 6444 to 6922 reverse strand)
tccagcatatcaaatctattatcacggcagacgaggtaatgctttgttaatcttacaataattaagattctctttaatttgttgctttgtttggtatattttaggccaatttttgttttactctgtttacctaatgatgggtattttctttaaaagaaaaacaaaaattcaaatcctttctttggggtttttaacactgcttaaaggggttcaagttgactatatatgttaatggaagtatttatgtgtctagaccgttcaaaggatgtatcacattgacaaaaagttatacgtttgacaaaccaaaatgtaagacagaactagctagaataagatattaagaattcaaactcttcttctaggtccaatttccacactgttcaatttttttctttctttctatttttctttatattttgtggaagatatcattattatttttttttcttttttgagtataggtgttgcttagagatcca

SEQ ID NO: 62405 - DNA, 589 bp, Cucumis sativus
  Intron number 1 from transcript Cucsa.017510.2 (locus Cucs a.017510) derived from phytozome v7.0 (chr-ID scaffold0024 5; pos 292270 to 292858 reverse strand)
ctcacacaaccgattacggtacgcttctctttcccctttacagatctatgcccactgttcctcatctaaattcctatcttcccgcatttttttctctattctttccgtcgatgcttgaatttgtcatttccttattggaaccagctgggtttttggttcaatggtttgatgctagggctttttcatttgagaacactggatttgattctgtcattttggtttttaatcttgattttttatgcgtgttaatcgatgttgttgttaatttcactttgggaatgggaaaaatctgcaaatgcttgtttaactgctttcattgtgtttgtttgttccattttttatgctctcacgtgggttttttttccgattctggatgtgtttttattttacctgctttgatattgatttttgttctactaattgtttggtttgctgcattgaaaactggttttctttcttccttctttcgtgctgacgatatgtttttgatgattcaatgctttatgttgtgtgctggatgaacgattgatttgtttttctttctttctttgcagttcgagattagttgctaactttactcagttgcagc

SEQ ID NO: 62406 - DNA, 501 bp, Cucumis sativus
  Intron number 1 from transcript Cucsa.127500.1 (locus Cucs a.127500) derived from phytozome v7.0 (chr-ID scaffold0101 9; pos 110208 to 110708 reverse strand)
ctttggttcccccatccctgtctactactcagttacgtatcaaattttattagttttggtgaatgttcttttcaagaatctttactgggaatttttttgtttctatattcttgaattagggaatcttcgtactgtttgaagacggattagaaagtctaatcaaatggcggagtttttttttttttttttttgtggtcactggtgacatatttgttgcctttatttattatattttaacatggagaattggaatgatgctcagtttattggtttcttactcagcagggaaggatacggagtatctgctactatatataatatcatatttcttaaaatggttctttacctatactgccagtttaatgttatatgatgacttaaaccatttaatctgctcttgatctgtttggttggtttttgaattagtttccatgtgcttactggtttactagttttttaatttgagtgcggtgtgatttaatttcaacagaaaggattgat

SEQ ID NO: 62407 - DNA, 660 bp, Cucumis sativus
  Intron number 1 from transcript Cucsa.083160.1 (locus Cucs a.083160) derived from phytozome v7.0 (chr-ID scaffold0085 8; pos 96971 to 97630 reverse strand)
ctccggcggcctctccttgtggccgtaacaaagaggtttgtcaaaatcatcatctgtaatttgaaattttactctgtttttaggaattctgattccatttcaggagggagggtaaatgtgacatttttgaacattgacattaaatgctctgagtgttgttgatagtacttgtgagcatatctctgcaatttagatcgttttctcttttttcacttgctctgaggactggttgggaaactatttgcttaaaacagacaaaaatcactttcttttttgctctttgttttgcagtattgccttgctttcttcctttttggaacacagtaaaaatagcttttatagtactagtctctgatcaatttttttgaacttttctttgatcaaaactgattacccttcatgttcattagtttttattagatgaaattcactaatgataccttcaaagttcatttggatgtttgacaatttgattagcttattggggtctgatgcagtactgagcactcaattgacaaaattaggctgatatcaattaaattctctttcaagtaaagaatctggattttatgttgtagagtacccatcatcctgatttttgacttttgtttgaatgttattacaggacatagtcgttgcagaaagcttgaataaatttca

SEQ ID NO: 62408 - DNA, 778 bp, Cucumis sativus
  Intron number 2 from transcript Cucsa.105920.1 (locus Cucs a.105920) derived from phytozome v7.0 (chr-ID scaffold0092 9; pos 362677 to 363454)
cgcttggagattgatttcccgtaatctttctttttcactatgaatattgattggtcttacttttcggttctattaggctctttcttttgagaaatgctgttcattcctttaatttgttacttagcaagttagcatcagagttactactaccatgttgtacgtttgttttcgtctcttctaatcctcatgcctcaagtatcgtaatcggttgggcttttgttaagatgatctagcgggtttaatttcggagcttccttcttgcagaggacccaatttaaaattatttgaaactgagatttcaaccgtagtctgtttaggtaaattgttcgtgccatgatcgaggagttccttctctgtctggctttttagggagaaaagcagcttattatgggttgttaggtgtgagctttagcgtggaatattgagggagagaagagaagcagtgttatagaggcgtggtcgttggaatttagtttcaaaggctttttgtaattattcttttaagtagaatcttgtatagttgaaacccttttgcaagatgggattttacagacttgatttttgtagtagtaaattgtttctgaacacggcttatgagaagtaacaatatcctttgctttagtgtcggaatgtggttaattctcgaatttattatctagttcttcatagtataattttcattattttctaattttgttttttgttttttgtttcccttttttggtgggatttcccatattcagacccctgcctagcaacatttcttcgtataaggtat

SEQ ID NO: 62409 - DNA, 1061 bp, Cucumis sativus
  Intron number 1 from transcript Cucsa.128320.1 (locus Cucs a.128320) derived from phytozome v7.0 (chr-ID scaffold0102 4; pos 360583 to 361643 reverse strand)
gtcaagcctggaagactggccgatttgggtaagttttcctgtttcaatatctgactcgtcttgctattcacgtgttattttgtcaaatgaatacatacttacttctggctgtataatttctcaatatctagtttcatttgccccggtcagtgacaaggtcgcattgtaatgaacaaatcttatgtttgcttctgattcagagaaccttaagctagagatgttcacgagacagaatctccatcgcactaaagtttctaatttcagacttatatgtagctttttgctttttaactacttccattaaagcaaagtgaaacaagctccgttcatatagatatatatgagcctttccaaccatataacactagtttttggaaacagtttttaaaagcttcagttatgtgcataatttattgttcataaccggctaaacaaacttttttgatatgaaaagtaatagactattggtaatggttacaatttttagaactaataggcaacactaatttgcacaatcatctcataaaaaattcccgaggcaacaatgatcatggcaggacttgtttaagtaaaccgttgcagtgctttctctttccaactgcaatggatggttttgctaaattgagttcatctttctttggctccttcacctaagcttgttgcttacggtaatataactgaagtaatcaattgaagaaaggcaaaatgaatgcaaactttgatgttgacatgcttaaagccagcacacaagttgttcagttttttaaaacctttttgcaaagcaccgacagtcgattattttccttttgataattgttaccctattctatatttgtacaagttctagtgaatgtgcaagcagggtcagttgtgaagataattagtgccttcttttgtttacctaataacgcaatgaattctatattttctgtaacatcaaaagaaatggaaatacaataagttctatttaatattttgcttcccatgctgacttcataataactatattttggttcaattttatagggttggtttcaactcagtgtaccatttaactgagc

SEQ ID NO: 62410 - DNA, 604 bp, Cucumis sativus
  Intron number 3 from transcript Cucsa.076280.4 (locus Cucs a.076280) derived from phytozome v7.0 (chr-ID scaffold0078 9; pos 693180 to 693783 reverse strand)
gttggtgaagtggttttcaatacttctttgactgggtatgtatttttgtgggagctttgagtagatttctcctctaaatatcatggccctttagctattacagtctgtttatttatttaaggcttcatcctgaatcatcgtccattcaacaacttgttttgttttatttttttcagaaaaagagatgtgtgggtatgacctacaacatttgggtgtcaatagaactcgtagatattaaattctatattggtggtaatcctagaaaaaatacatttattctaagttctttattaaagtcatggcctttattgaccgccagatcatgatggtcattgaggatcccaaattaggaagtaatgatagttcgtgttcatttatatcaccttgtccaatatcagttaaattgttatgttacaatcaaattgaatatgaggtggatgtttagatagaacttagaagacaccagggatggccacctacacatcagttttcgtaagttgattttgttggccaccggcacatcaataaacaatccattaaatatattgatgcctcccaatacgatgaatctgcaggtatcaagaaattctaacagatcccagct

SEQ ID NO: 62411 - DNA, 536 bp, Cucumis sativus
  Intron number 2 from transcript Cucsa.087010.2 (locus Cucs a.087010) derived from phytozome v7.0 (chr-ID scaffold0087 3; pos 349590 to 350125 reverse strand)
ctgttcaagaacaagtaacttgcgaccaggttttatctatctattcattttcgaagtcgatctactttcgcgcactttctttttcctagagaatcaagggcgtaaaactctgctaggaaatggttgtctacaatttgttttgatagttcttattggaaatatagtgttctcaaatctgaaatcgttaatctagttttgttgccctttgtttttcaagatctgtaaccgttgggctaatcttgtttctttcattgtcaagattacggatatcaggccctgcgatataatatctagggagaatatggtttatttgaattgaatttgagattggttgtatggctagatactattgcttatgttcatcttgtttttctcttgcgtgtgcttgtttttctttattctatcaggaagatttcctctccttcagttagagctgcatatctatgattctgtttgattgcttgttttcgaatattgaatattcactccatacttcaaggatctcttatttggtggatttgtatgtttagttggaa

SEQ ID NO: 62412 - DNA, 695 bp, Cucumis sativus
  Intron number 1 from transcript Cucsa.087010.2 (locus Cucs a.087010) derived from phytozome v7.0 (chr-ID scaffold0087 3; pos 350175 to 350869 reverse strand)
cggttcaaggactagttctttgcgatcaggttttattatttatctattcattttcgaagttgatgtacttttacgcgctttctttattcaagagaatcttgggggtgtgtgagaaatggttgttttcgatttgtgttgagagttcttattgatttagtcttggtgtcatttgcttttcaagatttgcgtttcttgggggctaattaaataagtcagagattgttgggttagtcttgtttttttcatcatcgagattatggacgtcggggtgattgttttctgcgtttggatatctagggggaatatggttcaatcgaattgaattgatttttgtggttggttgtatgggtttggggaatcataataatcagaagctattgtttgtgttcacccgtttgtcagtaatggttgtttttctttcgcgaaattggttggtcgcctgggaatgaatttctttattctttaaagaagatagttctttcctctctttgagttcgagttgcatagccatgattttgtctaagtgtctgttttctaatttgctggacttgtatgtttagttggaaatgtagatctttcttgcttttggttcagaagaattctttagtctctctctctcttttttataagttttgatttgtgctgaacaactatttgggttctgtgttttttagagcgataaagatcggagggct

SEQ ID NO: 62413 - DNA, 1029 bp, Cucumis sativus
  Intron number 1 from transcript Cucsa.052800.3 (locus Cucs a.052800) derived from phytozome v7.0 (chr-ID scaffold0057 7; pos 221760 to 222788)
tcttaaccctaactgccgacaccttctccgataaggtaccattttcgaaccctaatttactcatccgggtccatttatgtgttctttatatgccaaacacatgtgagcgatgggaatgggtcttttggtttttttaacagtgtctgacgatgtaaagcttatttttatgatttcggttgtcgttcctctaaaattgatgatacgtaattgaacccagtttttttttttggtctttgagttgaaaaacactctatgtgttcctcggatttgatcaattggtctgagattgatattggtactgtttttgatccgcaagaacgaactgtgtccgaggaaaaaatgaagatcctattgcctaaatgaattttctgattatgtttattctgatttccatcgtttgcttccaattgcgagtagaaaatagctttatggtattaggtttcggttggaatatggttaaactggaaaccgacaattgagaaggaattacttgctcgtgaagatcaaaccagcttgtaatgttttctcatttagagtgaaaatataggttgttcagtaggattctgattagttacattttagtttgttgttcctagatttagtaacattagtgaaatttgttaggagaaggctgctcagaaactgtggaaaggccgtaataataaaatttgaggcttttatcatttttagtgggtaacccattcttagtctcacatagtcgtctaaactcttcattgacgtaaggtaaaatcagctttcgtctctggcttacacttcttgatgtttgggcttactactttcatccttggcatacatgttgtatgctgttatgtccttggtgtatatgcgaatggattttaattttacgtctataatccaagaatgcctaatcgaagtttcaaaataacagtctcaatttctgaaagagttaagtctgattaaaatttgatttcatttaacactgttcctcatgatgaatatgtgtattttgcagataaaggaaaaggatactgcttggtttgtgaagtt

SEQ ID NO: 62414 - DNA, 889 bp, Cucumis sativus
  Intron number 2 from transcript Cucsa.132010.1 (locus Cucs a.132010) derived from phytozome v7.0 (chr-ID scaffold0103 7; pos 103245 to 104133)
aaccggtggttgggtcccggctgctcttatcgtaggtactatattttgtcttatatctttgatacgcccttcttcttgaagtttttctggaaatgaaaccaaaaccagcttcaagaaagtgaataaaaggttgtcttgacaagagtttgacatgttcccatatctcgcctataaatctagtttggacaaaaggtggtcttagatcatcaagaactacaaattctactcttgtctgaaatacaagatagctaatccagttgtgagtttggatgagtttcaagatcaatgtcactattattgacagctacatttgcagtcatagcctatgagatgttttagaaggatgacctaccagtcaagtttaataggtaattggagaaaaatgatgatcttaatcatgaaagataggattttaggttttatcaagttttgattagtagacatctttagcacattcagcattcagagccttctcaatctcagttcaaatcaatattttctatctctagaagtgagaggatgggaccctaaaacgaatgccatagacaacttcaaataattatgtccatgacattaatattcagacaatcaagaatgggaaaaggacaaatattattagctggaactttcccacattattaaatgtaattgttattgcccatcttcaattatactccactttctataaatgaaagaatattcaattctgctcactcctagctacacataaaaaatgtcaatctggtgtaaaatttggttcttgtttctccaagagaactaaaaaaaattgtaatcataatggaagaaaagataacatcattaaaagagagtatggaatttttgctacagaatgaatcaaactcataagatcttgaacagggattgaact

SEQ ID NO: 62415 - DNA, 485 bp, Cucumis sativus
  Intron number 2 from transcript Cucsa.131950.2 (locus Cucs a.131950) derived from phytozome v7.0 (chr-ID scaffold0103 7; pos 74418 to 74902)
aagggaaagcaaaatacgttgtgcgcccgtaagttaacttgttcaaacattgggatgcttcattttaatttatctatatttgattatcgaaaatttggtagagggttcggcataattataaaggattttataattccaccagttgattatgaattcaaaatactcgcatccttgggaagttgagatgtccagccagtccattccatgttgatgacaaacaatattcacagtttcaatctttatgatattccagctatttttgcttcctgcttgttcaccatcaatccaacccctttacattatgttacttggtcttcatgaagttattttattatccagtttatattaatttgtttttgaaacatcaagatgagagtcaattggatttactgatgtatgtaatgtgaagctctgtatattcatttttctttcctttattttaaattaatgatttttgtccaggtatacacctatatcagatcctg

SEQ ID NO: 62416 - DNA, 946 bp, Cucumis sativus
  Intron number 4 from transcript Cucsa.088420.1 (locus Cucs a.088420) derived from phytozome v7.0 (chr-ID scaffold0088 8; pos 737817 to 738762 reverse strand)
atgtaagctatttctaacttcagtgtaatatttgtatgattgagattagagctttagctttacaatcattatcagcatgtcttacatcacgtggtagtgtctttttccccaatcagtttattattttcaaatttcatatgttattgtacatttagactccttgatttaactgtagtttataaatgtgccatttttttaaacaagaagcaacttctcattgatgtaataaaaaagattaaatgtttaggaaatgacacttacaaggagagaaaaagaaaagttatattcagcaagtacaaccagaaagagagaaaactttcaaaacaacttcgacctccaagcctcttccaactattgagaaaacaaaagctgcaacaaactattgaagaaacccaagaaaacaaccaccggccaataaaagaccaacaaagagcaaactgaaaactcttgaacgatgcagaaactaaaaaccctatgaaataaacttttgatgaaccaacaccaaaaatcttagaaagtaacattctcctaatgctctaagagcttccaacaggagaacattcagcttaatgaaagcttgtttttcataaaacttaagacgattttcatttttcttctctgtaggcatcaaatatataatctttgaccaacacgttcaatcacttgttgtcattgtattttgatcccaaaaaaattctgatcaattagtcaaatattggagatgtgtactctatctttggtttcagtataaatgtcgtgttgactattttggaagtttgcatcatgtactatgatatatttacggtgttgtctgtattttgaaaggctgaaagagttcctcatttttttattttattttattttaaattatcattattataattttatttttttaactctttattaatcaggtagttacgaacatactttctaaaggtgtaaaact

SEQ ID NO: 62417 - DNA, 992 bp, Cucumis sativus
  Intron number 1 from transcript Cucsa.116170.4 (locus Cucs a.116170) derived from phytozome v7.0 (chr-ID scaffold0099 5; pos 94588 to 95579 reverse strand)
ctccttctcttgcatcacctcacttcatcttccaggtttctttctctttcaattcatgttttcctttgtttcattgctcaaactgaactgagctttgttttgaaattgtaattgtaggagcttgtttgttatttacttttttttttttttaatgaagatgatgatcggaggatgttacttgttttatgtgtttgtaatgtgctttcattttcttcttcactttctaattttgctatgtttggcagttttcttcctccagatctatggttcactttgctgttttgatttatgtttctggctttaaatctggatttcctgttgccatgtgcttgtacttgatgaaaataggggtttgttgttgttgttgtttttggaggttagggatggggtttcggggcaaatgcatctcgatcttaacttggaaaatgccttatgttgtctctggaagacttgtttgtttgggtttttgtgaattctaacagattttttttttgttaattcatgaatctgacctttcctgaagcttctgtgtacttattttgctttcggacctgcacaagcctgctaaaatgagcttcagcttataatgattttgctttaagagatatacttctacattacttcaaggattttcgatggaagtttttgtatagaatgccgttggagtatgaaactattgcctttccttcccttttttccttttttcttttcaactcattctttttacttctttctctttttcacatttactttcatcaatttcgtccgttacagatgtttcaaatcggagcttctttattatagttaagatttcaaagttatatgagttgtcttatctgatttaatttctagtgttcacaattttaagctttgattaattgatgccaggcttatagttatggtcttgaatgcaacataccgaatgcgtgtttctaaagaaagaagttgtggctgcagatacaccagaaagtttgctgaagagtagtttctaa

SEQ ID NO: 62418 - DNA, 375 bp, Cucumis sativus
  Intron number 2 from transcript Cucsa.066140.1 (locus Cucs a.066140) derived from phytozome v7.0 (chr-ID scaffold0069 6; pos 694971 to 695345)
attactatttgcttcctcgttcatgtaaaatgcactcccctcgttgatatattggaaggcttttactgtacatttcttgcttttcataagttttatgcttaatttagtacccttggttttcaattgatgaagtctagatcaagtttatagggtgatatgtgctgtctaattcctcataactaacaaactattccatcatgatcaaattgctctttttcttatcatgatctgagctttttaatcaatttagtatgcttttcgtaattcaaatgtctaaaataaattttgtctaggaaaagggttactgcttcatctacagttttttgttctttctatatattctaatgttgacttggtgtcttttgcagcttcttg

SEQ ID NO: 62419 - DNA, 904 bp, Cucumis sativus
  Intron number 1 from transcript Cucsa.088120.1 (locus Cucs a.088120) derived from phytozome v7.0 (chr-ID scaffold0088 8; pos 528037 to 528940 reverse strand)
ttgcgttgtcgcttccgtcagcgtggccttcaccggtacactttcttctctctctttttccaaatatatatactttcaaacatatacaaaaatgtattattagtatctaagttttctagaaatttaattattctatctttgcctcatagtttcttactaattgtatacaaaactctgttatatattcttccaaatatactttcacttcttgttttttggtgaccttaatctaccacatatttcaaatttcatacttaatactttttggtgatcttacctactatatatttcaaatttaatcatatgactctcacatccgtaattaggtgtgagatggtatgtaagcatgattagagaaaaattatagaccaatccaaaaattgtagacctaaatcaaaaaatctgagttggaccaagttgggttggcatattgatttttttttttcttttcctctccccataatttagaaaaaaatttatattaattttcaacatgtaagggtgattgtcgggtgcaatgtgatatatatatatatatattatacaacattcaaatttcaagtttataacgttatccatcagaaggtttgcttttaggtttatatatatatataatcgggttggacaaggtcaacccaaccaccttacttgcacaatcgactcaatttttttcctccaattttctaacccaatctaaaatttaacctaatccaaccttttggttggataattcaagttagttggattatcgatctttttggacagcaagaaatattgagcttgggtcaaaggtacttatgtaatttaattctcatccctacccaccatacgaaattaatgatattttttcttttggtatggttgggaaatgaatacaggaggttttggttcctatctattggca

SEQ ID NO: 62420 - DNA, 846 bp, Cucumis sativus
  Intron number 2 from transcript Cucsa.118320.1 (locus Cucs a.118320) derived from phytozome v7.0 (chr-ID scaffold0099 8; pos 110709 to 111554 reverse strand)
aagctgtaagtaacaaattttatatccaaaaatttacccatttcttctagggagagaaaatgatctggagaagagagcatgttcagaatactatactcactaaaagatggagaccaactaaaaatcatagtttaatttgatcaaatatatatcagttgctttcttttataataacttgaaagtagaagaatgaatagtagttgaccaaaagaaacatttttgtttttcattttttaaaaatccaaattaagaagggttgaccaaagaacaaacatcacttttagttttaaaactttcaaattccagataatgttctttaaactaaaatgaaggtgaaaccattttttagtttttttttttaaaaaaaagcctagacgtttttaaaacatacgcaataaatcgaactttttcactaaaaatatttttagatatagaattgtgttgctctattttttattgcggtgatattcaatatattcataggcatatattgatttagctcttatattttaaattacaatctaatttccttaatttaatactaatccaaaaagtataatataatatctaaacttatcttgtatcaaaatgttgaagttgaacaaaatttagtttgccattaaatagttttgaacttttcttaagatgaatttaagtttggtgggatttattttccaaaagcagctaattgagatttcatattttatgtggaaggactaaaatttaaatgtttgacaaacaagcttgaaaatttgactaagggtatgagacaaactcaaaacttaattattttctttttccttcttggcaggaaatttggactttgtgtcgaattttcaaaagaaa

SEQ ID NO: 62421 - DNA, 423 bp, Cucumis sativus
  Intron number 2 from transcript Cucsa.041580.1 (locus Cucs a.041580) derived from phytozome v7.0 (chr-ID scaffold0054 0; pos 160419 to 160841)
tggtaaaagttcctcaaacaattctttcaaagaattaatttttctagaataaattagccatcttcactttaattgggtcagtatagtgtttatttataatacatatgtttggtttctttactctattctcatcgttaataagttaaagtttagaaaccaagtcgagaattctacattgaaaaagctaagaagattcaaacactctttataaaatagattaactacttcttttataatcaattaattttgagatgaaaccccgtactattaatagaatttataataaaatatatttatcaattcaaagttcttaaattttaagaaatatgaaatagacttttaaaattttacagatttgttagatattattgaaagtattgatgtgaagcatcccacttgagaacgaagggagaaaatatattg

SEQ ID NO: 62422 - DNA, 655 bp, Cucumis sativus
  Intron number 1 from transcript Cucsa.075820.1 (locus Cucs a.075820) derived from phytozome v7.0 (chr-ID scaffold0078 9; pos 398190 to 398844 reverse strand)
tattttgccgtcggccccccactccctctttcaaggtgagtcctgatttcgtgctacttggtatttaatgtgttttggatttgttttctaaatggcttttcggatacttctcttgattgtttcacagaaacatatattatataattttacttggagcaggatatggctataagattgactgaacatttgtagtcgagagattgatatgcaaaggagtgaacatttgtgtttgagagattgatatacaaaggagtgaacattttgtattttaatttttctttctattcttttagaagccaaaaaggtattatttgatttgtagtaaagtgggcctttgactgaatctaatcaattcttgtatttcttagttatcgtgatttcttttttttggttatttttcctcaattgtgagaagctttgcatccattctcatcttcaaacacaagatttcaacctggtcgtattttttggttgggttggccctggcatattgaaccaatttttgatccaagtgtggaatggatttgattttcagttttatcaatccattattgatctttgcaataatgtttccttgtgtggaaaccgctatattggcattggatagagtctaattgattcaagtttgcagcgttaaaagctccaagcctgctaa

SEQ ID NO: 62423 - DNA, 718 bp, Cucumis sativus
  Intron number 1 from transcript Cucsa.047330.2 (locus Cucs a.047330) derived from phytozome v7.0 (chr-ID scaffold0054 2; pos 2393626 to 2394343)
cttccgctgctgctgctgctctctactcgattttggtaatttcctcttctttctccctactaactcttctctcccgccgccggctttttggcggcttcgggtttccttcaacttcctttcctttatagggttttatgcttttttctggaactttgttgtctattgatttcaatttaatcgatttgagttaatttatgttgttcctctgttccttgtttgttttccatcctctgttttattgtttcttatcgcttcgagatttcgagatcacgaaactagggtttgcttatacttctgtaaattttgcttgagtttgtttaattcttcttgatctttgatcttttgctattttcttttcgtgatctttcaacttttatgttgacggtagttccgagatacgtcctgtggattctgaattttgctttatgtttttagtttcagctcgtttcgttcccaatagaaactcttccttgttctcactacgcaatttcaagtgcttatgtttcgagagcgcgttttttttttttgtgaggacatgttttgttagttgctgatagcaccacgggggccgttttgtttggtcccatgttggtggaattatgagatgctataatctcacgtcgttgggttttttttttgtaagtcatttagtgggttacgggtctattttaagactgaattttattttctatactggcttctgcaggttaatttcgag

SEQ ID NO: 62424 - DNA, 596 bp, Cucumis sativus
  Intron number 2 from transcript Cucsa.077390.2 (locus Cucs a.077390) derived from phytozome v7.0 (chr-ID scaffold0079 1; pos 562307 to 562902)
tctgcaaggtggggttcattttctcatatccatatatcttcacgtttcgtgactgaattttatgctgttcctttacattaattactttagcttccctttttgttaatcttttagttagactgtttcaaatgaataatttcgatgttttaaaatgatgggtttttaaaatttagtaacttcttaaacaaatgataaaattttagtgaaaaagacaatgagaaatggccaaatttcatatattttaagcctttcgtatctactttttaaagtttctttagtttataaagctttaattgactctttccaaaaatcaagtcaagttcgaaatttcttataaagaaaataagttttaaaaatttgtttatgttttgaaatttgacgaagaatgttgctcttttgcttaagctagattgaagaaaatggttggacgaaatcccaacctaccattttttttctaaacgaaactggaaatcaaattgttactgcaatgttagcaaattttgtaacatgaagagatcaaaggggtatctttcttttcttttgtattttaattatattctttcaaatgatcttttgtagcaggacgagtgggttct

SEQ ID NO: 62425 - DNA, 975 bp, Cucumis sativus
  Intron number 1 from transcript Cucsa.070850.2 (locus Cucs a.070850) derived from phytozome v7.0 (chr-ID scaffold0073 3; pos 10810 to 11784)
gaggtcatttcgcctattggatattccaatttcaggttatttttcttttcttattatccaaatattatcaattttatattaaatatatgagtttccttattatcattgttattatttatttgagagggattaaacatttaaatttaatacattgtgttttcaaattaaaaaaattaatatatgatcaataattgacatctactctgtatgtatatgtatgtatatatagatgagttttttttatctctattaagagtattcaaaatgaaagtcagaaaaagaaagacccttctttataaatcattttgtattttattttttgtttttgaatattgaatttgtttactcacgttttcttattcatcagtttcatatttcgtttacaaatatttctaagtcttaaccaacttttaaaaataaaaaaatcactttaaaatttatttttctaaaaagcaaatgtgacttttagattgaaaacaccactaaaatttatatttatatgaaagaaatattaaataatagatagaaatgatattttcattctaaatctaaaaaaccaaaaaagaaaataaaccaaagggttataaaaaactcatttttgcttttagaaatcaacaaaaatatctaatacatacctacgatgacgacgataagtaaaaaatgggtgagaaaagtacaatttggccttaaaacaatattcccaaaagatttaaacatcttgtaaccattccatctaggtaatctttttaaaaaagttgtaacaagaattcaactttccaatattcccaaaatgaaagattgtgtttcttttaatttcaacaaacgaatgacaagcaatattacaactcaaattaaaattttgttttaatgtaacaaaaaaaaagtccatttccaaatacactaattgggaaattgcatacaaatctaaaaactcattatatatttcgtgcatctctttgttcatgcagcaagaaa

SEQ ID NO: 62426 - DNA, 996 bp, Cucumis sativus
  Intron number 1 from transcript Cucsa.013910.1 (locus Cucs a.013910) derived from phytozome v7.0 (chr-ID scaffold0017 8; pos 29980 to 30975 reverse strand)
cgccttcgttccttctctccctctctcattcatcggtatgtttccattccacctccattttaattccttttcatgctttcttcttttcttctttccgcctgattttctctattttattttattttatttcatggacgatttgcttttttttttgccccctctcttatgttttccttttcgttgggttactggattccctcattgttgattttttctcatagctgttttgttgattttgttacattgcgatgaattattgccagtagttcctaggattaccattttagaactccatctttattcgattggactctgtagtatcatattttcgaatgtgatgagattaaattgacttctttggtggttcatgaagactgattttcttttgaattgtttcaaacatcgagacgtgttttacatatttttctttttaccaagtttgaaaattcaacggggttgtttttgtgtttatgaggaagtcagccggggattatgactcggggtgtagaacgtgcgtctttaattcctgttattccaaactttcgaataaatttttcttttgggtttgaggttatgtcttgtttatcaaatcaattcgtttacttggattgaagtttatagggtttatatgttttttttttttttctttttctgaactattattatggctggcaatgaataaatgagaagtcgttgtcaagggtctcatcttccttctgaagtgtgggggctccttgtattttatggaattgtgtcgctatcctcaccaagttctttggattgacctcataacacgtggcttcaactaattcttttttctttttcacttttttgggttgttcccagttctttgtttaaaaatataatgttatgtaatcgtttcttactcctttggccatgtgagattaatgttctaatttgttggagacgtgttgtttttttccatttatttttgtttcaggatcgtgtgtgagtgggaacgggaagagggcttga

SEQ ID NO: 62427 - DNA, 383 bp, Cucumis sativus
  Intron number 2 from transcript Cucsa.057990.1 (locus Cucs a.057990) derived from phytozome v7.0 (chr-ID scaffold0061 4; pos 306253 to 306635)
tttatgttagtcagtcctactatagaaatgtaacttgtttttgggttttgggatatttcgattcgatctttaaggggtttgttattgattcgatataattgggggattgggtttgattcatagtatttcatactggcggttgtttttctgctggcatgaaaattcttgggtttccttgggcgtaaatgggtttttagattctttaaatcgttggatggctagttgttttttcttgggatgttagaagtgaatactttgtctgcttgttttttcttttcagaagcaggattacatgtagtctatgaatatttctttcaaaaattagttttattaatttgttgatatttcattaagtctttcttttgggttttctataatagatt

SEQ ID NO: 62428 - DNA, 687 bp, Cucumis sativus
  Intron number 4 from transcript Cucsa.057990.1 (locus Cucs a.057990) derived from phytozome v7.0 (chr-ID scaffold0061 4; pos 307511 to 308197)
ctggtatgcacattcttttgagttttaagttcctaatggttactctgttttaatctaagatcatattagtccttgtactttaaaatgtccaaatttagacattatacttgcatagtcaaaaccccaattttggaatcaacaaactcagtccgatgattgattctagacgaacttaaggggtatgtggagcactaagtggtttattacagtcaactgttcttttagtacgtgggttataatagtctataggttataaaagtccatacttggggtgcaaactatttagtctgggttataatagtttgtatttggggtctaaattatgttagtctaggtaggaaataatcaacactataataaagagggaatgagaaggtaagtaggaaatggtaaacattgtaacaaataggaatttggaataatgatatggtagttaattgtaggttataatattcgaaaatatcaacgattattattggagctccaaacatggagtggattattatagctcatcccacccacttaagtctagctagaatctggtatgtagatgaaaagtgggttcttcttcgattgaagagctttgataagttttgtgcaaaatattccattaattgaaatatcctgtagttcacattgttgtatgttctccctgaccctgttaaataatttatctagctgctgggt

SEQ ID NO: 62429 - DNA, 995 bp, Cucumis sativus
  Intron number 1 from transcript Cucsa.044250.1 (locus Cucs a.044250) derived from phytozome v7.0 (chr-ID scaffold0054 2; pos 684152 to 685146)
atactcgtacctccgtacggtttttccaatcccatcacacgtttgatcgttttgctttgatcttacttattctcgcgagtcttgattttatcctgttattaagagttttgctcgaatctttgtgttttgctggattttgtgatcatctatgaacttgtgtggtttcgttggatccggactgggatggccatttctggcatccgtttctttgcttagtttgttagatccttatgatataactcgcatttatttctgttttcttcctgtttatcattaattggatgtttttgttttctcctcttacgctccgcccacatgaaacgtttagtgggttttgatgtggggttctctttggactctttctattatgataaatatccccattttccatttatggatgtccgtttttttttaaccttagttattgatctcactgagttttcaaatttatgaaatgttattgaaaatgtcgattgattatttcaagctctacaatgtagatcaggaaatagcttagtggtgagggatagcagggtttctgtttgtttttaatgtttgaagagctaggctagtatttcttagcaaaggagatggttatactgggacttgactacccatttttttctatcaacttgcaagaggacctacttgtaaaagtgcttcaggatgacctcaaccatctgtttttttcagaatatccttctttttgtggaagagaaatgttgtattaaagagaaggtagggagaggcaaacttgctaaattagccaaaaggtttacatagaactttccagtagacttgaatgtcaaatgaagtgaaatagttatttagatcaggaaaaaatacttttgttgggttcgatttatattgttgtgagttttaatctttggtggttataatttataatattgtttctggtttatatttctaaattgtggtggtggcagtatatttttcggttttctaatttttttttccttccttttcttagaaat

SEQ ID NO: 62430 - DNA, 953 bp, Cucumis sativus
  Intron number 1 from transcript Cucsa.135610.4 (locus Cucs a.135610) derived from phytozome v7.0 (chr-ID scaffold0104 4; pos 430386 to 431338)
atagctgcggtgaaagctctctttctgctgttaaggttcttctctcccacttttcattaatctaaaaccactaatttcactcaaaacgagttaatacgactctactatgctaatgggtaatgattcattcaattcaatgatgtggggttctgagttatggatggactggaggcgtttattgtttattctgcaattggataggcgttcgaatgtagactgacttgtttttcaagagggtaatttatgggttgattggttgtgctttaggctgccaaggtaagatggcctggactgttcgatgaggtggaatccagtttggagaattggattgtggatcagatgtacacagtgagtctgttgtttccctttaattgtttcaatctgtttttttttttcttgatattttcttaatccaaaagacgctgaatctatctcttatacaagtatgtgaaaatatgtatagtgggtttgatgcacattttgttttttcgttctcttattaaaaatgattctgtatgtgtagtctgtaattcagaaatattaaattttgttggtcaaaatttgaaaacttgaataaaggggaaaaatgtttctatgttttaaatatagttcagtctttttaaagattgaaagacataaaagcaagtaaaaacagccccgaaacaattttaagaccacaaatagagaactaccttttaaaacccctgaaacacctctcagttttcgttctcatatctacacccagcttataacccttgctactcattgtcagaaaccctgcatacttcataggcatacaaaaaacttgtaatgtttaagggttattttttcttgtattaaagagagagaagcctcaagaagttttattagcagaaataagttatcgataaaacatcgttaatatgactaatatcctgtaatgtggtaggtccgccctgtggttgaaactggat

SEQ ID NO: 62431 - DNA, 498 bp, Cucumis sativus
  Intron number 1 from transcript Cucsa.047680.8 (locus Cucs a.047680) derived from phytozome v7.0 (chr-ID scaffold0054 2; pos 2608594 to 2609091 reverse strand)
tccctgaggatctgaaacaaaggattgttaagcaggtaactctaccgcctctccaccgtccatccaattgaacctcaaatttctttgcctttaggttttgcctggtatgccatttttggatttgtgaatcagtatataaatcttttttttctgtcttgcacatgtatttgaattgctagttgtgactttttgtatgtatacttgcatcgcttagtgcaaatattagaacgttgggaagcttatggttagaccgtcaactgcaaaggaagttatgggatcaattgatcatttcacggccgcgatatcgtatatttgatgctttgttacgtcattattagtgtagtcttttgatgtaaggcctgaagagagcatttagattttgacgattggatttcaattcattcagtttttttttataatattgttgagtgtttcagtatgccatcgtcgtctcatgattggtctaaatatcttcgcaggtagagtactacttcagcg

SEQ ID NO: 62432 - DNA, 370 bp, Cucumis sativus
  Intron number 2 from transcript Cucsa.051330.1 (locus Cucs a.051330) derived from phytozome v7.0 (chr-ID scaffold0055 7; pos 499106 to 499475 reverse strand)
aagaaaagggtcctctttacttaagaaaggtaaacttaaaaaagtatcatcgaagttcttcgtcacttacccatttttatttagataatgatctaaaagttgttaaaccaatttccttttcatgcattgatcatgaagttacttggtaagaaggtgtcaaacaagtcatggaatgcaatggtcactaatgctttggaatgtgttcctcttgacaaaaactttgctccaagctttgaggtttgacgactcttcctcataaactaattaaattaagacgaaatctattttaaaagtcaattcaaacaaatcgaaatacttctcacttttctagttcttttttttttattacatgaacttgaagaggcaagat

SEQ ID NO: 62433 - DNA, 641 bp, Cucumis sativus
  Intron number 3 from transcript Cucsa.117790.1 (locus Cucs a.117790) derived from phytozome v7.0 (chr-ID scaffold0099 7; pos 130234 to 130874 reverse strand)
tcgtcttcgatcatctactcaagggttttgttgtggtttgtcatcaatttattaatttatagtttttttccggttaacgagtaacaacatatctttcttaatattttctctctaaaattctttctgggttggattttgaaatttactattactgcatgtcactttatttctgatgcttgtgtaactctattgcatgaggttttacttttaccctttctggaactcttcgattgcttcatcccgtcatcactaaagattgttgaaatttgggttttagttagatcatcagcctctcttgaaattttaattatgggtcattgctccttatatttgtttgtgtgggtgtgcgtgaatgagtttggttggattgaatagaagcattggacttgtgatgtgaaggcctggaattgcctcaggacttttgttttgatttgtcttcctcgaatgtcgaagcatgattcgtcttttcaatttaatttctctagtttgtgagaagagatccagtttgagttcaggatacggcattcgatccttgctagtttgtgtgatttgatgttcttaaccaataaactaaataaaatctgattcatttctttttcttttcaggaattaatctgtattttgacattgtgagcaagcta

SEQ ID NO: 62434 - DNA, 870 bp, Cucumis sativus
  Intron number 1 from transcript Cucsa.078910.2 (locus Cucs a.078910) derived from phytozome v7.0 (chr-ID scaffold0079 3; pos 1403359 to 1404228 reverse strand)
cacttctcttgaaggtgagaacaaggttaactaactcatttagtgaatgggtgtttcggaattaattttggaattacacaaaattaatttttactatgcctagaatcacaattttatattaaaattgtgatgtttaaccacactgaccgaaagtgacttaaaaacttagtttgagattggtagataaactaattttgaaattatttggataatccttagcaggcacatccagaacaatcacttatatttgcgcatattttctcatcacacacaaagaaaatattacaatattataaagaaagggagaagtaaaatatttcatgtaataacttaggattgaacaattcgatggaatgtacaaatatttaggtgcatcctgaacatcacctatctttttgcatttcaccaaaaggttagtttaagaaaagtatacgacatcattagcttggcaaaattgagatttaaaattattgtattagtttccaaacttaatttaaaaattaccaaattactaaaaaggatttttcttttattttagaaacatatcaatacagaagaaacacgaattttactatgaaaaaaagaaaagaaaagaaaaataggggtgaattttgtaaggtaattccttctcaatcactccaccaaaaagcatacttcaaataattattacaaaaccaattctaaactgtttttagattgttttaaaataaatttcaacattttccaacacatcaatttgtttgtttgaaaaaaaaaaagtatttttaacaatactaaaatcactcctaaacatatctctaatcttcccttttgtatattctaatgggaataatgtaataatacagtggatattacacgattggactgacg

SEQ ID NO: 62435 - DNA, 1017 bp, Cucumis sativus
  Intron number 2 from transcript Cucsa.048170.3 (locus Cucs a.048170) derived from phytozome v7.0 (chr-ID scaffold0054 2; pos 2996347 to 2997363)
atcttgcacccttcaagctcttcgataccaggtgtgtgttttttctactataacctaaaccctcgcaatgtttcaagaaagggtatgtgtgtttttgtgattttattcagattgaactctccgtatcggctgtgttcttttcacgactttaattatattgcaatatgtcttattgttttcctttttcaactaaggaaccctactcttccttgatttctggaaagttacgaagctataacttcatcaagatacgaaattggacgcaatttccagatgttcgccatagaaccaatccctagaattggaaaaatacaaaccaactgaaatcaatattggcataataataataataaaagatttattttgatgaagcgtaacgagaagccgcattaacgaaaatttcaaatctatccaacctaggagtttgtttgtcttcaataggcaccgattcctttacaaccaatgtcggacagcatcgggttgatcacatttatccatatccatatatgtttcgcctttgtgggaagttcgggcagtttgaggttaggttgggacaggtccgtgctacacactattactatagaattagcttctaattccaattttcttaccagatttgtgtggttgacattgagaacgtttaggtgagttttagacttacagctaactgaagtgtgaattcagattttattattgaagccttgctagggtatctattgatttcttcattaattcgtaggatcattgtgttagaacttagactgttgattttaaaaacacaatagagcagattgtttgtactggagcatccttatcttcctagcttaattatcctcgacatgagttatcatccttttgttctctttggtttggtgttctttatgatttttgttgaaacttttgtaaggtttgttttgtgtagttcattttgttctccttgtaaaggcagtatgttttagccccggttttggattttttgaagcttgattgtaggaataagggcgctgagggggtgtc

SEQ ID NO: 62436 - DNA, 667 bp, Cucumis sativus
  Intron number 3 from transcript Cucsa.048170.3 (locus Cucs a.048170) derived from phytozome v7.0 (chr-ID scaffold0054 2; pos 2997379 to 2998045)
ttaaggtgcgcctgttgatccattggtctttattttatgctaaccctcttgtactttgagcattagtctcttttactttatcactttattaataaagagactcatttccttttctatatacatacttacatatatatatatacactattctttcagttatggagtaattgtttgattcttctcaaggaggtcataacgactagaaactttaaacttgcatttaaaaattggtttgtgcatttgtgatcttgagatttatgtctgtggaacatcaaaaggaagcattagactcatttcattaattcaattaaaaaagtcttgtttccatttagaaaaaggggaagcatttatgccaatctcttttttgtcatagcactttctgagttctgctgtgtttcccgacaatgaatatatagctcagattgaaatgtaaactatcattgtaaatgttttatgcttggtttgtgggtgatagtgaaatcaaaactctgtttttgaaaatgaagatgtagtcctaactattaatccaatattatttgagttttattttattcttgtctgttaaaagattctttccttgttttggtgaactccccaaagttttttttactggcttattcatcttcttcgggttttttttttacagtgttgtggctttataatttcc

SEQ ID NO: 62437 - DNA, 962 bp, Cucumis sativus
  Intron number 1 from transcript Cucsa.067140.1 (locus Cucs a.067140) derived from phytozome v7.0 (chr-ID scaffold0069 6; pos 1538120 to 1539081 reverse strand)
ccggaggaaggatttcctttgagagagtggcggaggtgagaaaactgttgaactacttggggattgtaagattgttggtataagattttttggaatcaaaatctggtagttgttagctcttactgagatgatcaaatccttgtgtttatgaactgaattaaatttttgcgatcatccgatggatgaaactatgcgtaatttttgtgcattcaagaaattctaaccctcttttacttactgcttttgtgtcaaaagcttacctctcaggttgataatcattttgggtcgtttcatttggttttttggttttgaaaattgcttggtctaattgaaagagttgaatccaaatagtcaaattctaaaaataaaaacagattttaagaaactatttttcttcaagaacttggctgtattttaaatagtgagcactaaaaaagtgttcactatttaaaaacttagcttaattttcaaaatctaagaatgaaattattaccaaatcgatcttagacttttagtttttggattctgaaaattatacttactttcttagaattttttttaccgtggttttcatttttctgaactaaatactagaattattagtaaaatttcaaaaactaaaaacaacttttccaattttcaaaattgtggtttggttttgaaacactcctaagaggtggtagcaattctatgtttaacttttataaaccaaaaactagatgactatcaaacaaattttaagacttgtttgaaccaactttctaagtgcttgaaaactccttttttttatacttaaaaattgaagcacttgaaaagtcaacctaaactatccatatgtttagtattaccgtggttctcttctaataagttaccacttaatctaaaatcttgagttgatgggttatgataaatttaattatataatggtttaacgtgaatcgtagctgtgaatggcagattga

SEQ ID NO: 62438 - DNA, 592 bp, Cucumis sativus
  Intron number 2 from transcript Cucsa.091500.3 (locus Cucs a.091500) derived from phytozome v7.0 (chr-ID scaffold0089 4; pos 2500814 to 2501405 reverse strand)
gtgcttcgaaggagaaagcgcaggtttggatttttgtttccgcttctggacctgattctaattagatgaccctttttctttgttttagaatattgattctcgtatttgaagctatttaatttcagttttctaattggttaaattgattaattgttctctataaatagattgtgtttacttaattaatactcctggatcatagatggctgattgtagtctataggttccatttgccaccaaccacatttctgttgtattcgccaccaaaattttctggacatatttctcttagttaattcgagtttttattaattttgtattttaattgatttcacttagatacttgatgaaggctataatcttcaatttttttgtttaatatttaaagcaaatgctagaaatggtttcttagtcaaggcttcattgttttttgttttctcatctcgtgcatcataattttttttaattggtttttgttttccttcgttacaataagaagttttgaacaaattggtgtatatttcatatataaatatataatataacctttatcgtcaaatttgagtattcttttgttgttgcaaccaggctc

SEQ ID NO: 62439 - DNA, 784 bp, Cucumis sativus
  Intron number 1 from transcript Cucsa.103200.1 (locus Cucs a.103200) derived from phytozome v7.0 (chr-ID scaffold0092 7; pos 2048476 to 2049259 reverse strand)
aaaaaggggaaaccctggacgaaaaaggaacatcagtacgttacgttacttcaacttaatttagcctctcctatatgattattattaatattctttagtacatatataactattttaaaataccattttaaatagtttgatttctaaaaactcttttgccaattcttaattataatcatagttcaactattactacctaaatttaagatttatcaaatgacgcatgaaaatttatagttgtatcaaagttgaaactaagttaaaagcatgtgtttatattagtataacttccatctcttaatattcaatcactcacttcataatttttcaactataaaagtaaaagaattatattcaataaaaggttgatgattatatattttattcaagagattagtttaaaactttgtaattgtaactattatttattagcattttcatggtagattttagcaaacacgtttatttatttttagcattgaaattattgatattattaaaaaattatatataaaatcaacttcttagaactaataaattttaagatttataaaagtattttgatataacgatcataatgacagaaatgtatgttaacccattaatattttaaagtgtcaattacttgctaaaattggatgacttattattatttaactatataaaaattgaaagttagacaaaaaataaatagaaatatttgatatgtataagaaaagaaattcaaatgaattttccaaatgtggcaggctgtttttattagggctgaagaaatttggaaagg

SEQ ID NO: 62440 - DNA, 865 bp, Cucumis sativus
  Intron number 1 from transcript Cucsa.012610.2 (locus Cucs a.012610) derived from phytozome v7.0 (chr-ID scaffold0016 4; pos 252944 to 253808)
ccgtgtagtttccaagtcccagttgaaagtgaaaggcaagttccactgtaatggattgttggatttgatctgttgtgggtttgattttagtttccccccctctttagttgtaatttcagtctatgcttctgtgttatgttaatctgtgaagctaattattaagaatttagtttacttttggagctgtgttcaaattacttcaagttttctttaatgggattgctacgtcatcgtcatttggtccatgtgataaagtgagttcacaagtaaagacaagggagcggtgttgggaattagtgaaatggaataaataagatggaagtttgtttttgtaaatttggatattgatccatgtgaaatttgctgagaagccttatactgagcctgtggaatgtgaaatgcattacaaatgctgtggaatttaattgggacagctaactacttacttaccagtgtcaaacagtaaatggaagagaactgctaatattgatttgacttttcatgtctttttccttgagttcaacaaatttatgctagaagattgaaccatcaatctttgggatgacaatgagtgtcttagccactgaactatgcttggatcgacgaacttctttagtctatgcatgctaaggatttaatataaagcttgaatgtaccctaacctattaatttaactttcatggttggcaatttaatgctatgtcaaaaacaaaagattctgtgtcaccaaggtttggagtgtctagaatattgaaaatattaaatatatgttaacgtattgacttaattttttagctcagtgacattgcatgagctaaaaccttctattatgtttacttgcttttagtgaaggcattttctggag

SEQ ID NO: 62441 - DNA, 530 bp, Cucumis sativus
  Intron number 2 from transcript Cucsa.010580.3 (locus Cucs a.010580) derived from phytozome v7.0 (chr-ID scaffold0015 4; pos 10858 to 11387 reverse strand)
ctccatctcctttgagaagtgccaaattttttcaggtatcattcttttgtatttttcttttccctttttaatgttttcgtttttgctctgttttctgttatgttcttacttgttttgttttgaaatttggcatctttctgtggtaatgtacaatggttttgtatattttttgaaccatcttgtgatcgggttcaaatctgacaaaacaacaatgagaagaggctgtttatgtttcataattgtgaagtcaaatattgttcttatgaaaattggggatctaagatgtttatgagcaggatgggttttgggatatcttttattgaaacaaagagagaggtttattaaagtgggtgggggaggaacgtgagtgttaggaaaacaatgtattaatccaaattgaagattttgcatcaaactaaatttgaatctgattggaaggctttaattggaattttctattccttaatctcttattcagctcggttgatttccttgaccaatattgtgatcttgctttacgacaggcaaat

SEQ ID NO: 62442 - DNA, 631 bp, Cucumis sativus
  Intron number 1 from transcript Cucsa.010580.3 (locus Cucs a.010580) derived from phytozome v7.0 (chr-ID scaffold0015 4; pos 11443 to 12073 reverse strand)
aaacccactccagatttttattttcctaatccaaggtgaaaatctcctcattttccactttcttttacttgattccatatatcattcaccaattttcgattttttttttcttataacaactgttttggttctgttagatttagatctggaattgtttggtgggttagtcctcactttctttgctcaaaagctttctacttttcgtgtttttgaagttttttcttcattctctttctcttcaagtcgtcgtaatttggtctattcattcttatattcaattattttcttcattttttttaatacccatcttataaattcctatataaaaggcattgctagcaacttagattttccaagcagctgaattgaagcttagaatttggggaattcactttgaagggtttgggtttttttttttttttcggttgtttttggtttgactttgttgcattgcatttctaatgtgatacattctttattttgcatcaaatccaagtctattgtctatttgagtttttggtttttatactgagaaatttcaaccattttggttgggttttttgtttttgaaattcaattgtgatgtttgatgattttgatgatccagtgtttgaagtgaagatctgaggta

SEQ ID NO: 62443 - DNA, 1008 bp, Cucumis sativus
  Intron number 1 from transcript Cucsa.084720.1 (locus Cucs a.084720) derived from phytozome v7.0 (chr-ID scaffold0086 2; pos 398691 to 399698 reverse strand)
gaagttgagattcccagttctgttcccagtgccaggtgaagatttttcctttctttttggggtttttgagttcatttctttcttgggtttgtttttttttagccaaaatttcagattcctgcttggaaaggttccaagtgactattttttcccttggaacctggaaggagctcaatgtgaaacttgaatctcagccttttgagcttaaatgtttggttggggtgccactttttagctcaacctttggccattttgcttgggtttctaatttcagattttgcaagtggccatttttccgttggaacttggacggatatcatcatgagtcttgaatctaagctttttgtgtttatatgtttggctgggatgccatcttttgagctcaaccgttaagctttttgcttggattcctagtttttagtgtttgtaaatagccatttttgccttttggaaggagctcttgataagacttaatctttgcttctacacttcaaatctttggtttgggtttggctttaatttgagcctttttcatggcattttagttttggagttactaatcctcttttctttttaccagaattttttagacgaatgggttgagggaaggaccaaaacttggccttcttcttccaatacaacaagaactaagacatttctcgcacaaaattagttttaaagactgggttatagcgtgaaatagttcacattttctctctttaagtccacaatttgatttaaacagtactatcaaaggacttttttcataaaaatgttcttccactcaattaaggaactcacctccctgtcatttagaatgaacattgaattgtgtcacgggctatgacaatactgtttcttggagctggtcatttggtgggaggagccttttgattattagttgtgtgggccacgaacattatgtaacgagtggggtcccgacatcatttagttttctctgttcttcatgtacaactaaattatgaacaccttaactttgcagtgcca

SEQ ID NO: 62444 - DNA, 813 bp, Cucumis sativus
  Intron number 2 from transcript Cucsa.074430.2 (locus Cucs a.074430) derived from phytozome v7.0 (chr-ID scaffold0078 5; pos 288849 to 289661 reverse strand)
attcacaagcagatattgcgattctcctcagaaaggtatcggttatttaggttaacttcaatctaaataatttaactaacacttcttctctcttgtgcaaattgcctttttgttttctcttttcaatgatgaaattcagaaatatggatactagatttctgatgaaaatggcttggaagaagtgtagttactaaaccttcttgtaattgtgattataatactaatttactcttacaagtaaaggaggagaggatgcagttactgaaggtcaataaaccaagtaatccaaataactagaaaatcatctcaatccaaaaaaaaaaaaaaaaaaaaaaaattactaacttgtcaatgggggcatactttgaaccagaaatcctgcaatctctctggcaagtatcaatggaggtcgaaactttcacaagagatggttcatgtcaatgggaaatatagtatttagtggttctctatttcataaactacttgaaggaaatagaaataaatcaattttttttaatgaaaaattcttcttttggattagtagattatctacaaaataaccatctatgttgccatccccttggaaattttaaaataatgcatagttttaaataacttcatttgatcacggtgcctcttatgtcataatgatgaatgaaaaagaaggttataccagaccttgaatctttgccacacaacgatttctcacatatttgttgagttacctgccaataattcttggatgaatattgctttgcaataaatttgcttcacattgggttgtatttgttatgtaaccatagttgattcgtg

SEQ ID NO: 62445 - DNA, 843 bp, Cucumis sativus
  Intron number 3 from transcript Cucsa.009200.3 (locus Cucs a.009200) derived from phytozome v7.0 (chr-ID scaffold0012 3; pos 158699 to 159541 reverse strand)
agagcctcgacaagcttctctttagtaagtgacacttagaaattatgtttcttttttcttccaatgaagaatgaattattatactctgtcatctatagaaatgtctgggcatcttcattttctgattgtatgttctcaagtaccttaagtttgtttgttcaagttgaactcttttttcttttcagagtgccattgaattttccatctaattgctctctggcttgaagttgtgcaaatagaaaagagttcccattcccgttagtttccattcatttgcagtgataattatacataattttgaactttccagtaaaaagttgatagtgctgtgtaatttcaagagattaatgcactacatctctttattattaatactgtttcatactatagtccatttattatgaccatttttcttcatgtgtttcaatctacaagtcaaaatgaagtcgtcctgtattattttaaaaatattcttttgtataaaaaaattattacaattgttatttatttttaatgagaaacaaaggcatcatggtaacagccttcgccttagggatgagagatccctaagcctaatggggataagcgttaattaattttttttgagaaaccacattaattattatttttttttttgaaaaaccacattaattacattgcagaggtcttaaaatcagtttcaacaaaatattcattccatcgatctagaacatgttcttctctttctatattattgtttttgttgttgatatgatgcttactcttcgaagaactataagtgataatagttacttttttgttgttatagcagaatccagcagacgaggagaacttgattggaag

SEQ ID NO: 62446 - DNA, 381 bp, Cucumis sativus
  Intron number 2 from transcript Cucsa.027590.1 (locus Cucs a.027590) derived from phytozome v7.0 (chr-ID scaffold0037 8; pos 315310 to 315690)
acaccggaatacagtttgtatgtccatcctcttaactaataatgaaaactgatttatttgttataatctatataatagaaaaatgacagtgtattgttgcgtttttcaccccttaattttggagaaaattaaatgtggatgagtagacggtagaaaattcaaaaaaacaaagaaatagtgtttatgaaaagaagtatatagtaagagaagggaaaaaatagctttctttttttagttgaattttgtaataaggaatgtgagagtagagaaatgtgagtttcaaattatattgtattttgttagttgaaagtatactttatttaatggttagtgattatatgaaggaatgtacgtaaatgggtgcagataaacataataaga

SEQ ID NO: 62447 - DNA, 693 bp, Cucumis sativus
  Intron number 2 from transcript Cucsa.011440.1 (locus Cucs a.011440) derived from phytozome v7.0 (chr-ID scaffold0015 4; pos 685109 to 685801)
gggtaacaggtcagttttcttgatcatgtgagctaaacttgtaagaaatagttttgtaacttcgtttttcttatgttctttcgagttattgatagacgatagttatcgattgtacacttacgaggacaaagagtgtcttcattagttttgaaaattaagttatttgtgagaacaactaacgaaaagtttacggtcttctgttttgattaatgcatagttacctgaatttttttatggtctttctgttctgaaaaaacagttcctaattgacatatatctgtcatgaacataaatggttttatgaacatacaaatacaagtttttaggaatgtatgacatggaaagcaagatcttctctatgtacaaaataccattttggatggctttaatgcacgttttaaaaaccttataaaggaagaataaagtaatgaaaactttccatgtttagctgaaccctctgctgtagttagcatttccttttcacaaaaaggaaaaaacaaaaaggccttttgttatttttattttgtatgcatttcttttccaaaagaatatgggaaaatagtgaagatcaatgtcttcaataacagtactcaaagcattaacaattttgtaattactttcccaatgtgaataaagctaaatgttgaagataaaacaggtggtcaaaaattgcaaggcacctccccggaagaa

SEQ ID NO: 62448 - DNA, 412 bp, Cucumis sativus
  Intron number 3 from transcript Cucsa.026490.2 (locus Cucs a.026490) derived from phytozome v7.0 (chr-ID scaffold0036 8; pos 39697 to 40108 reverse strand)
gaaaactcaggtaaccaaactatatagttgtatgctgtttgaatgacgcaaactataaatagagctggtagaaaaagtcaaattacaaggatcaatttctttttccgtttcttataaatttataaaatagagctttctaccaagtttgtgcaatgccttttcttatgtgtgcttgtgcaactattgtatttgtacttgtaattgatggttttttaaaactagttcttcgtgaatcgcttgatttggttatgataaataccgaaccacttgatacagattatttgacacgattttattcctgggatataactctttatgtttcttaccgtggatgtgtattctgatttattgttattattttgaaaagaaagaaataatggtcaatagttgccattgattgattcttacaggg

SEQ ID NO: 62449 - DNA, 836 bp, Cucumis sativus
  Intron number 2 from transcript Cucsa.120090.3 (locus Cucs a.120090) derived from phytozome v7.0 (chr-ID scaffold0099 8; pos 2062793 to 2063628 reverse strand)
ttgctgctggtaaattcctaatttcatttctagtcattccaatccatcatatatattcatattctgtatcctaaatttcaggtgttgggggtaatttctgggtttttctttaaacatttataaaggggtttttttttttttttttctgtacaagttcctgtttagatttaggctttaattttgagcggctggaaatgcatatcaatggagagcatttgatggttataggaattgtgtttcttggttaatttagcctctcaattggataataactttgatgaagttaatttttttagtggaactagtgtactatggtttaagctagttgtaatgctgcttgttctacagcggtaacggttcgtttgatatgcacaatgcaacttgggtttgactccttgtaggatctcatctctttaagcgagcaaaaacggaaatatatgctcgaccgtccacccattttgactcttgataagatttttcccggcaggataaggagatgaacctagtttcaaaagaatactggggtattggttagtgcaaagaaagaagcaaacaaaccagagtgttggggagtttttctattgatgtgacggagtatatacttctgtaaagaagaatttgggatagaggaagctaaccatgaattttttgtactatttcaaaaagaaaattttggtgtgtaaatcttcttggctctccttccacctacattcatcttcacaatatcaataaacacattaaatttttccatctcttcattgttttaaaaagttatagtttcttctgaactcttctctcttttagtttctttctgacaatctgttatccatttgcag

SEQ ID NO: 62450 - DNA, 858 bp, Cucumis sativus
  Intron number 1 from transcript Cucsa.131900.1 (locus Cucs a.131900) derived from phytozome v7.0 (chr-ID scaffold0103 7; pos 37575 to 38432 reverse strand)
ggagaattggctattgctggtcatgtgagtgcttcttgtcgttacttgacatctttgtgtcgaagctgttatagtttcctataatgctagttcaacttttcatatatattgttgactttattttctttatttgagtggagtgtcaactgagttgcgatggaaatgttgagaattaatggaggtgactacacatgtcttagctgtgcattttaaggtgttgaagtatagatgtaactaaatttaccgtaattcatgagcttaagcttttggtttgatcggtgattttgttgtatgtttgaatccctaaaatataatttcctttccaagcttgcgagtgttttacttgacgggcattgtttaagctacaagcgagggatggtgatgaagtattaatataattaaatttactgtaagtctgtaacccataagtataagtttttagttggatggtgatctaacctcaggcttgaaaacttatatggtctgtacttcttcacattgcaatggggtttagtttttgtttctgttctaagttttcatttttagggaggctatgttggttgggttggtggtaatcaaagcaataagctagtgatgttaagctttcaatagttcctggagtcagcttgtcctaggtgatcttcagcatgaaagccaatctggaacctacaaacatttgctatgtgtggccaactttccttctggtttagtttcatttctatctataaaaaattattcagaaatcaataaatcaatttatatgcatagactttagtaactaacttgatttcttcaggttgtccttttactctctttcttaagttttttaaactttgatcaggctagggcgttgctgga

SEQ ID NO: 62451 - DNA, 763 bp, Cucumis sativus
  Intron number 1 from transcript Cucsa.058490.1 (locus Cucs a.058490) derived from phytozome v7.0 (chr-ID scaffold0061 4; pos 652264 to 653026)
attcaaaacaacttcatttcttctgatacaggttaacactctttttatagttttgttctgtttttgaaatccacccaattttaatgaaatgaatatatatatagcatcttattttcttagtacagtacatagtatatttttattatagattgaaaatcactcatgattggttaaccatattcttctctcattttttttataattataattaaagtttaatcatgatagatttgcaatctctctcttaaaaaaaaatctcttagattttaacttttaatcaaataacttgtaaggaatactttatttactaaaaacaaatacacttttgaaagtttcattcctattttattctaaaaatgtagtcaaacaagatgattttaaatatgaaaatatatataatataaattgatgtgataaataatatcttaaattagaaaaaaaaaacatatttagtactgtctaacaataaacttcaaaaaaaattattaaaaaaagcaaaaaataaatgcttagtcaaactaagtatagaatttttctttctttcatacaaaaaaaaataatataatcaattagtcactaacaacatatacttatttaaaatattttaagtagataaagcttatatcatccatcatcattaaatgcatgattttctcacgaacattaaaaaataaaattgtaagataatttgaaggttaaagggaatgaaataaaaatattacaaaaattaaagtaaaaaaagtttggaaatggatatgacagg

SEQ ID NO: 62452 - DNA, 724 bp, Cucumis sativus
  Intron number 1 from transcript Cucsa.078270.1 (locus Cucs a.078270) derived from phytozome v7.0 (chr-ID scaffold0079 3; pos 547953 to 548676)
tgtggcattggttgaaagacaagactttattacaggtgtgttatttgattaatttcacattctttcatcctttttctttctatttattaccatttctatatttgtttttctggttatgcacatatttttttagattaacagaactgttgctaaatgatttgatggcagcctattaaaggacttgaacgccagagtaatagtgaagaaacattgtctaattcctttttttcttgtcctattaatttatagatgcagctgagctagcaaacaagaactacagcatgtttgggagtaattctagagtggttaaaataattttgttattctttgatattgttcaaaatcaatttaatggtatgaaaaaggtgtttgaaagtgtaaaattaaaaattaaattgattttgagcggctaaaagtgtgctttgatatgagaaaagtgaattcaacacttcagcaatcactcccaaatatggacctaatcaactcagctaacaacattagcttatatccatagaagacaaccttccaactagaaagtaacgaacccacttaccctatgaaagaaattgcttggaagctgtattgaattcatcggggattctcatctcttttgctttgttttattttgtatgtgtgtgtggatggggtgtggggtatgtaaaggaggggttctatgtcaaaaattttgctatataattatgtttctgtgacctttccatttcag

SEQ ID NO: 62453 - DNA, 630 bp, Cucumis sativus
  Intron number 1 from transcript Cucsa.032290.2 (locus Cucs a.032290) derived from phytozome v7.0 (chr-ID scaffold0042 9; pos 1640578 to 1641207)
gtggctattcctctgtcaagttcctaaggtggggataataacagggcaacttctggtgaaatcttcaagggattttacctttaggtgcttccactgcggtataggtagaagaagctagttcaatttgacttgtgaatgtatcaacagtggaattgagggtctaacaatatccttaatctaccattaattttgatatttagcagtagtaaagcataatcattaatcatcatgacacaaaaaaaagtagattacgtaaagaatgtgttaagatgggtttatgttatattataggttatgaaatctacgatcagaaaaacgtaaaagtagataaattgacacattgatttacttagtttactaacagtaagttaggtatgttcataggtggaattttattattaaaaaagaatatgagatgaaggcacctctagagttcgagtgtttatatatagagcactttctaaaatcaatggaaacacccaataactaattcatggcattccaacaatatggatgttttcagtgttctcattttggggttttaatagaaataatggctttgacaattgtattggtgtaaataatatgctaacagggaggagctgtacaaagactgcgtggcagccttgc

SEQ ID NO: 62454 - DNA, 646 bp, Cucumis sativus
  Intron number 1 from transcript Cucsa.089140.1 (locus Cucs a.089140) derived from phytozome v7.0 (chr-ID scaffold0089 4; pos 436683 to 437328 reverse strand)
tctccttcattactccttcctccgccgtttttcaggtatccgtcgttttctctgttactttggcttttcattcctcttgatctgatccgtttactcttcaatctctaactataaaactcgccttctcagtgtttgtttgattatttagtctgtttagtagtgtttttgtatgtatgaatatgtatttttttcccccttttattcgtgtattgggggtctattgtttttctagttgggcatatgtttgatgttggtgtcttaacaattgggattatgggttttaggtacgtgatcgtttaagcaactattgattatgggaatttgctaaatatatggacatctgatgagttaaagcattttttgtgatcattttagtatgtttatccatgagttccttgattggtgtatgtcttatctgcattcactcattgaattttaagaagatctataacatgtttcaagtaaaaatgtgtaattccctgtcatagttcttctgagattgaggtttttatttaagctatatttatgatttttgacatctccccaagtatcctccttgcttgtctgttgttgtctgttgtgtttgcatggtttaaacattcgtatttcaggtgattgttggcggtggaagtggtggcggtttcag

SEQ ID NO: 62455 - DNA, 661 bp, Cucumis sativus
  Intron number 1 from transcript Cucsa.084870.1 (locus Cucs a.084870) derived from phytozome v7.0 (chr-ID scaffold0086 2; pos 533909 to 534569)
tgtattttgtgcaagattactaaaaagaaaaaaatgtaaagacttaaaggatctcatatttgtttttttcgatatgtgccacgaaagagctattggctttctccattagattccacacatttaggccttccaaaagccaattttccattatcccggcaaggcaagtagaaactcccagctttccaaacaaggaattctacgaaactgaagatattgtcttgaataataatatccataaaattgggtttcttattttcagcgatacctacattgggttaagtatattttgtgcttgtgttttaagactagagaaatggtgatttttggtttcaaggtatttcagtattgaacatattatatcatgatagcatttaggacaaagctacaagttcacaatcgaactaattgatgttatgctttgtttgagtctccaaattgttgtctatacgcttatataacctttaagcatttggatttgaacctaagtgtttttaattgtacttgtaaagtaagaaaagtgatggggtggcctgaaggctgatctttatgcatctgactgacttctgtatggtagttatcatcttttgttcttttaaatggatgtaaattttttcctttgtccacaggggtgcccctagtaagaaatatcagtgagcttcca

SEQ ID NO: 62456 - DNA, 940 bp, Cucumis sativus
  Intron number 1 from transcript Cucsa.047370.1 (locus Cucs a.047370) derived from phytozome v7.0 (chr-ID scaffold0054 2; pos 2420316 to 2421255)
tcgttactcaagtttccaaggttttcatatatatatatatctacccctacattttcttttttcaagagtaatgcacgttctttttttctttaatttattattagtatatgtatatgtattatgtatacgtatctttttgaaaatattactttgatctaatcttatattcatgatttgtttttgtcacagaattagtatttatgttatttttgcatgaaaaaaatttaaattgtagtttgtatatatgaggttaatcttgtaattgtttgtgagaacagatgtttaaatcttatacaagaaatgttaaccattaagtttaacttcttatcaaaacaagagaaggaaaaaataaacaaaaaagaaaagaagattttgtttctttcggtttaactgtaaactcttgtgtctcgtgattcttttttctcaaagtcaaaaaagtactttgacacaattggaaagccatctttgatttttatatcttacttacttctactacccataattttttaattcaatttctacttaactaagacagcttttgaatattaatggagtgtttggagctagtaaactctaagcagttataaacttagccctcggtgtaaagaattaatggcatataaaagatgttcttgtagtattaaacgacgagtatagttcgatatttcacttatctctcaacccttacttaccaactccaaggccaaacatgtcgagaatgttttgttttttttttaatatggaaaaaaccatgatttgaaagactggaatgaaacaaacacgaatttcaaaatttgatgaagtgatttaataaaaatgctgtctagaagctgaatctatattgtatatttatattattatatgtacacttttttaattaattaagctgtttgtttgggtttcagatttccatagactttgtgtacctaggcattggtac

SEQ ID NO: 62457 - DNA, 735 bp, Cucumis sativus
  Intron number 1 from transcript Cucsa.083940.1 (locus Cucs a.083940) derived from phytozome v7.0 (chr-ID scaffold0085 8; pos 630788 to 631522)
aaatcattgttcggttgcgacttcgagaatactgggtcagtcttctttaactctctcccccccccagaaagtactacgatatccaatcgtttgattttcatttttcagttttgttaatatatacgatatgtatatattgtgtttgcttagtttttaaaatatttgtttaacttaaaaaattcattattaaataagattttaaagatgggtatttaaaaaataaaaatcttgttattttttttcttttcgaaaatacttaagaagttaattagatgaaagataaaataatatttatttagtgtaggcttatgaactcaatgtaacaaaaacaatgagccaaattaacaactctatttcttcaaacaaaacaccttcataagagtgttacagctagtggggctataaccatttgtaaccacaaccaaaaaaattaaaagaactcaaagacaggaaaaagaaaaataagtttgttatggttcaaacagacaatcaagaattactcttttggtaaagttgaattaataaagaagattattgagatagacaaaaacttctaaaattataataaaatataatagtttaagataaactactatgagtatatatcataatcatataaatagataaaaatatattttactgtattttatgaatattttggttaattttaattaatcataaagtaatttgaagtatataacttaattatgggatgtgttttgtttatatatgaag

SEQ ID NO: 62458 - DNA, 675 bp, Cucumis sativus
  Intron number 2 from transcript Cucsa.124740.2 (locus Cucs a.124740) derived from phytozome v7.0 (chr-ID scaffold0100 1; pos 571080 to 571754 reverse strand)
agcatttcaagaccaagcgtcacaggaagaggtgagcttagtcaatttttacctctcattattttttgggcatcctttgcacatttaagttcatatatttaaaagaaatccatctcgtattctccttggagaaattattaaatgttgagaacgcttagttttattaaccttatcagcttttgtttcttatatttacatttttagtttgcctaattcggttggtgctttgattgggtggttgtgtgaaattatgaacttggaattggaatattgaacttggtactggagtttgtcttagtgctaactgagtttaaatttcttgagttccttcacctggtctcagtcttaatttgttataaataacggcaaaggtgaaaccaaatttggaactccagtggaatttgaactgataatcttcttttgattctttaattatatccatttatagccattgaccttagtttctctatagtatttgatttcttggttgtaaggtgtaaagttagtatgactgtatttgaagaaaaatataggaaatgcaactgttcactataatatttgattcatttgattgtgaggtatgaagttagtaagattgtactaaagaagaatgtttgaactgcaattgttaactatgttcctgtaccacaatgacaatgttgcagggtaaaacaa

SEQ ID NO: 62459 - DNA, 380 bp, Cucumis sativus
  Intron number 1 from transcript Cucsa.124740.2 (locus Cucs a.124740) derived from phytozome v7.0 (chr-ID scaffold0100 1; pos 571773 to 572152 reverse strand)
gggcagtactactgcctgcactgcgagtaagttcttccatttgctactctttttgttaaatttatttactctaaatttctatagaaaaccgtttctctcattgtagagaattcatcaattttaatggttagggctgaatatttcgtcaagtattatgatttggttatctttaatgaaatttgaagtttagagtttataatcaatcaattaatgctatggtttactcatctttagggctgaatatttttttgatgtgttatctgaggctgagatgtttgtgaagtattatgattcttacattggatgaaactagtatgtacgattttaaagtttacaatttaaaatcaattaatggtatggtttcagccgatactttgcga

SEQ ID NO: 62460 - DNA, 847 bp, Cucumis sativus
  Intron number 2 from transcript Cucsa.126300.2 (locus Cucs a.126300) derived from phytozome v7.0 (chr-ID scaffold0101 7; pos 230675 to 231521 reverse strand)
tcgtcgacttgagaattataggattgttgatcgaggtaagtagtctccacttcctttccaccacataaattttaataaaaataggttttgaccgtctgaaatttgataaatggttgaaagtgtgttttggatgtttgaaaatatgttcgtaccatttgaaaccagttgaatcgttttttggatgttttaagtggtttcctattagccttgctgcccactgcccactatctacttagatcaagcccttcatcgctttgatttgtacaaaaaataagtaagactaaaagaaatggtttgtatagtaaacatgttttatgtgattttagaattggttgaaattattttgtatatttgtagttgattttgttaattaaaagtatatgattgttttggatgatagttgggagtgttttgactgattttgaattgaaagtgtttctattttagttttgttgacttcctaaaatattttgaaaggtttgaatggtttgatttgatgagtttttagctgaaattgctatttggaactacatgttttgtttgaaatgtttctatttgatttgataggggctatccaaatatgccggtttttgtgtctggaattatatggtagcttgttgtagccaaatagtatctctttcttagtgaagcttatttgtgagaagacacttttttgtggtatgacattcatgggaaagattcatgtgtgtgttggactcacatggcatcacactttaattaatgtgattctaactgtgacaacatttgaaccagagtggtagtcaacttgtgtatgttataattattctagccattgatttgagctaatcttctttctattttaggc

SEQ ID NO: 62461 - DNA, 769 bp, Cucumis sativus
  Intron number 2 from transcript Cucsa.092330.1 (locus Cucs a.092330) derived from phytozome v7.0 (chr-ID scaffold0090 5; pos 236789 to 237557 reverse strand)
acctattctattctttggaacccccaacgaattatgtaagcactacaccaacaatccttcttttctcttcttataaacaaactacaatatcatcaaaaaaaaaaaaaaaaactcaaaatataaaacctaacaaattcatgttatcatccaattttacgagtaattgtatctcatgataaaacatattacattttttacaaaagcaacaccactagccaacaagaatcacgaactatgcattgtgaaaacaaaccgaacttaaagaaatttacaaattataaaaacggataaaaattcttataaaaaacctcaaaaccaatttgaggaaggaatatatttatagattaattgatgatggttggaagacttttgaacctttcttggttcaaatttgaagagatatattcattcataaaaaagtccaactcctgaaattgaagaatgcgagctcaagcaacatgctatatatttcaacgggagtttcatctcctagaaaaaaccacatactaattctgcaagcagaagaataacatggaaaacaatagaattgacaacagaaacattacattgaaatttgagaaaaaaacacaaaccataaaaaagataaatacaaccacactaaaatttcagactaaagacataagcacttttctatagcgtttaaaatccatccaacactttatacgtgtaacaactgctttctaacattttgccaaaatccaacacccatcacattcatcttgcatcttatgcttcagcttctcagtgg

SEQ ID NO: 62462 - DNA, 899 bp, Cucumis sativus
  Intron number 1 from transcript Cucsa.090140.2 (locus Cucs a.090140) derived from phytozome v7.0 (chr-ID scaffold0089 4; pos 1517235 to 1518133)
aaagtctcttgcaggattacgaggagttgcataacgtaatattttcgtttttggatttttctccctgttttaatctcttttatcgatgtgcttgttcttcgattattgttgtttatttttcgagattggttatttgttgattggttgctgagttttgagactgtacttgttttgtccttgatactagaaaagatgaagatcttggcctgagaaggctttgagactgtatttggttgctgagaaaattttgaactgttgaaatattgcttttgatgtttgtgttaatttttggtgtttttaaatgctaaaagaaaattaagcttatggggttcaatctcttttatatgttgttggcttaatcgaggatacctcaaggggtttagacagttccattggctaagagatcataagttttaaactttcgaccccatgtgttccgtttttcccttagtgtagaagtggtacttaaaatgcctttaagcccttagaaaggtaatctaaacatgcaataaatcagggcgtttaattaaatgagataatgtgtctcctgtaattgtgttcaagtttgaagtaaatatgacttgatattattgattttctgtaatagagttagttgttagtttcaatgttgagtgagattagtcaaagtgtaagtattcaatttacgttgctttttgtatttgtttaggagtgatatatttgaatttatatacctagcttagctcaacttggatacccattacattggtttgaacatgatcttatcactcacgaataatgaaagtacaatctttgaggggtgggggtgccctgtatgttttaaggtttcaattttttttaccatatggttgatggatggaattcctgctcagttttacttctaatgtactgcagagata

SEQ ID NO: 62463 - DNA, 870 bp, Cucumis sativus
  Intron number 2 from transcript Cucsa.111530.2 (locus Cucs a.111530) derived from phytozome v7.0 (chr-ID scaffold0095 3; pos 297732 to 298601 reverse strand)
aagaggtacgaacagtttttcttcttgttcatgttcttctcttagtttagtattgatggagccatgaacaacctattgatagtatggatgtgaggagaacatctcacttgatactaattggattcaatatatttcacaagggggactgaatcattgattcattacaaattgttaagtacggtgtctactcgttatgattttgaaatacacaactaaatcgttacaaattaaggctgtgttactaaattctacctttcatgagaaatcaaggaccaaaagtgttttttaacctattttcattaatcaagtcaaagatgtaggacaagtgaatgaatgaatattcagtgagaggtttggcttggtggtccttagtttgatgagtattgttgggatgagattatttcacttgggctattgagggatttgcagattgtgaaattttttgcccccaccgatgtaagaaaagtcgatgcttattcatatgatagtttaaaagaaaacaaaacacgtgagattcctcaaattctcttgctttctcctaatattcacattcatttttcgacatgtttaaacgtgaagagatttacactgatctctctgcagttggacaaatttttagtcggcacaaagcttgtgttaccattttatttatctcctcagatcaatttttcaatttggtaaatatgcatccatatcttggatctacatcatatctgaaatacgaatttgatggtaatcatttctaatgaattaccctatcatttaattccttggtgcgtcgtaggagcttctgttttgttagtaattctatagtctgcgtttcatacaatgttggtgtatggactgcaggtaaaattgcttgcagaaagg

SEQ ID NO: 62464 - DNA, 908 bp, Cucumis sativus
  Intron number 2 from transcript Cucsa.048840.5 (locus Cucs a.048840) derived from phytozome v7.0 (chr-ID scaffold0054 2; pos 3469471 to 3470378)
acttgcttgcctcatctatcactgcaattgctgctgtaagtttccctttaactacagtttttattttttgggattttttatagttttttttatggtaactgctgctgtgcttccagtttgctcagaatttaatagaagcaaacgacgccattatctcttgttaacacaatcgttacatgaaataaggagaaaacaacatcgttagaattttaacttgtagcgttgtaatttgatttactcctgttaaatccctactgactatggtcaaaagaatccattcacggcttttgcagactggattgtgaatagaaggagcctttttgtttttttggaaatatatgtcaacttcttggaaaactgtggcctatttgggaaccatttgtttgatagcagtctctagttgttcctttagcctctgtcatatttgttaatattcagaattaggagagcgatgtgttaaattggcaatcaacctaaaggttatgataaactaaattataccagtactttagcacttcacttctcttaccttctaggagattcccattcaacaattgaaaatccatatttattggagagcaaatagagtttgaacataagaccttttactctcatgtcttattaagttaccaattaacttcaactcttgttatataaaaaaaagaaagaagaaaactaaagttttactgtgtaatttaattatatctatacctcaacatgattaaaaaatcatcttaatgcagtaaagcggttgaggtgattgtatgtaattaatttatttcttcaacaatgtatgatcagttttggtgctgtggatactaatcctaattgaagccgtttgtatgtttgttggaatgacttccaaaattgcagataggttccgtatttgagtacgtgaaccagaagcc

SEQ ID NO: 62465 - DNA, 984 bp, Cucumis sativus
  Intron number 2 from transcript Cucsa.023750.1 (locus Cucs a.023750) derived from phytozome v7.0 (chr-ID scaffold0032 8; pos 188595 to 189578 reverse strand)
aataatatcgaagagtacggaggcgatatcaacaggtaatatgtagtacctctatgctatactgtatgtttgtatctccttcctgtcgctattgattcttacctacctatatttttgtttggccattgggcaacgtttaggactgcttctctccctaaagtatcatgtttaggagttacataaagtgcttttgaaaaaattacagaggtacctcaatgtgccacagtagaaagcacttttggggtgtttttggcctacctacttggctgggaaacacttctattgaaagtagagatgtagaacaaacacaaatttagagataaaaaccacgatgctgatattttttatgatagtaaaggtttaaagggaaaaatatttatagggaacacaagcctaattaaaataataaaaaattagggcaaagtaaatgtcaactactcttaggctttcaacatgacccaggctcattatttctaacaacttcaaaagtactgttaagagtgtagcccaaacatcaaagtgattagttactaagcaccctcttagatattattttaagtttatccttacccacaacataaacttttgggtcaattggtgatttaagatggtatcaagtagtatggttcaagatgttctgtgttaaagcctctgcgttgtttcctccccatttaatattcatcttcacttattgggtttttgtttcatattccgagcccacaagagaaggggagtgttagatattatataaaatttacccttaccctatagcttaagcttttggatcaattggtgatttaaggtaccgtaacttcattttttttaatctcctcctcctgagaggttgtatctttggacatactggtgaccttttacacattaataacaaaattatttcatgttaaaagctaacatttgttttaaaagccctctcaaacacacctttaatttgttatgttctgctggtattctaggatttatcta

SEQ ID NO: 62466 - DNA, 370 bp, Cucumis sativus
  Intron number 1 from transcript Cucsa.114830.1 (locus Cucs a.114830) derived from phytozome v7.0 (chr-ID scaffold0096 8; pos 174754 to 175123 reverse strand)
agttttggaactttgatacagagaagattaaggtaattaatttacgtttgaaattattcattgtttttaatttttaaatattgaaaattattgtggatcgcattttcttcttgccttagtttgattatcatcaaagcttatttcatctgtcacatcaatcattgcactaaatcaattatcaacttgttattggtcaatatctactatggatcattatttaagaactaatttcaaactttacaaacaaattaattaaaaatataaagttccaatcatggatactaatatttgatggtttaaactttaaacaatgttgttgtgattcttgagtatggaactattattgtattatatggtatgataataggaa

SEQ ID NO: 62467 - DNA, 405 bp, Cucumis sativus
  Intron number 1 from transcript Cucsa.050850.3 (locus Cucs a.050850) derived from phytozome v7.0 (chr-ID scaffold0055 7; pos 66671 to 67075 reverse strand)
tctcaagattttacgtttcattggtaatgggtttcttctactgattccctttgtgtattctgttgttttttcatttcttttttttttgtctccttttaatgggttttctttatctggatggtggtattcttcggtaggatcattctgagtaatttatcttgattacccacttgttgatgtttttctttcccctctggttttacgttcgtttgtgtttcgatgatttttacagcttccgacggggttggtgggttattatctaatattttatgctgtgtttgctttattgttacctcgagtatttagtttctgtttatgttgatctatacccttgtttgaggccagatcgcattttgtttcttgtgaggatttcttgagaaggttttttttttttactgtttagag

SEQ ID NO: 62468 - DNA, 769 bp, Cucumis sativus
  Intron number 4 from transcript Cucsa.031720.2 (locus Cucs a.031720) derived from phytozome v7.0 (chr-ID scaffold0042 9; pos 913651 to 914419)
gctgcgaattggtaaagctaattattaccatatgaggccctttcttctttcttacccccctcccattagtttttgcaactaaagatgtttttgtctaagaattgactaacctgagtacttgttattctagtagcagataacgtcttcctgtctgactttttaacttctgttggccaagtttcaactttcaagaacgtccgtacatagaacaaaagaaaggatgtcactttcattctttaatatataaatttgtccatatcccgagcctaatattagaccatgaacagttgttcgttttaagcttggacctgtgcactttctgacatcctttgaattataattgtaagaaactgcttcgtggctgctgaacgcctaaaactgaccaatatcccaaatttttcagtgaataatgtattgcatgggttagtgtttagttcacttatttgtatgcttgatgaaatggttggcaacttggagcaatgacctttatttttattataagatcattgttgatagaattgttgagtaacctggaatttatgaaaccagcatttctgcttctttttttcctcttctttgaattttgttgtcttatctacctttcttttcacctaattttaataattcattaaatttcttgcttgtaaccttttagctttgtgtataatttgttagctctatagtagcatttggcatttgattttcagaatttatatttccttccaatctcgtaggaagattcgttccaggttgttacactcttgcagtc

SEQ ID NO: 62469 - DNA, 418 bp, Cucumis sativus
  Intron number 2 from transcript Cucsa.113550.1 (locus Cucs a.113550) derived from phytozome v7.0 (chr-ID scaffold0095 3; pos 1656029 to 1656446 reverse strand)
gcattgacaccgaacctgttcttagtgctgccaaggtttgtactccttcattggcattgacattaaatcttggttgtcatttcttcatcttgtattaaagaagattattgccgttcttctttccttttcgaacgatgaagttacatgcaccaaaagcttaagtttaccaaatagacacttatgtgcaaaaataataaattttgagtatgctccatttgctaagttcaataaataatgatgtgtcgacatgtttctcttgtgttgtatcacatccatgcttcttagttgttatttctaccgttggtgccaattgaagaatctttctattaagactgttttcatcaaacccaaattcacatatcaagtatttttcttggttgcagacagtagtaggggcagcacaacaaactggtaaggt

SEQ ID NO: 62470 - DNA, 876 bp, Cucumis sativus
  Intron number 1 from transcript Cucsa.065910.2 (locus Cucs a.065910) derived from phytozome v7.0 (chr-ID scaffold0069 6; pos 513888 to 514763)
aagaggtggagtaccaacggcggcattgccatcgggtttgagtttggtcaattgcgtacaagatgaagtgaaaggttttctccatatggttatgggtttcatttggtgaaagcgtttaggttgggttgagaacttgaacttgaacttgaagattggagatcggacggaggaggttgaatcgttattatttggcagcaagcaaaacagagctaaggtaaattcttgagcataaatcaatggacctaattccccatcattagctcaagaattcagaagtttgatggccaatgtactccattactgccattctttggcaaaagtcacaatattcaaatggaacaagttttcttctaaatattttttcaagttctttcgtttgacattactttgaaaaattacttgtgaacatgttgttgatgtattgattgattagattcatttgattgaatcgacttcgtatttgtgttaacttgcgtaaaggtcccaacttaaatgaggttgaatttgataaacctatgttgtgattagatgactagaagacatgtgctatcttttaatttacaatcagtttgtatccaaaagtttgatttaatagcctaaaattttgttgagatggtctttatactaaaagatttacaaacaccacaaagtctgccagtaattaactacattgttcgagttgatttatctccattttcttttaagagaaaggttgctatacacattgagctaacccgtacaatccaaaacaaatgtttgggataatgggcctggccattttacggcccaaggttaattctcacaaaccacgacttctttctccgtcgaacctcctcagcagcccaacatttccggcttctccgttgctttcattca

SEQ ID NO: 62471 - DNA, 1016 bp, Cucumis sativus
  Intron number 1 from transcript Cucsa.027740.1 (locus Cucs a.027740) derived from phytozome v7.0 (chr-ID scaffold0037 8; pos 575537 to 576552)
ctagatctccgggtatacgttagttttaacctttagttacttatgtttatttttcgacgttgttgttgttattattatttttttttaacataagtcaataaataatgtgggtagaagattagacgagtctcatgcaaatgtgtcattgaattaaactcattttgatgtctaatcttatcaactttttactttttattttcaacttgatatttctccctcaacgtattattaaaatgaatgctaacaataatgactaccattatttttgtaagcatgtttgatccatgcaaaacttgaaaatttaaattttatggatatttatgtaagtcacaaaatttgtacaagtttatttaaattgataatttagttgtttctacatccaaaatcaagttatgagtattgctatcagtattcatattcatatttgattaattagatgacctttttcatattcatattctaatgttttacgagcattcataaaagatgttagaggtacttagggatatttaatatcgatgttgaaccattcgactaactggtatatcaaaaaatatttttctcgttgattttgtatgacttatgaaatagaagtttatttgtataattcgtgtccaataaaattttgtataataagtaattaacgattgaatatactttgtcgaaaagtaaaaaatttcaaccaaaatattttgttgcaggttgtttttctctacaattttatcaacttcacaaagtacttatgttttataattcatgaaatgcatttgagagtttttttttaatgatatttagaacaaaaccaattacgtgcgtacaacatcaatcaaaatggtaacattttaaaattttgatgattaaaatcaaactatacttacttaacatgatcttgacattcaaagtaaagttcctattttattttaaataacttaacattatgtttcctacgctttttatatttatatatatgtgtatgtatatatattcaatcttctttctttttccagtgtttctta

SEQ ID NO: 62472 - DNA, 1011 bp, Cucumis sativus
  Intron number 2 from transcript Cucsa.093390.2 (locus Cucs a.093390) derived from phytozome v7.0 (chr-ID scaffold0091 5; pos 22097 to 23107)
taggtttgcagcctgacgaaggagctgaattgaaggtaaggaggttgatcttgtttctttagcgctttggatatagagttaatagagaggaagctgtgttttatttatgatttttttgttaaaagaatgtatgatttaatgaggctggcgttttatgttaaattaattatcatgtgaatatttgttgtttgtgattaaaatatgaagcatacacaaatctaattttgatgtcttcctccatattattgaagaattttcaccttctggtttttaagtttacattttcccattattaatataaccaatgttcttgttgcaaagcttattgccggtatattcgtctccttccaagatgcgtttaagatattcgtttgagaggaaaattgatgattaatcattgacgttgttttctctatgagccaaggaagattcatggtaactggatttgtggaaatttcaaatgaacaaactgttgttaattaattcttttaaagatatatttctgaaataaataatcaagaatctttccatccactcggtgcaacctccctaatgtcttttgtttgtttgtgttgccaccaattgggaatatttcttgtaatccattggttcagcggggatatcatttccctccttttatgtctttcttcgctaatatgtgtttgtttcctgccaaagaatatgtagtcaggatgtgtgtagtgagagaattgttgggcaatagagtttgtgatgcaacaacttgggagttagatacttgagcctagtttgattctttgagcctttgaacttttttagatacatgttataatctttgtggtatgtttttattataatcttgatggcttgtttctgattatcattaaagtaactgcatccagtgcattgcaataatgtaagctaggtgatttaatgccatagtatattactatattacagtgtctaattccttttcacctcattatctcataagcagcaagctccgtcttcccacagtgagcctttggctgt

SEQ ID NO: 62473 - DNA, 409 bp, Cucumis sativus
  Intron number 1 from transcript Cucsa.119350.1 (locus Cucs a.119350) derived from phytozome v7.0 (chr-ID scaffold0099 8; pos 1276394 to 1276802)
tgacaagtctaagaaacgggaagctgatttatctggtaattttctttctctcttgtttgttctttgtgtggctttataatgttgctgggttttgtcacaattagtccccaatttcaattttgagtattttagttttgtttttaccagacgacttccattctcttcatttctcagaaaatcgtgagaacgattaagggtgtttttcttttccactttcctttcattctagatttagctgtccaaacagatcagggaatgtgctgtcgagatcagaactcaattggggtttctttcgccttcctgacattgaatcagagaacccaaacttttttcttaatgagagatttcattcacttctggaattcatcttattatcttacctctccttttattttatgcagaagtcgag

SEQ ID NO: 62474 - DNA, 861 bp, Cucumis sativus
  Intron number 1 from transcript Cucsa.002550.1 (locus Cucs a.002550) derived from phytozome v7.0 (chr-ID scaffold0003 3; pos 34011 to 34871)
agcagtatcagagatttagggaggttagtgattgattctgggtaaccatccctccttctggggtattttttttttttgtgtgctactggtgatttctgtgcttgtttcttaggtaattactataattgaagtttgaaatggtggaactgggcttttactgagctaattttattggtcaaggtgggtgagcttagaatataggttctggaatcattctctttttcttcctgtttggtttctttggtaatcggactaagagaatcttttattcggaaacttttttcctttagtaaaaataatagtttccttttttctggatatgccatttacttttctcgtcactcatatgactgactagtttggtggtctcgtccgaatattcacgagcatatataatattaccagcaagcttaattcctgatgtataaattaacgaacttgtctcctagatgcttgactttgaaaagacatggggtttgtagcttgtgttagaaacgtgtcttttggttgtattcgttttccacttttctcaagttaatttaattcccttcgagtattgttttgagattggaggttttagttgagtctattctatagatgatttatgcattgttttaatttgaatttttccagtctgaagttacattcttaacacatcagttctcttaattattattctgtatgcttaggaaatgacctagtgagaagttgatttatgcattattctgtattcttaacacacaaattctcttaagatgatttatgcattgtaccagaattagtgagaagttctaaattttttgtttggatttcatttctgttgcagcttgctttaagcgttgtttatattgctattggtgt

SEQ ID NO: 62475 - DNA, 1003 bp, Cucumis sativus
  Intron number 1 from transcript Cucsa.058090.1 (locus Cucs a.058090) derived from phytozome v7.0 (chr-ID scaffold0061 4; pos 357423 to 358425 reverse strand)
tttctctctcagaccttcttcttctcttgcttcaggtatcgaaatgttgaatcattcttccccatatctgctgcttttgaaccttgtattcgttattttgatgttaatggtgagaaaatatgaaacgattcttgggtttctgcttgagatcgagctttagggtctgtttggattggctttgtaagtagcacaaatgtggttttgagtgaaagtaaaagtgtttttattcgtttagaaaatcgatctaaatagacaatctgtttttaaaatttggagtttagggtttgattcattttatgaaaacaaatttgttgttgagaacagatgaagttaagggtaatgttgagtaaagactgtagctatttgtaatcaagggatgtgttcattcatgtgcaaagcatctcggaactgaaatatgccggaaagttctcaaaaccaaaatttttatgaatatctaggtttaatgtacatttggaagtgattttgaaatgattaacatcgtattcagagaatcacttttggaggtgatttaaagcgatcttggacatgaaaaaaagtgatctaaacctttaacgatcttttggattgattgaaggaaaaaatattgtgctgattgagagattgtatcacttttaaaccaacaatcttcttctcgaacaacggaccacaagcggtcttttgcattgttgaaaaaaatatttttcaaaaaattcatttttttaggactcttttgataaaagggttatcaaacactctcatttttaaaaaaaatgatttttaaattaaacacttgaaactgcattccaaacgcacttaagtctcatattgaaatggatagagcattggctcaaaaacacttgaaaatcgtaatcttgttgtctaataatgttccattgacttaatttgaagttgtaggaagaataatatttcatttttgttatttttctgagaaagtattactgaaacactttgctttttaatcaatggtttacaacagttggaa

SEQ ID NO: 62476 - DNA, 797 bp, Cucumis sativus
  Intron number 1 from transcript Cucsa.113500.1 (locus Cucs a.113500) derived from phytozome v7.0 (chr-ID scaffold0095 3; pos 1618342 to 1619138 reverse strand)
cggaatcaggtcagtaactctgtaattgacatcttactgcttgattgtgaactcgaagattgatatttaggttttttagggtttaaggggtgcggtttttgcttggaatttgaaatttttttgttttagaattgatgtcattgctaatatgcttgactgcaagtctcagtccgattgaataatgcaatgcagtactctctactagtaaaattcttccctttcttttgaaactcgtagttattggaacaaattttcatataattacgtttgattgtattgaactatgtcgaaattttgtgggcacttgcttgattttcaggttaaggtcaaaatagatatacttttgcatctctacagcatccatttctctttctgctgtcatttacttgttcgaacagcaatgatagaagtctttaaaagatttaagaagtataagcatctttatttacctcaccagaaatatttcagtttcgcaagttcatcctccacaaaatttgaatgaacatccatctaaggtcttgtttgatatccattttatttttagttttctgtttgttatacttgttcatcacaagtttgtttggtcagatttcatgttctttaaaaacacacatttgaattcttttttagtttttaaaccatctaaaagatgtatagcgcagtagaaatcttctgtttataagcatgatttgctaaacatagttcaatttgggtgtagaaatacacatagtttaaaaagcttctaacttttcctgatttcaggaccagtctgcttctggaagtgctagaattgggga

SEQ ID NO: 62477 - DNA, 249 bp, Cucumis sativus
  Intron number 4 from transcript Cucsa.029540.1 (locus Cucs a.029540) derived from phytozome v7.0 (chr-ID scaffold0039 7; pos 169652 to 169900 reverse strand)
aaggtccaacgaaaagctcaaaattcaagaaagctgtaagttaccaaaaattataaaaacaaaaaaagaagaagaaagtattaaaaagttgataaaattaattagcgaataagtaatttagtatgacaacgtattagtttaaaaacagtcgttttctcctcaatcaaaatatatttgattaatccgaggttgctgttttgtttgtctttgttaggttaatcaaggtcttctcttccaaccagccagtga

SEQ ID NO: 62478 - DNA, 1008 bp, Cucumis sativus
  Intron number 1 from transcript Cucsa.100270.1 (locus Cucs a.100270) derived from phytozome v7.0 (chr-ID scaffold0092 6; pos 813932 to 814939 reverse strand)
tgccttacaatatctccatcttgcagatcagtaaggtaactgtcgatttcaacctttttcattacgccaaatcctaattcctattatcttgttcaaatttttaacaatcttaatcttgatatcagtggtaatagtatgaatatgtgaatgagatttatttatttccgataatatcacttcttatttaacaattaaattgacaattacaccatgttaatcaccgacttgtttagtatagctataataccaaattagaaagttaccaattgacaaaaattcctggatccacaatttcaaccactattaaatgattaacaaagttaaatatacaatatacaataactaatattattataaaaaaaaatatactattcaaatagaaaaaaacattttgtaacaatttgtgattgaacacttgcataggatccaccgtgaatgataatgtaatctttagaatattctaaacgaagttgattttcaactaaatgttaacactgttttagttgctaaaacgagttgagttcaactgacattgtattaatattataattttagaataaaaagtttggtcaattggattccttcgattctcatattaacaaaaaagaactttattatgttagtaacactgtaaagattcaaaacttcaactgttggataagaatataaagttaacttacattataatcattaatatacagatctaactatgtttgagtttcataattttaatattttgttaaagtttagttagtttttcaattcttagaagtgagtatttgataattatgtcttttatctattaaacttagtctcttagcggtctattttgtgaccgacaaaatggaaactcaaaaagttcatttaatttgttatggatctgattatttatttattaatttttctatcagaagacgacaattctgttagttaaccgtaacagttattttaacaaattgggattttacgttaggttataacatccgccgacgccgaggctccaacggc

SEQ ID NO: 62479 - DNA, 841 bp, Cucumis sativus
  Intron number 1 from transcript Cucsa.118340.1 (locus Cucs a.118340) derived from phytozome v7.0 (chr-ID scaffold0099 8; pos 142140 to 142980 reverse strand)
tgatatctataagcataatccttgggatcttcctagtatgattcaattactctcttgtacctatatgtttcacttccataaattcattttatcttttcgttgaaacgtatttaattttgcatacttttatataggtttagtttaatgattttaagtaaaaagtactttcataatttcatatatagatattcttttaagtaataatatattttgggtttaatatcaagagctaaaattttcaattttttgatttcttttcttaaaaagatgtaattttgcgttcatttatttaaagatggaattagtttaaagatttgaaatgactaaccttagcttatatagtttcaaaggaaaaaaacactgaagttttgatcttcgatttaatctgaacaagagatataaaacattcacatgaccttggtgttggattctcccaaaaaaaatcagtataatttactataattaatccaaaaaaacaacaacaacaacaacaattttgtagtttaacaaaggagatataagaaatacaattaccaaagcaatttagatctattctaaaggtttattagatctgtgtccaatgtttccatagattgcttgcttcttaaatggtattcggagacattaagataaacattattgatgaacagttatataatattttaatacgttaaacccctatgtacacatctttcaatatatattatttaattttcctttgttttgtcatctttctctgcattcattgaactctaaatatatacatacataaatgaaattaaatatacctgtttaattttaattaatgaaaactaataattgtgtaataatgtgactgcag

SEQ ID NO: 62480 - DNA, 1016 bp, Cucumis sativus
  Intron number 1 from transcript Cucsa.102330.1 (locus Cucs a.102330) derived from phytozome v7.0 (chr-ID scaffold0092 7; pos 1359521 to 1360536 reverse strand)
acacctccaactcatttctcactctcttctacccggtaatcttcccctcttcatcatccctttgagctcactcttcttcttcttcttcttcttcttcttcttcttcttcttcttcttctattactgcaactatctattctttttctctgtttcttcacatccacctactttgcttctgttgttttcaaaaaactgaaaaacatggttcttccaatttcttactgttttttcttggaacgtttttatccatttttacttaaactgttgttttacttctgaatgcttctctgtggagtttaatcgtttcgtgaacgtatttgtcatctgaaattattccgagcttaaaccatgggttggctgattagtttgcttggtggttttagcttgggttgtttatttattacggctttctgttttttctagtgttgattgattttttttaatgggttattcatttattaaagggtgtgttaatctgatttgaagtttaatctatcctgttcatgcttcaaattagaaccgactccatgatactcggaatctaatcatcaagtgtttagttgttttttttgttgcatttgggcattaatttaaatttagtttttatttaacttgaagaagaaaaatcaaggtgatcaggttgatatcagtcactattgctgcggttggatattgttaaccttcatgttcggaagcggtaatctcggatatacacagacatttttcttctaaatgttttgttatgctattctctatgtatgcaaccagttggtctgcatgacatcgtctaactggtgagaatggcgggaggaacattttatgaaaatagtagggagtccagaaactatttgactgtgactgtagcttttcaatttttagtgtctgattttcgttgttaacaaactttcctgcacttcttgtgtatgttggattgagaaaaaaattcggaatgactggagtatacccttttggtttattcaggggactgcttcatccagactttgccaaggcaatca

SEQ ID NO: 62481 - DNA, 470 bp, Cucumis sativus
  Intron number 1 from transcript Cucsa.083370.1 (locus Cucs a.083370) derived from phytozome v7.0 (chr-ID scaffold0085 8; pos 243421 to 243890)
attcaccagcattttcaggtccccttttcgaaaatgtagatgcccttttccctttccccttttcccttttcccttttccatatcttgctttgaagttctatatctttttttctgctccagtttgttttccctagtgccttattgtattgggtttaattgtcttctgctgttgaatttggttgataatgtgtaatggtttcgaattttcttccacactttttgagttttgcattttagagttcattttattgtttctgggaaatattgatttctagaatttaagtttttgttcgttatcgatttaacatttcccttggattgcccttttttttttactagtcgtctcaatttgtgtttgtttgatagggacacatttaatcgaacagtttgaaaattctagacctgttatgtatcttaatttcttttcattttcagctgcattgtgtaagggtgggagattcagtgttgga

SEQ ID NO: 62482 - DNA, 429 bp, Cucumis sativus
  Intron number 1 from transcript Cucsa.134860.1 (locus Cucs a.134860) derived from phytozome v7.0 (chr-ID scaffold0104 3; pos 402346 to 402774 reverse strand)
ttctcataaccggcgcttcctccggcatcggcgaggtaactaacaaccttcttcctttggtgaagtgttaatataagaactaacctattgatacgttgatgtaaggttttgagtttagtactgatttcaaatagacaataatcaaaacagcattccaactaaacttaaatgattttgccatttgactattttttattggaggaagtattttttgagaatgttaataactaaaatatttactattatgaaccaacaatgatgagtaataataacaacaacaataataataaaaaccttggtgaactgctctagttgactgttgccttgaaagttaacacaaaatcaaaggtttgtaaggatgagatttgtgtttgtaattttgtattaaatgcagcatttagcatatcagtacgcacagagaggagctcg

SEQ ID NO: 62483 - DNA, 1008 bp, Cucumis sativus
  Intron number 2 from transcript Cucsa.093390.1 (locus Cucs a.093390) derived from phytozome v7.0 (chr-ID scaffold0091 5; pos 22097 to 23104)
taggtttgcagcctgacgaaggagctgaattgaaggtaaggaggttgatcttgtttctttagcgctttggatatagagttaatagagaggaagctgtgttttatttatgatttttttgttaaaagaatgtatgatttaatgaggctggcgttttatgttaaattaattatcatgtgaatatttgttgtttgtgattaaaatatgaagcatacacaaatctaattttgatgtcttcctccatattattgaagaattttcaccttctggtttttaagtttacattttcccattattaatataaccaatgttcttgttgcaaagcttattgccggtatattcgtctccttccaagatgcgtttaagatattcgtttgagaggaaaattgatgattaatcattgacgttgttttctctatgagccaaggaagattcatggtaactggatttgtggaaatttcaaatgaacaaactgttgttaattaattcttttaaagatatatttctgaaataaataatcaagaatctttccatccactcggtgcaacctccctaatgtcttttgtttgtttgtgttgccaccaattgggaatatttcttgtaatccattggttcagcggggatatcatttccctccttttatgtctttcttcgctaatatgtgtttgtttcctgccaaagaatatgtagtcaggatgtgtgtagtgagagaattgttgggcaatagagtttgtgatgcaacaacttgggagttagatacttgagcctagtttgattctttgagcctttgaacttttttagatacatgttataatctttgtggtatgtttttattataatcttgatggcttgtttctgattatcattaaagtaactgcatccagtgcattgcaataatgtaagctaggtgatttaatgccatagtatattactatattacagtgtctaattccttttcacctcattatctcataagcagcaagctccgtcttcccacagtgagcctttggc

SEQ ID NO: 62484 - DNA, 664 bp, Cucumis sativus
  Intron number 1 from transcript Cucsa.135600.5 (locus Cucs a.135600) derived from phytozome v7.0 (chr-ID scaffold0104 4; pos 427854 to 428517 reverse strand)
tcgcgataccactctcctttctccttaacatatcggtaaaatcgattttttttcttggtaatttatttggtttgtgctctctctgtacccatttttattctttttatttgatattctctaccgtttcccatctttctcaatttgtttgattcgaaattttgttacttttgcatttcccctgttttcttaactgtgaactataattgatttggtggttcgatgttcagtgagtttgtgtcactatttaaataattttactagcttaacttcttgtattttttttctctgttcaagaagcaaaatttaggaatgggcttaaagtgtcaaaaaacgtgaaatcaaatttgggttatgttctaagatacaacgttatgagcccaacatttctatccagcttattttggttctgtttgcatgtatggcataccgaagaatatggtctttttattctgtcaacaagaagtgaaatacacactacccttgatttctgataagtggtaagattgagacatttgatcctaagatcaaagtttttgattatgaaatcgagatatttcttttggtgtttgaaatatggcagtgctgatttggtcttggttttttttttttttacgtcttgaaaatttgaattttctatccagattggcaattttggaattaaaca

SEQ ID NO: 62485 - DNA, 1003 bp, Cucumis sativus
  Intron number 1 from transcript Cucsa.086330.4 (locus Cucs a.086330) derived from phytozome v7.0 (chr-ID scaffold0087 0; pos 500576 to 501578 reverse strand)
aggttaaggtaataagtcaggtttgaaagtgattttgaaagggttaaaatgactcgatactcgatagtttgtttttaatagtccaaaattaattaaaattgtatgaaaatcatatttaaaactgtaaaatcataccaaaaaaaaaaagaagaagattttgaatgttgaaaggtatgtttgaaagtgattttgaaatttaatcatttcaagctcacttcctaacacgcccaagtgtccaaaatcaaaatagatatgtcattactcctgtctaggaacttatctgcttttcagactccatgatttcaactttcttgttaagtgatacaaacaagttattgtgtgttaagatcgttggtttaacaactaatatagctgctcatttccgttgtttaggttctacaattcaaatgataataaggtgaaaaccatagagtttagaacaatgaatacaatggagaaaggacgagtgaaaaagagagaaacctagtaatttgttgcaagagaaggtgttaaacagagtattaggccataccagtaacttcttttttgatgaaaattgatgcctctttttcttccttttcattcataaccttagatagttaaaggaaaaagaaaaaaagaggcttaggtgctggctttgctaaaatggtttcctcgctcgtgcgctttttgaaacactggtagggcatatggttattagtttccagttcctagattctgattatgaaataggagcttctcagcataagcttttgagaaatagacgatgacaagtaagcagttgagcttgccaatcatactcatttcagtgaactactttgaatagcatttgataatcatcaaagtctttcaaaaaaggagaagcatgctgtaaaaactagtaatggtatgttattgataagttatgtctctgactgctaaccgagagagtatttcaacatatttctttgtgatatcgattttcccatgttaggaagtggctgctaaactggagataaaggca

SEQ ID NO: 62486 - DNA, 673 bp, Cucumis sativus
  Intron number 1 from transcript Cucsa.068470.2 (locus Cucs a.068470) derived from phytozome v7.0 (chr-ID scaffold0070 7; pos 345201 to 345873 reverse strand)
gaatcaaatcctttgctattgaatctcattgcaaggtatcaatttcgatttctgctttcaatttctccattttttcttcgattttttggtttagggtttgcatcgaaatgcctcgatgtttgaaaccctagggtttgatctttgcttctatgtctctctgttgggagaactttctggggaacgggaagagaggttgcacttgactcaggctttgtctcttcacgctttgaattgggttattaggttttatgttctgggattttgtaatatcaagttttcctccctttctcatgggggtgaaaaaaacttgctgccactgtcaagaactgaaaatgtcatgtggttgtcttcttttggatgtgagattgatttttgttttggtagattctaaaatttggtgggaatgttgtattgacaatgaacactggtttctgagggtcgtactattatgttataaattgcatttcgtggcaacttctttacttttctgaaatcttctactctcttcttcttggtaatgatatgtttggtttgattagatgatgtatagtattgcgcttttgtatcaagttttcaggatttgataatttctttttaagtggactttttcattgaccgtttgttgtatgtggtttcaggtcactttgttggctattttaattttatttgaaat

SEQ ID NO: 62487 - DNA, 183 bp, Cucumis sativus
  Intron number 1 from transcript Cucsa.058740.1 (locus Cucs a.058740) derived from phytozome v7.0 (chr-ID scaffold0061 4; pos 858991 to 859173 reverse strand)
ttcatatgttcgtatgttctctgttattagttttttctctctttattatggaagaggcactaggtccaaacttttgactcttttagttttaggaatgtgctcttttggaatcatttagctaatttgattgtttaaaagtaaaacggaaattgatttgacatttgttcaattatgtagatatat

SEQ ID NO: 62488 - DNA, 403 bp, Cucumis sativus
  Intron number 1 from transcript Cucsa.108170.3 (locus Cucs a.108170) derived from phytozome v7.0 (chr-ID scaffold0093 1; pos 370246 to 370648)
aacgacttctgggggctgtgcgccttctgtcacaggtgatctttctcttggatttgtcttctttgtatcaccaattgggagatgttatacaaagggtcattctttttctatttgtttatgcttatgatttaaaaagatcaagatatattcctaatcaaaaattatatattatgatacattattactgagttaaaactgttatgcttaatgtaagctgttcaattttcactcgtataaatatttttctgctagttggcctttatttttgcctgagaggtcaatcaagggttctttttgttattgaccacgaggggcaatgactacagtttggaaaattggaaaattatgttcactttatatctttgtacattattgagaggatgttttttcaattcttttgcag

SEQ ID NO: 62489 - DNA, 556 bp, Cucumis sativus
  Intron number 1 from transcript Cucsa.092100.1 (locus Cucs a.092100) derived from phytozome v7.0 (chr-ID scaffold0090 5; pos 26190 to 26745)
attccttcggcctgccgagggatttgagttttcaggtctgttttctttctgtgtttctccttttttcctcaatttctggatccccttttcttttctttgttttgttttgttttttatttcatgtctgatttcttaccctttttatctgatttctttgtccatgtctttcttgggttgttttcattttgggttttttcataccatgaatgagattagtgtttctactaataatgtatgttcttcatcgcaatgtattcaactcttttttgtttgagttctaatgtttttttggatttgcgcatctgtttttgcttttaccttttctccataaactttatctgctcttttgaaaggaggtgttttttttttctactgtatgaattctttggtaacatagaccatttatggatgagatttgtttttccttgtatcagctttaggattttttgtttgtagtttagatccttgtgtatttctgcagtttactttgttctggggttgtttgctgcggattttgttcatagtttattgagttgatgaaaatttattaggggaa

SEQ ID NO: 62490 - DNA, 557 bp, Cucumis sativus
  Intron number 1 from transcript Cucsa.055620.1 (locus Cucs a.055620) derived from phytozome v7.0 (chr-ID scaffold0059 9; pos 305 to 861)
tacctgaggaatttgtcagagaatatcgtgctagggtaactcatctattttgaatttcattgtgatatgtgtttaatttttgtgttttgtttatctatcacatcacatgtaatatccttttgagtttgcctttgggatatcaaagggtagatattttgatgaagtttgcatttttctttgacccttttatacattcagttatatgatataaatctccagcacttattcttcttacgtgcaaattattgtttttatttttttgaatcgtagcatatgtgtttggttctgaaggtatcaggttgggcagacaactcctcttaatcacgtttttagtttattctaattggattcgctaggagaatgtgacatgacatgttaaatcttgtgtctgtatttttagttttaaggtgtttgataggcgttttgttagaatgacatttgaaaatatcttctggtggaatttaacttcaggcctatagttcctagctggcgacgcatttatgactcttttttacttccatacaatcctggttatgtaggaactggaccttgtcaaa

SEQ ID NO: 62491 - DNA, 813 bp, Cucumis sativus
  Intron number 1 from transcript Cucsa.076390.2 (locus Cucs a.076390) derived from phytozome v7.0 (chr-ID scaffold0078 9; pos 758857 to 759669 reverse strand)
acagaacatcttgatagtttacatagttttgtgatgacaatgttccttcttttcctcctttttttttcttttaataaaagattgaacagcctccgagttttctttcatatggcattgataatgtttcattagacatcttgacttacattttctgggctgttatttttttgtttcattaaattttttttaaaatagaatataaaaagtctccacatagaatgcaaaagagacatgtattctcatccacagggtgttcttcaacaattcttttttttgttaccatttaccaacgaacagccatggttcgacatcaaacattactcaaatgatttcttgaaaccaggtgaagaatggtagctcaatacgttgtgaattgatttcaaagcactgaatgaattaacagtcaattcacttactttttgttattagtgaatcttactagttactgatgtgcgtacatcacttttttctgctgctcgatataaatagtcttgttactttttttggcaatgatcatgatcaggaggccccctttcatatttaaattagatatccattggcttggcttttacttaatgattttaatttccctatgttttggtttttttttttggggggggggatgtttaacataataacatgtaagaaattttcaaagaccttgtggactcactttcttcagttaaactgtgaggaagaatattcattttaactgaacattaaactttcaaatgaaccctaacttcgattggacattcagttcattgttgtctgatgaatgattgtatttggcaggctcgaattaaaaagata

SEQ ID NO: 62492 - DNA, 725 bp, Cucumis sativus
  Intron number 1 from transcript Cucsa.100050.1 (locus Cucs a.100050) derived from phytozome v7.0 (chr-ID scaffold0092 6; pos 663712 to 664436)
ttgcttctctttacttatttttgaacaactacaaggttttctttcaactgggtttttgttagtttttcatttttatttttttacatattctacatgttctagattgcttaatctcatcttctccttgggtttttagagtattcgacatccattgtttccggccgattgtttcatcggaattattttctgtcgctgcctcctagtacgatatgattctacttgattgagtttgctgcttatgtatcagttttattttatcttgttattgtttttctttgaaaatcgtactgtttgtgttttagtaaacttctattctctgttatgttggtctgatttgattaggggaggtagtttagtgtttaatgttcttggttttctaatccttgttttctctacatggggtaatccgagtcgattttatggtttttttttggttgtttcctagtgtttttttggagttgtcaacgatgatctggaggggatgatgagagctttaactttgatttttttttttttgtttgtttgtttgtttgttgtttgattgatgctgagtagacctcttattggggattttgaatttttctcatgtttggatgtttgaatctgagagtttcttttctgtttttcttctttcttctttagggatgttttgatttgtatgtattaattcgttttgttgttgtttttttttttttttgtgcagattgagattggagggtaatagt

SEQ ID NO: 62493 - DNA, 702 bp, Cucumis sativus
  Intron number 2 from transcript Cucsa.127540.2 (locus Cucs a.127540) derived from phytozome v7.0 (chr-ID scaffold0101 9; pos 121842 to 122543 reverse strand)
ttgattctggaggaggtgatccgttgaatccgcaggtttgtgaaattatagttgtagaagaatcttggaaccgtgcttcaacaatgatatgaaaatcagttctaaactattatctgctttcttttaactgttggaaaaacatctgcaagttaacgaactcctattcatctttgaagtttgcatcgtaatgtaggatttagaggtggaagtctagtaggaactggctattgcccttcaaatatcatttgatctcaacctcaatcttccttttggtgtatctccttatctctctgttccttctttcctagttctaaaggcctgttggtaatgattgaatctggaagtgttcttgattatatgatcatttacccaagatttcatgaaaatttccaactcccattttttacttgggcttctaaatagtttcaaaatcagaaattttggttttaactttttttttttttttgtcatgaactattgaaccatatgcaaacagttagaactagttaggttgtttaagcattgagacaataatataataatagctagcagacacttatccattctgaattagatggtgtgtttcatccaatatattttactttccattttattctcattcataatagaagagatatgattccatctctactacaaacaatggcaggtttgggcagctggattttctgcagccattctcaa

SEQ ID NO: 62494 - DNA, 874 bp, Cucumis sativus
  Intron number 1 from transcript Cucsa.124720.1 (locus Cucs a.124720) derived from phytozome v7.0 (chr-ID scaffold0100 1; pos 556285 to 557158 reverse strand)
ttttcctttactctttattgctgctcttcctggaggtactcactcacttctctcgctattcaacttttttatgttcaatttgagtgattggttactttttgcaagggtttgttctgaaacttgtatcgctgatcacactaagtataaatcatgcgcgtgaaaagtgaatttgaacttatttatgaattatgtgttcttcaagttacattatggttgtatttatgaattgaggtacgttgatatgcagtttagacttaatcttgtttacattgtttgaatcttgtgtctgtgcacttccataaggaaggaagcattgtgttcagttttcgagtacaattaattttgaaccgattctgctcttttcacaaaaccttttatcttcatttgttggccccttcgtttctcaaaactagatttttcagctggcggtttcaaagtaaagaaggcaagattgaaatccatttggtggactagcttcggtctgattcagacgttgatggaaccaaatataagagcatgtgaaaatataaaagaaacatttggagtcgttggatttagattactcgtagccaaagcatcttgtagttagccctttttttggttttcgctcattgaagaatgaggagttatctataggaaatctacatctccctttgcatctcttcacagaacgattcgtcttccttttgtatatatgtagtaaaatgtttattatcttagacaatgcacataaatcataaatagatgaaaattttattttcatttcttttcttttaattgaggtgagatgcaatctttgtttactcgtcatgaatttcaattgaatacctaaatgacagcgggaactgtgaggtcactctttggtcctttcgtt

SEQ ID NO: 62495 - DNA, 1005 bp, Cucumis sativus
  Intron number 3 from transcript Cucsa.067230.1 (locus Cucs a.067230) derived from phytozome v7.0 (chr-ID scaffold0069 6; pos 1624671 to 1625675 reverse strand)
ttgaaggcaaatcgcttatttcactggtccaacaggtaacaattcgcttatgttttatttcatttgtaacccattcatatatatatatatataaccgttggaaatcggtagaaaatttaaatatgcaaattgtttatgttttccaggaaatgctcctgaaatgaaaaaaaaaatgtggctaagctatagcttaattaatcaaatatcaattatcataatgttttttatgctttggtttcccaccatctatagttattgattttttttaatagatatggtcattctaagctaattattgattcaataaacacaactttattattaattcaatttcaaccatttggactacacctatttttacaaaagaaaaaaaaattgaaatatacgtacatgtatttctgcataacgaaatttttttgaggtacaataatgtaatttttatttatatatgacgaggaagtttttaggtacaacaatgtaatttttatttatattatttgttttcttatccatttctcatccacaagtacacaatagctataatgacgaatgcatgtatggcttttgctactcaagggaaaagccaaccgtacaaaaacagtttccatttgtttttattttttaaaaaaatgaaaaagataatgaacttctataattttgaaaaccctaaaatgatagtgacatacataagggaggcccgtgaaggagaatatttagattggtaaggttattaattaagtttgataacgatatatacttttttttttttctgtttcttgggttctaagaactagaaacaagtaatatgttttatatcaaatcagttttcaaaattcagtctaaattttaaaaaaatttctcatattttagaaataagaaatgagatgtattatcaaaataagtatgttcttccaataaaaataggaaatgatcgaatgtacttcaaattaatgaatgaaatttaaatgtgtattgtatatgtatatgtagttggggggcttttga

SEQ ID NO: 62496 - DNA, 838 bp, Cucumis sativus
  Intron number 1 from transcript Cucsa.005150.1 (locus Cucs a.005150) derived from phytozome v7.0 (chr-ID scaffold0005 5; pos 257030 to 257867 reverse strand)
aataaggtatttctttgagttgctgtcttttgattagtgcttggctttacgtcttgaaggtgtttgttaaaatgtttaagtgaaactataatgcaattttaattagaaatattagagagtaaataaataattccagtaaatgccgaccatagattttagagggttttagtttgtggatttcgttgtgttggggatatgaattcagcttggaatatggatctttttgctaagttgtcaatatggccattaaaacgattgaatttcatgaacttgagcaagggaagtgacgctcgttttggaagtctctcgttgccgaatatgatgatgctttggatgttctatgaaaaattactcgttagctaggaaattctctatgaggagaagatgatgaaattatagaggtcgattatactgaatttcatgaataacactgttgtcggagttagatgacatgtcaggtgaagaagtagagtttttgataccttggtcgaagatatacatattaactacttgagttatgttgagttaatcttcttgaaaaagatgagatagcactgtttctaagttatcctagaatgtgaaaaatgggaatagactattctacaactttttggtttgtgtgatattaattgttacaggaggttcaaaacttggtacattttaatgttcctctcaactgcactccaatttactccaaaccttcattgcctatctcttgtagtccttcatttacttgataattttaagcaagaaagtttttgaaaaccgtttatttttactaattttcaccttcactataataggcacgtaagaaagagaaaaggctcgttgaagcact

SEQ ID NO: 62497 - DNA, 724 bp, Cucumis sativus
  Intron number 1 from transcript Cucsa.036160.1 (locus Cucs a.036160) derived from phytozome v7.0 (chr-ID scaffold0046 4; pos 172151 to 172874)
attctggtaacaaaccatttctttcctttatttggttttatatttgcatttatgggttctatctggggtgtctactgccaaattttgagtttttggcttgaaactttgtttccatgccttatagtgctcaatttgcaccagtatcgcggactgtttttgatgagttcatttacactttcatcactttgtttctccatcgccttttctctctggcacattaaagtggtttgatttactgatatcttaaaatgggtgtcaactatttatcccctcagcttctggttcctcactaaaagctgcaaagttttttattctttagcccgttaatctgaagaagtgggtgtttcgtaaaagaattttcattgatgcattaagcatttgcagccaagattacagatcccaaagtgtatttccactgattccactatgatcacgtttttctgttgtggctaccactaaatctcgatacccatctgcttgtgcctttgaagaagattagtgtggctgctggaactagtctaatgcactattagatctgaatcttgatgctgcaaaaaatttgtcctttggttgtcttttcatatttatctatggcaaagttttgcggaactagttcttcaattcaaacaatcatgttttttttgtagtctgtgaaaggaagacttattgttattaagcagatattcactttttgtcattgcagctaccgaaacacggtatttaa

SEQ ID NO: 62498 - DNA, 685 bp, Cucumis sativus
  Intron number 1 from transcript Cucsa.130340.1 (locus Cucs a.130340) derived from phytozome v7.0 (chr-ID scaffold0102 9; pos 279862 to 280546 reverse strand)
agcagctgggaactgcataattcaggtagatttcaaatttccatttcaatggagttttttgttcttttttttaaaattcaaatagttagttatttgagtttgcttatctgggtttcttgtaatactagtgaattttgcttcaattatttttattatgtgaatggatgcagaaaatatcaatatacgtgattctcttaaaggaaatggttgccccaaattgagttttggatatttacttttttgtgggtttccatgtttcagttcttgagtatgatttcaaatttgaaagaaaaagttcactgttaaaaattcttgggtgtttttgttaatgcccaactgcattattgcttttaatgtgagttgtgaatgaatcattagaagcaaatgttcaaaagatgaatagatttagttaactgctggtagtaatttttgttcttctgacatggttaggatgtaagaaaaattggaaacaggcagaacagcttgaaaggattggattttgaaattatgatacaatcatttcaaatacaatgctttacagattagaaaaaagaagatttttttcatagttttaaatgtatgcaatatgctaaattggtaatagtcagtgtggttcaatggaatttgaaatgtttgccatgaaggagtcaaggactcagcttattgaccatcccaaggcttgtaa

SEQ ID NO: 62499 - DNA, 730 bp, Cucumis sativus
  Intron number 1 from transcript Cucsa.048560.1 (locus Cucs a.048560) derived from phytozome v7.0 (chr-ID scaffold0054 2; pos 3235428 to 3236157)
attctctcccaacgcgctgacttccatacccacaggtctttttttcattctgggattaaaccaatatgcacgattcctctatttaacgctttcctattccttttcatgtatttctttgctttacaccattttctttgaatcttttctcttttcttcgtccaggttctctttctctgctttctttcttatctgggtgtctttctgtttttgtaattattgtctatgcatgcttctttagcagattctagggtgttcatgttattttcctgccatgccatggatctcatcgtttcaattgttgtcttttgttttatatcatttccaattccaatattgggaatgatctcttctttttctgggtctcgtctcttggaaattcgggtgttttcttttgtataacaaccgcgtatctgtcgttttcacgtctgaaaatgatgcatttatctctgtttggtttttgctttcagacatgggtcctgaattgcaatgttttttctctctctttcatctagcaacttataatttaaaattagccgggtcttctacgttcattttgcttttaaaagaaaaagaaaattctttccaagtgatagacttccaggcttctttaaaacaaggaagtttgaattattctcgtcttgacctcttgtgcattggaattttatggttgattattctttcggcttttgttacagaccatcatagcaaaataataccaaagggcaatatt

SEQ ID NO: 62500 - DNA, 792 bp, Cucumis sativus
  Intron number 1 from transcript Cucsa.011060.2 (locus Cucs a.011060) derived from phytozome v7.0 (chr-ID scaffold0015 4; pos 380236 to 381027 reverse strand)
gggtattgctctgttctcttcttgttttgttactttcctcgtcaggtcaatttttggatttgtattaactgaattgcataaacatcttgctgtttcttcaatttcggcatagttcttttggaactcgaaacttaactgtgattgtgtctgatagaaagtttataagtgctgaattcaatcagttttaatagcgttcttacgtgatcaaccaaagggttgatgcttcgaattcagctcttgaattgaattggtttgggaaatcttatctgattcatagactgatgattcatggattgaataggggttttgtttgagcggatgtctatgactctgtcatcagtatttttcatagaatattaagagctgatggcttcttagtggcatcaagcttaccatttctagattactcgacagttaatctcatttctggtgcataatcaattaatcttcactgtaggtgagaatatacagcagtatcttacactgcagctgtttcacagaaaaagaaaagacaatgacatgttgtttacttatagaactctaggaataatagttctttccagggtccaggctttcccttctcatcagaaatcataggttggttttcaacttttgattttggacattctgcaaaatgatacatattatgcctgaattggtttgcaagatttgtgatcattcccctatcataatcaatgcttacggtgcttttagttctcgtctatgaaacggttggttactttagaaaaaaagctatagaatcctaaaataagtgtgggaatatgtgcaggt

SEQ ID NO: 62501 - DNA, 419 bp, Cucumis sativus
  Intron number 2 from transcript Cucsa.027330.1 (locus Cucs a.027330) derived from phytozome v7.0 (chr-ID scaffold0037 8; pos 36240 to 36658 reverse strand)
agtttgctggaattgttgtttggattcttcatcaggtttccattttcctttctttttcattcttaaccatatttaatgtcatagtcttatcaatgaaattaattatattatattgcttctttttaattattatatttatcttttgagtttgattcttcatgttaacattttgtttggaattacaccattttccatcttcctcttaattctcttttgagtcaaatagacagcatataacaaaacaaagaaaattataggttggagttgtgtttatgaatttttagtataaaaaagcgaaaagaaaaaataaaatggatgtcaaatggggcgtgtatgtttttcaaccaccatatacgtataagagatgttacactggtgatttattttgcagtcggaacctccatccccgagaagtccga

SEQ ID NO: 62502 - DNA, 547 bp, Cucumis sativus
  Intron number 1 from transcript Cucsa.099130.4 (locus Cucs a.099130) derived from phytozome v7.0 (chr-ID scaffold0092 6; pos 16270 to 16816 reverse strand)
ggttcacttcaatcgtcttcccactcggtatctttaacctactctttgcttccgtactctcccctacattccttccttctttcttctttgactcctttctcgcgtttttcttgatcgaggttttcgtttttcttttatccatcctttgcaagcttgttagccggttgttgatttctggattacgttttcgttttgcttttttttttcgtaatcaatgttgttgtttttttttgcatgtattgttcgaatttgtgttttatcggattagtattggatcaggttttcagttttggagtagagaataaaggattgtgtgtagattttgatcattttacattctttcttatgttatcttcaattaagagattcggtatgagtttgctttgaaagttctttttactttattgtctcttctaccaatggtaattatggtcatcttgaacacttcctgagtttggtagatgactttaaccgcttagtctttgtgtatactgtcttctttctatcttccttgttcggttgatgaatagtcgatcaattagatcca

SEQ ID NO: 62503 - DNA, 798 bp, Cucumis sativus
  Intron number 4 from transcript Cucsa.054510.1 (locus Cucs a.054510) derived from phytozome v7.0 (chr-ID scaffold0058 5; pos 52638 to 53435 reverse strand)
aaggtaacatcttcttagcctatgcagactttatggcttggaaaaagaaaagaatgtttctttttcttttgtttcaatttatctgttttgtttcaatttatctgttttgtttcaatatgactcgtggtcgtaatttatctgctttggttattccattagcaaccgttagttttggtgagagtagagagtggataaaggtgatgatgtgatatgatgttttctttcaagtgacatagatgggctggaagaagataaagttatgttcaaagtccaatggtaacgtaagattattagtttgtttgacagcaaaagtgtgtctgtgattaattgagatggcatgtttcaagattattaagtgttggaccatatggttgagattagttgttagattggcatgagatacgactatgtcggtatgaagactggccaataaaagaagaaataccacatctgacacatctgtggaagataagacacccccaactcgataattgggctagaaaagagtacgaacctgaatggttacatcaagcctacctaactaaccgattcttgatcttatcgcttttttgttggtctttcgaacgaattcaaaatcaaacttttcaattgatttccaactcatgatgtatgtggatatctgttctgctctggtctttgggataggttcaaatgctactgacaaatgacaatcttatgtgcaattaggataagctcgaaactgtttgtatatttagaataataactgatctctgtgtgattgctgatttattatgactgacatggaaactgcagaat

SEQ ID NO: 62504 - DNA, 907 bp, Cucumis sativus
  Intron number 1 from transcript Cucsa.059780.2 (locus Cucs a.059780) derived from phytozome v7.0 (chr-ID scaffold0062 1; pos 364757 to 365663 reverse strand)
ttcccaaaacccgtttcaagatcagggttagtttccttttcctttttttttctttttttctttttttttatccctaataccccttttgtttaacttctttgaatctgcaccccaattgtaagatcattgttttgatgggttgttgcttaactgcatcattcaaatttgcttttgatctggatttcttttgccatggtcggaagctttgatcggctggaacagggtagttttgtttagattagtgtcatccttattggttctttcaagctatggtcaacctggtgacctttttggttcttacttttgcatgctaagcttttcttttcttcaaatgttttttctaaactttaactggcgatggcagattattaggacttgtgtttttggtttgccatttgaccattggtgtgtggcaggcaagaaaaactggttggttgagcaacaatgcttgcatatatttaggtttccaaacaaatcatttagaagatacagtgatttttaggttcattttttgttttgttgtaaaggtttagggttctccttaggacaggaagatgagaatggtgttgcctgcttctttttcacatattattctacttgcttgaaaatcatttagaagatgtgattttgagggtcattttaaaggttttagttttccttagtacataaagatggatatggagttgcctgctgatcaatttgtttctcatatatgattctagttgcttgaaaaagaagggaagctatggtggtgcattaacactttgtgtaaaatctttgtgtgccattgtcatttcacttttagttattttatttatctaagattgtcaatttgaaacacacctattgcttttagaggttataattcaacttttatgcaggctgggaaaaccttaagtgttagaaa

SEQ ID NO: 62505 - DNA, 790 bp, Cucumis sativus
  Intron number 3 from transcript Cucsa.104980.1 (locus Cucs a.104980) derived from phytozome v7.0 (chr-ID scaffold0092 7; pos 3277457 to 3278246 reverse strand)
atcaacagaagtggcttatttattgggcaggttggaaaagtattttttcagttttctccttcgatgatcttcattctttagcttcttaaaaaaatgtctttttaactttttcgattttaaatttcaaacaatggattgtttttcatgtcaagaccaattgacaacaaaaggagtagcacatctatctttgctaggagtgttggtttccttggtttttcaaacattgaattctcatctcaatggtgttatggagaaatatgcaagctccgttatttattttgaacttttccagttagttctcctcttggagttgtagggttgtagtttccattggggcacgagaaaaaagtaaaaggacaaaattttgtgagttagttgtccatggatttagatacttgaattgttgcactaattctggaatgcagggagagattgcagactaatctttttacatctattcatagttgacaaatgtatgacttgtaactaatttagtctggcttgttcatacttgttgtatttcacggacgtggtagatcgtaaaatctttttgttttctttttactttttattctactaataatttgtaatgttatatgagtactaagcatatgcctctattttctgtctaatgtcccagcacttaacattatggggtggaataaggatgtggatttagatacttgaattgttgcactaattctgttacctttcaagaaattatgctgtatataaccttcgtctgatatcaaaggcactaatcttttctgtatttacattaataaagcct

SEQ ID NO: 62506 - DNA, 319 bp, Cucumis sativus
  Intron number 1 from transcript Cucsa.025340.1 (locus Cucs a.025340) derived from phytozome v7.0 (chr-ID scaffold0034 5; pos 200161 to 200479)
tggtaattttggctttcttgggttatctttttggtttagcttttgaagctgtggttactgctccaaccctttaatcgagtttatatatcttggaatattcaaaattcttgatgtggactgaatctacaggaacatgtacttctattgagttttagcttttaagaattacttcttgcctcagcctgatgatggatggatgaaaagatccaaatttgtgttttctgttcttggtcttctacatatatgtttgtttgaaaagatccaaatatatttggtaactatttacctgtacatttcaggttcttagtggcattgcttt

SEQ ID NO: 62507 - DNA, 743 bp, Cucumis sativus
  Intron number 3 from transcript Cucsa.071910.1 (locus Cucs a.071910) derived from phytozome v7.0 (chr-ID scaffold0076 2; pos 16364 to 17106)
cagaggcaagtctggaaggtttgtatatcaattagctttctaagttctttttttttttatttaatttcattagtttgttatgttgttaatatcaattgtaagggagtatgggggccatgtagctcaagctcgattcacttggaaactctccaatcagttgattgatgtgttttaaattaaaatgaagtgtacacgaccgcatgccacatctgaattggttaagtagttgtaaatagtaatcacttaatttcctcccttccaaatttcttcaagtttagattcaaatgtcgatatgcactgttaaaaaaaacattgaattatgaccaaagactattaaaaactgggacgggaagtagctaaagggagatcacctacctactgccttccgttccatatccatttcatccatatggtatatttaacataacgtgttgcatctgcttggatttatatctatatacacatagatagattatgtttatctagacatcaagtgtacagattttgtacgagcttgtcaatctttacctcataacaaagaaggtgaatgagaaattgatggctgttgaccgcatgttattggtatattgagcaaaaagaacttaaatatagagttttttattgtaataattagccaatacggagttcgaaaatgcttggaataaccaatgtgtgattttaaccaagaatttattattttgaatatggcaactctttaacaattactcctgattatacagata

SEQ ID NO: 62508 - DNA, 653 bp, Cucumis sativus
  Intron number 2 from transcript Cucsa.076000.1 (locus Cucs a.076000) derived from phytozome v7.0 (chr-ID scaffold0078 9; pos 503815 to 504467 reverse strand)
ggttacaggtacttttcttttcatttttatttcattactatactgttgaatgttatccttagttgaattaatgttgtctagaacgataatgtcaggttaaggggttcacgttaaccatagtggttaaaggctttaatgttcgtcttgtgttggtgctgctttctaactttggagctctatactcgaagttggattattagaccatcaattgtccagaggaaggaattttgcgttttgttgatgtttttctgaaaaagatcaatgctttggattgttagatacctgcttatagataccatagccataagacctttatttaaccaatagaaagccattgagtgtttttgctgatgagggggatcttgcctttacatatcttgtgcatgcatcagatattacagatactttgattgaatggctgattttttgttattttgattttaatgatatccgaaaatggcttccctccctcctttaatcaactacctggactccatatgtggagtaaataaaataaattctgaaaacttacttcaatttggtcattggttctgtcttttctatttttatttgtttataccttctcattttttttcttccctctttgtttttgcctagaggatacattaaaggcattaaaggagaaagcaaaa

SEQ ID NO: 62509 - DNA, 482 bp, Cucumis sativus
  Intron number 1 from transcript Cucsa.076000.1 (locus Cucs a.076000) derived from phytozome v7.0 (chr-ID scaffold0078 9; pos 504508 to 504989 reverse strand)
gatcaaagagtattctcattcttcattcttcattcttctcttttcccgccacataattctaattttttgagctaccatcgatatatgtttccctgcttagggcttaatttagaactttttaatttctacttcaatattcgattagaggataattattaaatttttctttacaagagagatgtgtagagacacatgcagtttctatcatggcttgggctgaaatcaagggattgaattgaattaggttccttttgtttatagtagcattcaaagaatgagaaagacaatcaaatagacactcgaatggggaaaattttaggattttaatcatgcctgctgaatgaatatatgtgtattcttttgttcttggaataatgaaaatattgtcaaatatggaagacttgtagtattgtatatatgccttgtgtttaggttgtaagttcccgactgatcatgctagctactttttagggtcccccaag

SEQ ID NO: 62510 - DNA, 386 bp, Cucumis sativus
  Intron number 1 from transcript Cucsa.084800.1 (locus Cucs a.084800) derived from phytozome v7.0 (chr-ID scaffold0086 2; pos 460367 to 460752)
ttcttcacaatatctccatcttcaccaccacacaggttagactttcttccctctctttctccttgcgagttatatgcatgacttttgattaattgaattgaacttgtattgataaattcatttcctagagtgaagaatgtcaatctaggggatggattatggatgtaaattacccatatgcatataattgaagttagccattgggatttggggatatgggttattcttatgggacctgattaggctttgatttcgttttttttttttcttttttttttgattgttgttgtttcttttttaatgaattttccggatatttcttaattgagcatctgtgttttttttctgggttttggaacgtttggtttgtaggaaaccagttagga

SEQ ID NO: 62511 - DNA, 982 bp, Cucumis sativus
  Intron number 2 from transcript Cucsa.118480.2 (locus Cucs a.118480) derived from phytozome v7.0 (chr-ID scaffold0099 8; pos 380789 to 381770 reverse strand)
tttgggaagaagagggcgacagaagttgctcactcgtatgtgtttgtattatcctttatcagctgacttttttgagcatttttaagtaggttgtatgttctttgctttaagtattttgttcttcactggcctctctttctgaatccaacggtctccattgggttgtatgggcagtagtttcaaagctatgccctgtttttctaaactcgtaagtgcattatggcttttggaaatctattccacagaagattttgcatgatgagtagtttactggtttattgtagcttttcaagcctttgctcaaaattatacttcaatcaatatgagttgagaatcacaggcagtatgggcttgagagtataccatagttggaatatggagttggaatttaactcttatttcttttttgttgaaaggaacactttcattgagaaaaaaatgaaagaattcaaggcattcagaaaaaccagcccacagagaaagaggaacacccttgtaaagaaagggacttcaactatgtaaaatagcacctatagaataattacaaaagcctacaaagaaacatgataccagacaagggaccaaatcttgctagggctcctcttcacacctctaaaaaccctattgttccactcaccacacaccatccataagataccatgcacccctgcaaatccaaaaagaatttaacccatcttactcattagttttcttgtggagaaagtattcatcaagactcttgagagtgggttttcttttttgcggacttcgcttattccatcttttagcttgtgttctcacaagatacaacacatattcaaaatacataggactttttccatggtttagaatttagaatgtaacattttttatttcttgctttttagttgttgatccttctggttttgtgatgagaagtattaaaagttaattttcatggctagctattaattactttttctttgttcatcagtgtttggaa

SEQ ID NO: 62512 - DNA, 558 bp, Cucumis sativus
  Intron number 1 from transcript Cucsa.100050.2 (locus Cucs a.100050) derived from phytozome v7.0 (chr-ID scaffold0092 6; pos 663879 to 664436)
gtttcatcggaattattttctgtcgctgcctcctagtacgatatgattctacttgattgagtttgctgcttatgtatcagttttattttatcttgttattgtttttctttgaaaatcgtactgtttgtgttttagtaaacttctattctctgttatgttggtctgatttgattaggggaggtagtttagtgtttaatgttcttggttttctaatccttgttttctctacatggggtaatccgagtcgattttatggtttttttttggttgtttcctagtgtttttttggagttgtcaacgatgatctggaggggatgatgagagctttaactttgatttttttttttttgtttgtttgtttgtttgttgtttgattgatgctgagtagacctcttattggggattttgaatttttctcatgtttggatgtttgaatctgagagtttcttttctgtttttcttctttcttctttagggatgttttgatttgtatgtattaattcgttttgttgttgtttttttttttttttgtgcagattgagattggagggtaatagt

SEQ ID NO: 62513 - DNA, 491 bp, Cucumis sativus
  Intron number 1 from transcript Cucsa.094320.1 (locus Cucs a.094320) derived from phytozome v7.0 (chr-ID scaffold0091 9; pos 541014 to 541504 reverse strand)
ggtgcatcttcattattttgtaagtcgtctctcaccttctttctgcttctttcacttcttttcaaaaactaagtttataaatgagaaatttttaaatatagcatagtaaaatttagattctattcatgatgatagacattagaatcgaaaagtttgaccatgttttttttttttgtatatttcaataatttttcttttcaatacttggttttgcttaatattattacttttttatcttctaattcttacaaatgctttcaaaataatccagaccaagttttgcctaatagttcgagtaaaataaagaaaaagaagcataattatttaaagaaaacacgaaactaaaaaatgaaatcatgaacagacgagatgttaatatagattgtttatgattttattattatttgtaatcattgaatgtataatttgatttacttttatggttttgtttttcagataaattggaaggagagctacaaaagagattcgag

SEQ ID NO: 62514 - DNA, 891 bp, Cucumis sativus
  Intron number 1 from transcript Cucsa.095780.1 (locus Cucs a.095780) derived from phytozome v7.0 (chr-ID scaffold0091 9; pos 1629269 to 1630159)
gagcttttgttgaaaaggaagactcctctgctaaggttaactttacttatactactcttcgatttcttgtcattcgcctgttttgattgcgtgtttcttctgttttcatgttttaatttgtgttctcgtgtgtttcttttgaaatttttggttcttcttaatggaaagatctcgaggattgtttttctcgatatacattttactacggcttgtgttcattgctccagttcgatctgttctgttttcctgttgttctgaattcaatttgttgatcagttcttgtccaatccttctattggatccatattttccctccttttaagtacttttttcggaggttaatatgaattttacgctctttggatttgtccaaatctgtaattcgtgttattgtgttgttagaagttattttttaaatcctgatgttgaattctgtgttgcttttacttcaattggcccacagaaattgaaccatacggattctttgaaactatttttgaaatattttggtagagttgcatattttgcggactgtccttatctttttaaaatattcaaacattcaagagcaattagcgtctgtaagaaaatcctgtgaaacagaatctgtgccgactaattcatttgttgttgtagggatatttgttatgagaatcgagaggataaattttacctagacgcgtacaacttagattaacaagcatttgtctcttccattgaagaacttgttaggatattcggatgaattgctcttgtgcaatgaactttttccacagaattcttaaaactttttactatttcctatgacttaagaacattatgtgcatgcaaacaactcttgataactttgttttttgtaaagatcctgaacattttctgcatgttggcagg

SEQ ID NO: 62515 - DNA, 952 bp, Cucumis sativus
  Intron number 1 from transcript Cucsa.045170.3 (locus Cucs a.045170) derived from phytozome v7.0 (chr-ID scaffold0054 2; pos 1200900 to 1201851)
ccctgtaacagtcaacaggcgcgcgcgacactaaggtatcatcatcatctctctcgacactctctgcaattcccatttcattctgctgctttcgtgaatccaaattacatttttctgctactcctattgtcttggatccaacatttttttttagaatttctcagagtattaggtattttttctggggtgcacaccaactgtttgcacaaagttctctaagatgattgatatcagaaatcaaatatgagattgaaatgtcatctaatttattaaagtgtccattgtttaaataagttctgttcagaatttcaactatttgatcggactatgctctagtctacacatgcatttaaatatctccattctttttctaaaaaaatgaaataaatttttacatatttttgttatgaaatattacgatagacatcatctagtataatatgattgaaacatacgggaagtgtgtggaaatggaggacccaccccacttcttttgtgctctagaaaaagttcagtaagggaaatggagctttcattattccatgtatgtttaattggtttttgacgataagagatattttaggattgctttagttctgccaagattgttctagtactctcaagctacttcattggactatttacccctgttcaactggtcaagtggtgagttctttgcaagcggctcagtccacgttgcgctattgaatttcacatatcttagtctcttttctgtgaattctttcatatttgcttattgttcctgaatatctgttcactgttatctataaagtgattgccgctaggatccattagtgaactaatttttcttgattctgcttacaagatgtaaatttttctcgggtgtgtggagctgaagttgtacagttcaataaattttggttcagtaatcttcttgtcaattttgacagtctagtcgagttcagttgct

SEQ ID NO: 62516 - DNA, 373 bp, Cucumis sativus
  Intron number 1 from transcript Cucsa.018090.1 (locus Cucs a.018090) derived from phytozome v7.0 (chr-ID scaffold0025 2; pos 367795 to 368167)
ggaggccttcagcttgtttgacaaggacggcgacggttcgttctttttctattctattttcttttgattcagcgttgcttttccttctgcattgctcttcctcctcgtcttctcgtcactctaccagatctttgttttcccttggatttcggttttctatatctattcgtttcgtttggtgtcggatccctgcatcatttagcgaattttgttttgatttataaaacgtggaatctctgttattctgtgatgtgatgattagtccttctgaatctgagtgaaaaattaggatattacgaatttggattcactcagtttctgttttggttgtgatcgttcaggttgtatcacaaccaaggagcttggtactgtt

SEQ ID NO: 62517 - DNA, 717 bp, Cucumis sativus
  Intron number 1 from transcript Cucsa.081190.1 (locus Cucs a.081190) derived from phytozome v7.0 (chr-ID scaffold0081 7; pos 35247 to 35963 reverse strand)
ctgtctctaaagtgcagagtaattctcacgatgcgatgtcatgttctggaaaatgggtttctgctttgtagtttttttttttctttgttgctttctttgaatttaatgttgggatactggggattcaggaaatagatacgagaatgtgtttctattttttttattcctgtttttgctgatagtggtagagaaaaatctgtctacggaaatccatgagttcgaacgttatggaagtccaggttttattttgtgtggctacaggggatttggtaattggtttagccctattgcttgatttgaaattagaccaggattctcatggaatagtagtgttgttcttattctttttccttttgttgttgccattattgctaatcaggggaggatgtttgtgagtgatagttcttatctctctagtatcttgtgaatttcctctaccatatcttcttcttctgtatttgattcttttttctttttttggaaatttctatattgatactttaaattggttttctcgttaaatttgatggaagttctcctttgtttaagttccacgttaccttgtgcttaactgtttgggaatttgaggacaagaaactgaagaaaattattggtggaactttgcttcataattcagacattttctgccacttttatttctgtaaatgatcaaatcataatggttttggtgtaattttgcagcacattcaagcttgg

SEQ ID NO: 62518 - DNA, 165 bp, Cucumis sativus
  Intron number 1 from transcript Cucsa.101830.1 (locus Cucs a.101830) derived from phytozome v7.0 (chr-ID scaffold0092 7; pos 1003708 to 1003872)
tctctttttcctctacactcttcccaatccagcaggtactcaactcatctcttcttttttttttctttttttttgttgttgttcttgtaatttatgaattattcaaatttgaatttgttttttggttcagttttcaggtgtgggattattagttaatattattgt

SEQ ID NO: 62519 - DNA, 1056 bp, Cucumis sativus
  Intron number 1 from transcript Cucsa.093710.2 (locus Cucs a.093710) derived from phytozome v7.0 (chr-ID scaffold0091 9; pos 38551 to 39606 reverse strand)
ttacacgaaaaacactgaaggatccaattgccgaggtattattatctctctcttttttgtctatgatctgttttgatacttgcaacatgttcatgaaagatgaattgagttggttttattctccttcgggtttaaaccttttcaatccagtctccttgaagagaacatgatatgtatagccattttttgtttatctaaacctgaaatgcattcagcatttccataatcatgctgaatttctgtgggttgtaagcagaattcgagaaactgaggtaacaatatgtaggatgagagatggaaattgatgtatgagctcgtctatttgttgttgaaaattaaacatgtttttactcttgatacattatacatgtacacgagcgaacatttaatcaagtgtatgtgtgtatagttttgtaagataaaaaatcatgaaagaatactagggcatacaaaaatctagtccaccaaaaacaagtcttttaagatgattaattgtggatatatgtagccaacatgaagcataattcacttgttaacacttgctcttttccttggggttggggttcaaaccccaaacttcacattgttgtaggcaatataaaacaaatgtaggtcaatgtatattgatacatgggatgggaattattgtatggtttagatttttcattgtgctccctaaaaattgtagggtttctttgttgggtttgatgcaattatgtgaagaacaagaaaacaaaagacagtttaaaagaaagtggtgaactaagtttgtagtatgttgaaaattttcaatacaattgatttcgtttcctctcatttctcaagtaagttttatttgattactttttatgagttcacatgcttccaacagtcgctgtgcccaacttctatgaaactttgagcggatgttttgttgttattttgttttttgtgtgtgttcatttctttaagattgagtgtgaaatctgacttttaacccactattttccacaaacctctaatcatttgcatgctattaaagactgcagttttagctcaaataaattctgaggacac

SEQ ID NO: 62520 - DNA, 708 bp, Cucumis sativus
  Intron number 2 from transcript Cucsa.067290.2 (locus Cucs a.067290) derived from phytozome v7.0 (chr-ID scaffold0069 6; pos 1699533 to 1700240)
acagggaaaagaaacgtcatattgaaggtagactactatggtgagtgcctgagtggaataaatattcttccccatattttctaagagaagaaaatcttccaagtaatgtttattcgaagaggtctcttgaacaaacaaaatgtgggagtttgccctttaatatgttgtatattcctattgttatttttcgtgttttgttatcaaagcatatcgtgacttataactattagtattatatagtaaagaattttcaattaatttttccttctaatacagacacgtgagctagctctatttagtattttctacgcatgtgctactcatatgaaatgagacacttgactgacctgaccagtttcttttgttacgttgctgcattcatttgggtagttatttagtttcatggttcatttccagcttcattatttgatatcatctattgtctagctctgagtgcatatttgtaagtcgttttaatttttaggagctggaactatcccactattaagggtcaggtcactggaaaatttaatgcaacacaatagcaagactaatgggttgtttttagtagttagggcataatgttttgctttagattgtgcatgtgcagttttatttcaatattgctccttttaatctgcattcgtggttgacattcttctgaaattaacagaaataaacaaagcttccacagaagtgaaacaagga

SEQ ID NO: 62521 - DNA, 733 bp, Cucumis sativus
  Intron number 1 from transcript Cucsa.123420.1 (locus Cucs a.123420) derived from phytozome v7.0 (chr-ID scaffold0100 0; pos 643791 to 644523)
ttttagggtaaataatgaaaaaacaaaaaagattgttgcacattttattttgtatataacaacatttaaaaaaattacaaatataacaaaatttgtccaattctatcaatgatattcactaataaaccatgttataaaaattggtctatcaccgatagatcatacaagtctatcaatgatagtttttctatatttgtaattttttaaaaaatgttgctatatctttaattattatggatgaaattgtcatgtaataccggatgagttggctagagttcactcgtgggccaaaagataattgggcttgaaagttataggaccataaacagcccaaacagagagcccaatctcatgcgtcgtttcccatttctccacttcgtgtcagaccatcgtcaaaattgtgttggtgacatttgaagaatatttggagccaaatttcagtcacactgagcacaaactcaagcattcgaaagtgaagaaacagatagcatataccactttcactttcaatcaacactatatggagatcgaactcccatgcaattaattaggtaagccctaatttcttgtgtgtatgtactaaatcttctgcacgaggctttctctacatactgctgcatgtttttccagggaattgtggcagctatctgttacaattttagtgtgttatgatcgttggggtgtagttggagatatctctgattttctgaatttgtaattagtgttctttcag

SEQ ID NO: 62522 - DNA, 818 bp, Cucumis sativus
  Intron number 3 from transcript Cucsa.114680.2 (locus Cucs a.114680) derived from phytozome v7.0 (chr-ID scaffold0096 8; pos 50582 to 51399)
gtctgcgatccaaaaacaaagagagtaatctcattgtgagtttcaaaaagtagaagaaaccattttgaaaaagcttaatccacctctatgaaggtctaaagtttaatatgaaggagttttgctgaaaagaaacggaacttttttcaagattctcgttggtgttttctaaatcttttatacacttcacatattatgacactatgtcggaacttttgtaactgtcaactttcatgattatcattgttggagggcaacttataagccctgtttgaggctggaaactgggaagatctcttccctctgatctctttttccagttccttataaaggaacatagaagtttgatacgagaatgttgtgtggaaaaaatgtataaaccaaataaatacatcataaatgcctagttttagttgcaggtacaaatgctacagtcatgcaacttaactgcatctgaatttgtttaaagtggagaaataacatttttatatttttagtttgaagaatcacaaattcattacattgctgaatttctattcccagctagattttggctccccatgctataaaagttcttgaccaaaagatttagttttatttttgaactttttgtcaaatgctcttgcctcattaagaagcatttttttcatactagaggcaaaagttgaagtctgatttgatgctaaagtttattttaacacgatacgttttgcctttttgttcttttagtaagaaatgattgatcatttgatgacaccgcttttgtttttatgctcaatcatccaggaaacttgcaagtcacaaactgagtggattcattg

SEQ ID NO: 62523 - DNA, 964 bp, Cucumis sativus
  Intron number 1 from transcript Cucsa.100430.2 (locus Cucs a.100430) derived from phytozome v7.0 (chr-ID scaffold0092 6; pos 907327 to 908290)
ctgcttttatcgactaggaatctcgaattcctttggtgggtaagctttttcttcctgtatttgagttgggaagttgatgaatgagttgattttatggttttttttctttttcttgtttgatcttatgttctcatttgtttctgtttcttactgagggagattggttttcttgccccccttaaaacgattcattgagcttttgttcaaacagtgctgctgggagatctaggtgctcagttcagttgtgatttcttgtagttgatctagttttcaactcggtttgttgcttgtggttctgtttcttttggagtttggttgtggatatgattttaaacgagttagaaatatgaacactttttcccccctccttgagtacattgcggaagggcttttctgccatggttaactgcaatcaggtttttcttttggacaatatccccgcctgaacctgaaatcttagtgctcttttcttatagttcttatcagatgagtgattttatcacgcttggtaataatttattttttagttttcaaaacttggcttagtacttgaaaatacaaacgtagatagtaaaacaaaggaacttatgggtgaaagtagtgtctataagttggattttcaagaataagaaatcaaatgcaatggttactaaacgactcctaattattagatttttgaaactttttagttttgaggttaaaaattagctacgagtttcaaaccatacaccattgaatttagtgtttttcatggttcttttcttatagcaacattaatgggcttttttgaaggatagaataacttagttttcactttctttatcctaaaatggaaattaggagttcttttccgaatattgcctaaacaagtaaagtgtttaacgtatagtgaatatttgtacttgtgtagtgaaggatggtggttattaattcatattgtctttcttttcttatagcaagttta

SEQ ID NO: 62524 - DNA, 798 bp, Cucumis sativus
  Intron number 4 from transcript Cucsa.018080.3 (locus Cucs a.018080) derived from phytozome v7.0 (chr-ID scaffold0025 2; pos 359309 to 360106)
ctgattttgatcaatgtaagattcttgtcctactattggctcggatgctgtatgtatgtatgttagttcgtcagtgtggtattctttaaacaaaaaaggtaatcatctcaatataatagttttccattggaggtgaaaaaaaagaggagaagtttcctctctaatttacattcagatatgactataaaatttgagaacgtagaagcccaaagaatctcaacttagttttcctttttatttgtttggaccaaaatttatttgactttctgcaagtataatcttgccgatttcttaattcttagtaaggtatttccagttcacaatttctggattaatatatgatcgtgcatatagaaatagaaacaaacctctcagagagaggaccgagtggtggatagctccagttttgaaaaccaacatagttcaaattaaagaactatctaactgtctaggcgtaattacttgagatattttaatgaaacctccttatggaacctccttgatactggcttgagtttgagaaacttatccctttcatattacatatttagtggtaggagattgaaattggtccggtaaatgcaccgtagaaaccaacaagagtttagctcaactggcatctgtatctgttgaggaccaagaggtccgtggttcaaatttttctactccatttgtcctaaaaaaagaaatccaacaaggtgatgatttggactatcttatgaattccgtgtcacattcatccctgtcttgttttttctagtgacataagtatactattatatgcaggtttatcaattg

SEQ ID NO: 62525 - DNA, 486 bp, Cucumis sativus
  Intron number 2 from transcript Cucsa.124560.1 (locus Cucs a.124560) derived from phytozome v7.0 (chr-ID scaffold0100 1; pos 458774 to 459259 reverse strand)
gttgaggagaacctccgatttagtgctaggtgcaggtatgtgaatttttgttattcagaactttaccatttttgacctaaatatcaaatcatattcgtatactgcacgcactataacatgaatggtttggtgactagagtgttttgcagtttttaggagtcaggacccagcacttcattggatgctaattgtcctgaatattatttattttttggatttcttatctataagctttatcaccattttgaaacccaaaactaatttccactgttgctcttgattgaatgctctgtgtaatttaactgtaaataactggtgatggttcagataatgataatgttcaattgtaactgcctttcaccctctacaaaaatataaatttacaccagtgggttgggtctgttgaagaaacaaatgtgaatgtttggttaagtattgattttttccatattgatctattctttactttgtagactatcggctgac

SEQ ID NO: 62526 - DNA, 505 bp, Cucumis sativus
  Intron number 1 from transcript Cucsa.124560.1 (locus Cucs a.124560) derived from phytozome v7.0 (chr-ID scaffold0100 1; pos 460089 to 460593 reverse strand)
ggattatcctcattgtaagtaactcttcttcttctttctttctgtatttctttccttttttgtttttggtttctcccccggtatattttgcaatttaagctgacatcaaatcttgattggatacagtctgttttggctgagttggtagatatcattctcatttgtaattctggatgccatactaattttcttctaagattagaactatatatgttcctcacattgcactttaataacctttctttcagtcgtgttcggtgactattttcattcatgatcattctacatttggtttagttataggttggaatgcttcttggcataaaatgaatatctaatttatacatttatgaaaccattttatgcattgtcaaaacctcttattacgcatgttctttggcttatttaatagaaattactttttgtatgatatgcaacaatgtattttgatattgctcacatttttgtaggttgcattaagtactctgctgctgatcatttataa

SEQ ID NO: 62527 - DNA, 685 bp, Cucumis sativus
  Intron number 2 from transcript Cucsa.013970.2 (locus Cucs a.013970) derived from phytozome v7.0 (chr-ID scaffold0017 8; pos 88023 to 88707 reverse strand)
taggcactggatacttcattgaggtcagttttggtgggattttgtacttgattaacattcactttttttcttcacaaaaaaagattgaaattctatctggtgtttatatgattttatttaccgaacgagcttgattttctcaatttattgttgcgccttttgtcgagcgatgccaataccccatttgataaccatttgatttttgaaaataggtcttgttttctcaccatttctttacaattgtcttcagctttctcaatataagatttaaatcttacccaaatataaaaaccaaaaacaactttttaaaatttgagattttagttttcaaaacttggcttcaatttttttgaaaacattgttgagtagataacaaatcaaagaaacccataggtagaagtgtaggaaacaaaaatttaaaactagaatccaaatggttttcaaacaggatccgaatgacttacttgcagatttaccttctaaatagagcacttcatctagataaatctttcctacctatcagaatttgttctgattcattagcattgattgatgctggttgttattttcaattaggaacttactactcaatgagtaagatccatctttgtgaaaataatatcactttatcatgtattgatgttagtaatgtgttctcatgatctgatggttgaatcagaaaaca

SEQ ID NO: 62528 - DNA, 643 bp, Cucumis sativus
  Intron number 3 from transcript Cucsa.043900.2 (locus Cucs a.043900) derived from phytozome v7.0 (chr-ID scaffold0054 2; pos 523095 to 523737 reverse strand)
ctactcaaacctgttgaggctaagattacttttgggtgagttaattatgtttcatctttctgtctgtatctttttcctctagattatatcttgtgctgaattttgttctgtttttaatagattgtttcttttcttctaacattgctttttttctttgcttaagaatcaataatagtttatggtagagtagggatataattattacactaaccatcggcttaagtttttattctcgtcaatttaaaaacatggcctagagcaaagaggtcttatatttgaactcttgtaatgacattgtcaattaagatagcatgaatcaataagcaattatattcgattttgtaacttaacttggtctagagaaaagagatcctttactttttaaggacacagttgttcaacctatagacaatgtttaattaaagatgtagcaaagaggttatgtatttcgaacttcttccaattaaggttggatcatggatggaataataaaatatttttgactttgtaacttaatcattgttgcaagagaagggtgtttaatgatcttatagaaagcatctgcagtttgttgtgttgttgcccctaaatgtgattcttcatggcaggtgcggtacggtccagactggtatatttgcaacaa

SEQ ID NO: 62529 - DNA, 791 bp, Cucumis sativus
  Intron number 1 from transcript Cucsa.084200.1 (locus Cucs a.084200) derived from phytozome v7.0 (chr-ID scaffold0086 2; pos 1511 to 2301)
tcgcttcttcatcctccaggttacaactctctctgttcttcatttctttgtttctttctgattacggaacttctccgccaaagttttgatgtttgatgttgctgtttttgccctagacacttatcactcttcttttttctacttgcatttcttctcttgtttcctttttttttttgttgagatactctttcgttcgaacccacttcctcctactgtttttcttcttgcatttgtgtaatttctgcttctaaacgcttcttatgcctttcgaaacagttaacgttagtgaatggtgaggatcagtgagaggacgacaagaatgttacttcatactcactttgagttgaatgctttagtgaaagtgtaaacgctacgttaccatcacgtgatttgatgctgttttggttttgtgtttgaattcaaaatcatgtgcctactctttgaatttttggattcaatggcaacggatttgcttcataacctaaccttgtttccatttgacgatcgagttctgtttaattatttttaactttaggcattttaattatatagaatatgatgaatttgtctgcctaaaactttgaatcatgtcatttggtttgtggttggcaaattgtagttgtcttatcttattgtcttatgccaccaaaagttttatgcgtttcagatggaaattaacgaatgcttttgtagtttagagaaaaaagggatggtgatactgtgcattactaattttatttatttgatgaattttagttagtggtttggcctgggttttcccttctttcgtt

SEQ ID NO: 62530 - DNA, 714 bp, Cucumis sativus
  Intron number 4 from transcript Cucsa.084200.1 (locus Cucs a.084200) derived from phytozome v7.0 (chr-ID scaffold0086 2; pos 2848 to 3561)
ttattgtagagtataaagattcgtgggtagaaaaggtcagtatatcttgaattactctatattttttttttctttaaaaaaaaactattgtatgatgttgctttgggggggattcattttgatgtctattttcttatgggccttctggatgtggtgtggatttgacccccgttatctttagaacgtattttaaaatttttaatgtccccgtggtatctatgtatgggattttgatagagaacataagcgtttgaaagataaaaggtaaccaaactacaagatgaactcaagtgttagatttacatggaccttccaaatatttgtacactctcaagcctacatttttcaaaattattgcttttctttcttctttcccactccctgtatttataacaaacaaccataaaaacttctccaactaattgctaatatacccttaatactcttattatatcctaatagcatttctaacaaacttcagttactctgttcgtcattggtattttacttgtagcatttctcagaattgaagaatgtcaattttattaactttgtttctctttttcagttttattatttgtttgaatgtatgattaagtattttcttttgacccattagttttggttaaggagattattatctgcagtgtgcctgatttgttgaaatattctcttccagggctgttttgtgtgcattgtgataggatattgtga

SEQ ID NO: 62531 - DNA, 960 bp, Cucumis sativus
  Intron number 1 from transcript Cucsa.129340.2 (locus Cucs a.129340) derived from phytozome v7.0 (chr-ID scaffold0102 8; pos 312705 to 313664 reverse strand)
atcgtcttgttgttcgcgacactctctccttcaaggtctctctcgattcattctattattttgaaattttaacttatattctgatctcaaattttcgccaatgtataactaaacgattagggtatttgagattgagagtttctgtgtatctttgttaagcagcattgctgaattgtttaaccaagtaggataaattgaactgaagtgagctgatttgggtgtttttcttatgagtccctatttaggataaatcccgtctagaagctattttcattttacagtgaagatcaataaaacatcttatttttctcttccaatttttaggcaaaaccatttgcctgcttccgttctgttgctaaatagatttgttggagatcagcaaggatgtagccattttgggccttttcaggctgaattggtaaatgtaaatgcaaaactatgagaatgtaagatctcagtatgatttattggaactgaagcattctaatcgagttgcattgacatactggagaatctctctcgagctatttgttagtgctttcctcttctttaaatgcagggtatctatgattactctcgtgctgcttctaaatcattatgtactcgtctcaagaatcataaaattttggttaaaaccacaacagaaacataaatataggagaaaggaaggtttagaagtatgaccatcttattagcaacagttgataatagatttggaatgatacatgtaaaacttgatgctagttctttcgggttctttacattgacagataaaagtgacacaagtaaactttgttcttgctttgattttctattatggtggggtgggtggagaacccaatggaaacttgagcagtagcttggttgtgaggtaaatgtagctttgcttatcaagacgatatataacttaaatgatgcaatgcaggttgtgcacttgttttcctgtctggacaagataag

SEQ ID NO: 62532 - DNA, 621 bp, Cucumis sativus
  Intron number 3 from transcript Cucsa.012790.1 (locus Cucs a.012790) derived from phytozome v7.0 (chr-ID scaffold0016 4; pos 548410 to 549030)
gcactcatatcctgcatataattgttgtgatgttcatagtcttcaatatcaagaattatgatcttgatgtttaagcttccgttactgcttggtatatttcttgcagtcaaatttgatttactttcatgaaaacctcgtttttagggtgttttgaatctctagttcatttctttttcctcctgtagctaagattaggactgtaggagcagtccttggcattcacaatttaaacacggttgttcaactctgttttttgtggagtaaagttaggtcgacactatggtttatgcaatgaataaaaaagcaaaggagagttctttgtggcttatgtttaccctagaagatttgtattccattctaacggaaaaatgaaaagaaaatcaaataataggagagagttatttagggaactatttctctcaaaatttgtttttcctttttccttttttgtatttttttcttgttttccccctccaaaggtagatccttcattcaaagcaaacaaagattgatagtatgggcattaggtcattattagaggtttatacttactggaattcagaaaaaaatttcttaacaaaaccacgcattcctgccctgctaaagctcagttcagagaag

SEQ ID NO: 62533 - DNA, 976 bp, Cucumis sativus
  Intron number 3 from transcript Cucsa.083180.1 (locus Cucs a.083180) derived from phytozome v7.0 (chr-ID scaffold0085 8; pos 128872 to 129847 reverse strand)
gaagaaggtttgtttttccctctcttacattatctagttctgagtagttgttcatgctgtgatcctttcaaagtgagaattaaatgtggctccttgtatttttttgctcattttgtattgttatttcaacctacaaacattctattttgtgtcttacctctgccttagaaaatcgtttagtcattctgattgtttttctcataaattgatgaacacaagcttgacatgatatgcattttgctcatttgcttactagtttgtggcttacataggctaagtatttgaaattgcttacagggatgaagttggttggtttctttattaaaaaaatgttacgtagtggttgtagataggcaagtatgaagcaaccaaataacgaaaaattatttcaagttagataagttgttttagaagttttaagattcgtggagttgcattagccttctagaatataacaaaaaaacatgggggggttctttttatggaactttttgataaaataggcatcctagccacaaccttatttgaataggatcctaccttacttgaacaggatctagtttataggttgtacaaccatgttctttgagttttaaagaactaggcattaccctggcgaaaaatttgaaaaacgaggggccctttcttcatttattgagacagatagaggcaagtacacagtacagaaagaaagcaaggcacacagcactacacctacgtgtctttataataaagaagagttgggatgaatgtacatattcaactgtttacatgattttgaatggactaatatcaggattctcgtattacgcattgtgggtaatataatttgccatttcaaatttccaatagaaggcatggattgtaatttgaatatgtttctccccaatgtttcaacttgtaaggttgcactgttcctgccttgaatgtgttcaattctagttttacttaactgctactgttgtgcagcctggtt

SEQ ID NO: 62534 - DNA, 389 bp, Cucumis sativus
  Intron number 1 from transcript Cucsa.084970.4 (locus Cucs a.084970) derived from phytozome v7.0 (chr-ID scaffold0086 2; pos 649572 to 649960 reverse strand)
tcccattttccaacttttccgattctctatcactggttagtcttcatcacttttctcttctatttttcgtttgattgctgattaattttaaaacccacatgagattttgtcttgttattcctttttcatacctcttttcttatctgtcttttgaaatttcttcatctggggttgcattattagcttcaatttacaccttttcttgctctgtggcgttgttttgtgtactctattgcttggagaatgcgttagttatcgccttaattgaataaatgtgtgaaatttaactcttgtttggggttttgttgttggaaactttttgggtggttttgttggttgacaaggctgtgtttgtttgtttgtttcctgcagattaatctattggggga

SEQ ID NO: 62535 - DNA, 734 bp, Cucumis sativus
  Intron number 1 from transcript Cucsa.012020.4 (locus Cucs a.012020) derived from phytozome v7.0 (chr-ID scaffold0015 4; pos 1447665 to 1448398)
ttggttacattttgcattttcttttttatacccaggtgagaataactgcaaaagcattgtttctttcgataacccacttttcccttttcgtttttttctttttgttttcttattgctctgtttctctctgtgtgtgtctctttgtgggtttcttcttgtgttcttcgctacgcgtgtgtgggtttttcttgggagtagaggtaaaggtattcgttcaactgtgaatttgattgtttaatggaaatgaaatgggttattgaacttcacgcttggaggaggaggaattgaggggaatgattaacttactgctctgtatttttttattgtttgtttccttttttgtcacgcaaagaccttcttgaccagaaagtatatgaagcgaggaattctttggaatgtgggcttttctctctcccttggatgttattttattgtataccaaaaaaaacaccccatcttttgagagtcaggtttgtctctgggaatcgaaaggctctctttatcgatactgagcagctcagctcatcgtctttccttcctactctagaaatgggttttggtgagtgctataataggaaatggggttttttctatttgggttttttttggttttgctttccggactttaaatcctacaggtcaaatgctgttgcgccaagcttcctcttgtgaacattttggttttctgtttaattgcagaaggtgtcagaggaattttcagaaagaaagtaagc

SEQ ID NO: 62536 - DNA, 397 bp, Cucumis sativus
  Intron number 2 from transcript Cucsa.087580.1 (locus Cucs a.087580) derived from phytozome v7.0 (chr-ID scaffold0088 8; pos 141511 to 141907)
atactgctgttcttgctgcacaggtttgtactttatggcatgttattatattcgggtgaaggaaacaagtgaaattttgtttctgtttggtaattggggttaacgggaaggtactgacagaagatctattgataattgatgtaccaaaaatgtggagacgcaaagtgaatacgaactattcctctggttaagctccaaaagaatgtaaatggcattcttctggtaatatcaaaataatcatcaataatcagaattttctgtttttttttttaatacgtagtatctgtatgttggatccattgctgtaaatgcttccgttaatttaaagtacattctggttactgatttgtaaactcattcagattcggcaactgacacaagagatcagggagttgac

SEQ ID NO: 62537 - DNA, 1049 bp, Cucumis sativus
  Intron number 2 from transcript Cucsa.011420.3 (locus Cucs a.011420) derived from phytozome v7.0 (chr-ID scaffold0015 4; pos 680202 to 681250)
ttggtggtcaggacaaagtatgcacctctctcctttcttcttgcttgtcattgtgtgtgttggtcaattttgttcctggctttggtctttgggaacggaatataaaacttggtagaggttgctgattatatttcgtggtcagcagtctcattctgctgtctagattagaacatgacttctgaatatattttcgtaattacttttttttatcttataatgttctctctttttcttcaagtatgacttcatttcatttcagaatattacatcacatgttaatggtagaattcctacctatgaccttttaaatgaaatagagatgcttccaagatgtaatgttggtttgaatgcagctttttctttttgttttctcttgtctaattatttattattattttaatttctagataccatatggttattaaagatgcgcaaagcagaaattttttattatatgctttgtaggtgtttgtttgctaggaagatttgaagttctttttaggttttttgagtggccttggtcttgagaaactttataggagatcttggtcatatgctttagcgttcttagtgaccttcttaccttatggtgaaattcgataaggcaacttaattgtattttgattggttaagccatcatatcaactaaaatgttagtggtttgaatctctaacctcacatgtgaatgaaaacaaattacatagaacaacaagggcatacaaacaaccatacaaacaagtgcatattgtaatttttgttcagtggcctgttttgctcttcattattgcttagagtttttctttctcaatgcctgtatcatggaccgattatttctcagtttcaaggtgtctagcttgctaggcagtgtcataattgagatttggaaatactcaatattattcattacatgtttgctttttctacatctgtgatgagatgttgttatgtacagtgtatctggataagtctgaaggtaactgattcatgtattactaatatttaccaattgaatagattcgaccactgtggaggcattacttccaaaacac

SEQ ID NO: 62538 - DNA, 649 bp, Cucumis sativus
  Intron number 1 from transcript Cucsa.075560.2 (locus Cucs a.075560) derived from phytozome v7.0 (chr-ID scaffold0078 9; pos 212701 to 213349 reverse strand)
ccaaggtatgagctgaaatatattttctgcctcttatatatggtttcaaatgagtattgatgatattgtaacttcctggtggccttaagcccgttttcttttggtacgtttatacattggcaggtttattactaaaaataaatacatgaataagaaaagaaagaaaaagaacgttgatgtgtttgttctgcataataatttcaagaagacctcctatgacttttttctatgttcaactcacagaagttatgaactcttggcttgtagccactactacctgttatagtaagtaactgttttcatttgagacagaagatttttcagtttctaactaagcactttttgttaactcaaaattttgtagaaatcaaactgtatacgtaattttagtggcgtgatgtaatctggtttatatgcttggttgtgactggggtggttgaatgtgtgaggagttaagtttccttgtaagttagtagttaataagttgaattcttaagttgtaatactttatgttttgtaatgaatgttgcaaccatttaaatagtataccggcagtcaaaatactttagtgtagtgatatctgtttctaccagatgcatattatctttctctggtgtgaattatttattttcctcacattttcagttac

SEQ ID NO: 62539 - DNA, 747 bp, Cucumis sativus
  Intron number 1 from transcript Cucsa.077440.3 (locus Cucs a.077440) derived from phytozome v7.0 (chr-ID scaffold0079 1; pos 596614 to 597360)
actttcctttcttcctcgattcctcttctcctaatgtaagtttcctctttccttttttttttttccttctcttctttcttttgtttcttttttttctttttttcatcttgcctgtagtgttaataaactgtgttattctctaggaatttattgttttgttgctattgagttagcgtcgtcgtcgtcgtcgttgtcgttgttttacagggctttgaatcttgattttctttttccagatggatttaatttaatatgttgtagttactgaatgttgtggatctggagtgtgcgtttttctttttcgtcggcattagagtctctgaaatgattgactttgctgctgttggtaattatgttcggattttgtttgtgtgaaattttaagtctttgtagatcgtactatcacaacaagggaatttgtgattctggttttggatgatgtgtgtgaatgaggatgtttgaatgttagtaattggatatttctcgtttcttctcttagttaaattagcaagtgaatgtggtttattattgtacaggtggttcaagtgagtaaagaaatagtgttgaaatagtgttgtactgttggtgagcggctatgtgtttttattttctcttgtgagacttttcagttcttcttagggttcacatcttagatagaaaaatgaagtgtgctaaaggatgagttttgtaatatggttcatatggtcatggaaagactaacttttactgcaaacattatgacaagga

SEQ ID NO: 62540 - DNA, 848 bp, Cucumis sativus
  Intron number 1 from transcript Cucsa.087760.1 (locus Cucs a.087760) derived from phytozome v7.0 (chr-ID scaffold0088 8; pos 311149 to 311996)
actgctttgttcaggtaacttataggatttgctttctttattcaaacaattatgaggttaatttataaacttaaacaggttttgcgtgtttcctttcatccgcttatatacatttatatgcgagtttggtttgtttatacttaactcaaattacactattaaatattatatgttatgaactaatttcacaaataaatacatgtactatatttttttagaattattttgaaattattaattttttagctacctcatgatttcatttttttgtattaatttttttttgtggacattcaaattttagaaaatacaaatatcttgaaatgtaaatacataatcatagaaaaaataattgatttccaagaacaaaatataaataagatcaataatttttccgagacaatataatcttcaactagacaaaacgatgtgcagttcgattattttcttcatatttaccttcatttcacgaaccgaacaatcatattattcattggcgttctcataatttctttcacacatgttaagatcaaataaatttggctgagagagaaacatttgcaaattcctatatttaaatgtatatgaatacatattgaaaaaatattcaaagtatttaaaaataaaaagaatcaccgagaaaaaatatatagtaaaaattaatagaaaaaatagaataaaaatagatattcgggaggaattagtagtaaattaaaaattattctaaaatttagttgcatttgttaataggttcctaaaccctagaatggtagtaataaagtaaatgtgtagtagattaaaaatctcatattgggtgggtaattgtgggttgttgtgaagttgtaggg

SEQ ID NO: 62541 - DNA, 920 bp, Cucumis sativus
  Intron number 3 from transcript Cucsa.107690.2 (locus Cucs a.107690) derived from phytozome v7.0 (chr-ID scaffold0093 1; pos 31099 to 32018)
aggtgaggattctcataacccacattcgttttttctttacccctttccacttgagtcttacttaccaaaactgcaacaaaaacaggttgctcaaactgatgcaaatcctcagcagatttgctcactgaaaagaaacaagggttctgagttctctttaatgataaaagaggcacaagccttaggactggcgcttggtatcccttgtctagatgcgtaggttcctttcttctttaaaaaatctcgtgatgtctctaagttgttaaacagtaaaagaaagtttatcactgcatttgctgtcagcaaagcaaattttaagtttttatttagtatttagctaaatactacaatttagaagggtcattaggttttaatcagaactatatttaaaagttaagtttgatgagaatcaaggcttggtaacgggtgtaatttaatcaaggtttggatatcttgtggttttcactctgtcttctaactgagctcttcaaccttgtaacatattcttctaaatatagggtagaggaagctgaggcacaatgtgcattgctgaattcagaattattatgcgtaagtataggcttagaccttatctagtaatcatttggtttttggatgatagttcttgaaaactaagcttataaacatctattccacttaaatttcttgtttttttatctactttgtagcttttagaaaatttattgttgtttttggaatttcatttttgaattcaactcttgtacttaagaaaaatgaaaactattgtatgaaatgagagaaaataggcttaatttaaaaaaacaaaaaacaaaatgattaccaaatgagatcttagtaggtatatttcagtgtgctggatgattattgcttctgtagtcttgaacatcattactattattaagtctcatttcatgatcagg

SEQ ID NO: 62542 - DNA, 889 bp, Cucumis sativus
  Intron number 1 from transcript Cucsa.002950.1 (locus Cucs a.002950) derived from phytozome v7.0 (chr-ID scaffold0003 4; pos 151370 to 152258 reverse strand)
ctccttctggttcgtttccttttcttcttcttccttctaccttctttttttctctttatatttttagtcagattcatacggcctactgtattttggttaatgatccatatgttatgttcggtttatgaaattggattcataaacctttcgtcattgttttaaggtgtagtgctgtgttagcctgtttggggaattctgtttttttctgaattcgagagaattttttaggtgcttctacttcggtttttttctacattgttaacttatgaacattgaacagttggaatagtgttgtttgcataaatgtttgaattattcattattgtgtttgattcctcgaaatgcttatttttcttcttattcactgttgaaatgtttgaatgctgtgtaaaatgtaaatgtttgaattattgtgtttgattcctctgaaagctattatgttaatttgatgtatgtttttcttaagtatcttttgtctgccttgttaactattgaaatgtttgaatgaatgctgttgtttggattatttttcttgattccttggaatgctatttcgaagttggagttcagtttagtttcctcgtttatgtaagatcatccactgttcgggtgatgaaattgatcaacattcataagctttcatggttacgtaaggtatattattgacctgtggctgtttggaaaattaattttcttaatctgagagaatttttttggtgtttctactgcgcgtttcttcttctgcattgttaattaacaaatgatatgttcgaatgtttggattattgtgtttgatgtcttcggaaaccttttttctgaacctgtagttctgttcaatttttgtgtcatgtaaggtgaagtgtagggagaaattggcgttacaaggacg

SEQ ID NO: 62543 - DNA, 925 bp, Cucumis sativus
  Intron number 5 from transcript Cucsa.119630.3 (locus Cucs a.119630) derived from phytozome v7.0 (chr-ID scaffold0099 8; pos 1523537 to 1524461 reverse strand)
tggtaattacattctatgtgggacatattccctttttttgttgcattttgagatataagagtactctgatctaataaatctagttgattatcttgttttcctcaaagaattctgcatgaaaaccaactcatcatcatcttaagtagttccttgctgttttaatttagcctactatctcttatctggtgagaaaaagataattatcaactctaatattccaattttcaatatctgcaaaactacatggtcttacttgaggtcgaagctaacttctacaaaagatacttggtaggtgaatgagaaattcagaacacaagacaggagcaatgttgtattttgacggagcttacagatcaaaagcattggataagatgactagattttattgtttgtcttgagtattccattttgggactagtcttgaatgtagttcttatttatgaaatgctaagactgaaatatggtctctcgtagacttgagtatgaaggtttttgcatgtctgtaattagattatttcattaccatcccctactccatcattgcagaaaacttgataaataactccatttatagccctggaagtgagcagttttaactgaatcctggagtgtgattgaaagatagatcatacaagtaattaattaagttagaaactaataaaatactttataaattcataattgcttagcaatattcttaacgtagattctgaaactataaaaaggttatgcactcaactcaacatgcagaaaaaagtattatttctggaaagatgccctcaacttttcattttgttttattttcagtttgtggaagaaatttcaccttcaattatgctttatcagtttacttctctctttatgtgctgatgtattttcttgataatcaggaaggttgccttacattccgtggaggattttggaa

SEQ ID NO: 62544 - DNA, 731 bp, Cucumis sativus
  Intron number 1 from transcript Cucsa.004450.2 (locus Cucs a.004450) derived from phytozome v7.0 (chr-ID scaffold0005 3; pos 21768 to 22498 reverse strand)
acctcgacggcatccacaagcgcctcaaatccgtattactatctttccatagtcgttgcatatgatgcttccattttactgatttatttggtttacagtgcttcctgcttgctccaagagctccgccggccattcaatcgccggtgttttttcttatttttttttaaaatttctgcatgttttgaggatgaattggaatccgtatactgttcccacgttgttagtaagtatgccagcgtgcgacatggttttccttcttagtcgtgacgatttagctcaatggttgaattggagactcgggtttcttgttactgtgaaaatttggggaagtgaaatgctcttggctttgaatttaatggtttcttcttaacttaaacccaaacgtcctgcctactttggtttttatttgtaatatctgggtagttcacttggtttgtgaacttagatttgagatacttcctggcgtgatgtttagttcgtcggtttgagacggggctgggttcttaagaatatcgatgcaagagtgattgaaattacaacttcttatggtgttagtgtggtacagccttgtttatcattcttcctatcccatctcatccccattttctcatcatcttggctcctcaagatgcattttgtatctatttctacttttggtttaactaacgaccaacgactctcttctaaatatgtcaggtgttaaggagtcccagtaaactattagaacaggc

SEQ ID NO: 62545 - DNA, 836 bp, Cucumis sativus
  Intron number 1 from transcript Cucsa.053440.1 (locus Cucs a.053440) derived from phytozome v7.0 (chr-ID scaffold0058 1; pos 226898 to 227733)
gttgtgttgctcatatttttgctcttcaacaacaggtgtcaatcattttgtttttctttagttatcatcacttattagctcgatcagattcattgtcgtttaattttctggtgatgaatgattaagaatatgaataaaagatctgtttttttaggctagctctgtttgagtttttaatattaaaaacctaacaatataactatttaattcatttgtgaatttcctggtttcgttatttgatttaatttatttaggccatttttcaaaagtaaaattaaagtttcataatttcaaagtgaaaaaaatgagaattaattgtgctgttctttaaatttagctaagaatttgaaatgtttttccccttcgaataagactaattaaaaccttgtagaacaagggtgaaaaaacaaatagaaacagaaaatttaaaaacaaatgatagttaattggagcctaaaagttagattaattttttataacccatacaaattttttagcttagtggcgatcgtctattgaaaaactacacaacaataattttttgttttgctgtttgttttcattgtgaaagccaaagaaaaaaagaaaaaaaaatcatattggagatgcaaaatttcacctgattaatccattaatctaagtgagaactttaaaagcatcaactttttaatctataaaacaagtcctctcttttcttttctcacgcgattcaaggttagtttgaattgtcttttaatcaaacttcgagacaaacagacgttctgaattacaagtttgaactgaaggaatttatttatttttggtttttgaaggtggcatacttgcaaacacagctg

SEQ ID NO: 62546 - DNA, 346 bp, Cucumis sativus
  Intron number 1 from transcript Cucsa.044070.1 (locus Cucs a.044070) derived from phytozome v7.0 (chr-ID scaffold0054 2; pos 610523 to 610868)
atacattcgctttttcccttgtctttccgatcctggtacctcttcaaatccttttttttcttctccctctttgaatctttctttctagactttgggaactgaaaatgggaactgagaaatgggtgtagcctatttcccccttttccccatgtttttctttcgtttggtttcactaattttctttataccttgccttatctgaattctacttgagcttgaggctttcgtcgttttctgattgttgcttcgtttcttattgtcatcattgtgttttttgtgtggattttgattgtttgggaagtgggtttcagtccggagatcttcgttgggattaaaagtagcgttg

SEQ ID NO: 62547 - DNA, 632 bp, Cucumis sativus
  Intron number 1 from transcript Cucsa.011270.1 (locus Cucs a.011270) derived from phytozome v7.0 (chr-ID scaffold0015 4; pos 550903 to 551534 reverse strand)
gctgcggtacgtgtgattactaaggaccgtagtactccttttctgctgatctatatatggttttttcaggattctttgagcatctaaggtcgaaaaagctcgtttaatccaattctttgtttaaaaggtccacgctcgtcccaaggcactttatacagtgcatgatcattgttcttatttacactagctcagcggatagaattggttcttagctctataacccaggtgttcaatgttgaagttaatgaatatgtgagccggaaaaattttatggacattctgataaatctcaatgtcgattccaaaaaccataggaactcgtaaaattctttaaactaataaatttcaattcgtctagatcaccatcattagtatttggtttatgttgtctgacagttatattatttctggaagattttgagttttattgaagaaaatattgccccctaatatttgtgtagaaacttcaaattggaaagctcccagattttcattttcaaatttcttttaacccattccagtctcaatgcaaattattcgctttgcttgaccttttggtctctgatttcctaattcaatatctgtatgttttataatatgatcaaagtctcttgcagatttctgaaatttcc

SEQ ID NO: 62548 - DNA, 977 bp, Cucumis sativus
  Intron number 1 from transcript Cucsa.105500.2 (locus Cucs a.105500) derived from phytozome v7.0 (chr-ID scaffold0092 9; pos 144953 to 145929)
cccacaatctactcgaactttaggtgattttactttattcttaatctactattttctcttcttgcttttgcttattttaattaactcaatggactcttgagtaatggggaattagaaccccaactttcttggtttagattcatgattggaggaatccgattcatgttcttgctactcctatgaattatgcaatcctatgtttagacttcgaataagcgatctaaaggaaatggggtattaatgaatgttgttgatattaattgaagaggaaatgacagtacaatgattttgtagtttcgaaccattttcttgccatggtactatttttcaaaccatgattgaacccaaactctaaagtttctttcttttccttttttctttttttaaaaaccaaactctaaagtttgattgtttaatcttttgaaaatatttaacatatagttaattgtagatctcttgtagatgaatccaaactaaagcaataagtttcggctccatctcataacaatttggttttttactttcctattttaacttataaacactactttgttattcgctttctaccgatattttcaaaaactaaaccaaaatttgaaaacgatataagaaaatgaaaggaaacaagcacaattattatattaaaaccaaaaatcgtaatagtagttttgttttagtttttcaagttcaactaagaatttagatgttttctcaagaaatgtaaaaattatagtaagaaatttacacataaatgttgaaacaaaaaactaaaatgaaatcattatcaaatggctgggattcagtgagacttgaatggaagaatgaagaacgtagtgtttttaagtttaagaaggattttaatcagcatcaactaaaggaaaggaagaaagctcgagactgacggtacaatcattttacatcagttcctttggtatttatgatgcaggttctggtatctctggttcgtcgttttcgaa

SEQ ID NO: 62549 - DNA, 447 bp, Cucumis sativus
  Intron number 1 from transcript Cucsa.077660.7 (locus Cucs a.077660) derived from phytozome v7.0 (chr-ID scaffold0079 1; pos 767577 to 768023)
acacccttgcgaagcatctcttccactgtaagttcttctaattgattaacgattaatgtccagataaggggttgtttaagctcggtttaatttattattagctcatggtattgtgctttctattttgggtttgtctctttccgagttttggcctttcagaacactgtgaagtagtagcacagtgatgtcttatcctattattagtgtttgtttatttcatttgtgtttatgttaattaaaagcattgatgatgtatgcaatcacagctgcattatgcagtcaacatcaattttttttccaagtcttttgaattttaaatgttcgttaatttttcgtggaattctctgccgatcttctttcttttaccattttttggatagttttctttaatatggcaaaaatctttttgttttcttgacaggggagaatcagacaattgagtgggct

SEQ ID NO: 62550 - DNA, 1030 bp, Cucumis sativus
  Intron number 2 from transcript Cucsa.111630.1 (locus Cucs a.111630) derived from phytozome v7.0 (chr-ID scaffold0095 3; pos 365869 to 366898)
ggacgagaccaccaccatctccttggccaattcaagtaagcacttcaactttatctagaattgttgcatcttctcttttctttctcttcgtgttaacttgaagagtcatgaagtttagttgtaagtacataaccacttaaagagaacagtgagaaaatcaaaagtaaggcaggtttgatcagtcatcattttggtgtttgatgttgaatattattgattttagaaaattctaaaaacattttaaaattgcgttttctgttgaagtgctagatgcatgttttgaaatatttattataaacgttttcttacatacatatcaatcatacatataaaattttcataataaaaaaattagagaaaaagtatagttatcacaattatttagttaaataagttctcagatagaaacttccatttgatactatttttgttttcaaaaaataaacctatagacaatactttccatctctctctttcttcctttgttatctataataaatattaccaaaatatcttcctttgcgatctatattaaatattaccaattgtttaaaaaaccaagccaaaacttgaaactaaaaaaaaagtaaacttttttcttttgaaacttagctaggaattcaaccacacaaagaggatataggcttagttttgaaaaacaaaaacaaataacgaaatagttacaaactagaccttactgattccataattctaaactcgtttttaaaaccaatcataactcaagatcatatttaaatatataaaaatcacttttaggggcttgaaaccaaacattaatatgattatataaaaatcaataatcttttttctaaaatcatatttcaatcatcactcccaaaacatacccttagattgattccactggatgcagatttcacacaagagtgggcaattaaatctttagtttcagaaaagaattttgtacccctgatattaacaattcaagtagcaaaatcttttctaagagaacaaggatattttaactaaaaagcatatgtaactatcagga

SEQ ID NO: 62551 - DNA, 727 bp, Cucumis sativus
  Intron number 1 from transcript Cucsa.102980.1 (locus Cucs a.102980) derived from phytozome v7.0 (chr-ID scaffold0092 7; pos 1883608 to 1884334 reverse strand)
gctttgaagatctctgctcgagccaagtaaaatcaactcctcttttgtctctcgttttcatttctcttcgattcaatgtttcttctgctgtcatgatcttcctgcaactcaaatgctgttgttttcttggaattcgggaaaataagattttgaatccacaaaactgctcaaagttctggaaattctatatattataacgcacattgcaactctatgattctcttttgtctaatagttatgaataagtagctaataggtagaatacaaatctttcaaaataattgtcaagtttgaagattttgacattttatgctataattacaaataatttttatttgcatacagttgattataaggaaaaataaatggtgggttccaaatatggttactatgttatatttgatgctcatgaatttggatgaactgtatcattgacttcattgttgttgagttcttggtttcaaaacctgaaagttcgtgaatagaatgatgattgagagattgagatgaaaatgtacgggtcaagtttcatgaattgagtactgtcctcgttagatgtgcattgcttttaatgactaatgacataactaaatcaggatttggtctaatcttaactgatttaagaacaaattgatgagtcctgatttaatgaatggtttctatttgttgtacttgacatcttaggctattgttagctttgctaaattggatgcaatctttttaagga

SEQ ID NO: 62552 - DNA, 876 bp, Cucumis sativus
  Intron number 3 from transcript Cucsa.096620.4 (locus Cucs a.096620) derived from phytozome v7.0 (chr-ID scaffold0091 9; pos 2167127 to 2168002 reverse strand)
gggctttatttttacttcatcacatttttcccttggtaggtgccatactgctctttctgtttcttggctactttgattctgatgactccacgtttcacttgaatttgctccattatgttcagtaagtggtatattggtcattattctcattttaggacttcttttgtaatgcaacttattgtcgtagttatttttaggaatttgtatccatttctaatccctacaattgatttcagcttcatcgaggatagtggggaattttagctcatttgggctaaactagctagatcatacaatgaaatcaaagatgtgattgaacaacaaaactaatccattgtgtgaaagatattggaatattgctgtatgttttaattaatgatgctgtatactaagttactaacatgattgggagttaaaatacgtgcttggtgggatattgctctgaattcttgcgttaaattaactgatacagaactcagatttgctagaacattgcattattggttccctagatacattggatgcaggatttagtggcccagaatcgatttgccttcaccaaaatgcctcattactcgaagctcagtttacaaggcatccctcccacagcaggagtttccagccttgcttccatcccaaagtttgtgttctcatgcttctttgaaaccctaaaggctgaatcacttttcttcaaagggattatagtccaaatttttcaagtatttgatagatattctttgtactagcttaagtcatgggtagaaacatctttttaagcttctgaaaatcatgtctcttgtacgttctgcattctaaataagttccatttcttgtaatgcagaattccccaaaggcccccattgtcgtgacaatatt

SEQ ID NO: 62553 - DNA, 1032 bp, Cucumis sativus
  Intron number 1 from transcript Cucsa.107890.2 (locus Cucs a.107890) derived from phytozome v7.0 (chr-ID scaffold0093 1; pos 153548 to 154579)
gatcctcctgagttcgaacagcttcagagtccaaggtcagtcttcttccttaatcctcccattttcacgaaccctaattttgtaatcttcctttctttctacagttttgatcgcttgttatgtacgtatctgattctatgtatgcgctttttatcgctacaaatacgcgtaggatttcattgttttaatgtttataccctagatatatctttgtctccggatgaatattgtcaattgaccggtgtttcaattggaagcgtaatgggagttgcatttccaggtcttgttgacctcttgtcgtggctactgaggaaaacgagggattgtttcggagaaattaatatttgaagccttacgacggttggtagatgatatgaccatggataattttttggtttttggggtaattctcattttgcattttgtctaatgatttagtggtgagctgtatgggaaccgactggattgattgtcagagctattcgtttgaaatgaaaagctatggatgacaatctttctagaaagtgattgtattttgattattttagaattttcttaacatttgtttattgcatatcccattatgccagtactcttgtcactgaggccttaaagagtggatcactgaaagggagcatttaaacggttcttcatatttgagtcatgtttcaagagatttttgagttaaggggaaatctcttgatgtatttgaatggaacaatttgatctgccttcttacggaaattctgttatcctattcacactttatctacaatcatcatcacttgacttgtaaataatcattttcacaaacgatttatcctaaggttcttcaacaacccggttcagcatattatttggacatttccacttatcctctagtatcaaatcaaatggtcgtgcaggcaggacctttctttctttttcatgtttgttttgaagataactcttgcttttgtttaagtgtatatttatctgtgtgtgtgtgttctatttatttagttaacaactgccttttgtcttgcaggttgc

SEQ ID NO: 62554 - DNA, 584 bp, Cucumis sativus
  Intron number 1 from transcript Cucsa.125460.4 (locus Cucs a.125460) derived from phytozome v7.0 (chr-ID scaffold0100 4; pos 196658 to 197241)
gcccaaccaaggactacatagtcaaatccctccgagtaatgtttctacattgaattttctttttctatgccgcttccaaacgtctcttcattgactcttgtcgcactgaattagtcgctccttttatttccttgctaattgcaagttggtctacaatttttctttctttcttttctcattatgattgaagtgtttctctagggttttactcaatgttttaggggaatattgtgagtgtttgtatcttatttaaaaaattgtctccattttggaatgtgacgatgagacgattctgttctgcggagtttatatatagtttgttgcggttgattggactcggaccttcggacacaccttgagacgaagcattaaaacttagcttcacaacaaattccatccaactgttaaataatttactagttaaaactcctagactcgttttgtttgcgccagtttatgaatgatcatgtcctgtagttcatttattacaatttatgttggtcaataaatggggttttttatttatcgactattgttttccgtgtttacttgatctttgatgtttttactgcagcaagttgtag

SEQ ID NO: 62555 - DNA, 834 bp, Cucumis sativus
  Intron number 1 from transcript Cucsa.079150.1 (locus Cucs a.079150) derived from phytozome v7.0 (chr-ID scaffold0079 3; pos 1762802 to 1763635)
ggtttcaagtgctttgtggaagagccctgtttcaggttggtttgtttctgattctatggattgtttgtttgtatggttgaattttccttatcatcttcttctttgtttggaattgtaattattgtgtttcttgtttctgtacccattctgattagtggttactgcatacaaactcataagataaaattgagatgtaatcttgtttattgtcttaattgattcttatcaactctttaacccttgggatattctatgttccctctctttctctctctctcttttgaacttcttctctttctacgttgaaatccatgaaaaaagagctctgattcctttgggtttactttttttttaaaaaaaaaaaaattatttcctccataaaacttcttaataagcttcatttgatggagatttattcagccacatgctcatcatgctttgaggcatgtttggcaattctatagcaggcatttgcatgataactttgttgtgtgaaccgaatttttagatttctaaaattagcaccatggagaaatttctctatgtttgagttgatttttcttcaatttaatcttcgtttctctttgttttgacattgcttcaaagaaaagataagaggttccagctttaacgtgttctatttaatattgactctgatacaattgattgacttttatgatcctttcctttgtggtacaaattcacaaggaattgattgagaatttgagttgagtgatggattgtttatttgtatttgttgtttgtcaatgatctgtgatttatagttgcatgttttgttatttttcagatcttccaacataggttggaaattct

SEQ ID NO: 62556 - DNA, 738 bp, Cucumis sativus
  Intron number 1 from transcript Cucsa.095960.2 (locus Cucs a.095960) derived from phytozome v7.0 (chr-ID scaffold0091 9; pos 1754952 to 1755689)
gttcggcctcggtgtttatcattctggtcttcaaggtttgttcttctactaattcatcgctttctctgctgtttagatctgcatttctgttgcttaatctggatttggtaattgttgaatgacgagtccagtttttatgagttatgttttctgtttggttagtgagggaaacaggggggaaatttgaatgtaattctaggtttttgctttatgcatcattgtttgttgttctcttactcttgtagaattttaattggttctgtttgggtggggagaaaatgatggaaaaatagatgaacttactaggtttttggttttacttcacttttttttcattgttctttaagtataatttgctcctgctgatttctggacctgcatttcgacattctgtttggatggtgagaaaatgatgggaaattagacgaacttctaggtttttacccttagttcacttaatttgtttgttctttaagtataatttgctctaagacaaactttccaattgttatctggatctccactgcgagggattctctgtctggctggtgagaaaatggaggaaaattggataaacttgaagggattttcattttaccttttacctttgttcttgaactataactttccttttggaaaatcttccctagtgtttgggtgttgttgagaaaattaagggaaattgaaacattttctatctgaaacactaaatgttatgggattattgtaatgcagttc

SEQ ID NO: 62557 - DNA, 729 bp, Cucumis sativus
  Intron number 2 from transcript Cucsa.107400.4 (locus Cucs a.107400) derived from phytozome v7.0 (chr-ID scaffold0093 0; pos 788776 to 789504 reverse strand)
actgcaccctaggcaaggtaatttcaatttacttcgtagagaagattgtcttaagattcaatttggaggtaataaaatgtcaggtgcgcgcatacattgatctccttcccgattgcaacactcgaattttctttaatgcagttttgggaattcgagatgttgatttgtgatttttatttatagatttgattaacgcttggatacgcttgagaaatgttatcggaacgataaagaagactatcaaattattcttatctttttggagggaggggataggggctgcaataaacatgtagtattgggaaggagagtttgttcaattagctggaagtacgggaaacaggaggaagtttgctctatgagtggacagtcgaggttgacagatgttattttagtgaaaaaggagttttttttttctatgaaaaaaaaacaaattctttaagcattccgttctgtgcttccattaatttgaaacaaatatggagcttaccttttcagctgaatatcttaagaagaatgtaatatagaaaacagttaattaagcaaacagggttaagtatggggtttactatttagtttgtgcttatcatgttagaatctcttggctgtcttttaatatggtatggctttataataaattttcttgctttctaacttcatttttacctggttaattctgcaataaattttttaatatgattactcgttgcttgttggtacacagtatca

SEQ ID NO: 62558 - DNA, 820 bp, Cucumis sativus
  Intron number 1 from transcript Cucsa.058710.1 (locus Cucs a.058710) derived from phytozome v7.0 (chr-ID scaffold0061 4; pos 828764 to 829583 reverse strand)
cttcaatttccagctgaaatttgggatttcttcaggtttttgtttcttttcgtctattgttttttttttttttttttgtttatggctattgggttttttctcctttttgcttcccctcccttttttaggggttctttcttctttccttcttttttctgcttggtgtttccattgaaaccccttttttgtgtcttttatctattttaaagtcgttgtgaattgtggtgataatataaaataatggatttggttcttggggaagaaagtttctgtttcggtttctgtatgtgtttttacccaatttagacagacagcttttgccccttttttgaaaattttgttttgtttttcaacctctctgaatcctctgtttcgtgttctgaattcttcaagattctgtttcctcttctctatttgaaagggttgatatggttatggtgttttctaatgatttgtttggtttagagagtcaattgtgtaaattatttaattaaaagtgtcattaaatactactttatttggactttcttctcactcttttgcttaatttcatgggttttaataaatggggacagcaaatctctttattaattattttatttcttttcttggtcaattgctaacctagattttgtagttttttttgaataataatttgtggggatttcttgttttctacttttcaagcctcaaagtatggattaaagcttggtgttgttgtaacagaacaagaatattttcctaatttgtgatttttagggttattttctttatcttatttattgtttcattttgacagagattctgtgtcaaagcagcc

SEQ ID NO: 62559 - DNA, 834 bp, Cucumis sativus
  Intron number 1 from transcript Cucsa.066910.1 (locus Cucs a.066910) derived from phytozome v7.0 (chr-ID scaffold0069 6; pos 1305035 to 1305868 reverse strand)
actcgacccttccgtgaaacgcaagccatttactggtattagactctatttcattggcttggctgattcttttacctctcttgtcagcttgatttcgaatggttgttagtgtaagcgtttggagaagagaattgagctgttttcttcttgatttaaaattgtgatatttgatcttggttgattctgtgaaatgtatattgttcttttggaagcctaaattttttgttggacattgctctattctttaatttctctttcgtctagtagggactataatgtggtgccatcataaatcaatgaatgaaaatgacatgtgattttggtttagttcaatggaaagtaaattactcaagttgaacaggaagaagtatgacgtggattttacttttcttattttgccttctattatggtaatagtctttatgagctaaatttggtgatcagtaggttcattgttatgaaattcaacattctgtgtgtaaatgtggaagctttttaaaataattctcaaatgttgaagacttgggaacgagacttatgtgacctaaactatgtatttagattgttaatcaaactagtgaaatcatataggagacaccatctctctcattgtgtttttatatgataagcgcatttttcctgtttttctctgtattgcatgaatcaatgctttcatgggcgtgatcaaatatgcattggaatccttggtcctggttctgtcctgtttcaatggtggtcattttcttaaaactagaaaattgtgcagttgtgcaattgtgcaattttattcctgatgagtaatgcaagtggcttaaagatttgaaatgttttcag

SEQ ID NO: 62560 - DNA, 605 bp, Cucumis sativus
  Intron number 1 from transcript Cucsa.135470.1 (locus Cucs a.135470) derived from phytozome v7.0 (chr-ID scaffold0104 4; pos 334607 to 335211 reverse strand)
gctctcaattccctctccttcttctggtgagttttcttccttccctttttttaactttcacatgaatcttacattgaaacacgctcaatcctgaagaagaatcttgtttaattattctcaatctcgatgcaatttgactttgaagttgctctctgtttctggattccctcacatctctcctctttttcgtgttttaatttaatcatctttagttatttttcaattcaggattgctttttgttttttcttctatttgtctttcaatctatggatgagaaagcattttgatctcctagctctgttttttcttttttgttgctatctgttcttttacttcattttcaacttatagtgtttggaaaattaagttgagttctggtaaaatagtggaacgaatgccattttgttacatttcgcttttacttgaaagaaatttctggattcctattgctatgtttagtttgaatttggtaagggattagaaatggtaccggatagagtttgatttgacttgacaggctcagttagggtttttctatttccggataaactcggcgctttttgcttagttaggtgatttattgtttttactttttgttgaagga

SEQ ID NO: 62561 - DNA, 603 bp, Cucumis sativus
  Intron number 1 from transcript Cucsa.053430.1 (locus Cucs a.053430) derived from phytozome v7.0 (chr-ID scaffold0058 1; pos 203195 to 203797)
cctgtacttacctatttccccctgtttttagtgtcatttctctcttgggtttcttcctacaacccttcttattagttctaccagcaagtttaggttttctgtaactctgtttttcttcttcgtatcagtttataggttactctagttatcatcttctattaactgttcttttttggagtttgcatttgcttccgcttggaatcggctctcaccgacttttgccttttgcaaaacctttgtttatgaagacgtttgtgtattttttaaatggatatggattaatttctgaaggggagttgtttcaatttgggtgttgtgcagactgcagagcattgttgtgaaattccctaattatcagtttttgatgcattttctagttaacaatgtgttttttgtttttttcggctaataagaattaattcttctcttatcgtattctgttcaacttctctcttttagtgtttgattgttaattggaacatatgtttcttagacgtccttcatcgtccttgacatattcttttaaattcattggtgtgtacctgtagttaggttatgatcgaacattcttattggtgatatgctcatacttttctgaaccag

SEQ ID NO: 62562 - DNA, 919 bp, Cucumis sativus
  Intron number 1 from transcript Cucsa.107940.1 (locus Cucs a.107940) derived from phytozome v7.0 (chr-ID scaffold0093 1; pos 194896 to 195814)
ttctttctttgaatcgatctttcttgttcttactggtacgtgaaccgatcacactcacttttcttttcttttcttttcttttcttttttttggttatttttgtttaagcgtgttgccttttgtatgtgttttcttcttctgtcgattacagatcacatgcccgagttcttgaattggttgtttcgttattttcttgctaaccaattttggtttcggttcgtttcgtttgttttagtgttttaattgatgtccccaattcatatttctttggtggtctggtagattgatgggatggaacgtagtgtgtatgtctatattgggctttttctaatagtggacgtaacttgactgttgtaatgatgtgagatttgtgtaattaattttgaatgagatggcatttagaaaatgctgacttttattcgtttcttttccgttgttcttgatttctttcgtcgagttcccagaagtggttttgttaacgttggggaaaacctattgaattctcttcgttttcttatgatatattttttttttgtatgattaattttttcttttctgggatatatctttttaataattacggagaatagttttttcccctgttataatcagtggaatgaattctttacttgagggccaacggttgaatctggcgtggtcgtatgttcatctagaaagtttttttgccctttctccattgcaaagttttttctgtgtgctagctcattcttagtggatggagagctttctttcttttctgtatgcagcacactcttacagctaagagcttgtgctttatctctgattggtgtagttgtatggccagggtcgctaggtactgctttccagcatgtaatgtattttcttatattatgcagtgctcctgcccttgaattttgggtttaaaacttgtgtgtag

SEQ ID NO: 62563 - DNA, 987 bp, Cucumis sativus
  Intron number 1 from transcript Cucsa.072790.1 (locus Cucs a.072790) derived from phytozome v7.0 (chr-ID scaffold0076 5; pos 347069 to 348055)
gaataaagaagagagttcatcaaatactccaaaaggtataaatggatggattgtcttcgtaattgtaattctaattgtaatgtaaccgttttgctttctgctgtgtccgtttcttgtcttctttggttctgcctctctttgctacggccggccggcctggtttccccaatatagtagaaacgtaaatcgctataaattctataacccaagactcattcttcctcgatttgactggccttttcttttgttttttctttccactttgttattgtattttttttataatacttcttctttctttactctcattcttttgtgagtctgtgattttgatcgagatgaacgatttgctcacggtaatttgtgcttttgtttgtgggttttctgtactttgcttttgggattgcttaaaagtggatttttcatactggcctctgttttcctgtctcatgaaaacttttcggtgttttagttgtgtgttttgaattttgtcagttattatgattttaagattctgctagtgtgcttaccttaattttagccctttgaaatggtttacaatttatttagatgcaatatagttggtttgtgccatccaatgtagttgttagtgttacggtttgtagttcctatctatcaatccaaacatggctgtattgcattcttttgtttcatgaaattgattggttttgagtttgttggttccctttggcagtcataagtttcatggtgatcttataatgaagattaacgttcacttggtttttctatccttgtgtttgatttgaaaaaaaaagcaatttatatttcaaaagtaggtaggatgaatgtttctagaattcgatctcaatgtgaaattattgatttgttactcattctatattcttgttatctccctcttagtaggaatagcttgattaattggctacccaaaaaacttttatgatgggttatcgtgttctttatcataggattcatttgttagca

SEQ ID NO: 62564 - DNA, 280 bp, Cucumis sativus
  Intron number 4 from transcript Cucsa.072790.1 (locus Cucs a.072790) derived from phytozome v7.0 (chr-ID scaffold0076 5; pos 348470 to 348749)
aaaggtatatgtttatccttgtcttatgttgagtggcacaaacattaacaaaagagaatgtaaatttatgtcctttgaattacttatctgcaagttaggttaaggtttaaccaaaccactaagcatgcctatgtaaatctttcaatccataaggctccataataagtcaatttacatcaattgtgaatactccttttcttcttgagcatttgtttcagtcttggtacctacatgtctgctttcgctaacggcacttatcatttcagctatcaaaaagcga

SEQ ID NO: 62565 - DNA, 878 bp, Cucumis sativus
  Intron number 2 from transcript Cucsa.108370.2 (locus Cucs a.108370) derived from phytozome v7.0 (chr-ID scaffold0093 1; pos 540634 to 541511 reverse strand)
cagcttttgaggtatctattaagctcttacctcttcacttcactcttgtgtatgattgatgtgagtttggttttgcccgattgccgctccccagtttcttactatgttcgtgtttagtataattgttaatatgaatttagagaagaagaatgggggctggaggaagttgtataggaaatgattgtaacttgtttcatttagaactatgtcaaaaatcacaacaacctatttcatgttttgaactatttctaactataaaatctccgatcagtatttgaacacgggacaaagccaattaagaactataactcaatacctggattggtgggtgctcttttcagtcttcttttagaatcaatgccgagggatttccattaagctcccataggctatacgtgaatctattacattggttatgtgaaggttatctgcggtgataatcgacatcagtcaaattgccgttctgttttgacattaatcactgttcttattaactgttgaaagcttatcattgaacttgaaggtatggattcggtagaatttatgagtattactgtcctttgagcgaaaattttagaatttctagcgtaagccacttataggaagaatagccttccactgtgtttctaatttctatataaagaccctatcctcttctactcacctagaaggggaattttgtgatctaataccaaattttcaatcttatcattaccttattaacatttctaagaaaacaaccataccttattaacaatggtttcttgtgacatggaataagttgtgatacgatgttagattgcagaaatgtgtttatacgatgactaatgttaaattgtttaggttgcagctattgttactcaaccaccttctagaag

SEQ ID NO: 62566 - DNA, 798 bp, Cucumis sativus
  Intron number 1 from transcript Cucsa.043860.1 (locus Cucs a.043860) derived from phytozome v7.0 (chr-ID scaffold0054 2; pos 505544 to 506341 reverse strand)
cgaggttctgacttttcattttgtaacgtagtttttagttggttttgttgattaagtatgtgtgctaaaagtttaaatattcagttacagtgtcgtctttcgatttgaaccgaacccaaaataagttttacattgaaattatttgttttgaatggcctatttcagtatctcggccatactgatgaagacaacttgtgctttgcctgtttgtgggctgatacacgcacacacgtatttgttgttttccttattaatcaacaatcaaagggaggagaaaggctagcatatgtttacttggggaataagttagggttggggtattgggggtcatatgattgaaggtagcagcgatcggaaatatttgatataatcgattaaaccaaacaatgctaactctccacatttttgcttttatgcaataactgctgatcaaactagaagatgttgtctctgccacttttattctttggcactcttcatttggccaattcattatgttttgatgaataaaacagagagattgggcgatctcatcaagtcatcattaaatgctgcattgattctctactgtgtaggccctgttgaataagaacatacatggttattctttatttgctcgatggtttggccctttttttaacattttcaaaacaggggatacttcattgataattggtggttgtctcatagttttttctcaaactaatacatgctattaattacttcggactttcatttatatctttctggattttgtaatcaggggacaggaattcaaccatcctcaccgtataaaaa

SEQ ID NO: 62567 - DNA, 970 bp, Cucumis sativus
  Intron number 1 from transcript Cucsa.056260.1 (locus Cucs a.056260) derived from phytozome v7.0 (chr-ID scaffold0060 2; pos 418827 to 419796 reverse strand)
ccgatccggctacggaggtggatcaccaattgcaggtaccttggcagttgattatacagttttaagtttgtagttcttcttgaattctgtaatttcatattggcttcttgtttagaccttggctatgttctctatctgactccatatccttgggttttggagggattttccgtgcgggattctattatgatcctcgaattcagcgaatgcttttagcctatagtctcaagtaggttttaaattgatattcctacgtttagatgattcttttgcaattcttggaccggggttttttttcccatcaacagttcttggattgtgatgattttcaattcattcatttagcgctttggttgactgtttgatggtgagtaaagtggatgtaaagaggggaaagtaatatcgtatgcttataattgaatttgaaccggctaagcaatcttagactgagtgaaatgcagatccagggaaagacatgttagtttaatgtaaatcttgtggttgcaattgcgactctttgccacattccttcttgttattaatctattgcagtagccgaattgtggtagttgacttgtaatgaacttatggatctacaaatccactatttaggaaaattattcatctgatcatgatatcttactatattttggttcactccatctgttggtaaatgaagattaggctccatccattgttattctgccaaagaattatgcgtttgagtacttactcttatcttaaatttataaatatggcttgacttttatttgtattcttctgattgtcagcatctaatttgtcttagtattagagttcttttatttgaaattttattttctcagttttgaaagtattgaagagaagttatatgaaattttctttgttgtgtgatttagatcaagtgaactgtgcttcactcaattgataggctttgatcatttgactaatgtttcctcagattgatctc

SEQ ID NO: 62568 - DNA, 679 bp, Cucumis sativus
  Intron number 1 from transcript Cucsa.105990.1 (locus Cucs a.105990) derived from phytozome v7.0 (chr-ID scaffold0092 9; pos 420244 to 420922 reverse strand)
aggacgatattgctcttctaaagacctatgtatgctcatctatccgaacttatttcttttttactttataaaccctaaattcgtgacctattttactgcctatttcctgatttgtacctcatttttatgttcttatctcctcatcggattagatccagcgacttaagtagaatctcgttgcttatgacctgtgctcttagctaatcaagtgttttgaatgaaccatgtgattagttttgatgatttctcgacccggttttactgtgggtgttctttcacctgggggaattttaaatttcaagtaaattgatgtttaggagaggatttcctcatttcacttggtgcctgggttgaaatgtctggatagtgtgggaattcatggggggtgccatctgaaggcaatacgatagtttatgcaccactgagcatcttacctacatgttcgggtcagcttgtccatatagttagggtcctctaaaactcgattttctttctatccaaggaactatgtgcagtgggtcttattacgaggcgcatttttaagagagtggaatgtcagattgttactttcagttttttaggtttatctcagagcgtagttttggtgtatcctcggttttgcttaccatcatcctcttttgcaggggttgggaccttattcaacctatatcaagaaggt

SEQ ID NO: 62569 - DNA, 693 bp, Cucumis sativus
  Intron number 1 from transcript Cucsa.106860.8 (locus Cucs a.106860) derived from phytozome v7.0 (chr-ID scaffold0093 0; pos 335393 to 336085 reverse strand)
aaggtagatggacttctctgctagatcttgatcttttgttggtatattttctaaatttctttagaagggtaaattcaagagatgatatgcttagttttgttttagaattggcttcacaaagatagtcagtttaggaatggtaagtggaaataatagtttctgagcaaatcctgtgttgtgaagtgatgcagagttttagtgtgttactcaagtagtgggatcaggatcttgataaaatcatgcttctgtttctgcttttagatcaaagtttactgtatttttgtagttatgtttctatatctggctcaagttatatcaatttgctgagaagaaagaaaaagaagaaactctcagaattacaattggttaatgtaatttatgtatagcctgtgactgggatgttcttcgctttctacttttctctagcatcggctcttaaatccttcaaagatcaaatatctgaagacccaactcgagttttttcaaattgggatttacaagttgaaaaaaatccctgtaactggtctggaattgcctgttctccagatggaggccatgttataaagctgtgagtacgtttcttttttccttttattttgctctgcattcagctataattgattgaatttaagacactgaattcggtttgatgttgcagagacatttctagggcatcactgaaaggatttctag

SEQ ID NO: 62570 - DNA, 506 bp, Cucumis sativus
  Intron number 2 from transcript Cucsa.017040.1 (locus Cucs a.017040) derived from phytozome v7.0 (chr-ID scaffold0023 3; pos 226979 to 227484 reverse strand)
ctgcttcattgatatttctcactcaaacaaaccaggttagtgagtctattgattactgcaagacgttaatgtaagaacatttctaaagatagctaagtagtcaacttcgagtagtatccgatccattgttgatctgtttggttttgtgtgcatttaacttgcataatggcatcagaatgccagcaatttagattccattgaaaagcttggatcccatcatttatttgcaaataataggttcaaaggctctaagaagcatatgatatgctgtgttatgcaattagctctctgttcataacgttacactgaatgaatatagagtttcttcgcaagatccaatggtatttgggattcattaattcatgtcataggagaggacatatacaggattacgtgacaaactttatgaatacaagcagagcttcatgtcttacactttcttgatcaggctatctcagtagatatacctcgccttgaaaacttgtgtcagcttgcaagtgcagaga

SEQ ID NO: 62571 - DNA, 918 bp, Cucumis sativus
  Intron number 2 from transcript Cucsa.118780.2 (locus Cucs a.118780) derived from phytozome v7.0 (chr-ID scaffold0099 8; pos 655054 to 655971)
cttcggtcttttctggctttgttttctgcaagattgtaagtgttgagtactggttcgtattgttgtttttttttgtttaaagtagagtaggggaatgactatctgtaatctatgatttccttcactgtcgtgtctcttcattgatgtataattcttattaaccttcacatgtagcagcatttcacctgtcgaactgcatttttgcccccggtttattacgctctttttctaaacctaatttctgctaattcttttagaagctggtaattgattcagttaccaattgttgtctcgtttcaatgttcatatatttatatatgtttattagtggtggcgtcttgtgtgaatacgtgaattttaatacatgatgctctcatatgcacgtctgttagtattttaatgataggaagagaattatttttctccttttggtattcgtgggttaccagtgccacgttttcaaattgttaatgaaattactcttttgattgcctgtgcacataaattgtttattcactataggacgagtagaaaaggcatcttaagtttatttaaataattttcaaggggagcttcagttttataaaagcgttaaccagaaaagcagaaagaagagtggttgtcaaacacattttatttatttatttttcttcgaggcatcttatccatagagctacatcgaacagactatttcttttttcaaagtagaaaatagagaaaaaaaagttaaaaatggttaccaaggaagagactagaactaggaaatggaagcattgttagatggaccctgaaggcctcaactacaggacttgtgttgtgttctgtgcacacgagtgaaaaagaagattgaatgttaaaaaccttctctgtttctttcttgaaggtttacacgttaaccggcatcattagcctccagag

SEQ ID NO: 62572 - DNA, 627 bp, Cucumis sativus
  Intron number 1 from transcript Cucsa.084780.1 (locus Cucs a.084780) derived from phytozome v7.0 (chr-ID scaffold0086 2; pos 442906 to 443532)
aatctaaggtacttaacttctgcttcttttgtttcttaatctgtattcatttttatgcctatttgctagattttgaattggggtttaatggtttcatttatggggtctcttctatttttttctttttaaacttttgctttgcttttaatggttatgattttgggttttcaagctttcttgcttgtttgctgaattttgggtaagtttttgtgttgaaaatttgagcacttagtttgacttgtgaggagtttcttttttcctatttctttggaggctctctaatttattactagactgggtttgaattatatgtgatttgttcttggttaacaatgtaactggtgagactatatttctggtatgttttgattctttcttcccatttcttccaacttctacttatgagttgtgagttttcttctgttggaaagtgaatggtggaggatttttagttgcatttgctgaaacaagtgcttggagatattatctttgttcttcagaataatcatgttcacaattgatatttacttggttttatttgattctatctctttgttttcttgctccttcactctctcttcattgtttgaatctcttgttgacgcagagggttgttccactgaatac

SEQ ID NO: 62573 - DNA, 771 bp, Cucumis sativus
  Intron number 2 from transcript Cucsa.029920.17 (locus Cuc sa.029920) derived from phytozome v7.0 (chr-ID scaffold003 99; pos 168700 to 169470 reverse strand)
ctacttcagatcaacgaagagcagcagaaatccaggtatgatatttgttcttctgttctattttgatatatgaaactaaaggtgtattgtcttgcatatatacctaatgggagttagaactagatgtgagaaattattttggaggttgttcagtgcagaaactgcagctagatttcgaaaacggataggaggtgtttgactcatggattaggtttgtgttaactgaggcttaggttgagaagtcaatcctatacttggtgtgtgactcttcttgtgtgtttgttgaccgtatggactacataatcccaatcatagaagaatgtccatacagtttgatataggttaccaaaacctggatttttacgacttattcctttgtatagtcctaacttagattatgctaactcagatctctcgactccaggtctcataaacccaatttcgtcgagatcgtgtgcgaaacatcaaattattatgtttaaagaggataaacaaatgtctttgcctttactaaaacgtatggcttgcttttgtttgagctgatatgtttgtatctctgtctccgtatcttcaactttttcgatctagaaaacgttcaatcacgataggcaaggtggtcctcatttttccctggcagcttatcctatgcaacctgatttgtattcgattcatcgtcctcatgaagcaaaactattttcagttcaaaatcaaggtatatctgtttctttaggcaatccatccttgaagaacccttttgctcttcctggtcag

SEQ ID NO: 62574 - DNA, 704 bp, Cucumis sativus
  Intron number 3 from transcript Cucsa.007250.1 (locus Cucs a.007250) derived from phytozome v7.0 (chr-ID scaffold0008 9; pos 116273 to 116976 reverse strand)
tttatccacagctaggcttgaagaattcgccgcaggtttgtgatacgaaccatttcatttcacggtataagatgacacagaaacccaaaatctacctacctctcaaactcctcactttctccatctaacaacatttcaattcagaatgaacatagtttccttctgacaaatctgtcactcactaataaactaatttacctgtattgataaccttgttttctaacagtttgattgtgttcttattgaaatggttttgcttctatagttggttataaaattactttgcaaaatcatgtttattactttagttgaaagtattagtgagtttcagtttgattctttcttagcttttacattaaaatgacgttcaatatgttttttttctttgtttgggtgttcaaactgagtgtatctggaatatgattgtttgttgaggaaatgtaatgaaaggccacaggctggaagtcactaactagccttccgttgtcttggtggtgttaagtttgcatcttaactcctttcagaaattcagggtctctggggcaatagtttggatatttatgttcataaatatattgtgtatatacataagaacatattaattttttaggtaacaactaacaagctattctggaaaaagcttatgattattggaattgcctgaactccttataattatagctttcaaaccttgtttcaggttt

SEQ ID NO: 62575 - DNA, 521 bp, Cucumis sativus
  Intron number 2 from transcript Cucsa.044770.1 (locus Cucs a.044770) derived from phytozome v7.0 (chr-ID scaffold0054 2; pos 965292 to 965812)
gaaagtaggtacatattctaaaactaaaacccacaccttcaatttgttttctttttctaattgacaccaaattcttttagtgcttaaagagtaacccacttgtgcctttaatttataactattttcatattatcctactttgaaacatgagttcatgtagcacacaataaatgaaaaacctgccaagaattcgaattcgtcttactacttaagtatatggacaaattttccttttaccacatgcaaaaagtcatattttgatatatatgggtagatagtagtagtttcatttttaggctatattatgaaattgacgatgattttttctcggtctcttattattgttttttactatcatttatcaatctaattttctaaggttggtttgattttatgaacggatgtttttttttttgtaaatttaattattaacaaatatagttacaaaacaaaacctaaatgatccatcgttgatgacaatggtaggttggaacaaaccgctaataaaaattaaagaagga

SEQ ID NO: 62576 - DNA, 891 bp, Cucumis sativus
  Intron number 1 from transcript Cucsa.062530.1 (locus Cucs a.062530) derived from phytozome v7.0 (chr-ID scaffold0065 7; pos 2890 to 3780)
gagcttgcgttgattgaccccaaacgtgccaaaaggtatattttcttcagactcctttcaatttttgcttgacatgtaaagaaactgatcacttgtttacttttcctttcgtattcttctatgatatatgcataagagattctgcacgctgctatgtttgttcattttctagtctgaatcatctttgctcttcattttatttgtgtaatgcaacttactttcattgtttatggtatcaggcatgtaagtgtttcttgtcaatgtttgagaacagataaggttgcttagaaactactattactagtttcgtggtttcttcattgtggttatttcttcaccattccgtgtgtgtatgtgacattactacgatgtttgatttaaacaaatgatagactctgggggcctccccttgttggcattgaatcacgttattttaaacaaaactttgcttatattaggatgagtaggtatgattcttttcggttgggcattgtatactctttgtactgtattatgcatttccttgtagtttcacttttaatgaattaacgtagataatcaaatattcaaagaaaacaaaacagccccttctattatcacagttcagaaaatatcaagaccttgatgtttttctgcttgagaaaaatggaacacaatcttgtgtcaagcagtgactcagcttagaaaatctactgtatttgattatggactatgtttctctgctctcttatcttaagggcctgggttttgttcttcagcatgcttcctctccatgctaaagacgtttcctccaatcttttcatgtttgagactgaaaagagtttcatatctgttttccttgtcttttagttattgtgtttgtaattttctctgttgtccaatgcataggat

SEQ ID NO: 62577 - DNA, 629 bp, Cucumis sativus
  Intron number 1 from transcript Cucsa.108710.1 (locus Cucs a.108710) derived from phytozome v7.0 (chr-ID scaffold0093 1; pos 969371 to 969999 reverse strand)
gggtttcttctgatttttatcttgatcttcaagtatgaatctccctcatgtttctcttattttccattttcttgctgagattatagattaagaacactttattctcttcttctcctatcaactgttcgtttgttttctggttttgatctctatatttttgttctgcctttataagaagcaacatcatgaactgattagctactttgttttttcatttgtgattgatttgcacccctttcttcccatttttggttttcccccctctcttcccctttttggttcttaacttgtaaattttgccatcatgatctttatagtttacctcatattcttgagattggaattttatgaactctctaccttcaccctttttcagcaaactgtttgtatccattttctttaagttacgttgatatcttattccaatttcttcaaaaacaaaaccagtcaaaacttgtaaacaaggtgttgataagatgaaagatgaactaaattcatagagatcgtttcattttggtagtcttgagatgtgatagtttcttgagtaaggctggaaaaataatgctgatatgaatcttgttgaacatttggcaggaggcaattggggtttatattggtagctaattttg

SEQ ID NO: 62578 - DNA, 887 bp, Cucumis sativus
  Intron number 1 from transcript Cucsa.090530.1 (locus Cucs a.090530) derived from phytozome v7.0 (chr-ID scaffold0089 4; pos 1764795 to 1765681 reverse strand)
ttcagaaactactgcccagaacaacgttcaagcaggtgcgtttttgtgcatctatatattttttttctttaccccatttgcaatgagttatctattgttgctttgtaagaaactagtttgttatgttgattgttttcaaaattatccattttttttattgagttgaagtgtttgtgattcttgaattgagcagacgtgcttcttctttccagcaagagatttcttttcaatatgattgtaaaaattctttcagataacagtgttggttggaattgaaatcttttagttgcagaatttgttgcaaatatttaggccgaactctctccccaatcaaagattgtggaatttggagagtttcgatgattattcttgtggggtccttttgaagaagctgtcaaggacatctcaagagcctcctccaggctcaacaatcggttgttcaagtggaaggaaagcttcaaagaggatcaaatccttccttctgttggactttaagagctgctctttttttggtcaaaatcttatagaaaagcctgaaattgttgtttgatgtggtccaaagtcttttgggagatttggtggaatgaattcttagaatttagaaagataagttaagagaagatggtgtattttatttagattagttttatgattctagcgaattggagttcttttcctgatctccttggctcttggggaatcttcttcttctttttttattattgtttatttttgtatgtgttatgtttttaagctttttgtgataaaaatgcctccccatttgaatacgatccctttacaagtcttgaaaaaaagcacaacgtgttgatgttgttgtattttggtttgcaggttgttgctttccggggatattgtactgataagat

SEQ ID NO: 62579 - DNA, 783 bp, Cucumis sativus
  Intron number 1 from transcript Cucsa.005290.9 (locus Cucs a.005290) derived from phytozome v7.0 (chr-ID scaffold0005 5; pos 372920 to 373702 reverse strand)
ctcgtcgtctacccataggtacttctttatctcaacctcaattccatccttctttcaagattagcttctcactgcttcttttgacgagttttaagataaacacagatctccttttgacgcggattgtattgttgttcccgttgttcttagcattttcttcactctggatatcctgttcccagcttaccacatgcagatagattgcttttataccaatcgcattatctttctttcttatacttcttcgtctatcaccatatttttcgatattttttcttgtctcttcgtcttcctgtttaagactgctagtttttctgttggggtgtttttttccctctcttttatttgagtgtttatctaagggttttacattgttcatgtgtagtttggaaattagttttattgtcttgtagaagactatcttattgaaacggggaagcgtccccaccagtgcaacaagtgttttaactatgttatttgagttctaaaactaaattatgggggtgaggatggggttcgagggtgttttggcattgttattcctatcgtgtctcgtgctttctacagctaccttttattttaagccttcttgcgggaaggtagccattgcattcagctcactttccatcttggcttctttcattttccgaacttcacccatgtgctttatatcataactttgtttccctattctttatggtttattttcatataatgcagcattatttttattttatttcatttgcagagttttcagttttagtaaaattcgggtttttaccc

SEQ ID NO: 62580 - DNA, 563 bp, Cucumis sativus
  Intron number 1 from transcript Cucsa.095550.3 (locus Cucs a.095550) derived from phytozome v7.0 (chr-ID scaffold0091 9; pos 1412303 to 1412865)
attgtcctggtactgaaattcaaattatgaatcctttgtttctaattttcggtaacggtagtagaaattgattctcttgaactcgcgtttttctctgttggttttgaaatttacttgtcgggagtcgttgattttggtagcggattcagtggtaaaggagaaatggtctacttctaattagattctggaactttatgagtgtagtttgttttgattttaataaaacggaactaaattagattagtgattgtagttcatgattcgttgaaggactaagctattatctgtaatgggttgctcccatttctttgagatctttgtatttggattcctctgtgatatttcatgggcatttttaatgcttgttcgtttctgaacaacgcaaacgcgagatgatatttattctattttgggtttatattatccaaacgtacctgttctctttacttcagcaagcataaggttaaacaaactttcctgtttttgatttatattttaatatgaataacaagaggaatgagaaatacttctcttcacactcgatatatcacattctctatcag

SEQ ID NO: 62581 - DNA, 562 bp, Cucumis sativus
  Intron number 1 from transcript Cucsa.012570.1 (locus Cucs a.012570) derived from phytozome v7.0 (chr-ID scaffold0016 4; pos 159521 to 160082 reverse strand)
tgctggatctgttatactatttaaataccatcttggtgagaatactactttttaattttctcttaatatatatatatatatattcttctctcctagttaatacatttatattccatcctattctccatttcatttaggtttccttggggacaaaattcttaaaatataactaattttggctacgtaatttattgacatgagtttgctcaagggttaagaaggaatgagatatcaatctatataactaactacctaagacttaatatctcaagattaaggggggaaattttgaaaagggtgccaaaaacagactccaaattgttgtggtcaaaatatattgacatatctattattttactacctccttccactctttaaaaaaagaaagatagggttactgtaaaaaaaatctcattcttaaatagtcgaattttacatctaatattgaacttaaagacattcaattttaagcctatcagattcttttatatatatccgtgtgtgagttttttaatttttaatttaacgatcaaacaggagctgatcaagttgtttcagaaaa

SEQ ID NO: 62582 - DNA, 766 bp, Cucumis sativus
  Intron number 1 from transcript Cucsa.048260.3 (locus Cucs a.048260) derived from phytozome v7.0 (chr-ID scaffold0054 2; pos 3094496 to 3095261)
catcatcggttttcttcaatcatcgatctcactgggtatttatcattttctactttaatcatttcttattgactttattcttcaatcattgggaataatctctcataattttcgtttccatttcccgttttctttctgggttttttttttttttcgaattttgttgatcgtatagatgttgattgagcgtattttctgattatggattccttatatataggggccttcttcctgttagcgattcattgttattgtaaacttttgagctgatttggatgtatcgaccacatttaatgttttgaatgttgagaggatataattttctggggcttttcccatcttgtgaattctgtttccatttcgcccgatggaagagtcccaaagttttgcttctattagagctggaggaaacaggaaaaaaaaaaaagataaataaatctcaggttaattttggttgctaatttttctcgtttttggaattattgcatctgaggttttggtaaagaaaaaactcttccaatttcatttttcttggactcagtcgtttttggcatgtaatcctcgagatgaagaatttgggtgtccttttgctgctgatgccattatttaactttattctactattgttatttgttcattataagcgttagtgtgaatttatatctatgctgattcagagtataaaggggtctttttagaattgtgtgtgtttgtttgttgggttgagttattcaagctgcttttgtcgaaacataggatttgttgg

SEQ ID NO: 62583 - DNA, 734 bp, Cucumis sativus
  Intron number 1 from transcript Cucsa.132570.2 (locus Cucs a.132570) derived from phytozome v7.0 (chr-ID scaffold0103 7; pos 477738 to 478471)
ctccagaatttcacgcccttctggttttcattgaagtactgttataaacaatacaacaaatagatccttttgttttttgtgttttttttcttctcttttttgggggtgtgggatgggttggtgttggtgttggtttgaatattttgtttttgtctaaaattttcatggcattcttcacaatttaactagtttttccttcttgaaggattcatgttcgtgtctaatgttttgtttttgtctgcaattttcatgtcactattaaccgatctaactattcttatcttcttaaaggtgcatgtttaatgttgtttgtcccgtgaaattagtaagctagctcgacactcacagatactcaaagaaaagtccatgtttgtgtctactattttgttcttgccatttttcctggctgtattgactgatatagctggttggtccatgtttgtgcgattattgggactgaaaagcacacactcacaaaatgcgtcaatcctcatggtgtaatctagagctattttgtgttgtttctggttctgggtgttggataatttgtgaagttctaggacaagtttgatggatagttaacaagaagtatgggtatattagtgagagtggtggatttgaatggtgttagttttagttttcctgctgtttagtgaaacataaagctccttttggggattccagagaacaatttagatcggtttgttcctgttttatttttcagcatagatttt

SEQ ID NO: 62584 - DNA, 630 bp, Cucumis sativus
  Intron number 5 from transcript Cucsa.033870.1 (locus Cucs a.033870) derived from phytozome v7.0 (chr-ID scaffold0043 8; pos 420983 to 421612 reverse strand)
cggtgcgtgcttttatttgatactctcttttttgttgacactactacatgtctaacaagttactagataaccaaatgttttagaagatttggttgtcatttggacttcctagttttttggatgattttgaatcttaagtttatagaaagctaaaagcctaaaaatgatttttgaaaattggtagatgttaggtaccacaccttttgtatcctccattcatttgaatggaatactagttagtagatgttggagctacatcttgtatttatttatttattttacaaataactaaactttcattaagaaaaagtgaaagaatttaaaggcatacaaaagacggaaaaaattcacaaaaaaaggccccccagttggaggttttagttgcaacacttttggagaaagctctttgtattttccaatatttgaatgaaatatgttaatatatggatgatattgcttttttttcgttttatcttttcccatcgtagatgcatattaaaagtgtttaattttcacaattttatgtgtacgtttatgtacaaagaaggcaatttctcgtataagcatttacaaagttgtatgttttctctcttaggctgctgaagagacacgattgagagaagagtttga

SEQ ID NO: 62585 - DNA, 142 bp, Cucumis sativus
  Intron number 1 from transcript Cucsa.105320.1 (locus Cucs a.105320) derived from phytozome v7.0 (chr-ID scaffold0092 9; pos 57180 to 57321 reverse strand)
gcgcttggtataaatttcttttcttctttttcactaattaaatctgtttttgttttttgtttgatttatatctgatggattttttttttaatctgacgtttttttaggctttttggttacggcattggaattcatctcttgc

SEQ ID NO: 62586 - DNA, 977 bp, Cucumis sativus
  Intron number 1 from transcript Cucsa.094980.2 (locus Cucs a.094980) derived from phytozome v7.0 (chr-ID scaffold0091 9; pos 1000713 to 1001689)
tagacacctccccggaatccgttcgacgtgctcgggtgagtcacgttcttcttcccttctatctatgttgttaacaacagactggtctgttgttaattagttttgagatgcatgttatctaatataccataccagcgtaaacgggtatttgatctaataaaaaagaaattgttatctaccaaaagagtcgccatatcaggggcaagttaagaagtacacattggaaaaatcaacgaaaatcttgtcttttattgccaattggtttttgatatggaaccaacttgttattaaaaattctcaggtttatgcgtcatagattttaatggacattttactgttggacaagtatagggtggtgggagcgaggaggaattgacatatcttagttacaattacaactaagtgagaactagcacaatgcttttagaggaaattgtaaagcaccatcatgctgtgttattatggaaggctagatagaagctcatcagcctataaaaattggcttcttatctcaaaaaatggtgtaccgaacctgaggagaatagctctacataagggatttgagtgatacaattcattttatgaaaaataatataacaaacctaagatgtgtgacaaaataatatatgcaagaaattactaatatacttactttgctattacaaacacaaggaaatattaaaggaatggtaggataagagaagtgctgcattccataaatcattgaagtttgttcttcgtagattgagttgccaagatccagcagtgatcgaaaatgcagcattatagttaaaaaacttttgtagtgatattgggcatgtttaattaggaacttgctagaacgaattgagcatttcccatgaaaagtttatgcttagcctgagtttctattactttcgtataactcttgtaatctaatacttggtttctgcaaagaagtagagatctgctgattggaaggcagcgagggaatacct

SEQ ID NO: 62587 - DNA, 934 bp, Cucumis sativus
  Intron number 1 from transcript Cucsa.075520.1 (locus Cucs a.075520) derived from phytozome v7.0 (chr-ID scaffold0078 9; pos 186364 to 187297 reverse strand)
atcgattcgtcttattagtgaagaaattgatcctggtttgtgttcttcaatcattgtgaatcaactatattcatctttctctaattgattttctctgccttttaggattttttctattttgaacaatttaaaataaaaacgaacctgttgtgcctaacattgtgttcatcataactggtttatttcatgatcacagcctatattgtgtgtttaatgaaactcataccttcattattattattattaccttttcttttaggaaacttcattaatatatgttttgatccataatatagtgttagaaaaatatatccttcgaggaagattcaaaaatattttgatccacaatacgtgagtttttttttttttgtaatttttgttttctgttttttcggtatttaatttcttttgcatatatttgaggctaatcgcattttagttcgtagtctataattagaatttagtcaaacaattgtttataaaatgttatcaaattgtaagaactaaattatagtctccaagattctcaaacattaaattataactctccctaaaattttaggatccaattgacaatttaaagtcatatacataaaatataatattttgatttaatactgtacagaaaaaaaaaagaattgatgaacatggccaaaagttcactttttttttctttttaaatataattttatttcaagcaaatgtaggagcaaagcaaaacagatgaaaagaaaacaaacttttgatgaataaagcaaaagtaggagcaagaaaataatataaaaactatttgaactgttttcaatttttgggtccatttttgtatcctcaaggagcttctttgaacttcttccgttcaatcttccccttttctgattaattttttttttctcttacagaaaccaattcaggaagaagtattgaatcttgtgtg

SEQ ID NO: 62588 - DNA, 688 bp, Cucumis sativus
  Intron number 2 from transcript Cucsa.134600.2 (locus Cucs a.134600) derived from phytozome v7.0 (chr-ID scaffold0104 3; pos 230551 to 231238 reverse strand)
gctcgcctagaacaagagtatgctctctttctatttctgactctgccatgcgctagacatatcatttgaataaatttcttgtgcatcagctgttgattttctccgtcaatatactgagtgatattaggacaagcagtgatttgtagaaaggccatatttgtccatgcatgagtgttcttgcatgttctgaaattaccaatttaacactctagaaacgttggcttcatgtgggaaatgggaacttgagatatatacatactactgtctactagtgaattttctagttagcaaaagtaggtttcaatcagcagtgcattgtttaaaaaaccaaatctggggtgtggattgagacttccaagcttaagggaaatgtgcttctttaccttaatatcaggatcttaatgttgtttggagaaggaaatcaacatgacggagcagttcagtaactgagtttcaaatgtttctagagacatattacattctctaacaagcacaaaactcatctgggtttttagttgcatatcgattaccaaagcttttaaacattatgagccggtgtttaattttatgtcttttcattcaattttcttctgtttttgccccgcatttttatctttctgtgcatagatttgtcccaatattctgattatcttccatctactttgctaggcgcttgtccaagcttgaa

SEQ ID NO: 62589 - DNA, 1034 bp, Cucumis sativus
  Intron number 1 from transcript Cucsa.134600.2 (locus Cucs a.134600) derived from phytozome v7.0 (chr-ID scaffold0104 3; pos 231447 to 232480 reverse strand)
gttagtttcaaactttcagtttctctctgtcactggtatgtatttcatttactattgtttctattccatattttcttcaagtaaacgaaatgaaaacaagtcaacctaaacctcttccttcgctcacttccgcattctcaatcttctgccgttgcagctcccaaatccgaccaattttggatggggttctaatttttttttaatcaaaacaagatttcaaatcattttggtcttattcgatattgaactatttctaaaatagggtccctcaaggattcgaagatgaatttgagggattcggcattgtgatgtgaattactgctcagtgaattttgcttcttgactaagctttgcacttgtgaaaacctgcatatacatctaatttacgttctattcttgttatagtgataattatcgcatgtcaggtttatttcttatttctaggattatctctagtaagaacagatttgtgggcttgaagcagtcattttaatttttttgcaaattcttattggtaatgggaatactttggcttcaattcttgttctattctcgtaagcttcttacaattaccaactattaattatcatactgtgtgtagagcaattgagaatgaccggttttgatatggatgcactctcaaggagtgtgaagtgtttggtttatgagcttttaagtttcattgtcgatcgagtccaattttcatatgattcttcattgaattgtttcatatttctggatactttatacttacaggaaattattattgcaggtgagactttctatttgaaggttgaacaaaaggctcatttacattctttctccttgaaaatcgtttgtttgttattaaaaaaaaaaaagctcattcacattcttggttatctttatctgatgaagtagtttctgtaaatttggtgttggaaagtattaattcatcagctgaagcttctaatgaacgacatgtttttgcattattttctttgaaattaaaatcctcaggtgcttctttgttgatatacgtagggaaagccaga

SEQ ID NO: 62590 - DNA, 923 bp, Cucumis sativus
  Intron number 2 from transcript Cucsa.004520.1 (locus Cucs a.004520) derived from phytozome v7.0 (chr-ID scaffold0005 3; pos 82095 to 83017)
ttttgtcacttgctcaggttagagttgttacatggttttgttttttgttttttttttatttgttatgagttatgataatgagggagtttcttaaaacgagttaaaaggatgtgttttggtctttcaatgctgccatggtgctagtggccatgtataatgtatttttatttatttatttatttatttttttgtgttgtacaaggagaatcttctttttatttattggggttggaaagtttttggatgcagattttgatacaggggtgaactttaacgaaaatgtgtttttggtaaggtcattaaaaatggtttctggaaactttattctcgtagaaacggatacaggtttcctttttcttctatattaaataaataatctctgcatttctccgttttttccttttgtctcatgtttcttctgcttttgagcaatagttgagtcccctgtttgtgttttttctttcgttttttagtttttgaaaattatgtttctctacagtggttttcatgtttcctacataaaagagttgaattcttaataaaattcataaaagaaaaacataagaactactcttttttttttctttttaattttcaaaacttgtccttgttttttacaatatttgtaaaaggtagataacgaagtgttgatagctagaggtggacggaatacttataggcttaatttttaaaaaccaaatgtttaccaaacaagactttagtttagttatccatcaagctggaataaaaagctttgaactgaactattacactgttatggtctttgaacccaaattaacggttcttacaggtgcaatcttcaagttctagctgcttttatgagtttatctggtacttaaagttcctcattattataacatgctgcagggagtggtctattggcaacctccacaacaggcatt

SEQ ID NO: 62591 - DNA, 567 bp, Cucumis sativus
  Intron number 1 from transcript Cucsa.109320.1 (locus Cucs a.109320) derived from phytozome v7.0 (chr-ID scaffold0093 4; pos 254162 to 254728)
tccctccgacaaccacaaccgtcgcggatttcagggtaattttaatcttaaactatgtttactctcagtcactttttaatttgtttattcaactatgaacttaaaatattcaattcttgtctctgcatatgctaagaaagtacgctctgcttgatttcttctgctgattagttctgcatgcaggttatgagtagctttatgttgattgtttcttatatttcttcttcttcttcttcttcttcttctttttatgtggtttggtaaaaacttctgattgatggttttttgttgtgaattggtttttcttaatatggctttgtaaaaatttagctgtacattaagtaactgagaatctatggttttgacttttgttttaattttaacgtttcactgtcattggtggaaagcttgtgaagaagtatggaattgagaaccctaagaataggccatcttgggttgagttttttgtttttgtttttgttttggacattcagttggactttgattaattggtgactgaaaattgtgttaggtgacaacagtacttgagttcgtcacggtggaatc

SEQ ID NO: 62592 - DNA, 750 bp, Cucumis sativus
  Intron number 2 from transcript Cucsa.122000.1 (locus Cucs a.122000) derived from phytozome v7.0 (chr-ID scaffold0099 9; pos 359070 to 359819 reverse strand)
ttggaacgtggcagattttcaggaggcaagagaaggtatttccatttactgttagattttatactgtgcttgtttgaattatctgatttcagtttggtttatcaatttctttgtctcgcccctaacgaattaagctgtaattgatctaattcaagtatgcctgaacactttctagtgttcaaaactaaagatgcctcccctccctctttcgagcaatcggctctggaaatagggatatacctttcattactagtttttatcattgatccagttgaaatgagtaaattatctccatttgaaagaacgcacatctccaaaagaatgtaggtcttcaagaagtttcttgacgcttctgtgctctctatatactattctagatggttgatcaagtttagtcgcttggatcatattatagatgggtgatggatttctaacttttataattgaggcacgaattttttcatgacttagagaatatggcaactggtaaatgcagatactctatttaattaaacatatgcatgttagggtgttggaactttttcatcaatttaatctcaggcttcttaggaggccaaaagtaattccggttgttaagtgtcaaaaaatttgcttccttttcacattcgtcaaagctgaaaaacattcttttgaacatcaaattatttaagtaacattgcagggagctgatttgcacacatttatcattcaagtacttatcgtctttgacattatatcttgcagatagaa

SEQ ID NO: 62593 - DNA, 594 bp, Cucumis sativus
  Intron number 3 from transcript Cucsa.046070.1 (locus Cucs a.046070) derived from phytozome v7.0 (chr-ID scaffold0054 2; pos 1684341 to 1684934)
gcgggtatgcaaatgctctatcatacattgccttacactcttccctttcaaaagaaaactgaatggaaatattacaatcccgtgttgtttcaatgctctgtcttgacatgtatataacaattgatgaaagaaatatttattttgaagttgtttttgttggagagttgatataatatcaaatctaccctagtctatcggtttagacttttgtgtcaacaggtgatttaacatggcatatcatagcggaacgtccaattatgtctcatctattcctcaactaatattgatttttactattaagcctacgaacaagcttttatgtgtgaatgatttaatagtttttactttttcttttttatcaaatggacctttcctctattggtattgattctggatagagatttctgtctcatagctaataagtaaatacatggttcttctacgaataaatgaatctcctataatgttaggttgttcgagttttgtaacttttttgtgtctgtttgttctgttttcacccctttattaacttgttgcttcaactttcactctaatcaaggaaccagggcgagctgaggcagatttcggtcgctt

SEQ ID NO: 62594 - DNA, 696 bp, Cucumis sativus
  Intron number 3 from transcript Cucsa.081230.3 (locus Cucs a.081230) derived from phytozome v7.0 (chr-ID scaffold0081 7; pos 69747 to 70442 reverse strand)
ggagattcatatatagtcctcaaggcaagtggttttggtttggttttttactgtttgctttgacaaaatttgtcccgaaactactcattttattttaattcgtactcttattcaaatatattttaataggtatccttaataggcagatcattttttatgataaataaggcagaacactatcattttgcactagatgcagtatatgtagatgtgcttcctttatggaaataccaaactgttaacttctcatatcttcttttggtctttagttttacaagtagttctcacgtgacctgtctcattgcatctaattcaataaagtttatatactaaaaggatgaaggaaagagactgaaggtgcttattaagaaaccatagcaagagatgggatcttgttgcattattggctttattaattcattgtgggcttttaccggacttggaatttgagtatttaaacctatatggttatcctatcttcattctgtttcttctttaaaacatattatcccgctgtgttctatgttataaggaattgcaatcagtttgatgaagcaactgcaacctgctattacagcagcatgccagcattaaaagacaaggggaaaagaagccccccttttgttcttgatacctccattgatcctgtattttattccttgcagaccacatccttaaaaagtggtgctttgcggc

SEQ ID NO: 62595 - DNA, 715 bp, Cucumis sativus
  Intron number 1 from transcript Cucsa.112210.1 (locus Cucs a.112210) derived from phytozome v7.0 (chr-ID scaffold0095 3; pos 891194 to 891908 reverse strand)
tgcaccgttgaaaagctatagaattactgttagatacgtttgctcattactcctctgttctttggttttttcttgcaaataatataatttggtgttttctttgggtttttcatgttatgataaattcagcgactcagaacgcacaaaaattaaagaattggcttcactcaaggcatctactaagaatgatgaggtttacactcatggtaatggaccactagtcatcatttacatttttgtcaattagttaaatggttttaaaatccttgagcttcttaaattttcacatttatcatcttctagtcataccttcaaattatatttacgttcttaaactttgaataaaagtttattttggttcttcttaccatccaaataattcatttcttatgtcattagaattttgtaatgcatttaataaaaatcttatgtgtgtaatctatataaattggatttggtacatagttcgaagatagatagcctatgatttacattgaatgcaatattaaaaaaattcattggcgaacgtcaaataaatttttttggaagttgaaagaccaaaagcaaacttttagcctgaggagaaaaacaaaataagtgtcgattgatttaaacttaaatatgttatataatgttccagtgatagttactgaattttatttgaattttcatgtgatgccagggatgcctctaggaacctttgataaacatacag

SEQ ID NO: 62596 - DNA, 977 bp, Cucumis sativus
  Intron number 3 from transcript Cucsa.096070.3 (locus Cucs a.096070) derived from phytozome v7.0 (chr-ID scaffold0091 9; pos 1809422 to 1810398)
ttacttgggaattctctgagacgaacaaaaaaaaggttggtgtttttaatgactctagaaattttaggatttctggtgtttttagtctgagacgagaatgttttaacctttattgatttcggaatttgggaaatctggatgcctttcagatcgatattcgtcggcatttggcttgtcttatgacaatttatttttcaaaacaaatgattgttctgttaatttgacccaacatctggaaaggacggatagacgacttgctacaatttgttgcttatacatagccatgtcttgcttcaaacctatcaaattatgggacagcaactcatctaaataaaagaggaaatgagtactgtaagtattagaccaatgtatacgactagaatgatgcaatggataccaccacgcatctttctgtttttatgatggttagagtgtagcttttgggaattaaccgccaatatacatgatgcccgcaaaataattgatagatagtcttgaagaagccttttccccccatttttacatgaaatcgcaatatcctagactatcattgttaggtcaatatttggtaactacattgtatgcatcacattttgtgctttcagaaaccttattatcacagtatatgtgatgaggatttaagatgctctttgtcattttgtagtgggtggaagcctaattatctcttcttctttttttttctccgtagaggtacattgtttggtgggcttaatatcattacgatattcccatacttggttttacaatcattcatacttatgtttgcttaatatttattattattattattttaaaaaaaagttggctcaacattgttgtagcaaatagggatatatgtttgtttcttgtaatttcatcttgtcgacatcaatcaaatatttcttataaaaaaagggtttagttgatcttatccgtgtgcagattgcagagatattatcccactatccctccaacta

SEQ ID NO: 62597 - DNA, 302 bp, Cucumis sativus
  Intron number 2 from transcript Cucsa.101230.3 (locus Cucs a.101230) derived from phytozome v7.0 (chr-ID scaffold0092 7; pos 479582 to 479883 reverse strand)
cctgtcacaacatttctcttcgctgttttattgaggtataattctctttccatctcaaaattcatgtatagtcttctaatatgcatctaattttatacattcattttatagaaagtgacaatttaagacgtataaagttaatctatgacgtgattgcataaaaagaaaataaaaagaaaaatgttgaaaacaataaagttgagaaaagagaggtaatgttgtttgtttttcacatggaaaacttgaatttatacatgaaagtgatcacttactcattttgtttctctttaatgatgtatagg

SEQ ID NO: 62598 - DNA, 436 bp, Cucumis sativus
  Intron number 1 from transcript Cucsa.107760.1 (locus Cucs a.107760) derived from phytozome v7.0 (chr-ID scaffold0093 1; pos 62239 to 62674 reverse strand)
catcatcactctttcatgtactcctctccccttctctttacctcttcttttgattaagtgttttttttatagcgtgttttatgcttttaaatgcaattttcatttcatcatataattaaaatcgttttaaatcataaaaaatatgtttcataatgattttaaccgatttagaatcattctcattcacgcctatctctatttcatttcatatttatccattgattgaatgtaaaagataatttacaaaatttacctcgaacgtttgttgaaagagttttatatatttagattcattaacattagctttggttcattttaaataacacaaacgaacatgaatcttacaaaatccaccttagattatcaattttaaaattgaaaactaagcaacaacattttatttatttttgtttggtatttagttacttggtggaaa

SEQ ID NO: 62599 - DNA, 634 bp, Cucumis sativus
  Intron number 4 from transcript Cucsa.133450.1 (locus Cucs a.133450) derived from phytozome v7.0 (chr-ID scaffold0103 7; pos 1152374 to 1153007)
ctgatcattgtgtgggtatgatttctgatctttagctccatattctttagaaagctctatttgctccggggcttgttcggcgtacaatttggatttgtgtaacttaagattgtgaagccaaaccatttcttccatcctctcttgaaactctattcatttcaggggttgtctggcttacaggttggatttgtatagcctgagtgtgtgaagccaagttatgtgggattgcttatctcaaactacaggtttgcgaatcccacgaactacttaaattcgtgcttcgaaaccacctctcggcctatacggttggtttcttctacatcagtaatggaaaagaagaaatgaattcatgaaaggggatgaaaagtaaacattggttgcataaactcaactttgtttctttaatctataccttaacataattcaaagactttacaaatctagattctacaaattctagcttattacaaccgcgagcctaatatcccttgctcatgctattggtgattttattattgttttttttttggatggcaattgatatttctgatctgagatgtttcttttggaaagagcgaaagttgtaagagtttttcgtaatcagtgttataaattcacagggacccctgagttt

SEQ ID NO: 62600 - DNA, 799 bp, Cucumis sativus
  Intron number 2 from transcript Cucsa.125300.1 (locus Cucs a.125300) derived from phytozome v7.0 (chr-ID scaffold0100 4; pos 48615 to 49413)
gacgccgtccgaaataacctcggtaggaataaccaccgtccatctccgttacggagttttgcataaatttatattctaactattttgaaaataataataataatggtgattaagagacgtttgaaaaatcatttttgccactattggtaactgtttatttttttgttttttatttttaaaggttttatttttttcccccaattttttttcatgatttaatctattttcttacttctcaaaatttctccattttttttttaaattctagtagaaatgaaattgtgtttagcctagagttattttttggtaatttatttttaagaagcattagtagaaaaggaattgtgttttttagactaatttttaaaaataaaaagcaatatatgtttctaggtatggtttttttttctttaaaaaaattaaattataaagtatacacatactacttagtaccaattaattttgcaaaggatgtgaaaattttagtaaattttttgaaaagctaagaacaaaaagtttttgtgtggttggtgatgcaatagcaaaaaaagaaatgaaaagaagaattttatttaaaaattaaaaaacaaaacataaaaagaagaaaaaatatgtttttcattattttctttttaaaacgtgtttggtacaatgaaattattttttaagaacaaaatttcccaattgaaattgaacaaattatatatattttttaaatattgaatataattttggttttttaatttacttaatttttgtcacaggtgggtttaaggtgaagctgtgtgggttggttcaa

SEQ ID NO: 62601 - DNA, 805 bp, Cucumis sativus
  Intron number 1 from transcript Cucsa.127920.1 (locus Cucs a.127920) derived from phytozome v7.0 (chr-ID scaffold0102 4; pos 67988 to 68792 reverse strand)
cgattactgatctccctgttaaaggttatcttccggtgagttgtaatttgctttctgatctggtgtttgtttatattcagttgggttagttgtatagtttttgttagtggctttctttctgaggatactgttttcttgtttgtatgctgctttaatgattttttttttcttaaggaagaatcatttcttggaaataggagtgtggatcgggttttgtttattctataatgctgtcgattctttaggctgattttatctgaagattgctgctccatattttgcaagtgaataaataaaatcaatgttagaatcaaatatttcaaatccactggctatggtaggcctcaatgcaattggaacccggataccaatggttcgtcagttgagcaagtgaggcctcgtctgaaatttgagttttaagtcgtgaagttcttatttccccgtaataattcaatccaattatactatccgaattggtgtgacggcaaggagggtgcgatgttagttggttagattatttgagaaaacatgcaagttgattagataatctaaagcaatgaagtaatacccttgagggaaattgcaaattcgcttgatatggagttagatgaattgatgtttcgagctggaggatgcttttgaactagcttttcgttcatttataaatgtttgtgctagataagttctttgtttacgagttgttgacatttctgcattgtgtgtgttgttttggtctatacttgaggattgtaattaatcctaattttgcttactctaacgttgaatgcattataaacctacagga

SEQ ID NO: 62602 - DNA, 630 bp, Cucumis sativus
  Intron number 1 from transcript Cucsa.114970.3 (locus Cucs a.114970) derived from phytozome v7.0 (chr-ID scaffold0096 8; pos 293680 to 294309 reverse strand)
gttttccacccggcgaattatctcctcttcaagaggtgtgttctttcttctccgtttcggtcctacgatgtttactttacgatggaaaccctaggtgtttttttgtctccgatttcgtggttcttttgaattgatattgtttgttggttgttggtggtggagtagatgtttccccccctgaattatggttttttatttgttatataatgaggttgagtgcgagcggaagatttcttggttctgttagggttttattgttcggatgcctttaatttttccgtaatttggtgcgaactatatcgtagtttcctttctatcggtctttctttgattcatgatgaggcaacggcagtatgttgtatctactgacaacttttattcctcctacttatacaagggcatgtatggtttcttttcagttttctgtggctatctgcctaatgtatgcagtagagttctatttcttgattctttgaacgaaacctggcgaggaattgtttgattttgtgcactttaaatcatttctcagccattttgccttgtctattgtttgcttgtctacttgcgaatttctttaaaatcttactttacaagttaaacaacaactctatttttctaatcttgtgttag

SEQ ID NO: 62603 - DNA, 1007 bp, Cucumis sativus
  Intron number 1 from transcript Cucsa.103980.3 (locus Cucs a.103980) derived from phytozome v7.0 (chr-ID scaffold0092 7; pos 2615020 to 2616026 reverse strand)
aattctcacctggtaaggtcttctcttctgtttgtggtgtgcattattctgttatttgatcccatgctttgtgtcatattttccattagtttataaatttgcttgtaagtgcttttgtgattttactataatttgtgctgcaattgagagatgagggaatgtttaggacctgggttgacattggggatgttttggagctgctttcagtaacgttgtttgttttatgtttgaagataaaattgatttttagattagcgatcaattacttataagataaagttgttttcaaaggaagcacttataaagggccaatgagttgaaaacaacctttcggaattctcgaatgtaatcagaattatgggaatcggaattatgaaatgtgtgaaaaagggaagagcatgtaatagggattacaaaccaggcccaaaagcctcaatctaagcgtggcttgggattacaacccattaaaaactaacctcccaaacaaggagtccatgttaaacaaaacagaatgcttcccagaagtgctctcaaacatttcccacatgttatgcattattgtgtttctacatttgctgaaaccatggtggatggatagctgaaaatgcaatgacttaaacaatacttgcacatattttcctttaatccttgttaaattaaaaaaaacagaatgcttctctaaagagcttctaaacattcatatatgttatcaattattgtatattcttcattatcttatctgttgctgctggaatcaagatgtggtgtatgaatggctgcaagtctgcaataagttatcctactcattctttaggaaaacaaatctttgaatctctcttttcagaggcagaactttctttatattgtattggacctgtctcttggtcatcttttgtgtgcattgcatgaattactctactaaatttcatgatttgaaggaagcaacatcagacaacttttgcatgacaccaagtgtatcattgtacagcatcagattttagactaaa

SEQ ID NO: 62604 - DNA, 626 bp, Cucumis sativus
  Intron number 1 from transcript Cucsa.049520.4 (locus Cucs a.049520) derived from phytozome v7.0 (chr-ID scaffold0055 0; pos 12540 to 13165 reverse strand)
cttatatcaaggttttcttctcatcgttttcctccctctcttcctaatctgtttgagaaatttaggttgttgttccctttctgtatctgtttatgtgttttaacttttattgttattgagctctgaattatgatgtgcctgaattggaataaactcaggcatttgaattttgatgcgattttctttcttctctgtgcatctttccttcttatatgtttgatgtggcaggacagtttagatttagttgaaatttgaactctctctctttctctccttgtatcaagaacacatttattagaatcaaaatgtagtttaggtttagcaaggattgtttccatatgtgctttgaaagtatccccttcagaagtctttgcattatacaggaatgtatttgtggggttgcttctgttttatgatatggaggtttaacttgctcttgtgatggctgatgaccctcaaaagggtctctatttatcattttctgttttcttttttccatttttacattttcatcctcactgaaatttatctctcgactatcttgatctttttcttatcttctttggtattgaagtgtttgtaatgatttaggaaacaactccattagctggagcttcagctggtgc

SEQ ID NO: 62605 - DNA, 436 bp, Cucumis sativus
  Intron number 2 from transcript Cucsa.129460.1 (locus Cucs a.129460) derived from phytozome v7.0 (chr-ID scaffold0102 8; pos 381592 to 382027 reverse strand)
ccctttactccaggtatagggtttctttaatggtatcttatccttcttcgatgtttaggtaatttgcttctgtctgtggattaatgatggtatttacataaaattctgtaggttagaggttttccatgtggcttacagtaggtttgatctttgcaatgtcatacaactcccaacttttttaattccttcatgcttaaaatatgaggaagaagttaggtccttgcccttggcgtctcaaaatataatttcaaggctgttaattaattttttttaactatctattgtccctttgagcgaccatgccttttatctttttaaattcatatagagtgtagtgacaaaagttacttgggtactacttgattagaatgccggagaggtgacccttgtttctacaagccacattatttgaaaaaacataatttacaatgcaggc

SEQ ID NO: 62606 - DNA, 678 bp, Cucumis sativus
  Intron number 3 from transcript Cucsa.115690.2 (locus Cucs a.115690) derived from phytozome v7.0 (chr-ID scaffold0098 8; pos 266365 to 267042)
ttgctaaggctgtattggaggaacttgagaaggtaactcaagtaattacattttggattaaattgtaggtggaatgtaacactgaacagatacactatccacaaatgacaaatacagttgttaaggatcgacaaataaagatgaatgaaaaacgtaaaacaaaagagaattaatacataaattcatgttagttacctctgtgagcagaggcagaataatttattgttaaagagaataattcagattacaaatcagatgcgggtttggttttagagagtttatcttacacatttttctaagcatcatatattaaatttaaggcatttcaacaccaagtttacaaaacctattcctttgtacaatccatagaagactttataaattcgaatgttccaagcatatatcaagatcgtggttcaatttgcttactcccttgtactagagacacgaccaggagtttgtagtataataacacgtgctcttacgtttgtttttttacttctatttttatttttaagaacattgtaggtagagtatgcagtggattgaaaatcaaccgaagtggtgaatagctcatgattatcattaattcaattatttgaagttcaaatgtgtttgctccttgagcttaattgcttgatgatcatgagattgtactttgacttgacggattaggtg

SEQ ID NO: 62607 - DNA, 743 bp, Cucumis sativus
  Intron number 1 from transcript Cucsa.066980.1 (locus Cucs a.066980) derived from phytozome v7.0 (chr-ID scaffold0069 6; pos 1355532 to 1356274)
ttgccagcagtgcttttgctgcttctttcgctgaggtaatgtattacatacatattctgctttgcatcttcttaagcccttttgttgtttgtgttctgtagagtttcttgttgaaattttgttttttttattttttgtttggggttaatgagtttagtgtctggtgtgttttgtagttgtcaaagtcaaatgataaacatgggtttgtgagataattggctgattttatctccatcttcaccattttgaactttggttgataatgtattaggattggcttaagcgattttggttttaaaaaggtttttttttgttggatggggttggagtttgactgctgtttggagggatcgtgaccatcattaacagttagaactgatttcttattacttttattgattgaaagtgtgattttgttactatttgctttcttgtgtttgtttgggaaaccatggaaatcgatctatgttgttgttaacgtttgctagggggtgtttcttgtttttagaaatttgctaaaattgtacaagtgttcttaaaaggtggaatgctaaacaaataacatggctacgtaacgagtagatattttgaacttaatgatcgaaaacaggtaattgaaactaaaaataaaattgttatgttttatgcactcacgaaactgttgtgatcttcgtccaccttacactgttggatctgaaatgatttttgacaataactggcatgcatttgatattgatgcagat

SEQ ID NO: 62608 - DNA, 952 bp, Cucumis sativus; identical to SEQ ID NO: 62515
  Intron number 1 from transcript Cucsa.045170.6 (locus Cucs a.045170) derived from phytozome v7.0 (chr-ID scaffold0054 2; pos 1200900 to 1201851)

SEQ ID NO: 62609 - DNA, 663 bp, Cucumis sativus
  Intron number 1 from transcript Cucsa.103450.5 (locus Cucs a.103450) derived from phytozome v7.0 (chr-ID scaffold0092 7; pos 2228908 to 2229570)
atctaaggtgattagatcccattaactttttgtatttctttcctttatccatactttcagctcaatatctctctagtttgttcacatcttgaaaggtttctactgtttttatttatttctattttgtttcttgattctagtatgaaaattattctccaacaatgctaaattgcattgatctatgcctttcttctgttaccatttatgacattgcattgttttgttttgactgtttgttcttttgtttcgcttgtttctttttgttaacatttctttgtcagatttttattttatgggtttaatgtcagtcttgttatggtgactatagatgatgatttaattgtggaagttcactcttgaaattggtatacaatttctcattttgatttattttattttgttgggttggggtgttggaagtggggaaggcataaaaatgagtggccacgggtttatagtatcttaaaatttcatccatttatgtgtcggtgacgttctgtcagaagatgctacactggcgaaggatttaggattgatgtgcacatttttaaatgagttctagttccatggaatcatattgcacattcaatggctaagcaatctaactatcaattgtttatgttttcatcaaatgcagaatcatattcttttgaactattaatc

SEQ ID NO: 62610 - DNA, 950 bp, Cucumis sativus
  Intron number 1 from transcript Cucsa.087690.1 (locus Cucs a.087690) derived from phytozome v7.0 (chr-ID scaffold0088 8; pos 277016 to 277965)
ttcttcccagaccttcaaagttggtgatcaaattggtgagtaaatttctatataaatacaaaaaaattgtattaataagaaactttatgtgactttcgatttgattttgaagtacagtttttgttggagaaatggtaccaatagtctatttttaggggcctatatgagatcgttgaaaatccaatattttcttttggttgctcttttgagttttgaaataaccattttttttcccttccttctttcctttgaattcttttccttttccctcctagaattagtgagtttgaggaaaaagcgagagagaaataccaaatagtgagaggaagaagtcgagaaagagactagagcacgagaggaagaatccgaacaaagaaagaaattgcaactgtgtcttgtctgatggggaataagaagaaaaagtgggaaagagatgtggagtgagggaaggaacgggacctcatagagtgctagaggctgcgttttggatactttcacacgtggttaacgtcatcaatagaagtcatttctcattcgtttttttgccaaattttagttgggctcctaaggatagtcatttgtacaaattcttttaaaaaaatctttcattacttcggtaagaaaaaaccgaaaaacacaatacaagaaaagaataaactcatatacataaaaattaacgtaaaaaactttaaactacactattgcaatcgttgaccaaagttacaaataaaacactctttcgagactacttacactatttcccacactcaaactagagtatataaaaaagaagttaactaaattatcacacttaagctttgaaatatttttaataacataatttgaaatcaaaacttagacttcttttatacgttgaaacaactccacttctaatattttgcaaaatatgaacagttttcaagtacgattcaagcttgcacagtgtggta

SEQ ID NO: 62611 - DNA, 540 bp, Cucumis sativus
  Intron number 2 from transcript Cucsa.105780.1 (locus Cucs a.105780) derived from phytozome v7.0 (chr-ID scaffold0092 9; pos 281384 to 281923)
aggtataaaaaattctctccttatcgctcacagctttctaagaatccatagcatcgcttgtgtcttcttagtaccataattgtcgaaaattggcttgcatatatctagactgatcgtactgaacaattgtttgattcaaatagttgttgtgatactttatcaaattgctttgttggtaaatgatcgaatagagagaactaagaaactacctaaattttgtgacttgtacatttttattaattttttttaacaatgtttgatgcaactagttggagtgttgcatcatcaaattgcttttttggtaattgaatcgatgatcactttaacgaaaactagaaacttcccacattttgtctactttgtaccatgattgtccaaaatcaacttccatgtatcttgactaatcttcagtaaaccattatttgattcaactagttgtagtgttacattatcaatttgctttgttggtaaatgaaccaatgatcgatcagtgcaaaaactaagaaactgcctaaattttattctgtatgtgtagattca

SEQ ID NO: 62612 - DNA, 320 bp, Cucumis sativus
  Intron number 1 from transcript Cucsa.044260.1 (locus Cucs a.044260) derived from phytozome v7.0 (chr-ID scaffold0054 2; pos 689146 to 689465)
gtatattagcgtttttattatatatagaagatatttttgggagctgtaaactccaaattgggttaataaaaaattataaaaaagaaaaaaaaagaaaaagaaaaaagaaagataaaaagaaaaaaaaagaaaaaaaaaagaattgttgggaataccatttatgggggaaggggtatttgagtaatttgagaaaaaggcaatcaaagttacgaaagttttaaccctagtttgtgttttttgtgttgaatttgggcggtggaatcggaagccaaaatcgaagttcagaatcaatccttcgtaatcttggttagggttttctt

SEQ ID NO: 62613 - DNA, 931 bp, Cucumis sativus
  Intron number 2 from transcript Cucsa.044260.1 (locus Cucs a.044260) derived from phytozome v7.0 (chr-ID scaffold0054 2; pos 689590 to 690520)
tacggacccagagggtaagtctagaatttctgacctttctctcttcgctcttgtcttgtttcatttggattttcatgggttgttcttgaatttgtgtgctgggattgagagcagctggattgagggatgagttcctctgttattcgtcttggtgttttttttttttaaatttattataattgttatcaaatggggttttttagtagaacatattctttaaacaacaacttatgtttttgttaatgtaattcaaattgaggtccttttttgttttataaataaaatgaaggcgcgatttatgaaaccatctatgtgttgcattctatttacttgattctcttctttagatttgaactttaaaatcaactcaatacagtcggtggtttttcttcgatcgggtcgattatcaggaatctcgtaggatgccatatatctgagtcgtattaggatttgatttttcttttctaagttttaaccagaaagcaagaatttgaatgttgtatcggtgtcttatgacctgtctcgttttttttttaataccactatcaaatttagaagaggcttttgcagcgttatttaagctatggaggccagtgatttaattggttaattaatgttctcgtgaattgtctttactttaacatgaagggcttaaacttatatgaacattgggaaatcattttctactgcttgatgggttggtgttcactgagtctcaaaatgccttttctgctggtacttttagaaagtcttacttattctatatctagttaaattgttttgtttataggagtggtaatggcatgtaacttcattgaccataaatcgtgtacaccaataggttttagaggtgtaggttgggcttggttttattaacttgcttgagtggggatttttcttttcttttttctgggttggtaattgaagggca

SEQ ID NO: 62614 - DNA, 853 bp, Cucumis sativus
  Intron number 1 from transcript Cucsa.089040.3 (locus Cucs a.089040) derived from phytozome v7.0 (chr-ID scaffold0089 4; pos 315899 to 316751)
ctattttttttttctttctccaacctcatttcaatgtatgtttcgtcttttctttttaatctgtttttgcttttttttgtttaatggcctttcggcgatttgcatatactttgcttggattgcttgctaaagtgcttcctgccttgtcttcctttttcgtttatttattgttctgttcctttttttgggaattttttgtttttctaagtctgttttaagatttgggttttgctttcatggagtcaatcatgctttggaatttctgattttggctttgggcttcatttcggaatctgcttttactgtcagagttagctctgaaatgagtgttctcttacttcttccttcgttttaatctctttttggattttccttttcggggttgatgaagttcctcgttcttggttaactctggtttttttttaattggttttggtaatgggtttactatggaagtttgaaatcttgctctaacctctgtttctgtttttttcatggttgggttctttttatacttttctaattttttttttttttttgttcttcttcttcggcatccttctactttttagtgtgactgttgggacacttagataaagttgtatctctgatttacatttgggtgttgagcggttctttttgaaatctcttggacttgcttttgcttgaaatgtaaacttactatttcctttcagttaatttgtaatttttcacgatttattattattgttattatttattttttttattgggtttgagcttttcttcattgtgaagttctcttgtttagtctattgattttgatggattttgtccagatcttgatctgaaattaccttcttgacactgtaga

SEQ ID NO: 62615 - DNA, 639 bp, Cucumis sativus
  Intron number 3 from transcript Cucsa.133240.2 (locus Cucs a.133240) derived from phytozome v7.0 (chr-ID scaffold0103 7; pos 967192 to 967830 reverse strand)
gaagttgataaagtaagccgttcttatacgtaatactaaatttactttcacctactagattaaacttttgaattaattgacgaattaagactattattaagaaaaaaaaacaagagacaattggtttcttacaagtctagttggaatttagatttttgaatctgtatcttaatgatgcagccacatcaataaataaatatcttaatgatgcagccacatcaataaataatttatctttttgtagaatgacaagatgggtgagtactatatgaatagattctttgaattgtcgtttaattgtgaaaagaacctgttatacatttgtttctcattgaaactagataaagactcatatctaagtcattctcatttgatcttttgattagtgaaaatttctatcataatctttagatactataagagggtgcttgtaaattccactcttttgttcaagaagtttgtggctccatgacttaaaattactaattttgtgcttcattaacactttacactgtggatcccacaactgcataactcttcaagcactgaaaatgtcaattcttaaaaaataaaaagtaagaatgaaacgtcgctctgttcccagcttgcttttactggatcaaccgaaacggggaaggt

SEQ ID NO: 62616 - DNA, 517 bp, Cucumis sativus
  Intron number 2 from transcript Cucsa.085190.8 (locus Cucs a.085190) derived from phytozome v7.0 (chr-ID scaffold0086 7; pos 38984 to 39500 reverse strand)
aaggcatgtaatcgcttttcaaattagggttcttttttttggatgatttttttgatttgggttctttttgggtgtttgattggattgtttcttgttcttttttgggcatttcttttttaaataacggattggttgcttattttcttcaattttgtacgacaatattctgtctttggtggctctgaaaattgatggtttgttttgtgttttctgaattagggttcttttttggcaaacgggatgtttctcgttttgctccttttttcttttttttttttaggattgtgtgtctttgtgtctgctagagattttgcaggtgttttgtacgatttttttttgctgttgcttttaagagatgtcaatgcttgttgttactggtgtttggaaatggtggcgatgcaagcttctttatgctgtgattttttgggtttcttgtgaatgtaagaggatgattattaatgtcgtttctccttgctttttagattacaccagttttaggaggaggcagtcatcgcac

SEQ ID NO: 62617 - DNA, 950 bp, Cucumis sativus
  Intron number 3 from transcript Cucsa.018280.1 (locus Cucs a.018280) derived from phytozome v7.0 (chr-ID scaffold0025 2; pos 691927 to 692876)
cagttgctgctggggtaaaactgaaggatctacaggttcttaactttactatacttgcttttttggactttcaggtgaatgagattttgttttttgaattgggtgttacgtctgatgcatatacctttgctgattcatttcaaatttgaggtttttgtttgaatattttgccaatgaaaacagtttgtattgatttcttttgctgtatagggtaagtttgatgtgattctctcccaacattttgtcgtgttgggttaaatggttaaaagtaagtttttataatttgaatcattcttaagcattttgaagtacttgaataaaaagcacatgggatgagtttgagaatacttttagagcggtgaaatgctttagcactttaataacacttcaaaatttacaaaatgtttgcttatataataaaaaatgtttttgaaaactctagaagtactttacaagctcttaaactgatttttaggagaagcgagaagcacttattagtgtttctttcaagactctttataaaagaattgttgtactttaaaaagcatgttatcaaaaaccattagaaactatttttccaacaagtgttcatagaagaatgctctactcactcaacttcattctaaagaaagattttatattggaacattttcaaatataacaaaatgaacttaaaaatatagcaaaatttcatattctatcaatgatagatactaaaataatcaattgatagaattcgaatttagctatattttgtaaatattttcagctgtttttccatttacagtaatttcccatttatattcacatttatttgttaaaatgcgtccctttttaaatttaatcacatatgtgtacatatttttcttctttttgacgaacgattgcacttggagtaatgctttatacatataggattgggcaggtcataaccgattcattagagttat

SEQ ID NO: 62618 - DNA, 610 bp, Cucumis sativus
  Intron number 2 from transcript Cucsa.075600.1 (locus Cucs a.075600) derived from phytozome v7.0 (chr-ID scaffold0078 9; pos 254224 to 254833)
tctatcttggaatacgagctaggtacttcattgagttgaaaataaagtttcgtcatatatttgtacgatttatgatttttttcaacaattgagtttacttatgttttcgaagttctaggatgcttaaatatttaatgagtacgtaggaaatagtttgctaactaccacatattcttatggtccatttacaaaatgtgtattactaggaatacaatctctgtactgaaaaccgggagtggctcgattctttgagttgtgttctgtaagtcggtttatgcctccaagccattgtaaatagttgccgtatatttttggataatagttgatgaacgaatttctttgattcaaacctcgcaaggtagttatgatctttctgtggctagtttttaatactgaacataaattcttttgagtatttggagttcaatcactgtgattatcagtatataactttggtcactgtaataatagtcttgacttcagcgaattcttctacatttattttgttctttcctcattctatcaaatgttttatgcgaatacctagttctttagctaatgagtatatcttgtatttatcaggactccacgttcattgcttgctggcttg

SEQ ID NO: 62619 - DNA, 504 bp, Cucumis sativus
  Intron number 2 from transcript Cucsa.042500.2 (locus Cucs a.042500) derived from phytozome v7.0 (chr-ID scaffold0054 0; pos 890962 to 891465 reverse strand)
cattcagttttgagggaagaaaacgatcattgcaggtaggttttttctcctttgctaggatgaatagttattaccaatttatttattgattggttcctttgagattaaatggactcaacctcttccctacctccctggggtttagattatcttagagatgtggtgtttcattgggtggggtgggggtgggggattactggatatttccattgaagatcactgtttgttagcaatatccaacaagtcaatggttggtgttctgcctattgggggtcttttagttgtatagttgcggagtaagttgggtaccgattttacattatgttttcatggaaacaacggttgtatttaaaatatcattctcttttggttttggataacctgggggtgcgcaggcctattctcatcaagtgatataaaagattttacctccataattcttttcttacatttcagtgtttatttcttctcaggcactggaggccattgaaaagttgcagaaaa

SEQ ID NO: 62620 - DNA, 491 bp, Cucumis sativus
  Intron number 1 from transcript Cucsa.108260.1 (locus Cucs a.108260) derived from phytozome v7.0 (chr-ID scaffold0093 1; pos 435273 to 435763)
cgctcaggccaacatcaaactcggccattacactggtacttcttctctcttctctcttctctatttccttccagtttcatgtttcttactatgtaatgccccctttaattgactctgtaaagtataggattgcgcgaatcagagtctttgatcggatttttacttcttttggttatgatttgtactaaaaaaactttacttctcttcaatttttctgttcttttgaagaagttaatgttaagagctaagtagattcgagaagtttttggacgagtcgattcgtttatggtttctatttgaagttttgcagtccaatccctcgggttttggttctgggattaatttaggattatatgacttttcaagtgttcagaaaagtgtttttaagtgacaaaacaacgattttgagcactaagaaacaattaataagagttattgttttctttatttattttaatgattcgggtttatgtttgtagagactgttgcgg

SEQ ID NO: 62621 - DNA, 811 bp, Cucumis sativus
  Intron number 2 from transcript Cucsa.128340.1 (locus Cucs a.128340) derived from phytozome v7.0 (chr-ID scaffold0102 4; pos 373184 to 373994)
gaggatcgggactcgatttgaggagcaaagctagggtatgaattgattatttttctgtttggatcagattctgtttgttttccctgattattaatgtctctgttttcttgctatagtcgatttttttcgtttgagtttggaatcgatcatgcttttttcgaagttttataggataaattttctttatgtttcatttcgcttgaaaacttactgttgcagatcattttctttacattctgaacgttcatctcctcctgattgtgtttgatttgttttccggagtaattttctggatgtttcaaatcgttaggaaaattatctatgcaagtcatttcttcagaactaaaatgtctctctctgtatttttttttcgttcttcgattttttgtttgggtctctggaatcgatcattctttgagaatctacttgtagagatttgtctagctgtatcgttttttgtagatcgtttcgtctgatttagaatgtttttctcatattttttgtcctttgttccattttgaaatctgttatacgtataaatacttttctggagaaactttctcgtagcatacacgcgatagattcttttgttcagtatggatgcggacaccttcttcagatttcgttatttgatttgaagtcacgtactaataatccgctgtttttctggaaagcatttccgtacacattttgtttttctatggactcgttcgaaaaacattggtcagattgtttcttcgctttctgaataattttatcgaaaaaaaacctttcagactcttccgggcccggtgactgatccggcgaaact

SEQ ID NO: 62622 - DNA, 582 bp, Cucumis sativus
  Intron number 3 from transcript Cucsa.096480.1 (locus Cucs a.096480) derived from phytozome v7.0 (chr-ID scaffold0091 9; pos 2088433 to 2089014 reverse strand)
gatatttcaagtgttgtacttgttgagaaggacaggtatgtgttaggtacctaaataagaatattagtatgttagtattttggggtataaattataacggtcacgagagggaaagttagttactgttgtagtaaaaatagtaagagggtgggtgagtgaaggttaaactattttgtggagtgatctagggcttgggtgagagcactcaagagcaaggttccaagtgcctttatacttggtcttctagtttcttgtttgattctcagcatattttagatgttgattcttgttaggaagtatgtgcagctcctcgtttgaaggttctgatgagctatatttgtttttcttatttatgatctgacctttctgatctttcttgaagaaacaataatcacaattgcaagacaatattctcaaatgtattaatttcctagaaacgaaaagaaaaggcccctgttttgctgagaaaaaaatttctctcaacttcatctactgccatcttgtcagttaacaatgttgatgataaattttaaatgctggattgcagatcttatatcaagtctgaagctgttctaagaataa

SEQ ID NO: 62623 - DNA, 912 bp, Cucumis sativus
  Intron number 1 from transcript Cucsa.123710.1 (locus Cucs a.123710) derived from phytozome v7.0 (chr-ID scaffold0100 0; pos 819114 to 820025 reverse strand)
aacttgatcgccttcttgattacgctgtaagatgcgaatacgctattatttgaatccttcgtcttagttctttgttttgtcatattgtaaactatttgtattaccacaactaagtgaagtctatgcttcttatttcttctcgagatcggagtttcaaatctttccgttccccccgccgcgagttcgccacttgttgtagtttgaagtctacatgtattatatactcaaaataaatttcaataactgcccttcaccttctattatttcctttttttatcttttatactttcaagctttttgcttgatcttagatgagaccaacttttttatcttttatattcgatggggcaatttacatgccctaattgagctgattaacaataaaattactactttaaacggatggatgattacgtttgtgttttgtaatcattttcaattttgtattatcaaattaaagaacttatagttcactgcaagaaattggaatttttccgatgcacaaaaacttgtttggaaatgtcggaaaaaagagtacctaatggtgtatatcccgacgtattcatccaacgtcgggagttatccttctattaaatcctttagttttacataattgaaagagaaaagagaaagaaaaaatgagagagagggagaccgagaagaagaagaggagatctcacctctactgtagggtttttttatattagtttgatgtaatttatttttatttagattagaaattatgttttgaattagaaatttggtttttgaattagtttttgtgtgaggaataggattttgaattatgttttaggaataatattatgttttatgaggggatgattagaatggttgattaaaaattaaaggggtttaggattggattagaatttttaaggagggggtgttgaa

SEQ ID NO: 62624 - DNA, 836 bp, Cucumis sativus
  Intron number 3 from transcript Cucsa.066580.3 (locus Cucs a.066580) derived from phytozome v7.0 (chr-ID scaffold0069 6; pos 1023112 to 1023947)
aacaaactccttgccccatttttagtgagtactgatgcagttcttgaagatattttcttatcttactgttttgtgtattttttattgccaatacgcctcgcaggttggatttttttcttcttaatgtctgtttttacggaattcaaccatgaagatattaaataagttctgctgttgttatgaagcttttggcatttgggagtgattcaaatcacttttgtcatttttaaaattattatttgaaaagtctttttaatcattcaaaatcaattctaatagcatgaaaaacgtgtttaaaagtgtgaaattgattttgatcgattgatacttgaaagtttgtttcaaggtgattttgaacattggctgaagtaatcttaaccatttataaataaaccctgtgcagtgcttagttgggacttggaagttgtaagcatcagatttcagggaataagttcaaatcataaacataacaaagagattgccattttagttattctggttgtgctgttgttataatttaattctgttggggcactaggtctgtatagcctctgctctgtccgcaattcttgagttaattaaattattcttctgattgtgagcagtgtttcttctttcatttctttgatatagttgtcgataaatacgttcatttatgagccatgacaaaacctcgagaggtgaacctctcagttgaaaaactttagaattaggatgatagacttagttgagttgtgtgttttgagttgcggagggcagttttctgcatagaactttctccttttgcctatgccatcaagaacttgaggagatttatggtttatttactgcagaaa

SEQ ID NO: 62625 - DNA, 935 bp, Cucumis sativus
  Intron number 2 from transcript Cucsa.112580.1 (locus Cucs a.112580) derived from phytozome v7.0 (chr-ID scaffold0095 3; pos 1105157 to 1106091)
ggtattgactttgaagttaaagatcttctaagttttacttaattagtctcagttattgtatgtgtttgtattttgaaactgatgagtttggtctcttcatcgttaccaaacaaccgacagttgagagagaaaaagggttgtggattctataatatatatatatatatatagatatttctatttctccatatccttcttgtatatgtgttggtctcatgttggatattcaattctatgcccttagttgaaaaaagatcaaaagaataataacaatcaatgtagaggtaaaaggtggtgaactcttttaaatttggacaaaaatatcagttttggtgtctaaatctttagtctattttgtgttatatatatgttttagatttgggtttaaaaaccattacttgaattttatttgagtgtcatcaagattttacactgttatttcattgatttctagtcactaataaaattagtgctaccatatttgaaaacttaaaaatcaaactcaagacaaaaatgaagaaatgaaacccaaacataaacaacacttagaaaaaccagaaggatacaatttccatctaaactttcaacatatgcatacccaaaaatggaggagatatgttctaaaagttttaacttttagaggtaaataatgaataaggaatttgagattagaattattacttcttcgtcaaagttgagagataagggcatggtttatatattagttgagatgatataaaccctaaagcataccatagcatagcatgcatctgttttatatcttatttacactttacaccaccttttttggattttatttgatacccatcattggtttatttcaaagtggaatcaatgtgcaaattgagggccttgtatatatttgaagactaaaatgctaacatattttgtttattaaatgtgtaacgagaaac

SEQ ID NO: 62626 - DNA, 964 bp, Cucumis sativus
  Intron number 1 from transcript Cucsa.092110.1 (locus Cucs a.092110) derived from phytozome v7.0 (chr-ID scaffold0090 5; pos 56369 to 57332 reverse strand)
gcgtaccagagctgactacggagggaaggcgggaggttagtaccgactcacgatgctggaagtttgaaagatttactcaaattaggactgggtatagtcttattagaaaaattatgatgaagctctgttttgtttatattttcctttttttagcttttttttaaaattctttttttctttttggaagtgttgatctttctgtaattttggggtttagaattatgatattgtcagagccatttcagagggttaggaggtgttaaagtgttagttttgttgttagcctccatcgcctgtgttatataccgccatttctccctccaattttccttccatcacaatttcaacaccgcttaccttttcattttaacaattgatcgccgtctttctccttacagttgggttgttgatttctttggattttcagcttttgggttttcatttccttatttcttcttcaatcacacctttaaaaccaatcatcaataaaaacacaacaaatctacagtttatttctaggttttatacaactctagtttagtataatttttttttgtctgacatggataagaagagagtggctattcctctcgtttgccatggtcattctcgaccgattgtcgatctattttctagccttgttacgcccgatggattcttcctcgtcagtgccagcaagggtatgattcaagatttaaaacttttgctttgatttaagactttaatttatgtatcgccaaattttctggatattaattatgattttggatcttttttttttttgtccagtgtcagttcttttgactttgattgatagttgtcctagatgtgggtattgctattttagcttttttgatgggagatttgttgaatgaatcccatgtcgtttgctcaaagcttaatccggagtttacttttatgggttgccttataaatatgttattcccattcagattccaatccc

SEQ ID NO: 62627 - DNA, 900 bp, Cucumis sativus
  Intron number 1 from transcript Cucsa.135220.3 (locus Cucs a.135220) derived from phytozome v7.0 (chr-ID scaffold0104 4; pos 84794 to 85693 reverse strand)
gctccaatcaccttttctctggtagtatttcactctttctcccttgctctcttcacttttctttcctcccaccccctttttccttttttcttttcaaatttcaattaatctttgttttccatgttctgttttgtttatgaatttttgattactcgatgaccaattggggagtttgaatttatttgttttctgttctgaggctgaattttactcgatatgtttagattttgagctgtgttcttgtcatattcaattggggtttggttttttgtttgttttgtattacgtgattgtgttccttgagttattggatgagcaagtcgatgtttgacttagattccagtatggtggtattaattagttttagttgtcggcaggttttgatgttcagggactcgagtcaagcatgagtctttaatctggatgcttagtcaactagttagttgctctttttttaacgacctacttttgccctcttcttctccttagcttctgaccttcgcttgttggttatgaagagaatttgttcatttgagtttgtttgttgtttgctatcaggaaagtagtttatattcattctagtggatgtttatgttaatagtaggagtaggaccattttcttttttagacctttatttgaaagtatcatcattggagtcagattcttgattgcacgaagtcagatatcatagtctgtaattgagttgctcggtaaccttgttgcttcctagttactgtattctggaattggaatggcaagtgggtgtgtgttctatttctgcttgttttgaatagagtacgtttgaatacaacttctaattttttttttcttttgttctctttttgggccttgctttggattcagaagttctctagattcgctgaatcttgacttcactt

SEQ ID NO: 62628 - DNA, 296 bp, Cucumis sativus
  Intron number 2 from transcript Cucsa.101820.2 (locus Cucs a.101820) derived from phytozome v7.0 (chr-ID scaffold0092 7; pos 989121 to 989416 reverse strand)
acttctcacttctgcacctgtttcaacatttaaatgtaaaattaagcaacactttctatatatttacttttttttcatcatttcttctgaaatctattgcttgcaaaattacttttgaaatcatcttccgagttgttctcgagagttaatttattgaaattgtcttgatttcaaaagtcagttttgtcacaaattttgttctacatcaatgaaactaaaggaaggcactttttgatagtaacatggtggtttgttttgttatattgtattaattaaactgtagggtggcgtatttg

SEQ ID NO: 62629 - DNA, 670 bp, Cucumis sativus
  Intron number 1 from transcript Cucsa.101820.2 (locus Cucs a.101820) derived from phytozome v7.0 (chr-ID scaffold0092 7; pos 989481 to 990150 reverse strand)
tcttaggatctcaatcttcatttcaagcaaagaaggtatgatttttttcttataaagttctttcatttctgatgaattttcaagtttaacttatatgggcaagtagaaaataagcaaaaacatcacttcttggcaatgttttggccttttttttcttctcatttccccctgctttaactgaagagaagaagaaagaaacaagttggggggtaatctggtttatatgaatttttttttttatcaatttagaaacttttacagtggtttgaagggaaaatattagaaagaaactgaggggctattttttttttgttgtatatgaagtacttctaatgaatgatctttttgttttgtcttgtttatgagaacagtgaaggtgttgaaatattgagagagtgttaagacagcaattagggcattaaacataatagattgtgaagggatataggcaatattactttgatttgtgtttaaatatgtttgaaggtcatgatttttaatttgtagtgtaaccagatacaaaaagttgatgagatttgtttgattcctgttttaaatgctaaactcaaaaaatgagattagatccttaatctggtgatttgatttcaaattttttttttatactatgaataaaatagtgaattgttgcaggttgatttcatctgaaact

SEQ ID NO: 62630 - DNA, 704 bp, Cucumis sativus
  Intron number 2 from transcript Cucsa.131970.1 (locus Cucs a.131970) derived from phytozome v7.0 (chr-ID scaffold0103 7; pos 84327 to 85030)
atcgccgtctcatcccccatcttcgggtaatttctttgaattatacgatacttctgttttctcttccaaaagcctgtttggttgctgaaataaccgttaacgttacctttttgcaagtgttaatacatatgtaatgtaatttaactagttactcgtgcttttgttctgtttgtttccaaaattcatgcagctcgaagtcctctttgttgtatatatatggaaatatgtatctgaatccttgatgttattgaatgttcctttggttcgtatgtttttcaggatttattgcaaatttaaagtgctcaagttctaattgcatgtcacatttcatttacttcctaactaatattacttgatactgcatttgttgagttttatgctaaatcccaaatagattagtcctatccttgctgattaggttgatttcttgagcattttagttatcataatgcgcttaggtttagtggcaattaaacaatttggttgtgtctgagttttttagaaaatgtatgccattctccaggatctaatgggatatccttcacagacagtgggcgtctttgctatattgattattttgtacttcctatgtactttttctgatttctttctgtcattgggattactttctcacaagatggatcttgttcttgtttgcaattttattagacagcgaaggaaaactttgaattggctcttgaagt

SEQ ID NO: 62631 - DNA, 859 bp, Cucumis sativus
  Intron number 3 from transcript Cucsa.023710.1 (locus Cucs a.023710) derived from phytozome v7.0 (chr-ID scaffold0032 8; pos 85011 to 85869)
gtgattcatcagctgagttaggtaatattctaatctgctttttcatgtcacactttctcttgctcttgattggcagctggagataattcaaaccattggtgggtcagttacaatgagctaacacattctgaatgaggatgtgtagtagtctatcctggtgaggaaatcgacatgcatcattttgatctattcccacccaatttagatattttcatgtgatgaggggaagttcttgatgctgattgtaatggtttttcagcaaaattgcataaaaaggtcatggaagatggtggtaaactcatagacttaggacaaccagaccacctccatgatcaactcactctagcttatagtttcaaagtaggtatttatcagttaggaattactttttcttctttcttctttcttctttcttctttcttctgccttctgccttctgcctttttcacatttcttacctctcttgttagctattacaagattaatggtttggcttgctgatgcacttttgcctctcaaaacaaaaggctttcaactcagcacgtaacttgagtagttatcgtggttacttatctagaaaatattctatgagtttccttgtccttcaaatgttacagggtcagacacgttgttttagataaaaaataaaacaaaaccacctatagccagttacagtaaattacatgaaagactgatcctctttccttggaaattgaaaataatattattcatctttctaccgttattctgctaagatgatttatatttttgaaacatattttattttatttaagtgatttgatgataaacgttgtatgaattgtaatttaaacaggaagatcagattcctggagtcttg

SEQ ID NO: 62632 - DNA, 945 bp, Cucumis sativus
  Intron number 1 from transcript Cucsa.098240.1 (locus Cucs a.098240) derived from phytozome v7.0 (chr-ID scaffold0092 3; pos 318485 to 319429)
ttcttggggtcttcgttttcctctgcctttcacaggtaaagcttctctattcctacctcttcctactgatcttctgcccttcgcaacttttagtaactaattgtttttttgtttttgaattttgaatgagtctattttccctggatttcttatgatgtatttgcatatttcaaagatctaaggtttgaatgcttagctaaattttaaataaaaatatgtatgtatattcttttagattttaagttttgtagataacaagtaagaaatttagtgggaaagatgtgtttattgcttatttttttaaaactaaagacaaaccatttaaggtattgtttcgtagttaattgattttttgtttttagtttttgaaaatcgagtttacaaatacctcttttacatctaaatctctcaagttttcagaaaacgaagctaaaattttaaaaatgacagaaaaaaaagtttacttaaaagaaggtgaaatagtagcatagtttaaatgtatttttttttttttttgactaggttcaaatggttactaaacacaacataaatgaaaaaacttgttcttatttttaatatttaattagaaaaaaaaaaacgatagttagacaagtattgaaaaaaatcaattacaattttcttaaactaaaaaccaaaaacatccaatggaatttgttttataagtagctaggagaagtataatatagttttgaaaacttgtttttatctctaacgaaaagtgtcgtatacaatatgcaaaattttaatggtgtgtctaatagagggaaggttgacccattctaacatttgaaaagtaacaaaaaaaaatctaccgaacataaaaattaaacatttaagattccattggagtatatatatagtaaacacacaattgaaagttcatatttactaaggttatgtaggacgtaacgcaggtatcttcca

SEQ ID NO: 62633 - DNA, 605 bp, Cucumis sativus
  Intron number 1 from transcript Cucsa.079840.1 (locus Cucs a.079840) derived from phytozome v7.0 (chr-ID scaffold0079 3; pos 2695741 to 2696345 reverse strand)
caggtatgtcttagtgagctacaatttttacgctcatgtttcatccttatttggattttgaaattcaaacttataaccacttctgcagttaactgctatcttctttctactaattatggtttcaaaaagtaaatcaaaattttaaacctaaaagaagcataaattttgaaaactaaaaacgaaattggcaaggtctctaaggttagtttgttggatcaagctagctatagcttgtataacttcaaacaatttctaacaggcacctaattaaatttcaatttttgttttcaatcaatttctatgtttaagctcgtttgttgacatgcattaggttgtagtgtgcttgtattattctttttaaaaaaatatctctagtgaattaatttagagagtcaaaggcatcaattagacaaaagcaattaaaaaaagaaacacatgggacctatatagacattcttaaactataaagataaaatagacataatcttagaagttagaccattttacaccgtacatatgattatatataaaagaaattattttcaagttttttttaattaaattttgcaggtggcatcaaggtttcttcttctagtaaaagaaat

SEQ ID NO: 62634 - DNA, 548 bp, Cucumis sativus
  Intron number 2 from transcript Cucsa.113020.1 (locus Cucs a.113020) derived from phytozome v7.0 (chr-ID scaffold0095 3; pos 1322652 to 1323199 reverse strand)
ttcttgttttattgacgaaatctctcgaatttgaggttgggttagcctttttttttccctttttttcaatggtttttgttaaaaaggatctaaaaatgtgagcatgaaatcacttttgattcttgtatgtatactgtagcaaatgcgaagagcattgctagtttacttaacgtgttggaaatttctggtgctgtggaaaaggggaagggtgttagaatactgtattgttaaaagcatcatcattcaggataaacatataatttcttgagtttcaagttgtacctggatcaagccttttgaatctgattatgcttttcaattattgttttgttaatcctcgttatatcttagctgaaagtaatcttcaatcagtgttcccgtttggtcaaaatggttctctcaatttcttgatagcgttcttttttcccaaagttactcatttccagatctgcaacgccaaaggattgttctgtggtttcaatccttttgttgtgctaatctttcaaagattaaatgattacatctgttcttgattcttgtcagtcggt

SEQ ID NO: 62635 - DNA, 333 bp, Cucumis sativus
  Intron number 1 from transcript Cucsa.113020.1 (locus Cucs a.113020) derived from phytozome v7.0 (chr-ID scaffold0095 3; pos 1323336 to 1323668 reverse strand)
tcagaaactattcttctcagagcacaaggattttggtgaaggcctttccctttacctttacttttgaatgcaaacttttcttctaacccatttcatcaagcattctgatatctcaactaccctgatgttatatacttatattattttatcactatatcttcttcgtattgtatcattagttgtaaactgtgacttgtttttgactaaaaagatgcccatctttttagtttttggcatttagcacacatacccttctgaattcttgattagtttgatgcttctccttatttatgttgaaatactaacctgggtgggtgtatcaaaggcttaccc

SEQ ID NO: 62636 - DNA, 591 bp, Cucumis sativus
  Intron number 2 from transcript Cucsa.099830.3 (locus Cucs a.099830) derived from phytozome v7.0 (chr-ID scaffold0092 6; pos 511011 to 511601 reverse strand)
acccttccctgaggtgtattgagactgttgttgaggtatgctgtatgcttcttattcataccttttccctgtttgactagaacatactgttttgtcttacgaaggatgtgtttgagatgggtttgaaaaagaaacgcttttaaatgaaaacacattttctatcaatacttttgggaagaatcattaacaattgtttctcatagaagcactttgcatgcttttagaattttaaaaatcacttttgattatctaactaaaactataaaaatcttgaaacttacttttgatgaaacaaaagcacttcttatcattcctatttttagcttgtgaacgaagagggttgctcattgacttaaagagattaaaatttcattgactaagatgtgtgagaagaaagaactaaagaaagagtgacattttcatttccttgataatcaaagcttttaagaatgctttaacatgagcattgcagcatatgcctgtagttcatgtaatcttcatcataatagtttgcctatgggcgtgagtttcttttctttaacattttttaatgcacaaaataagacctacctcccatcttgcaggttgaag

SEQ ID NO: 62637 - DNA, 520 bp, Cucumis sativus
  Intron number 2 from transcript Cucsa.083170.2 (locus Cucs a.083170) derived from phytozome v7.0 (chr-ID scaffold0085 8; pos 119926 to 120445 reverse strand)
tttttctcaatattgctgaggtaattccatttttccttttctccttttctccattctattctatttatttaattaatatttaaaaatgatttttcttcaaggtaataaataaaatacctagttatttaccgaagactggggatgtataagtttatatacaaataaggtgtatatattattgaagtccatagttgtacgccatctaaactttaaattagtttatataattatttttgtttaattaatatattttaaacattaatttcaagttgcatcgattgaaccgccatgtggtttgaagggtatctccccattaataaatgaaaatttgtttaattaggaagctaatttagtcatcaatttgttagacttaaagtatgattagaaaaaaaaaaagaagcaaaagcaaaagaattaagaataacaatgtttatttatttttgttagacggcatgatttgattaattaaaatttaaaattgacagagtgtgcttggattggttcggctggccccatctag

SEQ ID NO: 62638 - DNA, 755 bp, Cucumis sativus
  Intron number 2 from transcript Cucsa.101990.1 (locus Cucs a.101990) derived from phytozome v7.0 (chr-ID scaffold0092 7; pos 1129874 to 1130628 reverse strand)
tcctgaagaagaatctatccgctattgatccggaggtgatgtctttttcttttttccatttcctgacaaatttagacattgaattgtgccggggattgcgttttatgtagtgtggatactaactgacatcttttagctcctcaagcacgtgaattgtgaagtgtattatttgcttcacatttcttggttgcttatctgttacgaattctgttagacttaagaagttcaaattttatgtcattgaatttttatcaatttggcaacaactctagaaggtatggacaggtgagttgcccggttgagttgttcaaagtgttcaatatttacaaactgaatttataggcctcttaatatcaaatatattttcacttttatcttattgggatcaagggatattatgactactctgaattcgttttcaattcccttgtttctgaaaaatgatttaaaaaacagttatccaggtaagaaaaagctgaagctatccttttaatgtaatcttcacaaattcaatattttaaggttatgaaaacatgaatcgaggttttcagaaatcgtcatcttaaatttcaaatattttactctttgattacttttgttgaacaaaaatgttgtttaccacttaagcctagtgccttattcggtttctcttctcaaagaaaaaagaagagaagaaaagaaaagaaaaaagcccagtgcctcattctaactacccgctctgtggttattgaatggatttcagggtgtcactttgc

SEQ ID NO: 62639 - DNA, 675 bp, Cucumis sativus
  Intron number 2 from transcript Cucsa.117810.1 (locus Cucs a.117810) derived from phytozome v7.0 (chr-ID scaffold0099 7; pos 152513 to 153187)
tccatacctctggttggaggagtttggttcatcttgtaagttgcaattctttttatacttcttagacatagatgtgtttaggatccattctggtgggcacattgtttctggaaaacatactaataattagatcacttcaagcactgtgaaatgtttataactgatttaatgaaaccaaacattatgaaaaacttgaaaatgtttctaaaagaactcccaaatcactattagtcttttggaattggttggtttatgagtggttgttttttacttttacttccattagcaattcaaacatcctttacacatcttaatctttttcattaagtcagtcagttctctaaaagggatctttaatccagtccataaatgcgtcgctccttgcttttctcttgagagattagattcaacaacaaaatagaaaatttgattgtcttgtaatattattatctggaatatcatatttacgtattcataatgcatagtagtactaaaatgtgttatgaaagttcatcattcaaacatttgggtttagacagctatggacgatggagtcattactctatgcattttttttagttctctccattatacatttcttttcttcactcagaacacttgagttgatcttgtgagtttgttctcgttttcagattcttggtgatatcaaccacg

SEQ ID NO: 62640 - DNA, 531 bp, Cucumis sativus
  Intron number 1 from transcript Cucsa.132270.3 (locus Cucs a.132270) derived from phytozome v7.0 (chr-ID scaffold0103 7; pos 261127 to 261657 reverse strand)
tcccccgcgacctccagattgcgaggtttgcacccattttcttctatggcgggggtatctaatgatttcgtagatgaattttgctggggttgtttgaaattccttgttcttctgtgattttcagactgtttgtaggaaaaatattggtgaaatgatgttagaataccatttttttcacgggatggtgctagttatctggcttttgaattttggttatcccattgaagtttctgtctatagtttcttttctttgtgtttgaagatttattgtgagattgttttcggctgttagtctttttctaatcttagaatgttgggtttctttaaatgtggggaaaggatggtgaagtttttcaggtttcaagaccttttggcttctaactttgctatcccatagagtggcttgttaagtattttagtagttttggctgtttaagtacttctggatttgtttgtgcatcactcttgaataaaagctattgtctgtcattgatttttgtgtagaaagtcggggaaggaaaatttcttccg

SEQ ID NO: 62641 - DNA, 781 bp, Cucumis sativus
  Intron number 3 from transcript Cucsa.133380.1 (locus Cucs a.133380) derived from phytozome v7.0 (chr-ID scaffold0103 7; pos 1077527 to 1078307 reverse strand)
gaaacctgttccgaagaactcatctttcttcaaccgtaagtcattcccagagatatttttgagtgagctttgttggttgatttttgtcacaatttgcagcaacatccttgctttttctatttcgttgttccttcagttttatcaaaattcgtaatatttagtttttgtttttcgatttactatttctatttgtactctatcttttattatgttaaaaaaaattagaagagaaaacatttgactctaaattttcaattagttttaattttcctcttgctgtttaaaaatattcaaattggctgttaatgtgtttttcttttcattgtcattatttattataatactcaaatgtttaaattgtatattaaacaacatttttataatagagttaaataaaaacaaaaaaatttcaagttttaacacaaacttaaaattaatttcataaaatgatggaggaagtattagataacaaaggaaaccaattaataaggtaagaaataacataaatttatcttaaaaatagtgtgtgacgagggtctcttagttctttcaatgtataagtccattgatgacatccattgcactaggaagtggaatgctcgacaattgtggtagcggctacaattttcattcaatatttgaattgatatatattctgagtagaaaatagatgagagaatttaaaaataaacaaacataaaaaaatgatataaattatgattggtttttcactggcattattgtagcttgctattgggcatattgtggacaaggagattgt

SEQ ID NO: 62642 - DNA, 1039 bp, Cucumis sativus
  Intron number 5 from transcript Cucsa.011150.1 (locus Cucs a.011150) derived from phytozome v7.0 (chr-ID scaffold0015 4; pos 456274 to 457312)
ccaagcgaggtactagttccctacactacaaaagctttgcaactcttacctgcccaataatcttctgtgtgaaactcatgaacagctttaatgtagttcgcttgtattagcttacatggtttaaactcgaccaatgaattgatagtccaaatgtagatttgacaaagactggagaactatggcataggactgagttgctcattggtgccaaaacagtgaccaatttggtctggatttacttactatttatatacgtgtgtgtgtgtgtgtggaatgctgcttgacaccattcacgaatctacctttttttaactgcaacactacttgtttagtgaacgtgtgttttgcaatggtagaaatgactggaaatttcatcaaagagtattgttgacccccaataagtttttcccctaaataataaaatttgaattatatttttctctgtttcctgtttggcgtatgcatttcttggaatacaaaagatcagcatgttttcctttttagacaaggatgtttgttgcattaacttgagacttgagattatcacatccgatatcattatgattaaataagatcgtgatagatacctagattagtatagggctaagcgtagttagttatgtaggcagttagatggttataaataggaagctggggagggaagaaaagggaggattagtgagtttatatcaattgaataagaacacataaaagactcccctctctgcctatcctctctctcaaggaagagtctagaaaaactacccacaaaactaatcctcccttttcttccctccctagcttcctatttataaccatctaactgcctacataaccaactacccttagcactaatctacgtatctatcagatcaataggaaaaagcgacgtcatgtgtgaccttatctaactggtgaaatatttcactcatctgttaattgaaattcccactctagttttcaaactgaatccattattccattattgttggcctcacgtacaggatttggccatcaaaccaaagtatctggtaacatt

SEQ ID NO: 62643 - DNA, 913 bp, Cucumis sativus
  Intron number 2 from transcript Cucsa.101870.1 (locus Cucs a.101870) derived from phytozome v7.0 (chr-ID scaffold0092 7; pos 1040646 to 1041558)
ccactgcacaagcgttctaagaggttagcttctgatgctgttctggttttcttttcttttatccttgtttcattgagtgtttttgttagttagtaatggttattccttttgttctgaatactcgatatgtgctcgaactagaatgagtcctcagttggttaaatagtaaaaaagtctaagagtttgtttctgtcggcttaccaaactttgaaaccagaggtctaaagaaaactgctgttggttctctgcttatagagctgtatcttttcttctttcttcttgttactcaagctctgttttcttgagatgggttttggaaacttttgacaattagcttaactgttaacttcgttctcttgttctacttcttcagatctgaaatctctacactgtttcagtcgttctaccttttctgttattgggtgagaatggtagaatatgtggacgcattggtttactgtttcaatttggattttgtggaatcataattcatgacttatctagagactgtagaagggaaattaggtaccttccttttatttttgctgaaaagatgtagatcatcacagatgaatcttgggatcatacggtttttgtagctcttgcttggtgcaaataccgaatcgtggctcagttgggggttcaacacctgatatattctgtatctttctgatatgcatctttgttgcaccattttttctagttgatagatataatgattggggggttatgggtgctagatagtggaatatttgcttttcctttttgtgttaagagaattcacggaacatagtatcattacatatttttatattaagtgtatccaaatggaattaaaaggttaatgtcttgttttctccatttctatattttaattcttcttttctctttttgtattgtcagttttctagac

SEQ ID NO: 62644 - DNA, 610 bp, Cucumis sativus
  Intron number 1 from transcript Cucsa.017290.1 (locus Cucs a.017290) derived from phytozome v7.0 (chr-ID scaffold0024 5; pos 7131 to 7740)
ccccccattcacatcaccaggttgctgtcgtatcttcttccttcttttccctcttcgtttgggatttgtttcctgtttaaagtcttcgtcaatactagaacatggccatttcaattttcaacttgccattatatttgttagaatgttaggatgtgcttttgattgtggcgtgtctttccataggaatgaattggaattagaaatatcaatttatgaaaatatttctttagatttatcgatcaagtttagaaatctccaatttgtgaagagaataggcaacttacgaatttccaagctgggatggaaatgctctcattctcttctgatgtcaaatgtgttgtgttgttgtataagtggaagaacaagatgttatctttctcactgttgagttggtttgcaattttttaatgatagcttcatatattataatggtcatgaatttcaatagcaatatacaataaggtgtgtaatgatgtgccttgtatcttacactaaaactttgaagttttggaatgacccagcagatcctggttattgtatgtatgtactgacgttctcttttttaactgtgaaagggatctgagactttaagggacagcaaaaggtttga

SEQ ID NO: 62645 - DNA, 777 bp, Cucumis sativus
  Intron number 1 from transcript Cucsa.078340.1 (locus Cucs a.078340) derived from phytozome v7.0 (chr-ID scaffold0079 3; pos 656282 to 657058 reverse strand)
tgctcctgctcctcctcctcgtcctactcctccaggttccaataacatttatttaattttctctctttatttttctgtaaatgccaaaatagggttagagatcgaatatctcgactggaatagaatggaaaaagcatcccaacccagcccagtttgtaaaaatagggttagaagtttaaatctcaaccgagacaagaaaaaaatggtggaaacatatctcaaacctagctccatggttctaggtcttattataaatttagactttagctttcaaaaagttaccatttatccatttagtttttgttacttaaatgttgagggtagggtaattgatctatgaaataaggatttttttttattaaaaaacataagtgggatggggcttccatcccttactaattagttgttaatgactaacatgctatattccaattgagctgaagattttgtttaaaattcatttaccactttggttaggttcaaatgttattttaaatgaacagaaaataacatttgaacctaaccaaagtgagagaacaaatcataatcgaaaagttgagagaacaaatcttctcaaagtcacttacaagttactataaatgtgcatttgaacttggatattgtaaatgaacagaaaatccaaaagcaaaccctgtgcaaaaggaagctgtagagaaagagaaagagaaagagaaagagaaagagagagagaatgagattggggaaaagaataacattgcagcacaaacattcacttttcgagagttggccactgct

SEQ ID NO: 62646 - DNA, 567 bp, Cucumis sativus
  Intron number 4 from transcript Cucsa.106840.1 (locus Cucs a.106840) derived from phytozome v7.0 (chr-ID scaffold0093 0; pos 322658 to 323224 reverse strand)
aaacgttggcaaagcacttgtttcattgtaagtttagtttaattatcaatgctttggccgccctgacttacctttctgtggtgctcatttatttgaattttcagcatggatctgagttgcatgtttatttaacataagtcaaggttcccatggttagtggtggtgggtgtaaaagaattatgtattaccttttcgtttctcatccttcactcctgttattttgaattttagatctccttgttggtaattatgccatggctcgctgatgctatttttatgaccattgttggttgaagcaaacttgtgcagttcttgcagggattatcccttaatagttgtgtcattaacattgtgaggaactcaaaaagtttcaacataagtggtgaaaaattaaacatttgatgatgtgaaagacgagtttttaatccttaaagacgagtttttaatccttaattgctttccatatttcttcttcctctcctcctgtactttggtcttgtaacaggtcattatcttctaaagtgaagtttaatataatacttactcaggggattctcaacctttgaa

SEQ ID NO: 62647 - DNA, 688 bp, Cucumis sativus
  Intron number 1 from transcript Cucsa.106840.1 (locus Cucs a.106840) derived from phytozome v7.0 (chr-ID scaffold0093 0; pos 324108 to 324795 reverse strand)
attcaagggtgaggaattgcttagcttgattctctttttgactgagtgcttttggtgttgttttttttccctttggggttgtctagttttcttgtatacttcttttacttttcttatttcgtcagccttgatttgttgaaagcatgtattcttgcttcttctcatgctatatcatcttgtaagctcactttatttggtgaaaatttgagataaaaaggggaaagtgctttttttggttgttatcaagataacccagatgggaattatttctcatctttgccttttttggtttcaaatgctggaatgtgacgaatatggtttatcctgatccactttttgatcattctattgttggtattagaatcttatttctcaacaaagctttaaattgtcttggtgtggcagtgtcttgtctatctctgtgacttattaattgcatccatttatcttaccaacaatacatatatcattctagcatggttctagtttataggacctcaattggcctcatggtggatgcgtacactgggaaaaatctcttactttcaagtttccaacgtaccccagtattgttgaagatcatttgagctttgtcagtgatgtgccaattattactctaaaataaataatacttcgaatgttatgtttggtagttactctttggtggaaggacaaatttggattggca

SEQ ID NO: 62648 - DNA, 926 bp, Cucumis sativus
  Intron number 1 from transcript Cucsa.086840.1 (locus Cucs a.086840) derived from phytozome v7.0 (chr-ID scaffold0087 3; pos 217365 to 218290)
aattatttcccgttgttcgatctcgagattatcatgtaccattcatctctttctgctaatcaccttagaaattttcctcatcatttcatgttattattccattgctaatctgttctttgttataagagttctctatttcgattttaatgtttttagaccttcttcccgctacaatgttgcgattaggacaaacttgggtgttcttgttagtggttggatcatcatagtttgaataaatctcttttcttgaattaggtctgttttggctttgttctctttgatttaattcaagatattggctaaaagtggtggaaatatttggtggatggtttatatggcaaaattctattggccatttttggcagagttatatgtgtctgtaggttttagcccttattgaatgaagtttatatgggtctctttttatttttgtgagataacttgattactggttgtggggttctaaagtgaggtgttattatttttaaaattattttttgtcaaattgtcattgattacttttgaagaaaggatctgcttggattgattacttataattgaaatacaagagattgtactgggatacaaactggtttggcttatagagctgatcaagtacgaccttaatttcttgcattttcatattttgtcttttatttcgatgttttaccaatctttgaagaagaattaactgagactaggggaaggttttaattctatttcaataacttctctgagactaatatggagttcaaaaagttcattgaatgatatgtataaagctctatgaacttaactgtcccattgtttctcttcccatgaagagtgcaattattagtagcataggcgtcccatcgatcaaggttgttaaaaatctcatacaattttcaggcggagacagagttatctagacagtcaacatccaa

SEQ ID NO: 62649 - DNA, 651 bp, Cucumis sativus
  Intron number 1 from transcript Cucsa.132160.1 (locus Cucs a.132160) derived from phytozome v7.0 (chr-ID scaffold0103 7; pos 188441 to 189091)
ctcagttcttgaaggaggtacgttgtatgagaattgaaattactatctttttttaatttgattcaaatttttttaactttacgtttggagatgatcattcattttattttctctattagatggagatatggaaatcttgttgtctcaaatagaagttcttgcaaaatcttgttctgatcctttaccattgtccattccttttcttggtgtttgtacgaatcttgatcttgatcgcctgaaattatgttatttaaaagatcttgaatctgcttttgtttcttagaacttttgggttagaataggccgggtttgaaatatatactagaagatgaacaaagtggattttaggaatcgttttgtgttaaaaaaaaaatacccaacacgctagaattgatgtaatctttacgaaagcaaagatttgattcttgaaacttttcaatttttaacaatttagtcttttggagaactaacaaatctcaatagatctttctaaaatttgaaagtacaattggtttttctattgaagttgctacaagaatgtaaaatgcattggtcgtaaagtttgaactattgtttattctcaagcaatttgttgactttatctgctaataaacaggttcgtggagaccttataaaagctgaagagtattg

SEQ ID NO: 62650 - DNA, 700 bp, Cucumis sativus
  Intron number 1 from transcript Cucsa.087780.1 (locus Cucs a.087780) derived from phytozome v7.0 (chr-ID scaffold0088 8; pos 319431 to 320130)
attgctttgtcgaggtattacttcttcttctttcttcttattgatgctttttaaaaattaaattttaggcgagatatatcctaatgtaaatgatgtttttcacataaaatgtctatatctgtttctaaatcaaagttttttttcgtagtactatcaagatatcatattctctttgttcacgttataaatttgttttcatttatgtcagtgaacaaaaaggagagtttgattctttttcgtgatacaaaattatataaacaattgtttgaaagtttgaactttgtacgactttgaaagtatggttagtttttttttaatattagaatattggtgtggttcataatcaagtaaattgagcaaaagagaagaaattttagtgataccaacttatttagcaaaagagaagaaattttagtcagaaaccaacttatttagtaaagtacctaaacaatttgacttggaggagttggagctaaccaaataagaacaaacttcttacttttatgtataactatatatgttgaaaaacttgcacctttggttatctttcatctcactccacattttcacacatttgattgagggttggggggttttctttgaagtacaaactagttttcagatagttgatatagtaaagaggtcgataacagtaatttgaattttactttgttttcttttgaatggaatgtgtgtaggg

SEQ ID NO: 62651 - DNA, 873 bp, Cucumis sativus
  Intron number 2 from transcript Cucsa.069260.2 (locus Cucs a.069260) derived from phytozome v7.0 (chr-ID scaffold0071 4; pos 102012 to 102884)
aaaggtaatacttcattgtttttttgcttattcgtgttgtgattagaataagtaaccttgattcatcatgtatctattgcattgtgttgattatttggattaaatgtgaacattcaaagtgtacttttgagctcaagcgtgcagtgtgtttgatgaaagttctcacaaaacaagataaaagcatccatttcgtaaccattttgttttttgaagttatgtttgtttttactaccatggttaccatttgaatttgaattttcagccaaattctaaaacgtagaacaagtattttaagaaactactttaattagttgccaaaactatgcattttgaaaacactattaaaagtagatagcaaacaaagaatgataccgtttataaacttagttttcaaaacccaatacagcgctaagaaattttcccaattattttgaagtttgctgtagaatggacttgagtttttgtttgataatatgtgtgttaccaccatgaatgtttgacaacactaatgagtcttgtgatgtgaatcaatttttttttcatcttatagatattggaaatgtgtctactagctagtgtttggattaaatttaaagatagaaagagtacttttttagctcaaccacgcaattcgtttgatgcaacttcctagataatatttgaatggcttgtgatctttttctttctatttccaagtttgcttcagaattgacctggttttagtttgaatgttcttgtgttacaactgtgaaggtttcacatttgtgattttcgttagttattgataatttcgctttagcttatgtaaaatatagaattggcaactgatttgagctttttcattccgtatgaaacagaattgccaggtgttcg

SEQ ID NO: 62652 - DNA, 449 bp, Cucumis sativus
  Intron number 1 from transcript Cucsa.033660.3 (locus Cucs a.033660) derived from phytozome v7.0 (chr-ID scaffold0043 8; pos 92499 to 92947 reverse strand)
ctgcctcatccttattactttcttcacgatttcaggtttgaagttcacgatgatgtgtgttagtcttcaatctgttcttcctcttcttgctgaatttaaatgatcattagagagaaaacgggggggaagaggatgaagatctatagattgaacttcattcttgtagttgactgtaagaattgctttcatatcatacacttgggtaggtgccacgctccccggtttggtttgtgatctaaaaaattgtgtatgaagggatggaattcagaattgtttaacttgtttcagtaattgttttggagaagaagtaataaccacattgtttttggctaatatggaaatgaaaacggatcatgaaccaatggaaccttttgacttgtggcaatttgttcaatatttgctccatgattgtacctaatatgagtgttgtatttttgttttcagattca

SEQ ID NO: 62653 - DNA, 668 bp, Cucumis sativus
  Intron number 2 from transcript Cucsa.096920.1 (locus Cucs a.096920) derived from phytozome v7.0 (chr-ID scaffold0091 9; pos 2374757 to 2375424 reverse strand)
ggaggctaagaggaagggacgtcattctggatacggtattgttcttttgagttctgttattgttattgttggagtgcacgttctatactcttgcataattttcgggtttgtgtgcaggagatggacactttgtaaactgatgtttcagttgttttttaaaatttccatttttagagaaattgaagatgagaaacccatattcttttaagaaacttagaattagggtatgtagttgttagttatgtaggaacataacggccatgatatcgtagtgtttgattctttatttttttatgaagacttgtatttgttttcgtccactttactcttttttgcagctgataaatgttttcttttcttgtgaaactaaatttaacgatttgatattctttttcaatcttaaaatttagtcgggaaacaggtacattcattttaaattttgactggtagagttgtcatttttagcggcttaaatgtgtgtatggatcagaatgggtaatggaatgctcagtaatatgtgcattttttacacatagtgtatcaagggcttttacaattaggaagcaaaaagtgtttgtttagtgaagtgcttttgtggtgactttagtcacttatcatgtctgttgcatttaggtaagcgtcggggtaccagagaagctagattgccc

SEQ ID NO: 62654 - DNA, 371 bp, Cucumis sativus
  Intron number 1 from transcript Cucsa.096920.1 (locus Cucs a.096920) derived from phytozome v7.0 (chr-ID scaffold0091 9; pos 2375486 to 2375856 reverse strand)
gccaattctcgtacgttcctttttcttgtttgattcctttcttcttttaccacttgttgggatttcaatttgatctgcttgtttattaagttatttttggttgtttgttgcgtaatttgataagtatacgtaagctgtggagttggatttttcattttgatctgcttgattgggatacaccattcctcttaacttgtttaattcggatacattactttttagatctttttttcttatatatactgattttttttgtttctggaagtctagaataaatatttagtatgtgtgcttcggtttttttttttggggggttgattaaagtggtgttctgtttgatgtaggccaaaacattaggaagttggttaaag

SEQ ID NO: 62655 - DNA, 419 bp, Cucumis sativus
  Intron number 1 from transcript Cucsa.133660.1 (locus Cucs a.133660) derived from phytozome v7.0 (chr-ID scaffold0103 7; pos 1327583 to 1328001)
cgccttttgaattcccttcatttgtgttctgttgggtaatttctctttcagcttttcatattatttctttgttttcttgatgggttttgattttaagctgccaataatgcacataacttagttcgaattcatggcttcttccatttttttacttgtttttaatattttaaatgctcgctagtatgaacttggtattgccggacaactgttcgacactatgcctcataaaggttgaacctgtgtgtgttcttctatcataaagttaagccttatctagtgtactcatgcttatttagtagtttagtccgtttattaaaccttcgagtcctgaaatatttccatgtagctgggaggtataatatttcgcctctttttttcttttaggtgctcataggagctgaaatcaggttctttcagca

SEQ ID NO: 62656 - DNA, 474 bp, Cucumis sativus
  Intron number 1 from transcript Cucsa.116690.3 (locus Cucs a.116690) derived from phytozome v7.0 (chr-ID scaffold0099 5; pos 549322 to 549795 reverse strand)
atccgaggtaatattatataatatcgtcatcattttcatttcctttcttcaaaatcaaaattttccattcattattctttagagagaattctgtaagtggaatccatattcttatctgaaataaaaggataattataattataagaaaagtttgtaaaaaaattagattttgtaaatttttatcaagttgaaatcaaactgaaggtccaggataagaatttgcatgtccataaacgatctaacttttccctcggaaaaggtatagaatgattttcgattaatcacttttctgggtttctcttaggtgttgaaatcaccgagaaaaaagtcgattttactggaaactcgcgcaaattctttgggtttccttcaaaatccctaattttacttttttttttccttttaatgaataatacatttttctccatttctacttatttttcaaactcataggcactgacacgaagctttttg

SEQ ID NO: 62657 - DNA, 328 bp, Cucumis sativus
  Intron number 6 from transcript Cucsa.083690.1 (locus Cucs a.083690) derived from phytozome v7.0 (chr-ID scaffold0085 8; pos 460716 to 461043 reverse strand)
ggttattttcattgcaagaacaaattgatcataaggtaactggctgttttctccgttgatttgattgaattgttgatgggtttaaagtagctacggtccatggaaaatttaaattttgaagttgctttataagctagtggacttcagttttcacgtccaagataggtatgcaatcggagatagctaagcggaacttcgaaattaacatcccttgctcaagattactgttcttttcattattatctgttttttgcatacccctttctctatcgtgtttcagtggttgatgccagaattctatacggggctggacaatattcatctttct

SEQ ID NO: 62658 - DNA, 474 bp, Cucumis sativus
  Intron number 1 from transcript Cucsa.011370.1 (locus Cucs a.011370) derived from phytozome v7.0 (chr-ID scaffold0015 4; pos 628949 to 629422)
gcatttccgataagctagagttcagaaggattccggtattatcgccttcttccattttcgttttgactatattacatatatgtgttttgaatgtttgcgttgcgagattgtcgacggatttcttcaggattgttctgaatttgagcttgaagcatgatttcattgcttggactgatttttttttttttcgcttaaagaatttgtggcgtttattcatggttgaacctttgcattcttggtgcttctttatatatttggttcttttacattgtatttgctttacagacttttccgtccgagtctctggatgtttatagtcatgattgaggctaacgaacttgcaaatgtccatttcttcttcgtaatgtctttattattttattttctgcttgttaactgtatagaagatcttactattgacagtaatgttttccttgcatcagtatcaatcaacgcagttattctaacgcgtcc

SEQ ID NO: 62659 - DNA, 771 bp, Cucumis sativus
  Intron number 2 from transcript Cucsa.011370.1 (locus Cucs a.011370) derived from phytozome v7.0 (chr-ID scaffold0015 4; pos 629456 to 630226)
ttacccgcaccatttcggtcgacttttagtttcaggtaacatgtcaaatctattgaactttgagctccagtcttcttagaaactacactagatcgactattaagttaagaaataaaaatttccgttgattggtttcaataaaactgaatgatacatattatatatttcatatttaacagtctgtaaatctcctagttgcatatggccttacgctttttagttgaactttaagttattacatgtttgatgttatgcaacaagaaaagcttttaagttgaaatttcgtatttaacactgaaatgaaatttgttccttgtaaaaaaaatctagttgttagcttattgcatatcatcttcgattgtctacttcttgcaatagaataaactgatcatcgctttatcaatgtgcttagcggcatcagttctgcattgagtttgtagttacttcctcattatttcacgagaagaatagcgtgagagcttgtttcaaactagttgcacgcaagttcaaagttggaatagaaatcgaccatcttaaccttttaactgatgtactattgctgttttctaattcctaaagatgtgagataacatcggatgttaaagtttaagtgaacaaataacatcggatgttaaaatttaagcgaacattctcacatgactgttttctcttatatatgttatgttctctccgactcaagttgtgaacactaagttaatccattcttattaaccgcactacaaacaggtactttaattcactgcagagtga

SEQ ID NO: 62660 - DNA, 1033 bp, Cucumis sativus
  Intron number 1 from transcript Cucsa.069760.1 (locus Cucs a.069760) derived from phytozome v7.0 (chr-ID scaffold0071 5; pos 89137 to 90169)
gctctgcttctggggttggtacttttcaaatttcttacgtgattctattttctgttttctgggtattacttgaaagctatttattcaatgaatgggtttattgtacattcatttttgtgcatttgaaggtgtttggttgtttgctgcatacgtaggaatataattgggtcttttcggctatgtttttctgatggaggctgagcattttggtttaaagttactgcttcgttctgttttttcttcttattcttattattcttattatattttcattcagtctaaacttgacaaggtgtaatgagaaagggtagagcatctttttgataaaagacggactttcgatgagaaaagaatgaaagaacacgcagacatgcaaaagaaaccaaggctaggaaaggaaacaccctagaaaaggatctccaatctaacaaaaataaggcctaacgaataattacagaaggaactcatcatcgatgctgagagagaagcgttaaactttagcactttgccaaggtccaaacgttgaaaggttcccttggattttcgaatcacctatatccctatcttatatccaataaaaaacatgagggctatacttataataatctgagaccataaggatgaggattcatggtaaaacatagatctcccacatgtgataatggggtctttatataactattgtttgtttgatgtttaaattgtagaagctctcattgcatattttgaaaaagaaccgtgtttttttttttgcagtggtaggcaccatggctcgttacctgttgaattggcataattgttcgaaacttgctagagcatttcacaaataatattttatgacatttgcatttcgcaatgtaactatacgtcaagaagctctttaaacttttttggcttattctttcatacgctttgtgattgtgtatggaatcatttgcttgcatcttgcgagtacagttctgcattcatagtttccatataattatgtctttgaaaatattctgtgtgtagcagggggattcttcagctgcag

SEQ ID NO: 62661 - DNA, 865 bp, Cucumis sativus
  Intron number 1 from transcript Cucsa.048530.1 (locus Cucs a.048530) derived from phytozome v7.0 (chr-ID scaffold0054 2; pos 3217803 to 3218667 reverse strand)
ccctttttcagcttccgatcgtcttcttcactcaggttcttttctttttatttattttttatttgggggtacctaatttttgtttattttttcggatggttgcttatggattatgtgcagttagtaattgcaactgatgtgggcttcatcggagttgttattataactattagtattttaattctgaataaacatatttgattgagttagccggcttggacgttttcgtgtaacgtgtatttgctgaagaaatttatggtcaatcatggcagcttgtgatcaacactcgagggaactttatttttgagggatttgttttttggaagaaaatttaaagaacatgcatcatggagctatctgggtcttgagggtatagtttttttagtttcgtttttccctttttagtattttgtaggctaatggagtttaaaagggagttggaggttttcaccgtcaagaacttgtgaacttttctcgtatctttacgattctttgagtggaggcgatagtttatttgatgttttttaggggttcggagactgagggaagaaaattttggtggaccttagtaaaattaccagaatatagtgataacggtacatttatattgatcatcagagattgtttttgtggcttctactggtctgagaaggtgatatggggacggcttttgaattctcaatctatttcacgtgaaatgaaacttttgtattctactgtatttttcagtttcgtctttggcggaatctgaactctttttggtattttatccttattattgatcaatatgcaatgatcatattatgtcatgcaataatctgtaaacattcttgtgtgcttcatttattgcaggtggaaaagaata

SEQ ID NO: 62662 - DNA, 441 bp, Cucumis sativus
  Intron number 1 from transcript Cucsa.017390.1 (locus Cucs a.017390) derived from phytozome v7.0 (chr-ID scaffold0024 5; pos 92331 to 92771 reverse strand)
ctggtatgaccaattatggagagtgccttcatttcctacttgttttaatttcttaacatttggagtagtttttgttaatgcatattggctcgaattttggaggactccgaatatagtggcatcttttaacttctgtttttcttaacttttgttgttttttttcgttatttgatactttgttgcaatggactaatatgcgggttaaacttttagtaacgttctccatgaatgcaacgcaacatgaacaaatgtattgaaatgttgcaagagtccagcagttgttgatggcgttctttgatcttgacattggaatatgttctctctttctttctatcttaaccaaaagaaaattcatttgaacatttttttcgtttgttcaacattttggacttgtgttaaaatcttccaacatcgccaacatgtttttgacagataacattg

SEQ ID NO: 62663 - DNA, 690 bp, Cucumis sativus
  Intron number 1 from transcript Cucsa.135560.2 (locus Cucs a.135560) derived from phytozome v7.0 (chr-ID scaffold0104 4; pos 389388 to 390077)
ctacacgtcctggttgtgagaataacttcgttctggttagtacttgtggttcttctctactgctgtttttttttcttttaaaaagttcacttaattggaggtttcaatttgaatttcttgttcttggtacttgaattgtgtggatttgatggttggaaaatctgggtatttgcttatttggctataagtaaattggacgaaccccttcagagaaagcgggcttaattgaagaaatgaaaagttgggacttgatggtttcgtggtttgtttgtgatttatgtgtctggtttagttagcttatagagcttcttcattcaattattccctctctgtttctctccgtctcttaaatgttttttatgattcatcttcttcttgtttctcaattattccctcaaatgtttttgatgattcatttttgctcttgtctatttggctgctaacatggtaacaagaaacgaaataaaacgatgcttgttttctatgctgtgtcttgttatatgtatatactggctgagaactagagttaagatagattcaatggacggagattcgaggtagaattgattttttgttcaaacagtgatgactttgaggatggtactcagtttctcctacaattatatctgtggtgatttcatgttgtagttcattgattttctgttaaggtgaaagtccctacttgggtca

SEQ ID NO: 62664 - DNA, 728 bp, Cucumis sativus
  Intron number 1 from transcript Cucsa.042480.1 (locus Cucs a.042480) derived from phytozome v7.0 (chr-ID scaffold0054 0; pos 878752 to 879479)
aactcaaattagacttcaattcctcctcccacaaggtaaattcactgttcttaggatttttgcttcctttcgccttctattctactttgattttggacttcaattttctggaatttgcccgacattgcattggattgggtttctctgatcagaattgtagattattttgattgatttttgttcggtttttcttttggtaagatgaatgagagaagtagaattgttcatctgattatgtcatatggttagttgtcatcattttccgttgtattttcttcccatttttattttttaatatttgtggtcgatggttattataaattggctatactcatactcatgttgatattatgaattttgaatatttgatcatgtcatttggaaatttttaactcactcaccattggttagcttaatggtcaataatgactgatgtaacttgttaagtaataaagagcttgatgagattgagtttaaatcaaggcgttcatctgaaaaaatatcataatgtggactagggttttaggattaggttaaggacatgcaaactcgctttgattctctctaatttaaagaaaaaatttgtgaaaaaacatttagctgcttgtttttggacagatcatagtttataccttgaacattgattttaggagtatttgttagtctaactaatggagatgataagagttcattttactgttattaatgtgtttctgcttgttaggttg

SEQ ID NO: 62665 - DNA, 872 bp, Cucumis sativus
  Intron number 2 from transcript Cucsa.042480.1 (locus Cucs a.042480) derived from phytozome v7.0 (chr-ID scaffold0054 0; pos 879663 to 880534)
tcccttttgttgaaacttcctgtaaagcagcccctgtatgttgtatcttagattgaatttagcgaaattcttatttgcatagtgctataataatgttatagcgtgttggtttggcttctgtttttgtcatgcatatactcctttgaattaaacgttgagtataattattcatatgaagtctaaccttgggatttagatgattttccgtgttctagaggaatgagtagttgagaatgatatatacacaaattaatttcagtgatagtttttagttagactagttcattattagaccaagtacatttttggttttgaggtatgagttcagtgtctatccctgagacatcaaaagaaacattggttttgagatttggaagatggagctataaatgacgcaaaataacattatatctttgaggggaaatttttaaatgatgtggtggcttttatttatatttgtactttttattagttttagttcacgtgcctttctctctctcttctccttctccatcttcagtgaatttccattgccaaactcccagttgcctccacaagaaataccattgctctccttcctcatcactactacatcatagtatgagagttactaaggggaggggagtaagacgagggagttctttccagatttgtcctttgactttgattcatgcttcaacaaaaacacgaaaactatttttcgaacctcaagagcgaaagaaacacaaagccaaaatcttttgggaccaaaattgaatttattttctctgaattgttatataattttgaaccataattctaattcctaagtccaagtttcgtcatttcttgtggtatgcaggtctgaaaaggagataaatcgacgtaaagac

SEQ ID NO: 62666 - DNA, 423 bp, Cucumis sativus
  Intron number 3 from transcript Cucsa.054100.1 (locus Cucs a.054100) derived from phytozome v7.0 (chr-ID scaffold0058 2; pos 396182 to 396604 reverse strand)
ggagttggtcagcttttgtagtacattactgttttttaagttttgcctattcttttgtcactttccttgaaatcatgatttgtttttttgtttttttttcttttttcccatttgaatagtggaaactgcttgttctagtttcatgatctagcctgtgaagcatcttatctggtagtggctctgcattctcttttgattgaaaggtttctctgtcattctataaattttgaactcttctgtttaatcatcttgtttctagtgtgctgtttaatttgaatatttttagtgagcattagcattttttaaaaaattaaaacatacctaaaattcctatttgtgctggattgttgtgccattggccatctttcataatccaataacctagaacatttatgcttgtgttgatctttgtttcttctacag

SEQ ID NO: 62667 - DNA, 626 bp, Cucumis sativus
  Intron number 2 from transcript Cucsa.054100.1 (locus Cucs a.054100) derived from phytozome v7.0 (chr-ID scaffold0058 2; pos 396621 to 397246 reverse strand)
acaatcaggtgagtcttcttcaaatttcgtttctacttcaatggtttttgatttagatgtttccttgttacttgtcactgcctattacaaaatggggtttcgttccttgtctcttggaataatttgtatggataggttaagctttcttcacaaacccccatttattcaggggaaatgggtttgttttgtttgtttgtatgtttctttttcgtagtgtctagggcagcttgagcacatttggcctaatctcataggacaatttccgaattcacccacatcgggttgacagaaaacttgtggtttcttacggtggaattgggtttgtgagggttctcttttataatctctattgcccctccatcagccactgttcttgctttgatcataagtactatttcctttttgtccttgttatgtacctaggtcttaggttcattctttaattcaaggttttcaattttcaaaccataagaatttgagtttgtgatagtacggtagtgctgaaagtcaatggtgtaactgtagatgatgagaagtttttggtacttcagtgagttgttcttattctggaagtttttgttgatcctgcaggaagccgttgctgtgacaacagcaattcaggagga

SEQ ID NO: 62668 - DNA, 912 bp, Cucumis sativus
  Intron number 1 from transcript Cucsa.083590.1 (locus Cucs a.083590) derived from phytozome v7.0 (chr-ID scaffold0085 8; pos 380289 to 381200)
tttgaattgcagggtactagcttccttccctcaaggtattatgatcttatcatcatttgattccattgtgtgtgtgtgtgtgttgttttttttaaagaaaatgttggttttttgtttgacttactgtttgtttcttagtaatttctctgttgggtttgttatttttatcgagattagggtttttatcttgtgggtttgccactattatccgggtttttttttatattttttttatttgcttgttatgtttgattgttgggctaattgaggaagtggaagacgttctttggaaatcttaaatgggtattgcgtttcgggttgaattatatatatttatattagtttgcttcaatccgtggcttctttttttaatcatgttcctttttcagtttatattgattaacaaaagttgacggaatacagggatgggattttgtttttaaattttagatggggggcatggtggcaatgatagttgaatggatcagaaatgaatgggcagacgatcaagttggataacctatctaattggtcgttacgttatgattattgttattattattttaaattcaacaacatttttggtcgaaagaatatgtttaaacccattaaacgaggttattggttgtcagtttataatttcattgattaatgttcaagacaaagacttgataaacatattcctaagtggacacaatgctcaaattacacgagtgaaatatgttacttagtcctagtccctctgttgtttggtattgtgattatatacatatttgtatcaagaaaattatagaaaaaacttcctgatgtcgttgaataatttacgtgcgttttatcctttcttttttcggctcacttttttgtctcatgtcttcagttcctcaactccaaggcttccacgtaattcatctc

SEQ ID NO: 62669 - DNA, 695 bp, Cucumis sativus
  Intron number 2 from transcript Cucsa.053070.1 (locus Cucs a.053070) derived from phytozome v7.0 (chr-ID scaffold0058 0; pos 1467 to 2161)
acaccccaggtttcggtcctgttcttggcatcagcgtgggtgatttttcttcctctgttttcgggttagttcattttttgttctcttgccccgatctattgatcacccatagtgttttggctttagaacgccgggttcgtagatttttcactcctgtccttcaaggagttagtgctatgtgattagtatcaccaaagattgtgtagcagagagaatttgagctaaacgatttcacgtacgttgtctcctgtaagacaatttccctcacagtgtttgattttcacgattaattgtcccgcaagataggtcaacagttaaatagatgaagtttcatttactatcatatgaaagacgtaagttttagttttagaacagattcaataaagattacagatgcatgatgattgaattttatcacacacataaaatctagatgcactaaaattgtcttaagagattgttatatgaataatgtcaacaaaaattagaaaatatatgaccttgtatacgggagaattccttaattttgttgatcttgtatgagtttgtcccaatcctagtgatgggagttcttactgagtatctggatgattttattttcccttctcaattaaatcttgttgttgctatgctatcttgtaagctgctcattcccgtctgttgaaatgccaggtggttgtatcataaaattggga

SEQ ID NO: 62670 - DNA, 543 bp, Cucumis sativus
  Intron number 5 from transcript Cucsa.061960.1 (locus Cucs a.061960) derived from phytozome v7.0 (chr-ID scaffold0065 3; pos 27123 to 27665 reverse strand)
aggtgagcattatgtgcagcatcttcctgagtgatccacccatggaaaccatatttcttcttaatatttggggaagatataaggagttcgcaaaaataatgaaaaagaattatgataatagagctcatgtcactcacattttcaaaattgcaaaaatagcaaatttaaaagcagattaccgttagattatcgtcttattattatttgattaccgtcatatttgctaaatttgcaatatgcaaaaatgaggtgttatgagctgttttttctaaaattttttgtcatataatgcaatttaccaagatttgaaggccgtttacttatcatattgattcttgtacattcctttttaactttacaattaatacatttttaatgtcacacatatgtaccacctcgttcaggtcattttaataatatctcccaatttcaagtttcaaacatatcttacctcattactatatatatcataaattagttcggttttgttagtaaccttctttttatgcacaaatatgattatagtgcaaccacaaaaaatct

SEQ ID NO: 62671 - DNA, 1007 bp, Cucumis sativus
  Intron number 1 from transcript Cucsa.051400.1 (locus Cucs a.051400) derived from phytozome v7.0 (chr-ID scaffold0055 7; pos 557817 to 558823 reverse strand)
cgttgtccaaactcatctcctcttccaactgcagggtgggctttgcttttcttttcttttttaatacacataaatatttgttttgttttgttttgggttttgttaatttataatttgagcttcataatttatagtttgagcttcatgttctaccttggtgcgttaattatcttcgtatggttaggtttgattttcaattttgaaaaatattatctcaatttcttaccatgatttgcacatttaagcaaatgagttgagctcttagttagattcccaaaataataataaaggacatttatcgtggattagtatgtaaaggtacaccagaatatcttatcttgacaccataacaccctcgttgtatcccactctcatttcattgagtatagagttatagatcaacacaagagttagcaaaaactaatgatcacaaaggaccacagagagagaagtcccgataagagataataaaagcatcccttttagtgtcgtgtttaagcgtgctttaacactatggaccatttggctggagggaaacaaccgaatattcaacaacagattttccagcactattaacatttgaaagaatatttgcactgtttttaaaagttactcttccagtgttattgctctaaacattattgcttttacttgactgcttttttctgtttctttggggcttattctctagtcctcttcatcatcctgtacttttctgtgattttatgaatatatatttgatgataagaatgctaaaaaggttgttcaccttgtgaatatgattgggtgccctactgatctattcgtatccttgtctaacgctctgactcttgaggctaattgacagtttccatatataagtttcatctcagtagtctaaaacaagtttattatccatttaatttcattttcttgagtcattgatttgttttattctttaaattaaaatccgatttcatttatataatttataataatcttttattttattttctgtagttctgcac

SEQ ID NO: 62672 - DNA, 1026 bp, Cucumis sativus
  Intron number 2 from transcript Cucsa.111940.1 (locus Cucs a.111940) derived from phytozome v7.0 (chr-ID scaffold0095 3; pos 615798 to 616823 reverse strand)
caaggcacttattagcacactcggtttcacattcggtgagtttcttcgctaaatatatattcaatttagtctctaaacccttaatttcttgcatttatttcgacaagtatccgtgagcaatattgacgtatctattcccctcccaactgagggacgaacgtttaacctttctaagaattggtttctggatctatataagaattataggcttggatatctcacataaaattttcattgatcttaagatttgccaccagagcttggatttggtagacttagatctattcttgactgaacatttcaagcacagagaagttttacttgcgcttcctgccaccgcaatccattacgagactttaatgaacttctattctatgtaaatccatgtagtattcacttttatcctctgttaaaaagatgttttgaaaagatcaaatttatccatacacaatttaagcttttaggtcattagacaatttaacatcatacctagtcacgaagccttgttttaaatcctcatgttctttacttttagtttcctattaattattgatttctaagatcaactgtaccgcagtttgtatacgaaactacatgtgaggaggagtgtaaaagattgagtagagaaatcgtaatttttccatacctatatcttgttaataaaataaacttagtgcagacctttcagcctatgagcttactctcttaaattttttgtctgattataacattaataatttcagttcaaaaggatctagcattcacgttatctacttgtcacattatcaacttatcacatgcctccagaaaaattgcaaccttttgaaactagatcagtttacaggtcttgtaattttaccaagagaagagtgcctttccctttccatctatttatttacgccaaactatgagcataagctacctgttgatacatggctctttatcctttgtatgtgaactctttcattaatggaacttggatgatgcacagccactacattgacaagctggcatctgcttgttaca

SEQ ID NO: 62673 - DNA, 599 bp, Cucumis sativus; identical to SEQ ID NO: 62138
  Intron number 3 from transcript Cucsa.065790.5 (locus Cucs a.065790) derived from phytozome v7.0 (chr-ID scaffold0069 6; pos 428104 to 428702 reverse strand)

SEQ ID NO: 62674 - DNA, 1040 bp, Cucumis sativus
  Intron number 2 from transcript Cucsa.083400.1 (locus Cucs a.083400) derived from phytozome v7.0 (chr-ID scaffold0085 8; pos 272384 to 273423 reverse strand)
ttggggtatggcataactatattgttttttttcttctttaatgtattttttcctctccatttaatttgagatgtctatttctcaattccacactggttctaaatttgttaattagagtgtcagatagtggttatcgagcttctatagagctgaagttaaaaatcactacctctttcacatatcatattgaacattaagttgctttctgaattggaccaatttgtcaagagttttttgtttattattcccatttttcctcagattgtactaaaatgctaataaaataattgatttactttttctttttatatattgttatgcaacatatgaaccaaaactgtaaagatagcattttcattgatgtcttaaaatgttgaaacaagaagagaacgagaaatcaattaagaggaaattggaaatgtttttgaaaaagatagaaatgaaaaatgggatagattattaaatttatatattttttaacttggccaataaagggtcattgtaaaaagtaaagggctcaagggaatgattttatttttatttatggtggccaaccatatgagatttgatgtaccaaaaattacctcgagaaccatatcaatttgtagtagggccaggtggttgtgttgtaagaatagtcaaggtttatctggtagtttttttgtgagaatagtcagggtttgtgcaagttagggtggacacaaaccgatattaaagtgtgtttcttaagaagtgaaaatgaggaactgaaagaaaatgaatatcttaacaatggtctgcccatctggttagtttttgttctctccaccctgttcaactttccttatccacttcgtgttactggaggtgtttattgggaacgggatacacaatttattaatttttgcaattgcagttgtaaaatgtatgagataaaacttcaacctggaaacatattactatgagcatcgtttgtggctgaatgttagcttttaattttgatcgtgttgcccttttttgttgcagaaacgatacgaggacatttcagttttgggtcaaag

SEQ ID NO: 62675 - DNA, 774 bp, Cucumis sativus
  Intron number 1 from transcript Cucsa.083400.1 (locus Cucs a.083400) derived from phytozome v7.0 (chr-ID scaffold0085 8; pos 273457 to 274230 reverse strand)
ccttcattatcgccggcgctttcgttggagagcgggtaaggatctgaaatcatctctgtattgtgtatcggattcattcttttggtttctttagccatcttcttgctgagggatagagcgatggtgagaagaaaaatgcaattttagtgggtaatagattgtattaccttgtcgattggtttatcgagattagcgggattgggatgtagaaactagttatatttgttgaaatgctggaatcttaattgaactggtttattaatgttctcttgatcatctaattccgaatcgattgctccattgctgaaaagacggtttgaccagaagtcggttctggaagtaaatcagttactgattatggggctggggcttcaaagttgaatatgaaactttgaatatctaaggatatgcttgtttattttcatgtaaatttgttcccgcgaaatgaactctctagagttttagggtgtttttttttttggattatgcagttggcttgcttatccctcgatgctaagaaacgattttcctttattcgtcgggtagctcgttaaatcatcattttggagtttgagaatgttgccaaactgtttttgcatttattcctttctaccgtttgcagggatatgcattccattatttgctacaaaactatttggggttcctttggttattttttaaatataaattattttttgatatccgggtcttgtaagattatgagcatcagtattagcttactttttttggcttttctgctgtaggctgtggatt

SEQ ID NO: 62676 - DNA, 622 bp, Cucumis sativus
  Intron number 1 from transcript Cucsa.083100.2 (locus Cucs a.083100) derived from phytozome v7.0 (chr-ID scaffold0085 8; pos 46100 to 46721)
gatcggatccactattttaggtccacgatttcgacacctatttttgttaaaaaatattattattcattacttttgaccgtatttattaaaatactattattttaaaaaaattaaactttcataacctcattttggtttttgtcggagacaattttctgtacgaatataatcagtatcaacaaacaataatggtaaaatagttatgttggtagatcattataaccatgtttaaataactactaccacgttagggttaggagatttgagttagtttttagaaagcacaacattatcattaatcaatctcttaaccataacttcatttctgtgagaaattgataaatagaatggagattaaattattaatgatatataatcaataaatagaataaggtcgtaaacgaaattttccaaaaaagaaataaagaagcaaaatttaataataatgcaggctgtggggttcgaacccacgcgcacttatgtgcagaagatcttaagtcttcccccttaacctctcgggcaaacctgctgtttgatgttagggattcatacttataaaatataaccgtttttctatcatttgaaagctaaaaacctaatcgataaatccagatcaggagga

SEQ ID NO: 62677 - DNA, 810 bp, Cucumis sativus
  Intron number 1 from transcript Cucsa.101040.1 (locus Cucs a.101040) derived from phytozome v7.0 (chr-ID scaffold0092 7; pos 309928 to 310737 reverse strand)
attcaactgacttgaagctccaacttctttctcaggtactgtctctctctttctagattcaatggatttcatagtcattacatttttgaggggtactctaacgtttataatgtgtaatgattttgaaatgtaatgtaatccaaaattcatgttttgatcgagcgttttgggccggatatgtactaccaaactcatttcattttcacagttttcaactcaaccctctcttccaccgttttcaagcagtttcattctgcatccatttcaacacccctcaagttttccaataattttgatcacattccaactcttggagcagtctctttgtttctttagaatttttgaaaacgttgtgagaaagtggataacaaaataaaacaaaaaaaatttgaggtaaatatattgtttataagcttaattttcaaaatccaaatggttatcgaacgtgatcttctttctttctagttcttttgtcttttgaccaaaaaaaaaaatgaagtgttgagcatgtttccttttcaagttcagttctattccttctctatgcttcaagtcatcaactgagttgattgacaacttttgcttaacaacaacctcaaccacttctctaactactgttcctttaattttaattattgtgcatcatcataatctcccaaagagttttggagttttgaccatttctgttcttcttttcctttctaaagtctctatatattatctgttttggcttctgaacatcttcttctttcactagagatattgattccataagttttgtagtttcttttttgtttgtttgtagagcaa

SEQ ID NO: 62678 - DNA, 981 bp, Cucumis sativus
  Intron number 1 from transcript Cucsa.116240.5 (locus Cucs a.116240) derived from phytozome v7.0 (chr-ID scaffold0099 5; pos 145752 to 146732 reverse strand)
aacttaggttcatttctttcgtaattttattctattgctttgcaacttaagtggctgtgaaatttgttttaaattaaggaatgttaacagtggaattttagtttactttagtgttgaatttgggatttgagctccttaatgtcgatttttttaaaaaatttatgccgattgattcaagtgaaagttgagctccctatactttgagagctatgtagcttcttaagtttggtaacgccagattattttttctctcatagagaatggttgattcaatagtataatagtttatggctctcatccctgacgagcctgtgcagctcttcgctgtgtattttgtgagaaccatttatttgctcttgctcgtcagaacgatgaggtttcttttgtgaattcttctacatagatcttgttttctatttatgtatatgtaatacaatgtatttcaaaagaataaacaattaacctgtgttttcctgaagaatatacaattattggcaatgatttcagattgttgagccatcacagctaagcaaaatctattgtcattttgttataaaaacatttggacagcctgttgagttgaaagacatttttcaggcttaaaacgttaagagcaatgatactgttttaactttttaagtttcgtcttgacacccacatgcccaaagaggaaaagaaacagaatgttgttttaaaaagtttctaggaaatatgacaatttgcccgggcttttcaggagatcttaaagtaacttcaagcgatggattgtagttactatagcggatacagtctattatcaggacaaccgcatggtttaatattggttccatgttggttaaatacttgcatacgtatcatggaatttttgtatgttctattctaatatataataagtggttctttggctggattttgatctctatattggtttggtgggattatgatttgctttctgtattgaagtttatcgacgatgcagat

SEQ ID NO: 62679 - DNA, 909 bp, Cucumis sativus
  Intron number 3 from transcript Cucsa.022950.1 (locus Cucs a.022950) derived from phytozome v7.0 (chr-ID scaffold0032 0; pos 263701 to 264609 reverse strand)
cctttcaaagatatcagagcagcttggcaactcaggtaaattttaaatggatcttggtactttgatttcacgagcaagcaacaagttatttgtagcgactaatttatttggtgccaactgtcaaatggaacaatatgctctgtacttcttgtctaagaagcatcgacactcctaagatatcggtgtcagaaatggcctcctattttttcattttaattttggacatgactccaacacggctggagaaaaaaaaaaccccatagaaatggcccattagcccagtccaatgacaataattattaggtttctttttcttttttttaattttctctaaaacgaaaagcttcacacactccaccctcccttctctgattctccacaccagccaccaaccctctcactggttgctgttgccgcccatctttcttgcccgtcgcgtgaacttgtctaaggagagaacatcattcttttttttaattttatggttctaaacttgttattttgatgtttttaattggaatgcttgttatgtaatatgtttatatgtgtgacatatatttaactcttttactaaaaaattgacgtgtccccgacgtgttgtgtcctacattttcgagaaatggtgtgttgccgtgccccatgttggtgcttcctagctttttgctcacaaactttttatatgcacaatatgcaactgtttccaattactatattatgatgtatcatcaatggtctttacttggtttaaagtaacgtagaatttcgccaatcgtcatttttgtatcctctttcaagttttgttttttattattttttagatacttttaataagtttgtgcaaagcattaaatagagaatatatgtgtttgtattgtaatctaataatccatgtttgttatgcagttattc

SEQ ID NO: 62680 - DNA, 598 bp, Cucumis sativus
  Intron number 1 from transcript Cucsa.123670.1 (locus Cucs a.123670) derived from phytozome v7.0 (chr-ID scaffold0100 0; pos 781745 to 782342)
aattcactcgtttgccattctcaattcctcaatatgtgagttcaacttccgaattttacttgtttcttttttccggtttgattgtcagatttgtatactgttgttaaaatctatgagctactactagataccgtatgtgtttgaattgcttaagaaagacaaatttatttaccagattctaaagatttctagcggctaggctagtctagtcttcaaattccatctgcgtctgttgtagtgttcatttaacgagtacacttagcgatatgggatccatttgggagatcgttgatactaaaagggaattgggatatttgattttggatttccattttttgttggctgaaaaattgaagacattaatgccttgattcatatggtagtggatctaaggctgggtggttctgaagtttgttttgcttgagatcgttttcgtttttacttcagtatggggttttgttccctgctaagacgtttggatggcaagaaatgaacccttagcttttataataagctacattgactttttttgtatgtctaattttgatgaacatttggagcaggttcttccccgataaggctgcatctctggcatttg

SEQ ID NO: 62681 - DNA, 686 bp, Cucumis sativus
  Intron number 2 from transcript Cucsa.105410.1 (locus Cucs a.105410) derived from phytozome v7.0 (chr-ID scaffold0092 9; pos 110980 to 111665)
attggtaagaatatgaattcagattgaattttcagcttgatggttgaatgaatgattcttgtttaatttgcaagaaagagattctgttaactggtgattcattcgtttacttttgattgttttttttttttataatggatcaagttgattttgccatgaatatgatcatgaacaaattctgagttcagcttcaatatcgccttttggtttctgaagattaagtttataaacacgacttctaactgattttttaaggcttgtggttagatttgaagttgaccatcaaatgttttctaatcagtaatcgcagtaagaaaattagaatgtaaaaataaaaaactgaaattgaaatcgctatcaaacaaggtttaaacattccttggttgtaaatcttccaatttgattgtgacttgtgtcatttcttcaagagttgagaaagttctctttgttagtatgtgaatcatgacatgtggtgcagtactcaacaattttagtccaattcgttttataattggaatctttcagtgagccttgttaagctatgttatacaagttcttgatcaagtattgaaatggagagaatagttcataggtctttgtttctttgcttttttattttgtttcaattcatagttaatttggttgtttataaatctttttcatttacagctatctgctagcgtcat

SEQ ID NO: 62682 - DNA, 532 bp, Cucumis sativus
  Intron number 3 from transcript Cucsa.058660.2 (locus Cucs a.058660) derived from phytozome v7.0 (chr-ID scaffold0061 4; pos 786516 to 787047 reverse strand)
atcaggtaagccagtatggttggacgttgtgctacttgccgatattatttttatgtgaatgtaagttcgaagagtttctggtgcaataaattgtatgagaaagttgtcctgtaggtttgagcagtattctttctgagccactgattttaggagtatgcgctgcatttcgctaatttatgagaattttgtgaaagttgtcctgtagtttctttttaattttattcttttgaggcaatagccaagtggttcagtaggcatgtgtgtaactgagacattttctggattgtttgaattgataattgatcgaatgatgtaataaatattggtaaagtccagattataaggatctgatatcaaatatttgcttgctttcgttgcatcacaaggatattagcagctgtgttatagtttgaattttgtgagactgtttttgcttccgcaatgttttcaatgccaactaatatttatgtttgtttcctattccttgtcaacgagacgctcagattttttaattcaaattcccaaactgtag

SEQ ID NO: 62683 - DNA, 698 bp, Cucumis sativus
  Intron number 2 from transcript Cucsa.000210.2 (locus Cucs a.000210) derived from phytozome v7.0 (chr-ID scaffold0000 9; pos 12975 to 13672 reverse strand)
ctcttcaacgtaactgcaagagaaactcattgaaggtacattctttgttttcttgggtatactgttaatttaggctttttctttgatggaccaccatggttcaaaattttgggttccgattttatggaaatatccatggaaactttaggaaaatttttggaaattgatggaatttgttatagttagttaatgaaattttgattatagcttaatgagactatggatgaccatttttaatcttcaagtaatcaacatgtagatgtatattgttaatatctgtgtgaatgtccacaggggagcgtatatttaaaaaggaaatggaaacaaaaggtcttgatggtaaaagaaacaaaactcacatcaattcaaatttgaagttaaattatgaattgttgtatgaaactatacaattttagtaatcaagataagaccataaaactggaaaaacttcaattgagctagcatatctgattgcttgagaaaatgaaatttcgatggaaaatttggaaatttcgtgaaatttttgagaaatggagggaaatcgaaattcttcctaactcgaaactctgagatttcaaccgagaattttcactgtggttggggcaacatatttctgcagtttcaatgtaactacatctgatattagtgcaaatttgttggcagtttctcaatctgtctcgctgtccaagtatcagcca

SEQ ID NO: 62684 - DNA, 869 bp, Cucumis sativus
  Intron number 1 from transcript Cucsa.026520.5 (locus Cucs a.026520) derived from phytozome v7.0 (chr-ID scaffold0036 8; pos 83073 to 83941 reverse strand)
agaattctacttttgcttctcagttctctacacttgtaagtattttcggctttctttttgttttttgttcctaatttttactccctgatcctttcaattccgtatccataaattctagttttactctgattcttgagttgtttcctctccacgtttgcttacttgattcctcgatttcatcttcgtttcgacgcgattttttctatttgattttggtactgcttcaaattcaactttctgcagttactgtcttctaatccatcattggatatgccatttcagaatattcaaaatggctactttcgcctctataatttccttagtcggactctgggtctctttctcttttgtgtctggcgccgatggctcaattgtgggtcaatatactcatttgcgtgctctctgtagctattctatcttagtatgtggcatctggtggtgtctcacctccctaagagtatggacacttgagtttggctagtgtaaatttgtatccgacacatgtaggacatttgttagctgttagttactagttgtacaaagtcaatataagtccaacatttgttaaacatgtatcagacactagaaattgaacaaatttttagagccgaatgcatcaaactattttttttttttatcaattatataaatgtattagtttattaactttgagtttatttttttttattaaaaatgacatatattttgacgaatgcgtccttgccattttttttttaacaaatgatgtgttagtgtgtttgtgttgtgccgtgtcttgtatcttcatccatgcttcttgtatcaatattattatcccttacagtaagaagtctactaactgcaatctgactttctacattaagacaaaa

SEQ ID NO: 62685 - DNA, 755 bp, Cucumis sativus
  Intron number 1 from transcript Cucsa.101100.1 (locus Cucs a.101100) derived from phytozome v7.0 (chr-ID scaffold0092 7; pos 390610 to 391364 reverse strand)
ctctaatttatcaggtgaggttttggtcttggatttgcgtacgtgcttaagaatgcatggaattggaaattaggtatggtctgagaaaaatacgattttaaaatggattttttatggaaacatatgaactcttatgttgaaatgatgtcagaatgaccatcgttttttagattgctgttgacgtactggagctaagccgggggataaagcaatattttgtagttcccgatggcaagttaataatatgcaaataaagttgtgggatgtggatatgatttactagttctattgcttgcaggcatttcttcccccatagacttgaaagggatagtttaggatcaaactaacttgattgttagaataaacttgacattaacaacactgtcatagttcgttgtttgtgtttttctctagagctattgaaagtttcatttcgtagtattttggtagcagtactgggctgagtcgactcatgttcaagttaagtgatttagaactcccatttgtgtgcttttattttccagtgttctgtcagtagcctgtcctttacgtctcctctactctgaatttcttcttctacttcttattttatgttctcatggaatacaaaccaaatcaggtgcttttattaatctcaataacatatcatgttgggaaggagaaacttgtgttcacgttttattttcaaattttatttttgtttattttggttttttatatttaattgcagaagaaacatttagagttagccaaaa

SEQ ID NO: 62686 - DNA, 602 bp, Cucumis sativus
  Intron number 2 from transcript Cucsa.117880.1 (locus Cucs a.117880) derived from phytozome v7.0 (chr-ID scaffold0099 7; pos 207323 to 207924 reverse strand)
cagtacaggtagagctctgaaaaaaagccacagaagtgaattatcatgtccattgtttttaaagttttgttcatttctctgtccttctctccgttgagaaaaactgtttccatgattttacttttaacaaatggttggagttttgttatctgggtctttttgacatttgatgtctatagtacgttagtttggagaacttgtgtagcttgattgattgagatctgtgaatcaactcattagaacaaaaattctgaatttacatacaatggcaagcagctgttcgtttgtttcgttcattgtttggttttggtttcttttttaatgcgttctttcacacttgggttgcatttcttcactggacccccaccagcaggcagtcatactcttttgtgttgggaattggaatttttttgttgttttggatctttcttttgtttgaatgtgcttacatgaatccgaatttgcgagtcacatgttctgcggaaaatcgaaattgtatatgcaattcaacttgatttgacaacagtagcttttcttcgggttatggatatctatcttacatttaatttatgcaggagcaaatttaaacagcattagcaggg

SEQ ID NO: 62687 - DNA, 427 bp, Cucumis sativus
  Intron number 1 from transcript Cucsa.091030.1 (locus Cucs a.091030) derived from phytozome v7.0 (chr-ID scaffold0089 4; pos 2122144 to 2122570)
aacgttttctggtcgacctacctccggcaacaagggtatgctacgccctttttattccactgttgccatggcggacacttaaccgaactcgataaacttcgactcaaaaccctaatcataagacaatcatggaatattgagtattcgatttgatttttcttgattaaaagtatttaaactgttggccgtcgatccaattgagattctaatttcttgttataattataaatcgcttaatgagaaacatactgttgattttgattaagaaatagccggcagctcggatttatcttgcaattagacggatctacacttttgaactgaaaatatgcccaatcgatacctcaaacttcttaatttcctcgttgactttttcttatttttcttcttttttttttttaatgaactcttttcggatcagagctcg

SEQ ID NO: 62688 - DNA, 502 bp, Cucumis sativus
  Intron number 1 from transcript Cucsa.026550.1 (locus Cucs a.026550) derived from phytozome v7.0 (chr-ID scaffold0036 8; pos 101838 to 102339)
tacgctaataaggtcggcccatttcacaatcccaggtaattcttttttattttcttctaatttcgatccataattcaatctgaccatttcttctttctgtaacccatcttttttattcttgctgcgcattcgttcatgtgctttcattttcttttgattgcatcgtggcctgtatttcaatctttttttcgtttttgttgaattgaaatgggtgtctttaacgtagcacctgaaattatttggatttgggaaaatgaaatgcggccattggcggttgatgattcggtttggagtgttttcattagattagattagattagattagattggttgtttattataattattgttgtcgttgttattattattatcccgttggaatttataattatttagccaatttttgtctggttgtttgtgttttttgtgttaatttcgctgatcttggtttttctgtgtcattccagtgaaacctaccgctactttgatctgcctttctgct

SEQ ID NO: 62689 - DNA, 841 bp, Cucumis sativus
  Intron number 1 from transcript Cucsa.096980.1 (locus Cucs a.096980) derived from phytozome v7.0 (chr-ID scaffold0091 9; pos 2413278 to 2414118 reverse strand)
tgcaggtttcaggtgaatctgaactttgattaatttctaactatggatttaattagggatattcccttctgattctgctcctaatttcgattaatgtctatgcttgtattttagttgcttattagttggatgaatgatgttatcaatttgcttagttttggttttctggtgtgtagattgactctgttcagtctcactcagacgcacaatcgaagttgcaaaataccgattgtgttcaattaaagtactgttgatgaatcaaagcttaaaagattgtgttcttaacatgttcattgtaaagttctttatagttttttggctgtttaactgttgtatcttaccattctcccatgtaaatgattgcaaaatgtcctgagaaagactttgatagaagttactgagttcatttaattggaagattccttcttgctaatacattcaattaacaaataatactgaaacaattttcacctttttttgtggttctctcttaattcatcaagttgctgattagagggatagccccatctaaattttgtttgattctctgttttgatcaacaattttctccaagttggaaagccatgtcgagcttttctgagtgtaaagtctttctatcgaacaagaaagctgaaattatagcaattattggtttggaccttttcttttttactaataaaacaatttttcatatcatttatgtaatcgtaggggatgctcatgtaaccaggaaaaatacaaatgaagtggctgtggtttctagaaattcatggcatctaaaacatgtgtagactgatttctaataggttccaggagaggcggaagcagattttgcctgcat

SEQ ID NO: 62690 - DNA, 788 bp, Cucumis sativus
  Intron number 1 from transcript Cucsa.047380.2 (locus Cucs a.047380) derived from phytozome v7.0 (chr-ID scaffold0054 2; pos 2429566 to 2430353)
gaaggaattggaagctcatatcaacccttctcaaggtacaattctcatattcgtacccccttttttcaaatttttaaccccatgttttcatttgtttcatatgggtcccttcttctgcttctgattcaatccctccttcagttgctgtgtatgtaaatgtaatgtaatttctcaagtgggttttgccacttgtgtcttcttcttgcttttgagatctgattatgttagatttgatttggttttgttttgaatccttgtgattagaatctgtgcacctcttatttcttgtttgttattgtgttaaccaaattagctttgtcggtagatttaaatttcagctgttcttttttgcgaacctgttttttaattttaattttccccccttgggacgcttcagtccaaagtaagagtcttttttaattgtttaattgaattaatctcgcttctctgttgatcaatcgcaattttcaatttttttcctctgttttggattctggttgaaattggtgcgtcaagtctcaccctactcatcatccaccttcatcagctttcttttacttttgggttcgagtttctgttactgattcgtttagaaagctgattcttggggtatttttaacttcaagttctttgattgttttggagagaaggatttgacttgaggtagattgcatgagttgtttcattacaatttagagataactttaccctcttttccatctggggagtgggaattacatatttctcttttgagttcttctgattataatttttcatgacaggaaagg

SEQ ID NO: 62691 - DNA, 1047 bp, Cucumis sativus
  Intron number 1 from transcript Cucsa.089180.2 (locus Cucs a.089180) derived from phytozome v7.0 (chr-ID scaffold0089 4; pos 471308 to 472354 reverse strand)
cggccctcttccccgagaatcaacaataattctaggtaaacaaagacttggtaattaatattttggctttgaattgtgttatagttgaaggaactgactccaactacatacttttaagctcctccatttaacttcagtctctatagtttcaatatatcttatatactttatcctaatttttagtgaaactggttaagtaatattactcatttttagacaatgggatatgatatgctaacgggtaaagagaaattaatagcaaattaatcctaaaacactaaatttaaaatatatgaaataaaattgaacggatctcaattgcattaaccaaaatagtattggtaaatattttcaaacgtctatttgaaacaattactttactaagaaaaacctaataatattctttttttttctttttagattgggttaaattaatatgttagactttgttttcttttattgatttgaatttagtttcttccactgatggacgtaaggatttggacataaaagagcatgagacaatttttattgaactaagtctatgaaagtaactttcaacctagaaaccaaattgttatgaatcgagcctaagttatctccgagcatttcaaacccttgccaacaattaactattttcaaatgcaaaaggactagtttcttatataggtaggttgattgatgtatatgatttttattgaaatgtcttgaatatgttatataccaacttatagtcaacaagtcgagtccacggataacatgttgtggtggaggttgaaggatgactccctcaaaacctattttgaatatgtatttaccatatttatattatttacatctttttttttctatggtttaaagaactgcactgtttaaagtctattgccctccctctgtctgtaacgtaattactggcattattgttagtaaaccaagtaaatgtctgcttgtttctctattgctatacattctttgtatttctttatttattgattactcaacaattttacaggacaaatatatacataaatccaagagtagcaccac

SEQ ID NO: 62692 - DNA, 476 bp, Cucumis sativus
  Intron number 2 from transcript Cucsa.108670.3 (locus Cucs a.108670) derived from phytozome v7.0 (chr-ID scaffold0093 1; pos 933503 to 933978)
aaagtaaaacaatgaatactaactttttctcttctttttcttcgctttcttagtctctaatatacgtttgagtgttttttttttgtttgaaatggctcgatttagttttcaattatactattaagtgtgtgagttagcataaatttgaaggaaatggtttgatttgttaaaaaaatcttccaattttctattgagatttcttgatattttggtgcagatggaattaaaatttttaatttcacctttttaatggcctaattcttctttttcttcttctgtatgatagaaaataacgatggttaaaacagacacaagatactaaatttgactcgtttttttaaccttggtgtcaatgattatgattaaacaaaagcattagagactaaacacatatatttaatcgtttccgaaaaccgaaaaaaaaaccggggtatttcatttttgcaggagcaacacctaagtcagttcttgagctg

SEQ ID NO: 62693 - DNA, 491 bp, Cucumis sativus
  Intron number 1 from transcript Cucsa.116440.1 (locus Cucs a.116440) derived from phytozome v7.0 (chr-ID scaffold0099 5; pos 342180 to 342670 reverse strand)
ctcaagcttgccgattttggacaggtaattctcttttaatcttctttttcgattaagatctgcatacaattgcagtctgcatattacataatctgtttagatgacgagaaatcaaagttaaatgtggagattctgtacacactctgcttctcaaaattagctcgttattttgaggaatcactgtgaacgacccattcaactcattagttgcaggttggatgcttcaaaatctctgcttgtagaattgttcaacacagaattttgagagaaataatctgaaatgaattttgattaaatgtattatttatctgttcatgttgaaggtttatgttttttttaccaagttctagctcagattcatgatactgaattttactcgatgctgttctcctatttcctttcatgttttgaatttctaggagttgagcttgatattggtttcggtgttcctaaaagaatgagtttgatgttggtttcaggcaaggatactc

SEQ ID NO: 62694 - DNA, 984 bp, Cucumis sativus
  Intron number 1 from transcript Cucsa.057630.1 (locus Cucs a.057630) derived from phytozome v7.0 (chr-ID scaffold0061 4; pos 30248 to 31231 reverse strand)
tttactccctacgtggagatttgattctcaaacaggtatcttgttaatctcttttgtcccttttcattgttttgatatgttgttttcatcatcagaaaagctgaaagggggaattaaaatctaataaactttcacgggatcactgttcttaaatccatgacaaaaatcaaaatctgatttctaggaaaggaaggaattgtttgattaagaaagtactataattttgttcacaactgttttaagaagcgtattcgcttaagatgtataattatggaacctttcttgttggtggctcctttttgtgggtttttgccgcacattcttccatttctctctcaatggaagtttctcattaaaagaaagatgtataattatggaagtacttgtaggttttgttatgatcttttacctggaaagatgataatggaatggtagatgctctaattatttgacaccctatcggtagtttaaaatcccgatgctaatatgattgttggccttcatttggttttattggtagtttaccagggtttatatctttaagacttcacaaaatttgcaattgcctaatattatttgaggaatatatttggattcatgtatctatggggaaaaaaagtaaaaggagagataacatctcaactaagtacgcttcaagttaaaaccttagtttaggtaaatgtgagcgcaagatgattttctaccgcaaatgcctgggagtaaaacatatccaattgtcaatcctcctcctgcaaatatggaatgcaaaatatttggttattgacttggaattttattcatttaaatacagtcttcgttgttaatataagcaatgcaactatgttagtctagatacaaacattacaaacttgcaaaattttgtattctcgttactggaaacttgattttttatgacacaatatatgactccattttttttttctaaattctgatggaatttattgccaatttgtggccttttag

SEQ ID NO: 62695 - DNA, 784 bp, Cucumis sativus
  Intron number 3 from transcript Cucsa.093770.1 (locus Cucs a.093770) derived from phytozome v7.0 (chr-ID scaffold0091 9; pos 76646 to 77429 reverse strand)
ttgctttcattactttgcggtgtctgattttcaaggtatgaactgcatctcaaggtagcttatgaaaattgagaacttactgtactgctgctcatagtcttttgtataaacatctggtctatggcaaaaagattgtccatctgatttatcttcatgatgtttgaaacagtatgtagttttgaatagaaattgaaattcttttagcatgtttgtcagttttaataatattaaaagaaagattatggaaatcacttccaaaatgacttttaataattcaaagtcagttttaataatatgaaaattgtatttgaaagtgtaaaattataaccaactaagtgtatttcgtattgattttgaagtgattttagcaattttaaaatcaatcccaaaatacacattttcattggcaaagacagtattaagtgtttctaattctttcttttttttgtttatttttcacactatctttggatatgctacaagtcttttgtcacatggaagataccttttccatcagttcgtctttttgctcatttcttgtgagttggtagaaaagctagtctgaagttatcaacaagtgtgaaagccttttttcccttgtaaagggatacaaatttgaaaattttgtgagattaaatcattaaataatgtagttttcttttcaatttctgattgcttccagttgcgcaaatttacctggaattactattatactgatattctctaattgcttgatcacttgatgaatgtacgttgttcttatcaccttcaggtgacgcactct

SEQ ID NO: 62696 - DNA, 456 bp, Cucumis sativus
  Intron number 2 from transcript Cucsa.048150.2 (locus Cucs a.048150) derived from phytozome v7.0 (chr-ID scaffold0054 2; pos 2950842 to 2951297)
cacttcctccatttgaggtaaagttttctttggacattaagaattctttctagatgatgtttctttactgaatttagagcatgcaaattggaaacatgtttacatgtgggaagtaaaaaactgttttgtatcttttcctttgcaatttagtcaaaataaaaaaaattgaagtcgttttggtcctaaaaaattatatgagatgttataagatatatatgatgtgtggagtgaaagattggtgccttggtccacatattatcacttttaaaaaccaaataagatttcagggtaagaaagattgagatattgtcaaagtttttgatacattagctaagaagacgtaatgttgtttatctttgtacatattgggtgaaagatcaatgagttcattgatattaaacattatgcccttttgtttcaggtggttgccctgataattcaggctcttgcttggtg

SEQ ID NO: 62697 - DNA, 702 bp, Cucumis sativus
  Intron number 1 from transcript Cucsa.083530.1 (locus Cucs a.083530) derived from phytozome v7.0 (chr-ID scaffold0085 8; pos 330640 to 331341)
ggatatatatcacttcaatccttgggatcttccacgtaattttcccctttttccctctgatctctactactatatcttctgctcttcatctttttcttcttgggtggggagttgtgttattaaacttaattaatgagttgtttagcgtaatctgttagggtgtttatgaaaattatatattgcaattaggtataagcatgaaaaaatatttttttacaaattaggatagcaagtgatcttgaaactgtgaaaatcacttccactgtgtatatatatatatatatattgaaaaatgatctttaaaaacatttttctttccttgtttgtttttgtattttttatatttaatcatgtcgtttatgatttttaatcttaagggctggagaagtagaagtgcatcagacaaagaactcctcttctatatctaataatttaaattatattttattaatacgagggctctctctcaattaatcaactcaaagatatatctaacctatatttttagtaaatcatgtaaagtgatcaatatatgggtgtaaaaacagtatttttaatgattacttcataaagtgaattgaataaaactctaattttgattaacaagattgttcgtttttagctagagatcatatatagatatattgtatgtgtgtgtgttttttttgttggtagaatttgctggggaggtgtgcaagagag

SEQ ID NO: 62698 - DNA, 367 bp, Cucumis sativus
  Intron number 2 from transcript Cucsa.121460.2 (locus Cucs a.121460) derived from phytozome v7.0 (chr-ID scaffold0099 9; pos 36389 to 36755 reverse strand)
agccgaatctgagtgatcctctgggtggaacaacggtgagttcaaatgtttgcaagtttttggttaatttcagttcctcgtcgtactgaaaatcaaaccttttctttttgtcaaagcttgaataaataacagtgtatatcagctctttgctttattcttgtactgctacgaggtgtgaaaagaattattaactcagatcagtggttaataattccgtttagtttttaactctctgtaagtgtgataactttgtggcaatgcctgcaagctttcctaacatttttttgaatggtagcttgtttcttagaatgactgaaatttctgaaaggctacacaatcatagttttttcaagtgtatgcaggagac

SEQ ID NO: 62699 - DNA, 372 bp, Cucumis sativus
  Intron number 2 from transcript Cucsa.124120.1 (locus Cucs a.124120) derived from phytozome v7.0 (chr-ID scaffold0100 1; pos 164960 to 165331 reverse strand)
aggttacaccgtcaaagccagtgttcgaaatccaggtttgtctaatattacttcttttaatcaaaatattcctcttcccaaatgaattcttgtgaaaatcgataaccccagttggcaatattgagttttatagcaaaatttccttctctttggtgattagtttcttgatcggtttctttagttttctcttcatttttcttcctttaatcaaatattcctcttcccaaatgaatgcatgtgaaaattgacaaccccactagggagtatttagttttgtagcaaaatttccttctctttggtgattagtttcttgatcggtttgtcttttttcccatagctgatccaatcaagactgcccatttgctttcactg

SEQ ID NO: 62700 - DNA, 583 bp, Cucumis sativus
  Intron number 4 from transcript Cucsa.106670.6 (locus Cucs a.106670) derived from phytozome v7.0 (chr-ID scaffold0093 0; pos 192568 to 193150 reverse strand)
gccaggctgctaataatcaggttcaaatgcttttactcatctcttccttcaatagtgttcaactgcttatatgcactgtgacattgtattcattcgaaatttccaaaatggttccaatttcctaatttaatcgtcaactcctcattactattgagtgacaacttgtatatcagatgaaacaacctctttggaacaacttttcaagggccttgaaaaagagaggttaaagtagtgttattttaaaagagtttttaaacactcaagaaaattattccaaaccaaccttaaaccaactgattgatttactctgacaactaatatcaaatgaatggatccataccatgtccttgtcctcctttgctataaagtatatcataaccgatcaactactgtgtttatatgtattaatgttgctagtatagttgccgcacagatattataaccaacaaaaaccaaaacttatcatcatgcttgctggtatccatattagcaaagatatgtttagtccaaagatattacataaatttccaagacatgtatacacgtgtagtaattaatgaactcggtttccttttcaggatct

SEQ ID NO: 62701 - DNA, 847 bp, Cucumis sativus
  Intron number 6 from transcript Cucsa.116720.2 (locus Cucs a.116720) derived from phytozome v7.0 (chr-ID scaffold0099 5; pos 578921 to 579767 reverse strand)
ggttggaaaactttttgccttaaaggttgttatactggtggaacaattctacactcttgcatctgtttttggtcattctacttttgctttaagttattcacatattttgttccttggctttgttatattagttgaagaagctgctgcaggaaggtagcagtttctaatctttacatttaatgtggaggtagctagtaaactgctaatacgttcatttagctatgaggataaattcaaattcccttccaaaaagcagtagaggttggtcttggtttataagtttaatttgttgaagttgaaagttcttacaaaaatgtaggatagtgagctagttttatctctttgatctatgggaaaaaagaacaatgagttttggcaataagtgataaaagccagatcaggcagtgcctcaggggtgactggtgactggtgactggtgagagtaatatggtaaactattcattgttatgattatttctatgatatggttgaattatgtttgatgttgattcattgttttatttgtttcacgtcttctttaagccaaaaataaattaccattctgtccaaatagttgcgcaattaacttgtcttcctgtttggaagtgttcaaattttgaagccaaggtatctgtttgattttggttatcttagatatatagcttatttatccaaactccatagtttttaagaatttcactctgcttagtcttagtatgcttgtgatgtcgtctccatcaaaatctgctattgtttgtgctattttggcttgtgtatatcataacctcgggtgcaaattctataattatgttggactcttttctaccacatgcttcaggtaatccag

SEQ ID NO: 62702 - DNA, 460 bp, Cucumis sativus
  Intron number 4 from transcript Cucsa.116720.2 (locus Cucs a.116720) derived from phytozome v7.0 (chr-ID scaffold0099 5; pos 580064 to 580523 reverse strand)
gttcccgttcaagaaacttccatccgttctttcctgtaagtttaatccatttctctcttgtttttctgcttaattttcatcatttcttcttccttttcagcgttcctttcatttccttactgttactctttatttgattgtgtgtaaatatgctatcgtgtgttcctcaatggaggttcgattgagttgcattcttagtttcttggaaatcaatgctagaaaacatacatgtttttttggaagtttggtggacttatcttttgttgactggatgaattcaattaactcgcttcattcatctactttccatttcgagtatttctaatttcaggaaggatttagggcatgatctgtcagatttataatgaattattagtatttcttttatacatgcgtatttctgtttcatcggttatcgtttctgattttgtaaatttcaggactgcaagtggaacatttc

SEQ ID NO: 62703 - DNA, 546 bp, Cucumis sativus
  Intron number 2 from transcript Cucsa.116720.2 (locus Cucs a.116720) derived from phytozome v7.0 (chr-ID scaffold0099 5; pos 582324 to 582869 reverse strand)
aaggggagcctggagctgttattcgtgggaagaaggtgataagctttaatagtactgtgttatacttttcttctgtgagttgtgactccaggatagatatgatcggcatgcaaacaatttattctgaaaaatgttctaaaatttacttgattagttgcatctgagtatgatttgcttcatcttaggttagttctctaattggtcagtcaagatagttacattgctaaaagttcgtaaattcatcggaatatgatggcaccaatgcactgttctattggtggagatagaaatatctttgatgtttacttcggaaaattacaattctcctttccattgaatttttaaaaggggtcattgcaaatatatcaatcaaattcgaagtattagcaaatctaacatgaggtaaaaaaaaactgccaatacagcaaactttagatctagctcttggagtcctaaaagttctacttattggaattattctcttaaaaactaattatcttttgattttcagggcccaggtggggttactgttaagaagactggtct

SEQ ID NO: 62704 - DNA, 611 bp, Cucumis sativus
  Intron number 1 from transcript Cucsa.116720.2 (locus Cucs a.116720) derived from phytozome v7.0 (chr-ID scaffold0099 5; pos 582938 to 583548 reverse strand)
gcagcgtttgggctcaaagccaagctttccctcaggttttctctatttctttcaggatgttttttaatccgagtattgatttgattgattctttgtaatccatggctggatctgtttggacttttttttttattattattcaagatctatatgagttgatctgattgtttttcaggtcgatgcattacttcggtgtaactctttgcagttttgttagatgtgattgaaattagaatctgttgttgtttcttttttgtttatgttgatttaatgttgcttttgtgtacgaagcaatgaagatctggagtatttcgattttgttagttaggaattggctcagatgctgtgctgaaatataaaaccttcgattttgagaagggaaatttgagtatctgttgttgcgtttacatttctctgtattagttagtttgtcatggtgattgatatcgtatggtgtttgttatgtatggaattgacaggagaagttgaaggttgttgatccatctaattttcctgatttcttgtcaactgcatgagattctcaatgcatgttcttgtttttttggttatatgcagctcaagcctgaagaagtttctggcatcgtggggga

SEQ ID NO: 62705 - DNA, 745 bp, Cucumis sativus
  Intron number 3 from transcript Cucsa.114940.2 (locus Cucs a.114940) derived from phytozome v7.0 (chr-ID scaffold0096 8; pos 269344 to 270088 reverse strand)
attttggtaaatttctttttgttaatataatatttcatttttttgtctgtttgtaagggttatttttaaatatagaaaatgaatataaatatttacaaatatggaaaattttacttctattacactactatccctatcgggatagacctataatctatagcagtctatcaacaacggttatattttgctatgttcatagatatttttagcagttttctcatttaaaataattttccttttttttgacgtttttaaaattatttttcttgtatgaaacaaaatttgactactaagaaataaaaagggcagtatgaagactgggtatttagagttagctcaattttaaacttattgggaaaggtagatacaatcattaatcaatgacaaagaagctgtctgcagctaagctttaaattcttggggaagttcgagtcaccatagtcaggcatgacgaatgcaatgtgaaaatggttgagtgatggattcttaacttaaattggcggcttaccccaatgatgggttcattcatttgcaaaagaatcatgagtctacattgattatttaatgtatttgccaagaggaattttttatatttttatgttttgatttagcaaaaggtgtttatgaatgatttagcaatatattttgatttagcagtaggagcaacatgttttaatttgcttatcttacttttttcttactgcacaaactatttttgtagttgctgtcaggaaggaaattcaag

SEQ ID NO: 62706 - DNA, 587 bp, Cucumis sativus
  Intron number 1 from transcript Cucsa.114940.2 (locus Cucs a.114940) derived from phytozome v7.0 (chr-ID scaffold0096 8; pos 270312 to 270898 reverse strand)
actccttgccggctatcgccgtcgtcggtggccaagtctgttttcgatctctctcttcttctttattttctttactgtttcatctaactgtgcctgcttctaactcatcgacattagtttagcgatctgagctgatactggtgttcagggattgagatcttcttgttctttctttatcgtttatctttttgttaatcgtttgaaatggatggagattttttactgcctgaatcgttagttcggaggtttttgttgctcaatcaaatgttaaaaatggaggatttcgtgaaaaagattgtttcgttgtctgattttgcaatcgagtttgttctgtggatccgtgtaattagccgaaagttctgttcggtagataggcgttgagtaatatctagaatatagtacaaccgcggtgtcgacgcgatatgtttatttgtgtcggaactttcttgatggcatcaggcttctccattatcttatgtgctgatttaagtggagagagctatagctcatagccaagcagaaatgacctttctcgtttttcctctcttgcagagttcgggcaaatcttcagtgttagaaagcattgt

SEQ ID NO: 62707 - DNA, 725 bp, Cucumis sativus
  Intron number 1 from transcript Cucsa.108240.2 (locus Cucs a.108240) derived from phytozome v7.0 (chr-ID scaffold0093 1; pos 428038 to 428762 reverse strand)
ttagcagatcgccgactcgatttccccttgttcaggtcgctctctctttttaacgtttcaatttcttcctttgatcagacattttatgtatttatccaccacctattctcaattttcgtatactttcatgcgtttgattgaattaatttaattaattttgggttttgacgcagctgtttctgtactgatttcaatgagattgatgtagattcgtatggatcgaaattatgtttttctttgagtatcgattggtgtagcttcaatcgtttatacttaattttcaatgggttccgtgccctatttctccctctctatcaattattggggttgaaggatgttgggtttataggcggaattgaacagtttgggtgggagttagttgctttgttaatggcttgttgctcaactttttcgacaattatgaagatgttattgatctatgtttcttattcaacgctgtagtttcccaaaatcgcatgcaattatcaaacaattcatggtcaaccacgttattctttgtaacttgaagattccttcttttctctgtttctgaaattcatttaggtttcaaagtgaatggataagctcctttatgatatgctgtattattttcatttctataaaaaaaaaagaaaagaaatgctatattattctcattgttatgatgttattacaaagctagtttttcagacagtagaaagttgacggaaggcactgctgataaa

SEQ ID NO: 62708 - DNA, 1032 bp, Cucumis sativus
  Intron number 1 from transcript Cucsa.057850.1 (locus Cucs a.057850) derived from phytozome v7.0 (chr-ID scaffold0061 4; pos 159337 to 160368)
atttaaaggctataggtcatctgggtagggcacaggtatagcagtgcgattaatgtttttttttttttttttttttaatttccaaatcgtacacatgatattgctactacattagataattgaatttctagtgattggctcgagtgttgtattttgactagcacagaaataatttactccttattacctggagatctgtttaatttactgattgtagtctacttgtgtagcttataaatggctcatcacaaaatatatagatttcttagaacaaaaatctggcccaataaatttatcaggagttcatttgccaaatagcttctttaaatagttgtaacacacttctatcaagtggctttctcagccacaagcttattgcatttacgattacattctaaacctctacttacaaaaagacgaataataattattatcatggggaaactattgcccatagaggaaactattgggactgggtattactcattcaaaaaggtgaggcgtgttggagaaatcgtttcaaaatagtcagctgttagtacatacctgtcgataatagcacatatagttgccatactgttgtctcatgtgagtcgatcaatcttgtggagactacgaaaagttggtacactttttttgtctgtaatagttctgtcaatcctggttcatcttcattacttctcattttagtttagggaactcctaaccctgctttttttgaagatattgtctttatgttctacatttctacctattctagtggatatcatctagcaaatattgtattcaaaccattgtccttgtcagtggtattttttatctcttccaaaccctacaattccatgccatctattttttgttttttgttttctatctgtagtgaggtgtttggtggtgttaaataaatcagagtcatgtgggttaaggatttcttttcggagtatccatttggttctttttttatttcttctgttttttctttaacctttattattctttgggtatagggcacgatcaatatttcttcaacgt

SEQ ID NO: 62709 - DNA, 970 bp, Cucumis sativus
  Intron number 1 from transcript Cucsa.135150.2 (locus Cucs a.135150) derived from phytozome v7.0 (chr-ID scaffold0104 4; pos 52590 to 53559)
gctctggtactcctctttctttttatgttttcttcatttttattttctatttctgcttcctttttctgtttgctttcatctaaccagaattgtatgattgtgattcgaattcacatccagcaagtcatttaatatgtatgcattttcttactcttcgtggcattgtaattctctttgagttgaactttctattgtttgctgaagactaagaagcgtattgaggggttctattttttagtatatttgacctgggtatttgctaaattttaaaattttcactgtggggttaagtttccatatactgttggctcagagatatgcaatatttgaaggtgggtgggtgctttatgaaaacttttttttttgctatggaaattcaaacccggttgattttatgtgttttctaaagtataattgtgtccaggcctttaggatcgtctaacctagaagctataatgtataattttggtatttttcttttcaatccttgctgcttaaatttcacaattcatcttgttaactgttttcgtttttacaatactttctcgtacaggattccttcaattctcaatgttacattatttgacgtccaaacctttaggcatttttcattttttcttgttttgaccttgggagttctgttttttatctgtactgggatgtggaatttaattttgaagatcatacctccatgggtaaagatcatttgggtcaacaaaaggcgtttgttccttgaaataattggagggagagtctttctattgattggcgttttatcatcttttgttgccttcttgttatctttatttgctggactatttttaagtgtttaatctctattaatattcttacctaacttaattgtcaaattaatagttgatcctccttactcaagtattggttcgtgtatagtaacatctcatgcaaggtttcagcttttcctatttttccttgaaggttgagtttttcc

SEQ ID NO: 62710 - DNA, 974 bp, Cucumis sativus
  Intron number 1 from transcript Cucsa.076150.1 (locus Cucs a.076150) derived from phytozome v7.0 (chr-ID scaffold0078 9; pos 593002 to 593975)
ccttcagccatttcaactgaggtttccattgtcaggtatacttgtttcaatgtgtatggtggcctctatgctcattttacatcgttcgattaacttcttcttgcaggatcgttcatcttatcttgcttgatacaagctggttttgtatttcatttcttgctgctacgacgcttatacatctggatgattcgatgtacatgttttctcatttaacttactgacgactgttgttccatcatgtttttctggtctaattccaatattccaaatgacagtcaaaatggtttcccccttaagaaactattaataatcagggctggagtctagaacgggctctttcaccattgcccgtttttgggtttttggattgaaacacaagggagcctgagttttggcactatctagtgccataggccactggtcgggggtcattttgttgtctgatggatttcggaactttgaactcggagaaacttgaacctggaacctgttttgttttgctaatctttccaaatcttattcacattcgtttttttcaaaaaattttaacaattgtttttcgccacttacgaactctattatccaaaacagaacaagttctgctattttttcttctcttgatttgacacattcgttcgattttatttcatccgaaacgtttttttgtatctcaatttgaaaactaatttgtatttactgaccttctgtttgattctagctaacggaaattcggttgatatgaaactactatgcctttatttatttttcctgtcatggttttcttctgttgtacattgttttgttttcgggtctggtgccatcattatatatttattgtgttctatgataatataatcatctttatctctatataagcggaacccaattcatattctggccttttgggactcttttggttgttcaattaacatcattaaaatatggtagttcactattaattgctgtaggaagac

SEQ ID NO: 62711 - DNA, 799 bp, Cucumis sativus
  Intron number 2 from transcript Cucsa.046740.1 (locus Cucs a.046740) derived from phytozome v7.0 (chr-ID scaffold0054 2; pos 2082748 to 2083546)
ttgttactgttctcgaaccattcttgtctaaggtatttactctacctctcccacaaaatttctggactttcgataactgatgagtatttgattgatcattgaggcaccttcttgtgtggtacaaaacagactttattcttaaatcataggaaacaattggtttatatttaagatcaaattaagtaaaagcttcaaattttggtactctaatgcatgaaacgattctgtttccaagagtttttgtgaaaattctctctacctgagtgcagatttctaggtaaacttctgctaatcccaactataaataactattgttaaacaaaaaatgaggatttagggaatgtcagaaggtttatttgctggtacaatggagttttatgatgatttggagtttggttccatcacttatagggcttcttaacgtcgagttatgaagactcgaagacgtttccaatgctttctatgattaggtaactacacttggcctatatagaaacaccaatagtaattattcttttgttcctttgggactcgaagaaaccaaagtttctttaagaaatctcacttctttcagtggaagaactatcgtgtatccttgtccaggattcaccagcatcgtgtcatctctgagtttataagcttcgttagactccagagcctaaccttcggaattttagtagttttgactgcagcaagaagcatatacttacactagggattgtgatgatcagctcagtacatgtaccatatttttttctttgcagcatctcctaagagtggttcctgttatcggcattat

SEQ ID NO: 62712 - DNA, 773 bp, Cucumis sativus
  Intron number 4 from transcript Cucsa.031720.1 (locus Cucs a.031720) derived from phytozome v7.0 (chr-ID scaffold0042 9; pos 913651 to 914423)
gctgcgaattggtaaagctaattattaccatatgaggccctttcttctttcttacccccctcccattagtttttgcaactaaagatgtttttgtctaagaattgactaacctgagtacttgttattctagtagcagataacgtcttcctgtctgactttttaacttctgttggccaagtttcaactttcaagaacgtccgtacatagaacaaaagaaaggatgtcactttcattctttaatatataaatttgtccatatcccgagcctaatattagaccatgaacagttgttcgttttaagcttggacctgtgcactttctgacatcctttgaattataattgtaagaaactgcttcgtggctgctgaacgcctaaaactgaccaatatcccaaatttttcagtgaataatgtattgcatgggttagtgtttagttcacttatttgtatgcttgatgaaatggttggcaacttggagcaatgacctttatttttattataagatcattgttgatagaattgttgagtaacctggaatttatgaaaccagcatttctgcttctttttttcctcttctttgaattttgttgtcttatctacctttcttttcacctaattttaataattcattaaatttcttgcttgtaaccttttagctttgtgtataatttgttagctctatagtagcatttggcatttgattttcagaatttatatttccttccaatctcgtaggaagattcgttccaggttgttacactcttgcagtctcag

SEQ ID NO: 62713 - DNA, 758 bp, Cucumis sativus
  Intron number 1 from transcript Cucsa.060050.1 (locus Cucs a.060050) derived from phytozome v7.0 (chr-ID scaffold0062 1; pos 609178 to 609935)
accagcggaggacggaggatcttctagggtttcaggtaaaatttactgtcttttttttggtttagtttcgttttcgttctgtattggaaaatttaattcagtctctggagtttaagatgattgagtggaagtttatgattggttctccttctttaaagctttgatttttggtctgatctattaattacagtgaaaactttcatttaaatgtgtatcatcaaactaattataacgacgaaaacattgattttgtactaggaattcactttcttacctcgttttttggatagttcattatgtcaatcaatgtcctgcgtttttcatataagaaaaacaattgatgttgaggtgtcatcctgtcttcttctatggttctttgtttgtttttggtgaagatgaatctaataattattctctttatgcaaagttgactattcatctaaatttatgtttgaaattctaactatttgtgctgattcgaacaatgtcaagtttaggaattaacagcttaatcaccatttcagaaactggtaatgcatgcatggatgattcagttgtgttacctaggatttagatcaatatttattgtttgctgcaaaatggttggatatgtggtcctcgttgaccttgtagttgaacatttcaaacatgatgattcaagttcttgagattttaggactcaagtttattcattttttttgttgttgaaactttttgtttcagcctcgcactggtcattctggcgtttcagcttttca

SEQ ID NO: 62714 - DNA, 557 bp, Cucumis sativus
  Intron number 2 from transcript Cucsa.100110.1 (locus Cucs a.100110) derived from phytozome v7.0 (chr-ID scaffold0092 6; pos 710534 to 711090)
ctgtttcggtggatgaaaaattgtccgaacagattgaaactcgtgaagttgatcagactggacaaggcaactatgatgaggagatttctgagaaaactgaaatggtagatgttcgcatgatattttatttttctttgatatatttttgcttgccagacttaccttactgttatccaaggattggtgtcacaatttaattattagtttttgtttggtctagactggtgattatacttttagcaattgtccatacaaaggacagcctcaacttatggagctgtaaaatcacttttagctcaatcgttatcctgtcatttgttaccggagtcttcgccttggcaatattactgggtcttatgtggttggcagtcggcatattactcttaactgcctcttgtgtcacgttctgttggcaatgcaattttatgcttcctgactcgaatacataatttttttactgtaatttaaatttttccatgcgttttgctggtgttgcacaagtatggttgaatatatttgttcattcttttcccagggaagcaaaaaatacttcaaac

SEQ ID NO: 62715 - DNA, 652 bp, Cucumis sativus
  Intron number 1 from transcript Cucsa.120970.1 (locus Cucs a.120970) derived from phytozome v7.0 (chr-ID scaffold0099 8; pos 3003362 to 3004013)
actgattccgatcctagagttgctgagacttgcaggtgagtaattttatttttcaatttctaatttgataaaatcatatatatttgctttatacatatttaaagaatggtttgtttgtaagattaattatgagtgaattcaaattgtgtgttgggatggcaaaatgaagttaagagaatccaaaccttcatgagtcattgactgtagatttattttttgggaggaagatcacttctaaaacaatcagaatatgtgtagtgtttgttacagaaactacagtgataattaagtaatatcaatgctaatacttatttcaaactagatcatttttaaggcatcgacgcaaactgattagattttccgccccgttagcgggaagagtttatccggttcctctcgcacccaaaaattaataaaaacaaacaaatgaacataagagtttcatttttccatttgacttcatgcacatactttcaatcaatcttgaccaaatatttttcgttagaaaaaaaaaatcaacaaagtaccaaactgaactatttttaagttttattaaaagtacatacatataaaatagaaacgtcatttgttcggttatatggttaataatataaagtgtttgtacaaaataacaggtacttagcagaggcac

SEQ ID NO: 62716 - DNA, 359 bp, Cucumis sativus
  Intron number 3 from transcript Cucsa.037120.1 (locus Cucs a.037120) derived from phytozome v7.0 (chr-ID scaffold0047 6; pos 75603 to 75961 reverse strand)
ttgccctctgtgcaaagcaggatttgtcgaccgaggtcgagtttccactactcttaggcttcttatagacttgtactgcttttgaatgatggtcttcatgtatcgatatctgttttacgctgtcttgatttctttatgaactaatgctctttcaagagtagcgaggttttggattatccctggtttctgatcatctaagattacattttttagaatatatgatacttgttaactaaaagagtataaaaacatcgtctttattaatgaatatgagtggttgttcaattttgttttcttgagaatttgtatgtgtaaaatgtcgttagtgatccttttgtcgtatgcttcattatgcagac

SEQ ID NO: 62717 - DNA, 1035 bp, Cucumis sativus
  Intron number 4 from transcript Cucsa.118610.2 (locus Cucs a.118610) derived from phytozome v7.0 (chr-ID scaffold0099 8; pos 487771 to 488805)
aacaaattgaggttagcccaatattactattgctattattatctcttcaagaatttaattgattaattgccttggttctaatgatgattttgtaattttgatataaatataataatcgttccctccaaaagtttatttagtattaatttttctttaaatttaaggaaattttggaattttgatgttagaaatattattgaatcatcgaccttttgatgctcaaatgactatatatatatattaaggaaacttttgaatgaggatactaagaaaacttttgaatcaggggttctttggtcatcattgatcttatggttggatgttgaattttaatttttgattcaatgatgcaataaacgtgtgtgggatattataactatatctgaatttaagtattttttggtatgaaataatttttagaaaaatatatgacacggattagtagtgttgggatgttgaattctacgttggaaaaacgaaggacgacacttacacttcctataagatagatcggttaacttctctcgttatcaattggtttttatataaaatccatactattagataagtaagtgcatccaagcgcatcttcagtgagtgaccaaccttatcatcttctttaaataatgttttgaaggttgattattgctagggacatttttaaaaataacaaaataaattaaaatatttatgataagcaatagcaaaattttaactaataattcattcatgagatgtctctactaaattttaactttttcctttttgttaaaaatttctgcatcacaaatttcaaaataataatatgtaacattaatgtacataaatatgtacttttaatctttaaactatattattcaataacttcaaattttatatgaattgatggtttaaatacttgaaaaatattccaaatgtttgttaaacacgtagaaaaatcatttgtgaatcaaattattaatatatataaaaggatggaattttaattgtgaatttgtaggtacaaagacaccttcaattgagaattgaggctca

SEQ ID NO: 62718 - DNA, 881 bp, Cucumis sativus
  Intron number 1 from transcript Cucsa.047910.1 (locus Cucs a.047910) derived from phytozome v7.0 (chr-ID scaffold0054 2; pos 2775795 to 2776675)
acaagaagcgggtttcttgcatcacgccctgcgaggtcagtccctttcgtaggtttttcttgttttttttttttttttttttgttgttggattcgtgttttagtttgttcttggacattgtgttgtagaacttggttttcatatctgcttggtctcaaatttgtgaataacattgaaaatagagataataaggttgatttatcctaaaattgttgaacatttcttaactaacacctcctccagtctttgctaactcctaagcagccgttttaccctcaagtacttcgaaaaaagatgtatacaccttaatctggacattttagaagaaaaatgtgtatgcgcaaattctagccttggtttcaaagaaatctgggttagtttcttttaggttttggccctctcacgccttctctcagtcgattttcacggttcttttggaattgtatattccatttcttaaggatccaatttgatttattggcattgatctggatgcgcgtttgtactttgtagctagctgtttgtgtttaaaaaagagtcgagacttcaatcctctgtattagataagcattcttcaagaccaattagttagttatgagaggagtaactcacctaagattgtgaagtatcttatctatataacgtatgttactcaacaggccaagatgatgggttttagggttcaccgttcttgaggtagatctcaaaaaaaatttcgatcatccatctcaaaatcaaggattaactcatttatcttataatttgaagtgtgaatctttcaaactttttttagtacttgtgtttacaaaaggtttcttttccctgtgtttatggaaacttggacagaacggcatcctgcttacaggtggagacgaccgttg

SEQ ID NO: 62719 - DNA, 507 bp, Cucumis sativus
  Intron number 1 from transcript Cucsa.112100.1 (locus Cucs a.112100) derived from phytozome v7.0 (chr-ID scaffold0095 3; pos 813415 to 813921 reverse strand)
atttcaaggaaagaagctcatcaacaatcccgacagtcagttctcctgcttgggactgtttatttacctgatcctttcctctttccatccccaccgatcccgatttcgtttgtttgactttttgaatgtccgctgattcattatcgagaaagaataactgaataagcttctattcttctacatttgctgatatactctgcattctccatttatgatttatctctaattatagttgcatattaaatacttggaacgaaagcaggcagaaaacaaaatgtgttaaactgacatctattctacttgctcacacgtactactagttcgtgaaaacccgaattcctgattattagacatttcttttggtgtttttttcccaccccatcaacaaaggatacaacgctgctccttctttttctcctcattttttctttcttaacctgaatagctggagaaagagcaaggactcatttaactgttttttttttttattatatggatgcatttcag

SEQ ID NO: 62720 - DNA, 767 bp, Cucumis sativus
  Intron number 1 from transcript Cucsa.085300.3 (locus Cucs a.085300) derived from phytozome v7.0 (chr-ID scaffold0086 7; pos 179383 to 180149 reverse strand)
gttctgaggagattcagcaaaaaatcgtcaaacaggtactctcttctctttaaaattatcaatcactaagctttgatttgaattactccattgggcaccatatatacatatttcttgtcatgtttcataaaatgtcattttagatactcttgggggatcttgaattggctgggacatttgttttcttttgtttgtatggtttcttgctgttggataagtaaaagaaaatgcattttagatactctgtacatgtgactggtatcataatgtccattagatacaccactttttcatcttttgtagtttctcacatccctcttccgttagttttctccttagattcctcttgatgtgtttgatacctctttctttaggctctgaagtcggtgtgttacgctgagagtttgcaaattcgatgtgcataagttttatgtaactataatcccatttacgtgatcattgtgatgtttggtcctcggtgaggttccatgcttctctttggtctcaggtctcgagtacttttttgtaggcagaatcttaattgtaaaccctttctttaaagggattttatcagcttgtttttttgttgcccttgtattctcttaaaagacgctcacgttaagcctacccaactttgaactccgtactttttttcaagaaggtttatcatgttcaggtgccaatgggataatgctgatttttacatgagaactttcagtatcttatggatgatttcaattttacaggtagaatatcagcttagtgac

SEQ ID NO: 62721 - DNA, 803 bp, Cucumis sativus
  Intron number 1 from transcript Cucsa.094440.1 (locus Cucs a.094440) derived from phytozome v7.0 (chr-ID scaffold0091 9; pos 641650 to 642452 reverse strand)
acttcgatcaaattccctcctgattttttttttcagtaagtctctgtttttcccatcttttagtgatgatgagttaattaatttggaattccggtttttcaactccacggggtttgtgtatttgcaattgacattttcgtcgtcgttttgattttgggtctttttggtttgatggtttttgggatttgggagagttttttttataaaaaaagtgggtaattgttgaattgttgtgttctctctttgtttgggagattgcgggggaaagaaatttagggatgttgtttaaatggaaggaacatgtgtctgtagtttgtttcttgaaattaattgttgtctctctgctgcaaaacgtgcatgagaattgaatgaaacgaatgtttgttttatggacgttcgagaatttaatttaattgtttgaatcgtttctgggttttgtgacttgggtcctgttgctttcccttttcaagttacttttgtttatgaaaatagcattggacttctgtaggatttattgtttgttgccatttattggaggaatgaactcattaatcaaacaagcagagatatttttttggctcaaccatttagacagggcatgtactcatctaattaccttattagcttctgttgtctggcttctcaccctcgagtgaacagcatttgcttgtatacatgtttttttttttgttacttttttgtttcctgcaagatcaatcttcgtctgttcttttattttcattttggttatggcattttcttaaaaatggtttgattgttgattgcagtggagtttggggttg

SEQ ID NO: 62722 - DNA, 991 bp, Cucumis sativus
  Intron number 1 from transcript Cucsa.101430.1 (locus Cucs a.101430) derived from phytozome v7.0 (chr-ID scaffold0092 7; pos 676246 to 677236)
ccctcttcttcttcttcttcttcttcatttcaaaggtctgtagttacctcgacctttcacaattttgactctttctctctttctcgcctgcttttgtttctttctttaattccaataactcctttttccacctaattacacgccaacctacgttgattcttctatttttcttctcttcgagtccgacttcataaaccctattattgctgttcttcctgatccctttttcctgcagattctggctgaactggatctaatttaatgtgggtttttttttttttcaattttgttgtttttgtgtttgttttttattttgtggaagtgggtatttgttgatcgacttgttatacaatctatgcatgtaattgggtctcctttctgattttgacctcttgattttgctcttcagctcttggatatgaatgttttttctacttttgattcattttttagcgtcttgttcaatgattctaattgttttagcttgaatttctgttagttggattttattttttcttttaccatggcctaagagttaattatagaaaaaacgtaacgattctacaaggaaccgtctcttcgttaccgttttttttaggtttgagatctgaatctctttgttctaaatgctgtaccattgaaagcatttaagtagaagggactgcgctgcaaatttggcctgtgtacacggagttttcgtttatggttggccagtagatgttttttgtcatcattttcttgtaaaatttggaactttcttttaaagtttgatttttccctttgaaacttgttgacctttaggagttatttttctttacttgtctttttgacttctattcagggttattttctctctgcacctaccggtcatttgatatgtttaagttgtctttcgcctttcacttatttatatattagtcattgatactttgctaacagcaaattgtgtgctgcagatagtactggttgagcatcaagatcaagcacttca

SEQ ID NO: 62723 - DNA, 609 bp, Cucumis sativus
  Intron number 2 from transcript Cucsa.017440.1 (locus Cucs a.017440) derived from phytozome v7.0 (chr-ID scaffold0024 5; pos 160755 to 161363 reverse strand)
caagcacaagctgaaaccgtatgttttgccagtccttacagttaactactctgataatatcaataccctctctatgtcctttgaacaatgctcagtttactttgtatttttctttaatggataacttttgaaggtctgaatccagtgttggacctattcttgaaaatgctaaaattgatttgagatcattttttataagagggggaaaagtttatatttgttcaaaatttaacttcaccatattcagtacttgagttttacatatttaaattgtcgtgaatctggaaataggttgtcaattgtaatttatatgaactgtaacttctaggcttgtaacaggatgaaaacaaaactctttttgtctatcaaattagaaggcttactagattggtaggaaagtattgaaaataaaagcaatattcatgttgcattgaattccttcgttgttttgggcgacagaaaaatgtgcttattctttaacagatatttatatatttgttaagaaaaagggaaagataagaaatgtgtaatacatcaattcattatgtttccaacttatgatggatttgtttttcttgtttgcattgtaggaaagacaaagggttatat

SEQ ID NO: 62724 - DNA, 596 bp, Cucumis sativus
  Intron number 1 from transcript Cucsa.017440.1 (locus Cucs a.017440) derived from phytozome v7.0 (chr-ID scaffold0024 5; pos 161430 to 162025 reverse strand)
ccaagaaggtttcaatttatttaagcttcgatgctcgttttgttttttttattgacctttaatgttctttttcacttttttggtaggagtttattgttctcttctctggaaggttagggttgttgttgttgtatgttctgtgtttttagttgcttgttagaacttttggatggtgattttttatatttgcctttcgcttgtacaatactacagctggaaacaagcaaaggtttagaaaggatgaagctgcaaaagtagatattctgaaccagtaaattctttaagatactagtaccgaataaaatatgctcaaactgattttatttttcttcttgagttggtggctttaaattagtaattactacttttaaattttcagttatctagtttctcccgtttgttaattttttttccaattttaatagcacttcattgcttgcatcatttgaaacttttttttttttggatctgtttctaagtgtagttcaaccgcaatatgaagtgatcatcgtggaaatgatgttatttttcgtttactttcaaaatcttatattttgccctttgctgacctcatttgggggtaggcttttgaagtc

SEQ ID NO: 62725 - DNA, 304 bp, Cucumis sativus
  Intron number 1 from transcript Cucsa.092320.7 (locus Cucs a.092320) derived from phytozome v7.0 (chr-ID scaffold0090 5; pos 229300 to 229603)
aagcaactagcaaaacactacttggaaattttacagtaagttacaatttcatttctaggaaatttccaggatggagctggattttcgatactgtactgctttcaattttggggttttttaaagctttctttatttttcttctttctttttctcttttatgtttggctgcgtcattctgcttagggtttggttcttgctggcggcttttgattttaatcaatcctcttcattgaagttttgatttgggtgtgcagtagatctggaaagttggagcttttttttcttttttatctaaaggttaagg

SEQ ID NO: 62726 - DNA, 484 bp, Cucumis sativus
  Intron number 1 from transcript Cucsa.032020.1 (locus Cucs a.032020) derived from phytozome v7.0 (chr-ID scaffold0042 9; pos 1291034 to 1291517 reverse strand)
ttgggacgaaccttcttaaattaggccataacgaggttggcagagatctcttcttactcttggtctacattgtctacctaagtactcttcacctatggttattgctgctgttctctgtagaaaacgttttttatccacattttcttaaagatgcaatgcagacatgctataagataagagcttttgtggcaggtgtcgatgtgtcatgcaacataaaatataaatgacatcttccttctcaaaaggaaaaaaagtatttcactttttcgaagttgtgtacctcttcccctaattaatttgacatgtaacatcaaactacaaagtttcataactagttggaacggtctcaattatacttagtttgtgcatcactttctattagaagtgtgttccggatatctgggtttcaagtcttctttttggtatcattattatatgtgctatggttcttaaagaatttattgtgcagagagagaagcattcc

SEQ ID NO: 62727 - DNA, 875 bp, Cucumis sativus
  Intron number 3 from transcript Cucsa.106910.2 (locus Cucs a.106910) derived from phytozome v7.0 (chr-ID scaffold0093 0; pos 365904 to 366778 reverse strand)
gaggagctcctgcagattacagaccttcgtttggggtaatttttatactatctccatagtggcttctgtaatatggttgatgctctctgcataaaaatgctgctttctactggttttgtacttctcttggagttggttattgaagaacgttattaagagcggtgcaatcattgctcatatatctaattagaattttatcaagtttatggccttggtcagtaagatggttaagcaatggaatcgattgaatgacatctcatagtcatagattagtctcttcatctttgatactttcctccaaaagtgcttcctaatcaactagtctgctaataacctagtttacgtatttaatagtaggtctttttttttttggcatttgcacgccatgttctctgttcatttgcagtctaatggttttctagggcccatgtgattactgatttggttaggcatatttaaaccatttactatttaggtattagatgagcatgagccatggagggttgtggcttaatttagtcaaggtgcacgtaagctggttcggacatttgctgatataaagaaaaaacaaaaagtgatagaaaaatgggttggtgaaatattagaaatgtcactagatttggaactttaatgccccatagtatgtcatccttgtgccaaatgatattctgattaaggtattttatggttgatgatgaagtcattttgaatgaatttgaattttatgatagtcattgatgtgtgctctagatgaaagttcggttaatttataaaaggagcttataattgtcgtttgttggttgtttattgattgctgtgtcatacctgaaaatttctcagggtcctggtggaaggccaggttttggccgtggagc

SEQ ID NO: 62728 - DNA, 727 bp, Cucumis sativus
  Intron number 2 from transcript Cucsa.096750.2 (locus Cucs a.096750) derived from phytozome v7.0 (chr-ID scaffold0091 9; pos 2248329 to 2249055 reverse strand)
gtgcagcgaaaaaggcagcacggtttgtgaaatttgtctccaggttcgatttcttaaattgttttttgtttaaatttttgtttttgatgtttgagtttctgggtctaattatttccacgaaatatgaagtgggtttccgtagattttgaaccttgaagtctctaaaccattgttctgaagctctgtttcttgggatgtggtttttatttttaaatttgggaaaggggaaagaagtttaggaattcgtctttttctttgagttcaagtctctttctctgtgttttaaagttgaactttcaaaattccataaagttctcttaatttgctttctttaacatttcatttcaatctcaatacctttttttttcttctcatttatcactgaagaagattactgttttaattcaatgaagattttaatgcgttatttaatgaggaaactgaacattaacaggtaatttgttaaaagaaaaacaatcccaactttaagaacagtaaattaaaattttcagtttatataaataaacaaaatttcaaatcttttatgttggtcacaactcttctgacaactcgtgtactgtcttgaattattacaattttttattataaaattttcaaaatgaatagagaataatatttttttttaaaaaaaaatgtcttttttaataataataatttgaaaattctctcagaattacgaacctggatatactgcaccttctaagaa

SEQ ID NO: 62729 - DNA, 824 bp, Cucumis sativus
  Intron number 3 from transcript Cucsa.082230.1 (locus Cucs a.082230) derived from phytozome v7.0 (chr-ID scaffold0084 3; pos 124823 to 125646 reverse strand)
ccacaatctttagatattttctagacctcgcacgggtaattgattgtcacctctaacattctttttatatttataaatcctattgtgaagaggcaagagttaccaattgttttctcttaccttttttgttgaatacgatccattatttggattgttgttggaactgaaaatttcttggagccaaaatatacgatatcatgttattgcagagatagaaatagtgcaaaggaaccaatgtgtatggaaatctattttatcgaaatactttaagtttataatcaaccaaagtaagtattattgtttatcaagttttttctctagagtgttttttttttttttggttaagaaaaccatttggactctattttcatagagataactgtttaaagttattgaagtaaagtttgataacataatttagtttttgtaacaatttatttacctcctaaacttgtgaaaacttttatcagcatgaattaatcaaaactatgatctatgcatgtacatgcataagaaactccattatacttgccaaagtgagcattactaagacgtatattccttttcatgagtttgacggttcaaatctcccacatcctcacttgtcgtactcacaagaagaaacacaacatcttgataaatattttcacgacaaagactaaattgccacaaaatttaaactatacaaactaaatcgttactttaatgaaagtagaggatcaaatgtgctttgaccttgatctttttataatctctcagttgtataatcattttgttgacatcccatagagtgcagcaaatttcattcatttatattcaagcca

SEQ ID NO: 62730 - DNA, 775 bp, Cucumis sativus
  Intron number 2 from transcript Cucsa.067640.3 (locus Cucs a.067640) derived from phytozome v7.0 (chr-ID scaffold0069 9; pos 260098 to 260872)
ttgagggcacctgcaggtttgttaactgtgtttcctacctaattgtacgctagaaaattcatgttgctgttatcttctgtttgttaattttggagaaaatatcttgcgatacgatgaattgctagatttgatcttggattatgaagttgttgggtggcatcccattagctttatttcacggctgtccattatatgatttctttcattctagttagcttttcctcgtagtacttttaatggatgattcaataatgttcaaacatattgttaatatgtttatagagagggttcggacatgagacatctgagaaacatgtgagaaaagatagttattttaatagacatctcaggtttttacattagttgtttaaatagacattcaactcccattgaatcaatgaaacatccaaactccaatggggtgatgaacagagtccgaagaagtttgtattactaattgggcctttgatgttggtggtaaaatattagctgatggtggtttaatccttgtttcgctgcatttttcttgtttggtatgatatcacataattctattatgatgcatatgcatgtcagttcgtcattatatgtcaaaatagcatgtcagttcgtcattatatgtcaaaatagcatgtcagttcatgaacatatgaaagtaaataaaaatagtttgatggatgatatttcttttgaatgtttgatactttgttcaactagtgagtggttagaggggttcattattgaaaaacttttatacgttgtcacagcggccgac

SEQ ID NO: 62731 - DNA, 554 bp, Cucumis sativus
  Intron number 1 from transcript Cucsa.104080.2 (locus Cucs a.104080) derived from phytozome v7.0 (chr-ID scaffold0092 7; pos 2707189 to 2707742)
agtttagaagagaggctgttgattggatttggaaggttggtttgttttttcttttgaaatctgatgatgatggaaaaatgtctgttttctctttttgattcatttctaaagaggggttttgatttttctaaggtctcttttccatcaattaaactttgagttgcttttacccttctcattaatcttcatttttttctttttgtttggtttgattattttattcgtaatgatggggtctgttttcttttcttttttttttttcgcttttcttttcccaatttcaacagtttatggtccctcagtacttgtgattccattgtgtgccatcttagttagttcattatttgattcagtgtggtgtgatgaacaggctcatgcccattacagctttggtcctctgagtctttgtttatctatgaactacttggaccgtttcctctcagtgtatcatttgcctgtaagttccaaaaatcgaacaatgtttgtttctttttttctctttccatatttcttgtcatgttatgaaaattttcttatatgtttttattatttag

SEQ ID NO: 62732 - DNA, 877 bp, Cucumis sativus
  Intron number 2 from transcript Cucsa.092460.2 (locus Cucs a.092460) derived from phytozome v7.0 (chr-ID scaffold0090 5; pos 312070 to 312946)
accgccgttttcagatattggcaaaaaggccagaggtacatatgttatctattctccctgtgtatctgagatgcgtattttgacttgtttcttttctatttccttaattaattttctcttaataggcggtttgcaacaattttggtattccatgttattcacaaagaaaatgttttatcggttcttcaaatctcgcatgagtcatgagtcatgagtcatgacactaatgactggtctttcctattagcacgtgtacccatttattcttttattctctatgaaaattgcgataggcttagcctcaatttattttcaagcagagggagaattcgagagctccccttcctcttcaagatctcatatagaaagcaatttcaagtaatttatacaaaacagttaatcccactctcaaacccaaagcatttacatacctcacctcacctcacctcacgcctctctgactaacaatactccatagggcccaaacaatctacatattttcctcacacgtgttttcatcccttcttttcgtaggcatgcatacatacactatagtaatttggacattatctgtttttagtgtgtgtgtgtatagattaaaataccataattatattacacattttcctcacacgtgttttcaccccttctttttgtaggcatgcatacatacactatagtaatttgggacccatatgtttttagtgtgtgtatgtattaaaataccgtaattatatgctataattttatttgatgttaatcttggatttgtacgtggtgctctaacttggcatagttgtaatttccaaaagcttattttcactttgatggtgaacttgcagacctcttaaccaaagactacaactttgatcacaag

SEQ ID NO: 62733 - DNA, 603 bp, Cucumis sativus; identical to SEQ ID NO: 62107
  Intron number 1 from transcript Cucsa.120350.17 (locus Cuc sa.120350) derived from phytozome v7.0 (chr-ID scaffold009 98; pos 2422190 to 2422792)

SEQ ID NO: 62734 - DNA, 811 bp, Cucumis sativus
  Intron number 1 from transcript Cucsa.073280.1 (locus Cucs a.073280) derived from phytozome v7.0 (chr-ID scaffold0076 5; pos 861226 to 862036)
ggattcttgattctccattgttgctcattcaggtatttatgctcttcatttgttcatttatttcatagaattattttgaagtgagaaagatgaagaacaatagatgaagtgacaaaaacggcgagtgataaaagatgatcgtaacgaacaattactgaaatgaaagataattaactaactgtggggtgagctataaagatgcaaactattctttgataccaattaagataagaacaagtgtattcttgataccaaatggtataaagagatttgtctcaattatgtttttggaatttcccttattttacgtgaacctgcaacaataatcaaattaacctccaataatgagaatcaataatgtataacgcgagaatcaattaataaacaataatctcaagggaagttggtcatggttgcttggaaaaatggatcgatgatcaagaagaaaggtggagttgttcttatcttgaaaattttgaacttttcacaacctaataaatcaaattaggattaaattctaaaacatgcatcctaatcacaggaatataaagaaaaacataaagataggataaaaggacaacctttaacctatgtacgtagtataaatttaaccaaaaacctttcaactttatatacgaaccttcataaatatcaatataaacaggtgtacgatgtattaaagatgttgatgaatatggatttatagactcatagtgtcttctgaataatgaaggttccctttaaattattatggcagtacaaactaattctatttggttatttaactgttcatgaaggtaacaagactcaa

SEQ ID NO: 62735 - DNA, 839 bp, Cucumis sativus
  Intron number 2 from transcript Cucsa.084560.1 (locus Cucs a.084560) derived from phytozome v7.0 (chr-ID scaffold0086 2; pos 280044 to 280882)
ccgctcatctcaagcgatccggaaaggtatccttttccttctctcaattcgcctctatttcttttgttggatgagactacttggttttcgattcaagggagagtattctaggatgttggtttcgaaaacggagtgagtgaatgctaaattttaagttgcagttttttcggctctgtttgggagtgtgttctattctgcattgtttatcgtctttatttctttgccttggcttgtgttgtagctaggcttttttactcaaacaagaagtttcaagttttagggtgtagatttttcgatcgatatgctactgattattgtttttcttataccataatggcttataaaatgatctgcttgtgctttgagtatgcctcgtctgttgattaagtttgtgggttaggtgcaatttatcagtttatcttgctcgtcgcacttcgtctgagaaatcgtgattttttagtgactttatacttgccattgaatgtttctgggttcttgtacgttttgtggatgtgttatcagtctttagaaaatttcaacattcccaaagcccttatccattggtcgggatttggctttttcccactactgtaatatttcattctatcaatgaacatttctttaaaagaaaaggaacccttcagaaggcttttgcgaatctacctggtttggattgtctgatttttagtactattcttggattttgattggttagaacttcctacattatatttatcttgtttactaataatttataagtttaaacattgatctgtaacatatgtgattttaacttatttttccctataaataattgacgagcaggttgaacttccacc

SEQ ID NO: 62736 - DNA, 500 bp, Cucumis sativus
  Intron number 1 from transcript Cucsa.135320.1 (locus Cucs a.135320) derived from phytozome v7.0 (chr-ID scaffold0104 4; pos 172742 to 173241 reverse strand)
agactaagattatcgatcttaatatcactcatcaggtcatctaatctactctctctctctctctttctctttcgtttctttggtttacagtaattcaaaatactatacccttagaggattttgtatgagatgtcgatgatgtcgatcggatccatattctattgtagtcttatactaagaagaagtgaccattttttgatgagtttaaatatgaataaaaatatagaaagttcgtgatcagaaaaatgaaacaattagatgatcagttacggaacttaaatggtagaatgttgtcattgtagaatataacatttgattttaaagtaagatttgagtatgtatataaagtagatatatgtatgtatgaagcaaatgagaaagaatattcttttaaatattatcatatagtactaattagtactaattatgtattttttttggtaccattaattgaaatgtgtgcagtttaaaagggaaatttacacactcaaacttctcaa

SEQ ID NO: 62737 - DNA, 816 bp, Cucumis sativus
  Intron number 1 from transcript Cucsa.077610.3 (locus Cucs a.077610) derived from phytozome v7.0 (chr-ID scaffold0079 1; pos 729253 to 730068)
cctctgctgattccaagcctcccaacggtactttggtatctccttctccctctctgcttctttgcttctttcctgttgcgtatggattgtaaagttaatgggtatcctgtcaaaatgtcaactggtacttcataagtttgtaaggattcttgtaacgtaggcttctgggtatactttatctagtggaatactctgagtaaatgtttctcataatgaatctggtttgttcaaaatattggagctgatggatgtgagattacattcttacgtatgatatcgctggcaaacattgaaaatgtggatgctttattcaatttcattgtagagcttttacaagatactagatattaagtggtgtgatactgtctataaattgttgattgataatgggttcttttttaaaaaataatttagatgtttttttcttgtcatcttgatgaacctgattgctgtaatattataatgagttccttctggggctgattaccaccgtagttggttgtcagtggtggtcggcagtagagtcattggatacatttcgatggtgggagagagatagagggattgacgaaattcctcaataaatgtgcaagttcaatagcaaacgctattaaagttggtgaagttgagttatttaacatcgatttatgaagtctggggaccaaacactcggttgggtaaaaacccaactcaaatgaaatctagtcaaggccccaagcactccttttatgttttttatatttgaatttctatgattgtttgaatatcttttatggaattggcagccaaaaactcggagagacatcctgctggaat

SEQ ID NO: 62738 - DNA, 578 bp, Cucumis sativus
  Intron number 1 from transcript Cucsa.047720.2 (locus Cucs a.047720.2) derived from phytozome v7.0 (chr-ID scaffold00 542; pos 2625501 to 2626078 reverse strand)
aactgatcggaagaagtgattgaacaaaagaatcggtgagttcttcgtaattatgagtcaattctggtatggatacattcaacatgaacaatttgatggtatatgatgaatagagaacaaactaacttaaaactagggcacaattatcctgcttatcttagttcaaacagtctgaattcggttggaggaaaatgaaattacagatgtagaaattactcgctgacttcgagtttgagttaaatctcaattgtagactccatgtactttgttgtgaaatataccattgttaatcgatttacctaatcgaaccgatcatcaaattgatcatcgtgctggtgactttcatcttttggaattggtagagatggacatttcataatttagtaatgatcttgttgaatgatgaaatcttccagctgttttagttatcttcaaatgctgttgttcaaattaagaacttaaaatccagaaataaccaaggtgaaatttatcgtccgagaaaagaatgaagcatattagcataattcatatactggaatcttgttttgttcttatgtagtggcaaattgggataatca

SEQ ID NO: 62739 - DNA, 732 bp, Cucumis sativus
  Intron number 2 from transcript Cucsa.111650.2 (locus Cucs a.111650) derived from phytozome v7.0 (chr-ID scaffold0095 3; pos 388462 to 389193 reverse strand)
aataaactgtgccagtattgtagaggcaggggaaggtacactgattgcctgtttaagttgatttctattatatttcaacattacatctttgattgagcttccttccatggttcgactagattgaatggtttaacttgggttttgagctggatcttagtcatttatttaattgaggttcatgtttaatagtagctaatgtcccattgattcttatggagtactgatatatatcatttttatatagttttgcaattatttttggttcaccattccaatccattaaaaagaaatatcgttctttttagaaagatttgagttggaaatgattattttagaggagtggatagtttaaaggcaaagcttcatcagacgccaagtcatttgcgactttgtagaaatagtgattcctaaaatgccaacttttcttctgaggcactgagaaaatacatacaagagaagaggctggaagtctcaatgaagaaaaatagttttaaggagaaatatgacaggcaacttcagttgctaattctttttttagatatcgagaatctgcttctttttgggctttatatcgaaacatcatatacagcaacttgacatataactactggagatcgcattgcttgaatcaaactatcaaatatcatactcataatgcttgctttctatcttaggaggctctttttagtttttacccatttttttctcactttgttatctgtttccttgcag

SEQ ID NO: 62740 - DNA, 821 bp, Cucumis sativus
  Intron number 1 from transcript Cucsa.111650.2 (locus Cucs a.111650) derived from phytozome v7.0 (chr-ID scaffold0095 3; pos 389200 to 390020 reverse strand)
taatccgtgctggttacagagtcaaaggttttgaggtaacttcattaaaattcatgcacggttttgctcttcagtagtttgcattacttctttcatcttctgacttggaattctgttgttgaatcgatataaattttcctctacttatcgattgctatccaatgtttagctcgagtgaagaacgaagtgaattgatttaatattacttaacttagtgtcaaagttgggatatatgagactgagagctgtgttttcaatcatatttgttagaatctgagtggaaatgacgttgtgggttttgatggatctgttgaatattgaaattgtaatggaaaatggatgcttatagacgagaatgagcatttttcttaatcgtttttctccatgtgtagatttggaaaatgttcatgaagaattgttgaatgctcattatgtatcaccgtgtcttacaatgatttacatctttcttaaatacaattgttgatttctttgctaaattccaaaaacaaaaacaacattttgaaagctattttttttttagtttttaaaatttagattggtttttttaaaccacctggtagaatttagataataaatgaagaaagttggaggtgaaagtagtgtctatagactcaattctaaaaaaaaaagttaccgaacggatattcaattctacagatacctttcatgtttattttctttgttcttggttaactttcagtattaatatgctgtatttgaatagtggtgacaagttcacgttaactgctaccattctgtctttagataaatcaggcgtggaaagataaatttttgaagtc

SEQ ID NO: 62741 - DNA, 821 bp, Cucumis sativus
  Intron number 2 from transcript Cucsa.079620.3 (locus Cucs a.079620) derived from phytozome v7.0 (chr-ID scaffold0079 3; pos 2514391 to 2515211)
aacaagaggtattcattgctttacgtttccctttttgttatttttctttttaaatttctcctctttgccgcttgtctatctagtttcatagaaagatttaacctttccctacatctattcctacatctattcctgatgcgttcctgggtctggtaagagagcgatgcatgagaataaaccaagtttctctagttcactgaataaaatgaaaccaaaatcttagtcatgacttgatggaaattgctaataatcaggagttcattagtccatgactgaagccaaacacaattattccccttcatcatcaacttcatcaattgttaagatcctggttttatgatggcctctttcaaatcctctagaaattcgtttgaatttgaaccatgtatttgttgagaatccttcacaaagactgaataaattagatttgtagcttagccttaggattttcttcgttataagtgacactgttgcaactatattgttggtatttataatatactaatatctctagatatactggggtaggagcaaatgactcacattgttgcttgctgcagtaattcatttaggaagttcatagttgagtctgtttttagcatatctctactaatacttgtttatcttttcttttgttatatgtttaatgaccttgaccaaatttggttttgatttattaaccattttattaccagcctagaggatattataattccgtgttcagggaaaaactcaagtggtttaactggtatacatctttgttttcatttgttattttgcaaacagggccggtgaactaactgctgctgagttggataatc

SEQ ID NO: 62742 - DNA, 669 bp, Cucumis sativus
  Intron number 1 from transcript Cucsa.119380.1 (locus Cucs a.119380) derived from phytozome v7.0 (chr-ID scaffold0099 8; pos 1313181 to 1313849 reverse strand)
ctcaaatcccattacagagttctttaaaaggtgacttatatgtatatattctaatacacgtcctgttttgatccctacttaattatttcatatacttattcttagttcatcagttttcccaaaaacttaagttttttagttaacggatatcttaattttcacttcttgcatctcctttctattatttcacgttcacgagtgaggaaaatgtattttgaggcatataattaaatttatattcattaattggattaacctaaaactatacaacaagcttttctctttgacttttgtttcttagacgtaaattaagtcctcgtggtctgttaaccttagttgttgctattagcttgatgtagtttgttgtgtagaagaaaattgacaaatgactcgatggtagcattgatatcaacactaacaaagggagttgattgctttgcaacaaataacgaactatagaagcaatgaatcaaattaaaagtttaggagttcagctgtttaaaaatcctaatagtttgaggttcgaggtggtatatgaataattctctagttattttcttcaatatatatatatataatgagttttcaaaaaataagaccttacttgataagtttgaattatgttttgttgaagctctgggacatctggaggagaacacaagttaattc

SEQ ID NO: 62743 - DNA, 699 bp, Cucumis sativus
  Intron number 2 from transcript Cucsa.021710.1 (locus Cucs a.021710) derived from phytozome v7.0 (chr-ID scaffold0030 9; pos 85603 to 86301)
agggagaatctggagctgttatccgtggaaagaaggtatgctttggcaccagtgctatcttgctgtgattctcatcttatgataatccatcatccatcatcaatgttgctcattctattttctgaataatctaatacagattatacatagacctgattaggtcaggactggttattctgcgagtataaagaacaatgactgcatattccgatcattaagctatttttgttttcctcactaaaagatgttgagtgaaaattgttaatccgactttggctagttgagccatcactaatgcgttcttctctacgaatcaaatctaaagaagagaccaaaacttgtgtggaagattattttcttcactttatctctaatctgggactcgttatgtttcaaaaacatgcatgctcacacagtattgcctatgcatgtcaaactttcagtttctccattgtggttattctaagattctacattttttcttattgaatcattaataaagcactatccaatccaactcagttcctcaaatttccaattaacatacaatcttagacattggacttcgcatcaagcaataaaattcagctgttttcataagaaatgcagtacagtttgtgatggttcttgaaaattggtttatgtttcatccacctgatgacagggcacttctgggatcactgtaaagaaaacaaccca

SEQ ID NO: 62744 - DNA, 1000 bp, Cucumis sativus
  Intron number 1 from transcript Cucsa.032310.1 (locus Cucs a.032310) derived from phytozome v7.0 (chr-ID scaffold0042 9; pos 1658271 to 1659270 reverse strand)
ttttccccattcgctcccccgtatcacctgctctggttagtcttttctctatctcttctatctatagttttatgcattgatttactccaataattgctacattctgtacccttttgtgggtaaattgcgttggcttcctgccctttgattgcctattacatcttgttaagcttaggatcaagatgctggttcgccaaattggttatttctttgaatgagttcaaatttgtaacaaaaaaattaatgtgtttgcataccctgaaatgtgcttagtctaatacaattagatggtaattagatggtgtttggtgcgctgagttgagttctaaagcatggaatcaatgtgttgaaattagtaaatctattttagaggggcattgttgtttagtccggagatagtaatcattagaaagaggaagagagacaaagaagaagatgaactgatgttgttgacattgatgaagttgagttatttaacaccaatttatgaagttgatgggctaaacactttcgtaggattcttcaccaagtagagggaaacaaatattatggaaattggacattaagttggagtaaacaactcaatttcaaaagtaaacaccattgaagtttgtacatttattgagtaaatttttctaccctatatttttattttttacatttatcgagtaactttattttctttcttaatctacttttcacaattatcaagcaactccatcttagaactctgttacctttgtctaacaacacaaacttactaattccactcaattggtccaacacccctaactctactcaattggccaaacacccctagcttcatatcttatatcttacaacacaaaactactaactccatcatattacctctagacttattaattccactcaattggccaaacaccctctaactgaacttgcatcgaagtattatgagttatattttaatggagttttatctgccatgccattgtcgctgcacttacagctaccaggg

SEQ ID NO: 62745 - DNA, 195 bp, Cucumis sativus
  Intron number 1 from transcript Cucsa.096370.1 (locus Cucs a.096370) derived from phytozome v7.0 (chr-ID scaffold0091 9; pos 2035598 to 2035792)
gccgttgcctcttcacagtccgccgcaaggtaatgaatacttgatttcgctttcttcttcctttatttcaaatgggttttctctaattatgaattttggattcttgtttgtttgaattttgagtttcgagttattgaatctgtattttttgcttaaacagaggccgagtttgcatcaacgttgggaagggtatct

SEQ ID NO: 62746 - DNA, 465 bp, Cucumis sativus
  Intron number 3 from transcript Cucsa.058860.1 (locus Cucs a.058860) derived from phytozome v7.0 (chr-ID scaffold0061 4; pos 977488 to 977952 reverse strand)
tgaggttagcaatgtgtttttgcaacttttgattgtttttacgaaatggataaatttatacaagatgcgagtactagtctactcttttggttgtacgtgcatgataacaactgttcactttaatagatgttcaatgtttgggtttttttttttttttttgcaaagaatgtttggttttagatgttgattagattatccttgcatttgatgtcaagataattcattgtttcatcttcttccccattttcccagcatgaaaagcatggtggactaagataattagtttactcaatttacaagcatcattcattgggcatttttctgaagttctcctccctatgttattgccatctagttgtaatttgttttcttggatgggctggaattggatcatttttaatcatgtttttttcttgttttctggcttcagtcggctcttcctccacagcagttagcttggtgtgg

SEQ ID NO: 62747 - DNA, 204 bp, Cucumis sativus
  Intron number 2 from transcript Cucsa.095200.1 (locus Cucs a.095200) derived from phytozome v7.0 (chr-ID scaffold0091 9; pos 1117430 to 1117633)
ttcaggtcagaggatttttttttgtttttttaatgtctattatttcattattgtaaattctatttgttggttgccgtctaatggatgtggaatgttcttgtgaaattatcgtcgattgctcatttgattctctttttttccctttattttcttgtctttattaggaagaagttcttaagaaccaatttttgtaggtaactaaag

SEQ ID NO: 62748 - DNA, 530 bp, Cucumis sativus
  Intron number 3 from transcript Cucsa.128860.1 (locus Cucs a.128860) derived from phytozome v7.0 (chr-ID scaffold0102 8; pos 29590 to 30119 reverse strand)
ggagagagaccagtacatacgaggcaggtcagaacatgttgggttaatatcttgttcagatggttacacctaatagtaattttgattttatttagttatgattgaccaccataaagataaagatgaaaaatatgcacgtagaattgttgatatcatagatcttggaatcttaaaaaaaattattataaaagaaggaagtggctggggttttgaatgttttctatgctctatacaatcaacacatgtgactaagtattagtgcttcgtgaaatttcttggcttgaacagtgagataatggtcacagactcagcctttaaatcttgcttaagaaacaattgtgcattactcatctaatatgcaaaaaaatttaaagagcagagttcacagtttgctcaataacttgtacatatataattatgtatgttgatatttctttttaatgatttgatgagtgctttgatagtgtgatgattgatacctttctattcttccaggctgatcaaaagactggaaccttgaaagaagagat

SEQ ID NO: 62749 - DNA, 418 bp, Cucumis sativus
  Intron number 1 from transcript Cucsa.128860.1 (locus Cucs a.128860) derived from phytozome v7.0 (chr-ID scaffold0102 8; pos 30530 to 30947 reverse strand)
tggtgaggattgaagaattttgttgtctttgttattgttgttttggatttctgaaaatgaaacgtattatttgtatgtttgagcgtaattatcatatcgagaattgcgttttttatttctcttgatttgagtttagaaatgatgattaggtttttgatttcttacggtcatgttgtttttgaaacgacgggggagtttgtagatgttgtgttatgaatcaattgaacagaagttttgatgcgaaatgtggttggatttgtgtataataattcgagcattttgttttctcattatttattgctctgttcttgaggaggctatttcgagtatttcgtcatttcttgtggtgcgaagttttttttttaatgctatttgagatgaccaagtcgtctttcgtagctaacaggatcgcgtcagc

SEQ ID NO: 62750 - DNA, 568 bp, Cucumis sativus
  Intron number 1 from transcript Cucsa.104900.1 (locus Cucs a.104900) derived from phytozome v7.0 (chr-ID scaffold0092 7; pos 3219068 to 3219635)
gcacaacctatcgcaaggttatatggtttctctctttaaattactagcttttgatttttcctactgtttatttgattttgaaatgtgttgatcgtggtctctccttcagatccgtctttattttaggccttttgttagtacttgcgcgtttcgtctttggttctgtggtactattttcttagatctggatatatggggaatcgagaatttatgattttattgttttgatgaaatgagtaagtgacggaggcctatatgtgagagtagtgttgtaatttccttttttagatccagaattcttaagcggttgatctgtctaaatctgcgaagttttgtagtacgtaagaaaggcgtaccagttcatttatcccccaattttttgatcattaattaggtttttcatttgtattgttccatttttaattatttaaatgtagctcgtctgctgctaaaggtttatggtagcaccagttggagtgaaacgtgttatcagttttttatgatttcagcaatatgttcgatgtgtcttgtctatgtttcttatctattgttgttaccttgtacaggg

SEQ ID NO: 62751 - DNA, 797 bp, Cucumis sativus
  Intron number 2 from transcript Cucsa.027600.1 (locus Cucs a.027600) derived from phytozome v7.0 (chr-ID scaffold0037 8; pos 338170 to 338966)
tagatcatcccctcttgaagaaccacaagattcaggtccacacattctccttcaacgatattaattatttttataattataatctaataaatctcattccctactctatttttttataagaaaaaagaaaaattattttaacctttaacctcatttttgcatccactgtttaacaaagagagattatatagttaacttaatctgccaatttgaaaccatatagtattttcaatttctagattggttcaaacaatattgaaggtcccagaaagtacatagtttcaatctatcaaaaaattctaattttgttatcaagctccataacctaaataaacagtttgaaaattagagaacagattgtattaatttaaattaatttttagaaaattacttatttatgaaagaataactttcatgtaatagctagaacacgctatataaaagcaaaaacgttcacatagacaaaattgttaaaaaagaacaaacagaaattaaaccccatctactatcatttgatttattgttttgatttattgaaaattaaataatccatagatagagatactatcttcacctccaagaattaaatctttaattaggtatttatttgctaaaatgtggaaactaaaagaataagttataaaaaaaagatgtgttttgattttagaatttgactagattgtatttgaaaaagacttgctaagaaatgagtaagaaataaacttaaaatggttattaaatagaatgattaattttgttcagagagggccaacggagtggccgaagacgaaggtggg

SEQ ID NO: 62752 - DNA, 876 bp, Cucumis sativus
  Intron number 1 from transcript Cucsa.083960.1 (locus Cucs a.083960) derived from phytozome v7.0 (chr-ID scaffold0085 8; pos 647217 to 648092 reverse strand)
ttctgtctttcttttctagatctgttcttttctaggtaagctatcgcgctgttgtttactcttgcctgtttagatcgcttagatcttgttcattatcctcttttttctttccttcttacattcagcatattttagcttttttttttgctcctgttttttttgttgcctttttcattttttacgcgtttttagtgtagatctaatttggttattggttaattatggttctttgttgctgtttcggttcgcattggtgtctgatttagtcgtttttctgctgattgaatgtagatctgatggagtttgtttatgttcttgttgtgtttcattgtacgtgagtgaatgatgttgtgttttcattataactttacgtggtttttgggttttgtttatgcgagtgatatttgtttttgtgctctgttctggatcgaccttattttgtatggatgtactaaatcattgctttatatgatttaatgtgtatcgaagttgatttacttgatcttcattgtctatgtcagttgtcaccacttcagtgagtgtttgattgcggaaattgtgccgtgaattttggctgatttttcttccttgaatacttttcttagtgttttagtcagatttgtgatacatttctcttaagttgaatttctgtatttcggacttttaattgtttatttgacgttgatgtttgaacggcttttgggaccaagtttcacttttcatgatatcttttgctagtatgaatgcaggctgtcggtgatctttgtgtattcaactaattgatacgtttttttcttctttttctaatcgactaatctgtttattccctttccattttcaggtgcaaactcgttaggatataacgttacaattaga

SEQ ID NO: 62753 - DNA, 877 bp, Cucumis sativus
  Intron number 2 from transcript Cucsa.032250.2 (locus Cucs a.032250) derived from phytozome v7.0 (chr-ID scaffold0042 9; pos 1617778 to 1618654 reverse strand)
ggaattcagctggttgttccctctctctaagtccataaatgtataattataagttttccttttattatatgccatatgctttgaaatcgatttcttcgtagatgtccatgttaacttttcctctttagctttatctttaattaattctcctgtgattaatcatctaagttctttctctggttcattgcaatctccacaaacaaaataagacaatgataatgattatcatcttgttcttgctcttgtcaaccctttgtctggttttcttttcaccctgaaagttcaattttttgttgctgaatcatacggattttgtggccaaagcagtgtcatgaaagcttactgtttgaatgccttaaattagttgttggtacttatgttatttataattttgactctaggtttagatgagcgtactatatgtacaaactctctgctgttagaagttgtaattcgtaatttgatatttctctctcataataaaaatgttctcctcctttgtccgttgatttaaataacactattagttaaccttgtaaatctctctgtctatttctctgttgcttacgttttctgttttctttgattgtcaattgccaccaagttctcggttgttggaatggagtggataactagccaaatctctcttcttttgctgttgtttttggaagccaaatttgatttttcagtcttgttagcgttcagcaattgctacttgtttctaaaacggtcatcgcttctttccttaaataaccaactgtttttttatcatacatcggaaacatgcagttcaactcattgttagcgatctttcatctattctatattgccttcataaagacatggtttgccctctgcagtgactttgaagtcgatt

SEQ ID NO: 62754 - DNA, 735 bp, Cucumis sativus
  Intron number 2 from transcript Cucsa.129540.3 (locus Cucs a.129540) derived from phytozome v7.0 (chr-ID scaffold0102 8; pos 422473 to 423207 reverse strand)
ctcgcaaggtatttcttatttagtttaaataaccattaggaaaatttatggtgatttttgtgaaggttccggcagcattagtattgtcttctggaaagatattggatagtacatggtaaagatatgtttttagtgaatggaccacattttaggccatgattggaagtgactaagatcacttttgttgtgttcaaaatcacttctaaacatgtctttaatcatcaaaacatatttcaattgcatgaaaacttgccgtcagttatggtcaaattagaaacttgtttgaactgatcaaagtactctttggaattgatttgttggttttggagctaggctgagcagaaaagtaaattgctagagttcaatgcatattgcacattttttaaatgttctttctgattaaattaaatcttctatttgatgctcctgtttcttcgtacttttttttagaattctctctacgcccattatgcatgtcaatagcaagggtgtttaacttttactcataataggacatagaactgccagattttgagaataggtttacattaatgtggcatttagtgcttgtggacactattgttacatcaagactgcaacagattagattgaaccatgtgtaacaacataattggatgattataaaagttatggaatttaatttacattgaagttctttgatataattctctgtttgcaggttcacaaggaattgcaagacacgttggctcaact

SEQ ID NO: 62755 - DNA, 569 bp, Cucumis sativus
  Intron number 3 from transcript Cucsa.010900.1 (locus Cucs a.010900) derived from phytozome v7.0 (chr-ID scaffold0015 4; pos 260569 to 261137 reverse strand)
gaaagcgtagatttcgaagagagccagatttaaatgtatggtgttctaatccctcttactaaaagtttcatgtaggattttcttatgagtaagtaaattgctgtacaacatcataataaattgagatttctactaatgtaatgagcaggtagtccgggataaattattgaatgatgcaagtacaatatagttacctagtttgtgctttacatgtttttctcatttataaacctttgattaacattgatctcttatttttttgggtcaatagtgacatgctaagctcccttttcttttccccatcttttcaataataatcagtctacatttgcatttgttcttcatatcaaaatttgttgcatctagaatggtgtcttttgattctagtctcaaggttgttaaatcatgaaatgtaacacgcatcaaaatggaattttagtttattgtgtattaatttctaaaaaaacagaagtcagaaaacaaatggattctaaacagtccctaaatgattctgttttctttcttttttggcagcctgagcttgtacggcgtgtggagaaagatttatt

SEQ ID NO: 62756 - DNA, 540 bp, Cucumis sativus
  Intron number 1 from transcript Cucsa.010900.1 (locus Cucs a.010900) derived from phytozome v7.0 (chr-ID scaffold0015 4; pos 261408 to 261947 reverse strand)
cttcgttggatttgtctttctctggtagtagaacttatacagtcatcttttgattcattctgtaccttccgtgttttttccattgcatctgcgatgtatggaagaatttttagattttccggatagattagtttcgtagcctcttaaaaaaaaataaaagtaacttctgatacaaagccttttctctttctgttattttttttactctgaacgttcccttttactgatgattgccaatgtgtgcttcttaggccaagttttgcacatagttgatctcacttctgccatgtgcttgtctggctaagtttagttatggtgtatggaaatccaacacttaaaatagccaaatctttgtttcctattgtacttaatggaaaagaaatttggcagtaatatcaggaggtagagagagatttggaaatagatcaaattgtgcagtatggttttgttctaatttgaggcttggtttaaatgcctataatatggcctcttacattgcatccagaggacgggagaagtggaacttttgccattggtgat

SEQ ID NO: 62757 - DNA, 698 bp, Cucumis sativus
  Intron number 2 from transcript Cucsa.104040.1 (locus Cucs a.104040) derived from phytozome v7.0 (chr-ID scaffold0092 7; pos 2682092 to 2682789 reverse strand)
atccgcgagctactcacaattgctgggcgtatcaggtgcttactttttgtctcttggttggacgtcgttagctgtatttattagttgtttaagttcttggagaatatatattatggggtagttcgccatcctttacagtggtgtcctaatatgttcatcacgtgatttgttgaaagtgtaatgtaacagaatttatgctaaatggtatgataaaataatataatgatgaggaagatgctggagttagtttctattttacatttttatactatctcattaaatttgacatattgctgctgcgaatgtgaataacttctttctaagtcataccctttttttccctaaatttgacatagaaagttagacccgtttggattgattcaagaaaaaatgtttttcaagaaattcatttttatttaaactttttttgatgaaattttttaaaactatactccaaaaactattttgagtgtatgtcaaacactccaattttttctaaaataacttactttttaaattaaacacttgaaaatgtattctaaacacacccttaatttgatggtcttattattacttcaagaatcaaaatgcattgttccagtttttggttaagagtattcccatgaagagattttgggaggggcataatacatttacttcttatgcctcatttcaggttggagatcaatataggtcta

SEQ ID NO: 62758 - DNA, 750 bp, Cucumis sativus
  Intron number 1 from transcript Cucsa.074640.1 (locus Cucs a.074640) derived from phytozome v7.0 (chr-ID scaffold0078 5; pos 530936 to 531685 reverse strand)
aaaagaaaaggagagagaaaactagagtaagtgatagaccatagactatagataataattttcatccatataccaacaataaaaatattctaaaacgtaaaagatattaacgatttttgttcatatgccaatacattttatatcaaaagtatgaagaaatttttgaaataaaaaagtatgaagaaattttgaaataaaaagtatgaagaaaattttgaaagttgattgtgaggaaaggagagagatgttaaggaattacgtacacaacggtaaagcccaatttaattaaagttttcatattttgaagccaaccttacaaacagtggttctatctattacttggtcaaacctctcatttcacttttttttctttcgttccttttggcactttaggaattaaaaattaaaaattccttgtcaacaaaaatccaaaaatattttcctgtttgattttcaaatcaaatgtcttattcttcttctccaacaattttctttttctcattcaaatcccccctcacaaattacatatataaaaacctcatcaattattcttcctccacgactgaaaaaataaaaggaaaaacaaaagaaaaaaaatactcatctcttttcctttctcaacgtaatcaacaacaagaactccgaatatgaaccgtgtggcagtgagcggagtcgggaatattacgccaaggcagtttctagctcatctggggaagaaggagatgaagggtatgactttgaagccttgtg

SEQ ID NO: 62759 - DNA, 721 bp, Cucumis sativus
  Intron number 1 from transcript Cucsa.089930.1 (locus Cucs a.089930) derived from phytozome v7.0 (chr-ID scaffold0089 4; pos 1334561 to 1335281)
agattaaggaggttttttctttttcccattctttgaactttgtttattgttgttttctgcgttgtgttttatttgcactattggtttcttcggttagtatgccttgacgttagtgttttgattatttttgttctggtatccgttttaactttacagtacttcgtgtagtgcttttttttttctttccttcattgattttagggtcatttactctgttggcaatattggttcccaattgaaatgtttgaatgagaattgatgaatgggcgaaaacgattagtctccatatcgcttcgagttcgattaagatatcaggggtcgttgattttgtgctttcttgtgcaataaggaaatcccttttgaaacaaattcggaatatagggaattttaagttgtggataatttatggagctaagggagctgttggcagtttgtaatttgtttaggatcttgattttcctagttgatcgtgataatacaagtggcacaatcctcttatagttctatcgtggattcccccagtagtaatgagaaatgggtctcttttatctagaaattagttacttggtaaatggtcacctaagctgttgaaattttgtaattttcatgatatgctcgtcctttatgcgggctcatttttcttggaacatttcttctctggttgcatggatctaaattcacacattacatatctggcagaaagccttggctgaagcaaata

SEQ ID NO: 62760 - DNA, 652 bp, Cucumis sativus
  Intron number 1 from transcript Cucsa.054270.2 (locus Cucs a.054270) derived from phytozome v7.0 (chr-ID scaffold0058 2; pos 582508 to 583159)
aggagcttcatcctcggtcttccatctaccagcaggttcttctttttctttctgacttctctctgtttttagcttgactcggagttgatttaatattttatatgaatcggctccagttcttgtattttgtgttcggaatagaaatttagtttgtcgaatttggtttctgaatttcggaatctttgaaattgtagtttgaattatgattttattttgtgttgattaataatagggttaaacgcagattaagttgtttaaaatcccgcttgtatgacatatctaatttcacagtttctttaatgttttgaagttgtttttttatccttgatcttgtaatttgttacaaataatattttcccatggtagtttttatttgtacattcgcgaggatgtggtgtgctttagggaaattttgtctaattggacatggcatgagaagaaaatctaaggaggttatatgttcgatctgtctaaatttctaatttgtttgataaaatgattgctgagaatcttgcagaaatcttgtgtgaaatcatggggatgtgtaactatattttccaaataaattggtgatgtttctccttgttggtttgagttatgagtctcacttgctctgttccttctcttccgtttcagattgctagttcaatca

SEQ ID NO: 62761 - DNA, 911 bp, Cucumis sativus
  Intron number 1 from transcript Cucsa.099870.2 (locus Cucs a.099870) derived from phytozome v7.0 (chr-ID scaffold0092 6; pos 542209 to 543119 reverse strand)
aaccggtaagctaaaaaaatctcttccgatttcagtttctctgagcagaagcaaagctcttgttaagctattagcatgaatttcaccttttacactacactttttttggtgctctcgtcttcctgttctagctcagttattagtagaggaatattggaatcagacgtttcaggaagcttattgcgttacagaactaagagttcttctcatgttttcagtgttagaagctttggtgcccgagcaaatggcttgactgatgatagcaacgtctgttctgcgtttgttttttgttgcttttttttctttttttgtggaaattgtttgagattttacttgatgaattgtattccttgagctctgttgctcccttcaactgttgagattctcttctctgctgcaatttcctgtactttttatccgttttttgttccatttcttcagctctctagaaacgacaactttgttattatatgcattgttcctaaggatttccatgaatctctcttgttgtgttttctacttgtctactcaaatttagaatcgttcaatcagatgttttctgttcttagtccaatttcttgcttggtggaaatgaaaatccagtttccttccaaatggcgaggatacatgattaggaatagtaaaaagtgtttattgacaaattacattgtgtttgattctacattcttgaaggggttttaggtggttctctaacaatcacaaggtttaatagtactatatgtgtgtgtgtgtgtgctttctcataaaacaatcagtcttttttttttcaaattgacaatatattgttttcaaacgtgatgtttctgagtaggaagtggttttgcttcaaaaagattaagatcagttttcaaaagttttgatttgcttgtgattcaggccttcttagcagc

SEQ ID NO: 62762 - DNA, 1002 bp, Cucumis sativus
  Intron number 1 from transcript Cucsa.088430.3 (locus Cucs a.088430) derived from phytozome v7.0 (chr-ID scaffold0088 8; pos 742288 to 743289)
cctgggcacgattagctggggtcaacgtgtttgaggtattcattcagaattttttgtgagagttaagctggaatgtttactgaagttgtattaattttctattggatcccattcagaattttttgtgcgagttaagctggaatgtttattgaagttgtattcattttctattggattctgtcgtcacttatccaatagggaaacgacgacaatggtttcctttctttgctcgatgagtgtgacttttaggagggatgtgtttggaagcccaatcctttgaaggcttctcttgtaaatctttcttcaaattgttgttaggcccctcccatggttgcatattggtttttggcgcggtttggaggataaagattccacagaaaatctagttttttatctagcaggttttgataggttgcaagaacaccttggatgggcttgctaagaagatgcctacgcttatgggaccgtcctgttgtattcttttttggaaggaagaggaaaccttaaccacctgctttgggactgttaatatgtgaggcttgtgtggtcttgtttctttcagaagtttggtttccagattgctggacagagaaagatctgtaccatgatcaaaaggagtatatcttgtatcgtccgcctttcaaagagaaaggtcggtttttgttgctttccagagtgtacgccatagtttggggttttgggggtgaaaggaacgagagagtttttagactttagaggtttagagaaggacccttctatgtttggtcctcggtgaggttccatatttctctgtgggattccattggtaacattttattaagttggaagtctttcttgtagaaggcttgttttttgatggcctggttttgtttgctcttgtattcttttcattcattttcaatgaaagttgaccatttttttaagaaaaaaaaaagcaaaactagagtttctatcttagctaaagagcttcaatattttgcagatcttgatttctgaagaaga

SEQ ID NO: 62763 - DNA, 737 bp, Cucumis sativus
  Intron number 3 from transcript Cucsa.066290.3 (locus Cucs a.066290) derived from phytozome v7.0 (chr-ID scaffold0069 6; pos 827773 to 828509 reverse strand)
tcctaaagcaaaagatcagaagacaaattctaaaggtactggaccttgtcatttggcctagtgttttccctttccctctatttgtaaattgatgctatcttcttcacttgcgttttgctgtattttagggagagagagagtggtgtatttatggattttgaatgtggtgattttaggattttgtaattattcttctcagcatgaaatctaaatagaaaacttcaagacatgggtaccaggattatatatctgtatagtttctactataacattatcctctcttttgtttttagtgtatgctgtggttttttgatctctctacctcaacatgccaaactgtcttcaataatttttcttttgaatgatttcttcttttgttaggctcaaacttgtcattaggtttggtagtaggatatcattttatgttcattcactagattcccgatcttatagtaatttatacttttgagcattatgttattcagatttatgtgtatgtttttgccaccaggttttcttcttctcacaccttgaagtgtgtattatctgaactgttaccatctttttcatatttggaattattgtacactttttcttttagttattcctaatcacatccttcactgttttattatgccattgctaaatagtgttctgatcttacttagacttatgttttcttcatgtttcctttgctagaagactctaatagtggtcacacagattcacaagagaaa

SEQ ID NO: 62764 - DNA, 958 bp, Cucumis sativus
  Intron number 2 from transcript Cucsa.012980.1 (locus Cucs a.012980) derived from phytozome v7.0 (chr-ID scaffold0016 4; pos 754887 to 755844 reverse strand)
tcttctgaggtaatttattctttaagtattaactttacatatatatatatatatatttttaataatattagattcaaatcttgaagagatattaatgcctaattggtataatatctctgtttttcttttattattattcttcattgtttgactttatgaagaaattacaaatgattttctttcttgtttaaaatactaaacttaaaaactaaaacaaatgttttaaagatcaaaaccaatgaaattatttatgaatatgtatctatcgttcctctatttaaattttcatacaaataactattatacttactaatgttgacctaattgaatttaaattttaatccttaaaattaaaagaaaacttaagaaattagtctctatcgtaatatcgtttataattaaaattttgcttttatagtttaataaagttttaataaatagtctccaaattatatatttacgaggacttcatcatctgtagagctatagattacctaggagattttactttaatggtaacaaggactaaatcactaaatttgaaatttaaccctgtttgtagaagtttgtgggttattttatttttaactttaaatgttgtaatttaatctttactttttatcatatattaacccaattttttaaatgataataatgtgatataatgctaattgttaatcatgttaatttatttgtattagggttaagaaagagacaaaatattttagaactatctattaattggtagaatgaaataagtgattagaggacaaattaccaacaacttttgagtttttaccaaaacgcacagacttcaaatatttaaattaagattttgttttattttctatattttgtgatcagtttggttaacgtttacaatttcaattaaaaaatatttatgtaattatagaatgattatatataaatatgtttcttttctgtccccaaaatgtag

SEQ ID NO: 62765 - DNA, 921 bp, Cucumis sativus
  Intron number 1 from transcript Cucsa.091360.1 (locus Cucs a.091360) derived from phytozome v7.0 (chr-ID scaffold0089 4; pos 2412692 to 2413612 reverse strand)
gtgatagatgtaagttttcctttttttttctctatttaacgtactttggagtccatagtactttggtctaaaagagttagaattgattttaaaacaatcttgatcgtattttatgtttatggtaaatcacttttacaatccacgataactttttaaatcagttcctaccaacttttacatttttgtaaaatcagattttacttctaatcaattttcaattttatcttccaaaattaagatttctattatatattatttagtatcagcttccttccatttttcatagaaaaaaaaagactataatttttagatcataccatatccattttctaaaaagaaaactaaagttttttctgttgatactaattaacaattaatttaagaaaaatatatcattttaagagatcagtatttaaatagtttaggataattatttaaaataacaaaaacgactaaaaaataataatatttacaaatataagataatcttactgtctatcaatcaaggtgaatcattgtttatgattagcgatatttttctatttcattttgatatatatttgaaaacaacaattttcttattatctgttgcttggtataaaatactttttagataattgctctaagtacatagcactgttcaaagactaataattaagtgtataataatattcttagaggactatcaaaaatataacaaagtctactctagaatgttaattttgtatatgtagatcaaattcatagttgtttgttagttgacttttttttggagatgctttggcgatattttatcaaatattgaagaaacggggttatttttccaaatagaaatgatttttatttggtatatattaatttgtaagtgttgattttatatatacagcaaaggaattgcaaggaaaggttggaaaaaagaca

SEQ ID NO: 62766 - DNA, 703 bp, Cucumis sativus
  Intron number 3 from transcript Cucsa.125080.2 (locus Cucs a.125080) derived from phytozome v7.0 (chr-ID scaffold0100 1; pos 869730 to 870432 reverse strand)
gactttcaaaggttgggaaatactataaaacttcatattacttgtgtaacattttagattaggccaaatccacagccaaacaggaaaatctgtagccctgaagttcaggaaaaattatctatgaatcaaagttctattttaaattgatattcaatagcccctcgtatatttctagaagttgctatttgttgttatacaagaaaataaaacaaatcactaaataaacccaaactattatttaatctaaaatcatcaactaaactaacgttaactgactatactaatcatctaattacttatgtacatcatgtctgttgcctgattaaatttactctcagtaaaataagcagctgacatcaagttcccttatttaagcggcttcaatttgatgcttattgaaaaatagacttataataagaaattatcgtataaagatggtggttcatttcattgctgcacgagatccacgttgttaattgcatcatatgaagacacatgagtttttcattaaaaattgattagaggttgagattttaatattctttagtttatgataagaaaatattttgcaaagtcaaactttataaaatataggcgttattttcttcactgcattgattatacagtaatctccttcatattactaaacttgacattttcttatataggtcgttaagaaaggagacaccctttttcttggtca

SEQ ID NO: 62767 - DNA, 827 bp, Cucumis sativus
  Intron number 1 from transcript Cucsa.058170.2 (locus Cucs a.058170) derived from phytozome v7.0 (chr-ID scaffold0061 4; pos 411213 to 412039 reverse strand)
ccgaagaagcccagaaattgaaggtcttcttgctctctatccatctctctttctctcttgggaagaagaagaatcgaaatgaatttttgtgaaaaatcaattttgaatctaattttcctaagatgtcaatggtaagttttgtttgctttcaaacattacacgtcatctatttgcttatctactttaatcctatggtttttttacaagaaaaaattccaaagatcaatacctatgatcccgttgtttcaaatcatgaagtatgattgaatgtcattgttacaacattacaaacacgttaactgtttgtattgttagaatttagagagcacgagcacgagcacgagaacttcacttcttcttttaggtttagtttgataatcatttaacttttaaaataaaacatttaagcttagtttcttatttatatgttcaaataatttttctaatgtttttcttttaaatttaaggccaattttagaaaggggaaattgaaaatgataaaactgttaaaaatatttacaaaatataacaaaaatttgaattctatcaccaactctctctgcctctaaacttttataaatactttagttaataagtgtgttcataatttaaatttcttgattttaatagttatttttaacatttaaaataatagtataattattaaaaaaaatgatgtaaaagaaaattggattaaagtaaagcatatttcgggtagtgaaaagttaatattttaagaatagaatattagttttaatatgatgatcactccatgttctcaatttgatccatttcgccctctacggtttcgtttctagagagagaaa

SEQ ID NO: 62768 - DNA, 643 bp, Cucumis sativus
  Intron number 2 from transcript Cucsa.011850.1 (locus Cucs a.011850) derived from phytozome v7.0 (chr-ID scaffold0015 4; pos 1247693 to 1248335 reverse strand)
cccttatccatagtgacgtttggggtccctccaaggtggacctcatctgggaaacggtggtttgtaaacttcattgattatcatacccatcttacctgagtctaccttatcatcgataaatttgaggtttcctctattttccaaaatttctatcacaccattgaaacacaattccataaaaaaaattgctattcttcggagtgacaatggttagaaattccaaaaccataaccttagtgaatttctagtctccaaggggattgttcactaaaactcgtgttattctagtctccaaggggattcctcaacaaaatggagtgatcgatcgaaataaccgtcaccttctggaaggtagcccgctcccttatgttatccattctccttccttcatacctgtagggagatgttattcttacagcagctcatttaatcaatagaatgccttcttgtatcctccgccttcagctcccttagattttcttaaggagtcctacccctctactcattttgtttttgaggttcctctttgtgtgtttgggtgtaccgcttgtatctataattttgaccttaatcaaaccaaatttacccctcgggcttgaatatgtgtgtttgttaagtatccccttcaccagcgtggttatag

SEQ ID NO: 62769 - DNA, 727 bp, Cucumis sativus
  Intron number 1 from transcript Cucsa.047490.2 (locus Cucs a.047490) derived from phytozome v7.0 (chr-ID scaffold0054 2; pos 2493275 to 2494001)
ttctactaactgctacctccttcctcgaaacagtaatttcccctatttcactttcctgttttcgattcatctctactgtctccaaaccctgcagtttccaatttaatcaaatgctgcttcaacttaattttacattttatttttattgttattattatatttgctttttattcattcgaactacggtgaattcaatgcggagttctccgtttttcttcagtaatatttattccgctcctaattaggggtttatcttttatgtaaagtgtttttttttcttgtgttcgtccttaaataataaattagtaattgtatttgcacgtacaagaattcttagaattaggtttttcgatatccgtgggtgtccggacaacccactgagcctaccacatctgggcgtcaaggaaacacctcgaaaattaaattgttaagtaggtgaccagttgtgattaaattagattctgatagtccatttccaggtgaaatatgtgagccactatatctatagagtatagacaagctgaagcgcactctacgcattgagtagttggtggtttttggatttgagaaatattcatgtgataaatttatgttcacgaatcacgctgcagtttgtgctaaatgaagtgcgccgtaggttgctttatctatatctcattaacgggttacggtgaaaagggttgtttattttatgtatgtatgacaaaatattttaccctcatgtaga

SEQ ID NO: 62770 - DNA, 175 bp, Cucumis sativus
  Intron number 1 from transcript Cucsa.099300.1 (locus Cucs a.099300) derived from phytozome v7.0 (chr-ID scaffold0092 6; pos 145860 to 146034)
agctgcctattactcaaacgattcaccactttcatgtacgttgttatatgttactgtcaaatctttatattatcattcttctctcgttttgtttctacgttttctttttcttttatataatactatattgactagagaataatgtgtatttgagttttagctggcgcttgtggtt

SEQ ID NO: 62771 - DNA, 971 bp, Cucumis sativus
  Intron number 3 from transcript Cucsa.099300.1 (locus Cucs a.099300) derived from phytozome v7.0 (chr-ID scaffold0092 6; pos 146650 to 147620)
ggactctggacattgaatacaaaaggttagcctttacattatggttcttccttttgtttatattgaattctaagtactgtacctcacatttgtttctttagtttgtcggtattcaaaattaaccttataaataaaaaaattgtcaaaaataacaatttcgaccaaatatttacaagttctaacaaaatttcaaattcaatcaataataaacatttaacaaacattgatattagtcggtgacataggtttttatcattcatatatctaaattttttgctataactagtaaatattttaatttattttgctattgttaaagatcaaatttataaatattacttttattttatgttaactaaaaaaagtagttttgtaaaaaataataccgagaaaacttaaaatcatcaatctttttgttttatcggtacaattttacccaacataaaccatgatttctttaaagaaaaaaaattaattaagatttgagaaattttgaaaagtagtctaatgtctaccgaaatgcaccacgaaaacccaaaacaatcagacaatggataagttgaaaatctttaatatgttagtaaaatttcgatgatcaacctctcctaaaatgaatcgagaatagatgtttaaatgatttttaaacgttgtctcttaacaattaacaattttaatttatcccctcgtacacaaaactacaaataagtaaatatatatatatataattcccctcattcacaaaactacaaataagtatatatatatgattcccctcattcacaaaactacaaataagtatatatatatatgtacatatttatatgatgcacacatagataagtattcatgttagatatgtatgtaactatgtagatataattatacagaaatagaaatctatatagagatcattatatatagagagagagaagtttgtttatataatatgggtggagcatggtttttgcagg

SEQ ID NO: 62772 - DNA, 355 bp, Cucumis sativus
  Intron number 3 from transcript Cucsa.114230.2 (locus Cucs a.114230) derived from phytozome v7.0 (chr-ID scaffold0096 2; pos 74831 to 75185)
cacaggactccttccatccctttagatcgggagaggtaattcttctttctttctcttctcaattattgatcatgatttgctttctatttttaattattatttggaacttcttgattcagattccttgtttgattaatcattcataatgggtgtttcttttttcttttctttttttggtttgatgatctttatcattgcatttgaatactaatcagatggccttgtatatggttgtgctgttggacatgtagttgtgttacttttggaccttatgagttttatatgtgatggtgattttgtgttttgtgtgacaatggcaggtgtctagctgaattactgtcagagagacagaagt

SEQ ID NO: 62773 - DNA, 801 bp, Cucumis sativus
  Intron number 3 from transcript Cucsa.135350.2 (locus Cucs a.135350) derived from phytozome v7.0 (chr-ID scaffold0104 4; pos 197100 to 197900)
tttcattgtcagcgatcattggtatgaatccacactgattgtccttcaatgaaacttctgatgctatgtttagccccctaaagctattgccatttttcaattctgtctctaaaaatctcactagccctccaagattaaggattccaaccttaacttaacctctttgattcttttgtttgtttgtttgaatcttacctcagaagtttaggtgttgatgttcatagaaaataatgtaaatgttatgagatcatacatttttggtcagtttcagtcacgttaatgggtaacagccttacttgaactctatcagttctttaggttgtagaattgtgtccttgagttttaaagatcgcattaatgagtaggaacttcttgaagttttttgacgtagtgaggctatatggatgatggtacgcataaaatgggggaaggtttaaggaccatattataattgtgaccttatttttattcgcatttgcagttgcaattgctatctttggccatcaaatgcaggatttgacaaactcagaaatgataatatacacagttcatccttaacccttctgtgttcaaaattctcttttgctttacgtataaaattttcgaactattgttttgcatcaggaaaagaagaaatttagtttaactctttaagatattttagttattatatagttttgcagatggtatgaagctgcaagctgttcatttgcaaattatactttacaatttccactaattttggcatctctattgatcttaaaaggtgctgtagctacttcctactttggagacgatttg

SEQ ID NO: 62774 - DNA, 659 bp, Cucumis sativus
  Intron number 3 from transcript Cucsa.038770.1 (locus Cucs a.038770) derived from phytozome v7.0 (chr-ID scaffold0050 8; pos 35982 to 36640 reverse strand)
gaaataggttaagtatttgaatggactcctattcttcatttagtgaatggattgtgctgtgccattatttatttatcctttttgtttttttttttttttggcaaaagtttcacacatacatggacttcaagagtataacacatgtgtctatagtatattagttgcatcttgaaaataatcctgaaagacagtgggtgcgtctatttttgtttttgaaatcttattgatggttcaaatgtttccaaaacactgtaagaaaattgtgaggaaataaacaatttgcagaaacagaaaacttaaaagtaaaatcattattaaaagaagccaaaactaaaccattattatttgtagaaatgactggagttcattccaaatttatacatgaccactaaagtgtcttaaagaacttcagaataaattataatgattgtaaaggaagtgactgccctgtttgtcagtcaatcaatgctacatgcccttctgtttctgcattgctcggctcacaaccccaagcatgtgttaatctccaaatgtaatggctgatatatgattttagaaggctaatgcatgataatggtctgatcttaaatctgatcatcttgtcaatatcctattgttctacagtttggactttttcaaaggactaatcaagagcaaat

SEQ ID NO: 62775 - DNA, 872 bp, Cucumis sativus
  Intron number 1 from transcript Cucsa.066320.1 (locus Cucs a.066320) derived from phytozome v7.0 (chr-ID scaffold0069 6; pos 842252 to 843123 reverse strand)
cgacatcatcatccatctcactttgacactgacaggtacctttctctctctctctgttttggctgccatggctaattatgaacaacctgtgatgtacaacatacaggaaggaaaaacagatcttgaatctttcttttcaaggacttctgcctttatgtgcagtttgttgatggcttctttaatgggttgttttctgtgtatgtttgttgttagtttcagtttggaggctgtcttttccaagattatatccaattttgactttggttttctgcattttggctgtgtcttaagggggaatttcgtttgtagaaattacaatctctttctttcttttatgggggggaaattggtcattttattttaaaatgaatactccctttgttttatgatttgcccatgctgatggatcttctaattgcttggctaatattcatggttttctgtgcttttgccttctcttttgggttaggattggacgtttgatctggttttcactctcttgtcaatctcttctttcttttttttcttttttttgttcccctatctatagatatttaaaattttgaatgactgaatatatagtttttttgtttcttcaaaaaccctagtctaatgatgaaaagaagatgcaacaaaatcaaaggattccttccattttcgagatttgagaaaaacactggactcaaataaaagtactctaagttacactttcattctgtgcagtcattcaaatcatctagcaaaaagtacatcagaattaagtaagcggcaaaaagataggtgaagcttaaatgcctacttccctaaaatactaattgtgcaatggaactttgacagaatcattaacagaccaacatcagtggactttgaaa

SEQ ID NO: 62776 - DNA, 882 bp, Cucumis sativus
  Intron number 1 from transcript Cucsa.046030.1 (locus Cucs a.046030) derived from phytozome v7.0 (chr-ID scaffold0054 2; pos 1661294 to 1662175)
tacatctactgagtgaggatctggatcctttgcaggtaggtttgttgctgctgattataggagaacacgggtttttctttttcctttttcattttttaaattgaaatgagaggtctgggattttggggaaactttagctacagttgcgatttcttctcttggattgaaacccgtttgatttagttggtgcttttagcgtatgatcagtgctgacagccgattcacccaaaaattatgagtaaaggggctaagttcatggtactgaccaacgtttattttcatatgaggtgaaatgaaggagaaagcaccagatgaagctttatatttcttactcgttaggattgctacattatgggcagaatgacgacgattatgtaacgttgttaagtttttctatttggaaaattgcgattttctcaagtcaatgggttcagggtgtgatcttgccagttaacgtatttttgggatgctatttgggtcgttctgtccgcaaagtcacctgacagttgacaccccatacctaatgaatgagattaaattgaatatggtgctgtaatactctatggctattgcatttgtttagtgcgaatttgttaaaagagcgatatacctccaattctttctgtttctttatggacccttattctgtaacttctaagctggatatttaggaaagtaatattggacttttggcctctaatctaagtggagaaattaggggatgtagcaaaggacatggtatcttgatggatttttttttctttcaattttcatgtcctttcttcgaaaatgatacctgcataatctttcactgtgaactctcttaactatttgtttataattatctatcgcagattaaaacagaggacttgtcaccaaata

SEQ ID NO: 62777 - DNA, 829 bp, Cucumis sativus
  Intron number 2 from transcript Cucsa.120080.1 (locus Cucs a.120080) derived from phytozome v7.0 (chr-ID scaffold0099 8; pos 2054974 to 2055802 reverse strand)
tctcaaactggctttgcattttcctttggtttgtatctcttctttcttcttttgtttcaaatttcattaccagaagccttgcaagcaatttgttgcatttaaggcatgctctgtagtgattgtgagtctgaaaatcactcccacacatcaaatttgattgtttagaattaacttgttttacacttttaaactcaacttttgtaatcttagaaactgattttcaacgtcacaaaagtgattttattttataataatttgaacttaggtcttttttctacaactatttggtctttgattttttttaaaatcattacccataagtttctatgtcttgtgattgcatttctaatactgtttaaaaaacgaagccaagttttgaaaataaaagaaatggttttcagagacgtatttttattttagaatttgactataaactataaacatagccttaattgagaagacaaatcagaaatttctaaagcacaagagttgaaaacgaaatcattattaaacatagccttaatctggtcatcacactcttcagataagcatagcattactggtttgtttctcttttgatgaacatattacaacaccaaaaagatggaaaaggagtgagcttttaattagatcatagaaaatgaacctgaaaattttaactttttggtagccaatagcgactgaacgaaacggatttaatagaacctgtcaataacttacgaatgatccacatgcatatatttcatttcatcaattagttgctttgatccaaggctttccctcctgtgtttcagctacaactttaactggatttcacttttctgtcact

SEQ ID NO: 62778 - DNA, 563 bp, Cucumis sativus
  Intron number 1 from transcript Cucsa.128250.1 (locus Cucs a.128250) derived from phytozome v7.0 (chr-ID scaffold0102 4; pos 302245 to 302807 reverse strand)
cgatttctctctgcttagtagaggtaggagaacacaggtagtactttgaattcttaaatttcgtagatttgggtttgtttttcttctgatggggtttgttttagatgtgattagttgttgattattctgtaaaattagatgtagtttcattcagaagcttctggggttgccgatttttggccgacactgtaaggagtttaatccttaacacgaatttctgagaagcttttggtttttttatctctattttggttgcccatgttattcctgtgatcgagcttgtgggattctatttctgccttaggttttttataatttttcgtgctgttcaaactagttttgttttcatttttttcacaaaatagttatgacgaatcatgattcagtggttcatgattttcaaaggaagaagaagcttaaacaacagttacccaattggaaaaaaaaactctcaaacaaccgctttttgtaactgaagtgattacttcatttaacaatatgttggttaaatttgttgcttaatcagttgtcttttctttggattgcagaactgtctcctaggc

SEQ ID NO: 62779 - DNA, 475 bp, Cucumis sativus
  Intron number 4 from transcript Cucsa.118950.1 (locus Cucs a.118950) derived from phytozome v7.0 (chr-ID scaffold0099 8; pos 870319 to 870793 reverse strand)
agacgtgcgttgatcatcaagtacttttctttattttctttcaacacttttcaggttttgacttgtatgttctatgaagatcatgtgtgagatgagtcattattctttaaaactcactaagtatttttcattgtcaaaactctattttcgaaaacaaaacttctgccttgatttcagttttcatgtatttgaattttgaacgaggccattcattaatcattcatgtctttcatgtacttcaattctatgacacaaaagggaacttttttgtttctttcattacatcaactctagttagtttgtagatatgcaaatttatcgattttcatctcaaacttttgttgtatccatgccttttctgctgcatgcacagttagaagttagcttttcttctcatctatgctttatttccatcagctatgagcacaagtaactgtccttcgttaatgataggaagctctgagagcattgtgga

SEQ ID NO: 62780 - DNA, 589 bp, Cucumis sativus
  Intron number 2 from transcript Cucsa.078400.7 (locus Cucs a.078400) derived from phytozome v7.0 (chr-ID scaffold0079 3; pos 755887 to 756475)
ctcctgtaggaaatatataagagctgcttctcttggtgagtaatcatgcaattgcttgataaatctccgggtaatatgtttatatgtaaattgtatattgtgcatgtaagactacccatcttcattttctgtagtctgtctttcatttatgttagatcctctctaaatgtggatagcacttttgtaatatgtgatggtcaatttaatgttagtgttgtgttccttggtaacatgaaatgaaaaccttgaattttatactgtgcaatattgccaatggtcatccactcctgcatttggttttttgtccccatttgttttgatactaaatcttatttaaatttagagcatttttttatatgcacttatgatttatttattgctgaaatttgctgtatctgttgttttgttgttagaattggatgccttagttttgttgtaatcctctttttttcctttgaaacatttgaaacaaacaacttttctaccagtttctacgtttttctttatactactatgagcattgtgctattgttgtcgtatagaagcattctgatattaaatatgcttagtgacttacctagtgttcaag

SEQ ID NO: 62781 - DNA, 988 bp, Cucumis sativus
  Intron number 1 from transcript Cucsa.090720.1 (locus Cucs a.090720) derived from phytozome v7.0 (chr-ID scaffold0089 4; pos 1899990 to 1900977)
gcggatttcaattttcattccctttaaggttaattttcattcttcccatttttgttcgttttgttcttctttgtgaaacaaatctgtcatatgctctagggttcgtatcttgattcttggctgttaatgaggtttttagtggttgcccattacaatgttgatcgtcttcgtcttggtttaagaaacaattcaacgattcttgagttttgaaatcttgacttgatcagggtttgggttggttttaatcaaacaggaaatacatggttggttagattagttttggttactctggagttcagtctcaaaaccttgttggattctctgtttctctttggactccagttttaagggcttttgaagttattcgttaggtttcatttcacttgatgattggacatccgtcttgtagttgactttctccgttgttctttgtgcttcggttttctggcgttctgaaattattcgttagttttttttttacttgattggacctttgtcttgttgttaacttcctttttgtggctttatcattttgtatgtttgtgtattctttcttttctcttttccgaatgaaaatcaaatttctcaaacacaaaagaaaatattgtggattcagattgttttgacatcgagtagagatgtgtaatttattgattcttgatgcaccctttgtgtatatatgtagcacttcttggtaaacccttggtatatgtatagcatttcttggtgagccttttgtgtatgtatagcatttcttggtgagccctttgtgttagcatttcttggtgagccctttgtgtatgtatactatccagagggcatattccctgaaaaaaaaaatcttgttgacagtgtaaacatgtttagttgttatcatttgttagataaatttgaagttagctacttaaaactcgagtttgttatattcattttctagataggtaactttaatgcagttgtgttttcttgtttctgttttgcagaatct

SEQ ID NO: 62782 - DNA, 603 bp, Cucumis sativus
  Intron number 3 from transcript Cucsa.073160.1 (locus Cucs a.073160) derived from phytozome v7.0 (chr-ID scaffold0076 5; pos 766964 to 767566)
gaggagttctacacaagtaagtttcttcttcttgcttttctcctttcacgttcaggaaattatgaataataacttgatttttatgatatttacttcatagttataaatttgtcacattcacctttaatgttattgtttaaccttaacaacaacgataatagaagacgtaacaataaatgtgaaattaataattttcataatattacagtccgatacttaatcagattgcttgtgtattttgattacaaatttggagatggattccacggttctttgcgattgcgaaacctagtaaacaacaataaatgcaatcaaataagactcacttttcaaattaccgttgatttatgatgtttccgttggataaacattaccttagctatacttaattgaaacctccattaaacattttctaaagttgagaagtctattagaaacaatcttgtaggaatttaacccgaaatcttcctgaagattttttgttaggtttcagtagcttttgaatccaaaaacaatttgtttatttttgaagagtacttggttataaaccaccgtgttccttttccagttataacgctttagaaaggagagaagcctgcaaag

SEQ ID NO: 62783 - DNA, 797 bp, Cucumis sativus
  Intron number 1 from transcript Cucsa.004580.1 (locus Cucs a.004580) derived from phytozome v7.0 (chr-ID scaffold0005 3; pos 137558 to 138354 reverse strand)
tggcctactacagaaaacaatcacttctggtaatttcattattaacatagatacgtacacactatatatagtacttatttttgttgtccaccatctgtatatatttagtaaattcagtttgattcttatgatatttggaagagtcattaaacttcaccatatatgattaattcctcgatgatttatttagaatattatatcacatatgtgtgattgaaaatttaagacttctttttaaacataactaaaatgatcaaattcacatgtcggttgtgcataaagatgatttaattgtttaattatttgttgatttctgaagaaaaaaattattattttggaaaatcacagtgcctaacaaattgtgtttattttcttcttaaactttaaaaagtgtctaatgagtaattaatttttttttcatatataggtctgtctaatatttaattcttttccttttaattttataataatttagtctctaaattttgtaattttaatctaacttttaaaacaattcatcaaaattaaaggttaatttttagaagtataagaatttagactttatagcttctcacgttaataattagtttattgatctgcctaatgcaagacatctcacgttaaaacttaactctgattttcacttaaatcgcaacaaatcttttagagaaacaaaaattgttacttcaatgaccaaaagtgattttgaaccaattttaataatacctcaaactttcaattcggtgtctatgttgatgacagtgtagctgttgaacgtttctcgacattggtggcga

SEQ ID NO: 62784 - DNA, 170 bp, Cucumis sativus
  Intron number 1 from transcript Cucsa.101550.1 (locus Cucs a.101550) derived from phytozome v7.0 (chr-ID scaffold0092 7; pos 811500 to 811669)
gtttgcactggagttctactctatcgttgtttctggtattctcctaatctccagttttttctttctcctcacttgaaaatcattaattaggacttcctatgaaaaaaaaatggagtgttggttttgatttattgttattatttcttttctttctaaaaaacagaagctga

SEQ ID NO: 62785 - DNA, 719 bp, Cucumis sativus
  Intron number 2 from transcript Cucsa.096750.1 (locus Cucs a.096750) derived from phytozome v7.0 (chr-ID scaffold0091 9; pos 2248329 to 2249047 reverse strand)
aaaaaggcagcacggtttgtgaaatttgtctccaggttcgatttcttaaattgttttttgtttaaatttttgtttttgatgtttgagtttctgggtctaattatttccacgaaatatgaagtgggtttccgtagattttgaaccttgaagtctctaaaccattgttctgaagctctgtttcttgggatgtggtttttatttttaaatttgggaaaggggaaagaagtttaggaattcgtctttttctttgagttcaagtctctttctctgtgttttaaagttgaactttcaaaattccataaagttctcttaatttgctttctttaacatttcatttcaatctcaatacctttttttttcttctcatttatcactgaagaagattactgttttaattcaatgaagattttaatgcgttatttaatgaggaaactgaacattaacaggtaatttgttaaaagaaaaacaatcccaactttaagaacagtaaattaaaattttcagtttatataaataaacaaaatttcaaatcttttatgttggtcacaactcttctgacaactcgtgtactgtcttgaattattacaattttttattataaaattttcaaaatgaatagagaataatatttttttttaaaaaaaaatgtcttttttaataataataatttgaaaattctctcagaattacgaacctggatatactgcaccttctaagaa

SEQ ID NO: 62786 - DNA, 849 bp, Cucumis sativus
  Intron number 2 from transcript Cucsa.074810.1 (locus Cucs a.074810) derived from phytozome v7.0 (chr-ID scaffold0078 5; pos 676163 to 677011 reverse strand)
tggtaataatgcctatgatctctgttttcttatttgttctgtttaatttcttataacttttgtttctctcctaaaaacggcaaaaaaaaaaaaaaagagtagagagtgaagagccgcaacctactaggaaataaaataatgttcaaaagataatcctgtattttaaaatttagaattcaaaatctcgatacaatacaaacataaaaatgttttttcagaatatgttcttcttggatcacataattcaagaacagtgttaaaaaaaatgttgaacttagtaaatctaaaaacataaaacaaaattcagatggtcaataaaaaacttaaaaagaacaaaaacggtaagaaactaataccggacatcatagtcgcaaagatagaaataggattgtattgttcttaattaatgaaaattcttcccagaagatgatgcttataaatgttctaaaagtttattcaaagaaattatacacgaatgttggactaagaatatatagctcagttttgttgttgctgttgttattacagttgaaattgatgattaatcatcttgatatttgactgctaattaatttatttattgcatctttgtactcgatttgagagatggatgattcttgacagagttttcatccataaggctgagtaacacatttctgtgttcaaagtagtcgtcttagtcaagcattatggaaaactttatgaatgcaatcatcaacaattgaactacatttcctactttacagccttgatcacaataagttgattgattaagttttccgttcacggttacttcaatgaaatagtatttcaggtaaccttaattgctcaaggcgacgttcctttgtc

SEQ ID NO: 62787 - DNA, 561 bp, Cucumis sativus
  Intron number 1 from transcript Cucsa.135500.2 (locus Cucs a.135500) derived from phytozome v7.0 (chr-ID scaffold0104 4; pos 351213 to 351773)
gtattagaattgggtctcgtggaatatgaagcagcatagacgatagcattactaagagataatttaactgagggacacccaagtggttgtgaacaaaatacttaaattaaaatttttcttaataactatttgtgtgtaatttaggctgaaattgttaatttaattgggaggttaaacatttttgccattagaagggagtgtagtgtagtgtaatgacccacaatgtagcggctcgagctatggtgtagagatactcttctgtttggatttatttttacttcgacggatttgttcgtttgattcatgagaaaaagaggtaatagagattcttattgtttatcgaggatagttatcatttctcgattaaataaataaaaagtttattaaaaaaagttaaaattttacatttcaataacgtattcactaaagacgattattagtctcttaggctaagtctttgttccaaacgtttgttagttaatgttaaaattgcttcatttacttcccccttgaaatccatttttagttgccttgagcgctcgtcttccacccgtctcgtcg

SEQ ID NO: 62788 - DNA, 553 bp, Cucumis sativus
  Intron number 1 from transcript Cucsa.004700.1 (locus Cucs a.004700) derived from phytozome v7.0 (chr-ID scaffold0005 3; pos 202071 to 202623 reverse strand)
tttgcaagattaagaccattgttgatctccaggtatggatcgctttctctacctctaaatttgttgtttattaatcttttaatttaatctcattttacctttcaattgttcgatttcagctttatctttacttcaattccgcatttgacttcttcgattcccctagttttctgtgttgctgacctttctcttgttgttaaagctttgttcttcttttttaatctggaagcttctttcgttgtttacattgtataggaaaattatagttattgtgtcattctatctggttccatctgtacttgtttgtctagctgaatggtgttaattagtgaaagtgaaagtggaaattaattgaaaaataaaaaacacgatttgattcactttggacataagcacactcgtagttttgattttggttgaaacccattagagatattgtcccaactttggtttaacttcctgaaaaacattattgattttttatatttgatatttactgaaattctttctggtaatagccatatttggtatagcttaagatatttgttcggga

SEQ ID NO: 62789 - DNA, 693 bp, Cucumis sativus
  Intron number 1 from transcript Cucsa.090170.1 (locus Cucs a.090170) derived from phytozome v7.0 (chr-ID scaffold0089 4; pos 1537639 to 1538331 reverse strand)
caacagcatagacttgattcgtgggattaaaaaacgtataatgttgaaaaatccgaggatccagtatttggcaatggtgctgcttgagacatgtgttaaaaattgtgagaagtctttctctgaggtggcagctgagagagttcttgatgagatggtgaagttaattgatgatccacagactgttgtcaataatcggaataaggctttaatgttgattgaagcatggggagaatcaactagtgagcttcgatatttgcctgtttatgaagaaacatacaaggtatgcgcatatttcttttatttcttgtttttgttatttatcatttatcatttatcatttttctatttgagtaatggtatccatatatttctgtaccctctttctcttctaaataaatgggatctgagtatgaaaaagatttagggctttagcataatatcagtggattaagtttagaaggacgctctttgttttttttccccctttctttcctctttcatctactggtgtttccgttttctaagtttatacatagaatgatatactatgcatgtagtgacttcttaaatattatttataggaagttcatgtcaaattatagtaacttggcaacaaactatgtttaattcttggatagatgtctcaacactatccaagaaacttcatgagaaacttcaaaaaaaatccagcac

SEQ ID NO: 62790 - DNA, 498 bp, Cucumis sativus
  Intron number 3 from transcript Cucsa.044370.1 (locus Cucs a.044370) derived from phytozome v7.0 (chr-ID scaffold0054 2; pos 753033 to 753530)
agatagttacagtcatgtaagtgttactgattctatattcaatagaaaagaagcaagtaggccaaattgagcttagctccaagggtaattggcttgtctccttttcgataggttggaggttggatcttccatcccttcagttattgtacagaaaagaacggaaaagaaaaagagcaagtagaaagggagaaggggaactgttgtcactgtcatccttaattttgagtttgttttgctaatacataattttctaataggttaggtcacagaatgttttctatacttgttgttattgtatagactattcaatactgcatttttagtcttctctcatgtcagcactccttcattttaagaatgaaatttagcgtagaaatcttccaacaaaatcaatattttttgttcaaacctccaaaaaaacatgtgtcgtggtttctaacaaggaataatgaaataataggggaaatagtaagacaacaatgatttttatgcaggtgt

SEQ ID NO: 62791 - DNA, 661 bp, Cucumis sativus
  Intron number 1 from transcript Cucsa.124110.1 (locus Cucs a.124110) derived from phytozome v7.0 (chr-ID scaffold0100 1; pos 156548 to 157208)
tgtctagttgaaagtgttatcactattcaagaattgtcaagttattgcatgatctctacccttctcttcaacttcctgacaagtaagtcttactcgaccatcccgatctccataagcattttcaagaaaacgctactttctcgacaacgatcttttaaaattatataagccctccttccatgtcaatgtttcttgatcttattaaatttgtaaacttcatttatttatagcttccttcgccttggttttgattcctatgatagcatttattcttaagtttctttacagaaagaatcaatcgtacattatcggcagacccaacaatgtcacaacagtaggttcacaactaatttggttattcacaatagttagagaaggcatacagtactttcatggatgctttaaaaactgtatgaatgttgtcaaccgtttcttcttgcataaaaaagcatcaataatcgctcagttgtttataagtccattgtgggttgtttttataaacttaggaaaacgttttggaaattataaaccttcaatctacaattatcttgcacaaacaattccataggtaaattcatgattatatttcaactataaactccatgtatcgattcttgatttcaagctaatcagtataatattttcaactgcaggtgtgccg

SEQ ID NO: 62792 - DNA, 980 bp, Cucumis sativus
  Intron number 3 from transcript Cucsa.011350.2 (locus Cucs a.011350) derived from phytozome v7.0 (chr-ID scaffold0015 4; pos 621385 to 622364)
aaactggttaccccattgtggagcctgctcacgtatgttcttttcaactgtttcttatgcacaaaactattactttcattcttgaagcaacattatttattttggtagttggtttttggaaatcaatgctgcattttagttaggagtgtaatgaaatgagtttgtaatgtaataggtccaaaacccatgtttggattaagcatttctggtggatttgtaataccaaacttatgtcctttatggagttttcaatcacggttccatttcgcatctcaatgcttctcaattctggttgcattctagctctccaaacatttccttaaaagtattttggtccctcaattatggatttagttcatttataagtattttggtccctcaattatggatttagttcattctggttcctatacttcaatgtatattttggaacagaaataaacattttgaaaatataactaccaaaatgtaccaagtataaggaccaaactaacattttaaaccttttgtttggttccataatggtggtgctaaccactttttttttgttttgttcatggcatatgtgtaaaccaattaaactatgtgttaagttattaacatttgatcgatcaataaagactaaaagtaaaccatgatgaacaaaactataataattattcaacatcaagattgaatcttttgatttttgaataaatgtacagttttgtggattttttttttctacactctgaaatacagcatagtgaatagaaaatcaaaataaataccgataccattcaaaatgaatactgatttggaactattctatctcatcgtactgccagtagtttctttgtcttttatttctctctctttttgttgcattcaacacatgatagagtaacaagtcacagccatgtccaatgtacttagtttcattactttttttctgaaacaacgtaggagctggccgaaccatccattaaagactcattcac

SEQ ID NO: 62793 - DNA, 569 bp, Cucumis sativus
  Intron number 1 from transcript Cucsa.084280.1 (locus Cucs a.084280) derived from phytozome v7.0 (chr-ID scaffold0086 2; pos 60450 to 61018 reverse strand)
gagatcgcgccgccactcatttttaacttcctcaggttttgatttttgggtttttcttgttagttggtttatgttggcttattacttgattttctccacccatagaaatcaagaatatatatatcttttataatttcctcctcaaccagtctaaattaaacatgaagataagaacgtatgcatcacagattagtaaaaagaaagattgaattcatatataaatatgaagaaaaacatattactcttatcataatcagaaatttaaggtgaacaaaggataaaagaaaacacacatttattttgtttagctattacaaatttgaaatattgtgtttgaaaatatcgagataattataatcagttaaaagcacaatcagcagaaagacaagcaaaattgaaagctatcttagagtgtgaatttgtttgagtggtgttgagtttgcttgaatttttctgtcttttgcttgtggtactgcctcatttattttattttttggaagactatttttttgagtcgttcacttgtattgacagtgaaggtcaaataaaagaaaatctgcacaaacccc

SEQ ID NO: 62794 - DNA, 836 bp, Cucumis sativus
  Intron number 1 from transcript Cucsa.126630.1 (locus Cucs a.126630) derived from phytozome v7.0 (chr-ID scaffold0101 7; pos 513185 to 514020)
ctcttgaggtttgatttcttattcatatcttcgtcgaagtatgatggttttcatttgctcttatgtgaaatgcttttgttgattgatgcaaatgggtccaatcgatttggcattgttgattttttaagatgaataatgtgttcatctagtggacaatgtgccgcctccataaaaaggtaattggttttaacttcgacacaaaaactcattaaacttggtattagagtgagtaacattgtttccaaggtgaaccaagttttatatctcttgttttttggtaatattattcgtataacagctctaaccaatgaagtaatgaaattagttcgtcaggaggcaactctagattcttgagggagatgattttattttctatttcctcgtagattacatatcatacttgatttgatctcaaattcatgtctgataactatttcttgtcattgatagtttgtcttgctgttctaccaatgctttgtttatactgtagagttcactttcatggaactagcttgcttttcctcccaattcttaactggcaagaataacgaatacattggagaggatttgctttccatgttctttctgacatatcaaagaagccacattgtggagagttcttggcttattgatttcatattaaattgaaatattcattgtgttttacccagtattattgttttgacccatctcttcaaaccccctttcatcttcagatatcaaagtggatgagtgataaaagatactttcctttatcgactgctgatatcgcaacacggatgaatttgatcttaagagttcatggattggaacaggtggaagattatttcaataac

SEQ ID NO: 62795 - DNA, 702 bp, Cucumis sativus
  Intron number 2 from transcript Cucsa.090600.1 (locus Cucs a.090600) derived from phytozome v7.0 (chr-ID scaffold0089 4; pos 1811666 to 1812367)
tttttggggtatgttcctttttctttcccttcctttcttcccttcaaaactttcaattctttggtcttttgttattttgtttcttagtttgtttttcttagaggttgtttggaggtctccaattgagctgtccgtgatatatctgtgctgtttaagttatatgccttcatcaattctactagtaaatgaatgctctgctcttttctctctcttgtttttgtttttgttctttttctgttaagctgaatggctatctttgactaaaaacagacttatctttctctggttttagttttagttgctcaaattagtacagacagttaaactgctgtttgggaaattcttctctaactcccttgattttctcttcttggttctctttatctctctcttattgatatattctgttaaagcttttaatgacactcattcttcaaatagatggttcaatagcttttaatgttcttaaacacgaactatacaaccccccatacttcgcattgctcttgctaaagggatattgtataatctctggcattgtttgtattcagttttagatttatataggaaattgaaaatccgatgttatgtatgaggggaatgcttttgagctatgtttcactgtgaaatgttttgtgttttctgtatgtattgccatatgccgtttttgtgatgtgtttcttccaatacttcaaactaggg

SEQ ID NO: 62796 - DNA, 294 bp, Cucumis sativus
  Intron number 1 from transcript Cucsa.130550.3 (locus Cucs a.130550) derived from phytozome v7.0 (chr-ID scaffold0102 9; pos 635575 to 635868 reverse strand)
cccttctctttcatacccttcttacacacttacaggtacctatcttctaactttctctttaattttaccctttttttgcatttcctttttcttttttgcggtttttgtgatgattgcgtatctgggtctgatttgatttgggagtttttttttttttttaaaaataaaattgaaaggggataaatttttatgtgggttttggttgttttttaggtttagggttggttattaattcgtgtttgtctcatttgatatctaggattttggcattgcgtgcttggggaatcgttaagg

SEQ ID NO: 62797 - DNA, 232 bp, Cucumis sativus
  Intron number 1 from transcript Cucsa.124390.3 (locus Cucs a.124390) derived from phytozome v7.0 (chr-ID scaffold0100 1; pos 325687 to 325918)
ttatagggtaagtctaagactagtttttttctttttgaaaattttgataatacccagtgaagaaaagaagagtgaaaagacaagaatgatgagtgatcaaggaaggaggggaaattattattgaggttgttctgtttttaggcctttgatttttttttttcttataaataaataactaatttttgtcttcttgttgtttttttcccttctcagagtcattcccaagacactc

SEQ ID NO: 62798 - DNA, 700 bp, Cucumis sativus
  Intron number 2 from transcript Cucsa.005120.3 (locus Cucs a.005120) derived from phytozome v7.0 (chr-ID scaffold0005 5; pos 237245 to 237944)
gggatttgtttagtgtaagcttctcttgatatctagcattgcttagtgaactgggattaggactattgtgttctgggttttataaaatttttcttcatccttatttctttattctttatacaatctattatttctagaaacctaatgaattataccacgccaggaagagtgcaatcaaattaactacataccaatctttggcttctgtggaagctgttcagaaaagtatttttctattcaggaatgcaaatatgtggtttctcaacttatgatggaagtagatgttaatcactatttctgtgtatagtgtaatctgatgctgacttgctgagatgctctgtgctcgaaatgagatgatgaaagcctagaaatgtttttttaaaaagaaaaagaaaaagaaaaagaagacatagttatgtatggccaaggccgagatagtccaagtgactgaagtttcaaatcttttagaaaatataaattaggtatattttatatgtagatcaaaatgagtacaaaaatccatagggaagaagttatctcccaaattaaaagctaagggaacttttgttttagtttattattgttaggttgattgacagaactccatagtcgtgtacaggttcactagattgagctgataaatccactttttgtgtgagtttcagagcttggttcatcatagggttctatcacattgggt

SEQ ID NO: 62799 - DNA, 800 bp, Cucumis sativus
  Intron number 1 from transcript Cucsa.099600.5 (locus Cucs a.099600) derived from phytozome v7.0 (chr-ID scaffold0092 6; pos 339731 to 340530 reverse strand)
tttgcggagtttacacagtttccttcttcgtcgaggttagttgtggcatcggtacccttttggctataaggtgaaatgagcacaaatatgtaccaggtgattaccaccgaatttaactgattcattagcttccatccttccatgtttcatcggagtagctgaggcaaatgaagccttctctgaaaataaatagtatttttgaaatttactcgtgatgaatctatgtgtctagcaaattcgatttattttctaagaaacaaaaacttcattgtcaaaggggagatagaaaaggaggagatgagatattctcacttaccaaaggatcacgataaacttctcatctagtgagtaattgaggtatgctataatttctagacaaattagaagaagtcgatcaagtagaaggaaaatgtttaacaagatcccagaggttatccctgttagatttcttttatcatgaaagatttcctgtctttgtggagtagcgatttagctatgaagtcagttcttaaaatgttttgagttctgtttagaattgtaatttaagcccaagtttagatagaccttgtgatgtaaaattcggttcattcttctaaagcattgaaagtttattacttgtttctgtgtattttttagataggaaagatagatgtggtaccttcttaatcaacgattaaatgaagatgtttggttgtgcgtattaataacactgtgtgagcatttcaataggtttaatgatttactcctttcttccaattgaataaggtaattgagactccagactgaaactgtcaagtgaa

SEQ ID NO: 62800 - DNA, 864 bp, Cucumis sativus
  Intron number 3 from transcript Cucsa.017550.1 (locus Cucs a.017550) derived from phytozome v7.0 (chr-ID scaffold0024 5; pos 329275 to 330138 reverse strand)
ttagtggaatcatcaagccaggaaggttggtttagctatacacttcatttaatattttgattattgattgaccataattactttgaacactttttatattactttcttcctaaatttgtaatgattatcaataattaaaaaaaaaatcattttggaaacttctaatctccatcattttagtgctgaattctaaattgttctttttttttttctgtttgatggatgtttgtgaaaacttttcttcttaaaacttttttattttatatttaaaaaaattatgtttatttcacctacttttttccatttttttaattgaattgtacttttctttctcaaatttgtttccatttttcaatatatatatatatagaagagagattcttataaatggtaaagaaaaaaatcaaaactatttatttattatttttaaaaaaatgatatttttctctttttctgactcaattgagttattgtctcttttttctcactactttattttatccctttctctaacttttttcttgaaaaaatttgtccctccctcttttagattttttttatttttattgttattctttctaaatttgttgtcactcttcattttttttcttatctttgtcactttatttttctatcctcaatttttctctctcttctatatttgatgattctaaattacctttgaaaacaaaccttaatcatttaaaaataattttagttatatttaaacttattatagttaaaaaaaattagctcaaagcacttgattgtgagttctggttaataaatcaatttgattagtattaccattttgggaagtactctgaacattcccttgacttgtgagttgtatgacatttcaga

SEQ ID NO: 62801 - DNA, 926 bp, Cucumis sativus
  Intron number 1 from transcript Cucsa.103630.1 (locus Cucs a.103630) derived from phytozome v7.0 (chr-ID scaffold0092 7; pos 2386235 to 2387160 reverse strand)
ttgctctttcagctctcatccccggcctcattaaggtaggtgtttttaactaattaaactttagtttccctcttatatatgtattttatttctttgatctttaattagtttatttataattagggttggtatctgttaggacataatttctttatattttctaatatgattgaattttgcatttattgcatatacagatagagattagtagaacttccaagaaataattgtgaaaaaaaaacaaaaaacactctaattgctaagaacaaaaaagggttaatgtcctccatggtggccggcgggcttaagtggatctttcaggatcacgatggtcatacagttctccaagttgaggtttcagtggagggtttgaaagcgtttgagctataagagtgctccaagcttaacccctcactttcacttgagggagaggttattattaatcctgctcgttagggagatttatttttctgaattaggattactcatctgagggaaaaacatattaaagttttggtttttttttttttacgcgtttttaaacagtagaacaaattaaaactattcatgctattgcagcttttacatcctctctaggtgtttttattttgtttaaatgtagaaagaggttcttttgtatagtattatcttcctcatcctttatgaggtgctaacaagtaaatgatagggtttattggttgctatagttttgttatgttacatttttttaattctagatgatttaactacaattagatttatttcatttgctatattgatatatatatatatatatatcaaaggactaaaagaaaaataatatataatgaataaactttggaaaaggatatctaaatagatacaaatgaaagaatatatttttggtgaaagagggacaaagcttcggtgcttggtggagctatcaa

SEQ ID NO: 62802 - DNA, 604 bp, Cucumis sativus
  Intron number 1 from transcript Cucsa.069370.3 (locus Cucs a.069370) derived from phytozome v7.0 (chr-ID scaffold0071 4; pos 190575 to 191178 reverse strand)
caccgctagtgccgccgcagccttcctcatagcgtgtatgtacttattttacgctttattcgattcagttacttgtactctctcaatctccatatttgtgtttcttctcgcaacttgtttagtgaaagaacagaggagctcctttgatttttttattttttattttgatttcttaacttgcgtgaatttgggacttttcgaaccgccttttattacccagtttctcttgattggttgcatatttctgtcaatcgaagctttgattatatgtttttctctttgctctctgctgagaattgtattgtttctgcaaccatgaagcttccggcatttcctttctctgtttatccgagaatcagttgaattaatctatcttggtatccagttctcttttaatctatgttcgtaatagttaggcattaggaaaataaagtattgattacgataattgaactttacggaatcaatattataaagattggaatttctaatgtaaatctggagtaattcaactcgcattcacagccaaacccttttgttcatctcctaatcaaattcctttgtatcagaataaacagcttcagccttaaaatcagacgtcaag

SEQ ID NO: 62803 - DNA, 549 bp, Cucumis sativus
  Intron number 1 from transcript Cucsa.061720.1 (locus Cucs a.061720) derived from phytozome v7.0 (chr-ID scaffold0065 1; pos 208153 to 208701 reverse strand)
ggctgattgtgctgatttgaaaattctaccttttcgtatgctattctggtttccttcttctgtttatgctttctaatttattttcattaactcagtatatctctctaatttggctttgttttttctcttttcttttcttttttttctttttaaacatcatcattcagttgttcactattattatatgcatgcatttgattcattatgaatttctttgtcactgcttacacttctagcatgtgactcttctttgactctcttgttcggattccacattaattgttgagcaaattcttggcaatacgaatctcttgtgcatattttctatgtttctaatagaccttttgagtagaatttataagttctaaaattaaaggttcattaacaaaggttatgattatcttggactagctgtctgttgctttctaagaagtagcaaaactagattagagagtcattattcttgatgtttaaattaataagccaatctaatgtttagtttttttggtattgaaggtcgtcatagaaaatttgtagttcagaaagtaa

SEQ ID NO: 62804 - DNA, 723 bp, Cucumis sativus
  Intron number 1 from transcript Cucsa.087660.3 (locus Cucs a.087660) derived from phytozome v7.0 (chr-ID scaffold0088 8; pos 255977 to 256699 reverse strand)
gacattgtacccacacgctctctatttctgtttttctgaattgggaattggacgaattatcttttgattcttgcacccatttgatcatagtatttcttcttagtcttcattgcccaccatttacctttcatctaattgaattgcttcataatctacttcactttaattgtttgaatcatcttctttgtctatactttttgggtatcaatagaattttatctatgttattttaatacttttatagtactagtgggattgtttcaagtaaattcacccatttatgatgggtagagtttcgccttagctaatgatttctctgtgctgctcgtgtcttctctagttttattccttcccaatttaacttcctttcaactgaataataaaataattacaatcttgccaaactgagccttgctcaatggtaattgacatggccttcttttttagaggatgaatgtttgatccccatccccacaaatgttgtactaaaaaaatagtaatagtcctctttaaagaatgcatttcactttcttatattggttggtgggagtatagagaaaggcgtgtagtgatgcataatccaattagatattataatgacatgcttgcaaattttgtgatgtgcgagagtggatgtggttttataaactacatttactttgcacattagtgatgaatttgtctggcatcacatctgatatctcttgttgctttatttgcagg

SEQ ID NO: 62805 - DNA, 1051 bp, Cucumis sativus
  Intron number 1 from transcript Cucsa.013870.5 (locus Cucs a.013870) derived from phytozome v7.0 (chr-ID scaffold0017 8; pos 6867 to 7917)
tttggacatttcagctccgattcttactttgctaggtaaatgaatactggggttcattgttctttttttttttttatggatttttgggtaaactgtcaaaatctttgtggttattataagcctagttttgtttcttcttcgttagttttttctgggttcgatcatcgatttttctaggctttgaaagcaagaagacgagggtttcgaggtgggtttcttcttcttttcattcaaatcagtggtttatcgagctgtttttgatgtttaagaagtgggttttatggaatttttatgaacctgtttattttttgaattcagattctcataaacgaaaaccccttttgaactttgcttcattaaaactgaaatcctttcactttgattgaatccaatttggggttttatggtcttttgtttttggaaaccgacaatacctaacacatccttttacttctttcgtatatctatatattcaagataggttctatttttggacttcttttctcttctttccttaaatgattccaccccatctgcttaagtagcagaaacaatcttatgctaagttatgatttgctgtaaaaaatgagtgtagaattgtgagaatctgaaatggaacgggataaactttggtgggcctcaagtgttaaaaaagctttgtgacatgtttggctttggtaattgagttttttgttttgttatgtatcagaagactcctcttttactctttttttcccctcttattatccttcgtgaacttctgggttgttacctctatgtttgttagtctccaatgtccctttcaaatttcgcaattcaaagctttaattaccactttgtttatatcatgactgcattaatttccattgcctcacagaaaactgacaatatattttattattaatattattattgttatatttactattactattattattattttttgatattatggcattcagatatttcttatggtccaactgaactctgttgccttttcgttctttcaataggtcagctgctcacaagagtcgagttcttgtgctgt

SEQ ID NO: 62806 - DNA, 586 bp, Cucumis sativus
  Intron number 4 from transcript Cucsa.117370.1 (locus Cucs a.117370) derived from phytozome v7.0 (chr-ID scaffold0099 5; pos 948097 to 948682 reverse strand)
tatcctcgactcagtcaacacaggccaaaaataaagtgaatcatctcctaatcatacttgtattatgatgtctgctttgacgacactcattattcctcaaaattattattatttttttaaaaagcaaatctatattattattattttctttgtaaatattttaagaagttttgacatttaaattaattttcctattcttactactcatctgtatgggtaggtatcatcagtctttctaaagcaataccaaaattagctgtattctacttgcacgaggttgtttaaagttatttttagattacaaacttattgttattccatcaccttgctatttttcaaccttgtctgtgaagaaagtttcatcatggtcttaaatattttttgcatgtaatagaatagaagagcaggaagatgcctttgtttccgttctccttattgtggaaatcttttgttgttcataagctcgtcctctcatctttcataatttctgtttacttgatacaaacattacttacccagaaacaatgcgtgtaacaatcttcttcatccagattcacgaagatctcaattctagtaaacctacttt

SEQ ID NO: 62807 - DNA, 509 bp, Cucumis sativus
  Intron number 3 from transcript Cucsa.091060.1 (locus Cucs a.091060) derived from phytozome v7.0 (chr-ID scaffold0089 4; pos 2140171 to 2140679 reverse strand)
aaagtatgtcgtaactcgtccacaccgtacctgtttctcatcgttgccctactttcgtaacttttgatttggttttcgacatccttgaacatgacttttaaccatttccatctctaaacttacaacactcgactgctagctgaatcacatctaatcattttttgcagaacaaccaattaaaaaacatatttttcagaaaagaaaggtaacccaactagtagataagtgtcaaaactcacacgactaaagatacgatccaaacatacattacgaattttgaagaacatgtgtgcatctaaagttagacctttttgtttttagattttaagaatataattaaacatttgttctttgagttttcaaaaggaattctttttttttcttgaatttcgattgtgtgtatatatattgatttattaacgtcgtttcgtcatatcatttgtttactaatcatgtttgtatatattttcgtaggttagaacaacaactttagtggcaatttttgacgt

SEQ ID NO: 62808 - DNA, 555 bp, Cucumis sativus
  Intron number 2 from transcript Cucsa.091060.1 (locus Cucs a.091060) derived from phytozome v7.0 (chr-ID scaffold0089 4; pos 2140853 to 2141407 reverse strand)
aatatcatttcaatattgttcttcatttctccgatgtaagttcactccataaattctctttctgttttgtaacgattttgttcatttctcttaacccctcttggtgagattgtttttttcttcttcaatcagattagttaaatttttgtcaacatagttgaatgtttgtttaattaaaatctctctactttcaaatctaatcttagttatgatatatttaatttatagtctctgttaggtttttttggtttatttttcttaattagtattttcattatagaatttgaaattatattcttatattatattcaaatgcatgaaaaattgttgttgtagttatttaacccaatttagataagaatcgattttgagggactcactcaccctaaagaaagtttacctctaaaagcatagttttaataaacttagattactatttcgagtttgatgtactgttactccctggattcaaagtttgatcattaagttaatggatattaatgtgatgaattttgtgcagaaaaacattttggagagtgttgaagaaaagatcaa

SEQ ID NO: 62809 - DNA, 710 bp, Cucumis sativus
  Intron number 1 from transcript Cucsa.077260.1 (locus Cucs a.077260) derived from phytozome v7.0 (chr-ID scaffold0079 1; pos 411973 to 412682 reverse strand)
ccactccggcttcttacaacactctcgtctccgaggtaccatttttctttcactttcctcctttccatttgtttctgttttattttggctatggcattaccgcattttatgttattcgagactcttcaagtttggtaggttgaagttgcgagttcaattgaaagggatctttgtgggtgaaggaatttatttgatgcttagaaatttcccctatttgattctgatatgcattgttgtccttagagtttaaaggattctgttgttgattattggttgggtctcatccagattgctagttaaatttgactgaagaaactaatttctaaaatttgtgtgttttccttttgattataagttttgggatgcactcaattgtttaaatttctcaatgatgaacttgtaatgtgttgatggattttcagtaagcaatgcacgttataatgcacgttataagttcggcagttaagtcaatattgtaaagcatccaaatagaaaatcatctggttatttattttcttggtcccttcaaatattgaattaagttcagattcaaacctttcttggatggtttgaacaattattggttcaaagcatccaaaaagtaaaaagggttttgtctattctttctgtcaaatttgaattaactctgtcttatgatccatggatctttgtcaggctgttaggatattggttcctccagcaagatttga

SEQ ID NO: 62810 - DNA, 136 bp, Cucumis sativus
  Intron number 2 from transcript Cucsa.125040.2 (locus Cucs a.125040) derived from phytozome v7.0 (chr-ID scaffold0100 1; pos 841141 to 841276)
gtttgacaccaaatctgctgctgccatttccaaatgtatttgcttgcttttttaaatccaaaatccgccgaatagctttcctttgaattgaagaaaattcttataattaatggcatgtgtttgttttgttgtaggt

SEQ ID NO: 62811 - DNA, 874 bp, Cucumis sativus
  Intron number 2 from transcript Cucsa.042090.1 (locus Cucs a.042090) derived from phytozome v7.0 (chr-ID scaffold0054 0; pos 577762 to 578635)
gatcactgaagaacacatttgaggtttgttctttgattttgatctttactgctggatctgtttttttattgggtgatgtgaataaaacaaaatgtattgcgacattggtgggctttttttcgatctcaaagctttatgaagggatactagtttattggcggttaattgctcaatcgcaacttcaattgttgaatcgtaaatttctctgagccttagatctgtttctgtattcacactattttgaatctactcttttggctcttggagactgtgacttcgtaatattttattatcacgaatggtattcattcttggtatgaaatggagctgccttgcagttgaagctagaataaatttgtgtagtccagagaaacggattgatttctttccatatcattctgaatcaaattcatgatttggttgatacgggatcaagtcttatgagtagatttgaagatcaaattgttgttaacttaactgcctggaggaatgaagatttgttgatttctggatgaagtaatttacaaaggtttacaagttaatttctccaggctttttaggctgattggaacttgtaggcactcaagttagatttgaagtttgaattggcaacaaaagatgaaggataagagatttctggatatgaaaatgataatgcaagctactttttggtaaagaagttgagcttgttgaggattactaataacaatgagaaagaaacttgttcagttataatattttattccaaaacgtaactggggtgattataaacatcctcacattggaaattatttgcattttgttgctgttattgaataaaaattgtacttaaaatgcatgactaactgagttaattatcttatatctccagatt

SEQ ID NO: 62812 - DNA, 506 bp, Cucumis sativus
  Intron number 2 from transcript Cucsa.134540.2 (locus Cucs a.134540) derived from phytozome v7.0 (chr-ID scaffold0104 3; pos 198673 to 199178)
acgaagcggtaggaagattgaacgaactagggaaggtagcggaccacgatacgatttttttcatttctctgtttgctaagatatgcgtgcgcttgcaaatgttttgaacttgttagattcagtgagtaattggacgatttgcatgtggatcttcgtctgttttatgtgattctgctgtagttttctattcataatataaaaatgtatagtatggaccatgtaaattgattttgttgactgtttgggtcctttgaagtatccccttcattgattcggatattaaaaagttccggctattttatataattttattattctttcttagaggtcttaatgtaaattttgattgaaagacttggggaatttcccgatttcttttttatctctgaagttttttccttggttgctttcgttttcaatcatcaaacactttattctatgccctactgcatatattatagcttagtgcatgaaaaattgtcctccccttcccccagataaacctg

SEQ ID NO: 62813 - DNA, 770 bp, Cucumis sativus
  Intron number 1 from transcript Cucsa.010790.1 (locus Cucs a.010790) derived from phytozome v7.0 (chr-ID scaffold0015 4; pos 187628 to 188397 reverse strand)
cctccattgtccacaacatcttcaaaccaaatcttgtactctccctctctatttctctctatctgctttgtgcatatatacctagactgaccctttgatcattattcattgtcggaaatatagccatgtatttgtagagtactgggtgcaattcaacttaaaacagtgcctgtaacctgttcgacaaaatgcgcatcttgctattttgtaccaattgttttatttcttcactattagcctgttttttttatcaataggattcagatttcagaaatattatcttgctatgttcccttttaagttagatatcaatttcagcttcttcagaagtatggtcattccttatttgtgctgggtgtcgtttcacttggcaatgcctgtaacatgttcgatgaaaggtccaccttgtagattatgccaagtgcctcatgatttgagtataagcctgtcatttactgtttttgattagtgcatttcagaattaccttgttatgttctggaaatcagatatcaatctctacttatattcttcttccagaaaatctaaggaccatccatccatattctatttcttgactttcttttattagcttttcataaaatgtccataattttgttgtgttgatagatgtttgcagtggaattgcttcctccatttctctagtttcactaaagagtgctatatgcaaagtggtctctgaatttctaactttgtcctttctaatttctttgtagaccttgcctccggcggatagtgcccagacgacgac

SEQ ID NO: 62814 - DNA, 468 bp, Cucumis sativus
  Intron number 1 from transcript Cucsa.129090.1 (locus Cucs a.129090) derived from phytozome v7.0 (chr-ID scaffold0102 8; pos 169080 to 169547)
agaattaaaaagaaaccatgtttcaatcataatcataaaatgtggacttcaaacgtcaatttgaatttatagatccttctaagaaaaaagaaaatcaaaacgtaatacgtagtgatgccggaaaccgacggttcatcggtgaagatccaactcccatggcggaaccaactaacttaaaacgatcttgcggctttcactttcctttcatccccatttgaaccgcatcgcaattttctcttttctgatcttcactttcctttctaaattcaatggttcccgccatttaagattgtccccaggatcttgttttcctgtttgtgggcttcaaattcttctacaaccaaccccagggtcatgagcttagctccttccctgttctcgcggcagcatttaaacacttcctccaaaaatctttactttgccatatcttcagaccaagcaaaactactttctctattggaatcctgc

SEQ ID NO: 62815 - DNA, 781 bp, Cucumis sativus
  Intron number 1 from transcript Cucsa.103270.2 (locus Cucs a.103270) derived from phytozome v7.0 (chr-ID scaffold0092 7; pos 2097337 to 2098117 reverse strand)
catcggccacgtctatcgccttatcactttcgaaggtatttttctttttctttatttttaacaattatattatacacgcacacacttacttttctcgcaatgcaacaatagaacaagtacattggttgaatagttttttaataaatattcttaaagttggaagaagaaaaacaaaactttagtgcatgtcacaggctttacccatcttttatgcaatctacacaatatcggataaaaatatgtcatacgtacagtaggttttttttcctaaagatttattttatcatgtgtaaaaaaagatgcagcaataaggaaaaaaactatgctgcgcctaataattactcttaaatttaaagggatgttcattactaaacacaatgatgaatctgatcatatgattcgcctatctctattttttttaccactctcgcatatctttatccttgatatgccgaccacacagttgaattatacttaaaagtaagctattttgttaagagttcgaaatataaatgaatgattttattttaaacttatataaaaatggtcctctctttaatataatataaggagatagtgagatggaacttcccaagtaatataatataaggagatagtgagatcaaacttatcagcttcaaagttaaaagtgttttctgttatagttgagttggacttatttaaacaaataaaacggttattagagagactggagtgggttgctaactaaatttaatgtgtgtattgtgtgctaaattgggaattttctttcctctttcag

SEQ ID NO: 62816 - DNA, 769 bp, Cucumis sativus
  Intron number 1 from transcript Cucsa.012740.1 (locus Cucs a.012740) derived from phytozome v7.0 (chr-ID scaffold0016 4; pos 473278 to 474046 reverse strand)
ctggcaggtttgatcttgatcttgagttttatgcaatttttaaattttgtcaacgaattgatccagagagtaagttgactctgcatgctccttggatttcaaaacctctcagtcataatggatgcttggattaaatttttaataagcttagattatgttggaagttgtatggtgtgaatttgtataacttgtttctgagtataaacgagtaggatacacaagtttaaatttgggttataaaaggtgcttgtcaaaaggtgcttgtcagtttcccgggccatgtttgatttatgtaactgtatctgtgtagctaataatgagcaaatcattagttttggttagcagactcgtattctcaataggtttgactccccgcattacgcaaacttaaccaatttttcttgacatttagactatagcatcctgttataacatagcctcaatttgaagtggattgatttaatccatttgtttggtttccatcatttagaattgttatagtaggttttgatggagattttattattatttatgtgtatctgtcttatgttcattgggcaatctccgactaatgtctatccccatccttttcttgtttggagcatatctttcgtaagaccccttcttcatggtggttttcaacattcttatccattaacaattgcttaacataaattgcagttcttttaaagtgataaaacatttttcctttttatgttgtggtttatgatcagatctgacagagagttcctttatcaaattctggggg

SEQ ID NO: 62817 - DNA, 612 bp, Cucumis sativus
  Intron number 1 from transcript Cucsa.094780.1 (locus Cucs a.094780) derived from phytozome v7.0 (chr-ID scaffold0091 9; pos 876493 to 877104 reverse strand)
aggttcactttttttgtgttacttcgttttgtttaatttgattcacatttggagatgaagcctgtatagaaatagttccattgccatagaagcagtgttcatagtaattctgctgttttatagtttatatatagtgtttctctcagatggtttgtacgtgttgggttcgttgctaagacttttagaaagttcaattttgtccttaattttagtaaacttctaatgaatatgtagaagttctaaaattgtattcatttgtagcatttttgggctgtcttgtgatataggaatatttccaattcagttagtaaaatatgtacataactcacagattttgatagaaaaatcaatcttgatacataaaggattgtattgaaactacgatcttatttgaacgagatctgttttgtaggttgtatatctctgtccttgagttctaaaggattgtattgaaactgattaaggtcttgtatgtctgctgtatatgaatgattggggtggatgaacatggcataaggattatattgctcatggtttaatgttgaattttggaaactcacttgattatttgattatgaatctaagtcttgaaactttcttccgtaggttgtg

SEQ ID NO: 62818 - DNA, 356 bp, Cucumis sativus
  Intron number 1 from transcript Cucsa.095650.2 (locus Cucs a.095650) derived from phytozome v7.0 (chr-ID scaffold0091 9; pos 1508014 to 1508369)
acactcgctctccgctcctccactgcattcgcaaggtctctttcatgctttccctccatttacaaatcctctatgttagctatggtagttactgaatacgtgaatgtgtaattgattgagagattattcatggagattcaattagggttttctcccatggaatttgaactccttagtaaaatcactagcccgtgtactcagttctcatttcttttccgttttttgattttgattgctgttggtgtgttgttcttgtttctattcttgggtatcttaaatataaaaaaaaaatcagcgaattcttactcttttactctgtaggcgcgagttcgaagctctgtaaccattgagtctgt

SEQ ID NO: 62819 - DNA, 407 bp, Cucumis sativus
  Intron number 3 from transcript Cucsa.095650.2 (locus Cucs a.095650) derived from phytozome v7.0 (chr-ID scaffold0091 9; pos 1508682 to 1509088)
ggctgaggaaacaaggtactgtttgtttctctcgaatgatggtttgtgttggtgatgcattaatctggtggccaatgtttgaacacttcaatgatcttcttattccataatctgagtttgcaaccttttgtgagtcttgttcttccttggttaaaaatcaatactatcacatgccaggttaataggagtataaccttgagaattttatttcagaaatttgaaattttatcaaaagttgtagtcgtaggatgcacaattttaagcttgatcttcaacattgaatacacctggatgctcttggtgttcagctagtgtctgctgtgatttttctaaaatttttcttttattagtttttgacctacctgatctttttcggtttattttatgatacttctgacatgtagggt

SEQ ID NO: 62820 - DNA, 993 bp, Cucumis sativus
  Intron number 1 from transcript Cucsa.006940.2 (locus Cucs a.006940) derived from phytozome v7.0 (chr-ID scaffold0008 4; pos 2508 to 3500)
ctaacactctctccttccccatttcaaaccctcaggtaattctttctcttcaattttaccctcttcttcctttcagtttcttctgttctacaatttccattttcttctgcattttttaggatgtgcaggggctttacccactccaagcttgtttttgtcttctctttattcttgctccctctccctcccctttgcatctctactactatctattgcagcttcattctttgaaactattcttacacaacatactttactctctgcacttttttctgtattacaccactacgctttatctctatttggaattaatttatctctatctttgttgaacaatgtgatgaaacaaaacttctgcatttcctttccctcaattccattcttaatatttatcccactcactttctgtttctctcgctccgtctgtgcatgattgactttaaggattaagcatttatataattggactcaaagaagagattcagtggattagtgactgcaccttaatggattacaatttgatgcttgtttcgttagcttaggagtttttgttttgattgatattcgataaacaagggttccatctcaatacgaatcggtaaggagagaaataactcaccttatcttagaactgtgagaggttacatagttttttgaaagtgggatttttgaaattccccgtaagatggtatctcttttaatatctcttttgagttcacattcttgatcaaatcacaattaatttgatattcaatctcaaaaccaatcaacaaccaaaggattaactcactcatctactcgtgggaccttctacaaatttcaaggccacaagtaccaaagaatgatgggttgatgcatgtaactttagaataacctaccagttgaagctatttgggtgattggcggtttaacagtattcatgttcttcttgaatggtccgtcatttttctttcttcaggttcgtggtcttcaaatcaagtgtgtacgtgttgg

SEQ ID NO: 62821 - DNA, 599 bp, Cucumis sativus
  Intron number 2 from transcript Cucsa.122410.1 (locus Cucs a.122410) derived from phytozome v7.0 (chr-ID scaffold0099 9; pos 646811 to 647409)
cttcacttctcttgagacttgcaacgggtggcgtaaaagaaaaacactcacatataactaatgctttagaaaatgtagcctttaatttttttttcttttttcacaattatatgaagattcaagaataaaaaaggttaagaaaaaaaaacaaaatactaaagatcttgaactcattattattttaaagtacacatataacttttgtgtatgtttccgaagtatctaatcaaacttttaagaaggaagaaaaaagaaatgtttttatttttttttcatttaacttttaattccacaatttcgtgcatactcaaactgactctctctggtttcaccatctaagttctgtaaacgtaagaaaagagctccaaaattttggctaagcattcaaagcaattgaggaaaatgtgcttaatttttaaaaactaagaggcttccatctaagtctctcatgccatgcttcataacccttttagattattgtttctagtagaggcgctcaagatatccatccctaatttttactttcctttaacgtccttacttcctttgtttattttatcatctcttttttttttttttttgtcaaattgcagaggcct

SEQ ID NO: 62822 - DNA, 1013 bp, Cucumis sativus
  Intron number 4 from transcript Cucsa.134810.3 (locus Cucs a.134810) derived from phytozome v7.0 (chr-ID scaffold0104 3; pos 376165 to 377177 reverse strand)
aacagttgctcctcatcggaagcttcttctcactagtaagtttacgaaaatctgatttaatcgcgtattcataaatgttataccagcagattcgttattcggaggaatcgttattcttttctgagtttgtcgttggtttttgttttaaatgtctgtttgattttggaattatgatcttggggatgaggggagggattgaaagattgggtactcaattgcatatatagttgatttgttgtcagaattgcacgcccatccattcttagtaatgaagctaaggcgcacctttttctatgtagctttcaactccttctttctgttctttaacctatatggcctttctgtagctgtttttggagaaatcttctttatttgatcctatatacccaccagcatttcttcctttttctgtccacaattcattgattacataaaagcaacctttggcccgaaagcgtggagcattataatgcctttttcagttttagcttttgagcttctaattgaattcattgctttgacaaaaaagctctaccagtgtgtgtgtattaaattatatcaaacgattagctaatgcgtggactctctttagtgggattgttgagggtacagttttattagttttaaactttcatatgatttttttttaattttaaattttgtcatgcctaaccaaatggattgaatttagataatggtgccttgggatttttctttttcatactctctttatctttaccttcgcctttgaatttgctttatcctttataattcattattaatgctttgaacacaacttttatgactttcagaaagtgtagtttgtgtgtctgtagttgtttttccattgggtgggtcgatatttatttataagagtaatgtttgcacgtgggtggtgccttcaacaatgccataatatacgatgccaacaaatgacgtcgacctgtttgcttctttatttgaatatgtgctttttaggggaagcaacaattgaggaaccaaccagaatttgg

SEQ ID NO: 62823 - DNA, 321 bp, Cucumis sativus
  Intron number 3 from transcript Cucsa.134810.3 (locus Cucs a.134810) derived from phytozome v7.0 (chr-ID scaffold0104 3; pos 377225 to 377545 reverse strand)
attcatcttctttttcgtatctgctattcttacaggtctgtatcatctctcgctctccgttcttcgttttgttttcaatttgtttttactgtgtgttttgatttgttatacttttacgtcgcctctctctctctctctctctctttctctgtgggtttaccttttgttttgtcttcttcttcctgtatattttatttgttcctcaatcattgttctctcctttgtctttttctgcttcgtatagaaacaaagatattattcttcttctactactttttttcacatcattttcttccttacatgattgcagatccgaatatt

SEQ ID NO: 62824 - DNA, 1003 bp, Cucumis sativus
  Intron number 1 from transcript Cucsa.106030.1 (locus Cucs a.106030) derived from phytozome v7.0 (chr-ID scaffold0092 9; pos 449802 to 450804)
aaaactggagagaagactggattttccaaatccaggtatgatcttatttactatgcgtattcttcctttttctcctctcatacaggttcatttgcttctcctgtaattttagaccgcaaaactgctgattgaagttccttagttttcaaattgtcatccatttccaccacgacggggggacagtgatgattgttgaccttttggttgagttattagatgaagtttgtggttgacttcccctgaacctgttggttttctagcttccagcgtagaactcaattccaccaactacagagtgctagaacaacgaagaattcattaacccattatctgttgtattttagttttgtattctgttagctgttagtctccttttctatcagagtatgagcgcaagttgttggttaagtctctatgagtccttatgtatattgagttgcaaactcatcccttcatctaatgacaacaaacaaagaaccaaaccttctttgggattttgagcttgcacaatggatgaggaaagaacgagagattgaagagactggagatcaagcaaaatgaggatacaaaaattttacaaaagaaagttcttgatcaatcaagttctcaagggaatgtaaatgtttgtctttgtaacgagtagaaagaaaaaccaactgctgtgaagacgagagagggcagctccccaatcttttgattaaggagggccttctgcgatcaaaagtggaagaagtagttggatgaagatcataaacatcagtggtggtctttctcctttgcgtgtgatcatggtgccatttttattgccaactattagagtggcttaagattccttgggtttcgtctgtcttgtacctttcgcagatcgtttgggaaaagaagtttgttaaaaaaaggaaaacaaaaaaaagaaataagaactcaccatatgattatttttactaaacaagctatatatttctccatatccgttataaatacttcacttgacaatgcaggtgcg

SEQ ID NO: 62825 - DNA, 374 bp, Cucumis sativus
  Intron number 1 from transcript Cucsa.041660.1 (locus Cucs a.041660) derived from phytozome v7.0 (chr-ID scaffold0054 0; pos 231973 to 232346 reverse strand)
ttttggttggaggtggaggggctttgaaattcaaggtacgttcccatttcttccactatcttgctctttcttttcatttttgggtttactaaccctcgattacttgtgttgattaatttaagaatttgggctgtttaagcttcttgttctttccaatttattaaccctgctttgcctgttttacttgcgatcgaatacccactttcgattttgtttctgggttttgttttcgtttgcttttgatacatgggttgattcggtttttgttttttttttcaatgtaatttattttttagtatttgggttattaattgattgtttcgctatgtttttttttagatttaagtgttgttgaggcggaaggattcctgttg

SEQ ID NO: 62826 - DNA, 514 bp, Cucumis sativus
  Intron number 1 from transcript Cucsa.112440.3 (locus Cucs a.112440) derived from phytozome v7.0 (chr-ID scaffold0095 3; pos 1019708 to 1020221 reverse strand)
tctttttgttttctattgtgctctacttctgcaaggttgtgttctttttttcttcttcattcgggtcccttttcttaaccgatattaaattaatgcaaatttgtttgggcttctaattgggaagccttttggaatatctcgacattttgattgctgcatttcattttgggtatatttctatgattgaaggatgtgggtctgttcactgcatgcttattacttatgcagctatgcttattgagtctcagtacggtgggtttgtttgtttgtgcaatctgtttccggattcataatttttgagcagtagatgaaaaatgatatttgtaaaattccttgagtgttggtgggtatctgctcctgctatttgcttttggattttacttttattatatctggattattcgaaatgttctgttcttgttataacttatacccgaagatgtgttcctccctgcatccagctttgtgggttacttatgatggacatgatttaattctgtttggtgttgtgcag

SEQ ID NO: 62827 - DNA, 548 bp, Cucumis sativus
  Intron number 1 from transcript Cucsa.124590.1 (locus Cucs a.124590) derived from phytozome v7.0 (chr-ID scaffold0100 1; pos 480739 to 481286)
cttcttgatcgctttcgcctttgattcaactgccggtgagtgtttttctttatgcttaatgtcacaacgattttcattccaatatgcaattgattcattgatccactaccagccattgttttaaggttttcttctttttctgtgatgaagttttaatcgttcttctgtacgtttttcagttttctttgtcttcttcttgttgtttatacgagtttgttgttttttgtttgattcaaattcatcgactcttggaaggtatggattggcttgtaattgcatggttttttttatcggcatctgtagatatagatgcttagaggtttttgttgttagatcaatgtcaaatatgttcgctgtttgttatttatttattgaacttagatgttagaaggtacagttcgataagtaattactaatttccactttccagacatgaacgggaactttgtgtttcttgattattggtgtcgtttagtgtttgtaattatcagtagttcactctatccgttgtaggtgagatttcagaggtctctggtggaggtggtgaa

SEQ ID NO: 62828 - DNA, 645 bp, Cucumis sativus
  Intron number 1 from transcript Cucsa.084340.2 (locus Cucs a.084340) derived from phytozome v7.0 (chr-ID scaffold0086 2; pos 89948 to 90592)
aaagaaaagagataaggtttgtttttatatttgaattagtcttaataattccactaattatatcaaattaattacccaacttttggagtgaaaaaaggagccatttttggagtcgtctttttttgtgggactgtctctcttcttttatttatttcactctaaatcctctttttttttctctcccattttcaactcttctttttcttcttcttcttcttcttcttcttcttcttgtaaaatataattctctgaaagaaaaaaaagaaaaaaaaaactctgtctattttctcaatttccatgtccatcattccaatgcttccacacaccgttggatttgttttgatcaacggtggcaattagttctttcttgttctttttcttctacctctttaccaaaaacagccatggaagccactgaagtttaattcaacatctgtttatctttttaaagattttcttctgaaaaaaaaatacaaaattgattgcccacttcccatatccaaaacccagaaagcttggattttttcaggtatttttgtactgaattttttctgggtttggttttgtttaatttgttatgagatctgatttttttgttattttttttcaggtgggaggtttttgaaaaatagggtgggaaaaaag

SEQ ID NO: 62829 - DNA, 596 bp, Cucumis sativus
  Intron number 2 from transcript Cucsa.084340.2 (locus Cucs a.084340) derived from phytozome v7.0 (chr-ID scaffold0086 2; pos 91312 to 91907)
atatctatatttacaggtaaacatacaacttatctatttcgttatttgttttcgttcttgttagatcttaaaacaccctttttaaagcaataaagtttagagaattaagttgtattttttaaagcaagaaagatttgaaaagtattgtaattaaaaatggtgagaaaattagtataattttgaattgacaatattttttagttgcaagtataattatgttgagtagtactataatttgttttattattttacttctttgtacatggaaataaatttcaaataacatttattcaaagtttctttttttcttttacatttattatgaatttttttggtaaaattaaaaaaaaaattagatgagaaagtaaaaaagttagcttatacatacgaaaaaaaaaaaataacaagatatatgtatgatataagttgaatctttgtttgaacataaagttggatttgtttttaccaattatggttactaaaaacagcaaacttttgtagtactaagaagaaaaaatacacatggttgtgaattatataatatattaatcagccattgttgtgaatttgcagaggtgagaaagctttttgtagcc

SEQ ID NO: 62830 - DNA, 204 bp, Cucumis sativus
  Intron number 1 from transcript Cucsa.118430.1 (locus Cucs a.118430) derived from phytozome v7.0 (chr-ID scaffold0099 8; pos 326813 to 327016 reverse strand)
taccttctggctgggaaagacgactcgatttgaaggtacccattttctcttctttctgtttccctctaaaattttcattaatcaaaaccccatttgtaaatttcctttttgtgtgtgtgtgtgtgtgtgtgtatttttagctttaaatgaaacagaggatttttattaattgattgaatgtttgaattatttcagtcagggaaa

SEQ ID NO: 62831 - DNA, 722 bp, Cucumis sativus
  Intron number 3 from transcript Cucsa.009230.1 (locus Cucs a.009230) derived from phytozome v7.0 (chr-ID scaffold0012 3; pos 196458 to 197179 reverse strand)
ttgctcgtcgcttgtccaagactcggaattggacggtacaatttttttcttaatgtgaaatttgctcattttttgggatcgggttcctttatgtgtaagaaatttcattgagtttctttaaatatcctcagttttacattggttatgtccctgttgttacttgtatgtggtttttctttttaatgcccatatttatctgcattggattttgttacgttcattatctgcaattgtgtttcaaatgtgaatatcaacaagtgatactgtgatatgcaaatttattttccccattcttaattttccatttgaaaaggatgtttccctttttttatatttggcagtgcttctggtagatttaattatcatctgcaatggtaaaatataaagcctttaggttctatcttattattagttgatttttttcttcgaagtttttgtttcatacttttttaaaccgatttcatgcattcactgataatgaagtatgtccaagcatgttctcaaaacatatctgtttctcatggttattttggcaagtatgacatcaaattatctatgattgtgagttgaatgaatgtgaaaatgttttacagtttacctgttgtattcaattttccattgtctattacttcttttgacttgatttttcttttgcattcaccgtataagtttcttcatgttttacaggtggctttgaaagcattgatagtcatacatagaac

SEQ ID NO: 62832 - DNA, 985 bp, Cucumis sativus
  Intron number 1 from transcript Cucsa.018420.1 (locus Cucs a.018420) derived from phytozome v7.0 (chr-ID scaffold0025 2; pos 816038 to 817022 reverse strand)
gctaggtatatctcttaagagttgacatcaatgatcttttctccatctctaaatttgttaattatctcttcaatatagctcaactaattcaattattattataatatcaaccaaaatgtgaaaaaaaatttgttaaagattcaaatctataccgaaatttacataattaggtataacataataaacccttggaaacataatgaataagataaaaacaaggttaagaaatcattttacttgagtggtttgtttaattttaatccccatatttttaaatatatatccaattttagtctatcaattttccagtccattttaaattaattaattcttatactagtttttggttgactatatattccaaaaaaaaacacctatcatctgctaacattaatttttcccatattatatttgattacgtaaaatttattattatttattaaatttcatggtctaaattaagatttatccaaattatttaaactaaagttaagatttcaaagtataagaactaaaatctgtggtatatttaagcacgtaggcaaattaaatttagatcgataataaatttgaaaggaaggattatatatacatatttacacacttgtttacttatttgatgtggaggaaaagtaaataaaaaagtgagagagaataatggatgaaacccaatggttaataagaagcaacaaaaaaaaaaaacttaaaacttaattaattcgaaaaaaaaaaagcttatatatataataataattaatgtgaaaaaaaattggagttgagttggggttgtcacaaacccaaaaaaaaggcctatttttgtgtaagaaatagaaagtttatgaacatgaaaacccaatatagaatggtccttttattttaaagaacccatgtttgttgaatttttaattagagcatttgaaaagaagaaaagagagaaagaaaatgggaagagggaaaatagaaataaaaagaatagagaactcaa

SEQ ID NO: 62833 - DNA, 163 bp, Cucumis sativus
  Intron number 1 from transcript Cucsa.046640.3 (locus Cucs a.046640) derived from phytozome v7.0 (chr-ID scaffold0054 2; pos 2031359 to 2031521 reverse strand)
cacttcctgccttagatctgccccttacactacaggttcttcttctaattattcaaaatctttccttttctttttgggagtttaatatatttgatatgatcaaaattttgtgtgtgttttttttatagttggtgggtgtgaagagaggagtccagagccaaaa

SEQ ID NO: 62834 - DNA, 255 bp, Cucumis sativus
  Intron number 1 from transcript Cucsa.016460.4 (locus Cucs a.016460) derived from phytozome v7.0 (chr-ID scaffold0022 7; pos 149642 to 149896)
gagaatttagaggtatattgtctaattctttagttgattagttcaaatagaatagcatttaatgcaaactaagtttcttgataaatcacattgtggtttgactctattttcatgatcaaatgtagaaccacatattgaagattttgatgcatttatcaactggtatagcattgcttattgaaaacaatataattgaattgttctacgtgttcatgtacaggcaagttccttgcttctactttataattggaaata

SEQ ID NO: 62835 - DNA, 699 bp, Cucumis sativus
  Intron number 1 from transcript Cucsa.108630.1 (locus Cucs a.108630) derived from phytozome v7.0 (chr-ID scaffold0093 1; pos 824167 to 824865)
tcctaccaactttcttctctactcttctaacataggtacacactagcgatattattttagctgtgttagttcgaaaaagtttgttacaagataaattatagttaagacaccattctgaagagaaacaaaagagagttatcaaactaataactttctttctcatctttccatgattttcctttgttagcttcttacattttactcttttggattgatttttaggattaattgatgagttttgatgcatgaaattgtaaagcttgtttgataattatttggttctcaaaaaactttgtctattttctatggttttgctatcatgatttacatttattttattaagtatcagacttaagttcttgcataaatttcaaaaacaaaaagaaagaaaagtttcttgagttaatgaaatataatgattatgaatttgatataaaagcacaaacaaacagacgcttcaattcaaataaattaaactgaagtgtgtttatattgagcttagcttttgcaagtgggacttaatcaatcatatatatatatatatattcaaaatttcttttgcaagttggacttaatcaatcatatatatatatatatattcaaaatttaaatgtgtagctacggaaagaaataataaaacttatatattagtacatgatatatggtttcacttgttaatttgtgcagctcttaatccaa

SEQ ID NO: 62836 - DNA, 283 bp, Cucumis sativus
  Intron number 1 from transcript Cucsa.046670.1 (locus Cucs a.046670) derived from phytozome v7.0 (chr-ID scaffold0054 2; pos 2050598 to 2050880)
gttcaccaacggccgcctcaccactgactatattggtaattttaattctaccacattttaaaatatatccaaatttcttcgcttcttttctactttttcattcaaaaacaaaagccaaatttttaaaactaaaagccaaatgattattgaaggtataatgcttttttcttttacaaaaatagaagtagttaccatatggtaaaaggtaaggacaaactgacaaagattgttttaattttaattaattctgtgatgtgttattgttttgtttgagcagcttcat

SEQ ID NO: 62837 - DNA, 279 bp, Cucumis sativus
  Intron number 1 from transcript Cucsa.060320.1 (locus Cucs a.060320) derived from phytozome v7.0 (chr-ID scaffold0063 2; pos 23330 to 23608 reverse strand)
cttgtcacatccttttaggaagaccttggtaatatgatacagattacattaatagaagaagatctaacactattgagtttgattggatgagtcgtcgtgtagttcttttatctataggcagcttcaccgacacaaaagccaaccctagtaaaggaaaacaacttttttctgtaattaagggtaaagagttcctgccttaaaaaacaacacctatcttagcctttgtcattaaaggaaacaacagtgcaccttcagaaaactacctacctagtgagatat

SEQ ID NO: 62838 - DNA, 600 bp, Cucumis sativus
  Intron number 1 from transcript Cucsa.090320.3 (locus Cucs a.090320) derived from phytozome v7.0 (chr-ID scaffold0089 4; pos 1666561 to 1667160 reverse strand)
tcttttccgttcgtttagccgccgaatttcttcaggttttccccttgttctggtttggatgtcatttgtcaggcttttcgtttgtcttcttcaagtaaatatacttttctttcgctaatttcctctttcttgctcgtcagactcggcctattaaacaaatatttcatctgggatctgttggatttgcctttcttctcgagtttcttttatattaatatgagcttaggagcttaattttggatttgggtgtctctagattcattaaacaattgctttatttaataccccttttgagttgttaaaatatattttctcccaaaactctatttgactccactgatagggacattggttttacctatttgtgaaccactttgatgatttagaggtgtttaatcctttttgtattcaactgggttcgtcttattttattcatttggatttagcttgtgaagtttaaacgtgacttatttcccagtaaagaggcaaagagttcttttttttctttttctttcttttcttattttccaaccatgcctctatctgagctttatcgtgtggccagagggaaacttgattcaactcaagacaagaacagca

SEQ ID NO: 62839 - DNA, 905 bp, Cucumis sativus
  Intron number 1 from transcript Cucsa.050490.1 (locus Cucs a.050490) derived from phytozome v7.0 (chr-ID scaffold0055 5; pos 81588 to 82492 reverse strand)
atttctatagagacaaggttctatttttctcttttcttttgatgttctgagttctgatcatcttttattttctgtgttcgttttgctttctctgatgtgtcttaactgttttgcaatttctttattttgtaatggcaacagatgatgctggattaactgaaaatataaaattaactacttttattatattatggattaactgaaaatataaaattaactacttttattatattatatataaaaggttacatcttcttttactattttttttcctgatatatttattaaaatgtttaccatccatggtatttcacatacacaatatagcaccttacatttcccataatcttactcccattttttcaggaatgttttttccttcttttttgttccctaagttaggatcttgctggttaaaaatgtctaatatacaattggttgtaaacgcttctttctaacattgtaaaaacttgaacgatgacaaaaatgagattatgggatgtgattcaatgttcacaaaatttcaaaattttatgtccataaaatcagtgtctttgaggttataaaattaagttatggttctgaaactataatgctactgtttttatgagtttaacggcttcaagcgggtaagatttgaatacaagtatcatgagatcaattgaagtattaacaagctggctttggaactaaattttcttcacttcattttatctgtaagcttcatatgatggtgcataatttatctcttcgttgttgtaagtggaagtagctttttcattcctgcaaatccctgtttcgcctgttaaaatacgtcaaatgattagtcctgatatgtgtttattcatattcttgagttcaaaatttcaggtgcaaaatattccagaatcgtttaagtcagtgcg

SEQ ID NO: 62840 - DNA, 631 bp, Cucumis sativus
  Intron number 3 from transcript Cucsa.060620.1 (locus Cucs a.060620) derived from phytozome v7.0 (chr-ID scaffold0063 5; pos 104828 to 105458)
ggagggaagaagaaggcttggaggaagaagagaaagtaactactatctcggcttctatctatttctgttcaatttgattgaccatttttactccgtttccctaagtagccgtaaactgacccacaaaagattctgtaattttctttatatatttgtttgatttttagtgctcaatccaaattttgtaggtttagctggaacatcgatttttttttcttggatagttgtgatgttattagcaaagatttgtcatttgttttatatagtttaactaatatgcgttagttatcccacacctttgtttggttgatgtttttttcttgaattaatttcgtgtcacttgtaatatgttcacattttcatattttatgaatggtgtagttggtttttctctcttatcgaagaattgatggaaccccttcttcaattttcgagttatggtgcagttagttctattaattgtagatgctgatcttctagtagaactgtaacattgttatatgtgtatgggctcttgatactgaaacgtcaacataacagtttgactttcttgtcaattgaagttacagcttttatttgctgtgtgttgttttttaaagttctcgttattgttttatttatttgtaaaggt

SEQ ID NO: 62841 - DNA, 727 bp, Cucumis sativus
  Intron number 2 from transcript Cucsa.050570.2 (locus Cucs a.050570) derived from phytozome v7.0 (chr-ID scaffold0055 5; pos 199368 to 200094 reverse strand)
gccagactgccgagactgctagacaatttttgcaggtttttctcccctcccccacaaacccttttacctgttcttacccttgctctatttttgttccattatgttacgtcttgtggctaatgggttgtttctgatgcttgattcttgtatattcaatttgacattgagggggtttcggaatccggcccatttcctaagtcggtgttgggtttacggttgtgggactggaggggaagatagttatttttctatgtgcaatcttttgatattattcgtttatttctttagaattttttttctgtactgcatgatgcatatgtgtctattacggcaacgctacctatcaagtcccaatatccaaattttggttctggaacgatcttgttatgtacgcatatcctacatttttatttgttaaacgaatcaccatatcttttttccacataaacgaatcaccatatcttttttccaccctttctttttggttctcagactagtccgtagctgatagttctcagttagtatactaacatgagaggctatatattgggcggttaattgtctgagaatgagatgttggacggttgtggacgatcttgttcttgttctttttttttctctctctctcttaggtttgggactattttggaaaaaacttttagttattttctttttgagcattagtattgaatgttgcatggacaggcaactagttggaagcttgagg

SEQ ID NO: 62842 - DNA, 978 bp, Cucumis sativus
  Intron number 2 from transcript Cucsa.098030.1 (locus Cucs a.098030) derived from phytozome v7.0 (chr-ID scaffold0092 3; pos 186136 to 187113)
cttgtgcttctctagtcaaatccattgcctgtgcggtaagaccttatgatccccaaaagaaaacacaaaatctcccccttctttctacatatggcatagctgattcttcctgttgttataacttgtatctcgtttttaactgttgctgaataataaaatcttgtttgtctgaagcttttgaggaagtactgtaggaattctgccatttgttatatattaactcaggctcggtttactgttttgtttttggttttcaaaaattaagttagtaatcaccactttcatatattgatccgtgtgtttagttatttacattttaggagcgtttttaatatccaaagtaaaatttgaaaactaagaaaagatagtttttagttttggaatttggttaaggctttatatgtttacataaaatatatgaaaatcatgatcaagatattatgtgaaataagtacagttttcaaaaaccgaaaaccaaatgattgataaacggggcttaaatgatttgggaagagcagttggtttatgcaatctctctttccacctcttcttctatcggccttactcttgaaatgtataattcttgtcttttgacaatgatatgagtgtagatgatttttaatcctagatagaaactttacaagttaaatgacttttacacctgctgaaccatcatcaagttaagaagacacagctattccatacacttgatgttacagaaggacatcaaaagaaagtgttaggatgaatgctgtgaatacaatttttctacttttgttaacaaataaggactaatcttagctttttaagccttaatatggacattagtttaaatggttgacttcttgcacttgtttggtgatcatcttgcatgctattttacttgtgataccagtatctcaagcctttatcaattttctcttccttcttatgatatctttagaggtgtgatccattttctggagatctgtatcaagt

SEQ ID NO: 62843 - DNA, 334 bp, Cucumis sativus
  Intron number 2 from transcript Cucsa.102170.1 (locus Cucs a.102170) derived from phytozome v7.0 (chr-ID scaffold0092 7; pos 1234126 to 1234459 reverse strand)
tgagacaaaagttatatacgaattgttcccaggaggtgagttctcactaaacttaaactttcttcactcgatgtttttttttcttaatcatacgtgttgtcttgttgttaggtaagagaattaaatctttgacttctagctagttggatatcaaaaaatttaatctttttggtctttagatttaaaaaaaacaagaatgattaaaccatgattagataagttaccctacatcttttcttttgaaggtttacaacttttaagtttaattaatgtttgattcttcttttatgattatttaggatctggagttgggaaaattgctggtgaggccatt

SEQ ID NO: 62844 - DNA, 787 bp, Cucumis sativus
  Intron number 2 from transcript Cucsa.054280.1 (locus Cucs a.054280) derived from phytozome v7.0 (chr-ID scaffold0058 2; pos 590130 to 590916 reverse strand)
agcccgatagttgtgtagcacctccaattgaagaggtatcaacttgatttcattatagttttcctctcgtcatgcttttatttaactgtctataaccagcgctggcctctattgtaccagactaattttgaggcaagtcttcattactctttagacttaaagttaagcctcaactgagtgctttttgtagctgtatggcttaccaatcagtacacttttatggtataatgtgtggagaattcaacattgaaaaattggagagaactcacaatctttaaaagatgcatgagctagtcctgcaatggaattgtcatactcttccttttaccaattggttttgagatgaaacccaagtttatttattacagcatcatagcatatgaaattcaaacaggtatttagtttaaaaaagacaaaaagggatccaacccaacaacgatgaacccaaatagacacaccccaaagagcatgttgaggatcctatatgccttagtgagttaactgtttggctattaaaaaactttcttaatggcccaataatctgcattcggtaattagtggtctgagcacctgttgtggtgtcatgtccacaattattctcttaaaatacgtcaccttatgtataatgacttttaggtggcccatgtattattgttccatcctctcaacatctgtgtgatatcacgttgaacttcgtgctggacctatacccatcttctttatgttgttatctgcttcatagggtttaatgtttttaatcgtacgatacttgacgtgaatctgcagg

SEQ ID NO: 62845 - DNA, 988 bp, Cucumis sativus
  Intron number 1 from transcript Cucsa.033630.1 (locus Cucs a.033630) derived from phytozome v7.0 (chr-ID scaffold0043 8; pos 34232 to 35219)
tttccacccattcaatcttcgttttaatcttctaggtattccctttctttcttaattgcttcgattatatgggttttttttttttttaaattctgggctctctctttttcttgtttttgctttaattgcattgctgtctgcctcttttgccgatttttctattcctctactttgcgtggtgtgtgggaatttgtttatctgttttgtgttttttcatgtagaagagagggagaggattttttggtttgttatttgttaggttattgttttttttgcttgatgggcttgtttggtggtgtttaagtaatcatttttttatttgttactgggcgtgttggatggtttatgttttgtgttgaatcattactactgttcactacttaattaactaaaacttgaattcaattctttatgttgttaactctactcaatactctcacatttgggttactgaaaaatgcatgttgaataattttaaagtttccatgtttgttcaagtgattttgttcttggtatgcactcaatacttgcttgcaatataaccgttgtgattgacatgaacttcctcgaataaagtgatttatccccttttttgggtactgacaattggatagtctggtcattatttaatcctcgatgtagaatttaaaattaatggggttaattggctgcttgaaataggatctttcgttttagcagcgaatagaacttcaaaaatgttcttgattttgaatttctgattttccacttaaggtcgtttgtggctgtctttaatatgttctctctatgacatgggagatgttatgcaagtatactcttcgtgttagttaataaaggataatatgattttgggaatgattttaaagccttatccctgacattggtttctgatactggtcgctaaagcttgatgattttctagtgttggaattctcattaattgatttcttttcttaggcctctcatagaaattattgcagcactatct

SEQ ID NO: 62846 - DNA, 657 bp, Cucumis sativus
  Intron number 3 from transcript Cucsa.033630.1 (locus Cucs a.033630) derived from phytozome v7.0 (chr-ID scaffold0043 8; pos 35781 to 36437)
aataattttcactttggaaatccccttgttcagcaagtatcccccccttctccctttagaagtttataatagtattttctgcacgatatttttttagctaatctaaagaagagtgttaattgatatagttatggaagttcagtgtttaaattgatacaataattaggggttaaattgataaactttctgtttcttataaaagaagatatacgacccaaagtttaggggtgtaaatttaaagtttccccatttattttttaatatgaaaaagataacactttctttccattgatattttaaaatttaatattggttcctaattatgatattacttccctttgatatttgcttctaataaaaaagaaagagagggtactgggctgataaagaagagcctcaaattgtaggttctttaagttttaacgttaaatttgtttcagtttctacttattgaagtttggaattgtttttctcttcttctttatcattattttgtgattactttatttccatcagaattgtggcaagagatggacttcgtgtgttaaatcaattttttttttggagaaaaagtgaaggctacaaaataactgttaatttatccatatatatgtattttcagggagtcttcactttgctctggtgcccttcaccctg

SEQ ID NO: 62847 - DNA, 816 bp, Cucumis sativus
  Intron number 1 from transcript Cucsa.007600.1 (locus Cucs a.007600) derived from phytozome v7.0 (chr-ID scaffold0009 3; pos 1674 to 2489)
tttttcaggaactcccatatagcttgcttttcaatgtttcaacttaggctccccctaagcttgagctccctcactttcacagtatgcttcttcaagcgttgtatgagattccctcgatacaatatgtttaggttccccctaagagtgagatcctctcacattcattctatttaggctcccctaagagtgagatcctctcacattcactctatttaggctcccctaactacaatatcaatattgaactcctctcgagttctacaatggctgctgaaccaaatagtttcagcgacaagcacaagaatttttcactatcaacatgtgaaggttgaggctagacaatccctaagctcaaaacattcaagcacacttttttgatgaagcgtctaaccttaaaaagaatagagtagtatatatatatatatatatatggctagcttatagaatattaatctaagagataataaatattatttgtaggagaataaaggctaaggatatgcaggagaatcaatcctacatgaaatatgcacaaatcaatctttcatatatggaaaaattattttgttgatgcagtggccccaatgtttgttgtcatgttgtctagctattactcaaatttttcctttaataaaatcagccaaccaatacattaatataactcttaatacaaatgattaactaatttataacagaaaccataacaaatattaacaatatatacatattttcatacatcttttgtagaaatattaactgtataatagaaaccataatactatcttcttacatcttttcttcctttttgtagaaaga

SEQ ID NO: 62848 - DNA, 1017 bp, Cucumis sativus
  Intron number 1 from transcript Cucsa.113020.4 (locus Cucs a.113020) derived from phytozome v7.0 (chr-ID scaffold0095 3; pos 1322652 to 1323668 reverse strand)
tcagaaactattcttctcagagcacaaggattttggtgaaggcctttccctttacctttacttttgaatgcaaacttttcttctaacccatttcatcaagcattctgatatctcaactaccctgatgttatatacttatattattttatcactatatcttcttcgtattgtatcattagttgtaaactgtgacttgtttttgactaaaaagatgcccatctttttagtttttggcatttagcacacatacccttctgaattcttgattagtttgatgcttctccttatttatgttgaaatactaacctgggtgggtgtatcaaaggcttacccatgacgtgcaacttggttttcctagttgttggagtggcctaaagtccaagataggaattggaaagtctggtggttcagctaaaaattcttgacttcaggttgtggcaattgcttcagaggccatctccatttcattttcttgttttattgacgaaatctctcgaatttgaggttgggttagcctttttttttccctttttttcaatggtttttgttaaaaaggatctaaaaatgtgagcatgaaatcacttttgattcttgtatgtatactgtagcaaatgcgaagagcattgctagtttacttaacgtgttggaaatttctggtgctgtggaaaaggggaagggtgttagaatactgtattgttaaaagcatcatcattcaggataaacatataatttcttgagtttcaagttgtacctggatcaagccttttgaatctgattatgcttttcaattattgttttgttaatcctcgttatatcttagctgaaagtaatcttcaatcagtgttcccgtttggtcaaaatggttctctcaatttcttgatagcgttcttttttcccaaagttactcatttccagatctgcaacgccaaaggattgttctgtggtttcaatccttttgttgtgctaatctttcaaagattaaatgattacatctgttcttgattcttgtcagtcggt

SEQ ID NO: 62849 - DNA, 577 bp, Cucumis sativus
  Intron number 4 from transcript Cucsa.048200.2 (locus Cucs a.048200) derived from phytozome v7.0 (chr-ID scaffold0054 2; pos 3050991 to 3051567 reverse strand)
ttcaagtaagtttgtatgccattttcccttaatttttttgatatttttttcttttttaagagtatgaccgattgagccattctcaatttcacttgactttctacattttatacatgaccgaagtacagtgagtttgccaggtaaagttgtgttggacctgtttgatatcacatagtcaatatataatagaaggaagaagggttcagtggaacaatgctgtctttcgcttagattttcttaatctgcaaatcgcttattgcatttttctttgctcaagatgttgcaattccattttttatcattcagttctctttatcttttctgataacattttgtgatgtttttcaatgaaatgacatcaactcttgggtggtttcttcagagaaaaattaatacaaacatgttaaaaaagcgaggaccacacttgaccaattttctagcccctcaatggaactctttaaaaactttttccgtgtatgtaagtttaagctaaatatgtggtcgttttattctgatgatctacttttcacatggatttccaggaacatcaagcaattgtaaagaagctagttgatct

SEQ ID NO: 62850 - DNA, 440 bp, Cucumis sativus
  Intron number 2 from transcript Cucsa.113530.1 (locus Cucs a.113530) derived from phytozome v7.0 (chr-ID scaffold0095 3; pos 1649294 to 1649733)
caataattgccgttaaggtagtgaataaagatgtttttttttcctttctatatctgctttgagttacaagtaattatattatcttttagctagtagttttaatgtttaaaaacatctaggaagctttgcttaactttaactctcatctgaacatcagcctttcattgaagattatgtgaatggatggattaatatatatggttatcacataataaaatacctttacaaatgtggatatttccttggagattagatgtcattattgcattcgtgagtttgcgagttagtattgacgatgatattacacttaggcttctggttcaagtaataatttctatgactatacttaacctttcaaatggtatttccatgactgtgcataatctttctcccgcttttttcttttgttatggggtagtcatctgaaggatctgtgaaac

SEQ ID NO: 62851 - DNA, 431 bp, Cucumis sativus
  Intron number 1 from transcript Cucsa.102500.1 (locus Cucs a.102500) derived from phytozome v7.0 (chr-ID scaffold0092 7; pos 1515475 to 1515905)
atgtggatatgagaaagagagaaaggagaaaccagggtgctgaagtcaagttggaagagagaacgactaaaatctgctacattagttcttttgttgacagggcttaatcatagagaccaaccgcaagtatttaatatactataggaattaatttgtcgggtttgaaattatgaagaaaagatagattagcaaaaaactaaggctcaaactgtagttttccctcaataatttattaatttagaaactgtaatttgctggaatgtacaatagttaattttttttatgcatatttatctgtttaatatccatgattcatgaattcttgggcaaagctttccactacctaactcaaatcgaacatttcttctttttatcaaattttagttattttatattgatactaaagtaatttgaacaattgcagatatttg

SEQ ID NO: 62852 - DNA, 567 bp, Cucumis sativus
  Intron number 1 from transcript Cucsa.095500.1 (locus Cucs a.095500) derived from phytozome v7.0 (chr-ID scaffold0091 9; pos 1343936 to 1344502 reverse strand)
gattctaagcctccacagccttcaggtttgccaaattcatccctttctctcaccccttctttttatttgaggtcggcttgtggttatcgtttactcttttgtttttcggtgataaaaccctagttttgattgtacttctattgattttcttctcttttttttttgtgggtttgtgtttttttgttagttaatcgggtacccttttgttttgggtttgtatttcaatagatgaatgtattaggttttgttagattgtgtttgtatggagtaagtgtaccgttgactttgtaaaaagacgagattggatgaaatattgatgggtttctagcgtatatgtagaagctctatccacttgggttcaatattcaggattatgatctgaatcaatcgtgatttataccttagagaaagggagaaattattgttgtctctaattgctggctgctgtttcacccgttgtttgattgctttttaaaagtcctttttaatttcacttgttgatttgcgattgccttacttttggttattgcagcttctaatcctccaccaaaaccttgggaaagagca

SEQ ID NO: 62853 - DNA, 772 bp, Cucumis sativus
  Intron number 1 from transcript Cucsa.106650.2 (locus Cucs a.106650) derived from phytozome v7.0 (chr-ID scaffold0093 0; pos 178174 to 178945)
aggttcttcttccaatcttctttcttttgagcttcttttcatttcttgtggtttctttatgttgattttggattctgaacttatctattgaatttcttctcaaattcaattcttcttccatacatttctcacaattttgctattttctactgtaaaaatcagttaaacttcagtttggcattccctttgatttagtgtaatgtgtttaagctctctctacttcattctctggctcatgagttctaccctgatagaggtatttttttttcttttttctttttttatagaaaaatttgattgcaggttgacaattatattgagatgggttcctaaggaagaataataacgattagattctactttcctgtccaattcaaataaacagaacgtctgaccctttattttattttatttctcagtaactgtattgttttgttggccgaattgaatctttccgagtaaccaagtgaatggggtgggttttttaacttttgatataagaagctttaagacacacttgtttctccatggctaaataatggaaaataacctaaatagcagaccattttctcttcaacttgttggctgttgtctaaactttgctaagcttaacttatggctggtggttgaattcttgtagattgatgtttttttgttttattttgctcacttttacggtttcttttgttaatcttatttaaggtatatctaattcatcggttttaacaaaattacagctgctgattctgtggcttggagaatacaaacatac

SEQ ID NO: 62854 - DNA, 1022 bp, Cucumis sativus
  Intron number 3 from transcript Cucsa.106650.2 (locus Cucs a.106650) derived from phytozome v7.0 (chr-ID scaffold0093 0; pos 179302 to 180323)
agtctaccggtaaagttcttattccatctttgaaatggtatagatagtaagcttggaagggaaaaatcatcagttgtagcctttctgacgtgccaaaacaaacattccttatgctaacgtgtcaataatagagtaaatgttttagtcttcttccttcacgctatctgtttatatgggatcaaattgaacctgacattgtttagtgcaaacagtgtaacacattactggattggatggttgtaatcttagttggattagcccttatttatttaagacatattctcccatgcctatttggtccctaaattttcaaaagatacatttaagttctttcccaactttgtgaagtaggcctaaataatttgtgattgtttttcatttggcgtgatagcttggggaggtagagggaaaatgggagaagaaaatatgaaggaaaactctcctctcaataaatgaaattagaaagaagaaaaatcttttttggccgcataagcaacaggaattcctaaattagagggaatgtgtgtgagagagagagagaggtaactcaaggaaactaagaaaatattttatttactctatcatattagcagatttttttattgtcaaataggagatgtccaaattcaaacaattaacaaaggtacaacttagtttgatttaacaacttatggatcaaaatagaagtaaaaggaaaaattcattgtgaaaaattaatagtttatatctataactattggtctgccttctttctctataaactattgattattaggacctaaaacatggtttatcaattgtaaaatgagtaacaccataccgggattcataaaaacaactacacaatatcgtgacaaattactaacaagtctagcaaatctaatcattcgtatattaatgatgataatatttactgtagttgtattaaacaaggttcacattgcattttcaaattactttatttcatctctgagcttccttcttgactttctctgctagtgcagctgtattccctcgaatta

SEQ ID NO: 62855 - DNA, 528 bp, Cucumis sativus
  Intron number 1 from transcript Cucsa.079040.1 (locus Cucs a.079040) derived from phytozome v7.0 (chr-ID scaffold0079 3; pos 1602891 to 1603418)
atcaaaagacagaagaggtaccaaacttctcatcttcttcaactatttgtttctaaatagtgtatacaggttgggttacgtagttttttggaccaacctgaaaatgcttgagttagtagaaagatccgaacaaggtctccgacccagcctaattaaaattactcaagtctatttaccacccatgattccaaaatgcttgggaaaaaagtccgatagcattttagaaggcaatatgaaaaagcagttgtagtgtactattttttactcgagtagctgaccatacaataaaaaagaaatatattagtagtatagaactaagcatcaaaaggatttgaaggaattttaaaattgaacagtttcttaaaattgttatgaagtacttttttctcatatcatttccaagtgagaaatggttaacatggccttaatgcttataattaaactactttttagcacttattctcaaatcatacatactcaaacatattcttaggtttggaaaggttttcaagaccagtgtgctaggga

SEQ ID NO: 62856 - DNA, 571 bp, Cucumis sativus
  Intron number 1 from transcript Cucsa.084220.2 (locus Cucs a.084220) derived from phytozome v7.0 (chr-ID scaffold0086 2; pos 11951 to 12521 reverse strand)
tgctcaatcccgatcatcgcaaacagattcttaaggtttttaattattccgtttttatcctcattcttcccgctccctttccctctagaatcttgtgattatctctttgttcaagcatggcgattctttttttttttatgatcactattgctttatttctgttagaaaagaatgcagactagtaacggatcattaagaaatgtcttgagagactgtactcgctgcattgctcgtaactactggagctttaatttaggttgagttctagttgatcgtctgatatttctttgatttatgtttaacttatatgatgttgctaatatgtattgctggttaggttttttaaaattaaaaatttatctcagagatttagaatcgaatcatggaggagtttgtttctttgttctgttttcatgagatctcagctgagctgcttgttcactgtgaacattttaccatatcatccatggaactggaagcaattaaattcaagttcaaatgggatggaacagtctgcctattaacttgattactttgtattcaacttctcaggatcataacttagggagtg

SEQ ID NO: 62857 - DNA, 510 bp, Cucumis sativus
  Intron number 2 from transcript Cucsa.012820.2 (locus Cucs a.012820) derived from phytozome v7.0 (chr-ID scaffold0016 4; pos 574891 to 575400 reverse strand)
cgaagggtttgaactgtgaaatcaatcacattgaggtttgttcttcccttcactattttccataaaagaagcaattaagaatgtttgatcctttcaaataaaataatatatcattgtggtaatgctcccttcactattttccataaaagaagcaattaagaatgtttgatcctttcaaataaaataatatatcattgtgggtaatgctagaaagcttccatttgttgatccgtgaagaacaagcgcatttagaaacgtgaatcttttctacttttgacttctaacaactggaccaaaatattgttatatgagtaattgaaaggtttataatagatggtggggtggggatttgaatccggaacctcttgttcacataaacatacgggtgtcagttgagctaagctcatgtaaaggttattttgctttttagagctttatcgaatattatgtatcaatgtcgtcttattaactaacgtcatttgacattcatagacaagaaagaggagggaa

SEQ ID NO: 62858 - DNA, 573 bp, Cucumis sativus
  Intron number 1 from transcript Cucsa.051410.1 (locus Cucs a.051410) derived from phytozome v7.0 (chr-ID scaffold0055 7; pos 576851 to 577423 reverse strand)
gagaagaggatctcacatagcattaactctccaaggtcatttctaatttaactatttgtaaataatattaataaattttattttctattcgtgttgattgcaatagactcgactcagatgaacatctatttactgacaaatgtctatttgagcaaaatcataagccaaggaggtatcaatgttctaatgtgtcttctcattccttcgtctagtatcttaggttaaacaaaaaactatagcttgaaagttaaaatttgtaatttaaactgttttgttgtttaaaacaacttcccattatttatttttctttcattaaaaccacaaatattattgttgataaagctcaaatataatatgcttgtaggtcaaattaccacttgtccacccaaattttgtaattacgatgcttcatctactgctttaaactgaattgctttaattttctcctcctagctctctttgtacataactctctttgcttttatcctttcgtttgaattgcatcaaaaactgattaagggtatgatgagagagtgctaagtgagagatatttttttttctatagttgtggag

SEQ ID NO: 62859 - DNA, 841 bp, Cucumis sativus
  Intron number 1 from transcript Cucsa.095450.4 (locus Cucs a.095450) derived from phytozome v7.0 (chr-ID scaffold0091 9; pos 1310450 to 1311290 reverse strand)
ttcaagggtaacaatctcaattcccattaattcttgtttccaaatctctgattttcttccctctctccctttcatttccattggatttcaactcccacttccccaactaagattttgatctccaattcccttgttttttctcttttaatttatcgggtagctcaattatttccacacattcttcgtgggcgttggttccagttcctcaattctgtaagcttttgatcctcagagttcgattgttgaggaaacttttttgggttctgtagatcttgttatatgagctctggcttacttagatgcgatctgggtttgatgccgttttgcgtttggtttctgggaaatgtgttggagctctgcagttggaaatttgtattgccggttaattaaactatttattgggggataagaacagtgggaattgtccaagcctcgacacttgtggttggtaatttacatcagatattaattactttgaattttgattaacggaagccggataactgataagcatcgtgttgttagtttgtaagtgctccaattcttccaaatttacctggtggagtctatttgttattgattatgtctcttatgctagaatagattgttgtttctcaaagattgaatttttttcaataaaaactgtttttatggttccatagtttgtagaagctgctaattgatcccatggccaggttacggaggaacatcatttatttgcttatcacattctatgaacccgagcttttgattttttgttatatttttctcaaattcttaatcatacatctggatctctgaagcaggctacttaaaggccgtagtattcccggtaaagtat

SEQ ID NO: 62860 - DNA, 688 bp, Cucumis sativus
  Intron number 1 from transcript Cucsa.107390.3 (locus Cucs a.107390) derived from phytozome v7.0 (chr-ID scaffold0093 0; pos 775449 to 776136 reverse strand)
attcaaggattggatagttgttgggatatatttcggtttgatttcttcactttcttcttctttgctgagagataccgctactagattctgcattttgtgccttcttctattccagcttttattttagccgagtacaaggtcctttcccgttatgtttatatcgttacttaagttgagttctgctctgtgtattccgctagattttctcgtttgttttttttttttttattatatatactgtgctgatgaatatattgaaatttgagtatgattagttttgatcaaaagtttcatagttcattgttttttttagtacttggctctgccgcttttgattggaacagttatagttcaaactgcttaagatcaatatatatctttttctctttagatataaattactgtaccatgccgggtgggtgtgttctgcttgctctgttcttaccgtcatatttgagcttcatcctttttggcagttccattttcccattttcttgagctttgatcaataccattcttttgttttctcagctttgcatgggattatattagacctttgcttgttggcttatgagttatttgatatccatcgttaatatgatgatcatcgttaaatgtaatgcgccaatttttccattgattactgttatattgcaggttatcagtggaaagaaaccctggaaatcga

SEQ ID NO: 62861 - DNA, 478 bp, Cucumis sativus
  Intron number 1 from transcript Cucsa.106000.3 (locus Cucs a.106000) derived from phytozome v7.0 (chr-ID scaffold0092 9; pos 425471 to 425948 reverse strand)
atcctgggaattttctcctccaaatctcttccaaggtaattccgcgatcaatttctcgtattgatggtttttttgtgctttcgttttacttgtgcacagcgaagaaaaaccctcgaggtttcaatgatcacggaaaatttgaataagatgatttgggttttggtttaagttgaccagaggattttttcattgaattttcatggttgtttctattattgcttaatacgaacatcttgatcatttttctggagctaaataattgctcggttatggagagttaggtttattggaattggatatatatatgtatacatatatatatatctttcattaattgtaagttagttgtatgctttagggattttcttcctttacatattgataaaattgttgagagtattagaatttgatcttctattgagttgggtctggttcatttgcagataaacttttaaaccggtggctgtgtgaggaaaca

SEQ ID NO: 62862 - DNA, 1030 bp, Cucumis sativus
  Intron number 1 from transcript Cucsa.072980.1 (locus Cucs a.072980) derived from phytozome v7.0 (chr-ID scaffold0076 5; pos 502337 to 503366 reverse strand)
attacagtgacctaattatcaaaggtctcatacaagtatgtttttctttctaaattagaacatctaagtttgattttccaatatataaacatttttttcgtcctcataagattaacaatatgatctttttattttttattttacactttacagattcaagcttctaattacttggttttttgtattaaaagttttgcttgtttctcaccatttattgcttagagtttcaaattttcaatttacacatttaaattcttaatcaaatatttaaaaacaaaaactattattttagggtctcttttcgtaactatcaggtttatatattactttctttaaaaaaaaaattataaacatgacttcaatcttccaaatttcttgttttgttacaaactttttactaatgaattaaagaaccaaaccaattttgaaaagaaagtagtttataaaaacttgttattgattttggaatttagctaagaatccaactatatattgtacttgaaaaaaagtaaattatggtaagaaattgagaggaaattaatatacttaattaattttcaaagacacaaaaaaaaattaaaataattattcaaccataccttagttttgaaaacttgattttgattctagaaacacccaacaactgaacatataaagtaatatagataaagaacgcgaatccttataaacaattttgagaaactagaactaaaaaccaagcaagtgcattagattatgaattttcaaattttggtaacaattgagcttctatatattttattgattgataaattaataagaaatcaaaactttttataaactatatttaaagagtaagtttgtacgtgataaaagttggtgatgaaatttttcatagagagtaaaatggtcataaatatatagcaaataacttctcttttttccatccaaaaatataccataacattaaagctaacatagatgggttcaccgagtgctctcaattattcttgcaggatatattaatagcagggattgacacaagcgctgt

SEQ ID NO: 62863 - DNA, 516 bp, Cucumis sativus
  Intron number 1 from transcript Cucsa.097430.1 (locus Cucs a.097430) derived from phytozome v7.0 (chr-ID scaffold0091 9; pos 2665912 to 2666427 reverse strand)
ttcacaagacggcgcaatttcatttcaattcttttgtaagtatctgaattcgaattctatgattccccttactaatgattagggttttcacttccatcttccaattttcaactttgatttcaatgctttttatccttcatttcttttggggttttacttttttttttttcattttgtttgtacaatgattcaaaaacccaactcttgttgccttacgatttggctgcaatccatttttttaaaaaaaaattgttttgtttgtttccagctgttctttactttggggtttcttccttctgattcccaaacttctacaattggtattcaaatgcttcagtcagatattgggatgtcaatattgttttgaatacttaagctaagctgtgaaaattagggtttctggctttctgatcaaagatttattctgcgcttttctcagtttatctgttttgttggtggaggattcctgagggctttgtctcaaattcagccattgctggaattgcggctctgaaa

SEQ ID NO: 62864 - DNA, 675 bp, Cucumis sativus
  Intron number 1 from transcript Cucsa.056290.1 (locus Cucs a.056290) derived from phytozome v7.0 (chr-ID scaffold0060 2; pos 440664 to 441338 reverse strand)
aagaggttgtgttttcaatcttctacttagtaaattctttgattactatttttaacgcttatactatatccgatttcttttgcgtcattcgccaatacttttccttgggaggaataatctctaatgtagcaaaatgttatgcattaatgattttttgaacatctgaaactcaacaaaagcaatgaaggtttaatcctatgagaaaaaaggctacacttctaatgatgtacttctagaatgtagctatggtaatacagcaacttttggcccctttggagacatccgatagaattggaaagaaatagggaagatcagcacgggtcctgcacaaatcaagaacatagcaactttcgattccagtaataaggaaaaaatgaggttcaattaaagcatttgatttagatccactgataccactggtttgttgctttgttgctttgttgctttgttgtcaccctctttctttttctcataatatagtgcttctgccttcaacttgtgattgtaacaaggaacttggttctcattgcttgtgatattgcatgtaactttgaattttctaggattgatccaactttgtaatattttgggatgcattccatttcttaatgctgatagtggttagcaatggcatatgcagacactagtttcctggaagtccaggctgcgtagctg

SEQ ID NO: 62865 - DNA, 297 bp, Cucumis sativus
  Intron number 1 from transcript Cucsa.126160.1 (locus Cucs a.126160) derived from phytozome v7.0 (chr-ID scaffold0101 7; pos 140523 to 140819)
ttaatcaacaacgatttccaggtaataataattaaaacattaatcaaatactatttgttacgttgtaataacaatcataacgatcataaatcacttatgggaagacaaattcagtattatatcactttatggatgaagaaaatcccaataagctagtagcttaaacacaagacttgtcttactttaataccaatttaaatcatcaaattgattgatcgaaacataaatttaatattatatcacttagtttgttcatttgacatattgattttttttcttttttttgcatgtatgtag

SEQ ID NO: 62866 - DNA, 360 bp, Cucumis sativus
  Intron number 2 from transcript Cucsa.128310.3 (locus Cucs a.128310) derived from phytozome v7.0 (chr-ID scaffold0102 4; pos 337023 to 337382 reverse strand)
ggatacctcttagtgctcagcttcctggagatgtaaactaatatgttattatcaatgataaggaattgtcatatatgatcatgtgctctaattagaatttttcttttcttagattgaatggtacgttttagccttttcactatcaatcgtagttataaatcattcacagcaactcaagtgcactcatttacaaaattaagatggaaattttgattttcttaaaatctatctacagctataaattaatcggtttttttctttctttttctgccagtaaatgcttatatttgactctaaaatgggtgactctattataaatcttcaggtctacattaaagcaactggagaaaaaagtgcaga

SEQ ID NO: 62867 - DNA, 486 bp, Cucumis sativus
  Intron number 1 from transcript Cucsa.128310.3 (locus Cucs a.128310) derived from phytozome v7.0 (chr-ID scaffold0102 4; pos 337562 to 338047 reverse strand)
aaccgttagtttccattgcttcggttcttttttttacttcgtcgttgagatagaaatgcacgagaattttgaatttgtttttgtttttctactgcgaattttgcgattcgcgacttcggaactcactgtttacgataatgaattattggagtttgggagaagttgtacatggaacagctatttgcaggcttaatttctctattctagtcaagttaagctggtctttgaagcctccgcatacccaattatttttacgcctaatcgaattcggggaaagcaatttctggttatcatttcttcaaatgttttttcttttttatctaccttgttactgcttgtggactttgtcaaggttcctgactattgtaattttgtagtttctcgttcctacacctgcggttttgagttcgtttcaccaatataatgccatgaaatcatttgacacttccagcccactgcaggctttcttttggggactaggcaaac

SEQ ID NO: 62868 - DNA, 936 bp, Cucumis sativus
  Intron number 3 from transcript Cucsa.103480.2 (locus Cucs a.103480) derived from phytozome v7.0 (chr-ID scaffold0092 7; pos 2277724 to 2278659 reverse strand)
ggcaggttagatcatttaactattttaaacgtgctgcttatcttttttccctacttctaaagttcgtctcatgctctatatatgaagtagcatgatttaatttcttgccttatcattttcaattggttatgtagttctgcatctgctctttcactcttatttggggttggttttattcttgttatgactcaaatctgttcttaccagttgaatctttccaatagtttttgtaaaatttggtacccctgttccaccgtttttcgttctttatggaggttggttttatctttgttttgcttttgaccgaaccctgatctgtaccagtagataactttccagaaacttctacaaaatttggtaccatttacagaattgtctttcattcctattccagttgatcttatccttgttgtgactgaaatctgttcttactagacgtcaatccacctgcaagttatgtagagagatcaaatctttttttaaggacaatgaattgagggacaaaattgcatcaatggaatcttattgagtggctaaaattggacaaaaatgccgactgaaagggagggagaaaacaatatatttgtcgaaaaaattgttactttgttcaaggagatttaatgcaaaggcatgcaaagcaccacgtactgtaaacttgaacgttattgggaccattggactcagaagcacttagtctcagtagttgtagtagtataaatccgttactttttatgactaattcaacttgccaattaggataatcacaattatatacttgtacaatatggtcacacattaaggatacttgtatgcagcatggctaaactaccaatgcattcttttcattattaattcatgagattgtgtattttgcttgacaaatattattctatccaagtagggattatttgagggtctaaaggcgtacagaaaaga

SEQ ID NO: 62869 - DNA, 492 bp, Cucumis sativus
  Intron number 2 from transcript Cucsa.103480.2 (locus Cucs a.103480) derived from phytozome v7.0 (chr-ID scaffold0092 7; pos 2278798 to 2279289 reverse strand)
ctcctcaaacggcttctcccatcaggtgttatgaaaaatcttgttttctaactttacggtttcctcttctcttcttcttttcgcgttgactactctgcctgagtccatctttactagtgatatactcgatctatatgggaatatatttaattaatgctgagaaatgtaatttgattggaagagtagaaatttcttttattatatttcagtttataatttcttgttatttagatggtgaattttttggaaattattgggcatggcattaatgaaataagattctatcgaatatggtaaaatggttcagtatcgtcctaagggtatctctgcagttgtccataattattttgggacactggatcttattaatatggttatgttgttattaaatctccgtatggattgttatgttttttacgttcgactgatacccactaacatttgtgcaactctgcagcaaagacgtaggggcaatacctgagtttgattggg

SEQ ID NO: 62870 - DNA, 506 bp, Cucumis sativus
  Intron number 1 from transcript Cucsa.104810.1 (locus Cucs a.104810) derived from phytozome v7.0 (chr-ID scaffold0092 7; pos 3158608 to 3159113)
aaattgatcgctctaatattaaagctattgctcttgtaagtacatttctttccatctatactttttttttttttgggtaaaaatgaatttgtattgcgtaaacccctcaattaaaaatctaatttattccaaaatatttttcgttttagacttgttgatgcatttatataacattttcataattttcttcttttataatgttgatatatagcaacctcattgtagagagccgtcatgggacataatttgaaagttgaaattctcttatgccataggacttgtctatgaggaagataaatatttataaagtacaaaatttttgcaaatacgattaacatgtttctttaatgtatccaaaagaggcattttaatattaaacaagaactataattaaaaaataaaagtagtggaatgcatctgtctcatttcgaatttccccccatttttgatctcatattaaaaacctcaccattaattattactaaataaatatgtatatatttagg

SEQ ID NO: 62871 - DNA, 1018 bp, Cucumis sativus
  Intron number 2 from transcript Cucsa.122940.3 (locus Cucs a.122940) derived from phytozome v7.0 (chr-ID scaffold0100 0; pos 254537 to 255554)
tgccgccgtggaaaagcatacctttttaataacgcgtgagttctctatcttttggtcgcaattgctgttggttgtttaatctttatggatttacaattcgtatttcctattattatgcactcaagtgtccacagattgaactaatttataaattattattaatgtcatagatcctcatgtatttaagtcacagttcgtgttgtctatccatccaaaaaagggtcatggttcgtgtaaactgtagatagccaaaacatattaagcattattaatttcccacttgagctagctaagaatggcagtcatatgttctgtgtaatacatgctattatcaattttggactctaactacttgttagaagtctattaagcatttttctttttgcataagtgtgaacaacaaatagaaaacacatctagttattgcttttagtcatttaaattccaaaagtttgaaataggttacaacatactttctcttgttgtttttccctgggtgggtggtcgtcctagtgacagtggcttcagatattttggaagaagttctctaaggtcttgggtccaagcctctgggtagaaagcttgataagggaaagttttaatatcttttggagccaacgtgtgaaaatttcatgtggagttgtagggcagggtaatatcacaaatatgataaactaaaaacaacaaatagaaaccaacccggctacctggcacataatatttgactgtttgagagaaataggggtagttaaccatgtggtccatgcagcctaggcaatccttcaactaacctcaatccaaaagtgttgagtcttttggaggctccaacttctctgtggtaggtgagacgaagagagagataagcatcttttctttcgtttgttatttacaaattatcgatgtttattgtttacacgttcttatcattacaaagcattctgattggaattatgctcacttctgtttttgagttcttcatataggataaacatttattttggagcattggaagagagga

SEQ ID NO: 62872 - DNA, 401 bp, Cucumis sativus
  Intron number 1 from transcript Cucsa.122130.2 (locus Cucs a.122130) derived from phytozome v7.0 (chr-ID scaffold0099 9; pos 444871 to 445271)
aaagtactttctatctcgccctctctccatttcgctcatttattaaatcacaactaaaactcaaaagtttgataacaaattcatcttgtcgggtcaaaacccaagaatttaagctgaagtgtgattgaaaagtagttcaaccagcaattacttatattaattgatgagtaaatgacgttggatactggacagagattcttgttttttttttcttttctttctttctcttgttgggtttaacaatatgcaatatatagtagagtgtgagataagctattgaagtatttatttactaagcctatattgtttaaattgacaaattgaattaatatgataaaaaaaattgaattgttttttttaatatatgattaggggcaactccaaaatcagtgctggagcta

SEQ ID NO: 62873 - DNA, 658 bp, Cucumis sativus
  Intron number 1 from transcript Cucsa.099220.1 (locus Cucs a.099220) derived from phytozome v7.0 (chr-ID scaffold0092 6; pos 99215 to 99872)
ttgctttcctcaaggttggtatatatgcgtgtgttaataaatagctccatgtttttatgttttgtttcattgagttgagtacctttagtttttgggttggtttaacgttttttttataatgattttcaaatggttaaaagcattgatcatttaaaatcttcggtgtttgattttacaactctcaaatgcaatcatcaaatcactaataaaatagatcttgaatattaaaagtcatggttttggtgtgattatgaatgtgacaaaaagttttttaaaaaaaaatcaaagaggtcagtaaaacttttactctctatgtttgaaatattcatactcgttcaaaggcttgaacttagaggcatcaataactttttatattaagttcacccaaaggttcaaaagttgagacctttaaggcaacatgaccaagagactcgattgcccaaaattacccttaaaattgagcctaattcctctaaatttcttgtcatggttaagagttgaattctttcaaaattttgggttttcttgttgaatattagttaaaagatagataaagaaagtgaagaaatttagcggtagaatagttggaaggtaatctaattttgaaaaagtagataattaagcaaatgtttggaaattgaactgcagtggattttac

SEQ ID NO: 62874 - DNA, 469 bp, Cucumis sativus
  Intron number 2 from transcript Cucsa.131870.1 (locus Cucs a.131870) derived from phytozome v7.0 (chr-ID scaffold0103 7; pos 13102 to 13570)
gacaatctcaaagtaaataaaaaccttctttcttttattcttctctttctctctcttctacatttttctcaaatgggttttaataaaaaagatttctttttcttatgaaattcctttattttcaaatggggtctcaaaaaatcacttttttttctttttcttttggggtttcaattttttcttatgggttttcttttctttttttcctaatcgaaaagtcactttttttttcaaatggggattcagaaaatcatttttttttcttatgtgatattacttttttccaatggggtcctaaaaaaccattttctaaaaaatggggttccataaaattgaattttttctttatgggttttcaaagaagttcttttttttttctttcatttttctaacgaggtttcaaagaagacggtttgttttcttatggatttttctattggtttttttggattagttgttgattccagtg

SEQ ID NO: 62875 - DNA, 963 bp, Cucumis sativus
  Intron number 1 from transcript Cucsa.110020.1 (locus Cucs a.110020) derived from phytozome v7.0 (chr-ID scaffold0093 4; pos 918770 to 919732 reverse strand)
caggtaatactatttcctgctttccttttatattttaaatatactgtctcgcacacaattgtcattcaaatcctaaaccttaaacccttaaaagttgatatatatcacatatgatgttaatagttgattgtattctgtaggcaattgttgattactggatatatgttttaatttaataagtttcattaaggaaaaaagaaacgaaatgatacaagggcgcacaaagaaaagaccaagcccatgaaaggcacccaactaaagaaagagatgacagctttactaaataattcttatagaataattagaaaaaacttttggaatcaaacccccagagaaacttgaaattttctattttttgtcaggtttttacccaccaacactaatagcaatgaacaagagtttccttgacagtagttaatagaagctcaatctcctagtttcatactttctcagtgtggtttgtttgtattggccaatttataatttattcacaaataagtgaatcctactaatatttttccgtcaagtaaaaataaatctaactagaaagtaagcatgaactcctatctaaaagagggctttggagtaaatcatatttactctccttttaactatctcaagactgctcgcctttgtggatattgatttccatgtatcttaaatctctcaaggtattcttatttgatcatcaatataggaagtgttatttaggcaaacttgttaagaatcaggagaagatagtaaagactatgatatattacattatgattcccatctcactgaatggactcatttgcttacatcatggtttgtaggtacgatgtaaagacttgtcctctttttttcttatattctttaatatataagtccttactatcttctcctggttttttatctgtgtcgttaacaattatctgatgacttgcaggcagaagactcttggtcaccatacacattgcagca

SEQ ID NO: 62876 - DNA, 653 bp, Cucumis sativus
  Intron number 3 from transcript Cucsa.102960.3 (locus Cucs a.102960) derived from phytozome v7.0 (chr-ID scaffold0092 7; pos 1871401 to 1872053)
gaaaccgcagagagcacgaaaggagtccgaacaaggtatcttctgtctgtctgtctgtattggcacttatgattttatcaattatcatccattattctttgcacggcctcaacataagtttcttcctgtacttccatttataaccaaactctgtccatatatgcgatctgttatggtatgagaaattatccatcgagatttctgaagttcagcttagttatagatagtttctttttaattcgactctttggtcactctcacctatgatgtttattggaattccgtttgaactcctaggcattggttttgggaacttccatccgcttttgtaattttacattatccatgcagtttattcatatctagaatatttatgtttccattgtagtttctttattctgtttcgtaattcgaccaaaattccaggttagccatggctattggcaaaactggaaaatttttattacttcgtttttggttttcggcttcatgtatagaaggctctagtggttataatgcacgatcttctaaattcttggttatactcgggttatagggatatagaattttgtagagatgcttacgtttgcaatttgattcttttctcttctccgccccaagcagttctggagtgttctttagtgcttcagaag

SEQ ID NO: 62877 - DNA, 603 bp, Cucumis sativus
  Intron number 2 from transcript Cucsa.135340.1 (locus Cucs a.135340) derived from phytozome v7.0 (chr-ID scaffold0104 4; pos 192197 to 192799)
caggtccaagtttcttcttcttctctttaattgtctattgaattgaacgattttgtgttcgtatcccagctttatctttttgggttaacagtaattgtaaatagcataaggttttgaggttagttgttgttgcctgttggatgtcttccgtcaccagcatcagtttcacttcaggttcaccctaacgggagactcgtttagaagtacttagcctgcttttattacgagttaatttggagaagtttgtgctcactgctcaaaatttgaggctttcttgttacatggtataatattaaaattatatttatccataagtttagggttatgggtcaatcggtgatttgagatggtattggttcaaaatttgttgtgtttaaactcttgcaatattattttctctccaattaatattgactttcacctggttcaaattcataagtgagggagtgttagataataccatataaatttatcttcacggaagcttaagttgttgggtcagtcagtaattgaagacttggtgcaaaagtttgataaaatagttttgaatatgttgatattaaactaggctggcaatatcagaggtcaccacccactatccag

SEQ ID NO: 62878 - DNA, 702 bp, Cucumis sativus
  Intron number 1 from transcript Cucsa.048590.1 (locus Cucs a.048590) derived from phytozome v7.0 (chr-ID scaffold0054 2; pos 3251019 to 3251720)
agtacttctggtggattaagcatccataaagcaaggtacttctccatcactcctttcccttctctcttatacttgcattaagcagctctaagcttctcgttttagtgctttacttgaaatatgatgaaaacttgttgtataagacattagcaattactgtaattttcttaaaccccaacgtgggcatatttgttcaagcatgagttcttgacatgctctctggttgatattgattactttttctggggtttggaagtttatcttactttctctgtcaaagttttttttttttcatcatttggtacttctattgtgttgggagaaggcagaatttgtttgtgtacagttttgttgcatttactaatctcctctctcttcttctcagtgaagattcatgaaaactgtcccactaccttgtagaaactgttgctttgcaaatttctgtttaatgtattgtcggtgttttgtttaatgtattgtcgacgcgcaaataataattactgactgaaattattgcttgaagttgtgattggccctaatgctataccttttcgtttctgctcttcctcttgtttagtctgtttgattatttttcaggtagtataattctcttttcttaaattgtaatttaatctctactgtttgatgtttattttattttatgtagaaacatatcaagaaagcatcgaagatatagatctt

SEQ ID NO: 62879 - DNA, 413 bp, Cucumis sativus
  Intron number 4 from transcript Cucsa.057920.3 (locus Cucs a.057920) derived from phytozome v7.0 (chr-ID scaffold0061 4; pos 236819 to 237231)
caatttactgggagtcttggagaaatattgatcaggtagccttctcattgattgaaatgacagtatccaatgcctcaattcttattttcacgtagtaatatgataggaatgctattagtaacatcattacactgccaagtgtatattatactttcccaagtaaaagaaaagtgaaaagcggagaattatttagtagtcaaggcttgagtgagcatattcaagagagggaaagtttcaaatacctcaaatacttaattatcttgtagttttatatttgagcatatttgcaaggttgtgcttttggtctttgtctggtgcatatggtggacttggccatactcatggaagaattcttccctgatatctgacatcaaacatgaaaattttcctgttttttcctggtaggtgtaaca

SEQ ID NO: 62880 - DNA, 917 bp, Cucumis sativus
  Intron number 2 from transcript Cucsa.083270.1 (locus Cucs a.083270) derived from phytozome v7.0 (chr-ID scaffold0085 8; pos 189071 to 189987)
gccgtgttttgaccgattacgtaggtaaaaacatgcaacttgtttgtttgtgttgttgaaaagtgaaaacaaatgcagtgttggtaatttttttaaagacaaatattttgtttttcctgatattaggaggttgagtgtaccgtacacgttgcaataaagtagattggtagttcgacttcgttcaatccatgaaaatgagaagccatgacgtttgaaccataactaataaacatattcatttgtactttaactcccctttccactctttatatagttactgtttttctcctcttttttttattattttcatttttcgggatggatagtaattaccaagtgtcattttagcaaatataaatatatatatttatatccttttaatattttcaagataacaatttgatgagaatggtaaggaggcttcaacctgcgtctactaattagtatcttgttagaaaaatcaagataattatattattaaaaataatgataattaattactcaaagaataaataaacaggaaaaaagaactttactaaaaagaacttaataaatggttaatctaaacaaacatatatatgcatatgtgaaccatattagtttttctaacttcattttaaccttcaaaatatgcttttagtttttccgactttaattatttcattcgtataaatttattttttaaaaaaaatatagaaggatcttctaagcatttgtataaattagataacaaaattatatataaaaaaaaacttgtagaataaaatgcttattatcttgtaaatttctaacaacgactccaattttgtgtacgttcttctatttacttttctcatacgttgaagcctaagtgaagttaaaattgttatatgaatgatgcagcaagatatttgggtttgaagcctcctatcccattt

SEQ ID NO: 62881 - DNA, 575 bp, Cucumis sativus
  Intron number 1 from transcript Cucsa.120690.1 (locus Cucs a.120690) derived from phytozome v7.0 (chr-ID scaffold0099 8; pos 2763996 to 2764570 reverse strand)
ctggagaacttaatcaacctattcaagttccacaggttttttttttcctctctttttcattttcgtttgattaccaagtttatttcgttcatgtcgattaggtcttaagattctttagcttttgcttttgtgtgtgaaaattttgaaattttgtatccaataaagttcttaacgtattcaacattttttattcggtgtgtttgcacacttttttctgcttttattaaaaagaaaaattttggttttggattatgacgagagtgttagaagatgtcgacttagttgagataacatatattgatgaaggttataattaaaaagaagaattcaatatttttattaattttgtgtccaaacggatttgtaaactttaagaagggagttgaattggtcgagagcttattatacaaaactatttctatattttgtgtatgttgctcttaattatagaataaagagataacacgtcacatcgtttattaaatcatgtaactctgtatgcagatatttacttgttaattgttactgatgtaacaatattttttttgggtacaaacacagttgattgttcatag

SEQ ID NO: 62882 - DNA, 572 bp, Cucumis sativus
  Intron number 3 from transcript Cucsa.130270.1 (locus Cucs a.130270) derived from phytozome v7.0 (chr-ID scaffold0102 9; pos 212197 to 212768 reverse strand)
ccagttaacagttgaccacaaaccaaatattccatgtgggtattctttaaaatccacatcaatcaactctatcttatcaattttagataacaaaaatgatagcaacaaaggattgaacaatttagcaagaaaattttagtccatccattaaggacattaatctacttgggttaggtatctatccattcaatccgtctgtcatcccatcatcttcatcatattccatatggtcaattgttcattccttcattcatatgttttcaatgtgaatcaggcgaagcagaaagaataaagaatttcaaaaaaaaaaaaaaaaactaaaaatgaaattgttatgaacagagctaattaataattgaccagaaaccaaatattccatatgggcattgtttattccacatcaatcaactctatcttatcaatttgagatgacacaaatgatagaaacgatggaatgaacaatttagcaagaatattttagttcgtctatttaggagattaagctatcttcatttttatgttttcaatgtgaatcaggcgaagcagaaagaataaagaatctccaaggccga

SEQ ID NO: 62883 - DNA, 777 bp, Cucumis sativus
  Intron number 1 from transcript Cucsa.078160.1 (locus Cucs a.078160) derived from phytozome v7.0 (chr-ID scaffold0079 3; pos 394650 to 395426 reverse strand)
gcggtcagttcttctaatttcaccatcttttgcttttctcttccatgtttatgtctgtttcgttgctgcgaaaattaggatttttgtgctactgtggtagatctggaaattaatttgtttttcttgtatgattttgttgttgtattggaattaatcggatatttttcattaatttttctctttctctgtttcaagatgaggtttctgtgttcttttctattattttttactttttttttggcattcgatttgacttttctagctgaattggaaaagtataatggtttcttggagtgacaagattttagttcttttataaatcttgattcaaatccaggtttgaatttttttgtcttaaaaaaaaaagtgttctaacaacaatagttttgtgtaaatccagcttcgaagagctttcttgctagcaacttttaaaatgatgaaggcactttgtatgatttaattgatgtggcactataaagttctttttttttttctttctgtggaacgaaaattttaaggaaagtgacttccatcttcaactttaaaagaaattgttagtcaaaactattgaagtattcttacaattaaatctagcttaaacttttgggttagtggttgattaaatatggtaccaaaacaagatgatgttttgtgtgttggaaccactgtaatattattttctttcccattacttacatcacaacgaatcaactagatgaatcgatgatttaatagaagtgttgaaaaatgtgtttttgttggaacagcaacggtcac

SEQ ID NO: 62884 - DNA, 744 bp, Cucumis sativus
  Intron number 1 from transcript Cucsa.081270.3 (locus Cucs a.081270) derived from phytozome v7.0 (chr-ID scaffold0081 7; pos 129303 to 130046)
ccccgacttggttcttccctcgagatcattattctgtgagtatgatttcttaccccatttcctctttcttacatttggttcgttttttcatcactcaagtgagtgttcagattctgattccgattctgggtctgattcccgtttgtttacgttattttcctatttcttgattggcagttttggattttgggaatcttagctctagattttctcttctttaattgttattttgatgtgttttacccatttcggttgattactggttttactgtttttgcttatttgatttgaattcatagcgtttttttctatcgcattattagttttcttgtcatttggggttctgggtaggtctaattttaatgtgtataggcgtcgggttggcttgacttttctgtgaaatgtagattactcaagttacataggccgtattgattggttttagttgttggttgggatgcttcatagattagaatggactattctttattctgtttgtggggattgttggaaagtaacttactgcaaaagtttctttcagtgtacagtgaaaccttgtgctgctcatgaggtgtttaccataggagcaattcgaattacgatactattgagttctataatcatttgaagctttaccttttccattttagctaattagatgattctttagaacttgcgataaaatattttgtttgctatctgattgcagatttccttcatcagtgatcagtcaattttcagatt

SEQ ID NO: 62885 - DNA, 429 bp, Cucumis sativus
  Intron number 1 from transcript Cucsa.125480.1 (locus Cucs a.125480) derived from phytozome v7.0 (chr-ID scaffold0100 4; pos 229917 to 230345)
ttcttatttgttgcttcgcctggaagaagctcaaggtttgaatgtttgattcccgaatgtttttcgttttctatttcttgtttttggtttatttttcctctatgaatttttgtttttttgggttctttttgttttcttcgtttgttatacttcctcgagactcttctgttggtgttttggatggaatttgggaaagtgtatatggaaatacttagtttatggaaggaaaactgttaaacttctgcgtacgagagaattaatgttgggcttagtcgatttgcttattttcgttgttattacttatttgtcgacaattacagatcaagtcttcgtgcggattaattaatggtcttgatgaattaatttagcttgtttttttttttttttgttcattttagtaacacttggtgcctctgaagtattcaggaa

SEQ ID NO: 62886 - DNA, 689 bp, Cucumis sativus
  Intron number 4 from transcript Cucsa.023980.1 (locus Cucs a.023980) derived from phytozome v7.0 (chr-ID scaffold0033 0; pos 16764 to 17452 reverse strand)
gaactcaagaaggttcttatctttgggtatgtttattatttgctgtcatgcactttgaactttgtatttaagtctgggcttcagctgcaaaatgcatgttattcgttgtacaatagtgtaatgatgtgatgttcttgctaattgtgctctttccccctctaagtgaaagaatataaggcctttcagataaactatcatgcttgccactcaaatatattgcttactcttcagccttctataagaaaaaccccatttttgtacgatggtccgaagttcggttttctgtttaaaatcctacaaatattcaaagcttaggatctgctgttctctctagcccgcaccttactttttcttagtcgaggatggagttcacatgtttgtagtagttcggatttagcctaggtgctggaatagcattatgggtgagcttggataacagaatggggtcatggaacttggcaatacaatggaatatgaagaggttgtcaatgtgttaaacatcatgaaggagttgagcacaatttgagacagaaatttgttcagttggagattgttaatgcatgcctgtatttctaatcagaatagttgttgagattttgaatgatgttctcatccatctattaacatattagaagcttgtttatctttttccaggtgacgttaaactatctgcttgggaacttgggtaa

SEQ ID NO: 62887 - DNA, 700 bp, Cucumis sativus
  Intron number 1 from transcript Cucsa.133100.1 (locus Cucs a.133100) derived from phytozome v7.0 (chr-ID scaffold0103 7; pos 898335 to 899034)
cttgtcagatcggcaaggggagctggtaattcaaggtgggtctttttcttcttcctctctgtttttcatcttttttttttctttttagagtttcagagttttagagttttttttaatggtggatatgaattcccttgtcttctttttcatcttttttgctgtgttctgatgaaaatggttcttttttgttgtcttttttcttcttctttgatggctttgagttgttttttaagcttgggggaaatggggttctctagtatttcaatctttgtgtgtgttctttttctttcttttgggtgtggtggaattgggattttgaattaacccttttgattttgtgggtcaattcaaacttttgaactttccttttgcattttgagcttatagttgaagctttcttgaggattcaatttgatgtttctcttttgttccttactttttgtggagttttttttgggaaactaattgattttcttagttcagaagtcaattcctctttttataatatagattaaataatttggttggttgttgtcgagaggctttttgtttcttttgaaccaaagttatatcaagttgagtgagtgtaagtttgtaatttttgtatttgagcttcttttgattttggtttggaaaatgatacctatttctttttggaggattttgattgcgatgttgttggtgtttttggtgcagggtc

SEQ ID NO: 62888 - DNA, 566 bp, Cucumis sativus
  Intron number 2 from transcript Cucsa.133100.1 (locus Cucs a.133100) derived from phytozome v7.0 (chr-ID scaffold0103 7; pos 899579 to 900144)
aattgcagcctcccagccctgaaaagaactcgcatgtaagtacaacttttaggaatgtcaatgaagccacatttgtgtttactggaagtagcttttatgcaacaggaaaactggaaaagtaccacaggactagttaagtctccttgaatagaacattattgactggaaaacagcttcctgactttgattttcgggtttatctcctattcgacttctttcatggactttcaacacaaatataactatgcccttttgttcagtttcattagggtcagttacgagtttcgaactgcatcaacttcaatttagttgagtgtaaaatgccattgaatatctttatcttttctaatcttaaaatggttggttttgtttatagttctttgggaaatatatttagttgcattacagtttggttgagaatgtcctaccctcctgaccttgtttcttatatcttcaaagtatagattaagatttttgttagaaaatgagatggacaaaattatgatttctatatgttttacttttctacagccaaactcgcctcaatcatcgagtaaatcttcaca

SEQ ID NO: 62889 - DNA, 835 bp, Cucumis sativus
  Intron number 1 from transcript Cucsa.043770.2 (locus Cucs a.043770) derived from phytozome v7.0 (chr-ID scaffold0054 2; pos 455320 to 456154 reverse strand)
ctccgtttagcgtaagtttttgttctaagttctatatttgtgattgtttatagatttgcaggggaaagtgaaataaattgaacaccgcatctgcttgggaaattatttcgcattttgtttttctatcattgcacagttgattgggtgttttagttgatgagttcaaaatcaatatgaaatgtccatttagtcatcaaataatattttgtcgggttccaaacacgtttgattcttgagcttttagtgagtgacaatgaactttagtcagtaaagttttagtatttgtaattttaactttgcaacaatatagtcctttcaactctaataactgatcatctagttggtatacttttcaatttgtaaggattagtccttcacatgtaaactattgttagatttaatgaaatattttatgcatgtagattgataatgtgaccaaggataagctttgtttataaactatggaaaatgttgttaggcaataaaaaataacacttaattctgatatggtttattatggtgggttaaaattattacaaatttgaaagtatagagactaagttcaaaaagtttaagagctaaaatctaacaaaattttgaaagtacatagatgaaatcattgcaaattcaagtttagagagtaagttggtgctagcacaaaagtttgagagaaaatgtttttaacctaaatttgtagaaaaagcacaattttcatactattaaatttaattttgaatgattaaaagcaagcatgataaaagtgatatcattaaaatcactctcaaacatgcttggaattcatttgttgaagagggatttttgttgggtaggtggc

SEQ ID NO: 62890 - DNA, 757 bp, Cucumis sativus
  Intron number 2 from transcript Cucsa.123000.1 (locus Cucs a.123000) derived from phytozome v7.0 (chr-ID scaffold0100 0; pos 293657 to 294413 reverse strand)
tctacaaggggtaagcttcaattcttttattatttattatgattcagtggagtggaatcggttacacacccttgatcttttggtgtgcttatcaattaaataaatgactggcgaggcagcaaatggttatgtgtgtgtgtgatctttgaactagcgtggatttggatcagtatacattttcatgttatgtcactaagaaacagggatatggatatggtcacacatcattaaaaaaaaacctaaaacaaagacaaggcaggggaaaatgataattatataaatttgaaaagatgtatgcataaaaaaaatctattcatgcattatgaatttatgccctccaaatatacaatttttagcccacgtttgtatttatgcttaataagttgaatatatagtggagtgttatgcatagtttattctattgtgctaacaaatatttgatacacgttggacaagttggagtgcatagtactgagattgcagggtctatacttcttagctgcatctttttaactttgtatttcagttaaaatctcatatataaaaaaaagaattcatttaaagttgaagaaacctttctgtgaactaaggtgccggtcttcagtcctcttttttttttggatgggagtgtgttaccaaggcctttttgttatgcaatcaatcagaaaacgaactggaaccactcgttgatatagtttcctgacgcctatctgcatttgcaggtttgacaaggaacttaacaaagaagttgctatca

SEQ ID NO: 62891 - DNA, 680 bp, Cucumis sativus
  Intron number 1 from transcript Cucsa.130060.1 (locus Cucs a.130060) derived from phytozome v7.0 (chr-ID scaffold0102 9; pos 72375 to 73054)
gtggcgaccacccgttcaaacaagtaaagctttataaactatttttcattggtagattatataattattttgatatatgtcgttatgttatataaatttagtttaaatatatcatttttactcgttttaaatttcgtttgtaggatttgaatttaattaattttagtttaatttcatttagttttagagtttgaatttgcatgaaatgtctcctactaactcaaaattcataaattttctaataatattgatacatttattcacaacaacttcatcaactcgtattagaatttaggatttagggtttaaccaataaaaaaaatatatacttgtgatactcatgtttaacccggataaaattaaaattttagaaaactaaacctaaatcagtcaacatatattgataatataaaactataacccaaattaaaattatccccatatcattaaaatcattttgggattagtttatacttgccttttctatttatatgtattgtgatttaagatagattattttataggaattctataacaatgtgttatattatgtgttttactaataaataacattgtgtcgaatccaagctatatctcaattttctccctctatcaatttgcaggaagaaactctagacatcttcattgcaacgatggtcatagatgtgatgacaatgtag

SEQ ID NO: 62892 - DNA, 774 bp, Cucumis sativus
  Intron number 2 from transcript Cucsa.072580.1 (locus Cucs a.072580) derived from phytozome v7.0 (chr-ID scaffold0076 5; pos 20255 to 21028 reverse strand)
gtcaaggtaattgagaatgacacaacccaaaattatatttttctcttttattttctttctatatgtttacggaacgctggaaagagacaacgaacaactttagtaggtggatttaactactgctaccctactagacaagaatcatttaactatcaaattttaaattatagtatataaacttacacaaaataagcttaattttaaatgccacgaatcggatctaagtgtccatcattgttttatagtcctgttaaacatttttttttgcatattacgaatatgacataatcagtgatatcacacagacatagacttcattgttataactttttttttctattttttttaacactaacttttttccatctattgtcaaatatttaattttagtaatgtattcttgactttagtttgtttattatttttaatttcttagaaagatgaaagaaaaagaaaatatctataatgattttcactctaagtttttcaaaagatattctcatatcatattttcttccatgaaaattataattatttaaccaaaatttcaataaaagaataagattcatgaaattacataaactaaaatctaagaattaaaaatctattgattagaattaaacataaaatttcaatagcatattttaacaatactcaaatgactttggtagataaaaataagattttaattcctataaaaagaaaatgaagagtgtaagatgagaaataaataaagaataatagaaatgtatgaatgggaaaggaaggtggagt

SEQ ID NO: 62893 - DNA, 560 bp, Cucumis sativus
  Intron number 2 from transcript Cucsa.018100.1 (locus Cucs a.018100) derived from phytozome v7.0 (chr-ID scaffold0025 2; pos 371819 to 372378 reverse strand)
gtgtagaagtgctctgttttcccccactggatgtaattcttggcctattgcacatcacatcatatactttaatgacccaccctggagactggagaggtatacttgtgtacagagggatgtggttatgctatcagtttgaaggtgtacttgtgaacaatttttagttagatttcctgagcatggaagtctgttggcgagggagagaataaagacgatacaggagagagggcaaaggactcaggcttgtagttgacagaccatgcctccactccaaaagatttagaactctgtatataactttttgaatgcattacgttccctttaacttcggcttcaggagtgactgggtgtaaaagaaacagttaggaagaatatattttcacacctttatctcctggtttgcttactcgattttatgaatggttttgatgtagaatatgtttaattaagatacaaacagctaatgatgctttgatgctcggatgaaaaacagtttctcattctgtctactgctgtaccccattaatggtgcatacctttcaatttgattcaggccacta

SEQ ID NO: 62894 - DNA, 484 bp, Cucumis sativus
  Intron number 2 from transcript Cucsa.094250.1 (locus Cucs a.094250) derived from phytozome v7.0 (chr-ID scaffold0091 9; pos 441704 to 442187)
cggtactagttcttatgagtttttcttccatttgttgggattttgatgtgtttctttcattgagttcttgctttctctccttctctttcttgttcatttgaaattactttatttcagaaatttggactagaagctttatttgtatgtttgctttgaaactctaatagtagcttcagtgatgagttgtcttttatattctgttcacatcctgttgatatttttcatgcaatgcaacttaacattgaagaattaaatcttgatgtttctgatgaccatgtaagtcagaacctgaggaagataattgtgaagtcaagacacaactaaaacaaaaggaaaaagtggatttatcaattattgtgtaacgccttaaagtttcttactggaagattcctcaccccaccccccaatgaagtgtctgtaatttcgaactattgtctagatttttgtggcttatttgataaatgttttcttaaaatgcaggttt

SEQ ID NO: 62895 - DNA, 763 bp, Cucumis sativus
  Intron number 1 from transcript Cucsa.101430.3 (locus Cucs a.101430) derived from phytozome v7.0 (chr-ID scaffold0092 7; pos 676474 to 677236)
cctgcagattctggctgaactggatctaatttaatgtgggtttttttttttttcaattttgttgtttttgtgtttgttttttattttgtggaagtgggtatttgttgatcgacttgttatacaatctatgcatgtaattgggtctcctttctgattttgacctcttgattttgctcttcagctcttggatatgaatgttttttctacttttgattcattttttagcgtcttgttcaatgattctaattgttttagcttgaatttctgttagttggattttattttttcttttaccatggcctaagagttaattatagaaaaaacgtaacgattctacaaggaaccgtctcttcgttaccgttttttttaggtttgagatctgaatctctttgttctaaatgctgtaccattgaaagcatttaagtagaagggactgcgctgcaaatttggcctgtgtacacggagttttcgtttatggttggccagtagatgttttttgtcatcattttcttgtaaaatttggaactttcttttaaagtttgatttttccctttgaaacttgttgacctttaggagttatttttctttacttgtctttttgacttctattcagggttattttctctctgcacctaccggtcatttgatatgtttaagttgtctttcgcctttcacttatttatatattagtcattgatactttgctaacagcaaattgtgtgctgcagatagtactggttgagcatcaagatcaagcacttca

SEQ ID NO: 62896 - DNA, 549 bp, Cucumis sativus
  Intron number 2 from transcript Cucsa.093740.1 (locus Cucs a.093740) derived from phytozome v7.0 (chr-ID scaffold0091 9; pos 54788 to 55336)
tgagtttgtttcataattgaattgtatttgtatgttaggtgcaaccatgtggagagcttgactttgacgataaattcgatttggtttctgaatacatgccgaaggtgagtgcaagctaaaccactgatgactttgattcatttgactcctgcccatcaacttttcttttgttctacagttttcggaagagtttcttggcgatgtatcattgctgcttggcgatggaggtactatgttcttatgattttttttttaagtacaacaattgggggttgggattcaaacctcccacctctaggatggaatgttatgtcaattacaacttagctaagcttgctttgatatctattcttatgatctaactgaaatgtagatgtagatcaataaaataaggaaagttgtggaatgattttgtttattggtatttgttagggtatatattgatgtttaatcttggagagagattttatttgtttgttgcggaggtagtggccctactattgattggttgctatggtttaatttgtttcagactataggggaaaggag

SEQ ID NO: 62897 - DNA, 958 bp, Cucumis sativus
  Intron number 1 from transcript Cucsa.132870.2 (locus Cucs a.132870) derived from phytozome v7.0 (chr-ID scaffold0103 7; pos 715123 to 716080)
tacccaacaagcccaaactccgaatcttcacaagggtatgcgccaattcatcttcttcttctttttttcttccacttttaactagattctttctatcttatttctcccaattgttgtcattttacgtgatgcgtttctgatttacgattctcctgcaattttttctttttctgggttggttttgaatttctctgcgtgctaattggttttgtgatttggaaagaatctggaagagtgtgtttggagggttcttttgaatggaattcttggactgtttttgctgttatgttgaagttcgaaagcgattttaaagagtgaaagagacgtagatttggtgtaagtcgggtacaggtagcatataattcagggggccatgtttctggaaacgtatacaaaacaaactcctccaacttttgtaatggcatgtagtttgagagagaagcaaggatatcgtcagaagctcccaaatgaataaagtctttaaaagggtagttatgtatggaaagggaaagtgtcctttttggtggttgctatagtttgtaactagtgatgtaagcatatatcacagatatgtttttaagtagttttcggagtattctttttcacaaatggtcatggttcaggttcagtgaagtctatttcatctgtctattgtctatcagattcaaaatccatctgttatagcattttaggtggaacaactaatgaactctaacttaataactattaaatcttttggtgatctcaatactcattactcaatttacttgagatccattgttatttatttggagttttgtcaatgctaatgattgcattgatctataccacttcagctgaaaatctattttccatgccatgctgttaccctctcatgattagagcatgtgatatacgttagcattatgttgcagggggtgcagcctgttcgtaagcattcaactctcattcgagcaca

SEQ ID NO: 62898 - DNA, 878 bp, Cucumis sativus
  Intron number 1 from transcript Cucsa.123510.1 (locus Cucs a.123510) derived from phytozome v7.0 (chr-ID scaffold0100 0; pos 735015 to 735892 reverse strand)
gttacctccattcctgcttctcttctgtcggcgaggtttgctttctatcttcttttccaattatctctctgttttttttacgcgttttttttttttagtttggtgattaatgtgtaacattcgctctatgtacattactaatctaataagttgttacgatgaatcgatgatgggttgtttggtgacttgctggaattttcgtcgttgaagttctcaattaaatcggtctttagaaagtgatacattctcttcgttatagtaagggtataaatattgaatgtttccttagtttcttattttggtgatttttgttttttggtggtttccgtacttgattgtcgttgtacaatttcaacacggaagagcagaactacatgacaattataaatttgatcaaatatttgattttgtttttgaaaattaaaaaacagtttttgctactcttaggcagtgaacatttactggagttgactgttgcagatttgattacgtttttttcttatattagtaagctagagaagaatctgcttaaaagtgtagcactgtattttgtaaaaatgtttttggaattaaacaattctgaatgagagaattggctgtttgttttaagacttttagatgtttagaatgactgtatctcctaacctctcaaattcacagcctattgagaaatattgtgaaatgtatatgaagaaatactatagtaggttatgttgttagtaaatgaaagaatacattctctagtaattgacattttacatcccgtggtgttctgtgacaatcttttttcttgttgaacatttttgaattgttctttggttgacatgatcacgttgaacattgattgttctattttctgtatgatgcagatttcgtct

SEQ ID NO: 62899 - DNA, 679 bp, Cucumis sativus
  Intron number 1 from transcript Cucsa.063180.1 (locus Cucs a.063180) derived from phytozome v7.0 (chr-ID scaffold0066 7; pos 45199 to 45877)
ttcaaacccctctctctggctcctcccccgcccaggtttgttttactttctttctctcaaatcctcaataccccttttttaatttttactctagattcattttttctttatgggtcattgatgttttcctgttttgattcgttttccttggttttttgaaatggaatacatgatgggagattttttttttctttttctgaatgtttttttttacttggtttcttgaatttcttttgggggatgggatggtttggtgatggtgagaagtggtttctgaatcttgggtagtgttttgtttgtggggtttttgaagagttttggtttattgtggctgctcttgggctgtagtcataggggaaactttttttaattttgtgggggttgttttgaaatgtacgtatttttgtggtctctcgttgttcattctttcttccatggaggtttgaaaggggagtccaagggattgaaatgagttataatttctcaagtgaagccggggtccttacattgtttttaacgacctttgttattggatgatgtttaacgagatttcgtctttggatgatttttgattcagtaagtttctcaaaataatttaaacagtttcgaggtggcttattgtgatttattttctttacccccagcaggatcaattgatagtcaatctcttaaggtggtg

SEQ ID NO: 62900 - DNA, 623 bp, Cucumis sativus
  Intron number 4 from transcript Cucsa.066880.4 (locus Cucs a.066880) derived from phytozome v7.0 (chr-ID scaffold0069 6; pos 1287593 to 1288215)
ctttgttttcattcatatttttatcatttttcttggtgaggttctactctttggttttcctattagttttctttcatctcttaatctgtttgattttattattggttacataaaggatgaattcccgctagcatgttaatgtacaccttttgcattaaacattcaaaccttcctaacaaggttcagattctatactctatttgctcccctttcatacattcaacattgatgaagacctcatgagtagggcagtgcatactgaactgaaggctgctctctaaggcttaaatgttttagaacattcatgtttctagaggagcaatgccattgtcataaaaaagggggttttctctgttggttcctcgatttcgagtagaaatttcagtggcatataaataaaatgccctttgtagtccaatctctgcaatattgattctcattaaaatatatgcatacttgacaaaaaaattgttttttacttttcttcatttagaacaatgctggttttgttttctggtatcagttctcttttccttagcatacatggattttctttagtgttgctaatggtggaactttctgttgcagtggacctttcatcctttcattctaaaaactaagaa

SEQ ID NO: 62901 - DNA, 294 bp, Cucumis sativus
  Intron number 3 from transcript Cucsa.129410.1 (locus Cucs a.129410) derived from phytozome v7.0 (chr-ID scaffold0102 8; pos 359790 to 360083 reverse strand)
ttctggttcctaaaccactctatgctcttactcttttattgcttttcttttccaaatccgaactatataaaatctcacaacactatacaagttatcggctcgggatctgttaatttagaattattttgattcctgttctttcacgtaatacttaatagtggaaataactggaaatttcgaaatagttctctcttcataaactgaaactttcaatatattcagtgtgtcactttttccttttgttatttctggaatttagggccttgggttgttggccttatctgcagcattacc

SEQ ID NO: 62902 - DNA, 720 bp, Cucumis sativus
  Intron number 1 from transcript Cucsa.077050.1 (locus Cucs a.077050) derived from phytozome v7.0 (chr-ID scaffold0079 1; pos 157869 to 158588 reverse strand)
aaggttctcatccttgattctcagacggtatgcgccatcatagccattccactccttcagttttcttttctgattgttatcgaggagaaaaattaaatgtagaagtacggaattttgttctggtctgggggaaggggatttgatttccattttctgcacactgtattggtctgagaaagtgggaaaatgtatagtatggtatcctttagctgtatttcagagcgtactctgataatttgcccccggtagttgttgtatatgatttcttcgatctctatgaacgtggagctggatcgtctgtgtattccaaagggaaggaatgtttaattcttatatcattgacagtgctgaatatcggtatcaataatctagactggattgatttagttttttaaggaacattgattgccagttctccctggttaagcttttagatagcaatgtgttaggtctctattccaaaattttatttcctgattcttcaagtgtaacgttttgcatggttgttgaacaaatttgcgtcataatgtaaaattggtgtcatggtatcttatatatataatatattgcaatcatgctagaattagacctcctttgtcaaatagcttggggaaaggtatcatgggtgctcgtatttaatgatgtgatatttgcatcataacattattattttatttggtttcaggttagtgttgtcagtgtggcgtactcacagtcgga

SEQ ID NO: 62903 - DNA, 426 bp, Cucumis sativus
  Intron number 1 from transcript Cucsa.094240.2 (locus Cucs a.094240) derived from phytozome v7.0 (chr-ID scaffold0091 9; pos 438165 to 438590)
ggtatgtctattatttttcttcttcctttcttctttttctcgtttaaattttcagcgtttgagtagctttccccccaagttttgaatgtgttcttactatcttcataatctttctattgtttagggaggagctttgattagagtgtataatggttttgtttgatgtaaagtttttttttatcacattttgattattctagcttctttgcggcatttggttaaatgttatatttctctttatttttttttactatgttcaaaatctttcagtttagattgtttgtgcaggagcctatattagattgttgtatgtttatgtttgatgaaaatttaatagtttcttctttttatgtttttttttgttttgcttggttcccatcatttgtaatttggaaaaataggggcgtacaagtacgtgtcagagct

SEQ ID NO: 62904 - DNA, 909 bp, Cucumis sativus
  Intron number 1 from transcript Cucsa.034790.1 (locus Cucs a.034790) derived from phytozome v7.0 (chr-ID scaffold0044 4; pos 765671 to 766579)
ggcctcctgttttctctaaggcccatcgtaagccatttctcaccactactactactactactgccatttccttggtaatccctttctctttcttttcctttttcttttctgttctctttttataaattaatattcatcgaagtaattattcagtagaattaacttccttttttttttttttttttataaatttccggaatttataccttgcttgatattcaacattattttaaaaaaaattatatatagaaatttataaatactcttttttgttctattacctaaacatattataaaaacatttgaagattattttagattcttcagaattgaagtgtgttttcaagggttgggaaaaaagttcaccaaagttgtgaagaaaactaaacataatttaatggtaatcatatgaaacctcggtctttgaacattaatattctctttcataaacatttgttttattttttctgttttctattgttttctaatatttaatttttaaaaaccaaatcaagaactattttattttaaaaaaaattgatccagagaataaaagatagatgtgagaaaaagaataaacaaaatttttaaaaataaaaagtagaaaacaaaatcgattgattactgaacaaagtcttaatgtataaaaatttcatcaaaactaaccataattttcttttacctaacaattattctaaaaattggctacatattattgtgaagaattgaattaaaaacaaaaaaaataaaagcaaacgaactaaattaagaaaaataataacttggagatcaaattgataggtttacgaaggttggagggctaaaaatgttttaagaagaaaatattattttagttttaacattatattgtttgggattgtaacgtggtgaattgaacagataaatcta

SEQ ID NO: 62905 - DNA, 823 bp, Cucumis sativus
  Intron number 3 from transcript Cucsa.085950.2 (locus Cucs a.085950) derived from phytozome v7.0 (chr-ID scaffold0087 0; pos 278552 to 279374 reverse strand)
ggctccacaagcaagtgtttcttttgcaaccaaaggtaagtttgcacgagtagtgtttgaaccttcgatatcatttatgaaaatttacctggaccatatctggatctttgatattatttgggattcgccaattgaaactctagagatttggagaatgaataatctgtattccactgtttttgatgatgaagtaaagtagcctacttataagtacccaatactctagatttacaaagatatttacaatcagaatctggaaattgttataacagacgttctgttacaacagaaatatattaaaaaatttatttgactgaatcctaacctttccttggctcgaatttaagttcttaattttttccaccgtagtgaaaaagacatttaccaccattatcttatctacttattgccaagctgttttacgagataaaagattgcacattagttctcttaaaatattgatgttgatgataacctatataagagattacacatcgtattgttgtcttttgtggaagatcttcgttacaaatgttctacaattttggaactcttgcaatttttatagatcatcttgacattttctctattgtttagcaaattaaagttaccggctcttttagctacgtttccaagtggcatcttagtttctcttccctttttctttatttatagaatcacttaatattttaaagatttcaatagtcccatggcctctgaaaatcttaaaaaggtgtgatgaagactatatcttgtatactgaggtatgtcaattaattctgaatcaggttctactattgttattgttggaacttcctgggct

SEQ ID NO: 62906 - DNA, 803 bp, Cucumis sativus
  Intron number 1 from transcript Cucsa.092280.1 (locus Cucs a.092280) derived from phytozome v7.0 (chr-ID scaffold0090 5; pos 213872 to 214674 reverse strand)
gcaatagcccgctgctcattgataacgccaagaaggtaaggtttccgattccctcgatttctaaattgatggtggctgtagttggatgagtggtcgttagtaagcccttccttacagtgtaacaaaacaaatactttcctgaatggttagggtcataaaatacatttctatcaaatttcataaacattaaagctaattttgttataattcctcccttactataccgtacccatgctcggattcatacagaaacttttgaaattatacgtagaagtgcttgtatttcaatggagtttgagaaacttatcaagtgcatgtgtatcattttggattgttctataccagagtttcactttccatcgacaacaaatcaagtagaatatgaaatttgtacaatggaaaagggggttaaacttttgatgtctagaaagttgtaaattgcattcatttaaatatcacttgtatattatatattctgaggttcagtttattcttcagtttttatatgcctttaacatgctctcaagacttattgagcttgaattgggcgagaaatagttatctggtggccccaattttaggtgactgagttttgaagtataaatcatttatagttttatatacacttgtgataacttgattaccaattctatataagaagccattatgttcatatgcatatcttttgtcagttattgaatcagtgtagctgctctgtactttctctttgtattaataaattgagtagactgaatcgttggtatgtagtagagtttatcattggacaagcagagtggtaagaa

SEQ ID NO: 62907 - DNA, 1048 bp, Cucumis sativus
  Intron number 1 from transcript Cucsa.105200.1 (locus Cucs a.105200) derived from phytozome v7.0 (chr-ID scaffold0092 9; pos 6074 to 7121 reverse strand)
ttcatcttcttcttcaatcgaagataagggttctggtaaacactttaatcttatattgacccaatcgcaattatattacgatttttcgtctttcttttgattctaattatccccgttttcagttttttttctccttaatttcacgttcacggcttagaatgaatctgccattaatttttttctcctttttgttttttcttttctgggtatctcaatgttatagctaattgatatcaatatctgatttttcgtcttgatcactcatggtttagaatctgaaagtcaggtcaagcatattcttattcaagtgttggtatgtagttttgagtgcaaatttatttgtgtattaatgttttgaagtcttgttttgaatcgcgaaaatccctgtttttatatatcttgttctgcattcacttttaagttttaagttgttgtacaacagagggagattcagaaataggaataaagaagctcttatctaagaaaattatgatcttgaaaatctatcgactcttatgagcgatgaatttgaatttatatatgcattttacaacgctaaggaaataacttttacctttccatgaatttgttgttcttaagatttagtgtattaaccatcctgagatcttagagttaagaggccatgggttcgatccatggtggctaggtgggttgtattttgagaatagttgtggtgcttgtaagctaggtctaacactcacggatttagaaaaagaaaaggatttagcgtagtctagagcatcaaattcgtatagtggtttatagcttattcttatcagctggtcatcttgaagaggtttgagtcaacacatcatggagctgttaatgcttgttgataggatctctagaattcagaatagaaagctgttcatagttagattaatcttgatcttaaaatctgatgaaatttttgtatatcagctggattttgtatcttcttgttttcttatttattaatcataaccctgattcttctgcattgcgttgacattcttcttttttttttggacaagttttaatcatcgac

SEQ ID NO: 62908 - DNA, 514 bp, Cucumis sativus
  Intron number 1 from transcript Cucsa.071680.1 (locus Cucs a.071680) derived from phytozome v7.0 (chr-ID scaffold0075 6; pos 2468 to 2981 reverse strand)
aaaatagtaaattctgagacaaataggcaggaaaagtcaaaaataccctcacatggaaattttcttcatttttctttttcctccttttcttatctctctaacctctctctaatttcttttctctcaacctctcttgtacaaagtctcttgctgttttggaaagagtttatttttattgttgttatagataatcctcctaacttttaatgcaaccctttccttgtttggagaagttatgataatccttccccaatttcctcaatccttccttagtttcctcaatttttccttattcattattcaatcttttcttattagtaatgtataattaatccatttaaatttaaatattatttagtctattttttttctcttttataatttttatactcacctcatttggttaattttaatctttttatttaaaaaacacaacttatgtttaagtgatgaatttgattcgattatattaatttaagttttttattttttcttttactcttgaattagataa

SEQ ID NO: 62909 - DNA, 956 bp, Cucumis sativus
  Intron number 1 from transcript Cucsa.012150.2 (locus Cucs a.012150) derived from phytozome v7.0 (chr-ID scaffold0015 4; pos 1620444 to 1621399 reverse strand)
caaatagtaagtcaattttttaaaattatatttacaaattagtctctcattctacaaaacttaaattttgattcttataatttctttaaattttcacctccaggctccaaatataaacattaaattctaattccttttttaaaagaaactatttattttaaatgtttaactcgtaaatttacacaacttttttaatcttatagttctgaattcccccccccccccccccccccccttttttagtgtctcttaaatattaaagatgaaaataagttttataatttccataacgtttacataaaataaaaattaaaaattttaatgtaaaaagagtaaatggccaatattttctttcttgaaattattttatttttattttgaattgatactcttcttttattgaagggcttcatgtttgatttttgctctctttaatttagtctttgtggataaatacaattacaatctaattataaaataaaacgaggagtcttcttgtaaatgaggtaggtgtatttgagagtagtctctctccaaaaccattttttattttcttaaaatttaggtaattataagaaaagataatgtatctttaaatcaagagacttatatatttgtcttccaacccatctcttacttcaaccacatttggatactcattcccaatacaagtactttttcttttaaaacataattgataattattatgtaataggcccttagtttattagaggaaaatttagttaaaatgtaattgttgtgtttggacaacttgtttttatttatttgtaataaaacaaattacgaatattatttatttaaaaaaagaaagaaaagaaatgaaaatatttgggttcccatggatgatgaaaataattttttaaaaaagaagaagaaaaagaaaggtgattagttggagtaatatattggatttgcagaagaagagtcaaaaggca

SEQ ID NO: 62910 - DNA, 511 bp, Cucumis sativus
  Intron number 3 from transcript Cucsa.094010.1 (locus Cucs a.094010) derived from phytozome v7.0 (chr-ID scaffold0091 9; pos 224650 to 225160)
attcgcaaaactgtaagtgttttttaatctccttattgttacaacatgggctgtggaaattttgtggaaacatctttcttcctttcattattttgtagagagattttctgaacttcaactgttagtttgttcatggacactttactttgtggttgagaaatccggtggcctatctaagttctaagtttttccttttgagttgatgtgatggatttctcttcatttctctcacccttttgataggagctaaagatgaatctttgatcagaaagtttctttctatatatcttcatggctagtcacttgtggcaaaaggacaaatgacgaactgccatgttaaagaatgttcttgttgagttgtgattgaatctcaatttaattcactatcgtatcatgttgaaagctctcttgtttgatttgaaaaatagattttgagggtttgttttttaattatttcttcatatatataatcataggtcgaagtggaaaaacacaaggataaaaatcctga

SEQ ID NO: 62911 - DNA, 885 bp, Cucumis sativus
  Intron number 2 from transcript Cucsa.088470.3 (locus Cucs a.088470) derived from phytozome v7.0 (chr-ID scaffold0088 8; pos 761013 to 761897 reverse strand)
cggtatatttatatatcctttaaaatagagagattaatgcactctgttgcttttacttttaactacattacttttcttaagacgtgaagttttttaatgtggtcaagtttatattaagataagatggaaggcggaagctttactctcttggttattacagtatatatataccttgtctatcaccgtttcttcgatattgttttgttatttgattcttgttaaaagcatagtagtatttaaatcctcaggtaggtataaacatttaagcagacttgaggagcaatagagtgttttggggtatggagtgggaacctggcgaggtccggtctttggtgaggttccatgtttccctttgggcattggttttgaaggctttttgcaattatcttccagggaatatcttacctagttggaacccttttgtcaatgggatttccgtggtcttttttctttttatgctcttgtattctttcattatttctcaaggaaagcatttgtttctatataattataataatgatgataataataaacatttaagcagactttgtcttaaaatcagtacaaaacattttagactgacgagatgtcaatcagaaaaggtgaatatattgtcggtactagtgggcattattattgtttttagatagaaaccaaaacaatatagaattcaaggacagatggtatcagggtcattgaggaagcaccattcattctcttattctttttcttggttattgttatttttcactaaactaccttttttattgcaacgacttgttagagatattaggataattttatatctgttaaaataatatgtgaagtttacactgccgttaaggtgatagttattttcattaatacaggggtcactgttttctt

SEQ ID NO: 62912 - DNA, 513 bp, Cucumis sativus
  Intron number 1 from transcript Cucsa.088470.3 (locus Cucs a.088470) derived from phytozome v7.0 (chr-ID scaffold0088 8; pos 761932 to 762444 reverse strand)
aaaatcgtcgatcctctcctccaaatccttcaaaggttcttcctctcaccacatatttcgatttccaaatattttatttctctcggagcattgaagtttgttgaataggaatttgacggacttttttcttcatttggtacaaattttgaatgcggtttttaatcttgaggattagatattgcttgcagctcttctttgattggaagcatattttgattttattttgagtttttggccttctaggatggattgaaaagcatatctcagaaggagataggccaattagagctgttggtttcagcgagttcaagaattatgctttcccttatcttttcatggattatgggagttgtttttgatacatttattcccaatgaagcaaagggtctaaagctattctcttaattttctgacgatagaccttgaagaaattgctaaaacttttctactcgttctttcttggttttgttgtttgaaggggcgccgagccgaagcaactggcattctctgcag

SEQ ID NO: 62913 - DNA, 279 bp, Cucumis sativus
  Intron number 2 from transcript Cucsa.095630.1 (locus Cucs a.095630) derived from phytozome v7.0 (chr-ID scaffold0091 9; pos 1491829 to 1492107)
ttgcctcaaatatcaaaaaactatctgagaatcaagtgagattttctctctctctctctctcattaacctaattaaatttctccttttttattttttattttttacttatttatttatttgcctttgactttaatatctcactctcttcttcttccctttttctttctcttttctccctaattttgattgaacttttaaagttgaaaccataaaagaatactaaaactttttggatcaatcatctttttttttttgtttttcttttgaaatgaataggg

SEQ ID NO: 62914 - DNA, 361 bp, Cucumis sativus
  Intron number 1 from transcript Cucsa.042280.1 (locus Cucs a.042280) derived from phytozome v7.0 (chr-ID scaffold0054 0; pos 736575 to 736935 reverse strand)
ttcattctttgcggcttttaattgccattcgtcaggtaaaacctccttataatgtgattcttttttcggtaaattgcaataaacaacacgaaagtatggtaggagttgccaatttctacaaatattatatgttcgaagttttaacatcaattgagtcaacttttatcattgaaagttccaaggggtgtaagatgttacaatttgctcttattttttttaggtttgttggtggcagcttagttgaataattcttcttggatttttttctcactatgacaaatgtcaaaatgggttgatattttggtttctaacaatttgggttttgatgtaaataaagcagcaggtgcttgaagaattaaat

SEQ ID NO: 62915 - DNA, 634 bp, Cucumis sativus
  Intron number 1 from transcript Cucsa.011580.1 (locus Cucs a.011580) derived from phytozome v7.0 (chr-ID scaffold0015 4; pos 801912 to 802545)
ataatctgtctacctacaaagaccagcttcaccaggtgttcttcttctctatttctttcttcctagtaatccccttcttcttcttcttcttcttcctcttcttcttttgttgaaaatgattttgtttcacttactggggctctctctttttagactcactctaaccaaaatttgatttttatgatctcttaaaccctttccgctgtcattcttgacttcttcagtactttgtatctgaattaggggtttgctttccatcttggactgttgcagcgaatctggaggggatagaaactgtattatggataattgcattaagcctagaaattcagaacttaacccacataaactagtgtcaagattctttttaggacttttcagttttttatctgttgtcctgattctttatataaccttttactacttaggatactgaaaaccttgggcagggtttaaaagaatctgaatggtttttatatttgtatggcgaatttttagttatcaatcagtcacttcctccacctaattacatgaattcttggcttcctcactttgtttcattttgtatgtaagttttctttctgttgggtaaaataacttttttctatcctgatccaggtcagacaactgttag

SEQ ID NO: 62916 - DNA, 669 bp, Cucumis sativus
  Intron number 2 from transcript Cucsa.011580.1 (locus Cucs a.011580) derived from phytozome v7.0 (chr-ID scaffold0015 4; pos 802581 to 803249)
gaaaaggagcttgaagaggtagtttgttttttattctcctagtatgtctatccttcattgtgaactcgtcatatgtgtatgtatggtttagcactcttgctgaatgtatttttaggttcagcttcttctgctgtagcactaaggatcagagaacgctcaaaactattacttttattatgtgggtttccagacgtgtttgctttatttcgtttctttgtcttcctttttcattttaaaggaaacatgtgaaataagaaagagttatggcccctgtggagattgtcattttcatttttgggaggaaaaggtgagggggttgtatctttcatttgtgtgctccagagctttaatctctggtcataagtgatcattattggatatgtgtagaaaatttgaaacttcatcaagatgcacatcacttctaccttggttcccttgcaggtgtgctaatattcgtgatggccagtctgctcttcccctgacctcctttcagatgctgatcctgagatttaagttcttgtgtttttttctttttcttttttttggggataaatacctgctctttatggaatttacagttggagatatattttaactgaaacattggacttgggctaaagttgcagtaatgcaggttattgctttgacggaagaacttctttcaacagc

SEQ ID NO: 62917 - DNA, 642 bp, Cucumis sativus
  Intron number 1 from transcript Cucsa.135600.1 (locus Cucs a.135600) derived from phytozome v7.0 (chr-ID scaffold0104 4; pos 427854 to 428495 reverse strand)
ccttaacatatcggtaaaatcgattttttttcttggtaatttatttggtttgtgctctctctgtacccatttttattctttttatttgatattctctaccgtttcccatctttctcaatttgtttgattcgaaattttgttacttttgcatttcccctgttttcttaactgtgaactataattgatttggtggttcgatgttcagtgagtttgtgtcactatttaaataattttactagcttaacttcttgtattttttttctctgttcaagaagcaaaatttaggaatgggcttaaagtgtcaaaaaacgtgaaatcaaatttgggttatgttctaagatacaacgttatgagcccaacatttctatccagcttattttggttctgtttgcatgtatggcataccgaagaatatggtctttttattctgtcaacaagaagtgaaatacacactacccttgatttctgataagtggtaagattgagacatttgatcctaagatcaaagtttttgattatgaaatcgagatatttcttttggtgtttgaaatatggcagtgctgatttggtcttggttttttttttttttacgtcttgaaaatttgaattttctatccagattggcaattttggaattaaaca

SEQ ID NO: 62918 - DNA, 460 bp, Cucumis sativus
  Intron number 1 from transcript Cucsa.075300.4 (locus Cucs a.075300) derived from phytozome v7.0 (chr-ID scaffold0078 9; pos 46961 to 47420 reverse strand)
tttttggggttggaatatccattcatagacgattggtattcttcttaacaatgctttgccttctgctctgactcatttttcaccatcatcttccttattttgttttccatttccttaacttgttttgtttcggagtttcttgctgctcttttacttggctttgttttttcttttcttaagctcaaatggtagtgatcgagtgccttatttgggttgtttttggttaactgatctaatctttgatcgtggtttggaataacttatttgggttaaaaactaagttcttaaaaaactataagcttgaaacgtcaaagcatccgtaaatccattattggactctttttttttttttttttgccttttcatttgtttttctcctttgtcttacgagtaatttatacaggtgtggtttgtttcttatgtagattcaagagtggaagtttgttgaacaatcctgtta

SEQ ID NO: 62919 - DNA, 455 bp, Cucumis sativus
  Intron number 1 from transcript Cucsa.066660.2 (locus Cucs a.066660) derived from phytozome v7.0 (chr-ID scaffold0069 6; pos 1152340 to 1152794)
ggatttttggctctatttttgctccttcttccaaggtttgtaccattctccttattcctttctgattctatccgatgatcattggttttttttggtttttgcttgtgtttttgttcgttttttttcttcttttgtttgtttttcagtcctctccatggattgtgattctacttctttttcttgtttttaaattctaatcctctttttccctctttttctctaatgggttttgattatattaatgaattgaagcaaattaatgatgatttctcaatttagagcgtttattgactcatgctttaatgcattgtttcctcattctcttaatgtttaagtaatcgaacttgtcaatttgtatcttaatttattgatgcattaattaagaatcttaaaaaaattatatctgtgttacttgttcaggtgttagggagagaatctctgctctctcacaccaa

SEQ ID NO: 62920 - DNA, 627 bp, Cucumis sativus
  Intron number 2 from transcript Cucsa.066660.2 (locus Cucs a.066660) derived from phytozome v7.0 (chr-ID scaffold0069 6; pos 1152828 to 1153454)
gaaccccaacgccggagctcaaggtttgtttggtgttttgattatattatattcaaggagaagcttcagcgtttggcttcttctcttaattccactttgaggctccaacctcaaagattgcttattccacctctttttttttcttatggtgttgaattgatatattgcatttaagctggtttcttgtttctcagatgactttttaaagaacaaaggaaaaagataacagctgatagcgttataagattatgattttgaagcttcttccgttgtatataatgttttaagtattccttatggcatattcaagttatacataaatatttttaaatgctatgagattgagatttctgaaaggtgtttttacataacgatgcttttaaaatatggagaaaatatataaatagtttctcagagagaaatcttcctaagagcaattttaggaaacaattcacaaccaaggcttgatactttcaaaatccagcggctctgaggcggcttctgattgcttatacgtgaaattggctcttcaaaggacatccgtctccataagcaaatcattgagatctaaattttgttataagaactcttcctcattgatatctttgttttttttaatctttgcag

SEQ ID NO: 62921 - DNA, 855 bp, Cucumis sativus
  Intron number 1 from transcript Cucsa.078380.1 (locus Cucs a.078380) derived from phytozome v7.0 (chr-ID scaffold0079 3; pos 736193 to 737047)
tgggccttccagattcttagctcgttgcagctctggtacctttattctttgcctcctttgtttttgttttccaatctcttgttacttatttatgggatttcacgatggtgtttgtggtgaatctgttattaattctgatatttgagtgaatctctgcgtatctgtttgtctttttttttggatttcgtaaaacaatattggttttacttctcgttcgaagctatctgattctatgactacaaactgtttgatctattgtcaatggttttattgagtgtcaagttggcctaattttgttatgattagttttcttcaactcactgcattaagagctattttgtttcttaggctaggatttcattttccttgaacttaaatctgaaatttggccaaattatgaaacttctgcttctaatgacgtggaggaggaaaaatgatactctttgctttttggtgaaaacttggaggtttgatgaataattggtatggattgaggaagaatctgctgaaggaccgaatagatcttaacttcttgtatttaggcctttaaccatagttttgcctctgatttcaatgagagcttgctcaataagagttcattcaatggaatctgtatgcaatggaatactcatatgccctttccatagaattattcattctctgtattagccttatgcaaattgatgttataagaaaggaggaaagatagacaactttaagaagatgatattgatctcgtaggagaggaaaatccaacagaaactgtggaaaaagcctttttatatctgtgatctagatcttctagttttgttacttttatcaagaatctaatgatctggctgtgtgatgcaggtg

SEQ ID NO: 62922 - DNA, 687 bp, Cucumis sativus
  Intron number 2 from transcript Cucsa.120860.1 (locus Cucs a.120860) derived from phytozome v7.0 (chr-ID scaffold0099 8; pos 2898489 to 2899175 reverse strand)
ccattgtgattcaaacggcctttcgaggatatctggtgagcaattagttttgaaatagttaaatcacttttaattttgagaggttaaaatcatatcattgaagtgatttggaaccggacaaagttatttttaaacctttcaaaatcattcttaatcatgcgctaagtttatatgactcttcagtttagaccttttggttgagtgaggtttaacttgataatatcaagagggggttgaaaatctagtgatataacgtgacatacttctcaactgatgttgagcccacaattagtttgttaaacaatcaaaattgattttgagggttaaaattatgttttgaagtgacttagaaccagacaatagtgattttaactctttcaaagtcattatgtaactcttgggtataaacatggttaagtgattgttagcctgataatatcaaagtaagatgtgattgaatatgctatccttctcaattgatgtttagcccacaatgaattaatagactcactcctccattaacatgatgataacttgttgggcatactattttctgtaaatttcaactggatgactaacaatttattaatttaaaaaaggcgtaacacatgttttatccacttaaattatattataatctttggtttgaaaggcaaggagggctctgcgggcattgaaggggttagt

SEQ ID NO: 62923 - DNA, 950 bp, Cucumis sativus
  Intron number 1 from transcript Cucsa.049540.3 (locus Cucs a.049540) derived from phytozome v7.0 (chr-ID scaffold0055 0; pos 32674 to 33623 reverse strand)
tgggtttgaggccaaagacaacattaaactcagtggtatgtctttcttgagattcctgtttttcttttcttctttcttcttcttcttcaattttgttctttggagtttctaatttgatacttgattgctctgatttttcttgcaaattttttatgtggttttatgcttttgaatgatcttctgttttctcccgtctattgaaattggaaatttggaagtgttgtgatgtttccagagcatgatcgtgcttcagatcaactcatatgatctaccatttttattcccatagctttgctttgatggtcatgttaatatgtagacgaagggccattactgaaggtttaattctggttttagatgtttcttacttttatcttgtttaggttttccttgacgggttttattttgtttgattttcttgatagaaatgtttgaaattatggtgccttagtcctaatcctacagagtttgttatgtgaatttagtggtgttgcagccaatattcacttgacgatgatttagttcttccatgttggaatataattttcacatgggaagatgtgaaccaacatttatactatttggaaaatagtaaaggcatcatattccttccttaccattttgcctagggaatcctattcttagtagaatcggattctgaacgatcgggtggatcgtacaagcattcctcctagcatcaactatgaagcacttgctctagcagcaaaaccagactttgcttttgcttcaattttagattgcctgtgaactgtttggttagaatccggttcgtaagggattaagaatgcttactccttagtttgatggacagctagaaattagactttgcttttgcttcaacttagatcttctgtgagtatctgttacttagaaggtttttgttctcttttccagctacagttcaggtgtattttgttcttgaaaagccc

SEQ ID NO: 62924 - DNA, 904 bp, Cucumis sativus
  Intron number 2 from transcript Cucsa.047620.1 (locus Cucs a.047620) derived from phytozome v7.0 (chr-ID scaffold0054 2; pos 2577549 to 2578452 reverse strand)
ccaaagaaaccacctactgctttcttttactttttgtatgatccctttctcttactgttatctcatttaagaatttaccttgtctagtacttgaattgcgtaagtcaactttgaacactttcacagttctaatgtttgcatattagttaaaggtgtctgcattttcatggttttaatgtgcacgtattaaaagatgtaggcagtgtcatggttccattgcacacatattaaggtagggatataaaatttcacgaaaagcttggttgggttgctgatttagggttctttaagtggctgcaacacgaagtgcttatagtcttcaacagtaatgcccttctgcttatatgcaatgcatattgttcatctttttgttattctgtttctgaccatcacgattgccatcttacttaagtctgccaactgcttctttaactttaaactgaatgaagttaagtggtatgtgcgttatatgctactgattttgatttcgtctgcttttcatgcctcatgcatatatatcggtagatatggtttgatattgcaactctatgagagcttttgagacattgaaaattgtcctgcccaagtatacatctaagaaatgatactcacatgctatatggtgaacttgtgcttatttttttgagagttgataacagacatctttagcacacgattgatttctaaaacttgcaatgttgattttcactctactgttcatattcagcatatacagtacaaccgttgagatagctagggaatctttccatcagtcttcttagcacgcatgttttaatactatagttgatgaaacctggcaccatttaggacgctagcttacagaactaaactgtattatcattctcaagggacgatttccgcaaggaatttcaagaacagaatc

SEQ ID NO: 62925 - DNA, 827 bp, Cucumis sativus
  Intron number 3 from transcript Cucsa.101910.1 (locus Cucs a.101910) derived from phytozome v7.0 (chr-ID scaffold0092 7; pos 1065153 to 1065979 reverse strand)
ggtattgaggctcttctttccgcgacatttcccaggtaagcaccatggttatttgtttactttttcaccacttttcttgtcgatcggtatcctgtcgctgtgtatgatgaaaggttgttttgaatttataatacatttcaatcattaactacaaaaaggcatttgtcaatcagtacaaccttgtatttgttgaggtgacatgatgaattatttaaactcggcgtagcgagtgcttgatagagaacgtggctttgatacttgacataataatgcaagaaaaagcttcaggtttaaaaatgtttttcctccctctaaacttttgatcattttgcctcttttgacttgtaatctctcctattatgatctaagagatcatgtttgataatcatttggttttttttcttttcttttttaagattaagcctataaacactcgttctctttctaaacatttactttctactttgtaccaatgtttttaaaaatcaagccaagttttgaaaagtaaaaaaaaaaagaaaaattgtttttaaaatttgactaagaattaactcttttactttaaaaagatgcaaaccagtatgaaagttatgggtgaaaatagctttaatttttaaaaactattaaccaaacgagacattaacttacagaaacacattttcaaatttgaagcactgctgatcttggtcaatgtgagtgatatgtcacaggcagttgagctatacttaactcggtcatatcttcaatagttcgttacaacaaaaaaaaatgaattgaagttggtttttgcagattggttggagattccagggtcattgattctgctt

SEQ ID NO: 62926 - DNA, 1070 bp, Cucumis sativus
  Intron number 1 from transcript Cucsa.047860.2 (locus Cucs a.047860) derived from phytozome v7.0 (chr-ID scaffold0054 2; pos 2749941 to 2751010 reverse strand)
atctgagaaattctgcagtctttatatctgtttcggtgagaattgactaacgaatcttctaaacttggagtttattgattttagtttttagttaatggtatgaacttctgatgtgatttgaacttttgtgttacatgctagtgattgagattgagctactagctagcaggattttctgtatcttgtagttgaggtatatttgttgttcagagaacgataatcttgctggatgaatgtgaatctaatttaggctcggaaggtttagtttctgttttgtgattgtgcatttttttttgtcgatggctttgttgaatttgtttttagctttcatttttctgtttgactggaattttgagcatgaagaagaagattttctgctggtggtggttaattttgggttaagagattgcagatctgtaaaggattttggacgtagctaagagatttgaggatgttaaacaaaaatgaaaaagaaaatctaggttatgtaaattctctaggtttagttctttgcctctcagcgatgaacacctgtcacccgaataattgatgtatgcataatgcgttctccggacccaacattgtcttccagctcgataaatttaatagtttcttgtttgtgattgtgtggataatttggaacatgaatttgttagtttcttttaattattttttaaaaaatatttctcacgagttgtcgtgttgatgttaatttgtctgccatttttacgaccagtgatgaatctttaaatactgctcaagagaagtatcgttagcttagatccgtgagttcttgctctatttctctactttttgctttcaaaaatgtttttccaaagaaaaaaacgaagaaaggaggtgagatccaaccattttagacagtgtagataaggctccatggttgagagtttttctttaaaatggatattcaacacatttgtaaaagcttatcttcttttaaaacccgccttaaagagacggggtgtcaactctctttcttctctgtcattgtaggttttaagacgaggtttgcaggtttaaggaggcgaggctgagagtcgtctgagtta

SEQ ID NO: 62927 - DNA, 633 bp, Cucumis sativus
  Intron number 3 from transcript Cucsa.093420.1 (locus Cucs a.093420) derived from phytozome v7.0 (chr-ID scaffold0091 5; pos 37400 to 38032 reverse strand)
cttgtgggtaattttcttttttagtctccaattaactccttagctagtaataagaagtatcttgaagttacttcatggcacgtttgaagtttggcgctttgaaagaatcttcttaccatgttaactgggtctattaaatatgacgatgttgtttccagttcatttactggaatttcttttaatctaacagctgtagtttattaatgcattatactaatctgaaaattaagtggtggttgaatgttaagttgcaagtaacttcagcattttttttataggtggtttaactttatgcggttatttgtgatcccaacttaacgaagattgatgggtgctaaagtcccgcattgtttggttgaaaatagacatgatacgaaccaccattaatagtctacacagacacctatatcttagaagtcagacatcactgcacataaaaaaatcatatggatgtcatcctgaaaaattaacgtttgagcttaatctaatttccactcatacttaccgactcaattaatcaccagtataatttaaaagtcgtggtctgttggatgtgagatatcctgccacattcttctcaaacagatcttcacaactttgtctaaatgtgatgaaagttatgcaggttttgca

SEQ ID NO: 62928 - DNA, 667 bp, Cucumis sativus
  Intron number 1 from transcript Cucsa.093420.1 (locus Cucs a.093420) derived from phytozome v7.0 (chr-ID scaffold0091 5; pos 38654 to 39320 reverse strand)
tcggcattccgtttcactactccatcgatttccttgtaagttcatagttctcattctatttcatttccccctttcttcatctcttgttgttgctggagtatgaattctgggttttcagtatacgtttcgttttgagaggtttacgttaaatttacgccgaaattgatttccagttgaagctgatgacttagaagttattaacttttggtcgccccccatgtgtttgataaaatttgctttgtgtattttttattgtcacttcgattagttgctattatttgtataattcagttacttttattgattttccataatcttttttagcaacagttgcataatgacgcgactgcattgatgttgccttaaggggatgctttaaaatttatcctacttttggactccctttgttttgaatgattaatagcttaaactattcgaatatttctctttattttgctcaatatgattttcccggcggcatattaatcctgcattgcttgcccctcttctttctttcccttttaccattcaattcttttttgctcattttgcatatttgtaagtcttatagttatagcttttctaatttgttgcaagataggtactattaattctcagcattccttcttttgattactttgtaaaattaagttcttctggtttcagg

SEQ ID NO: 62929 - DNA, 1031 bp, Cucumis sativus; identical to SEQ ID NO: 62252
  Intron number 2 from transcript Cucsa.111540.5 (locus Cucs a.111540) derived from phytozome v7.0 (chr-ID scaffold0095 3; pos 303103 to 304133 reverse strand)

SEQ ID NO: 62930 - DNA, 741 bp, Cucumis sativus
  Intron number 5 from transcript Cucsa.079290.1 (locus Cucs a.079290) derived from phytozome v7.0 (chr-ID scaffold0079 3; pos 1897724 to 1898464)
aagtatgattctttagaacttgatgctatcattcttatttagtcattacttccccaaaataatttgattctgggcatgatttttagatacaaaatgtcctgtgattgtgtagttttagcatcactcgatcttgccttttcctttcaagtaatgacgttggatttttagatacaaaagcacgtgcttatggatactgcatgcacattctaacagaatctacaatccaatagactgtaggcctgcattttgtatccaccatgcaaaaccatttgataattgttctaaatattgtggctagagtttatagattatattttggtttcttcaagaatagcaataaaattacattgttgagagaattatgaggggccaaaggcattctattgtatatgtgtttacgttgagaagcagttgaacactagtgtaacttgtagtattctatatttaaatcttgagggggtgttagggtctctttgtttggcccatggggctcatgggccccacaaataaaataaatcaatttcatgccttattaactcctaccgtgaagtttggaagttcataactccctatacttcacaactccaccccttgatctaaatgtcctcttattgtttattcactttaattttacaacctttgtatcaaggaattccttccgtattctcgtttgaagcactgatattaacaggatgtataattacagtcacaggaggttgcaagggattttagtgcagtttg

SEQ ID NO: 62931 - DNA, 1066 bp, Cucumis sativus
  Intron number 5 from transcript Cucsa.108440.2 (locus Cucs a.108440) derived from phytozome v7.0 (chr-ID scaffold0093 1; pos 592343 to 593408 reverse strand)
aaggacctttagaagctcttcggccgaaattacaggttaaagaatatatctatatatatattgaacaagaaatatactcttcattatgtcatgcatatggtcttcatctcaactagacaacctttgatattattttagggtagagattttgagtgataacatgtgctgaagagagtgcttctccatctcaaaatttagaccttgacttgaccttttgaataaaagtttaaggcataacaattcttttccattttgttttcaattttctaattttagtatctagtttaatattagaatatcagaccatttttccataaaggcaaaaggaggaaaaaaattggttggcaaaagcataaactagggagagttgtttttgggtgaaagaaagtatatgtttgaaaaaaaaaaatacatgaaagactatgaaactagggataagcgctaacatgagctcatctcaattgatatctgtatctttccgaggacaagagatcccggattcaaatccccctacccaagttgtacttaataagacattttctaaaaaaacaaaggataagcaagaggaggtttttggatagagatgtgttaaaaacaagtctgtcaaagcctacatagagagaaacaaacaagtaaaaaatatatattgcgactaaatttgaacatttgaaagtacggaatgaattgaacgcatcatgttaccaaatccaccaattcccaatcaattactgtgacactatataggttcccaagaaaagaaaagttttccaagaagttataggtgaataagcttgagtaatcaaatcagacaatatgattgaaaaggtcgaaaataaatagcagacgtggcttaatcctcggaaggatggtgctgtgattaccaaatgcgttagtatgttaatttgtcaaggcatctgtatgattattgggaaataatttgttttgtaatttcctttttattgcccgttcttttgttaattctatcatcagaaaggactaatgcgatttcaatttttttttctcttccgtagccaacacaacagcaaacacgatacaggaagtctcc

SEQ ID NO: 62932 - DNA, 471 bp, Cucumis sativus
  Intron number 1 from transcript Cucsa.088600.1 (locus Cucs a.088600) derived from phytozome v7.0 (chr-ID scaffold0088 8; pos 883432 to 883902 reverse strand)
ctggtatttctgtaaagtacctttgcttgggagtgagtgcttttcattttcttcatcttcagtgataccttttcgaatgcgacctttggacgagaaacattgtagaaaaccaagatgataacaattgggacaaagtttttaggtttagactcagaatcgagtaaactaagaaacctactttaggaaggcattaagaatttctatccagccatcgatgtatttatcttgtttatctttcctttttggaataattagagtgtacttatttagttactttatattattcttataaaggttttcccccatactttttatctttgtgtttttgttgtaatatagttgatgttctcattaaaagtaggagtctgctcggagattttgaatcaaagggcttttcaaaccttttgatgattttctgctgcttatgtttcgacagagctagctgcgtctgttcctaagactgaaattgta

SEQ ID NO: 62933 - DNA, 333 bp, Cucumis sativus
  Intron number 3 from transcript Cucsa.027790.1 (locus Cucs a.027790) derived from phytozome v7.0 (chr-ID scaffold0037 8; pos 623339 to 623671 reverse strand)
caattctttggaattcccatcaaattgtgtaagttaactcaatcgaaaccctataaatagagttatttaaccatttcaaccttattttcttgtccattattttgaactcaaatgtaacttcaacattaacttaagtttattaattactacttaaattggactttaaatttcaaaccctttgttccagtttgtcataaatgaattccatttttttttttcatatcaaattagaaagcatgtaaggtagtatagaattatgagttattatttgctaataaatagtagtccttatggttaattaatgtgtgaatattatgatcagcttttctatag

SEQ ID NO: 62934 - DNA, 719 bp, Cucumis sativus
  Intron number 1 from transcript Cucsa.052610.1 (locus Cucs a.052610) derived from phytozome v7.0 (chr-ID scaffold0057 7; pos 98407 to 99125 reverse strand)
atcttggcgagcttggcatccttcaatttagagatgtatgtttcaaattatttatattctactaattttctcactttgttttatgtttaattgatggaggaggagatttgttgttgtgtttttatcctatcttttactgtaattgttagaactttagcgtggatgtcaggattaaggcgtttttattctgttttatcggtgtttgcgtggtagaattgccggttttgccgttgaattctagaattcaatacttgggattttgatttatagcggttactggaaatttggatggatgttgaactctaatgttagttataggtttacttggttgcttaagtgttggtgcaaatctaggaattgtgtgagactgtatcttcagtgcaatttatgtataagtttcacgatctcagaattgcaccacaagtcaccagttgggtttatgagtaatggggaggctctatgcattttgactatttgagaatctaatggatcaggcgtcgggggataaattatacttgttaaaaccactgtttgtgtactattcaagttgtagtgttgggtaatcactgtttgataaaatgttttagaagtaactcgatttgcttgtgtctataaattatactttttgttggtttgttggtggggtaaaattttcaactcacattttcttttcttccttggcagttaaacgtggacaaaagtcctttccagagaacctt

SEQ ID NO: 62935 - DNA, 1027 bp, Cucumis sativus
  Intron number 1 from transcript Cucsa.071920.1 (locus Cucs a.071920) derived from phytozome v7.0 (chr-ID scaffold0076 2; pos 28048 to 29074)
aggctttaagtgtccgcagccacgccgtcatcgcagtaattatttcttgtttctctttcaactcttcaaacctttccaataacttttcttattttaaaataattaaatgatttattgtttaaatgattttttcaaatatgaaaaaataagcaaaatttcactctataatagacttccacattagctaatattttattattcaaaataatttctgattaaatattaaatttatttttgagtagttgaaggcttttttttcaatataattcgaacgtgtgaaaaattattttaacaattttaaaattgcttgaaaagattttcattttaagatttatgaaatttaacaaatatttaataagtggacttaaagaactttgaatttagtgggatgaaatttaataattttttatttttaattgtgaaatattcatttggcaaggaaaacttttttggaataataaatttaaggaaaccaatagcatctcaaatcttacaaactatatgaaaactataaccaacatacattttcacatttttttaattcttgaacacaaaatgtaaattttacattaaataatttagttaattttaatctttttcacaatgttatctaaaattgaaaattttatattctatatatatagttagaagaaacgaatagttggaaaattaaaagttaaagaattgaagtatagatttaatttgagttttcttttttcttattaagaattaaatttgaactttggatgttgtaatgattacacaaaccaaatttatttgatctaaatatcatagatcagatgcaaatttgaaagtgaaatagtaaatttagcgatgtaaaggctttgagccttgaggacagtaaatagagtagacaactaagcaagcaaaacccaaggcttttcctttgcgcattactataccatttttatttatttgaagattgaactcactatccctcattcataaagataaactcaaataagaacaacattaattccctccattttttacaggcaaaagctat

SEQ ID NO: 62936 - DNA, 640 bp, Cucumis sativus; identical to SEQ ID NO: 62001
  Intron number 1 from transcript Cucsa.106950.1 (locus Cucs a.106950) derived from phytozome v7.0 (chr-ID scaffold0093 0; pos 400955 to 401594 reverse strand)

SEQ ID NO: 62937 - DNA, 612 bp, Cucumis sativus
  Intron number 1 from transcript Cucsa.122700.1 (locus Cucs a.122700) derived from phytozome v7.0 (chr-ID scaffold0100 0; pos 60678 to 61289)
atcatagacctccacaccctcttcaggttcttttctcttcttttatttccgttgatcgcaaaccctttttcattccgctgctcgctttgtgtgaatgttggaaaaatattcattttttcttttctctttttagttgttgaattgaattctggaaaacaatgtgatcctgtttatcaaacttttaaaaatacgcttctcacatggctataatccgtatattttcaccccaccttgattttggagctatgatcgtttaaagaacactgaatttgaagggtctttcatatatatatattttttttctctttaaagtcttatttaataagtttgaatgggtttaatcaaattatagggatgggagaatgtaagattatgaaatcattactggcattgttgtgaaaggaagctttgtttctgctgttatttatgttttgtggttgtaagactgatgattaacaaaacgtttatggagtgttattcttgttcaaaccaacttgtttttgtagtcaagaaagttgcgctacttgatagtagaatgccttactttggtcttttctacgagtcttgtagtaccgtttctttggttttaaggattatgactcttgcaggtga

SEQ ID NO: 62938 - DNA, 834 bp, Cucumis sativus
  Intron number 4 from transcript Cucsa.051280.1 (locus Cucs a.051280) derived from phytozome v7.0 (chr-ID scaffold0055 7; pos 445478 to 446311 reverse strand)
agtttgagcatcgactagcaactcataataatgtatactttctatttctcacaatgtttttctttaggaatcagtatttagttgttgctgatttctctcttcatttcaagaatgattaagattatggatggttaaagcaatgtatcttgtcaaggtattgctgaaatattaaatttactgtagtctatcaacttaatcttttgcatttaatgatgattttaaaatggtataagagttggagctttgatgttcaaatttctctaatgtaattttcattcaaattaatgtctttgtccaatttttcaagtccacgaatgagagaaagtgtttgttgctatgacctcaggtgaaacataatcaatcaatggtaatatgaaaagtgagtcttagttgattacgcgtgtgtttgtaattataatgaactctaggacccaactctaaatatgtaatcgagacatgcaatctgattgtggaatggagggtgcacaatttgtttgtactgaaattaagtagaatccactatctttacctttaccattacggtcagcgttccaattactatcagtgtaacgatatgagaattataaatttgtcacgttttaccattatcattaccgttagagtcaagtgataatagtagaagttaatgtaaaatgtgacatgtttgtaatcctaagtaaatgcaattaaaaccaattcaattatgtttgcaattcaaatccattaggattgatcaacaaatagaatcctaccgtgattacaccaatttttatcacagatcagtaaacttgacctttgttataactcatcagatagcttaaattttcggattca

SEQ ID NO: 62939 - DNA, 454 bp, Cucumis sativus
  Intron number 1 from transcript Cucsa.102840.2 (locus Cucs a.102840) derived from phytozome v7.0 (chr-ID scaffold0092 7; pos 1791105 to 1791558)
ctcaaactcggtgactgcgactactagacgcggttagatttcccatcactttccatgaaattttctcttacttgtctcggagagatttaaattgtggttttttgttttttccattaaatttagggttttcgtttatttctttggtattgattcgttccatcttacttgtctcatcctcgagcttccgatcaattttatttttctttccaacgatgcttttgattgaaagttacaacgaattttccgtaatggactgttcacaattgtttcttgtaaatttctatgttgtaatagatgaaccctagcccttgtaaagagggagaaagaagatctgtgacatgaattgcaattgaaacagattactaaagttttagttagcggtgattgcttataatcattcctgttttacatttgtctaggttctgcaaagagaattattaaattcgagatctat

SEQ ID NO: 62940 - DNA, 1007 bp, Cucumis sativus
  Intron number 1 from transcript Cucsa.117800.1 (locus Cucs a.117800) derived from phytozome v7.0 (chr-ID scaffold0099 7; pos 146821 to 147827 reverse strand)
ggtacttccttttttctacttctgacataatctctttttcttcttcacttcgttgtttctcgattggtatctatttgcttggagggtttttgtagctgtaatcgttgttgttattggttctatggctctttttgttcgaattattagcttcaatgtctgctctattgtgctgatttgtcttgaatgtatctcttttttcgttgctgtagggtgtttgttgaatttgtataaaagtgttttgttttcctttttgtacaactgtctcatcggtggtgtgattcgttgttttgaactagttcttgtgtaatgaagttcttcccttcccttctactttttcaggagtttgatctaggtatggatccttatttgagattttgaaagatcaatgaatttttttctgctgaatatttgcatacaggggttttagtttcttggtaaaaaaaagtaggttatagatatgcacgctacttcaatacatgacattattctttgtctcatagctaggataactttttttccaaagccatcgaaatcaggtggtgatgtgtctcattttccaatatgatatttcaagcatgaattgcttcatgttcgatttgtttggtttgttgtttagcttgaagcttcgaagctgtgttattgtttattacctattattgttgcattgaatagcctcgcaaatgtggatccaaatcagtagcgtttacattggaatgcttgtgaaagctttactttctctcattttggtcaactgatattgaagttgtgcaactagtattactaatttcacggcagataaatggcattcctctcagacctagttgtattgttaatgttgttttttgtgggtttaccagtgtactttgattgttttactttgctagattatacttctttcaagttatatgtttctgatccacatatttcgttaatacaaactttgtatcattgttagagagtataacttatgatgatcatgcctttctttattctcaggtttcttggtt

SEQ ID NO: 62941 - DNA, 662 bp, Cucumis sativus
  Intron number 1 from transcript Cucsa.094400.1 (locus Cucs a.094400) derived from phytozome v7.0 (chr-ID scaffold0091 9; pos 607462 to 608123 reverse strand)
atcatcggtacgcattttcgtttctctctgtcggtttttgttgattttatgtgtatgtgtttcgtgtggcgtgttttttactcattcgatgccgaaatggagattaacaagaacttgagtgattagtggctttatgctttgttgaggtattcgtcaatgtattttaaatctgagttgtgatgtttttctttgagttgatttctttagaggagcgaggtattctttgttggtaccattagcgaattgtgttttcttcttcttctcatactttgtaatggtgcacttgccggctctgtcagagattggcagctacacagtgttgtgttgacgactacttgtaaatgttaatttgcttttcattttctggaatttacctcttccttggatttgatttaatggaaatgaaaacactcttgactctccttttttgagtttttctatgattaaacgttgcagttttttatgtttgctatgagttgaactatttgaatgatgaatctttgaccatctggctggattctttgttcgcatatggtaacattttggtgacttgattgtgttcctgtacttccagagaattatgcaaagttgtgattcataaggtgctttcttgaatggtaattgcaggtgctttgttacaactagcatttttaagaaggctg

SEQ ID NO: 62942 - DNA, 916 bp, Cucumis sativus
  Intron number 2 from transcript Cucsa.119930.2 (locus Cucs a.119930) derived from phytozome v7.0 (chr-ID scaffold0099 8; pos 1878049 to 1878964 reverse strand)
tatctggttagttattgttgatgctaatttactcttctaccgttggtgttgttctttcatacatgatgttggaagttagtaagaatgcttattgatggttcaggctgaataatttttaattgatttaaaactagaaacattatgaaacgcttttgaatagtagctcatagaagaataatttaaaaaccttttcgctctaactttagattcatgacttaagtagtcatagctgggttgtgacttatttacatgcagtgattcacagtgaaactacggtattaatagtagacttctagtagtgggatgaaacactaagattgtgttctatcaatggaacttccattgataaatgaaataaatccaaggtcaaagtgaaataataaaagaaacgaattaatcttaattcggttacaatctatctgttaccttctctctcgaaggtgcccagactcaaatctcaaaacctaactgcccttccctccaataattcaaacctatttataaaacatatcctaactacttaccctaacaaactcacacgtgcctacctaattcttcttccttcgtctagtgtattggtggatgatagggggtctatcatagtgcacactacaattgcttcagacattgatgacctgcattaataaatttattgttgaatgtggcactagattgttgtgtttaaatatagtccttaacggtttttcagttgtttatagttgctccattttgtgtttaaatggatggcttttcttttatactattgttataggaaaggaactctagggtcagttagtgtcttgcagttgtcgttggcttttacaacaatggctcactcaagcaaacttcagatgttactgattgaatcttttgatgaacaggtgagttggctttacttgttgagggtcttggagtt

SEQ ID NO: 62943 - DNA, 668 bp, Cucumis sativus
  Intron number 1 from transcript Cucsa.047960.1 (locus Cucs a.047960) derived from phytozome v7.0 (chr-ID scaffold0054 2; pos 2812525 to 2813192 reverse strand)
gacgtcgtgttatcctccttcgctgcgaagctcaggtacgtagcgtctagtaccgacttgtataggtttttccaatccaactacttaaattaatttgacgattttacccctatcagtatgccttggttttagcgggtttatggagtatggacaaattactcgtcgtcttcttgtgtatcaaaaagttcctctgaaactgattgctattttgtctggaggttgcagacttttatttgattatgaaaagctgtatgctatttacatttgtggttaggaatgtgcgatcggttctttatccagctgaaactcagacccaatttcagcatgtagtgggaaattttttgctaactgggttagatattgaagttccacttacttcttctgtgtgtaatatctatgtcgcatgcaagcaaggggaaaaaataaacaaaattaacctttgaagcccacgtggattgaattttctaaaatgttttgtttgtctgattattatccttttgttgtaatttttttctccagttgaaattggcgccaatttcagtcatcatttaaagctttgcaacttagtttgaatgttttttgttatgaatttaggaaaatcaagctactgttgatttctatgtgttcattgttattgcttgtatcaggcctatcaatatcccaacaaa

SEQ ID NO: 62944 - DNA, 325 bp, Cucumis sativus
  Intron number 2 from transcript Cucsa.047210.1 (locus Cucs a.047210) derived from phytozome v7.0 (chr-ID scaffold0054 2; pos 2335189 to 2335513)
gaaacaggtaaacaaaaccaactactctgctaatatccatttatttctcttgcttcaaaatggtatattcttctttggtttggtaaaattcttgaaccccaagtttcaattaacctctaaaacaagaaaaaccgaagttttttccatttttggtgagactcaactcttgtgcttgtcacagagcctctctctcttttttttcaccaaaccagatttttttcattaattgatgattcctaatcagataagacaaagtggggtgtactgataactgatttgattctgattccaaaacaattcaatttttggttacaggtgccagctt

SEQ ID NO: 62945 - DNA, 865 bp, Cucumis sativus
  Intron number 2 from transcript Cucsa.105910.1 (locus Cucs a.105910) derived from phytozome v7.0 (chr-ID scaffold0092 9; pos 358534 to 359398)
gttggattgcttaaggtcggttccaacaatttaccttgaatttggacagaacagtattgctagtgattctacatgttttggtgtatgaaaggttttaaatattgcgatcctacagagacttctttcaagaaatgggctagattgacatttgtagagaacaatagccaaggattatcacgcttctacttggatatggaactttcatgatgctcataattggtagacatagtagtgattttgagatcacttgaaaagaatttagtgctgcccatcttggccaacactccgataactttctttgattgagtgggatgcattcactctgtcctcgtttttccaattatgaaacatgactaagtgatcctaccgacattggccctagtgtccaagtggtttggccaatagtgggtcaagaaatattgaatggtgatggaggcaggggttttcaagattgaacaatggctgtggtaggaatgatatttagggtgtaattgggatattaaaagtatgatagtaattaataggtttttatgatatttgattataaatatagagggagaggaaaggagaagctagccaatatcttggcttgagagtgatctcaagaagggagggtcaagtacctcaaattacttggtttgttttgtagtttggttattgtttatattccaatatatcaggttctatcaagttgttagggaaaaataaaatttgaatctataccaaaccatcaaatagggtggtcacattgaataattttggagtttgtagggtttaagctttaacttagttaagtgagaattagagaaattcggactgatttgagtggtgtaactggtttcattgttgttgcagggcaggtact

SEQ ID NO: 62946 - DNA, 1016 bp, Cucumis sativus
  Intron number 1 from transcript Cucsa.014940.1 (locus Cucs a.014940) derived from phytozome v7.0 (chr-ID scaffold0019 1; pos 5747 to 6762)
aagttcttgatcaagttgcaggatcgtcttgataggtaaaatttccttttttcttttttcccattttctttctatcaagacgtacggcccctcatcttccgtcaatgaatttatgtttatggatggttgaagataataatttatgttaatgttagtttcgttttcaaatttttaaaaagataataatattgtatctttcgtattatatacttaaaagcactcttgaaatgaatggcaaagttagaagatcttttttgtaatttagtttatctttttcctttattaaactactccgttgaattttcatggagtgtctaatctgtgaaaaacaaattcttcactttcttcgtttgaaaaaaaaaaactcaataagttcaaaagttaaaaatatattacttttatattttcataaggttaaaaaaaaacgcattgagtaaaaattcttcaaaatcttgatgggaattgatgaaatgatgtagtagtcgtcatggccatatttattggtcccaaattttcttttttaaattataaatagtttctacttttccacatttacaaaaaatgaaaggataatatttatgacttcaaaatgtaagagtattttttgtttatttaaacaaataaaagataaaaagaatatttttcatagtttagcttttaagtttttgacccgcagaaaacaaaagtctactctctctaatctctacaaaattgttttggtcacaaaccttaaaaggtgatggatgcattaaatattttaaattatttaacttttcgttcaaattatttttaaaataaaaattaaagtatctcaaactagttatttgacgctacgaacgaacaattaagtacgaggtattattagagaaccatgtatatatgtgtatcgatctcttttacgtctattttttatattatttaggtgctgattttaaaagactaaaattcatatggtttaattatttgtttaaaattttcaagagttggaatcgaagttccaacaatagaggttcggt

SEQ ID NO: 62947 - DNA, 911 bp, Cucumis sativus
  Intron number 1 from transcript Cucsa.134430.1 (locus Cucs a.134430) derived from phytozome v7.0 (chr-ID scaffold0104 3; pos 104859 to 105769)
tgaaccttcagatcataacttattccaaattggtggtaaaaattattactaagtgttccttttttatctacttctcacatctctatcttttgtactttttacattaattaaaatcgttctatgttcattaccaaaatatatatatatatatatatagtccagcttttaagccttatattatgttgttcatttttttaatttaatcttatttaagaattatttctttcgcttgttgggttaaaaaaaattgttgcaaaaatgtcatggcggtctccatatcattcaagaacgttgccaccccctaaatcaaatgaagactaaacgctcacatgatatttggaaacactcctaaaaaatgataacaaacaaaaaaaagttgaagtggtagcagtgctcgcataaggtgagcagacacaaggatatctcaactaagttggatgatgatgctacggaagtatctgaaaatgttctagtccacatactgatttatctcatatttcacctagcgaagatgttttggtacacatacttatccatctatcttgtatctcatatcttttaactgacccatctcctatcttttaaaagaaaatgtttgacaaattgcggacatctcaaccagcatttataactttattttccttaataaaaaagcaaaataatcccaatgttcatcaaatggagactaaactcattgaatgaggagagaattattagtgagtttttttcttttagtttcaacctggctttaataaatatacgatatgacgaagatcacataaattgaactatgttttgaatataccaattcttcaacctttctaataataatatatgcatttttgggcgtgtatatataattgcatatggtatgataatttcagctgctacaaggatatttctgtatcaaa

SEQ ID NO: 62948 - DNA, 806 bp, Cucumis sativus
  Intron number 3 from transcript Cucsa.075640.1 (locus Cucs a.075640) derived from phytozome v7.0 (chr-ID scaffold0078 9; pos 285195 to 286000)
gccgggttagtgttagggcctaattagtttcccccttaattaatcttcagctaatctaattaattaatttgttgattatattatcttctatcatcatcttgaacaagaaagtttcttgttgtacaattttacatgtttgtacttttatcattttttctccttgcaataattagtttcaataattttttaattgtgtaattatagaaataagtacttcaaaacaaataaattatttgacaacccatcaaaatagttattatttttaaaaaatctcatgaataataaaaaaattgacttatttacccaacatagcaagaagtttaaattgactaaaacatacttccataaattttactattttttatatgtatatatttaaaaacatctatatacttagagtgtattttaaacatttttttttaaatcaaaatagttagacataaaaatatataatcactaaagtccgatatgctaaccattctttttattaagcttgtaaatctattttcgtttagttgtctataatttaagtgttttaagacaaatttaaaaaacaaacaaagttttaaataaatatggttagttttaaaattaagatgatacaaagtaataaactgttatgtgtatgtatgaacttcaactttctagattttcatgtattggattagatggtaaacaaatttttaaaaaacaagggatttgttaataatatgttaatagttagaaggttgaatatgaatttgaaaggttatttaattaatttgtgtggtgtgtatatatggaatgtgtagataacggcaattgat

SEQ ID NO: 62949 - DNA, 861 bp, Cucumis sativus
  Intron number 2 from transcript Cucsa.125430.1 (locus Cucs a.125430) derived from phytozome v7.0 (chr-ID scaffold0100 4; pos 168929 to 169789 reverse strand)
cccttgagcccatttttcattcaaggtaccctgactatttttttattttcttgctatacatacctattaatcccttgaatctaattgctaattatatttataattgacttgtttttaatagaaaatttatttgtttgtcatacattccatctaacgttttaatgtttagtcatattaattttggatttcttcgagctataaacattataatttagttcatgaattttcaacaaaacttaaaatcagtttgggatgcgtttggttttttaaaaatcaagtttaatttatctaaacactacttttagctacctattagggtttatttgttaccgtctacttatttttagactatgaggtgtatggagcgagtgacttaaaatagtttaaggattatgatagtatgatagtataatagtctgtgtttgggatgcatactattatcttaacttttctcgacgttgtttccttttgtgatggctgcttctgggattttcgttttggtttgaccttctacttttacttggtaaatatttggaacttagtgagagaagaggtatgaggaaaaggagagtgagaacaagtattatataccgtatagaattaggaattaagaaaaccttaatcgataatactacgagcaaacatggagggggctaaatagtccaccacacttctctctaatccttgggcaaacagctacaggtgcttctgtcaaaattgtgtgaaaaatacttttaatatgaattcaaatatatatattttgatatttgtcgacctatctctttttgtaattctaacgtacacaactttttggctccaatggtagggttttaaagcatccgtgtagggtatacaaccaag

SEQ ID NO: 62950 - DNA, 660 bp, Cucumis sativus
  Intron number 2 from transcript Cucsa.072700.1 (locus Cucs a.072700) derived from phytozome v7.0 (chr-ID scaffold0076 5; pos 183836 to 184495 reverse strand)
gcggaacccaaagtgaaatacgatcgccaactcaggtcctgctcattatctctcatgcctgtctcattccttgatgttgaacttctgttcgtgtttcgatactttgtatccatcttcttgctccgttttccccccaactctgtgccagtagtatactattactccatcttcaagtcgtttctacttctcctctcggtaatttctgtttagctttatttgttttttcgtctaccgaaagagaagaaccgctgatgtgtaagaacaagtccgcatttgagttcgcgctctttgtaatttcttgacgtcatagttgctcagcagctgattgactactgacattctgtttttcttgatttctttgataggaattgctggaatttccgtgattgcagatttttttccttttattgtagatatatattgttcagcgatgtctaacttgttgaataacgaatttacttccaagcttaggattttcccactttgttacgccaacttagtttttatgaagtattgtctcttttgagaaatgtgttatctagagcattttttttctcttttttggggcaaagttatctattggataactcgttcgactaactttaatcatctttattacctttaagttctgaaagcttttatcccgtgatattgtaggat

SEQ ID NO: 62951 - DNA, 704 bp, Cucumis sativus
  Intron number 2 from transcript Cucsa.104230.1 (locus Cucs a.104230) derived from phytozome v7.0 (chr-ID scaffold0092 7; pos 2831207 to 2831910)
ctaaactgtaaggaattttctttgtatatcgtactgttaccatctcattcttctttcattctgttggtggaagtatcggttttaggggtccaacaatatgaaacttgggatgcttatagcacaaagttttttcttactgattttaacaatgtgttttttgctcgaaggattaggaagcaatgaacatgctgcttatttttatttatttaatttctttatattgttcagtaattgtttcattagtatgtatgatatttcgtttggggaacttataattatctgtggagttggcctgcaaactggaagccttttcttttgcatttcgttacgacgttagtctttttgttcacacattatcacagatccccattctcgcttaaatttccgtctttagaaatggaagtttcttctattattccaaaatcatggatattataggagatttgattacttttctcacaaaacaaattatctgaaatctaaacatagctggattctggtatctggtttcgtgggattatttgactctcttagtatcaagtttttcatgtagtgttagctgtgacgaatttgacttgacttgtcatattgggacaagtgggtctctcatttggaatatccttacagttcattagaatttgtagtcacactttaatattcttaatgcagccgaccattttgggacaagaggatctcccaagaag

SEQ ID NO: 62952 - DNA, 652 bp, Cucumis sativus
  Intron number 1 from transcript Cucsa.042360.1 (locus Cucs a.042360) derived from phytozome v7.0 (chr-ID scaffold0054 0; pos 785364 to 786015)
ccccttcaatttcttcatcctcttccaagtttgtaatcaactgctttctttttctttttattccaatatcatattcttctgtttctttaattcttctattttaccctcataatctctcagtttttattgtttaccttaattgtttcgtgtcttccacaccaaattttgctttctgggtttgaattatgatctgggttctttttagtttcatcttttaagcaatctttagtccaattcagaaaccaaatgaatataggattagttcattttccttgttaattactcttttcttgtccaccaagattattgttagtattctttcatgatattatagatacaaaatttccccaattgcaaaaaccaccctttcaagtatcgtgctaggagttgcaaattgcaaattacaccctcaaactaacttatagtagaaactggaccaattttaaccacgtagagtttgaggatataattgctatctccgagtttttttttttttttggtaatcttccccagaaatttgattgtttacgtggaataatgtaacttctcttattctatacttaaattaaatttgaatttaagttgatagtacaactattatgtcagttgaggttgagatatgttcgtttatgagatgtttttgtttgtttag

SEQ ID NO: 62953 - DNA, 880 bp, Cucumis sativus
  Intron number 1 from transcript Cucsa.106670.1 (locus Cucs a.106670) derived from phytozome v7.0 (chr-ID scaffold0093 0; pos 193782 to 194661 reverse strand)
aagccgccctttgccgctcttgtgacgagaaggtattattctcttgactttcgtcttcttcttcttccccttcttcttcttcttcttcttcttcttcttcttcttcttcctttcattgtttctctcttagatttcttcccatgtttcttatgttggctgattttgtttaatcttgattgtgaccacttcacctgcgatgagaatctggtggatgataattgaatcatggattattggctttttataaatatgggttattagatgtatgcctgcctgcattagatagtcgtaatgctggtggatcttatacttaaggggtctcttactccttgcaatttgctgcaaattttcactacatttggctgctaggaaagaaaactttggaaggaagacttctgttctggtcaatttggcaagaaatatgctctatatctgcattgcccaatcgatgtttacagctcaaaattgctcatgttgactgtcacaccaagtgactttgaagcataaccccagcacttatcgagtttatgtaaaacaagttcttactagctgttgtgttggatttttaacacgaggattgtcagcatggatgataatttgattgttccttgacactttgtttcgatgttcggacctccactcacgtagctgatggtttattgattaccttatgaagaatagtagattgatatttgagtggttgcattataattctcattcatttttatgccatcttattctttcctgtttgctgagtccttgtgtgtttggaaaaactttactatcgtcctcgacattttcatgtctgtttcaagtaaaagaactgaatttgaagctgacaccttcacaaattttttggaaacttggatgataggttcat

SEQ ID NO: 62954 - DNA, 665 bp, Cucumis sativus
  Intron number 1 from transcript Cucsa.109940.2 (locus Cucs a.109940) derived from phytozome v7.0 (chr-ID scaffold0093 4; pos 828944 to 829608)
gcaattcttcaggtttcccatttcttttctttggacattttcatatgaaaaagtaactacatccaattcagtctacaattacagtttcatgttgtggccttttttttccttcatggacttaattaagtattatagttttgttttttttatttagatttagtttgatggcagatttaaaaggtagatttttgtgttaaaagttccaaaatggtaaaagatttgagttatatttcaatttgtatttctaaactttaaaacattgtagccatatcttgaatgtgatgtttaataattaattaatcaaattaaaagaattagaagaataataattttaaaagataaatataaatataacaaaatttaattgtgtattaggagaataaatgatagtagacttggatgtattagtgggaatatatatctattaacaatagatagagagagagggtgagggtagttaatgtttatgagtgactattagtattagtatcagtatcagtatcagtgctaagtgcacacaaatttggattctgtagttgattaaaatcaaacgcaccatttgaggaagtgatcgcatttcctagccatgatatgaatttttgatcgcccaacaatatgattttgtgtcttgcagtgattccgtcaagaggaatccaggcaaccca

SEQ ID NO: 62955 - DNA, 697 bp, Cucumis sativus
  Intron number 1 from transcript Cucsa.083140.1 (locus Cucs a.083140) derived from phytozome v7.0 (chr-ID scaffold0085 8; pos 84941 to 85637)
tcttgctacagaggcaaatacgctggtaaatcgtctctctcttctcttctaaaatccatgcattttctctttaatccagatctaattccccatgttacccacgtttctatcgatctttgtttgcttctattctttttgtttcgttaatgggttctggaattttctgcttatttgatgttctgatcagtcgttattggcttcaatccatgatgtagatttagatttttttttgttccagcttattttttattagatctgcagggtcgcagtccagatctgtgttttgaggtattttttttttctcttagagctagaatgataccctgagaactatactttgacttaaatgaagttggtgattgagtgtgatttaattttagatttagatgttatgagtagtgtttgatgtgatgcttttgaaaaatggttcttttctactaattgtccatgttttggaaaatgtctgttctttgaaaatggtgttttgttttatttagatccttttatgtggagttcgcacttttgtgtatggaccatgtaattgaatttggtttttacttgaagacaaattctattggacctttttgattttgtagctttcgactcgaggaattttcttaatggtctgtctgtctctgttaggatatttattgttaaagtttcgtttttttctgccttgtagacgagcttattgcca

SEQ ID NO: 62956 - DNA, 286 bp, Cucumis sativus
  Intron number 2 from transcript Cucsa.130620.1 (locus Cucs a.130620) derived from phytozome v7.0 (chr-ID scaffold0102 9; pos 691545 to 691830 reverse strand)
tttacagaaggatccgcccacatcttgcagtgctggtctggttctaagccttgatctctttatttcgtgacttattttgaccattttctttggattttattgcttttgtttcgttgatgggaatgattcaatgaataagatgaattggtatttgttgaatggttgtttttgtgttgaccttttgatctctcttgatgtgaagatgtttatttgttttttagttttgagcttcggatgtttattttattttattttgcttttgaggataggccccgtagctgaagat

SEQ ID NO: 62957 - DNA, 953 bp, Cucumis sativus
  Intron number 2 from transcript Cucsa.098450.1 (locus Cucs a.098450) derived from phytozome v7.0 (chr-ID scaffold0092 3; pos 445278 to 446230 reverse strand)
atatatctcacctggctcttgacatcggcggtatattccatgtctatttgtttatccgtttcccccttttggttattaacttttggttgaatcctatgatatgtttattgtgagggatttttctaaggatgtgaagaaaaggtgaatttaaaaataaaattagctttaggtagtccatattttagcgaggccgctaataatgtgacactatgatcgagatgattttagttgaacatagttcttgtggctaaaacataacgtatattcttctcctttttcatttctggaagtcattgaaattctttttagtagtgacagtgaaacatatttgttgtttccactaacgaatttcgttggaattattctccatgttagattccaaatctgaactttctgtatgtgtagggacatacttaactaatggctggtatgatcacaaataaatggaaagtgataattaaagaattaaaagagaatgaacaaacccattcacatttctttattgataaataattaccgagcaaatctgttagttaatttgaacttctataatatagtatggtatttggagaatctgattctacatagtataaggattgaaaaataatataatgtgtggcctatcccaatcaaatcatgggaaacgtactcgttttgcttttgaatgaaaaaagattattcctttttgttcaccgctcttttccctccactgttagataatttccaactcttgtcaacagtacttttggcttaacttttttcttgacaaatcatcattgagtccattcttgtacttatcaaatgtaaagtgactaagataaggtgttgaaagatgggaatttattgttaatatggaacacagtttttcacagttgttttctaagggagttgatggtagcgttgaatcataatttgcaggatctctcatcaaattggtgtacttttctagacat

SEQ ID NO: 62958 - DNA, 374 bp, Cucumis sativus
  Intron number 1 from transcript Cucsa.098450.1 (locus Cucs a.098450) derived from phytozome v7.0 (chr-ID scaffold0092 3; pos 446528 to 446901 reverse strand)
tctttctaaacccaccgtggtcacaagcttccctggttggccaaattcgaattcatactacttccgtttacttttgattgtttaccggcctcgattttgaagtcaaatgaattgaatatttgtgttagaggagtttgtttctatatgcgtcagagaataatagggaagttacttttcaaaagtgggccttagatgcaagaatttcattttttaggatttaagtttatgttttcgttttgtattttcttttttatcgaagataatgagatcgtcacatagttggatggcgtttcttcttctaattgacaagtatctataaatttttagttgggtttgtaggtgtacgacgagtggttggtcaagtaaagttgagg

SEQ ID NO: 62959 - DNA, 951 bp, Cucumis sativus
  Intron number 2 from transcript Cucsa.124030.1 (locus Cucs a.124030) derived from phytozome v7.0 (chr-ID scaffold0100 1; pos 83899 to 84849)
ttggaggctgctttgagtggtatgctgattcttctgattaatatacgattttagtcttttggatcagtttcgtttcgtttgtgaaatatttccatgtttaagaatcttttttgtgtccttttcattttcctcatttcaatgaagattcaaaattagaaacttaagcagtcaaattatgatcaattcaatggtttaattttctcaaagataaagttgaattcaacccacaaggaaataatatcatacataaagttttaccttcaaggctacgaaaagagttgtgtgaaatacaagatatcgtagttcaaggattttttcttctctttctttcaaattttgaatagcgctatctttgccttttttttatcattattattatgaatactctcttagttcagttgcctatttatggaagttccaacacacatggacagtcctgcacctgttgacggccttctatttttttgtttacactacacagttaatgccttttttttaaagtttcagctctgaatatctgacaaataacatggtatttgtctcttgatgtcgtgtattattaatttcacgacctttttttactgcaaagactgtcaagagtcaatcgatttttggtggttctgatttctgatgtgcctttgaaaatattttggtttatttacaacaggattggtaaaatggcatacccatcaatttatcatccctttacttatttttttattttcttaataaatgatctttttatggtctaagaatattaagaatgaaggtattctttagttgcagataccttgatttatgatgtctacctggatcaaaacacgtgaaaaccttgcaccttaaaccaaagttgtttaagtgtctaacatttttgctaccaagggcacttaactgaaatttgtaactgtcattacagacgtggatcttgtagttcatacggctggacctttc

SEQ ID NO: 62960 - DNA, 503 bp, Cucumis sativus
  Intron number 2 from transcript Cucsa.115520.1 (locus Cucs a.115520) derived from phytozome v7.0 (chr-ID scaffold0098 8; pos 121718 to 122220)
gtcagaaaactgggaccagtggtctacggaagaaggtttgtttgtttgttttttttttctttctatttcttttcatttttgattgttctgctgtgtctcgggatattcgtattttaattaatttcgagtagttactgattattttatttttgtaaaagaagaagaaatcgaatgagggagtggtaataaaattatatttaatgtatctatgtatgagtattgggagtctctaatatgaagcggtgatggattgataatgtggatgaatctgtggtatctggtgtggttgttcaacgttgggaaaactgccagcattcggttgattgagctattgctgttcttttttttaaaaaaatctactcttgaagtgcttattaaatttatccgtttttttatataatttttcttcgtattttggtggtgttgatgccttcacgactcactttgttagtttatatggagttttaggtgaaaatatttcagcaggaaaattaccttgcgaa

SEQ ID NO: 62961 - DNA, 638 bp, Cucumis sativus
  Intron number 4 from transcript Cucsa.116230.1 (locus Cucs a.116230) derived from phytozome v7.0 (chr-ID scaffold0099 5; pos 137484 to 138121 reverse strand)
tgaagaagaagcttgaagatcctcatactaggtactttttatgatgcttttgaagccacttatctctgaaatatttagttgtttgttgcttatcaatcactttgatgtactctgaagtttaatccactcgatggcactggactagtgaaatgccagtttgagcgaatttagtgaatccttgattaaatatataaaattgtttgtaacctctcatattttagatgggactgaattattttacttttattatttagaaattcaaaatacttgtcttgtatcttctaaacttgaggcaccagagtatttatatacattttttttctggaggttctattttgttcttgtttctattgaatgcaaactaaaattaaatgtgttgaacccaaggttgggttatagtggctttctcaaactccatgagtcatcataactgataagatcaagtcatcaaggctccatgagttttttgactttcaaatgatgtaagctcaagtggcattccataacttttaatctgatgaacattgatatgtaaaagatatgctgtatgggagttttgaggattttttgacactcagtttatcttaatttgcagtaaccttctatttctcttcatgtttatccaggtataattttgg

SEQ ID NO: 62962 - DNA, 977 bp, Cucumis sativus
  Intron number 2 from transcript Cucsa.024080.1 (locus Cucs a.024080) derived from phytozome v7.0 (chr-ID scaffold0033 0; pos 87516 to 88492 reverse strand)
tcagctctccatttttgtctttctttactcttaaggtaaataactcgatctttatacaatacactctctctctcttctctctctctctctccaaatgagaaacagagtttcccataaagtattagtaaacaaatagtaaaggtttctctatttagtttaaatccttattatactatgatctcttaactttcactttacttcaaaattttattgtaaattatattttcagactcactgttttctacgctaaattacaaaataccctctatgctttcccctttgtttaaaaaatgctctcattttgaatttacagtattacaatagaacctttttataaaggaccatcaaagtagaaatcctttagaattttggataaattctaactgagccctaacaatgctcgagtctcaatttctattccaaatcattaccttatcacctaatttctctaacatttgtactttaagggcagttctcgtttagatttatttgatactaactttaaaaacttgaaactagatcgagcccgcgtggttgtaattttctttttttaaataagactcttgttaaacattatgggtaggaacttgtaatgtttgtacatcttttaataactaatatagatttatgttaaattatcgtccttgtactttggaactatcatttctgttcaatttattttctacattttctataattcttaaaggataagtcctcaaagcttctcattgaatggttctaaggatagatttgaacgaactttgcctcgatctttcttctctgttttttcctttttcctttttcgttttgttgtaagtcaaagattccattacagtgagtagtttgttatacataccaaagaaaacttactagattccattacagtgagtagtttgttatacataccaaagaaaacttactctgttttatacaaaacagctgcagattactcttttaaagaatcctgggatacaacc

SEQ ID NO: 62963 - DNA, 411 bp, Cucumis sativus
  Intron number 1 from transcript Cucsa.121570.1 (locus Cucs a.121570) derived from phytozome v7.0 (chr-ID scaffold0099 9; pos 97663 to 98073)
gaagaagaatcccaagccaggtgaggttaaagcctttcttttctaattaaattacgacttgttgtttctgttttacgtatactttcgaattaaatcacaacaaattggtgttttttacctaaaaaatttatatatatttggtttaagttgagatgtttcaaccttgatttaaaatatatgtttatgttattgaaacattggtactaaaaaacgattataaagttttcaaatatttatataatctaggaattttgattgatgacaatggttgtttagtgaaagaaaacagacttacaataatgagaagagaacactactaatttatgctttcttatactaattttttagatatacattcacttataagttttaagaaactttgggatgatttgaatgaacataggcagtgca

SEQ ID NO: 62964 - DNA, 355 bp, Cucumis sativus
  Intron number 1 from transcript Cucsa.066600.1 (locus Cucs a.066600) derived from phytozome v7.0 (chr-ID scaffold0069 6; pos 1064990 to 1065344 reverse strand)
ccgcccctcttgctcgccttactatcctctttcaggttctttctttctttcttctttacccgctttttatctcgatttccataagctttttaatttttaatctcaattatgggttgacctggattctttttctttttctttttctttttcttttattgcgtatgttttgcttctggttacgttaatatagagggatgagggtgaggaatgattaggtgttcaaatcttgtcttggcttaactagccttggttacaccattgcgtgaatgctgggtttcttttgattggttaccctgcttctcttgcgctgacttttaattaattgtgttggaaccaactttaccaggtgcaaggg

SEQ ID NO: 62965 - DNA, 520 bp, Cucumis sativus
  Intron number 1 from transcript Cucsa.077690.2 (locus Cucs a.077690) derived from phytozome v7.0 (chr-ID scaffold0079 1; pos 797251 to 797770)
agaaactcacccgatccgatagcagctctagctctgtaagtttcatttgttcttcattctgactctgtttagaatcactttcttcaaatggttttagccatttaaaaagtcatttcaaatagttttgattttacatcgcctgaattcttcgattattgtgagctaagtagcacaaaatttgatgttgaattgtgcgaaagattttatatatattgataatgctagataatacttgtgatgatcatcgtcatgtaataacatatcgaactcatttactgaaatattttaatttggtttttgattgtaaagaggaggggcatgatcataaaaatagttacttagacaatcagaataattttaacatcttgattcatctcagtattgctttatttttcatttgtttcttaaatttactttgcgcaatccaagtaattggcaattatctaaaatttattgtgtcatatatatatttggggtatgtgtttaatctgacttcggggtatgatttaacagtctagcg

SEQ ID NO: 62966 - DNA, 924 bp, Cucumis sativus
  Intron number 1 from transcript Cucsa.135440.2 (locus Cucs a.135440) derived from phytozome v7.0 (chr-ID scaffold0104 4; pos 308856 to 309779)
ccaacacttttttttctctgaccacaatactgaaggtgtgttcttctgtattctactcttgtttaacttctttttctggtgcagatcctgtggttttctttctaattgtttgaaattttttctgggaaatgtaattggtttagtttgcgtgggatttcttgtttcttccctgagtttctttaagaactgactgcgggaatgcttcttgtttcttgggtttgttactgtagagatgtttaagtttgggaatgggatgatggggatgttgattttgtgttgtggaacatgggttggagccagggagggatattgttgtggaacctggtgtgttggggggtttattttcttgatttgtttacttggggcggggggggggagtggaatttgtgttgggggcttgaagatacttaatgctgtgtaagaaatttttaatctttcttttttgaagattctgtatatcctttttctgtttctgggtttggcttaaatatttttttgtttgtttcactttggaatctaactaactttgatacctttattactttgtttttgctgccttttgcctttattttcattttggttcaaagtgggtttgctttctcgacgactgttttccccaattttttttatagttttgaaagttcaatgaatggggaagaaaaatggattgctgatgacaggaaaggtcaaggcatgctaattttatcatctactgtgttttggattctgtggatgccttttcttttcgtttctacaaatcacatagttctcttagtttagtggaaacctcaaaatttaaaactggaaagaaaaaagactacgcttgatattgtattgatgcaaatattacttccattttcaggtgctaaagttttggttgccatttcagttcatcagcgttcgggtggtttgaaagaagtttaa

SEQ ID NO: 62967 - DNA, 424 bp, Cucumis sativus
  Intron number 2 from transcript Cucsa.043190.5 (locus Cucs a.043190) derived from phytozome v7.0 (chr-ID scaffold0054 2; pos 89053 to 89476)
caaaacggagctatatattcacttcaacgtttcaggttatttctcttccttctcttctccatcttcttttgtttcaaattcagctctcacttcaacattcattcatctttccactttccactttccactttccactttctctcctacaagctgaaacccatccgaattcgcaaatctaattattggatttaagtttttgttgatgtcctcagctttcgttcctccaattgaatttctatttcagtcgcttctactttccttttcgaatcttgcacctatgcttttctcctggatatcttgaacacgctaccgttgtttgattctactctcacttgcttctgccttttagtattgggtattaatcaattttcatgctatttgtctttaaatcgagcttataaattttatttttagcctgcaggac

SEQ ID NO: 62968 - DNA, 687 bp, Cucumis sativus
  Intron number 6 from transcript Cucsa.043190.5 (locus Cucs a.043190) derived from phytozome v7.0 (chr-ID scaffold0054 2; pos 90386 to 91072)
ggttttgcaaagacgtggagaatagatcacaagtaatatttctcttttagattactttaccacgagcttcaattacattgaaatacatgttagcaaattaatattacatgcggtctcttagtgccttatttgataaataaaggtttatatattcacatcattctttactttagatctgccactattaatggttaagggttatagtgtaggagttttgaaaatggatacattttcttaagcacaatggagtttggtttctttttcattttggattaactattctcaaggaactatcaaaattggccgagaagaattgcattgattttgtgcattctattatactttctgtagttaaaaacgttgtacaatactttgtgcatttcatttcgtgcttggattctcattctgagaggaccaatataggtttattatgacaagtaacaaaaggatatgagttggctttcatttcttcatatcatttcataatattatttttaaaggacaattttagattgtaagaagttaattcttgatatgtagttatcagtccatgactatggtaaatcaaggtctgaaggctatttcatgttgaaagttcatattttcctcctttccctcttcattgttttcaaaagattgggcagtctcattcacatctggtgcatttgttcctgattattcagggat

SEQ ID NO: 62969 - DNA, 752 bp, Cucumis sativus
  Intron number 1 from transcript Cucsa.109200.1 (locus Cucs a.109200) derived from phytozome v7.0 (chr-ID scaffold0093 4; pos 117201 to 117952)
ctaagctccgtgaacaggtcgctcgccagcaacaggttttttttccccctcctccgatcgaaccctaaactctttcctcttgcttagatccatttctgtgttttcttcaatctcttcaagctttcttcttcatttttgtaaatatttttcttcttctttcatgccttagcttctttgttttttgttttttgtttttttttctctttatttcggaatattcgataatgctactcctggttatgtgactttgattcggatgtcaatgcttttgttgattcatgactttttttttttacgaatttatggatctggaagttaaatctttgattatctaatcttcgtttatcttttgctggtggataatttaaagatagagatgaatgtgttttccgcggcatttcttatcagctaggagccggtagttttttgtttattgtaacaggattgatgtgataggtaactgtaactttatgctttttaaagagttgtgggtgagtgtcttattcagaagaaatgctcttcagaaagtagatagaaatggaaaagaagttgaaggaatgtgtttctgatccatttcctgatcatatctcttctccatttgtttattcatggttgcttatcgtaattttaatggaagagtggttagcttagattttatttgtgtattattggtactgctagaaaagtcaatgacataatgcaacctcattttgtattgtaggctgtactcaaacagtttggtgctggaggat

SEQ ID NO: 62970 - DNA, 848 bp, Cucumis sativus
  Intron number 1 from transcript Cucsa.109690.1 (locus Cucs a.109690) derived from phytozome v7.0 (chr-ID scaffold0093 4; pos 613568 to 614415 reverse strand)
ctattgctttcttctttcttctttctcttctcttggtaagctctaattcttcttcctttttccttaattaatctcctttcagatatatatttattatatgcttttgttctaatttgttattttattttttaattaaggataattgaaattgagttagatttgtgaatattcatagcatgattatcataaaaccactggatcataatatatattcttatgatatagtttgggtttagtttagttttattgtgttaataccttaaggcatatatatgtttctgtccctctcatctcacctatagtcttttttttcttacaaaacagaaaaagaaatttcctaattttctctgatatataatttgtctaaaacagagttatgaagttcttttgttttttttttttttccctttttttaagcaaatagaattttgtattcttcaatggaggaatttgtcattaaacaggctagtttttaaaaacaaatttgggtgttagttttttcttttcttttattgatgattttcttagaaatctaaaagtaaagaaatttgtttaataccttattttatatataaatgagaagttaaatactttttacgatttcaaaacttgatttagtttttttaaaacgtttttacaacgaaagaacaaaaaaaaaaaatggagggagtaattttataagcttaaattataaaaactaaatagtctaaacaataatcctcacatgcaactgatttttaaagtcactaaatagtaatcaaacggatcggcaaagacaacagaatttgatggagttgcttacatgtttttgaatgatggggtttaattacagcttggagatctaaccc

SEQ ID NO: 62971 - DNA, 584 bp, Cucumis sativus
  Intron number 1 from transcript Cucsa.002660.1 (locus Cucs a.002660) derived from phytozome v7.0 (chr-ID scaffold0003 3; pos 226584 to 227167 reverse strand)
tatcttcttccgacaacgatacacaaacacacgacgtactttcttctcattcccttttctttttgtttttctctataatctgcatcccattcctcttcgttttcgtcttctccgatgctgaaaatgattgttcatcccttaccattttcttgcttcctctgtttttcttggaattgaaggcttcctatagcttgcttcatacactattctactaatcaaagttctaggtctctgtttatcttttaattaatagttgtttatgttgtcgaggtgagaatagagggactgctgtatttgaagttcaaacggtttatctttatgccgtagggttaaaagttttagttctgacttgtgaactcttgtgtttttagttatgattatgtttaagaacactttggacttgtgaatttgttttcattctttatattcggatcggttaaggattagcattttttgtagtatcgttaatggattggttatcttttctattcgtggtataatttttgtatttctgttttgtatggctcatgagggatttttacttctcaggtacatcctgtttgttctactgtgcctgcttcgat

SEQ ID NO: 62972 - DNA, 1007 bp, Cucumis sativus
  Intron number 2 from transcript Cucsa.011740.1 (locus Cucs a.011740) derived from phytozome v7.0 (chr-ID scaffold0015 4; pos 1052297 to 1053303)
gagggtttaaaaatcctttcagcctcacatttcaggtatttgatttatgttttcttctttttggtttgtttcttgtgatctgtgttctaaaaagtccacagcccactgagtcatgcaccttagtgcgattaagtaggcgcacacaacctttgtgtgactgtctcactttaaataatctcgaggctcccttagtgaagcccacttgaagctctgtctcaaggcttgtgatgtttgcctcaatgcctcgagcttgatttcttactctttcctcttttagtatttaagtaataattatattgatattcctaccatctgttaaaagctctattttgttgagctttttattattattcatcatactaattttcttcatacttcaaacatttacatttttctattgtgcaccccgagctttatttatttcttaaagaacttatttccttcctttgatgcagaattgtataatgcattccgttttcatcttgaagaaagcatgtctttaatatccatatctacttttttttgctgtgaattgcatgtgatgtcttaagcaattcatattgcatgatctttgaagatttaccttctgcactttgcattacttaatgcacagcacagttggtatcttctggtgtttggtccctagcacatatatacatgcgcgcgcacacagatttgtttgggcagaatattttggaaaattgcattagatgacaaaaaaatttagaaagaagcaacccatagcacctcctttttgcatattgcaaatatgacaaatataacaaatatgacaaataattaaatatatcatagggctatccgcttttaaatttgctacttttgcaatttagaaaatgtagtgacataggctctattattgtaaattttttgctatttttgctaacactccgaatattttctccttgagtattatgatatttctctattgattccttttttcttttatgacagccagttggtttgggaaagattgctaaacttataaa

SEQ ID NO: 62973 - DNA, 503 bp, Cucumis sativus
  Intron number 2 from transcript Cucsa.104930.2 (locus Cucs a.104930) derived from phytozome v7.0 (chr-ID scaffold0092 7; pos 3245200 to 3245702 reverse strand)
gcagatgtatgtgaaactgtaaccattttttgacgatttcacttcacattaaaataaagggaaagtttaaatatgctggaattaatgaaagtgaagatgaactcttcaatccttctatctaggtcgctactagaaacttcccaaactagttacaccagaaatgtctttgcattttctgtttattgtttaaattattctcagttgcgccaacaaatgcaatatctgacgctctttttgaacttacttacaattaatctgatctactgtgctgttattttgatggttgttatggttgttgttctatgtttctatacatgagcacctatgtctggttaaatcttgttttactagtcttaagtagactttcgtggttttaatgagattgtacaagcttttatgatccttgttgcaaccttgactttttcttgatgagtttcataatctcccgttctgtgttaggctaagttagttcttttaaatcttgtatcagaatctgccagctg

SEQ ID NO: 62974 - DNA, 578 bp, Cucumis sativus
  Intron number 1 from transcript Cucsa.104930.2 (locus Cucs a.104930) derived from phytozome v7.0 (chr-ID scaffold0092 7; pos 3245802 to 3246379 reverse strand)
acgccttggttgtcccttctgaagattatcaccaggtttaatcaactacctatgctatgctgaattcccaattttgtttctctttttctttatcatcatcggtttatttaaaggaggatctgaattcagccatttgttgttctacttctctagattaatccgaaacgaattatgtctttctaattcgacatttcgctactttctttcatttaatttcgtggttaataatcgttgtctgcatgttgttgcagagtgaatatgtatctgcgagagataaacgccgtgaatttgtttcaggtttcaccgggagtactggtaaatattgtctcttttctttttgttgctacagtggagttcatgatatggtccctaaccttattttatctttagtccgttccaatttagctagaattttacttggcacgtttaatatatagaagaaaattatttctgagtagcgtagttaccatgtttgatcactgttcatggtcactttgatccttgtcaaccgctgatcttttggatcctatttctttcctgaaggtctggcacttgtaactcagacagaagcattattg

SEQ ID NO: 62975 - DNA, 637 bp, Cucumis sativus
  Intron number 1 from transcript Cucsa.098500.1 (locus Cucs a.098500) derived from phytozome v7.0 (chr-ID scaffold0092 3; pos 482537 to 483173)
tcaatccctttacaagtgctaccccaaattaccaggttctctctctttataatgccttattttttttctttacaaatacccttctttcgttgcttataattactagctattaagtgcaagaggaaactaaagcataaggctctgctcttttaacataagcttcatttctaaacaggttttctctttgtaaattatatattagcttgaatagctaaatgcactagatctcactaaaattctactgttaagtgtctttggacgagagcagtgttaagttgatttgagttaccatttataaagtccttgtgtttgaacatttttcttcataaaaaaagtaatagtttgaatagccgagaaagaagagagaaaagtgacttgtatttatattttgaagataaatagaagcaattttccttcatgataaaggagggtattttcttcccaatttacttaagagtaactttcgctttattccttttgatttactgtttatgatccttcgctattctactttattccagctagttgtttgctctttttttccttttgcttctatatttatatacaccaagataaggagagaaaaaagaatggagttgttcatttaattttccaatttcacaggaagaagagcaat

SEQ ID NO: 62976 - DNA, 909 bp, Cucumis sativus
  Intron number 1 from transcript Cucsa.058500.2 (locus Cucs a.058500) derived from phytozome v7.0 (chr-ID scaffold0061 4; pos 656487 to 657395)
gatcttacttgaattgcttccgatttccattttaggtgttctccagtaaccctaggttgagttattttgattttgtttatgatctagttttaattgttgtcgttagcttgttctgattggtgaggaaattttgtcgcattttagaatggtgaaatttgttgtgcattcgatctactgttattggatttataactgttgtaagacttttaaggtgcaatttcaatttctcttttgatctatctcgttgcttgacaactgatatcagaagtgaagtttgatttccagatgggtactcttcatttttaaattgcttacagtatttgcagagaaaatgttttcaagtagaggaatctgtttgacgtatcaacttttaagtcgtttctttaaataatttgtgatattacttgaattgaatcatctggatgacttcggtcgtttccagtttccatttttgtggtagtttgagaaagttgggactttgaattttaattaacttgggggattgataatgcctgggatttgataatgtctttggtcttccactactaaattattttagattgagcaccttccatctttttaggttaagaaaatggtataaaaaaaacattaagatttgaagttattaaacatgaaaaattgtaaattctgtccattgctatgaaaatttatggatccatccttgtggagagcttctgatctcatctctttacctaataggttggattaaatttccacccctttctcttttgttagagtttcaatacgattgttctctacaaaaagaaaagaaaagaaacgctattacttttcataatcaacttatgatgaggttggataagttttacttggtttatttctctaatctacattattttctcatattctctagcaggctgtcaaggtaat

SEQ ID NO: 62977 - DNA, 663 bp, Cucumis sativus
  Intron number 1 from transcript Cucsa.088250.2 (locus Cucs a.088250) derived from phytozome v7.0 (chr-ID scaffold0088 8; pos 633496 to 634158)
tggtcattttctactgttattgcacttggattcaggtgggtttgcaactcaaattgtttcatcaagaaacaaaaacacctgtgtttttcttcttcctattcttgtatggctctgtctaaggaatcaagactgttttgagttgttcttttctgaattgaatttgtccctttcttcttcttgctgtgcgccaactttcttgtgttagttattgcttagaaatacaagtttggccccgttttgcttatacacacaagtgagtttattacatgtgggtgacacttgctacaagtttcttttcagaattgaaaggggatgggaatttgaagttgtgttcataattcagttggctttgatttgtgattacaaacccagttcttttttgttttgaatgaaaggagcctattagatggaatagtttctagagaatgatcaatattttgatgggttccaaaagctgttaactcaactgtaacctccttttgtttttccctgttgtggttcttcaattctgttttttcctctttcctgttattctttctgtgatttgcagttcaattattctgtatgacataccttttttcgaagttgaaagatggatgtattgtctttttcacttctaacacttgtttactattttccatcttttcagtccattttactctt

SEQ ID NO: 62978 - DNA, 490 bp, Cucumis sativus
  Intron number 1 from transcript Cucsa.111230.1 (locus Cucs a.111230) derived from phytozome v7.0 (chr-ID scaffold0095 3; pos 96057 to 96546)
taagcaataaaggtacttcccctcccccaagagaatggtctattttatggctgctttctgctatccaactaacaaatttgaatgtgaagtcgacgtttgcgttttagtatttgttaagttggatggtttgcttgcctgagtgaagggaattcgggggatgtgaaacttttgttcgtaagtaaggaagggagagcttgaagataggttataatgttaaagaattagagcaaactgatttagtcatttcatttaatagttcgtagatcattacacagtacaaacagttaggcttttttgttttctttatgatttaacgctttgaatttgagattgggtgatatttgaatgcttttatttcttttgtttctttctagatctgacgtttatgcctcggtaaattaggattttgttcaatgcgactttatcgagactcatgggagttgataattttttcatttgattcattaaatttctgcccccagaattgaaa

SEQ ID NO: 62979 - DNA, 796 bp, Cucumis sativus
  Intron number 2 from transcript Cucsa.095280.3 (locus Cucs a.095280) derived from phytozome v7.0 (chr-ID scaffold0091 9; pos 1184121 to 1184916 reverse strand)
tggaatatatccaattccttcacgagcaagtcaaggtatgatcttgcttaaagtttgtgatctttttaaattctgatttgggtaccagatacgaatggctatcatgccatgcacatgtcttttctatggcctgtatgatttttccctccgtcaattccttctaattggtcaatggaatatatatctttctcacttccacattttcctctgacattagtcagtacttgcatgcaaagcgttttgagcatcaatcagtggctaaaaaatcactggatctttttagtgtaatttaatgtcagtttggtttgtctctcttcactttttcttctctctctctcccggactttgtttgctgagtattcttccatgcctattttagttttaggtatttagtcattctgttcctttcttccatcacactctccctaatcagcaagggaacattaactgcaagattgaatcaattaatagttgtgcaaccagttatggttctctcttcatatggactattattgtattctatatgtaagagttcttttgtgactactgttcatgtaatcatgtttgactgattttcaaccgttgatttatttaccaagtccatgaaattggtttagtttggatattggaggactagaacagagtaatttgactgaaaaattgtctgccactttcaatgaacttatcaaatactaattgtgtatttgtgcggctagaagtgtaattttatattccctaatgttattttgacgtgatttcaggtgttgagtgcaccatatctccaaagcacacccac

SEQ ID NO: 62980 - DNA, 728 bp, Cucumis sativus
  Intron number 2 from transcript Cucsa.130640.1 (locus Cucs a.130640) derived from phytozome v7.0 (chr-ID scaffold0102 9; pos 709685 to 710412 reverse strand)
tcgtcgactgagggaggaaaacacgattacgattggtaatttcttttgttaaatttatcaacggattcaatgattttcatcttcttttcttctgtttttttttttaaaaaaaaaaattcctgctttggaacttacccgcttttgaggctctctttcatcaattatcaatgaagtagtccatacaactatctatgatttcatctgtatccaaagtattttataggattatcaattatggagatggtgaagaagttcaataacatgtcagcattactaaattctacctgtcaaggaccaattaattgagtttcctagactactatatggatttacttgatctatttatgtgattatttgcgggacccttctctgcattcttttaactttgatgtttctcttttggagtgataatgacaaagaagttaaacatgtattgcaattagaatgatgcaagtacatgttgatgattccttaaaaatatgcatattgacgctatttgaagttgattccagttgttctgatcttacttttaaccggtaaaagtgcgagccactttcttttgagtgaaaaagaacaaaaaaaatgtagatcttgattggtgtttgaaacttttaagtatgatttttagctaagtgggatgcactaagtgaagaatatgattattctgtggttaaattaagctttgtgctacaggcttctcaccccacccggtactcctctttttcctt

SEQ ID NO: 62981 - DNA, 837 bp, Cucumis sativus
  Intron number 3 from transcript Cucsa.099660.1 (locus Cucs a.099660) derived from phytozome v7.0 (chr-ID scaffold0092 6; pos 366982 to 367818 reverse strand)
gagaggtatcacacttgtgtctctttgtggcacattttgcatctaacgattctgtcctattttctaatatgtattttgtcagtaatatccttttattttaatccatctagccatttagttggtaggcgagttcctatcatcaccagtttatagtatcctcactataaaacgtttcagtagtggactaaccacaccgacattatgaaattaaaaaacttaaattgattaatacatgaggactaagatgtttgtatgtatgcattttagccctgaactttttatttttttttaaattttcttcagcagaatatcctatcatctagcctctaagtcaatggaaatgtaaatattgtttagtatatgacattatttatactttgttgttatgactgtggcaatgataacatgtagcaatatcattgcctacatttggtttcttatctattagtcattccaagtgattgtggtttttttttctggttttatcctgcctgtattactataaacttattttgctagttatgccctggctgtaattgttaagatacttgaagtagatagatggttaaacaaaatttattgcacctgaattgaaggctgaggacttatgtcattagaggttttccttgatgaagttatgttctatccacgattttagtttcttcctcccattacacctagtggaaaaaaattccatcacttagttgtgggattcttgtcatactctcggttctaattttgttttctttataagttttatgcattcagaagttcatgcacctattgaccaactcaaatgcttgcaggagcaagatacgggaaatagaatcagcacca

SEQ ID NO: 62982 - DNA, 551 bp, Cucumis sativus
  Intron number 1 from transcript Cucsa.099660.1 (locus Cucs a.099660) derived from phytozome v7.0 (chr-ID scaffold0092 6; pos 368033 to 368583 reverse strand)
ccttgaatcttctctttatcttctccgtctttcaggtaacagctttcgattcctctccccgagtatttacttcttctttcttttttttctctgtattctttttagttgaaatgtggtactgaattgatccttctcattcggtactgtagcgattgttagctgaatttctcgtagacattgacggtgtcttgtaattacttttctagcagttttcggagtagtttgctgttgattgatgccgattgttttggatactttttggaatttatattttcttttacttttgtttctgtttttagatttgattgttccttactgaattgaaccacactgttggctctgatcttaagtttgttattctattgtgtcgtaatcttttcgtaatagtgtttctctgattgtgtctttattttctgaatttaaaagaattcattcacatgattagatcgtagctagctgtcattgtatatctatttccgttttccagatagatgcagtttaagcctaattttcgatgcaggttgtatcactcgttggtcttattggagtgg

SEQ ID NO: 62983 - DNA, 767 bp, Cucumis sativus
  Intron number 2 from transcript Cucsa.098590.2 (locus Cucs a.098590) derived from phytozome v7.0 (chr-ID scaffold0092 3; pos 525757 to 526523 reverse strand)
caccatactccattgaggagcaatatctgttttaggtaaggactttcagaatcccttcagtaccccccaccccccatatttttaacccataaaccattctcgaattagaaattttaatagttaaggtgaacttgaaagttgaatgccaagccatatttttcgtaattaaaagtccactatagatagttataggtcattctactcactttgtcagtcaccacttttgtgtcccccccaagggcggcagccccggcccctttggcaaagccttgcagtttttgagctattcctgctcaaaggttgtgttttggaacactcaggtgggcttaaaaagataaactcttgatgtctctcggcttcaggccttgggggggtagtgaaggtgggtcctcaatactaggttatagaagaaattgtgactaaagtagataggccatgccatgccaattttctgtgtcatgtttgttggttagtaactgtatcatgttgcttgttgccaatatacttgggaaatgtttgtgctgaaagtagacaattctgttcttttaatattgagatgatttctaacttcttaagtgttaaattctattaattcagtcatttagctggcctttccttgatgtttctctagtgtacatggaaatccttgtatcattgtaaacaagggtgttgtgcttgaagtttttctgatgtgcatgggtatccttgtataattccttgtcccacaaactcatggaacttattttcagcgtagggactcctcgatt

SEQ ID NO: 62984 - DNA, 960 bp, Cucumis sativus
  Intron number 2 from transcript Cucsa.034580.1 (locus Cucs a.034580) derived from phytozome v7.0 (chr-ID scaffold0044 4; pos 401759 to 402718 reverse strand)
ctccagaaacattgagttggaccttgaacttaaaggtacgtttttttaaaatttctaattgttttttattgagaatagatagatttatttcaaattattcgttctggctatcttgtagttatagtagctttagttaaacctagattttgcattttgatgattggttctggctaccatgtagttatggtagccttcagttgaacttagtttttgcatccttagaggttgggttgttatggggtagtttgatcatggagtgagtttgaggggagcttaaacgtcactttgaaggtctcaatgtaattgttacgttgggtggcacgccaaagtgagtttttgtgtaaggagtcaaggtttagcgattatgttgttgttacatttgtggaaagtgaagtatagaggttgggttgttatgggatagttttatcatggagcgggtttgaggggggcttaaacatcctttttaaggtctcaatgtcaatgttaccttgggtgggcacgccgcacgccgcaattagtttttttgtaagcagtaaaggtattctattgttgttagtgttacatttgtacaaagagacaaagttgtttcattgggttcttatggggtaggttgatgtttgagtgagtttgttgggttgttatggaatggtaggttgatcatgggagttagtttgatcattgctagtgaaaaagttttggtttttggcatacatgtgaataaatatcatataaatttctaattacatcattaccttgcaaagttttataatttaaacactggatgttcttttggttaagatttagactatcatgttgttctaaattcttcttggattaaattttagtgttctagaattgtccctaatatttgctcattctctctctaaataagtaactaataaatattgtttttctcctctcacaggattcaacaactttccaagtttcaacaaattagag

SEQ ID NO: 62985 - DNA, 582 bp, Cucumis sativus
  Intron number 1 from transcript Cucsa.034580.1 (locus Cucs a.034580) derived from phytozome v7.0 (chr-ID scaffold0044 4; pos 402785 to 403366 reverse strand)
caactcagcaacttgtcggcagattcctcttgttggttagtctccattatcctttttatggtttcctcttgtgattctggtaagtgaggtgatttttcatagatgggattaagtgggttttggttttcttttcttacaaagtttgtactactttgaatttcaaaattttgacaatgggattgagggtttttgttctatttgattgagacctagttagtacatcgattgattgtttttttttttgttgttgttgttgtattggttcttttttaagagaaattgaagaagaagaagaataagaaacaagaagaagttaacattcgaaagttgtatgaaccaaacttttgaagtagtttcaaatcttgcttgcataaatttatgtgtatagaaagggccctttttgcatggacacttagaaatcttgctcgaatcctcatactttgttcgatataatgatttcctaatgaaaagatgcaattaaatattctttggtatatctgtaaagctttacaccatccctagctttgttcgaacacttagaaattttgttgagtgaaggagtagagagattgaagcgtttag

SEQ ID NO: 62986 - DNA, 768 bp, Cucumis sativus
  Intron number 1 from transcript Cucsa.106490.1 (locus Cucs a.106490) derived from phytozome v7.0 (chr-ID scaffold0093 0; pos 88286 to 89053)
ggcctagaggcccaaaggtaaatcaatataccataatgaactaatatattaataactacacattaaaactataatatccaccgtagattattattgattaaacacttgtatttacttattattttcgtgcatggaagatcttagtattacttatttttttcaataaatagatttgaacccattaaaaaaaatatgggatttccatctcaaaagtaatcaatataatgtgatggcgagatctctttactagattttcaaagttattttcgagtatgtatttttcatcaaacatatttaattactcaaaattaatttatattctaaaaagtaattcgtatattttgaatcgttaaaggtatattaattcaaaatatgacagtaattacactttcaaaataaacttgtagactagcttaattttagtgttgtcacgtctattatcactcaaaaccattattggtaatctttctaaaattaaatgggataatatcaatgttgtattgaccaatgttaagatggttttgaagcgcaattaattatattgattaacacattggaatcagacatttgaatctcgagtagatttatataatcaatgtcatgttctctttttctccctttttggaaaggaaacaaattcttttgttattattattgttttaatttttatactcttaacttcaaaatacaaattcaaaacattcgagtatttgtttttatttaataacacattatttgtttgtgaatgaatttctgagtacagtcgct

SEQ ID NO: 62987 - DNA, 789 bp, Cucumis sativus
  Intron number 1 from transcript Cucsa.045520.1 (locus Cucs a.045520) derived from phytozome v7.0 (chr-ID scaffold0054 2; pos 1385130 to 1385918)
ggccttgctatctccaacttcgtctccgaaacctggtacacttatggggaaaaattgatgtcatgaataaaaattactacttttgtttttgtgcgtgtttgacttttagataatgtagtttttacgattaagtttgaattcagatttctttatcctttcttctctcatctaattgaatcggaattatgaatttgtggttgagttaaattgtatttctaacaaaaattaatcatcatttaggtaagttatattttttggttttggttttttttttcaactaatattttaaacggatttgcttttcgaaacaaaggatttagtactgtgaccaaaaaaaaaaaagaaaaaaaaacttgaatcttggtcatttctgttgatggccaatggatttcaacccaaattcataattcaaggcttagcttctagccaaaatttatgaattatggtttgaatgtttggtcttaattttagatgtaatctcatttaaaggcatatttagatggactccctaaatacttaaaatagtgatgtaggttaaaaaaaaagaagaagtatttttaagattttacaaaggtcagctagacccctaatttacaattgcattggtaagtagcagtgatactctattttaatactcacaattatcatactttgacatattatttttttatgtttttgtttgtttgtttgttcttccttaacttgtagttgattttctgaacttggatttagctttttggtcttcttgtatcaggaaataacgacaatactggtagaactaaaactatt

SEQ ID NO: 62988 - DNA, 594 bp, Cucumis sativus
  Intron number 1 from transcript Cucsa.029560.1 (locus Cucs a.029560) derived from phytozome v7.0 (chr-ID scaffold0039 7; pos 203630 to 204223)
ggtgtacagttcaggtcgtctttattttcatatcatatcatctccttcttgaatattgaatcttggatcaaattgttttgtttctttcttaattaggctttagctaaatcacttcaaatattatttggagttattctgtttttctccatatcagtttctttagaccttttttactataattttttgtacccaatatttcattaatataaaataaaacatattatctagattctcgcaataaacttggagaacatatgagaataagtttctcaatgttggaactaatttgagaatttatatattggatgtaagttctaacaaagaactacagtttcttgggtagcgtgttttaagtttcaatctttaatttggattagtttaatcaggaaaatccttttgaccaaaacatttgctcaccatgaatttaactggaatttctcttccaaacttttgagctcttcttctctagagtgaagaaaatttgctgaccatgaatttgagttaagcttagttatgctatattaattgaaatttggcatatttatgtttcattttgtagtctttggggcggctctgttctcaatttaggaacca

SEQ ID NO: 62989 - DNA, 577 bp, Cucumis sativus
  Intron number 1 from transcript Cucsa.072680.2 (locus Cucs a.072680) derived from phytozome v7.0 (chr-ID scaffold0076 5; pos 146698 to 147274 reverse strand)
ggcaaaaagctcgtttaagttggagcatcccctgggttagttttttctttgctcctacacaaatcgagggtcatattttgtgatttctatcaatttttttgggggatttttcttagttttatacgtccagtttgattacatcgattgattgcttgtagtcgaaatgattcagctcacgctttgttactttttatttttatttttttttatttttattatggcttcctccaatggttgaattttgatgtgagtatcaagacttcaattttaattgtgattttaaatcactttgaattttgatatgattaatgttttacatatgggtttgatggatgagattcaatccaaattcttatgttttatgatgaacaacatgagattaaaacaaccaataaactaatatgtggggtttttctgttggttagaatgtttattataatcaactatatcaagtgcaaattaccatggcctgatattcatacgcatgaacaaacacttttgaaattaacttgaattttgaattgacattctgaacattccagaaaggagacaggttgaatctgctaggatccgggag

SEQ ID NO: 62990 - DNA, 1064 bp, Cucumis sativus
  Intron number 1 from transcript Cucsa.108290.1 (locus Cucs a.108290) derived from phytozome v7.0 (chr-ID scaffold0093 1; pos 466233 to 467296)
acgagcttgtcgatttcacacttcacattttggaggtaatgcccttattaagttatttgtaatttctccaagttcctccccattttacaatttgaatgtgtttggagctttgattgctgctcggatcttggtttttccattatttgtaattccggttttgttagttgtaaacaaggtgctgtttgaattcatggaactggacgtcgaaggtttatacttttgcctttacttcaattactctcagatattctattcagcatgtggacaaactgaatatgtgttatgttaggtctcttttatatgatattcaaacatctaatattagagtaaaatagtttttagaatttggttgagaattcgaatatttctttaggagtgaagaaaaccatagtaaagaagatgtgaggaaacaagtataattttcaagaaacaaaaaataaaaaatgaaaacagtaaccatttagtttttgccattttagctctttggtttcaaatattaagtctatttcttctcaatatattacaactttttgtagcctttttaagttaaagagttggaactcttagccagatacataaacaaagccaagattttaaagaactatttgaaaacattggtaaaatgtacataacaaaacaagaagtttagaggtggaaaaggtgtatagggttaattttcgaaaaactataaagcagatcgttgccaaacaggaccaaaatcatcatcaaacatgaccttaaaagtcagggatatcaaaattgtatgtctattttccactgatgactttcttgaactctccccaaacaatgaccaactgtttctccctttcgtttgaggttgactgaaaactcggtaaatgttttgttgcttttttgttcttggacaatttgaagattgaaaatggactgtaattcagtttactacttcaaatcattcttttcttttctctgaaggccaagttccaacttccggagtcgtaagtcgttattttgctgctcaagattgtaacgtattccttcttcttacaggtgaaactaagcgcaagtttgaaagtgtacactca

SEQ ID NO: 62991 - DNA, 348 bp, Cucumis sativus
  Intron number 1 from transcript Cucsa.112860.1 (locus Cucs a.112860) derived from phytozome v7.0 (chr-ID scaffold0095 3; pos 1232363 to 1232710 reverse strand)
gcggccccgacgcttctggtacttcaggtatgttttgaagaccgtcatcaaaacatatatgcatgcatctccaaccttttcatttatttatttgtttattttgtgttctatagtctttgtaaactttgttttttctattttgtattttgtaggtttcttccaagatcttacaaaaaatgtagaataaacttggatttattattacgtacacacaaaataataagattaatcagtaactaatggattatacgtctagtttgaaattttgtgattactaactgaacgaactaagtgattgttggagatgtttgtatattgaatattgttattgtgttttgtaggtggagc

SEQ ID NO: 62992 - DNA, 313 bp, Cucumis sativus
  Intron number 2 from transcript Cucsa.076270.1 (locus Cucs a.076270) derived from phytozome v7.0 (chr-ID scaffold0078 9; pos 684937 to 685249)
cgatatcatcatttttcccgtttctgtacttcgtaagtttgcgatttcatggagtaggatatgacggagaagactgaatcatttccgtttaagatatttaggaaccgatcgtaaataaatcaaaacaaaagtcattatttgaaggagttttctagtaaatctgttaattggtgttgtaatatttcaaacctcatgattacttacatgctcctgttgttcgtcaccaacaagtttttgtaccattcttttctttttgtttcttatctggttaccccaatctttatgcaggttcgggattttaatattgcagaaa

SEQ ID NO: 62993 - DNA, 653 bp, Cucumis sativus
  Intron number 2 from transcript Cucsa.132540.2 (locus Cucs a.132540) derived from phytozome v7.0 (chr-ID scaffold0103 7; pos 458266 to 458918)
gctatcaggtcgtgtttatttcctttcctgcaatgtaactgttaacttatttagtgttcctattcatgaatttctatggcatagaaagaaacaatcaacaattttttttttaacataaagggttggtgtggtctcaatgttgaataaggcattagttactacgtggatagaagtttgggtttgtccttgaactgcccgcaaaatcgtgtgagaaataagtcgacctggatataagaatcttagtgttatggaacatttctattgtcagtcttttcctccagatgtcttgatattgcggtggattggtggtatatgagagaatataggttatacttcttcgttgagtgatttggggtttagatgtttgtgtttcatggtttatttggttgcctgatactaatttctattcagaaacttattttctaaccattatgtaggtcgcacttattttctttctagaatatcaactttctagctaatgtttgaggcattcttttccaatcaaaaaactgttcaaaattaaactgatattcagtcagtacaacaaataacataaagggttggtgtggtctcaatgttgaataaggcatttagttgccatctggtgatcagcatactgattgcaactatatggacttaattgcagacaaccc

SEQ ID NO: 62994 - DNA, 433 bp, Cucumis sativus
  Intron number 3 from transcript Cucsa.132540.2 (locus Cucs a.132540) derived from phytozome v7.0 (chr-ID scaffold0103 7; pos 459006 to 459438)
ggagaagtcctttacactggtagtagtttttgacaatacttcaaattgttaaaatggtactggtattaactgttatccacatttgtggacacatgatgcttattgatgtggttttttttcttagtattgtgccattatcattagatcttacgatttggttttatgtctctcatcctatttatttagttgctgtaattttgtgagcaatccctattttgatgtggtcccaaaaaatttgccccattttacacagttgcttctattttctaacccaaatctatgagtgccgttctttcattaaaataaataaacgagtgttgtcctgaaaaagtcttttgatatgttttcttaagaaattctttttaacaattataagtcttctttgttgattcttttagggctgcatacaaaggttttgctgattgtatacgac

SEQ ID NO: 62995 - DNA, 302 bp, Cucumis sativus
  Intron number 1 from transcript Cucsa.098130.2 (locus Cucs a.098130) derived from phytozome v7.0 (chr-ID scaffold0092 3; pos 242069 to 242370)
gaagactctgaggtgattttccttttaatcgctgctatttcttcttccttttctgattcttgaaaccactgcccttgccgcttttttaactaactttctttctgatgttttccctttttgtgttgggttttgtttttttctttgatttgtggcttttttaaggggaatgtgtaactggggttgattttgatcttattgaaattttttttactgctctttaatgggttgttcgtggtttgtttagtttgattttgtaatgggttttgcttgttttcagaaattgactgccttgaagaaggctt

SEQ ID NO: 62996 - DNA, 641 bp, Cucumis sativus
  Intron number 1 from transcript Cucsa.104330.1 (locus Cucs a.104330) derived from phytozome v7.0 (chr-ID scaffold0092 7; pos 2886560 to 2887200 reverse strand)
gtaatctccaaaacgggtccaatggttcgtcggatgatggatcttttgagtcgtttcttgatgggtttggtttgattgagaatcaatgtttagaagaggtgctgggatttcctaatgatttcgattcggaatcagaatggaaattttgtggtttttgatgttagtatctgtctgtacatgtggaaaattctttgcatagatatttgtactctttatcagtttgaatttaattcatttacctcttcattggtattagatttgggaagtgttttatcagttcgaatttgattaatttacccccatctccctcattactattagttttgtccatattcaaacttgattgttggaagtattactctgtctgaaagttacaaatggtaataactaaatagtcattgaagcattaaagattatcattgggttgagatgatctgtcgataagacaggaaattgctaagaagctctctatctctcagctcaagtctgaagtcattgtttaattagaaagaaaaataattaaataataaggtgcagtttagactatactatatatttgtttttattacatcccatccatttaatcaatagttttgtctcaaacttctcactttatttttagatctatatacttggaagcc

SEQ ID NO: 62997 - DNA, 990 bp, Cucumis sativus
  Intron number 2 from transcript Cucsa.133570.1 (locus Cucs a.133570) derived from phytozome v7.0 (chr-ID scaffold0103 7; pos 1267997 to 1268986 reverse strand)
tggtacgcatgtctactgatatatgggacttatttttataccagcattactataagaactaaatcctggcacatgaaatggattttgagctattgatggattatccattcccaaattcaaatatagacacacacatttataaatttatggatatgtattttgagcttttgatacatttccagaataaacatttttatatattttctagttactcaaatccacacttgttactttggttttctataacttggtatactcatcttattagttaagaacaaggaacaattgtaacccttgagaacttgcccactgagctattttgattattgtatctttcctgaaaagtggttgattcagtttgagtttgttcagcatatgacttcaactcgaagtagaattaaccgaaccatggtttgaaatttcgtgcctttgttttcaagtctttcaactttatttttgccagcactgctgtcttgttacatatcagtgtttttttttcatacaaaaggatattcatgcattgacatgtttaatgcaataaacgaaaggttaggcgggtgtatacaatattaaaagtgatgtgcatatcgtggttcactcttcttttttcgctgtattttcccttttgtcttgtcttttagtttcttacattttgtagtctgttaattttcttgtatttattatcttttcttcataattgaaacaattcttcccccctacccaccccaccctcctacccgaaaaataaaaggaaatgtggtgaagattatcaagacggcattttgtaaagacaaaaaccaactttctacagtcactatttcatttaccacactatttaaattttctggcagtgtttgcccaaagaactgccataatgagtgattttgcagtttcataacttttgcgaatgattcattgtgtcatccagtttccgtcggttgtttcactcaggtgtcttataatacctctaatttcccattttgaagatac

SEQ ID NO: 62998 - DNA, 505 bp, Cucumis sativus
  Intron number 1 from transcript Cucsa.133570.1 (locus Cucs a.133570) derived from phytozome v7.0 (chr-ID scaffold0103 7; pos 1269197 to 1269701 reverse strand)
ctaagtttcgccccataacgcttgaacgccccaaggtatattcctaaaaaccagaagtgtttctttggaatcatatttgacattcatttcttactacgtgtccataattgggctagtagtttgattttagttgtgaaaagtatgaccttctattcgggggtgtttaaaaaaacccctgttttaagcttctgtattggcaataatatcaagttaaatgcaattgaaattgtcacttagctgtatatttacttgctgtacaaattttttaagcggttgacaaaacttaaaactttagaggtagaagaatagctctgctaatcatccactgtactgtcatgcttcatattttagaggcagtttgcagtaaggtggttggatagaagatcgtgtatgaaggccttaattaagctagaacgtttttgaagcattgaaagttgcacgatgtttttcgttccattgattaatctgttatttttttgtctaaaggtattattgccgctggtaa

SEQ ID NO: 62999 - DNA, 659 bp, Cucumis sativus
  Intron number 1 from transcript Cucsa.100890.5 (locus Cucs a.100890) derived from phytozome v7.0 (chr-ID scaffold0092 7; pos 177985 to 178643 reverse strand)
tctgctcaagaacagcttcaatttggagcttacaggtgggtttctaatttggaaggtttttgactccgatcggcacttgattctgttgtactttcgtatacttattttggggttttcagaatttggagtttgtggagaacttttaggttgttggcttcagacgaattatcatctactggttcttgattatttgatttgagatcctatcatgaaccggaaggatttaattcccctgtttaattgattattcccctgtttctgtagttttctgctgaagaagatggaatattctactgagagttttgaatgaaattcagcgagttttccaatctttttggccctgttgggatcttaatctctccttccctgagttcttttttgatttctgaaactgggcctttgattgattatacctatgctttgatatcttagtaactctagatttgttctgtttcttgtttagttctgtgtgcttagcagtctatctcactgtttatttgtcggtgaaatggagaattttgatggctgatatgaatagtttctgttttaaacttgttacgaaaagctgggatcagctggacgtttttctaacattttcaaatcaacttctgactgcttcataaggtttctttcaactgggaacgaaaagaatttacagt

SEQ ID NO: 63000 - DNA, 623 bp, Cucumis sativus
  Intron number 4 from transcript Cucsa.056050.1 (locus Cucs a.056050) derived from phytozome v7.0 (chr-ID scaffold0060 2; pos 255723 to 256345)
gccttgcatcatctcttcgcgtaaatattcgagcagtaagatgaaaaccttctggaattgttgaacattcctcgatcctttacccgctctttcaaattctcctactccatttgacctcgaagtgtttgtgtatatccgttttcctttctgtaatctgttttcaaattttttgctggattctggtagttaaagaatatttgaaaagaagcttgatatcagaacacttgtaaataagatcaaactcctacaatattattcctctctattttatatgttacttcctgtgtttcttacctaggagaaaagtgctagaaaatatattgataggatcgaacttaatctaatctatctctttattaaaatttcggtttcagctgtagtagtatgcctgtgcttgtttcggcaattttgcctcgtttaaacagtgtatatgtatatacattcctcattgctcttctgacaacttgattccactgaaatcctcattgctagactggtatttcatattggaagttacttacagcgctaatttttcttaatcgcatttacttttcttgagttctttctggtcatgagttcatatagaattgtggaaattttgtttcaataataggttgcacaat

SEQ ID NO: 63001 - DNA, 662 bp, Cucumis sativus
  Intron number 2 from transcript Cucsa.001310.1 (locus Cucs a.001310) derived from phytozome v7.0 (chr-ID scaffold0002 0; pos 38455 to 39116)
ttcctttagcgaccaccgatccctggaagattcaggtgctttttcttcttaatatgaacgattttttacttcacatgtcagtttctgcatttcttatttttctagctgcagtaggaggttctttgattttgttgcaatttttgtagattttattgttttggaatgtaagtgttacgtgatctgattgagatcaacttacgtagtttcactaccatagtttccctaccatagtttcccgtgctttttgactttcttggctgggaattggagttagtgtgctgagtcgagtgctaggttgacatagtgggaaagagatcaaatgtgctgaatgttgattttttctttactttgtattttataatcatggagtttcgatattttcctttctgtaattagctttgactggggtccttttgtttgaccttcttttgttttcttctcccctgattttttattatttcattttctctccagttttgaaaaaaccagtatctttttgtttctagttgcttgtattccgaagtatattcatttttattgatatttagattcttattggccttcggatttgtatattgcatgtgctacgttaatgttgctgatatacatctcttgtattatgagcagggttgggcggcacagagttgaatttcttgtatttt

SEQ ID NO: 63002 - DNA, 334 bp, Cucumis sativus
  Intron number 1 from transcript Cucsa.017950.1 (locus Cucs a.017950) derived from phytozome v7.0 (chr-ID scaffold0025 2; pos 219315 to 219648 reverse strand)
tagggtttttcacttctcttcttttgtctattctggtaacgttaactctactttcttgcttttcacctgttcttcagtattgagtttttattttgagatctgtgttgctactcttttcattttgattgaaactcctctttttttcacacatgggtttgcactttactggacttgaagttgagtatcagctgtatcgtgtttcttttactttcatttcatgtgtttttgaacttttcttttttcttttccccaggcactaaattctctattattgttgttaatttgtttggtttttaagcttggacttcctttttcccccattacagagtggctt

SEQ ID NO: 63003 - DNA, 635 bp, Cucumis sativus
  Intron number 2 from transcript Cucsa.129380.1 (locus Cucs a.129380) derived from phytozome v7.0 (chr-ID scaffold0102 8; pos 341581 to 342215 reverse strand)
cttcatcccaaggattactagtgtcccaactccaagtaagccatgtaattcttttttttttttgataaagatggaatgtgtttttggtattttaaattggatgtaaggttgctaagctgttgactagaaaaatactttgaaatgaatattgccttctctgcaacattcaagtgaaacattgattttattttctaacactaattagagagtgctgtactgtgtacaaagttgatgttttatcaaattttgatcattattgttcactttatgctagttcctactattgaaaattgaaaaagacagttctttgaccatcttgagattatccaaaaactttcttgcatttttatgttagtttaattatagcaggggaattctgtgtagcatccccaatatttctgcaaatctaccttcacaatgtaaccttgaacaaatttacattgtgttcatttttatatttttaaatttcttatgtaatttgtttttatgatggtgttgactaatacatgtaggatgcacatatgacacaaattctttattcttcatttaatgcaaaacggtcatcaaattttcctcatacattcttgtggctaacgctagactttgcctagattgcatattcaagctatatacca

SEQ ID NO: 63004 - DNA, 601 bp, Cucumis sativus
  Intron number 1 from transcript Cucsa.129380.1 (locus Cucs a.129380) derived from phytozome v7.0 (chr-ID scaffold0102 8; pos 342397 to 342997 reverse strand)
tgggcatctctaacgggaaattctgcctgtggagggtactgtttcattttctcacccttttttttttttgtatttgcttcttgctgagaggaacttaactgggttgtttttattttttattttcgttgaggatttcatgcagctgggacttgtttttctgttttggttttaattcgtgaattgggaattcctcatttgttgttatttttggtggggttttattgtaagactaacttctgtttgattcttttttgtattctctagtttgtaagtgagattaaagagtttgagtagtacagatgctctaaattagtggaagttccttctggtttgtgatttgttttcctgtttcgagcttgttaattcttgtgatcctagttttgttactttctttgaatttctttgttatttttctgcttcttcttcttgtagtagtagagggaggtttttccccaacatacaatgttatacaaggtatctaatttgatatcttagatagaaggtccaccaaatacgagtcattttgaattattattccatttttgttgttaatgatttgtgtacttaactgaattgctttccccattgcttaggaggtttg

SEQ ID NO: 63005 - DNA, 875 bp, Cucumis sativus
  Intron number 1 from transcript Cucsa.008910.1 (locus Cucs a.008910) derived from phytozome v7.0 (chr-ID scaffold0012 2; pos 39464 to 40338 reverse strand)
gccttctggcaatcatcacttctggtaattattacttatggtatttgatattcttatatgtttttctttctatataatctttgatttttttctttgttttttttttttttaattgttcttcatcccattgattcattcatcatataatatatatttaagttcaattgttcttgttaaattaaagttctctattttgggactaaatttatatatatataaaaaaaaaaaactctcttgattttgctgatcaaaatattaatttctagccgtgtgtaaattatgttgttcttatttatttatcatagaatctttactcttttactgtttttccagctaatgttagagtatatttacatctttaataatttttaaactaaatatacactcatgattttctattctggaaaatcaattaagatcatgtttaataaccattattttaaagtttgcttttaatttttttttcaaaatttattcttgatttctttcaaattcttaaccatgtgatcattttcaattgatactaaaataaatatttaaattcttaatcaaaatttaaaaacaaaaattagtttttaaaatctaatttttgagtttttcaaagtgttgccagtagaaagtagactaaacaatacagatcagtgaagtgaaagtagggtttgaaagttgaattttcaaaacaaaacacaataaaaagacaaaaaaatagaaaggaaaaaaaagagttaatatatatatttgtaaagaatttctcatatgccattttgtaaaattttcttttattcctatgtgggtttattgaatttgtacataaatgaaaataaatttgtatttggacagtgaaaaattatttgcatactcaaagaagatatcag

SEQ ID NO: 63006 - DNA, 1006 bp, Cucumis sativus
  Intron number 1 from transcript Cucsa.125540.2 (locus Cucs a.125540) derived from phytozome v7.0 (chr-ID scaffold0100 4; pos 278860 to 279865 reverse strand)
ctcttggctatctctgcaaagcttctagacctgaggtattaacttctgttttgattctttagtgtagtattcttcaatttggatttttaacctttgggttggatttatctagtgtaaagatgttggatggattattatacttccagctagtccctgtccttcatcgtttttacttgaatcttctatcctatctcagttgtttgtaaacaacaatgaacttaattcttaagctctgcttgagatatacatattaatacttttgttatacgatacatacatcaaattcaatttctacttctctatctgacttgaagagtatgtgtgggatatgggccatatggggaacttcatattgggttttttctaatttaatccctcgggttttccgaccaatgcatgtgttaataaataaaataaaggtaaaaaacaaaacatatatagcaaggagagaaacggtcgcaaaaaaaaaaatagtgaggagaaaaatctcgagttgcactaagctattggctagtagcttagccgtttcctagtgctcccccatttttcagattagagtgccatctttgtaaatgacgtagaaaggagttaaatgaggtggaaccaacttttaaagtagcttaaaataccattttggctctcatattttgatgtttctcgaatcttagtccctattttagtctttaatacttttattaaatcttaatttagttcctcaaagttaaaatttacagatattgattaaatactaataacaattaacatgcaagaaaatacaactgagcatatattttcaagatttatagtcaaaatgttatagataacaaaaatatttttaaaagataaaatatacgaactaagatttaaaattttggtggctaaaataaaattttagctttttaacttttaagtattgcatcagtgcagtgttgggttcagtgagtgacctaatttttggtgcaaaatttcaggtagaagttgaagcactggtgattcaaggcccaaa

SEQ ID NO: 63007 - DNA, 865 bp, Cucumis sativus
  Intron number 1 from transcript Cucsa.075970.1 (locus Cucs a.075970) derived from phytozome v7.0 (chr-ID scaffold0078 9; pos 486160 to 487024)
cgggaggagaaattctagcgttggtattttcctttcttgtgttcttaatttcttcaacctgtgaattcaattcatgaagctttcttctgttttctgactgcatgtttgtgttggacgatctcatctctcttctctttttcttcggattcgatttttcatcgtaaaatggtgcagagtcgagtcggagaattctttatcaatttctctgctcacggtattaacgtcactggaaatccgcatctatggaatataaatggttagatcgggttagagatctgccaaacactgcaaaactttctcattttttttcgtgtcgtcttcggaggaagatgttgcatcttatctcctttcatgctgctgcgaggttttctttgaatttgtttttctttttgcttagagtgaggcctgttttgcttgcatgtgacttccagaatttcaaattactccctgttttttcatctatgcttcgtatcatctttatagttgtcagaattctgagtttgatgttgaattatttgattttgataagacattgatgctttataatggacatgatttcactataaacccccttaaagtaacctgactactgattaacagtacccacctcagtttattttgttcaaacagtagttggtgttgcaagaatttttcacctgatactgttttggattgatgaaaagatgtatcatgtttgtcaaacgcttttggtttttgtggtgctttcttcagttttaaatcctgagtctggctcatttgattaagatgtatgttcaacagctaaatttaacataaaatgttgaggttttgtgtctcccttcaatttgtttgtttgcttgctttttggcagaaacttgtgaagtca

SEQ ID NO: 63008 - DNA, 571 bp, Cucumis sativus
  Intron number 3 from transcript Cucsa.090080.1 (locus Cucs a.090080) derived from phytozome v7.0 (chr-ID scaffold0089 4; pos 1491008 to 1491578)
ctgaacttgatttggtatgtcttcttgcatcgtttgttgttaaaataattgtttgtctatgaattccaaagaaccttgcaccaaaatttaatcgccttttgaggaaacattgtatagttcatatttcttttactaaaaaatggaattaaaagcatataataataaactattcgaaaaattatagatataagttatagcctttcatccatagctagaagaaccatcgcatagtgaatggatttcatttcacagctgtgcattaggccaattttactgtttgctctgatattaaattgtaatttccttctcctatttgtcaacacgagacttggataaatgctggataatgccttgttattaagatatatgattaaaagtttcttagaacctttgagttgtctggatgctcctggtgcaataaacgatgctcatttcacattctgttttttacttcttaacttggataaagaaggtcgggggctaatatttttcctggaatcctaatattttcgttgctttatgtaaggtttagctaattctttttattccgttcaggttgtagtatcccctg

SEQ ID NO: 63009 - DNA, 652 bp, Cucumis sativus
  Intron number 2 from transcript Cucsa.074580.3 (locus Cucs a.074580) derived from phytozome v7.0 (chr-ID scaffold0078 5; pos 403728 to 404379)
tgaagaaagctctcaaggtaacatacaatactgtgcttcttcattgatgtaacatacaatactgtgcttcttcattgatgtagtacatatggtaaaaattgaatcagaaaactaatcagtggtaaaatagggtcattctgttagacccccgattctgcacacaaataaaagaaggggtaaaaaggggaatgcacagtaccaaggagagaatagcgcctgagggctcactgtgaagtgtgaagggagtataaattgggaatgtttttggggattgggtttcttaggtattgattttggttaaaagttgttggtcctttcggatattccagccttctcgaaggagctgagttatttttattgaattcctgttgcttttatttcttgtatttctgttaatggttggctgttaaacattttattttgatatcaatatattgaggtgagtactgtctctgttttcgcccttgttgaggtttttctgagtttcagatttagaatcttaacacattctttccttgaccattgggttatgttgtttatttttgtttgtgtttgtctttctcgtttgactatattcagtagttgggacattgacatattataaacttctaatttgacttatttttgtttgcctaatttcagctggcagttg

SEQ ID NO: 63010 - DNA, 822 bp, Cucumis sativus
  Intron number 3 from transcript Cucsa.074580.3 (locus Cucs a.074580) derived from phytozome v7.0 (chr-ID scaffold0078 5; pos 404431 to 405252)
gtttagcaatatacacaactctaattgaaggcaaggtacacaaaagcatcgctccatttgacttgggaacctggtgtacatcatctattgcaatattgattgaaattaaagaagaagataacaagcctttgatttatgaagtatggttgaaacatatataagatacttatgatatttataggcctcaaaatggtgtttgttctttcaaaacaagagaatagataatgaaacagacatgcatcgtcattaatgttttttcattcttttaaagcagcaagtgcttcaataatgcttgataagtcatcacattgtatcatactaatgagtttaacctctagtctgtatgaatgtgtgttgtagtgtttaatgcttattgaagacattactctgcataaaatgaaatgtcaatgcttcataaaatttgatcatggcgattgtaactttttttcgtctgtctctctagcagtccaattctttgtaggtcatttcttgaagtcttgtaatatctttggtttgataaatgtgtccttcagcttactgtcctggtaaacagtacgttgtgggggtgattttatggctagatagtaagtagaatagtagttaggaattaaagttgcgaaatattgctattgagacctcatttaaactttttatcccattattttatttttcatctgtgcatttatccatttctcctttcatgtaatctctcatgcttaggttttggttgattttattgggcagttcagaaactagatgaacaatgtaacatttctttggttttcagggtggactgcaaactctcctccaaagcattaagga

SEQ ID NO: 63011 - DNA, 807 bp, Cucumis sativus
  Intron number 4 from transcript Cucsa.102510.1 (locus Cucs a.102510) derived from phytozome v7.0 (chr-ID scaffold0092 7; pos 1521461 to 1522267)
ccaatcaggaagatacggtcaccagtcaactaaacgtgagttctcattcgtccattgccatcttcctcaagatcttccgctttccatggtttcattttagaatgaagaatctaccattttcccttaatacaaactttacaacgattttccatttctatattccgcctccctctttcgctctctaaattagatacctaactctttacacttttttccatccaatcaaggatttttttttccatttacttatttggactcaaatttttctttttacaatttggtccctcgtttttgaaaaaaattcattttcacctctaatatattaaatattttcaattaagtacttattcacatgaaaaagtttaaattgttttggttttcagaaagatatatttttaggtattccgaatgttgctgaatagatatatactaatggaatataatcccaaacaactttactttcaataaatcaaaactaatgtagtagtcttacattattatactataagatgtcaataatctttttaaaaagtggactagtgacagttggtggactgtcccaaacggcaaatctgtgtatggctgatggtgaaattggtggctgtcacatgcctttaattattctatttgtgggatttggcttgagatcaacgcatcatgctcgtttatgcatatgagtactaaccgacattcatattccaacaaacccagaccaaatccttacccgtttccatacttttatatgtactttttaatattaatttgtggtttaatttttcttacggttaattatgatgaatttgtaga

SEQ ID NO: 63012 - DNA, 935 bp, Cucumis sativus
  Intron number 4 from transcript Cucsa.122390.1 (locus Cucs a.122390) derived from phytozome v7.0 (chr-ID scaffold0099 9; pos 636308 to 637242 reverse strand)
aacgtgtttactctaccaaggtttgtacaataaccgttgttaactaagatggaattttctactttctattgctcttccgttgactgttagtttagagagagaattttttcaatatgtaaaaataatttatatgatttgactgttatcacaccttagttgatgcatttctattatgctggttcggacaaaatttttcatacttggctgattgtcgttgtattttttgtttatattttaaattagaaaacatgattctacattggttagattaatgtgattcgagctgctaaaatatcaaatgagatgtgagaaggagtagaagcaacaaggggataatatgatgattaagaagtggtagttctatactttcaattgatacatgaaaattttgttttttaaatttgaagactgaagttagatcttgagtacaaaattttccccttgaggaaagcatgtttttcaacagataccaaaactgaccacattagcttaattctgccttcatgctgagttaaatttactccttcaaaagcatgccctagtttgctttctctattctatgcaaatggatagtaagccatctagttttcatttctgattttatcttcatttcaattattcaccgtgtaggcctttgttgtgggaaactgattccatgactatatgtataatgtttttgttcatcagttccatagttcaaataacaagtactagcattttcatgtggatcaaaagttttcattcagacagaaatgtctatactcattaaattatgtgaacggataaattttcatttgaatttgttggatccttgaattttctgatgcaatggctttcaaaggatttaaaactctacatttttcctttgaattaactcaatacttacttctcgatctgcaggaaggcgttcaacaacttgttttgggtctatatat

SEQ ID NO: 63013 - DNA, 415 bp, Cucumis sativus
  Intron number 2 from transcript Cucsa.122390.1 (locus Cucs a.122390) derived from phytozome v7.0 (chr-ID scaffold0099 9; pos 637383 to 637797 reverse strand)
ggcaagtggacctggacttgattctctggttgatcgtaagtaattttatttagattctctcgaactgtttgtttttatacatatatcagtctctatagttcattcagtgtgaaaacggagtaattgatccaacgaggatattactgaactcttgagggtggaagttgaatagattgttcccttttgagctggttatgaactgttttaggctattcaaaagaacctctttgtaacctgttatactttgttgaagatatatatggatttctcctctattgttgattggttttaagatgaaatcctatgttattgtctaatatactgttcttaatcttctcacttgcttgcactaaaatcatcctcttaacttctttttttagaaacaatatcagttatcacaaacgacggccgcaat

SEQ ID NO: 63014 - DNA, 419 bp, Cucumis sativus
  Intron number 1 from transcript Cucsa.120580.6 (locus Cucs a.120580) derived from phytozome v7.0 (chr-ID scaffold0099 8; pos 2643986 to 2644404)
agctgatctcctctttccccgccgtcgactctctggtttgtatttccttacccatgatcctaatttttctttgatctcagttgttttcacgtttcttttcttcttatccaaccggcgattagctaattgactaaattcgtggattattgccttgatcgattactttttggagatattgtgtgttctttttctttgtttttatttatgttctatgcttgagttgccaaattagtggtctgtcgtgttgattattgtcttaaaatttatgatttttgtttcggttattgatagggatggtagattttgaccgggtttactttgattgagctgaatcgtcttttattggttttgtgacgaatgttatatcgattacgactgattgttggttcaatcactttttctcagtttttttgtgagta

SEQ ID NO: 63015 - DNA, 996 bp, Cucumis sativus
  Intron number 1 from transcript Cucsa.036410.1 (locus Cucs a.036410) derived from phytozome v7.0 (chr-ID scaffold0046 5; pos 15672 to 16667 reverse strand)
gatcttagatcggtttccagtttccagtttcgaatgtcagttccaatttctaacttttagttcttgaaatgaaattattttgctgtgcttctttgattcttattgtgtatatgaaataattcattgtattgtttctttcttcatttatgtggctgtttctaattttgacatgtttagtgcgatttttgtgagatcatttcactttgctttgactgtcaaaatgcttgctgcattcactttgaaattatgtttagtttgagctgaaattgttgctactcctactgcttcaagttcaatacttgatgttattttcgtgctgcacgggtttggaatatagctatgtcaatttcatggtctgcggaatatttatgtaatggcttttgctttaattgcgacggtccttgaatttattatgcatttttcttttaaatgaatgtgcggtcatctcttattgcggacttcgttataaaaaaaaaaaaaaaacaattgttctctttattttctgtgttgttgtggcttctagtggcatatctacagggaacaataagataagaatctgttggtccaccgggatacttgtgtctggtacattcttgctcacttgggtttattgtttgcatttttttaatcccattggttttagtttcgttatttcgctgtatttatatgacacttcagtagtagcatgatcttatagtagattgtgagtcacgactcaggactttgtcaaacacatatgttaacagaattttgaagcattgtgttaactaaatttatatacctattactctttctagtctggacgagcatatgatatataggatagttttcccatgatttgtgtattggtgtaaactggagtgatataaaactgcgagcaaattctgtgacatggagaattttgtgcatagttattttatactgtcgccatgctgagagttagctgcttcttgtatagcaggtgttgtttttcttgcagcagctcgttgttatcag

SEQ ID NO: 63016 - DNA, 695 bp, Cucumis sativus
  Intron number 1 from transcript Cucsa.127970.1 (locus Cucs a.127970) derived from phytozome v7.0 (chr-ID scaffold0102 4; pos 109725 to 110419 reverse strand)
ccaggcggtttgagtctgggaatttagtggtgagggttttagtttggattgttatttttatgattttactttgtattgttggttagttgaatgtgtgtttttttctgttgttgtaaacaagcgtgagtagaacttgtgtgtggggatttgtttttcctattgttgcgatgccgaatttagcttgatttttgctgattaggcagtacgtatggtaagtcattaaccctttttccctagaaataaaatctagatcgaccattttaggttgtaagatgcatcactcttggaatttatagggggaaaatctttaataacttggtggtcattttgaatacttggacatgttctggacagatggtgttttatttccttcttcttttggtcagtactcagtagttactatctgcagatttgcatttggatttcagtgagaaatttattgaaaaatactacaaacttacttaggattaacgctgctggtggtggcaagtatataatcatttaaattttactagatcaatgagtggtctgtaatgtgagggctgcctcgtgctaaaattttctcaggttctttatcagtatgggacacaatttataagatatatttgaagtgccctgtattgctgcagttacaatcatggtttttttacccttgaacaggacgcctccggtaacattgtgggtgaagagcaggg

SEQ ID NO: 63017 - DNA, 854 bp, Cucumis sativus
  Intron number 3 from transcript Cucsa.095410.1 (locus Cucs a.095410) derived from phytozome v7.0 (chr-ID scaffold0091 9; pos 1291258 to 1292111 reverse strand)
gaacccctgacactggatattttcttcaggtaacttgttcttctattgattttaatctgttgcacactggatttaacgtggtggtgttggtaagaaaatgatgtcctggtaggttgaaggatttaggccttgtttggcaactttttaggccctgtttagtaatcatttggtttttagttgaaaattatgactatagacttcaattccacatctaaatttattgctgtgttatctgcattttacaagtatttttaaaaagtgaagccaaaatttgaaaacatggaaaagtagtttttaaaaactaagaaattgaggggaaaagtttaattttcaaaactcaaaaacaaaaagcgaaatagagtctgagtttttagttatttgtttttgaaaatcttataaatatccctttgtcctctaaaaaatttgttatctacattaaaaccaagcgtaaatttgagaactaaaaaatgtagttttaaaaaacttgttttactttttagaatttgattaagaattcaactcttaagaaaaatataaaccattgcaagaaattgagaggaagtaagcttaatcttaagaaacaaaaactgaatagttaccaaatggggtcttagtagtccattttgtcataaactactatatttgaaatatcactttgaacattaatagggaacaagaaactttcaatctgctaggaaatatatgctttccatagttattgcatatgtcaagactggtcttcattgttttccgacaactatatttggtcttgagcattttcgacacttgaatatgtctacttaacaatcattaggctgcataacagggcaatcggaagtctcttgcagacagat

SEQ ID NO: 63018 - DNA, 370 bp, Cucumis sativus
  Intron number 1 from transcript Cucsa.023730.1 (locus Cucs a.023730) derived from phytozome v7.0 (chr-ID scaffold0032 8; pos 111670 to 112039)
accaaaaagtgagtatttaatgaaatttcaaaattaatggtgtaaatcttgaaacaactaaatcaaattgaaatttaagaaataaatatgtaacatcttcaacataacgaaacaaaaactagatccaaaatctagaaaagacgactgtggaggtcattgtcaaatgtttaaaataacaaatttatgttgttgtagatttaatttgaaatccaaatagaaaaatattttaagagaaaattgactgggccatatctccttttaagagagctaataatagttatgagaggtacactaaagtaaaattagatgatttagccattagatctagatctaagaattagaattcttgattacgattgtaatattcgag

SEQ ID NO: 63019 - DNA, 890 bp, Cucumis sativus
  Intron number 1 from transcript Cucsa.044440.1 (locus Cucs a.044440) derived from phytozome v7.0 (chr-ID scaffold0054 2; pos 799321 to 800210)
gtttcaatcaggtttttactctgtttctaactgaatctttacgtctctgtcttttcaactgcaaattaagtgttttgtagcggtggatgacgtgtttatatatatataaaagaataattaggtgtatttatacacaagctgagtaatttagaagagtagaattggatgggtaagaagaaaaaccacgaactcaaatattattcaatacgaattatatacatgcagtggagtaagctcctcgatgacacaattgagaaccatgttatttttaaatataaccaaataaaaatagatagaaatatcgaaactaattaggaaaatacacttattcgatgcaattttcctcaatatatatatatacaaaatacaaccaaattttaaattctaatagtttagtttatgtctataaatgtatattttataaatatattttttcagtagttttggggtgattggaatattcttttgaattttgtgtaaagtagttttgtaaaatgattaaaaataacaaatttgacaaaatatttatcaactaacacaattttatattctatctctaccaaacatttaatagtcattaataattaataagaatctaagaattttggtgtaaattataaatattttaacttattttgttatttttaaaaacattataatatttttcagatttatcaattaattttctgtttagtttattttagaatatagttttttcggtgtatttgttaaataatttatttttcatacgaattctgttatgccttccaactccaaccgtaaaacttggatctttccatgttcaagcagtttcaactttcaattacgaattatgattgtttgaatggcaattccttgcaaaatgaggtaggtttacataaccggagggg

SEQ ID NO: 63020 - DNA, 880 bp, Cucumis sativus
  Intron number 4 from transcript Cucsa.046490.3 (locus Cucs a.046490) derived from phytozome v7.0 (chr-ID scaffold0054 2; pos 1947483 to 1948362 reverse strand)
tgataagctgggcagtgggtcttcctaagcgagcagtaagtcaactctttctataccccaatatgccaattttctattctttttctttcattcaaattgttatttttaactttttcatacccaatttagtttgtttattagtattaattgtctaattggtagggttgttttaatgagtatttagattgagacagtactatatcatatatgatgtcattgcagtgttgattgagttctttttctctatttatttcaaagatggcaatataacttttgtaatctttgtgcccatgtttatttgaagctacattgtataggaggaaaaaagaaaaggaaagtgtaaaatggtcaactaaattattatttttagtgaatatattatacaaggtgcgctaaaatatagcacttacaagtaaatgcaaacttactaatctaaagactgaactatcaattcatgaaattttttataattagcaattggtttttttttttttttttttttatatttagtttttgggggtttgtttttcaatgaaaatattgcaagtatggtaatcttttatgacaatgtatttgctaaagtatggatataaatttttttaaaaaaaatttatcagcttaaatttttagttgtactagagatttagggtaggaggttaatatagatccagctattgagacttcttcaaattttcaattaaatatatcgtagcttattaacttaagttttaggtgattaacaatgtcaaaagataattcagttatttttggtgcgcttagtataagggtaactctgttctctctatttcacacaagtgattgctaacatgtgttttggcttgcagcctattgattcaaccctcctgaagttgctgatccc

SEQ ID NO: 63021 - DNA, 272 bp, Cucumis sativus
  Intron number 3 from transcript Cucsa.114170.1 (locus Cucs a.114170) derived from phytozome v7.0 (chr-ID scaffold0096 2; pos 33642 to 33913 reverse strand)
ttttatcacgcattggtcccacagagtttttcaaggtggatatcggacattgagttggtaacccattttatttgtttttccattagcatagttttgataggagaactttttttttcaggcacatattgcttgttcaatcacgtagaaaaatgtgtgtccattacaataataggcacccaaatcaactacatccatgtgattgtgatgtcaaaattgaaaagaacaaggaactaagcaatgtttagtctgttgccttcaggatcttgagacgt

SEQ ID NO: 63022 - DNA, 713 bp, Cucumis sativus
  Intron number 2 from transcript Cucsa.114170.1 (locus Cucs a.114170) derived from phytozome v7.0 (chr-ID scaffold0096 2; pos 33983 to 34695 reverse strand)
aatcacgtggtccacaggcaaatccacttgcccaagtaatgtccccgactgtatatcatttcatttatcaataatgaataaacatcttgaatctctaatgttgttttccaaaatgaagtctattcatttttcttcacttgttggcgaagattgaaaagttcatgagttacagaatagagatatcagtaaatgatgctttagtacaaataatagtagcaggaatgtcatgattgtcttgacaaacaaaatagtacggagatcaatggaattgttccccatacgatattcttatgtaaagtaatctcttccgttacatgaatcaatttagagttctgatgaatgatacaagtgaaatggatttaagtgacttttgagttcgggtagtcttgattgtaattcttgtgaatcattgaatggtcataacagtggcatgaagatatggagattcaattttcattatgcgcctgtcttttgtgtagactaataactttatcaacctattattcataaggcgtccacaattacttagtttcaactatatatgctacttaatttggcataacctttttatttgataaccggaaagttgggactccactacatgcccatgcccactaatcctagagtgggtgaacatcacaaaccctttcatcaaacaccccaaagtccttaatttgccatttatttgtttgttaatctttttcaggtcttgg

SEQ ID NO: 63023 - DNA, 868 bp, Cucumis sativus
  Intron number 1 from transcript Cucsa.043580.1 (locus Cucs a.043580) derived from phytozome v7.0 (chr-ID scaffold0054 2; pos 350824 to 351691 reverse strand)
actcgtcaccttagcaaccagcttactgaatccaggtttgtggggttgtggattttcattagcatcaggcttatatgctgttgatctggaattgagtgttttggatggatggttttatgggttgagttaacagtttgttttcatatcttgtattgtgcaattttagtagtcgatcttcctcgggaatatgggatgaagattggtttttttaactgacctagtattgttgacactaacccagatgaaattcttagttcgggttttttttttttttttttttttttattctttactccctcttgttgcttaagggataatggtgtttgatttttgagacttttcgtatttttcagtggaattttactagtgagaacgataccccacgattcaattgggaagcaaacttgactaaacattctaattctttgaatttatcattaagaagccccttttagttcttataaattaaagagttgagtcactgttacctttttttcacctttttaagaaacacttttgaatctagtcaattttcaagaacaacatttttacaaacgtgtgcagtttagaaatttgaagtagatcaggaataacaaaaactagtgtctaagttgaaaaaatattagtcaattgaaaagatagtaagatgctgagccagcagagtgaattttgtggattcagaaacttgactgtttcaacttttaacaaagggatagttttggaagcctcatttacatgaggaaagagaggcagtccgtgtaaatgacatggactgattgtacgaacgttatattaggaagtctcagtcttggatttcatctcattaactcttcatcccttttttgggcatttctcaggttaagaacag

SEQ ID NO: 63024 - DNA, 641 bp, Cucumis sativus
  Intron number 3 from transcript Cucsa.044570.2 (locus Cucs a.044570) derived from phytozome v7.0 (chr-ID scaffold0054 2; pos 859698 to 860338 reverse strand)
tttccctcaccgaccctgttcaagatctgacattagtaagattctgctcatcagttttgtgacctactgtctgtttcattgagttactccctgttacgttcttactttctctgttgctcgtccatttctttctttctccaaagttgcatagcgttgaaccgatatattccactaggccgtgatgattgtctacatcaagttgtaatgatttgtgtgtaagcaaccattttggttttgaaaaagtatcaaaccaattgtggtcagtgaaaaggtgcatattgttttggtagctaagctaggccatctcatgtttgtgttatcagagtggcatttgattacaggaaaaaaaaaaaaatcttgactgttcattcctttaagttctattctatcatattctatattgctggttattctgttctatttctgaaactgaagtatgtgaaatgaaattagaacaatgtttgattgtttctcgtttcggaaagataaaaacagactccttatactgtatttgcaagaagtatggatcattatctttttgttggaataaataacaaaacactcttctaagaataactctaaacaaccaaatttcatgttctttctgcaggaagtgtttgacaaagatcggttcaagtcag

SEQ ID NO: 63025 - DNA, 279 bp, Cucumis sativus
  Intron number 1 from transcript Cucsa.122360.1 (locus Cucs a.122360) derived from phytozome v7.0 (chr-ID scaffold0099 9; pos 604510 to 604788 reverse strand)
gaatcaaacttcaagaaaagtgagtgtctaaaacgtttagggtataaaatttgtgttggttgctaagctttgttcacaagcatttcataacgtttatgttagttttttgttagataatttacttaaaaagttgaaatggttttttaatgataagtttgtggatttaaacataatggaaaatgaaattatcttgaatatttatggaagaaaataagaattttaacaacattttgtcactataaatttgactttacttgaactcaattggattatatgcag

SEQ ID NO: 63026 - DNA, 556 bp, Cucumis sativus
  Intron number 1 from transcript Cucsa.009150.2 (locus Cucs a.009150) derived from phytozome v7.0 (chr-ID scaffold0012 3; pos 95201 to 95756)
cttctattgttggttcatgttcatggacccaaatttatataaatacctaaattatatatacttttttttacatactttactcacatgtatcactattatgattataaaataataacaaataattttagagagaagaaaaacttttaaaactttttaatttgaaataataccaaaaatttaaaatttatccttacaaccttttaaattactttatgaatcagaagcatacatttattgttcaaatccacttgactaaagatattatatttacttaaagaatattctttgaactgagtttattataccaataatctctcgttatatctatactttgttgacatctataactgaacaactttgataaaataaaacaaatattttgaaagtcgagtgacaaaaatagaataaattgaaggattggaaattcaacttttttttctaattttataaaaacaaaaagaagaaataataacttaaacataataaaaaaattacacaaaatatttatttatttttgtgttgtagttaacagcatctcacttaccatatacgcgaa

SEQ ID NO: 63027 - DNA, 807 bp, Cucumis sativus
  Intron number 1 from transcript Cucsa.054540.1 (locus Cucs a.054540) derived from phytozome v7.0 (chr-ID scaffold0058 5; pos 105708 to 106514)
gcctgctaagaaactcgttatcaagcttctcaaaggtttcttctttccatttctaccttccttttcaagggtttcttattttttttttttaaattttctcgttaggttttgttttgttgattctattgttctttctgactgctttgtttaatttgggggttttcgtgttgattgttgttttcgtgttcttgttttgaattaagctttaactgaacatgggcactcgggattatttcgatttcttatgttttctgcaccacttttaccggattacttggaattgagctctacttagacattttttctgctgattgctcggttctacactggcatttatattttcacgtgggttaaaactcctgactaatgatttaacaagtttctgatacgactgtcattacagtagctctgcccggatcaggaaatgtcatttactgtaatgggagattaagaggagtactctgcatttagaattgggaaagttcatttgttcatctacggatagaatctatagtcaggaatgtacaatcttataccatggtctcaatttagttaatggcgatggaagatttttagtcatctgccaaaaattgactgcgttaaagcaaatgtactttcaacttggtattataacagtgaggccacatctgtactctcgtgtagatattatcaacagttgtgaatatgtgtgtgaattatgtagcctcagttcaactgatatctcgtgttgaaagtggtttacaatatctcattttccgttttctctatgaagcaaaaccgacactccctgctaattttgaggaggat

SEQ ID NO: 63028 - DNA, 361 bp, Cucumis sativus
  Intron number 4 from transcript Cucsa.026620.1 (locus Cucs a.026620) derived from phytozome v7.0 (chr-ID scaffold0036 8; pos 215398 to 215758 reverse strand)
agctgccttggcaacaaggtatatccgtatgcataacacttttctttcgtaacatttttgtttctaagttttctatgataatattgctacttttctgtctagcttgttttcctaataataatcaaaattaacaaaaaaaataaaataaaataaacaaaatacattttgttaactgtattttggtttttgagttttagcctcaaatccttagtatctataaatcatttgtttgttatctagtttgtattaagaattcaaaactcttctactaaaaaaatatatagttgttaaaaatttgttttttttttttccttttggtttcatttaattcagggatcagtatcagttagatttcgattgc

SEQ ID NO: 63029 - DNA, 837 bp, Cucumis sativus
  Intron number 1 from transcript Cucsa.032560.2 (locus Cucs a.032560) derived from phytozome v7.0 (chr-ID scaffold0042 9; pos 1863009 to 1863845)
ttcttgcgcttctcgctctttctcttccttgtgttgtacgtattctcctgaccccatttcatttcttctgtttctgtggtcgtttttccctcctttttactgttttttctcttctgggtattgctattccgtcttcccctgagattttcccttggtgggtattgaggattttgtttgtttcttcaccatctcatcatattcgtttgtttttttaatgggtttctttcaatctttgtgatgtttggtttctgttgaatgatttgaggatctactcatttggattgctcttattttggacgattcttatggcatttggttgttttttagtgttctatggcttcctcattaatgaacaagttattttcaatcttttcatcaacttatttccctgatttggaacgtggagactagggtttctgcttgatttccattttgtcttaatatcaccatctgatttgtctactgatctgtacatttagctttccatcattgaaatgtggatgcaattaattttatttccaattattttgtgtttctttaagctgttattatctatttgattttggcatatgcagtaaatttctgattcttatctaaattttggtttacaattctgggttttgttcttttttccatttaaaatacatgagctagtagttcacgcaaagcttgaggtcgttgttcactaaaaattaataaaaaaatttgcggacttgggggtttgttatatttgttttattcatcaaccttgtgtgaagtatatatatattattgatttggtgcatttgttttatttcttaagggtcttggtccgaatttgaacagcttggggttgtt

SEQ ID NO: 63030 - DNA, 472 bp, Cucumis sativus
  Intron number 4 from transcript Cucsa.032560.2 (locus Cucs a.032560) derived from phytozome v7.0 (chr-ID scaffold0042 9; pos 1864842 to 1865313)
tcgagctttgccaacagcatttaaattgtttactggttcgtgttcctttataaatctctattcattttacttgcagttatctttgtttttcatcatatatctgcctgaaataatcatcttccaagggattgaagatttaagttttctttgtgttaataactaccaaatattatgatgtttgaaaatgcattggaatcactgatttgcagtggagtttgaaccagtttttttccgtagtagaacaaggtctctttcttttctcatcgagtagttaagcagatttggttttgtggggtcgctttcgaagttcaaagctttgtacgattttgtattttgactcttcattatgcagatatttctcatcgagtacagaaattttaacattccccaaacgtggaccagttttacaagccaccgcattgtcggatcttttaagcaatcaaataacactactatcttctgcaggttcagc

SEQ ID NO: 63031 - DNA, 515 bp, Cucumis sativus
  Intron number 3 from transcript Cucsa.106690.3 (locus Cucs a.106690) derived from phytozome v7.0 (chr-ID scaffold0093 0; pos 216959 to 217473)
ccctgaattttgtctgtgcacagaggtaaaaaatgtttcagttgtaatagttatttatgtaattccttcttttgattctttgaatgtttttctgccataaatcttacgattttccagttatgtttgttacccacaagaagttgaaaacaaaaccgagtactccatttgtatttgatttggtcttgtgtgtaggtgtggctaaactggttgtaattattgactcaaattgtatccaaaaataaaatttactatgctccagaagcagagagaatatgattaataataaaatttcatttctgtacgtcaagtgcaagtgcgttcattgatcttgggttcagtattttttgtacagagactggtgaatgcatttctttttgaatagcatatttatgttttactcatatgttacatgttttcatatttattcctgctttcagcactgctgcagttaacttaatgcattttcatttgatcttcaaggttttcctctgctttgggaattcagtggcctcaac

SEQ ID NO: 63032 - DNA, 822 bp, Cucumis sativus
  Intron number 1 from transcript Cucsa.112570.1 (locus Cucs a.112570) derived from phytozome v7.0 (chr-ID scaffold0095 3; pos 1097576 to 1098397)
cacccacttcaccccccccttttcttatccaatttgtaagctctacctctgttttttttgcttctttctttttttttccctttgattattgttattttcttttgctttgtagttttagcctcatgcttttctgggcacccactcaatttgtaattactgtttacaaattcaaagatgaacctcttcttcgctcaataccataattagcttcaatggggatttttattattattgttattgttattattcttcttttttgtttattgtgttttcgcttccagaaatgaagttctgactttagattggcttcaattatgtttttgcatttctttatcattgctttctgctgcaacccttttccccttttcgattatttactcatgcctatgcccgacttgatctgaagatcttgattttaggttttggctattgttttttcgattgctctttctctctgtaactgtaattgtcgttctttttttagatgggcatgcacttagtttgtttctcgatctgctcccgttgcttgcatgcacttaggttttgttcttaattcagattgttggaaattgttcaatgagtttccttcctagttgcattttttaacagtatgcaacgcttttctttctttcttcttcttcttctttttcttccttttttttttttttggcattaccattcatattattagctagccacttagttggcacttccattcgcatggaatgattaaggaattgacattctattttcattgttacctgacattgcattttaatactgctagttgtgagagggtcggttcatttggatcctataaac

SEQ ID NO: 63033 - DNA, 675 bp, Cucumis sativus
  Intron number 2 from transcript Cucsa.124840.1 (locus Cucs a.124840) derived from phytozome v7.0 (chr-ID scaffold0100 1; pos 665184 to 665858)
caggcctttttcgcctccgtggccatcgtgatcaggttcacaagtattacaatttgattggagctattttttttttttttcatatttgattctctgataaaaagataacttcttttatcaagctgaacctggtacaccgaaagtagagctcaagtcttcctccactgctttgtcttttctgtccagtggagttttttccttcaaaatggcagatatcgtgaacctctcatttgaattattgtgcccacattgctccgaaattcgatgtgccatacacttttccagcaccaatttttcttaagatttctaaactactcaatttagattcttggcctcttcccttcattcaactttattctgatttagttggtttaggttcttgtctatgtagaactcaaggacatggttgttcaacctatgaaacatatcccgttcacgttagattctaagcctaattttgttgatgagtatattttttatgtagttctcctgtcaaaggattttcccccctccccatctttttaggtaggcctgattcagttgattactatcttctagcatgtgtagattatataagaggcctgtcattctcatagctattttcctgttcactaatgccttctccttattcttggtgcaggtaactgatctggtatttctagattcaagcaaaaa

SEQ ID NO: 63034 - DNA, 684 bp, Cucumis sativus
  Intron number 1 from transcript Cucsa.088210.2 (locus Cucs a.088210) derived from phytozome v7.0 (chr-ID scaffold0088 8; pos 602152 to 602835 reverse strand)
ccgcgaaagcaagagggatcagttttctcgaccctgtaagccatcaagtttcgctctttcttgttgatctcatttcatgatttctagttaaatgaaaactaatcttcaggatccgtttctgatggacttttgtagtctccttgttgtgtcgttcagacacggatttgtttgggatgtttttctgcttgcatcttgtaattgtctgaatgaagaatacgatggttgctttattgtttatatgaagcagatgacgaagttgaagaattactgtgttccattttgttatattcaccatctagtattattcgtagaaatctgggatgttcgctttatcccttttgtttatttttgtgttatttttattgtttgattacgacatgttatagttttcgattatttattagtttctgtaggtctgcaatcttgataaaattgtggtgtttctgcccccgtctcaatacccaaatcagcaatttgcaatcattttttttctccctaaacttgttccaaacatgaaaaagagttttagattatttggttttctagtttgtttgtgagcgaggttctccactcccggcacacacaactggcctttagtaattattttattgtatgagtatgagttgattaaattatcttcattttaaaggaactgttggtttaccaaattaccgaaaagggaga

SEQ ID NO: 63035 - DNA, 502 bp, Cucumis sativus
  Intron number 1 from transcript Cucsa.011190.2 (locus Cucs a.011190) derived from phytozome v7.0 (chr-ID scaffold0015 4; pos 497038 to 497539)
tttgtggccaggttagtctattgttttcaatctctctctctattttctctattttctctatttctttgttgtttctttttccgtatctgttgttttcgactttttttggatcaaacccttttgattgaaatacccatttatgacgaggaaggtacagttattatctgcaatgatgtaatgatggttatgcttcgttcttgttatgtttatcagcagaatattttgattccaagtgtgcattgatttgagtttcaatcgaattttgctgtccttttcaatttatagctaaatttccttttctgggtttctaatttcagcttagtaaaagaatcatttcggtttttttttaatgtttttccatcgtccccacttatcatttgcatctggaaatgaatttgcttgctttgaatttgttggatcgtggtgttgtttgatcgttgattatgttcttcaatgttttgtagcaggggcctcgtggtgcttttagcttgtctagatttcg

SEQ ID NO: 63036 - DNA, 904 bp, Cucumis sativus
  Intron number 1 from transcript Cucsa.060010.2 (locus Cucs a.060010) derived from phytozome v7.0 (chr-ID scaffold0062 1; pos 573311 to 574214)
ccatttccaagtgtactactggtattaatacgtcccctcattctctttgacctatttggcttcatcaattttcctttttaaatcttattttaaagaaattatttatccatttttatgttaaaatagcattttttataaaagaaaaatataaacaacctattttgataaaaaaaaaaatgattattgaattcctctacgacaacataaaaaaaacggaaaaaataaagttagttaaaaaagaaaaaaataaaaataaaatacatctatcatacacaagaaaataaatagttgagatgttgaaaatatgcattttaataaaaacaaatgaattagggaattttccacaacttttaacaactatctctattagtacgacactattttgatgtggtatcaaaagcaaaattatatgggtgtatgtttaaagtaaaaattatcgcatgaagatatgtaaagttcttctgtcgttaccaaattcaaatgattttaatacttttaaacattttttagagaaaattatctttagtttcaaaattttgacgaatatgtgcaaaaatattaaaagtatctacaaaaatgtaggaaaaaatttcaaatctgatcaatcgatagacctctaatagatacaaaaatttgttatatattataaatatttattagtttatttgactagtttttatatctttttagtttttaaatttataaaaatagatttgaaataataacccattttaaattgtaatattaactttgatctacacaaatcactaaacaaaaaaattagatcttaaatgaaacgtaacaaatttaaggtaaaatttatattttttttccctaaagattattccaccacttaataccaatgtttgttttgtggcagaaatcataggcattgcaactgaca

SEQ ID NO: 63037 - DNA, 523 bp, Cucumis sativus
  Intron number 1 from transcript Cucsa.100250.3 (locus Cucs a.100250) derived from phytozome v7.0 (chr-ID scaffold0092 6; pos 800550 to 801072 reverse strand)
ccttaagtaagttgtcgtttgtatgattttttttcttaagagatgagcatttatcctctatttcctctcccttttggttccgtaatcttgttattgaatcatgagttgattaagcattaaagcttttatgttattttgctttccttagctaacgaaggaactgagaagcttgttatgttggttgattttgttgaactgtgctgatgcttaaatcaggaagtttaatttaactctgtcaaccttaaataattacattgtaattgacttccaactttagcaaaatatgttttttttgtggaatttctaattatttgtccatgtattcttttaaattgtagaaaagtagatgtttttcctagtggactgttttttgaattttactgattgataagaatttatgataatattcagtttacaatttatctggatgcttccacattattgtttttggtgattccatggctttgttttatttatcagcgactcatttataaattttatagattttcagttttggcatacc

SEQ ID NO: 63038 - DNA, 906 bp, Cucumis sativus
  Intron number 2 from transcript Cucsa.118390.2 (locus Cucs a.118390) derived from phytozome v7.0 (chr-ID scaffold0099 8; pos 247337 to 248242 reverse strand)
ataatgtaagtgggtacgaagtttgttattaggaataatggaaaatattgtgtgtgtcatgtgtgtgtgtttttcatttgggtctagataacgaaatttgggtcaattatgttggagaaatcacgatggttttggcggtatctttgatgtgttgtgatatttttcgattgagaatgacaaacccatttatccgttttgcttaaattcaatggctcttgattgttcagcatctcaattttccatgaaaaagaatggctgatagctcagtactttgcttttggttgacaattcaagaaaagaccaaaatattccgaattatcttcttaatatcaggactggaacataaattatcatctagctcagataaccatatgttggtcggttttttagatttggtgaccaatgtgaatttatgagatattgccatcccaatcagaggagtgaatcaaggactaatatcgtttgaataggctggaaggggattgtgcactcgggctttatatataatctttatagttctcctggcttgagcagtttcgttaacttggttcttttggggttgtctggaagactggattatgggatctaagtatattatgggatctattagcgatcgaaataccctgatagttgtttgccgtagtatatttaattggttctactaagatgtaaattataggaatttatctgagcaatcagtagagtcttaatttcctttaagaatgtaaaaagaggtgattactgcaacatacttttacatcctgagattttattttgataaactctcaagcctacttttttagtttcctattgaagcatattgacctgatgttggttttgttacttgtttattacttttttttttatgaagacgaggctttccagggaaagagattctctatcaat

SEQ ID NO: 63039 - DNA, 455 bp, Cucumis sativus
  Intron number 1 from transcript Cucsa.048180.3 (locus Cucs a.048180) derived from phytozome v7.0 (chr-ID scaffold0054 2; pos 3006337 to 3006791)
aatcttctaggtgaattttagaggctgaaaatcaagtaagagtccataattttcttcttcttcttcgaacagctggttggtgttaggtcaaaatttgagggggttgaactaattttctgtcttgatttgctttcatccgttttttttagttctgggtgtttgtgttttctgggttgtggtgtattttggtgaagtgggtggttggaggttctgttcaaatgaattcagagctcaatttgtaaagggattttcctatttcttctctaaattgatagtttgtaaccgtttcttcctgtagtttgacagtgattgactagtttaaaacaattcccatttgtgtactgagttgtttttgtaagagaaactagtcaacgagctacattgccgctggtttaggaaatttgagttttgggtttctagggttctctgctgatttcggcctcggaactactaat

SEQ ID NO: 63040 - DNA, 800 bp, Cucumis sativus
  Intron number 2 from transcript Cucsa.088310.1 (locus Cucs a.088310) derived from phytozome v7.0 (chr-ID scaffold0088 8; pos 673467 to 674266 reverse strand)
cccaattggggcactacagtcaaaggacgctggaggtttgtttctgcgtttaagtttagtgctataattttgttgatattgcgcattgcgaaacatagctcaaaccttgtagtttaatgatctggcctattgcaaatataaaattaacttattgtgttgacgcgagacatctgtttagtttgatatagtagccttacgcaattctaaagttgaagaagataactgaactttagtggcaatgagattgtaattctagagtggaagtagataagtgcaacttctattgactgtttcttgtcattgaaccaaaatactcctttttttaatgtcttggaaggaatatatttgacttagccaactgtttttgttttttctatggtgccgggaattgcaattctatcacatattgactgacttccttgtttcaagtatcatttaccccaggtcttaattcgttatccctatcgtggttcataatcaataatgcatggagtcttgaacataaaaggtggatagaaatcacaggacaaaggagatatcatttccctgcttgatcttgattagagtgtcatctgtaattggagacaaatcctattttttaatttctataatgtttgtaggaagtctgcagacttttgtttgggtggagtttccattctattctacggggcagcatgactttataatttttaagatctcccttgaactagttaatccctccgctacattctaaaattttcttttaactataatgttacttggatgacagtagcattcacatgtttcagatttaccttggg

SEQ ID NO: 63041 - DNA, 426 bp, Cucumis sativus
  Intron number 4 from transcript Cucsa.096900.3 (locus Cucs a.096900) derived from phytozome v7.0 (chr-ID scaffold0091 9; pos 2360753 to 2361178)
ttttaacagataaaaggcctgaagaaattccaacggtgattactgaatctcgagaactttgtttatgtagctttattgatagattgtcttgatatgcttggtggtagccttagatcaagataaatggacattgttaatgaattagtgtttcattccgcagactgtgaggaattattaaggaaaaatgatcattgtttctgtttcagcatgattcatcaatttaatcatcttaccttgagagtatttcttagcttcttctttttcaaatactaggctatcatcaatggcaatttgattctgctgttttaacagcatatatggtcaattgttctattttgtataaattggacgtttcctcaactttttctaaattatgttgctctatcttcttgtagtttgtagaatcattgttaagcaagcttgtgg

SEQ ID NO: 63042 - DNA, 920 bp, Cucumis sativus
  Intron number 1 from transcript Cucsa.004590.1 (locus Cucs a.004590) derived from phytozome v7.0 (chr-ID scaffold0005 3; pos 141810 to 142729 reverse strand)
tggccgccggagggaaatcaccattttaggtcattttctcttcttcttttacatctttctttctttcaatttttcgtttttcagatagttagcaaattttacataagatgttcaaataatctacgtctcatgctcgttatgctaaaaaaaagtttacggataaatcttatgctttttatacgatttgatgaacttattagtaatcttattgtcaattggtatatgaactaatgttatttaatataagatattttaaaaatgataaaatattaaaactaattacaaaatataacaaaattcatcaaactcttaaatacattttgtaactaattttagtattttgctatggagaacaatttttcttaatatatgaaccctaaacccttaatattttgaggatgtgaattggatcacgtatcatctgatatgtaaatatttgttttagcaagatataacaaaatttcacatacctcaaatagaaatatgaaattttgttgtactgtttttttttataattttttttaacactattacaacagaatgttattatatatattttttctgtgggtgctgacttttataaatgagttgggattattggatgtttactttgtgggtttttgagtactgatcttgggagctagctgctttattattagtgggttggtctcaataaagaattcttagcttcttggagaatgttgttcaaatggatccaaacaagagacaagactaggtagcctagctagttcaataataatgaaagataaatgaaagaattggacaaagataaagcttcttatttggaggggtttggatacataattgttttggttgaagagagaagtgataataatgttcttaatttttggtttgttttttcagtgcaactttgcattcatttgcaaagatagcagaag

SEQ ID NO: 63043 - DNA, 639 bp, Cucumis sativus
  Intron number 1 from transcript Cucsa.011910.1 (locus Cucs a.011910) derived from phytozome v7.0 (chr-ID scaffold0015 4; pos 1316807 to 1317445 reverse strand)
agactcgatcggtaactacactttcttttcagttctatctttacatcccatttccccatattcatcatactgttcactcgtactcttttttcctttaccctcttactcttcatctctccttggttgtgcttttaaccagtaactttgtaatatgctttacgtttttgtcatgctaattcatacggttcctattacagcctatagcattcgtacatatttcttctgtttgctgttctgtaacttatagctacctacgtattcacacatttcctaaacatattactatgcagcttaaaagttttgagagaattttcttctgtagtaacgtttctatgcttttggtcatcaactttccatgattctgttatttatgtgataactgatattgtcttattgaggcaatttgattgtggtggcattagtagataaattcctatcttttttatttttcttccttccctctaaacagattctttcttctgttgactgtagaatcttggtttagtaaaggttgaagaaacgttatgttggtgatgtatgtcacttcttgatgtggtgtggtgtggctgtctaactgtatttatgtatttgtggtagtattcccatttatgcttctttccttggttctagaaattttac

SEQ ID NO: 63044 - DNA, 616 bp, Cucumis sativus
  Intron number 3 from transcript Cucsa.101170.1 (locus Cucs a.101170) derived from phytozome v7.0 (chr-ID scaffold0092 7; pos 441564 to 442179)
cctgtcaccacttttttatttgctcttcttctaaggtactacttcagctcctgataacctatttatctaatacatttgaactccggactcagccttgttgttgttgttgttgttttggtatgaaagtttatagttattatttgataaatttaactaaattttttacgtttagaaaatttgaagagaaacggaattggaaatgaattgtaagaacccttttggtatttacactttgtgttttctaagaagataaatttattgattagataattaattatactgtgtcatttactttaatttaattggaaggattttattacccctaatcttgggaagaattgtgaatataatcaaagtgcgtcttcatcatcttccaccttatagaccactttatttattttaaaataaacttacaaaagccagagaataatatttgatgttagttgccaacaatttgatggttcattacaacttgtaaaaaagaaaaacagtggagaattactttaaataacaagataatattgcaaaatgtaaatattttagttaatttcagtataattgaaaagaaaagaacaacgtttagagattaaaggggtgtgatgtggttggggacagg

SEQ ID NO: 63045 - DNA, 995 bp, Cucumis sativus
  Intron number 2 from transcript Cucsa.121160.8 (locus Cucs a.121160) derived from phytozome v7.0 (chr-ID scaffold0099 8; pos 3189681 to 3190675)
tctcccaactcaaagcaaacaaaggttatgaattatggctgaaatgattaccaacttaaatgtgttctaagtttgaacttctaacatcctgtatgggaactcacctgtcactgtagctctaatgcaaggcatataggtgttcatttagtgggtagaacaataaacgaaggatgctgtaggaatcaccacctcaatctcatcaatggttgttctacgtttttcgtctaggaggcaagcttaagtttggaccagtgggtattgatgggaaccttaagtcaagcgtacatatcattttaggaggaatgcacattagatgattgggttttgtggtgcaatgtaggctgtgttcaatgtgaataaagatgggagatgatcgtgtataatggttagaggttgtgggcttaagatgatgtatgttaacttgttaagggtgggtaatgtgttagacattcacattacccatccctaacaagtggtaatgtgttagacattcagtcagttgtgggcccaaaatgatagatattaactcagcttctagcacatgtgttgagttataagccttttggggtgcttaagtttttttgtcttcgactttttgttgaattcaattctacttatttcacctgatttttttttttattctttgctattctcatcctcattaagataatgtgatctttatggacccaaggtagttactccccaattttgttggtttcttctttttaatgctttggctattagagtggtgatggtggtgcctattaatttatttaaaacaaataaataagattattatttgtattcgttatttatttattttaaaatgaaatcattgataatattctttttggcttgctagactggtaatgttaatcaaatgttttgttgttttagtggattttttacttatttgaattgtaaagtgaagttattttatttgatgttcttcctttccagttagaaggaactgagcattctatatatcttgacgt

SEQ ID NO: 63046 - DNA, 821 bp, Cucumis sativus
  Intron number 2 from transcript Cucsa.130310.1 (locus Cucs a.130310) derived from phytozome v7.0 (chr-ID scaffold0102 9; pos 232164 to 232984 reverse strand)
ttggagacttggttgataagttagcatacgtcaaggttctctcttttcgtcgctttaaaactccatccaacttgcttactgttatgaaatcgacaaacaagggaaacaaaaaacataaacagagaatccacatagaaatatacatggtcaacagtgtgttggctatagccatggatagagaaaaagttaattattggcaaaaaatgatcatattacaaatacagaggcgtcacactagtagagttggatagtttatatggtgcacatggccaaaatcataaacaatctatttaaatatgaatacaactcagagagaccacccgtgcttggttgttcagagcggcagatagccgattcaaaccattataacacttactttacatgatttgaagaaaaaatgataaaaaattgtctttattatgtttgagattttaagtttcccacagtttgcgctgcttcccacagtgagttgaagacttgaaggtgaatttaatgaacatagttgctgttatgagaaggctgatagtattttcctcccgtcttaacttctttttcattataatcaatgattagaaagaaggctgataagaattaatgaacatagttgctgttatgatatggattcattataatcatctacatgaatgaaatgaaacaacagtgaatgtggatcaaataaattatcaaattagtctcttcaaacatcctcttgaagcagttgtttattgcttcatttaaattgttgcaagtgtaagtagttttatattttcagtgatatgttattaggttctgaagatttggctggcgacacaaaatctttc

SEQ ID NO: 63047 - DNA, 318 bp, Cucumis sativus
  Intron number 1 from transcript Cucsa.130310.1 (locus Cucs a.130310) derived from phytozome v7.0 (chr-ID scaffold0102 9; pos 233100 to 233417 reverse strand)
gggtgctaggtctttgctttctcttcttcattatttgttcctcattggtgattttagatgaattctattgcttgttgaatggaattatttgaaaccctgttttttgtttggtttttctactgtttgattgctttgtttctatattgcacttgcagatgatgttttcgtgtatttgtttctttgatcggattgctgttttggttattggtctttttttttttttttttgtcaatattttttaataataaaaatctggttttactcttttaattggattttgatctgttcccattgcctttgattttgttgcattgcaga

SEQ ID NO: 63048 - DNA, 894 bp, Cucumis sativus
  Intron number 1 from transcript Cucsa.043570.1 (locus Cucs a.043570) derived from phytozome v7.0 (chr-ID scaffold0054 2; pos 343467 to 344360)
atcgagttgctgtaaagaaaattgagaagaataaggtattgtttcttacaacttatgatgtatgtttttctcccttcttcgtttttctgaatctacggccttaattagtgcttggctttaatctgcattctgggttgaatttcccccacaacatcgtttggaagagctcaccaggtttaaattcggtagttgaacgatttttcagagtaatggagcaggaaggaagaacttcctctgatggaggttttgaatttgccaatttggtatatgttttctctttgtgggtttcgatacagattcatcgtcaaccccaacatttgcctgactttatagcaaggggcagccttcaccctttaatcgccacagggataaagaaagtagttacagatttaccagtttttgcaagatcacgactgatgttgcaaggaaccaattcagggatccttgaaaattaatctgaattacttggattggatagatcttcgtggcacacaagattgagcagttctaattgaatacagcctctatctgaatctaagagtcatggctttctttgtttttagccgagaatcagattcttcctatcacctttagttcaatagttcttccctaaagatgcagccgtatgtttcactgatgggttcttatttctgaataagaaaggaacatattcgtttctattgaaaattcttcattcaggccaattaggcaagattaatgcttgtgctcacaactgtgtggctagtttggaaccttttagtactgtatggtcaagaataggagttcacctgcaaatggcttttgggtcagagagttttcaaatttgattttgaagggctttgtatgctgtttttgggttgtgtttgatacagaaaatttttaatgttgttgcag

SEQ ID NO: 63049 - DNA, 447 bp, Cucumis sativus
  Intron number 3 from transcript Cucsa.101240.1 (locus Cucs a.101240) derived from phytozome v7.0 (chr-ID scaffold0092 7; pos 488869 to 489315 reverse strand)
cctgtcactacattcttttttgctgttttgttaaggtcattttttaatccttacaatcatttaattaagtcaactgtgtttttacttttctaaattcattttttctaactttttatttataaagaaatccacttttaatggagaagaaagaaaacacaaaatttaactttaactttttcaattcacttttaaatttatcgctttctacggtcgtgacttcgcgaaatgttgtaattttttctatgctctaatttaaattttgacaattagttcacgacttttgattttaataaaagatcaatattcataaaaactttcgaagaaaattatcaaataaaacttaaaagtttaagaagaatcgaaactttctaacattacctgaaaaaagtatatatatatatattttttgtagactaattgaattatgatcgtgttttggtgtatagg

SEQ ID NO: 63050 - DNA, 870 bp, Cucumis sativus
  Intron number 1 from transcript Cucsa.090110.1 (locus Cucs a.090110) derived from phytozome v7.0 (chr-ID scaffold0089 4; pos 1500152 to 1501021 reverse strand)
tgctccgattcttctctcgatttagtcgctcaagggtaattaaattaacttttcttcttttaatactaattttaattttattgttggggccaaaaatggagctttattgtttggttattagggtagaagatttcatttttattcttctcatattttttttattcagcaagcatcttgattgtgagttttttgttttcattttataattaagttaagcattatcacttgatttttgcatctgctttcaattttcaacaatcgatgtgcagttttttagaattaaaattgttgggttcctcattcaagatgggtttttttaggatggtggatgggatgggatgggatgggatgggatgggatgaatttagaaattctaattggttagggatgtaccttatagaaaggattccttgttttggaaacatggttttttttttcaattcataaatatttcatggaatttgatgttctcataaatagtccacttagggactacgaggatctttctcaaacaatagggaatgaattctaatagtaaaccatatgaactcaatttgaactttttccatatcgtatggatagtttaattgcaaaaaaaagcaatttctaaagattgtttggattgattttttaagtgcttaggagtgtttttcaagagagaaaaaatagtgtttttaaaagtccatacagagttttgactctaaatagtcgatgaggtcatgggtatgggctttgcaacaaaaatggctgtagaatctggcattggagatgagtaagatagcatggacactagggattatcaaaagggaaaaggaaatcatattatgggttggcatatattgatggctttcaacttacttcacattttag

SEQ ID NO: 63051 - DNA, 1000 bp, Cucumis sativus
  Intron number 1 from transcript Cucsa.102160.3 (locus Cucs a.102160) derived from phytozome v7.0 (chr-ID scaffold0092 7; pos 1230057 to 1231056 reverse strand)
ataccctacacccaccgtcctacgttctagacgtaactcttttcttttcttttcaatattttactacttttttaattttattattatcaacatttttaaaccaacgcaaatataaacttttatcattttttagtgacatttagaattttttaaaatattattatctacattaaaattttgaatctatcatatccttgccaaatcaattttaaataaatttagatggtacgtatttttatagacaacatcaatctaaaccaataattaataaattttattttaaaaaacgattttactatatacttaaccgttgttaatttctaaaagtatagtccaagtgtataaccatgatacttttaccttttatttgatcctttttaaagaagagaaaaagatgacgtgttttttcttttttcacacaaaccatcttgtaaaataaacctagcaattaaaaagcattaacacttttaaattttataaactcttaaatgtttaattttgtatcaataattataaattaacgttccactagtaaaaaaatttacacatcttattcttttttttacttttgaagaaagatacatgattagaaattagtggatgcacgtataaatatttcaactagctagttgaaatatctttttgctttttactctaatcatactccaactttgaataaattcatattccataaaacaataatacaatgacaactggagaagagcttaccaaaaatgtacaaaatgttgtaaacaaaatattgaaattagttcattagatataaaatgaaaagtcatatataaattcaattttaaaaattttaaaaaataattaaatacaaaattgaaaggtatgaaagatgtatgtacgaattttcaaattgtaagaatgaaatagagacaaaattgatatttagagaagtaagatgaaggtaattacatttgtattataaactgtaatggcagtactcggataaaaaccaaacagaagagttgttaga

SEQ ID NO: 63052 - DNA, 643 bp, Cucumis sativus
  Intron number 1 from transcript Cucsa.113220.1 (locus Cucs a.113220) derived from phytozome v7.0 (chr-ID scaffold0095 3; pos 1451807 to 1452449 reverse strand)
attgtgaaagaaaggaagaagagaacgaaacaaaggttttcccatttccctttccctttcctttccttctcttttctcgtaatgactctaatttgtattcttatcttttgttcttcgttgtggattttgattgcttctgttttgtgttttgatcttttgtcgttctgtgtagagacattttgtttgtctgttcacctgactgaacttacacatgttctgatttggaggttttgtttcattcttcttttgtgttttaagacttccactctaacgttttgggtatatatgctctgcttaagaatgattattacggttcgttctccagtgttctcttgctccggttgggacgttttttaatatcatagtctctctagaatgtctaatcaaagcgtgcatgtgaacataaaaaaatttatgagtgtaaagattagctagtttgctggcatgtttccacagattttgtttgtttatttgtttattatggattatacagtagtacctaaagactttcttttttattgtggagttaatgttacattggaagttctgaatatttgcaggtgctgtatcgtcttgggcaactactttttatcccttacggaatttaattttattttcttggcaattctttcaggttgttaac

SEQ ID NO: 63053 - DNA, 645 bp, Cucumis sativus
  Intron number 2 from transcript Cucsa.063230.1 (locus Cucs a.063230) derived from phytozome v7.0 (chr-ID scaffold0066 7; pos 91915 to 92559)
caaaacaccaagagatttcggtaagtttatatcaattaaaacttctctgtttatttgcccctaaaaagtggttagtaaaattaaccagtggatggggtttaatttctttgtaggtcacttgggtgtgtgatacaattttgggtgctctatctttcaggtggtgcagtgtaaagcgggaaggaattttggaaggctctccttatgcgatatatcgtcttccttggcatctaatccctatccaaatgctgcctttttcttttttcttttttctttttaaatgactaacaacaataatgttaagcccttagaatgatcctcaatttagatatcatgggtgaaggcccatttttccattcaagcattgcaatatagctagctactctctctatctctctctctaatcggtgcgcagaacgggaacaaacatatccgaatactgaatttggatggtccttcatggaatgtcaatggttgctttataaacaaagaatataatcaaattgaaatgagaactattaaggcttgaacttaggtcagcataaagagctctttcagatagaaccagaaggttaaacaggaggaaaagattgtgaaagagaattgggggaattgtggggtattgattaagattcagaatctgtgtga

SEQ ID NO: 63054 - DNA, 573 bp, Cucumis sativus
  Intron number 2 from transcript Cucsa.047520.1 (locus Cucs a.047520) derived from phytozome v7.0 (chr-ID scaffold0054 2; pos 2518923 to 2519495)
gaggatttggagggaatcaaccccggccaggtagaatttaccgccatgcaatcttctttaattactttgttgttgagtagattgatcgttgagaagttttaattcttcactctgaatgaactttgagttcgttgtttccgggtgctgattagttgtataattgtctatgtatggtgtgatacttattcattttatcggacggggaagtatttattgtgtctatgaattgagttggtggtaataataatgtttgagaatttgcagtcataggttctacttttcaattagtgggaagtcttcgcttaatttcttcatcatgcggatggaatcaatgtatttataccaaacttggcgtgaacattagtttagatgccacatgcagaagaactaattatgggaacactacaaactactcaacatgaacatacactgaaaaaaatccacgtcctctccatatgtttatgtttattattactattttattttaatccgatacttgcttttcttagtgatatgaaaagctattgctatgtttcaggtttcttttttgctgggcgtgattccaatttttgt

SEQ ID NO: 63055 - DNA, 1026 bp, Cucumis sativus
  Intron number 1 from transcript Cucsa.061500.1 (locus Cucs a.061500) derived from phytozome v7.0 (chr-ID scaffold0065 1; pos 32767 to 33792)
ttttacattgatttcatattctcgcgttgttaccggtattctctcagtctccatctttgtctttcttctcaatcgaaaaaataaattaggacttgctcaatgaaagattggagtagtcgtttgattttctaattttattctttgttcaataaaatagccgaatatcattcttatttttgtggtaagtagggtcgtggtttgtgtttggctgtttcaattcgaacgtggttgtaccgccattttgatttgttgcatatgtctgttcccccccatttgaagcccgtcacttcgtcgcactcatcgaaactcaattgaatagcggtagaagcaaagaactgcgcctcccccgctcgttactgagcttacactattcctcgattttgtttctcttgctcggttctcaacagttggatgtattaatctgtcatttcttctttttgattcacccattgcctttccaggttcacttcgttatttttgagatttagtaatggacttcgaatagtcgtctgcccatgcttgccttgtatttaattttttttataaaaaaattgtatcatttgatgtgttttatgcctatacaggtgtcaaggatgctatagatttaattttagataatgaaacaacaaaattttatagaaaagtgtcgtgattgcctcattagacactcatgttggtgaatcaaagggaaaactcccggttaaagtaggacttctgggatggtttagatcccaactttattgaattcccacttcccatatctttcttcttaaatacgggtttggcagatagaagttttgtcatcttactttcacgtttgagaatatattcttgaagtagaaatgtccgtatcaccagtatttattcgcattttcccaatagacctattctactgttaaccaaatttttgctcatattttcttacttatcattggtggatacgatcaagtactggtagttctcgttattttaatgctttgtgtatgcactaaagatctttttgtgtcatgcagcttttgaatcatc

SEQ ID NO: 63056 - DNA, 608 bp, Cucumis sativus
  Intron number 3 from transcript Cucsa.120040.2 (locus Cucs a.120040) derived from phytozome v7.0 (chr-ID scaffold0099 8; pos 2008076 to 2008683 reverse strand)
aatagctgctggatcagcagctggaatctcatctggttggtctctctgttatatgcttgttgtttgttgattgatgatggatataaagtattttctgcaatatagtatgccttcgctacattataggctaagaatgtgataaaccacccatattatattagtacagtaggataggaaataagaaataacacgtgtgagtgaagggaagggtagcaatataaataagtttgtaaagggcgggggatggagtttttagtttttgagtttcagaatctattctgttattccttgagagagagggaaacaggagattgtttttctgttatttctttcaataatatcagattactatttctatccgcggattccatcagaatgttattaatcataaaatttaacaactggcctggtaggcatttctttctataacatgtttagtgccagtggctgtgatagaacaatcaaacatttgttcttttttactctgtgtttcaaagtaaatttgtccacatgttggtcttcttatgctgtcttatttagtagacgatggcaaggacctcttttctatttcctccattgaagctatttttctattttgtcagggttta

SEQ ID NO: 63057 - DNA, 650 bp, Cucumis sativus
  Intron number 1 from transcript Cucsa.120040.2 (locus Cucs a.120040) derived from phytozome v7.0 (chr-ID scaffold0099 8; pos 2009556 to 2010205 reverse strand)
aaacggtttctgggtattcatacttcggttgaaaggttctgaattgtacaaaattcccattttttgaaacttctgcttcttcttctgtttacttcacctacatcaaagtacctgttttactctacgtttcatattttccatgtacttttttttaggcaatattgtccatatacttgaatcatgcagctatggcctttgcttcctgaatcttttttcacctctaaatttatttgattcattgtcgtacttcttatcaatatttttaaaaatccaagcagttttgaaaactaataaatggaaaagcaactcctcttcaaaagccatggaactgtagttggtggctcgctctgtctcaaacttatccacccaagttcgtctggatagagttatatttgatcttcgtggtacattcacacatagttagccgaagaactatatgtgaatgatcatatcgataatgggagctttcgattccatgggattaaagcttaacaatgcccctcattacccttgtctttcctctctcccttctgcttttttctgctccaatttctcaactctaaacttctcttcctcaatttctggtttacatgatctcagtattcccatctctaatggacttgaaaattgtgcagtgggtaataggagtt

SEQ ID NO: 63058 - DNA, 711 bp, Cucumis sativus
  Intron number 1 from transcript Cucsa.111220.2 (locus Cucs a.111220) derived from phytozome v7.0 (chr-ID scaffold0095 3; pos 92383 to 93093 reverse strand)
aatttgcttctgtgagtaatctattgactcgttggattttgattttgcacttcatttttctttttttcgttacttaacttgtcaaattaacaagacttggttaccttcattaggacgagtgaataccttgagataaaaaaaaattcttacctataagaattttgttgcattggcttcatgatgtaatgcttggaatgccctgtgtttataaaaacaatccctgaggcctgatgtttttggtttttgaaagttgtatttattttgataaagacaacgagacctctagtcaatgatattgtccaccttggatatcaaccatcttattttgtttttggaacactcaaaagcttcgtgccaattgagataattctcttcacttatgtacccatggtcacttccttctctaactaacgtgaagctctttttgcactcctaatatattttgacaccatctaacaattgtattcttagtcatatctcaaaaacaactttgcaagaatattttttcgtccaaacttggtatggattttaaaaaatatggtttgaaagtagataacagagccaagaaagtcataggtgagataaatatttataagcttaacttttagaaacataaaccaaatggtacaaacgggactcgaattttgaatccatgtttcttttaatgattgtgtatcatatttactattgaaggttagagcaggagttgag

SEQ ID NO: 63059 - DNA, 994 bp, Cucumis sativus
  Intron number 1 from transcript Cucsa.054230.2 (locus Cucs a.054230) derived from phytozome v7.0 (chr-ID scaffold0058 2; pos 548762 to 549755 reverse strand)
gctataagtgccaagaaattcaggtatgagtataaaccttttctatccacaacgcaatgcatgtataaacattcttataaccatttttcacaccttccacaatcactttttattttattttttaaactaatcttataaatatatcatccaccactaatttcttgtatttcaaacttttttcatttaaaccacactaaaaaaaggaagaaatataatggaaattgaagtcttgcaaaaatatgagaagaaatatgcttaattttcgaaattcagttttagtttttttatttttatttttagaagctaaatttataaacacttgtttccttaaaatatggttaaatttttttgcttccaaagaaattgaaaatgtattttaaaccttcttatgaaattaattttaacaaatgactttgttttttgaaacaaaaacttggtgttaagaattttgttttcaccgattgagtatggttaggtacactatctaacactgttatatatgcattgaggactcgagttaaaatgtgttggtcctaaatagtaatatggaaatacgattttatttgattttttctttaattcaaacatgataatatatatagaaaaagatgggtataattatggcacacattattctccatttatatcaacaccgtttccttttctttttctttttagaaatgatatttcctttacaaactatctacgcttgacaaaaacccaccacaattaattcattcatattttgtcctccacattgtcaacttttacaatatattgtaccacagttaattaattttaatatatattaacttttttaggaatgttctctaaattaataaaaattaactgacaaattatggtaaacagtatttaattaaataatgattatggaaaatagaagggtaataaaatatgaatttgacaatgaaataaaagcctgaggtgtaatattaagctatgattatggaataacaataggttacaacgaaag

SEQ ID NO: 63060 - DNA, 836 bp, Cucumis sativus
  Intron number 1 from transcript Cucsa.063140.2 (locus Cucs a.063140) derived from phytozome v7.0 (chr-ID scaffold0066 7; pos 7684 to 8519 reverse strand)
ggtttggataatttggtgcgaacaaaaaaatttattatccttaccaattacttccatgaacttgttttgatgaagattttgtgtttattaagacatcgtttgaattgcatttcaagattttatttgcttttttcttctctttccctcttaccagggagcaacgtaactgaaattagtttgtgttcttttattacattttctgatcaatcccagatgatatttttggttgtaaatgttctttttatttgcttttatttatttttgcagaatgattgtatgagcagtggtggtgattctactgctttattttttatttttttattttttagagacaacataagggcatttgtataagcaatccacaaaagaaaaggaatgaaacaaattgaattggaggtggttgatgttgttttcgattagatcaaggcttgaaaagactaaactattcatgatgttgacgttcggttgagcaattgtggcattctcttctttttttttttcttttgttgtgcattacaatggagaatattttagacgtagcctgatacgtattgtgttgatctattattcctgttctctttttcattaactttttgcatagtgaatggatttttttaaagaaactaaaaatcttggaggaagagttcaattttatcattcttaaagtttgtattaatttgttttatttgaaccattcatttgaggatgcaacttttcagatattataaactttcatctctcgaattttgcaagtattatagtgtctatttttgcttcaactcatgttttctgtaaccccaaataacagattttgaagcagtaatttgggctacaca

SEQ ID NO: 63061 - DNA, 320 bp, Cucumis sativus
  Intron number 1 from transcript Cucsa.001290.1 (locus Cucs a.001290) derived from phytozome v7.0 (chr-ID scaffold0002 0; pos 17044 to 17363 reverse strand)
attgtttagcttgtctagtttcacttatcgagcaggtaacaagcttttttttcctgtttgatgccttgacggttttgaattattttgcattggaatcattttttttttctattaacatctatttagttcatcgttgcagatgatgaattttcttattatctcgaacttttggtctcttctatgtgcaaaaaggatcttttattctctttcaacctctgtttaaacttactttccagtttattcctatctgatgattttcatttgttgtttgctcttcttttatagacaagatatcttcagttccgaaactggcccgtcga

SEQ ID NO: 63062 - DNA, 537 bp, Cucumis sativus
  Intron number 1 from transcript Cucsa.074580.1 (locus Cucs a.074580) derived from phytozome v7.0 (chr-ID scaffold0078 5; pos 402813 to 403349)
aactctcttccaactcccataaccactcttcactggttggttctgctttcactctacaactcttcaattcctcttttatttcacaatgtggcttcaattttccccttcaattgcttctacgcaacgtctctagatttctcttttctttcggtgacctgtgttccttaacttgatgacaatttcttctcttggacttatcttatactttacgaatcaaaaatgatagaaatgtactgaatgtgccacctccaatgatattttgaagtccaacttggtgttcttcatttgttagtaagcttatacttggtttatctaggttgtaatggttgactggttaatgtatttggcctactcctgggagtatgattctaaagactgtttctggatgtgcattttgtggctagagggagatttaacactttctatgctaagccgattaagagattgtcgttttcattagttatgttgttttgaatttctgaatagaatttcagtcgtgcagggactagaggaccagcataactttctccaacagtt

SEQ ID NO: 63063 - DNA, 424 bp, Cucumis sativus; identical to SEQ ID NO: 62967
  Intron number 2 from transcript Cucsa.043190.3 (locus Cucs a.043190) derived from phytozome v7.0 (chr-ID scaffold0054 2; pos 89053 to 89476)

SEQ ID NO: 63064 - DNA, 753 bp, Cucumis sativus
  Intron number 1 from transcript Cucsa.029520.1 (locus Cucs a.029520) derived from phytozome v7.0 (chr-ID scaffold0039 7; pos 142384 to 143136)
tggtcctgtacactatatattccatttccccctctctctcctcctttcataacgtttctgtttctggtttctttcttgttttgatcttctgttgcttgtttacaccaacatggttcaataactatttaagaaaatttagataaaaacttgtttgataactatatcatgagttccgatgtcaattattaacgaaaacaatataattattgttttctagcatttcaaatgctgctcaaatttaatctgcattattatttctcattcgagtcattaatcccaaatataattgaatcatattattaggtaaattaaatactccccttaagtaccttaaatttgtactttgtggtcagtggttatcatgacatgccattttgaatttacataatgtacggagattgcaaaagtacctcgaatttatatcatgaagttggtggttagtggttaacaggaaatgcaatttttgaatgaatgtgttgggagaaaaactgcaaaagtagttcgaatgtggtgattagtactgttgattgggatgtttctagctttgtacgttgaccagtttgagtgttacgatagtttttgcctttgattcaagaaattattcaagatgacctgtaatgtcagaatgtgttcacagttttgcatacttggatacaacttacaagtatcttgaatttgtgtccggcatctcaccactagattatatttaagagtggtctcactcttctcgcatggtgatgttgtaggttttag

SEQ ID NO: 63065 - DNA, 994 bp, Cucumis sativus
  Intron number 1 from transcript Cucsa.060590.1 (locus Cucs a.060590) derived from phytozome v7.0 (chr-ID scaffold0063 5; pos 58304 to 59297 reverse strand)
gctgctgcagctcgtgattatcaaaaggtatttgtaccatcaattcgcccttccaaagttgtgttttttatttaattttttctttattcagatctatttctccagcttcgttttgagatatcaatagcgatcgggttatattagtgtctgattctagaaagcattaacatatcatctataactgcaacttcagtttattgatctgcaacctagacattgctgcattgaatcagatgattcttcttccttcacccctatcaaattgctttgtacataactacagaacctgggtcacactcttttggcataatttaaccttattcaatacaatgcagcaatgtttttttatttttcatttatttaaatgtgctacaactctgcaccagtgtgttgttatagttaacctatgatttaatcagagtggcttagtttgataaattggactgcgttatatgaggctgaccttcgattcttcttatgttggttgttttgtttgaaagtagtagtgaagtatcagtatgttgtggtatattttttcaaaattttgtttcacaagtacttactggtttcaaaggttaaactcaaaatacccctctaggctctatctgtgttgtccatatatgcatctctactggattccaggcgtgtgattctcttaggaatcttgcaacaaattttttccctcaactaaaaatttccccatttacatgtccatcataacattgaccttagggattttgggctttacatttatatttccttaatgtgggaacattgactctttgggatctcattctctgacctttcttttcttcgaagctcttggtaaatgatgctcttaccaaaaattttaaattcagaacatttatacttcttatggataactgggaatcgttgagggctgtgaagtatgattgcagtttttaccggtttcttgaatatatttatggactttacaggaattgcttgctcaagggaaggctcaggcatcaaa

SEQ ID NO: 63066 - DNA, 286 bp, Cucumis sativus
  Intron number 4 from transcript Cucsa.099320.1 (locus Cucs a.099320) derived from phytozome v7.0 (chr-ID scaffold0092 6; pos 157906 to 158191)
gccaaacagagattgtggctgtcgagatagctgaggtaaattcaaaatcactatataccagtaattttttaaatggttaaaattacttttggatgtgatttataccatcaaaattgattttgaatcattaaaatatgtttttgatttggtttgacaaatgagaagaatatcccgtgtttcttatcaaaattgtgaggccctccttcatcactccgaaatgaaaccgaaaacttggatagggaatactgaaagatgcagatttgactgttatgacaggttggttcat

SEQ ID NO: 63067 - DNA, 829 bp, Cucumis sativus
  Intron number 1 from transcript Cucsa.038550.1 (locus Cucs a.038550) derived from phytozome v7.0 (chr-ID scaffold0050 7; pos 84015 to 84843)
ttgagtttgctgtgggagataaggtgttcttaaaggtagcacctatgaagggtgttatgcgttttgagaagaaagggaagttgagtcatcgtttcgttggatcgtttgagattttagagagaattggtattgtgacgtatcgtttggcttaccaccatctctctttgtagttcataatgttttccatgtttcgatgttgaggaagtatgtagcagatacatctcatgtagtccactatgaacccttggagattgatgagaatttgagctacgtggagcaacctgtggagattctggctagagaggtgaagatgcttcgtaatagaagcattccattagtaaaggttttgtggcagaatcatcagattgagaaggcgacacggaagcgagaggatgagatgaaaacttattatccagagttactttaggattagaactttcgaggacgaaagtttcttaaggagggaagaatgtaactccccgaactttaaggtatcttacttttaaattaaattgtatttttgtttaaagatttatttttaaaagaaaaaaaattaggaaagaaaatgattggaaatgttataataataacaatatatatttattgttattattataattaataatataattattataaaaaaaagaaaaagaaaattctttttttcttctctctctcgccgcacaccctcccctttttttctttcttctttctttcttctttctttcttctttctcttcttcttttctctttcttttcctccattcttcttccgtttctccttcttccttcagcccagcaaccacccaccccaaatctcttctacttt

SEQ ID NO: 63068 - DNA, 810 bp, Cucumis sativus
  Intron number 1 from transcript Cucsa.058540.1 (locus Cucs a.058540) derived from phytozome v7.0 (chr-ID scaffold0061 4; pos 699765 to 700574 reverse strand)
aaatcgctccgccggattgtcagtgcatatctcaagtacgttttgtttatccttctttatatattgggttattgcgatccactcttttctctttgattcatatatgtatgcactcgcgtattggttattggttaaaacactagttttttaatctgggtattgggggtcgttttgaattatgtaatttcaggaatgttattgaagtctgtgaattaaggtagtagttgaagcttttaagccggatagagtcgttgagattgaagtattggcttgtttcaactggcaggtggttatggatactatctccattcgttaaaacgcattggaatctttgtcgtttaacgacttaattgaaaaagaagaaggaaataatggatagctataatttgtattgacactgcttttattgaaatctgtgaattatgatagtagtagaagaatcttttaagctggacggaataattgagattgaagtattgacttgtttcaattagcaggtgcttgtagaagctattttcaagaaaaagtaaataatggatagtcataatttgtgtttatacggccgttttttgtttctcatcttcgttctcccttgtttcttgagtaatcacatttgttggtggatatttcagtatcttatttgttattcttgtagtaggaattctctttttgtggtcttttttttacggcggtgtattctttcatttttctgaatgaaagtcatttgttgctattaaaagaaagtatcttatttttcactcatatattgatacagctatccagaggcttcagaagaagacgtgaaaagat

SEQ ID NO: 63069 - DNA, 586 bp, Cucumis sativus
  Intron number 2 from transcript Cucsa.128200.1 (locus Cucs a.128200) derived from phytozome v7.0 (chr-ID scaffold0102 4; pos 274388 to 274973 reverse strand)
gattggccattcagtgaggttaatttggcaaaatggacattggtcatttctaagttatttatgaattacatactccttgtgttcattggacatacttgttatgaagcatctaaagttagaagtttgatttgctgaattatcagatcaactcgtttccttattttactgtcttgtgcttttttttttgtttttttaatctatagctgaggattctttatcctcagacatctaattgtatgtcactttttcttatctacatactttttagtggttcctttcttttgaatacaaaaattgcagggtgggaaatgaaactctgaaccctagggaattgaactgagctcactttagcccttttagttgttccctttagttggagattaaaatactttgatcaggtgtttctccattgttttgtagctttattattattatatgaaatatgaatagaagcatggttggattaggttagatgttttcgaattcttctgaacattttgcacccctgtgtttgtgtgggtgtgggtgtgtgagcgcacattgcataataactcctgtaacatggatttttatatagggttgaaca

SEQ ID NO: 63070 - DNA, 157 bp, Cucumis sativus
  Intron number 1 from transcript Cucsa.128200.1 (locus Cucs a.128200) derived from phytozome v7.0 (chr-ID scaffold0102 4; pos 275161 to 275317 reverse strand)
cttaggtgtttgtaaatcctggtactctttttcattatctatcttcgaggaaaggagagaagaaaaagcgtaattaatttctttgatgtttttggtgtttctttttcctgttaatttgatatctctaacttaaattttgaatgtgctacaaggaatt

SEQ ID NO: 63071 - DNA, 737 bp, Cucumis sativus
  Intron number 1 from transcript Cucsa.012020.3 (locus Cucs a.012020) derived from phytozome v7.0 (chr-ID scaffold0015 4; pos 1447665 to 1448401)
ttggttacattttgcattttcttttttatacccaggtgagaataactgcaaaagcattgtttctttcgataacccacttttcccttttcgtttttttctttttgttttcttattgctctgtttctctctgtgtgtgtctctttgtgggtttcttcttgtgttcttcgctacgcgtgtgtgggtttttcttgggagtagaggtaaaggtattcgttcaactgtgaatttgattgtttaatggaaatgaaatgggttattgaacttcacgcttggaggaggaggaattgaggggaatgattaacttactgctctgtatttttttattgtttgtttccttttttgtcacgcaaagaccttcttgaccagaaagtatatgaagcgaggaattctttggaatgtgggcttttctctctcccttggatgttattttattgtataccaaaaaaaacaccccatcttttgagagtcaggtttgtctctgggaatcgaaaggctctctttatcgatactgagcagctcagctcatcgtctttccttcctactctagaaatgggttttggtgagtgctataataggaaatggggttttttctatttgggttttttttggttttgctttccggactttaaatcctacaggtcaaatgctgttgcgccaagcttcctcttgtgaacattttggttttctgtttaattgcagaaggtgtcagaggaattttcagaaagaaagtaagctca

SEQ ID NO: 63072 - DNA, 589 bp, Cucumis sativus; identical to SEQ ID NO: 62780
  Intron number 2 from transcript Cucsa.078400.8 (locus Cucs a.078400) derived from phytozome v7.0 (chr-ID scaffold0079 3; pos 755887 to 756475)

SEQ ID NO: 63073 - DNA, 749 bp, Cucumis sativus
  Intron number 1 from transcript Cucsa.105610.1 (locus Cucs a.105610) derived from phytozome v7.0 (chr-ID scaffold0092 9; pos 225376 to 226124)
aacattatcgtggtttggatgaaaactatcatttgctcaatctttctctatttcaaaatttcaaagaattgaaaactcttgacttaacttataatgcattcaacgaaattactggaaaccaaggtacgttatctgttcttgattcatctacttcttaattatttatttatatatggttcgatcattcctaatataagtaactaacacatattattattgtttttctccttccacaggattcaacaaatttccaaatttcaacaaattagaaattttaaatctttctggaaattattttagaaataaaatcctttcatctttgagtggatttacctcgttgaagaagttgttgcttaataacaacgagttaaatgaatctatcactttacttggttagttgttttgtttatttaaaatactcatcaatatacacatgtatttagaaccttcagtatcgatattaaaaaaaattaaaagagctaaagtttctaatgatataattaggtcctaacatagtttcttttcatatatacaatgtaatgtgtaggttttgaaaacttgagagagttagatctaagtatgaatagattgaatgggacacttcaaatgcaaggtaattaatgaagctcaaacttcttttacaacttaatcttcactattattattgtatattgaaaagtatattaaaatttgaagtttttggaactaacatgagcattattatttgagttattattgtacagggctag

SEQ ID NO: 63074 - DNA, 773 bp, Cucumis sativus
  Intron number 1 from transcript Cucsa.088110.1 (locus Cucs a.088110) derived from phytozome v7.0 (chr-ID scaffold0088 8; pos 520448 to 521220)
taaccattggggtgttcactcttgtaatcctcgcggtaagcttcgctgcagtatttctatttccgtttattttatttgtttttttaagctcgttttcagttgtggatttgtatgattctgtgaattttgattgatttttaagtttgtgtttgatgctgagaagttaactgtttaatccgacttaggtcgtggttcttccctgttatctagtctccatttaaggttgcgttcttctctgaccaaaaatctacttgaacttgggtatttcttgttaatcctcttaaacaccgtgtttgagttatgtaggtgcctaagtatttgaagaattcaaattaagattggagagagagagagagattttaggttaattaacattatatttctgcctgtattctcagccttcttagctgaccgcagacagatacagatcgaaatactaggcttgaactgagtggggatattcaaattctgaagaactcaatttccttcatgttttatcattgtccttgtatgacatggtttccaaccacccaaacaaaattttcccccctagaaaatgaaattagatatctgacgtagttagagagcttgagaacttgatggaacttactagtagcttttggattctaattttttttacaaaaaggtacagatgtttccttgagtattcttgaagtggaatccttattgtgcatcccaaccgagcaagcttttttcttgccttcattatttgctcgatggatattgattttctccctctgaatgtgacagct

SEQ ID NO: 63075 - DNA, 790 bp, Cucumis sativus
  Intron number 1 from transcript Cucsa.038030.1 (locus Cucs a.038030) derived from phytozome v7.0 (chr-ID scaffold0049 3; pos 81990 to 82779)
gggagtgagaaaggcataatttgagtgaagggaaagggaagagttgtgggaaagctgagggaagctgaagaaaagtttttgttttgcatgaagaaactgaggtaaaattatgatccatttatcaacttttttctggctttgatgcatataatcccttaagtcagatttgagaacgacaagtgatgatatcttgaatccaatcaataatctgtattcattacttttttgtatttcttcacaatagatgtaacattgatgaaatttttgcattatctctcaaacaaaatattgtatgttttaagtatatctactcttaaattcataattaaacagcctcgttgttgtatagttgtctggcatgagacaagtttgacttttagaatgctaggagcccatgccctgtggtatcaacaagttaggatttgtattatattgtaatattttccatttggttgctgatatcaaaaccaacttgtgagttgctgatatcgaaaccaatttatgagtttttgatatcaaaattgagttataagtattatgttttccgtacgtcatttggtgtttgtgtctgctattacgctaaaaaagttcccattttgacttgatcaggttcttgtttgaattgttattggatccaacatcgttatctgataaaacagcacacgtaaatttgacatttttatgtacttgctttgtgaatattgctgttaagttgactatagtttctaaaaatatgcccttttccgcattgccaggtacagagcagtgacaagtgcatactacagaggtg

SEQ ID NO: 63076 - DNA, 552 bp, Cucumis sativus
  Intron number 1 from transcript Cucsa.045760.3 (locus Cucs a.045760) derived from phytozome v7.0 (chr-ID scaffold0054 2; pos 1486571 to 1487122)
aaactgtggattctctcgggtatcttcacttcattttttctttctttgataacccattttgaaatacccatctgccaaatcatgttttgatgtattctcccgaatagaaaagcttcattgtgatttgtcatttttctttgatggggaaagccgtttttctcgactctgacctccctctcatccgtgttgaaaaggtgttggagtagtttgttgggttgtttttgctctctctgtttccaaaacaaaaatctcgagctgtgtgatcaaatgtttttggtttaacttgtggtaaaactcttaccagttatggaaatcaccagcgcccttaattatttttctgctaaaatttcgccaaatttgtgtagattctttttttacagctcattctttctcttctccaatctgtgtatttaatgatgccgttcacactccctctccttctaaatcatactttgcatataagaacatcaaatttctacaactctctgtcgtagtggtttcatcattttttttaagatactttgttttattgtttgggaatagggatctacc

SEQ ID NO: 63077 - DNA, 956 bp, Cucumis sativus
  Intron number 1 from transcript Cucsa.013000.1 (locus Cucs a.013000) derived from phytozome v7.0 (chr-ID scaffold0016 4; pos 778651 to 779606)
gcttcgaccgccgttgtgtttgccaccaccgtcgggtaagttcatttttcaaccactgcttgtcatctgtgcttgttcaacaatgttgtattttgtttatgtatttcttttctctgttttttattataggtttgcctttgtggaaaatatgtataaagcaaaatattcttcaacttacgatagtagatttttcatagacaacattttgatgagtttcatttgcttgcaagtagggttaactgagcactcaaacttcttttattattgctgttttagccataaacgggtatgatattaaagtgaaaaaatttgaacggtaaaataattttgattgtttctagagataagattttagtagagaatccttaagatgtattatgttagtagtaaggtatataaagcaaaatattcttaacttacagtggtagatttttcatagacaacattttgatgactttcatttgcttgcaaaaaggggttaactgagcactcaaacatcttttaattagtattttagccataaatgggtatgatattaaagtgaaaattttggaacgataaaataatttcgattgtttctagagataaaattttagtagagaatccttaagattctaaagcataaaatattatgttagtagtaaggtgtttaagactttgaaagggatggagaattgtaccattgagttctttgcagcctgagttattgaacaataggttgaactattttacgtattaccattagttggagaacttagttcaacattttgtttgtccattttcattcatcagtctcaagtgactatagttattaattttaatgttttgtgtctttgtagatacgttcgtgcatatattcattttgattatctactcttttgatttgattatatactcttttgttttgatcatcaagctcagatctggttagttcgtggccagatttgcatttgaag

SEQ ID NO: 63078 - DNA, 608 bp, Cucumis sativus
  Intron number 1 from transcript Cucsa.087950.2 (locus Cucs a.087950) derived from phytozome v7.0 (chr-ID scaffold0088 8; pos 423924 to 424531 reverse strand)
gttttaaagtttttggtggtggcaacgcctttcaggtttgtgggttttcttgttactggatttcccagttgctaaattcaaaggaaatttgaattgcttgaactttgtgaatgattggcctgtctatcggttggatttacttttgaattatatgtgttgtttgttttttgttttttttttgaagcgggatatggatctatcgaaattgcagagcttttatatttgatttgatttgatttggaaatgaaaaatgttcttcttttgactttagtttttttcttttgataatctttccttgaaaattcttcttttaattgatcaaactgtttgaataaatgcccgtaagaattgtttggctgcagagactcatatttataatcccattcatttggtggaagccttcatgattaaggttttcttttgtttagggtaattatacgaacaaatataattgtttggagacttgttaagatctctttttaggcacttttgctatataactttgagttgaagtaagttttctggagtttttaacaaaacttttcctctgaaggttttgttggggttatttaggttgtatcacaaacgagaccacagctttcctccat

SEQ ID NO: 63079 - DNA, 756 bp, Cucumis sativus
  Intron number 3 from transcript Cucsa.089260.1 (locus Cucs a.089260) derived from phytozome v7.0 (chr-ID scaffold0089 4; pos 585088 to 585843)
ctggtaagttatttctcgctaaaaaatcttgttgtagttaatttcttctcccaaacagcatagtataatactatgacctaaccctttttagtactcaatagtttctactacctttttgtttaggacgatcttataacttatgatattgtaaaatgatcttcgcttcatcattttatcatcaagtataatagtttttcatcctaagttagatacagcataggagttcataaaacaaaatttttgtgtagagtgtgcttgcatgtgcagtgaaatgtgttggacattgtgcaattgttcgtggaggttgcttgatgatttactatttaatgctcgagattatcaggagatgacatgtaaacaaactggagcacaatttattttcttttatttgaaaattttctatggtttattttgatcatctgctaaaattcgacaaccatgtgagagattctatacttcttgactttgtcatcagggtattgttgggttttaatacactctggttatatttgcataatctaattggcatgaattttccttttaatgaaagggccacttcatttgccttagatgcataagcatgttaatttgacgcatatttcaatgaaatgctacataaaatttgatttttagggttggtaaacagtatgttttcattgttattattttattatagaaagttagttttagccaaggttttgatgtttctcttcatctacagctcaacagtattgcttctcatcgatcatcagaaag

SEQ ID NO: 63080 - DNA, 579 bp, Cucumis sativus
  Intron number 2 from transcript Cucsa.066100.1 (locus Cucs a.066100) derived from phytozome v7.0 (chr-ID scaffold0069 6; pos 661390 to 661968)
ccaacctactactactggtactttctttttcttgtctaacaaattatattagaactgatggatgtgttaaaattattgcttagatctaaaaagtttaactcttttaaatcactatttagattgtaatttttactttttaataaaaatactactatgagcctctattcaatttcatattttttcacttttcttgaccaacttttagaatctaagtgaaaatttggtaactaaaaaaaagtaattttgttttttaaagtgaattttcgattgttagctaaaaaataaacaacataatcttttaataaaatttctttagctttcaatttttttttttggttaatctcaatatctaacaagaaatgagaaattaagaccatgttttcttaagaatattataatatatataataatttgttatgtaatacatctgattttataatttataaactatatgtgaagtaaatattttgtagggttttttaactctatgaaacttttaaaaacttatatcaaattaaccacaaatccaatttcaatttatttttacataaactttcagagctttcaggaggagaaaca

SEQ ID NO: 63081 - DNA, 775 bp, Cucumis sativus
  Intron number 1 from transcript Cucsa.041690.1 (locus Cucs a.041690) derived from phytozome v7.0 (chr-ID scaffold0054 0; pos 262043 to 262817)
ccaccggtctttgcgttgcagcttttaacattggggttagtttcttagttttgttcttcaattggcggcatctgtatatttttcgttacttgcaccatttgcctgcgttttaacgttctggttggtgtctacaataatagtgcagccttttcctttcatgtcttcattttcttctgataccagatgttataattaccgatgacttgattgttatatgcttgtctatttaatcaaatttgtacctgttttttgttagtttggttggagaagatgtttgcaattttaggatgaaacctttaggcgcagacgcccattttggctgagccaaatgccaaatgttcttagttacctactcttaccttctaatgttaacaaccataccaaccagatgattagctgttgtgactttacctgacttatcgtcttgaagaaaaaaaggaaaataaaagccaacatcaactcgtaagctaaattaaccattaattggaaagacaagtctcctagctcagttttagcatcaactcaacttggtgctaaattttgttactcgcctttatgcaactatggttgaaatgatcatatggtctcttcgatgaactttttgtaacccgcattggcttgtgttggattccctccattttttttaaacgaattattttattttgttgtaatcctcattttttcaatgaaaatatgttttctattatggaaaagcatgattaagcacttggatagcaataggaatttgctgatgccatggttctcgagtaggtac

SEQ ID NO: 63082 - DNA, 516 bp, Cucumis sativus
  Intron number 1 from transcript Cucsa.078420.1 (locus Cucs a.078420) derived from phytozome v7.0 (chr-ID scaffold0079 3; pos 766218 to 766733)
ctctctctctctgtcgttcattgctgagttcgttggtattaatttattttccttattcattttctttcttcaattcaacccattactaaaaagggtcaaattttatctcaactcctgccgaattcgatctgttttgaactgattttttttgtacggaagagggattctgagatgtttggaatttgttatgtaaagtcgctgtgattatttggattgttctacttgagaattttgtgtgctggaaagtctcccttcttcatccgcttgcttgcataccccagtttctcgtatcggttgacaaatatattttcttcaccttttgatttttgaaatctaaagcgtaagcaataattcaataattctcttttaacagaatgagttaaggactaagagaactctattattcataagtttttttttttgtgttcgagctgattcactgctggaatctgattggtgtttgttgttttccactctctaggcggttatcgagctcacatctcaggaacccaattc

SEQ ID NO: 63083 - DNA, 442 bp, Cucumis sativus
  Intron number 3 from transcript Cucsa.086900.1 (locus Cucs a.086900) derived from phytozome v7.0 (chr-ID scaffold0087 3; pos 273340 to 273781 reverse strand)
attatcgaaatccaacaaaaggatccttacttcatgtaagcttcaagttccagttcttactatcttaattcatggtaatattcactgtattttcctgctcgagcaattttttcccctagttcttccatgccgtgttaaaaaaaaaaagagaatgaaagtagaagcatgcattctgagattggaaattacgagaatttgaacttcaaaagatctacaatctatcaaatggtttgttatcttaaagatcgcaaacaatcaaactacgcattgactatttccttctattgcatctctcactaatattaatgctgccatgtgtttgagtacaaatattctttaatattatatagtgtgttttttatgttcaatattttcgtgtgcaaaaaaaactctttatgttcaatattttcatttattcattcattgcagaaagaaccaatca

SEQ ID NO: 63084 - DNA, 425 bp, Cucumis sativus
  Intron number 1 from transcript Cucsa.026890.1 (locus Cucs a.026890) derived from phytozome v7.0 (chr-ID scaffold0037 0; pos 46991 to 47415)
aatgtagaagatgatgccatacggtttgttcttaccatacttatctttcgaccattttctggctctggcctggttttgtgatttctgcttttgggagagagggagacaagttactccattacagtttctgaaaaaagggttctagtttttttctttagaatctgaaagggaggaagtaaagattcaaatttggttaattgagttcattaaataatactgctaagtttgttttatgtttgttcgtgtgtttcataggcagatcatttataaattattattttacttgtgtttttttctttttttttaggattcggtctttctctcatgaacatcagtctgagaatctttcttcccatgtagacattcactcgacgaattccgtgggatcagtgccaacaagacttgagtctcctactgataaacta

SEQ ID NO: 63085 - DNA, 584 bp, Cucumis sativus
  Intron number 1 from transcript Cucsa.126830.4 (locus Cucs a.126830) derived from phytozome v7.0 (chr-ID scaffold0101 7; pos 663959 to 664542 reverse strand)
ctgtcattatcggccacccttttgacaccgttaaggtaagctgcatcctctgcttgaactgcagttccttcgaccttccttctgcttattcctgtggactgaaatgaaaattgtctttttgtatttgggattttttaaagtttcgtgaaaatgaaatagattgcaatggtaatagagtttacatttcgggctttgacctggatgctgtgtttcattcacctgtggagttttgagtgatgtgaggctgagatttatctgatatgtaaagtagacatagttgaatgattcttcttgtttaccacttaaattaagttgttgcggagtaatactaaacattttgattgtttgtgttttaaaatgccttttccattactgttttcttttatagagcaactattacctttttatcatgctgccttgtctgtactaagcacattcagactatccaaatgacttccatttgaacttaactgcaggttaagctagttctgcttgtgaatagttagtggctggtagaatgatttctcatattgtctgtttacttaccaggtaaagcttcaaaaacataataccgagtcacgggg

SEQ ID NO: 63086 - DNA, 760 bp, Cucumis sativus
  Intron number 1 from transcript Cucsa.109590.1 (locus Cucs a.109590) derived from phytozome v7.0 (chr-ID scaffold0093 4; pos 516810 to 517569)
gatttccacgttggattttcaagcaatatctggaggtacgtcaaaattatttttgtaaaaccatttcttttttttatttatttgtttttcttacggagaattcaatggtaaataaccatagattgaaaaaaaaaacatttttttgtgggatatggtttttaaaagttattctactcatttaactattttatttaaaataaaagtataaagttatttttaaatttatttttaaaaaacattttgaaactcaaaattcccatttttaaaacgtatagatcaaacctatatattcatcaaaacttagaaactaaaaatattaatatttttaaatatttattaacactagacaaggttgaatgtcattaatatggcaaatatttaggtccttttgaaaacaagttttgtgaaacactcaagcttttagttaaattctaaaatcccaaaaagtgagtgcaatcacatttttgtttgagggaagatcaaaaattggattcattattattttctagaatataaagagtcatttacgataattatttgtaattttttaaaaatattattatatatttaattattttaaaattaaactataaggtagagtagagacccataaagttgccatgcgtgcagttattagagacgacctcagcagatttataatatacatttttgtacattattattgatgatgggaaaactgatttgaaattagtattttgttttgttaataaaaggaaaaggatggttgtgattgtaggcc

SEQ ID NO: 63087 - DNA, 548 bp, Cucumis sativus
  Intron number 1 from transcript Cucsa.107100.1 (locus Cucs a.107100) derived from phytozome v7.0 (chr-ID scaffold0093 0; pos 544140 to 544687 reverse strand)
ccatccgccaacctcgtgttattgctgagatcgtcgtatgttctttctctctttctttttattcttatcttttataatcataattaataatattaagttatgttttcgtttttttatatatattatatatttatgagttttttggggggcttgtttcactatttaatgattttctatactctagtgagttaatgttatgtacagtggtaaaaccaaggtagaagaaagtgaattttattactttggtccctatgcatgactctattatgtctatccttttacagtttaaataccaaaatgaaccataagtttatgttgtgattgagaatgtattattgaatttgtgttaaagtgattatcagaggtgtttccttttttttctttcttttataaaagtgactgttagagcttaatatttgaattggagaatggacatatttcttataacttttcactatggaatggacatctgtttctatataatttaaaagtagcgttaacggggtattgcagggcggcatcttgttgggtccatcggcacttggccg

SEQ ID NO: 63088 - DNA, 961 bp, Cucumis sativus
  Intron number 1 from transcript Cucsa.125070.1 (locus Cucs a.125070) derived from phytozome v7.0 (chr-ID scaffold0100 1; pos 856982 to 857942 reverse strand)
cttcaactgcaactacaatttggatcactttcctggtaaaccagactcataaaatgaaacttaccttttactgttcaatgtgtatgtattgtttgttctttttttcttttttttcttttagacaccactttttgatggatcattaaacctaaaccttctccctagaaaccctattttgtcaaaattttgccaaatagggttttagggttttgggtttgttttctctttttctctaaacattactctatctatggggggcttgtggagaggtattagcattccagacaggagtttgaacgcaaaatttgttttcctcttaaatacgttttcaaatcacaacgaattcaactcataatgaaaatttttggtttgattcgatatccattttggttttcctttttttttgaagttatgtattgtcactaatttgtggtggtatgctattcacattctgaaaagcatatcttaattctaaaccaaattgcaaaaaagaaaaaaaaacaaaaacaaacaaattcaagtttttaataccttgtttgataacttttggattttatgatttctttgcaatatttttttatgtaaaatttgaactgtaaacctaatttaaaatatgaagtatatttttggttaattttttcatttacttacaaagatcgtcatctattttctcataatctcatttgaattcttacccaaatttcaaaacaaaaacaaacttttaaaaactatttctttttatgtttcaaagggaaaatattgttagagcgagataacaaaaccaaagaatcatatagctagagctaggcaggagttatatttagcttaacaaactaattaagcaaagaatgcatgcatgtacaaaactaataaaatggttatattagagactgattgatattctcaaccttcttctatccaaccagtagtagagacaacgacaccggtagcaaccggggaa

SEQ ID NO: 63089 - DNA, 1000 bp, Cucumis sativus
  Intron number 2 from transcript Cucsa.094760.1 (locus Cucs a.094760) derived from phytozome v7.0 (chr-ID scaffold0091 9; pos 872015 to 873014 reverse strand)
gaaaggatctggaaaaaacttgagcgaggtatgttttaggcttgtttgttttaataactaatatactctcccatatgcatttctatggattattgcctgtcttgttataattcagggtgtattggttttgtttcctatcttgttggttatcaaacttgctttatcatgaccttacttgaacaagatttgtcaataatttgtacaactatgtccttgagttcaagctttgctttgtcagtttgcattagaaaactattaaatcatcaaaccctagaatcgaacttttggtttgacaattgtcttttgtgtagaaagaaaaggcattgaggaccttgtggttcttacttcttttttccaacatgcttgatggggtaccttgaattggatttttctttgaaattcagttgttgtcatcgctactacagctgcgagatttagaatgaataattgaaattctagtttgtgttcctttccctttaagtggtagagtttcttttatcatcaattttatgttgtgtattctataatactgccattgtcacttgtcggttggttaatgtaatataaaatatcaactttagggtcaacattttatcaatgattttacatctaacatatttcgtgtcgagaggaagccatctctagtctattcccatggttttgccatagtttgacagcactattcattcatctaattgtctagccaaaaccatctttttcttaaatggatcttcagtttatgtttctatatcaatatgattatctggcatgcacccaaacgtgtttattattctaccttttgactaaattggtaagagttaaccttccagcttttcagtttgaatggttatgattcttcattttcttcatatctggaattcttatttgaaagcattaatgtaaccattctcttgaagcttttagcttttatcatcttttatcatcttttatcatcttttatcatctttagcttttcatcctgcgcttgttctttcgcagg

SEQ ID NO: 63090 - DNA, 643 bp, Cucumis sativus
  Intron number 1 from transcript Cucsa.127600.1 (locus Cucs a.127600) derived from phytozome v7.0 (chr-ID scaffold0101 9; pos 166382 to 167024 reverse strand)
cggctggtgggctggaggctatactcaataagctggtttgtaaattttattagtttcacgtttcttcttgatttgggtatgtgttggtttgagctcagttgcagcctcataggccttttaatcactgtctagagattaatctgttaccttgaatcattttttcaaattgatgcttgaacaaaaccttgggtgactttgttgatttgtacactgtatatctaatacaccccctttgtttattatgtatgggtgcttaatcctattggttttgctttttatctttaccaaatgggtgatttattcgtacgatgtatcaacatgtttcctatttttaatcgatttagtactttattggcattgaaacttatcgtatctcaactttaaaggtaccagttgttctcacttccattttaactttgctcgtagtgttagtgcataggagtaacacaaaattcaacaaactctgaggaaatgtcatgcttgaacatatatttccactttcctgcagtgtttggaactttgtcgacttcaaattgggtcatttaggatcaaactttgtcagtttgggagtagctgtattgtttggtaacattgttgattctttccagagcaagtggcttgtagctgccctttttgctggtat

SEQ ID NO: 63091 - DNA, 629 bp, Cucumis sativus
  Intron number 1 from transcript Cucsa.113400.1 (locus Cucs a.113400) derived from phytozome v7.0 (chr-ID scaffold0095 3; pos 1555777 to 1556405)
actgctttgtgagttgatttgggatttttttgttttcttctttcttttctctctttcccctgttgtgaactttggatcttatctgattgggtttttttttccttttaaattgttagtcttggtaatgttgatctgaccttacactgttgtagtgttgttgattcggttttagattgttggatatataaactctctgcttagtacagctacatgcatcgtgtcagtggtgcatttgtagatttgcatgctttaaaagacaacacaatccattcgttggtgtagatctgtctgaaaactcattcgaggtcacaaatcagtttagaattttttaacgtagttgactgaaacatgtggatctgctgcataattagtcaagcaagtgatcttggattgctagagctaagcttctgtcatttcagctttctgatccatgatctacgaggtcttgctttgtggatccatgtagtttttcttagttctatatgggagtgttgatgttgaattttttttttttagttttgtctagaatggtacaaggaatgagtgatgagatcgtccattctggatctaataattattctttattttgatcttgcaggttgctaaggatccatcaggcaaggatatca

SEQ ID NO: 63092 - DNA, 800 bp, Cucumis sativus
  Intron number 1 from transcript Cucsa.113310.1 (locus Cucs a.113310) derived from phytozome v7.0 (chr-ID scaffold0095 3; pos 1492556 to 1493355 reverse strand)
agacacaagcggcttcctcctggtattgctatctgaccttgctttggcttgttgtctttctgctacaaagttttaagcttcctaatagtttttgatgttttgatcactttaatgttcttctaagaattgaagatgccactttattccctatcttgaaaagtttgttcattttcctttttgttatggggatagagaaacagaattgaaatttgtgttgcctaatttattaacttcactgtcttatgaatttctctgtaattggtgttctgtggagcaaaaaaggaaacacgtcatgcttttcgtaattatgtggctaatctaatgacaatcctttgagcttgttttattgaacttcagatagattgcttctgttttgatccactccaaacgagcttcacaatctttaattggttattgtttataaatcccttggcagtcttgtttttcgtcatttgtggggcatccggattgagagaaatggtaaaatctttagagggttggaaaattttggtgagaggttttgcgaggcattaaatttagctcctttgtgtgtgtgtgaatcggacttcatataattatgagctcagcatcgttcttccggatagaatttcatttagatctttttgttattgggcttgtttctttatcctcttgtatatctttttatctttctcaatgaaagcttggtttcttatatatatatcaaaatccaggggtatgcaaattgataacgtgccaatttattttcgatcttgtcttctacaggcacttctcatctaaatattggcagcgcagtaaaa

SEQ ID NO: 63093 - DNA, 622 bp, Cucumis sativus
  Intron number 3 from transcript Cucsa.007180.1 (locus Cucs a.007180) derived from phytozome v7.0 (chr-ID scaffold0008 9; pos 46411 to 47032 reverse strand)
ctttagttgtatgatttttcaattccctcatcttctatttttcaatttcattggtaaaatgacttttgggtggaaataacccccgccttgtcagcttgttttcaaacatttgttataaaacaagccctatcagtattttatttattggccagaatacataaattatggatttccatttaatttcgctttttttgctttgagcatggatgatctttggtaattattttcatggtttaaatatgattttggttatatactttgaagtttgttcaactttagacttgcattttcaatatatcttaaatttagtcaacatatcaacatactgtatgtcgcatgaaaattattataattattaaccaactttggtaaaattaactttgagggattaaaaataagatttattggaagtatagaaattaaaattgggcagttgaaagaattgaaattaaaaattgaacaaacttcaaagtacatagaccaaaatggtattttgctctgattctcttttggcatgaacagtaaaatctgattcatcctcatgattttttgctgcttgttaatgttattattccacattgtctttgattgagtttgatatatgcatctttgtttgtgacag

SEQ ID NO: 63094 - DNA, 525 bp, Cucumis sativus
  Intron number 1 from transcript Cucsa.007180.1 (locus Cucs a.007180) derived from phytozome v7.0 (chr-ID scaffold0008 9; pos 47235 to 47759 reverse strand)
ctgttcttggattcttgattcagagaagtggggaggtttgtatcaatattgtcattgcttgatggataggtttttatgatatttcttgttggaatgcagtataacataaagatcaaaatatatagttaccacgctgtttcttgtttctagcattaaatgatgggctaggtgttttgttgaacttcctcatggatttattgactatgttgctttgcatgtttggctcattgtttgttcttccaatagtaaactatgaaccaacagaaacatatgatgactttgtgtagctggaatatatggatccttttggggggtttccagcattacattttttaaaatgttttactgttaagcagcacctgataccaaatctattttgttgaaaaagtacttttggcatttgaaagtgtcagtatatctgagtaggcgctggaaatatgctatgtttggtgatctcttgttctttttaagttatttttctcttatgcaggtgcaatcgagctttcgatactatctgagtattat

SEQ ID NO: 63095 - DNA, 769 bp, Cucumis sativus
  Intron number 1 from transcript Cucsa.041950.1 (locus Cucs a.041950) derived from phytozome v7.0 (chr-ID scaffold0054 0; pos 487526 to 488294)
tcattcattcaagataaagtcttcctccacagctggtttgttctcttcttctttacatttatttttcactattctttttaattcataaatttgacctaaccatccgatactactaaaattaaattatagaaatttgaatatgcatatatacattgaaaacgtaaaagatacaaagttaaaaaatgttttgatacacatattttcaaatctatttaaaaatagttaatttcgaatatagcaaattaaatttaaatgtttacgaaatataacaaaattttagatctattgctatgactatttgtaacacagataaactcttgtcacggatagaatcttaaattttgttatattatattttgtaaatattttctaatattttttccattttcaatcatttttcttagaaaaagttaaaaaataaattatatattttataataaataacaagatgttgtgtggattgccttttagtttacttttcaaaattttgaaacaagggatacaacaatatttagaaaaattaagggaggcttcggtaaattagtcatgactcgttaattattttagtattaaaaatagattttatcaaaaacatgtatttatcttttggtaaattgacttaaatggtaaaattgttgaaaatattttcatactaaatctttaaaaaataaaaaaacaagatggttactaggtcttaattttaaactcaaaacctaaattctaaataggttgaaattaaaattgtaggagtgagctaaagaacgcggtt

SEQ ID NO: 63096 - DNA, 825 bp, Cucumis sativus
  Intron number 1 from transcript Cucsa.112790.3 (locus Cucs a.112790) derived from phytozome v7.0 (chr-ID scaffold0095 3; pos 1197582 to 1198406 reverse strand)
ttttttttttttttccaacctctttgatttgaaaggtttcttcttcaacttcaacttcaatctaattcttattcaactttcattttccttcttcatgcttttacatttttgttgtctgctttttcttgtgatcattgggttttaggggtttctgtggaattgcatgttgtgggtttgattttttttttttgccttttttgttggggtgtggttttgggttcttcttgtgaagcttagcaattggttgaaatttgaaaattttgaactttgggggttcttatggcttgtaagtataaggtggggtgagggaaagttgggggatttctttctacttttttctgtgtacattttagctgcgatcgttttgtagcagaaaggtgctgattttgtagttggattgttttagaagaacgggttttctcatcttttgtttttagtgggggaatatactgtttttgaaaaatatagtttcaaaagttgttgatcggaaaaatgatatcttttgttctgggggaggagttgattttaagaatgtgacccttgccttttatgatgcaattagttggagtttgaattttttttttttttgtggattttctttttctgtagctgagggtttcgagaattgagggaaattgaacacaagagatacgtttgaaggtgtgtgttcttttctttgctttatttttatggatgtgttactgaaagttacttaacttcaatctctgtgtttttagtttttttggatgtgaactaagggaaatattttgtcatttgttaatgtaatgtgtttgatgatgcaggaacttttgtttttgtacaaga

SEQ ID NO: 63097 - DNA, 661 bp, Cucumis sativus
  Intron number 1 from transcript Cucsa.011450.1 (locus Cucs a.011450) derived from phytozome v7.0 (chr-ID scaffold0015 4; pos 696398 to 697058)
ctcgtggcgaactttgcataatttcggaagaaacagtgagcaatcatccactttacttcttcttcttaattttccttctttgcattcattatcacacctcctcactacccatttcccccttccacttttaacttcaaatttaataactccattttcaaattcccccattcagccttttctttcccaaatctcagatttcgttcttattacctgttttgtatgtacctgtttgtcatctattggaaaatttactttttcaaggctggttatggaacaatttggtgttactcttttgggttcttgtaattctaattctgctgctgtgcgtacagatagaaatgcccttttttccattttccatttataatttggatatcatggattgctaaatatgatagaatttctcggctgtactgctgtttcctcttgtttcctcttgtggcagaggttctgagttggattgaactagtaaattacaaataaagagcttctgagttggattagattaaacacgataaagatttggtgtttataatagatggagtaaagttagattgatagattaatgtttttttttttaaatttcatttgttagcaatatgtcaagtgggaattatctttatgatataaggtttctttgaatcttgataggttgcacctt

SEQ ID NO: 63098 - DNA, 532 bp, Cucumis sativus
  Intron number 2 from transcript Cucsa.011450.1 (locus Cucs a.011450) derived from phytozome v7.0 (chr-ID scaffold0015 4; pos 697066 to 697597)
acctgctttaagtaaagggtatttacttccagaaggtagggctttttatcttgctacatctggctatttatgtataatagaataggaaaggaaataggacctataacattgttttgtttagcataactcaatgttaatttacatgacctctttcccttttaagtcgaatgtttaaattctcatacccccacttgttgtacttgcaagttagaaaaaacacatcattttgaaataactagagcttttaagatacatttcttcaagaattgttgagaacctggtgctggtggttgctttgtctaggttgggagagaaaatcaatgttggtttatggatatttttctaccagcattgttcttttaatcattcagcagggtgctaggttttgtatttgatcttcagtagcatccagcagaaacttttgagtttgtgccatggttattgctttttgccttttgctttataggacacttatctaatgtgggattctatgctaatttgcagccccagcacgccttccagcattccacac

SEQ ID NO: 63099 - DNA, 598 bp, Cucumis sativus
  Intron number 1 from transcript Cucsa.047810.4 (locus Cucs a.047810) derived from phytozome v7.0 (chr-ID scaffold0054 2; pos 2710159 to 2710756 reverse strand)
gtctgatttgttcttctcttatctgggattttgtggtactacatctatgtgtattgtttcttcactcatttgggtatttcgagtttttgtgtttcatgcagttcttattcgtttattctctgtttcattgatgtgggtttggattcttttagattgacgttcacttctgctctatgaatttgattttgatgatgatgggtgggcttgttttctgtttcattgtcggtttatctatggaacttgagtgaaatgaatctgatattcactggttcaattagattcatatcttgatactcgatgaatgttcgtttgcaatagttttcaagcatggaataaagtatcgataaacgcatcttctgctggtttagatgaataaaccttaaagtaataaactaataactagtttactttgttaatcaatgattatctcgtacatcaatcgtattattcatgatgagacttgtactttcttggtcttgatgagaattgttgcttcatcccttttcatcaaatacctgacagatcgtttcaatttgttgggttttgaattaatttgtctaattttcttaaacacagctttaagtaggttgctgaaaag

SEQ ID NO: 63100 - DNA, 395 bp, Cucumis sativus
  Intron number 2 from transcript Cucsa.024060.2 (locus Cucs a.024060) derived from phytozome v7.0 (chr-ID scaffold0033 0; pos 67137 to 67531)
aacattttgcaacggaatcaagcaatattttttaggtacattttgctactactctttggtgtttaaatgaacagaacttttcaactgtttttactcttgaatgtgttcttcccccatttttttttgatagttttcttttttactatgtggtttttgtttctttgcttgatatttggatacttgtaatcgtcaaaagtagagagtttctttctctttgtttttgttttatcagattctttttgaaatttatatcattggtctcaaaatataaggggatggtgtgcaacatgtttgtttttatgcccagcccggtaagggctctatctttgttttccaatattattggatttgaaattttttggatataatctaattttttgggtgcataaagcagg

SEQ ID NO: 63101 - DNA, 1002 bp, Cucumis sativus
  Intron number 1 from transcript Cucsa.023000.1 (locus Cucs a.023000) derived from phytozome v7.0 (chr-ID scaffold0032 0; pos 277967 to 278968)
atatacggttcaagactcatcaaacaacttaggaggttagtttattggatttgagttattacgtcaaaattaataatataatcaataacatttattgaaattataataataacactttatcaataataatcaattaattatatttataatttacgagttttaggacataaattccaacaagatgctgccacgatttccaatgttggtgaccttatgtgatcattaaagcagcaaaagggtaatgatccattcaatatttcatcccctctaatgctatacacgtaggaagattaatattgtattactttcatgcatacgagaggtcataggatcccatttatgttctagagaataacataccgatagaccttcactattttgttctgttttcttgagtatagctaataaaagagtatgtctaagttgcagcctcttctactaatttttgagtccatcttgaaaaacactagcaagtaacttcttcatgtaagtcacacgagatcaatttttatttctactccttcaaacggtggtataatgaaatttgctaagaaacagcttacctgcattggctgcaaggctctactagggtaattttaagagcttttctattcttcatggtttttgctagtttgaaaggcatattttctttttcttctaacgttctctgtagcaagttcagtatcttggtaaagtgaattatgtattattttttactgcactccagcaaggcagacaaaactcttattaacatatagtctaataagatcattaccttctgaatattttacttgcaaccaatctctaattaacatatagtctgatactcttagccttatccttgcacttgttccaaaggatgagcaaacggatcatgttattcagtaagtgctcttgaaaaatacttactaattacttttttctcatttatcccccctccaccaaggccatctctctttactttgagctgctaacattagcactgagaagcttgctcgtgtt

SEQ ID NO: 63102 - DNA, 536 bp, Cucumis sativus; identical to SEQ ID NO: 62411
  Intron number 2 from transcript Cucsa.087010.3 (locus Cucs a.087010) derived from phytozome v7.0 (chr-ID scaffold0087 3; pos 349590 to 350125 reverse strand)

SEQ ID NO: 63103 - DNA, 531 bp, Cucumis sativus
  Intron number 1 from transcript Cucsa.119810.1 (locus Cucs a.119810) derived from phytozome v7.0 (chr-ID scaffold0099 8; pos 1743210 to 1743740)
aggtcgttcctggcgtcgttgagagcctcaaggtaattctaattttttatttttttatttttcttcttctttttatcaatgtcctgtttggagtgacagaccctaattttgtgttatatggctctgttttttctaattctctgattgattgaatttatctacgtttcattttaacactatggacttgtaactaaacgaagaaagctaagaaacgaatcctgcattgcattaacatttattttatttatttctttctttgattaacttcaatctttcttaagttatttgtagaatggaatcatttagatatatatcaataacattttttgtcagaatttaaattcctctctatactgcaacaatccaagcagggtgtagatgcagttatatagtcttctctgttaaatattgaatcatactcataatttgtcaattatatttctcctgtcttccctatttcaataatatataaagtaattaacctgaatttctgtaggtgatctcaaagttttcctcagaacgcattgccaa

SEQ ID NO: 63104 - DNA, 635 bp, Cucumis sativus
  Intron number 1 from transcript Cucsa.117390.2 (locus Cucs a.117390) derived from phytozome v7.0 (chr-ID scaffold0099 5; pos 952746 to 953380)
cagccttgatatctaatctgtaaggtattgtcttctcattgtttttctgtttctgcgatacagttgtctcttggctactcgcatgaaatttcacaatttctctatactccgatggagatctttggtccgagcctgaaatctctacaatacttccaacgttgctacacgaggatgttaatttcgttcccgccctaactacactgctatttgctactaaaataattttccacatgattgagaacctaaatcatgcttgctaatttaacccctactgtttttcttattttccattaagattcgagagaagcaacttgagattttattcaaaccatgtatcttgttactggtgggaatgtgcaacatttatttgtagtcacaactcaaatccttcaattattgggcattccactgctattcgttgcacttacgtcacagatcgtagatgttatgcccttggaaaatcctcaaattgtccagtatcttgtagtcccaatgtactagtaatcgattgtgtgtgtaattgccacttgagcaccggttatctttttgttctctatatgtttattttacctgccgactcattcttccaagaacattttgataaaatattaacacgcttgctactcaaatgtagg

SEQ ID NO: 63105 - DNA, 809 bp, Cucumis sativus
  Intron number 1 from transcript Cucsa.115890.1 (locus Cucs a.115890) derived from phytozome v7.0 (chr-ID scaffold0099 4; pos 19665 to 20473)
taaactcgccaacttgcctcccatacttggactctgtaagtttctacctttcttcttcttcttcttttttttttttccttagcttcttttaactgaatacgtttagttactacatgtgttttgttttgttatttttttttttccatttaagaaacagtgttttcgttttctctagaagtggaaatctttatcctttgaaaactacttatttaattattctctaataatcatttcattttaagataaaaaaagaatgatcgaatgcactcagcggagcatcgatgtttgtgtattttcaatgctaactataagtttttatttagaaaagaaatatttttaacaaacaattaaaagtacatctaattattgcttttaaaaaaaattgaatgttacgtaaatattttttactttttacctttaaaaatgacccaatttaaaatttaataatttttttatgaagaatatatacttagattaacttgttaagttaggtttaggttagaaatttgtacaatgcaacatcaagctttataactaaactaatgagtcaatagaaatatcactaaatagtaattaatcaatatatacgtacttctaccttttttttaaggtcaaaatagtccaaatttataccccaaattataatatacttaaaaagtaaaataaaagattaagcaatacaaataaacgataataattattttaggtatcacacgttaaactttcatagagatataacaaatcatatatagttaaatgttaataaagtaaattatacacagattcgagttttattccaccgttaattt

SEQ ID NO: 63106 - DNA, 466 bp, Cucumis sativus
  Intron number 1 from transcript Cucsa.112830.1 (locus Cucs a.112830) derived from phytozome v7.0 (chr-ID scaffold0095 3; pos 1220485 to 1220950)
tgactacaacaaactcaatctgctcttgttgtaagatttaattttcaaatttcttcaatccttcctttgtcttgtaattcttattgggtgtttttttcttttggcgagttattcaagcgagtttcacttattgtattatcattttttcctttttgtttttgttcatgaacactgtatttctccactgtcattgtttctgaagcaatttgcatgttttggttactttgactctctgggtgttacaaagtttgcctcgttatattacattgtccattgttttatatcattccatccgtgccttgtagtatctcggagacggctgatattcatctccattctaactgtttccttgatgttagaatcatattcgtttttatttttatttttgaagcatgacgtgaaagtgataataatgcttctttgtggtgcagggagttatttcaacttaattgaagtcaacttcttt

SEQ ID NO: 63107 - DNA, 727 bp, Cucumis sativus
  Intron number 2 from transcript Cucsa.112830.1 (locus Cucs a.112830) derived from phytozome v7.0 (chr-ID scaffold0095 3; pos 1221171 to 1221897)
ggcgtttctgggtacatacctcaacatgttgttgtacttcgaattctgtatttttcttatgttgttatttattggaagactttatttttcttttttctctggatggtttgagttttatggcgctcataatgatgtagttaatttcgaaattatatgtcacagtttgatgacacataaatgtatatttaaaatttttgtccaaatacttctagtgaaccattgaattgtgctgtaaggtgaaactgtctttatgaagtcattaaatctgtcactacaaattggaatagctttacaatttgattgagtttcattgtacattttggtgttccctctctaattctttttgtcaattcacctctctatggcacacgaagttaggtatcattttatttgctacttttcaccaaacctttgaaaagtttgcttctataaccaagaacctctttttacaaactgtttctggatacagaaaagtctctgtgtcatttccttctggcttattgatcagttagagagaaaccaattgaacttttatttaaattgagtattgttttgatatggattagtaacaacttgatgacataataagatctggctagcaatttggttggttgtgtttagtcttgagtagtggacactcctaattcagggtcatctgaactcttctttcgttttttccttttgttaattcattccgaagatttttgaattgtgcccaggaaacctg

SEQ ID NO: 63108 - DNA, 730 bp, Cucumis sativus
  Intron number 1 from transcript Cucsa.094590.1 (locus Cucs a.094590) derived from phytozome v7.0 (chr-ID scaffold0091 9; pos 764230 to 764959 reverse strand)
tggaccgtcgagatcatcatcgttttggtttagtggtaaggattgttggatgttttctttcatttgattggctttgtcattacttgcaatgtttttggccccccctatgtgaatctatgtttcaattttctatttataggctcatcttctttatctcttcgtgatattggtttcctgaaaggttgaaagttttcaagcattggtttgggggtattgatgtttttttttaattaatatatttaaattggttgtgggaggggatatttttccattgttgtattttgaaatatttggaactgtctgtcgttctactacctggaagttgaattgttcaagaaggatgtgatcatgtgtaagggtggcgggggtttgagttatgtggcaataaaataatctcgagattatgaaggtaatatagtttgagaaggtgaggtattggtggaattgaaagatctgaggcattcttcatcaatgaattctaagtatatttcaaccattatcacgagtaacgttgctccctttttttgctcctgtcatttttctttggcttccatgaaaagaaaaaaataattttctcctttgagcctttgttttagttttattttttggtcgttcatattaagcaaaaagatctcttgcagatcattgttctttgacttctaaaaatctgtctcatatctttaaaacaagagaattgttttcactagagcttttggttattttcaggcgc

SEQ ID NO: 63109 - DNA, 604 bp, Cucumis sativus
  Intron number 2 from transcript Cucsa.104950.1 (locus Cucs a.104950) derived from phytozome v7.0 (chr-ID scaffold0092 7; pos 3262825 to 3263428)
ctgttgttctacaaaaatcccatcttgaatctgaggtcagttttattataaatttttctttttctttcttttaatttggcatattaatgattttttctccaaaaattacgtacggtcagagagttataatttgtttgaccttatcgttaattttgtagtactaaaaataaaactggattttgatttgcttatctagtaagaaatgaacgaaatttggtaaacaaaataacaatgtttttttattttttaaaataaaaatttgaaaggaataaaaaagaagaacgtgcatgagctcttggctcgaagaatatgatgccaccttatagggtttggaatttgtaaaataataaataatataaaaaaaatcaatttcttccctaaaaaaaactcagaaacttttctttttctttttcttttttttccattaacgtacagcttactgccatctgaggcaaatataaatgggataacaacctctctcttctctctttagacaatgatccgtacaccatcttaatatatatatctatttataactctataacagttcttataataatttgtttaaatctaattaattgttttgtttggtttgatttagttg

SEQ ID NO: 63110 - DNA, 644 bp, Cucumis sativus
  Intron number 2 from transcript Cucsa.101310.1 (locus Cucs a.101310) derived from phytozome v7.0 (chr-ID scaffold0092 7; pos 581539 to 582182 reverse strand)
ccaccactcttcttcaggttcatttcttcgggggctttgtgtgtgtgtgtgtgtgtttttatgttgctgatgtagaagaattatgggtaattgttaattatttgagtgaagatggtataacctccaatgtgtacttcctaattttgtagtgctattgcttttaatacttgaaatgcctgatttgaggccaattctttagatacagtactgaaatgtctaacttctgtttcattctgttattttattttttagtgcaccttttgccttgtagagatctgggaaaacttgcttttgatatcgttaacagatataggttgctgcacattttcattttttatttttgttctcatttttggtaatttctaacagttgtttcctcctaatgcatgttcctctttcacctacaaactctcatagttgtttatccctatccgtattaaacttgatacttttctccaccctaaaataaagtagttgccacacgctatagctttctctctcgtttgctgtttgtttgttgcatcaagagcttttcttgtatgttttgttctgcaacaatcttttgaaatttattttgattgtgattgtgattgctggtgtctttcacaggagaaagggtcaaacgagattgttgtcaagggaat

SEQ ID NO: 63111 - DNA, 1036 bp, Cucumis sativus
  Intron number 1 from transcript Cucsa.105930.1 (locus Cucs a.105930) derived from phytozome v7.0 (chr-ID scaffold0092 9; pos 374016 to 375051)
tggattgtcaagaataaaagctgaaggagaatttggtgttgatttgttcagtcaagaattgggtcgaagccaagagctatggaagagtcaagactattcagggactttagctaatgaaactcctgccattggaactcctgtggaatccaacactgaggtagattttgctcttgctttacaagcctcttcttcttctaaaaacagtaaaacgtctcataatgttaagggtatgaatctgaattctttgagttataatgccaacatttcaaatgagggagatgggaagaaggggaaggaggtttcaagtttagatgttaatggagttgattggagtaatcgttttgttccctatgattgtggaattgaacataataatgacttgaattctggtgctgttttgagtgttgatgatggagggaatagtgctaaacaatgggggaaagattggtggtggagacaagacgggagcggcgagttatgcagcaaagattatgttatggaatggataggaagccagatttatccaacagctaatcctgattgggatgaagaaactaagaccacacctgaaaaagctaattgtaactgctcttttccattggagaatatggatggtgtgaatggtgactcgaaagtacaggaattaggattcgaaaacccctcgaacgagttggagcctaaagagtcgaaaactaggaacaacaagaagaaacagaagaagatgcaagaatggtggaaggaagagaattttgctgagattagtaggaaaagcaacaaaaaagcaaagggtttagaagcctcggcttgtagcaaatggaacaaaagcctacaacaactaccacatttcggtttagggaaacggttttacttccttcgtcgaacgcagcgcttgagacaacaagatccaaaccagaccgaactcgacagagagtttagcttcagaagaggttggaagaagaagaacaacactcaatccgtagggagtgatatgtgcagtggggatttatttagtagagaacttagtagcacaacaagc

SEQ ID NO: 63112 - DNA, 683 bp, Cucumis sativus
  Intron number 1 from transcript Cucsa.005220.2 (locus Cucs a.005220) derived from phytozome v7.0 (chr-ID scaffold0005 5; pos 294604 to 295286 reverse strand)
catttctctgtctttctctcagatctttactttcagtgagtttctccttctgattatcttcttttcagtttgttttatccgttcgaatttctggatctgaggaataattgtttttttcttttcttttttgtggctgcattgcgtgtgagatgatatattggcattatggttgtttttaattctttcttcttaagttttttcagagagcaatctggactcatgtccaatttattgaaataagtgagccgcaatttatgcgttttctttactctgcctccattgcatttaattttgaagtaaattagcttttcacgaggacttggtatggtgtatcttagctaacggggatctagaaacttagaaaggaaaaatatattgatctgtgaacttttatatggactaattcaatggaactttagctgaattgtttttgtttcttgccactgagtttgaaacaatctatttagataggttagtcttttgccttatttcctcaaaacaatcagatttttttttttaataaaaaagttgttctactgttgtaaatacagggggctttcaggtaccctaatttatatatggtcggggtttatttgtcatgaattaacttctttctttggttatctttcaatagatctaatattgggcttctttgacagattcggttctgcatatcccgttca

SEQ ID NO: 63113 - DNA, 1070 bp, Cucumis sativus
  Intron number 1 from transcript Cucsa.088050.1 (locus Cucs a.088050) derived from phytozome v7.0 (chr-ID scaffold0088 8; pos 478018 to 479087 reverse strand)
gatctccctctgccctctcttctctttctaaacaggtagacacttcatttctctctagatttttcattcttattcccgattcaaagtttgtaaatcatgttgtcattttaataaaacccttctggtctgtgttgtttttcacagttgattgaacagataaggatttgtttttggcttttttgaaaggtgtattagggtttgttttttttttttcccatttggatccatgacgggtttagtgattttgtatttttttcccatttctttcttcttaattatcccttcctctgattatctctttccgaggaaatgatgaaaaattaaagttctgttgattatgatctagttttcttattagtaggttttagtttcttcagcaatgaagcttagtaatttttataaatgagcttcagttttgatttaataagagagatgttagattaggaacatgtcttgcctcttttgctacttcctctgctactatagctgccactgaatgtgacgtgaaattacagagtattgtttacatatttacaattaacagtcccgtaagtagtttccttgaatattagagaatcaatttacatatttatacttgtttgttttgtttgtggttatggttgaaatggttgaagggaaaattaaagggaaagcttaaggaagctgaaaggcggagcctaagaagcacatacactttagtttagccagcttgtctttgtcgtatacagcacaagtcagatactggacattttaacacttatagtgcaacagatgtgttagaaactagttgtcgtacaaagtcaaagtaggcacattattgtggtagatatttgttagattttacatttaccctttggtgtagtaatattttaaatgtaattttgatatttgttgcttgggttttcacctaactaatgatacattgattttttctgtctttagtattaatattagtatttgaacagacatcggggttaatatcatccattcttttgtgaactataatggcattgctctgaatctttaattttgcagataacaataggttgcagaaagtttatatcttgcta

SEQ ID NO: 63114 - DNA, 866 bp, Cucumis sativus
  Intron number 1 from transcript Cucsa.098480.1 (locus Cucs a.098480) derived from phytozome v7.0 (chr-ID scaffold0092 3; pos 473264 to 474129 reverse strand)
ttttcaacatctactttaacatctacaataagcaggttaggtgtcttattcttcttcttctttgaaattttacggtgtttgtggattatgtatggtacggttgttggaatttcgtggttattttgatcgatttgcatgaaatgcctgtacaacgagaaaccgagcatcgattatgttccgtatgtggatcttttagcgaaaaaagaaagttattcttatggttaaattatcttcataatcaatcatatacgcacgagcatgttgttacatgtgtttcttttattatattcagtatttctctagatgaacattcttgtacgaggatttatctaggagtttttcttataagatatcgacgccaatttttcccgttcatttccgataatttcatacttcaacgaggtagattaagagttgttctcatgaagatgtaagatcaaactgtcttagtagatccgtatgaatatgatatttcaagtgaaggtctcttttcttttcttttttattatttttttatgagagacaaaaagaggacgaacgattaggtatgattaagctcttgctcgtttgttgattcttgaaagtcgtattataaccttcacagcaattttcccgctgcaaatactaacaatcagcagacttcagaattgatctttggtgtctgattcagtaaattgctccttcaatatttcctgcaactgttttacatactcttttatttcaacttccaactctcaacttgctatgtattgatcaacgtgaactgaaatggtagcttcttttggagttgagaacgctgataatggatgacctgactctacttgctcacaggttctcaaagtgtatccattccctgtaactgtcac

SEQ ID NO: 63115 - DNA, 847 bp, Cucumis sativus
  Intron number 3 from transcript Cucsa.132000.1 (locus Cucs a.132000) derived from phytozome v7.0 (chr-ID scaffold0103 7; pos 98006 to 98852)
ttcttctccatcttcccttgttggctgaagataaggtaacactaaatattttatgaactttagattgaaaatcatgggtttctgttacttcttaagatagataagttggaagtgagactgaacatattttaggattgctatatctcccatgctatttattgcactattttattaactaatgaagccttgctgtagacaatgttaggaattagcttttatatagacgtgatagctagcagcaatttctcttaatatttgtttcttccttatgagacaccctcaatatggaagccgttgccattgtagctttacattgaatccatatctgtgtcatgaaaatctgtggtggtttattgggaattaatgcaacgaggtagcaaaagagcttccaaaatgttcgcttttcttgtttgattcacaatttagtaaatccacaagttcaataaacttcccccatttcattctttattatagttaacttcaagccagtgttccctatagtccaacttttatatttgcttctaactttagttgtacacttagtcagatgctcaagtcaattgtataaagcaaaagtttgaaagatgaaatttatcccttactttagcattgtgataaagtcatgttttggatggagatagaaccgccaatgatttattcaattacatatcttgtttgataaccatctggttggaagagttttcttactttcatgttatgcattccagatattaggttgatttcttttccagacttcaataatcaatataataaaatcatgtgtctcaaaatgacaactaattcttaatcctctatgatataacacaattatgttcaaacttgcaga

SEQ ID NO: 63116 - DNA, 837 bp, Cucumis sativus
  Intron number 2 from transcript Cucsa.031370.1 (locus Cucs a.031370) derived from phytozome v7.0 (chr-ID scaffold0042 9; pos 436134 to 436970 reverse strand)
ggggataaactcaaggtaactcactctataactgaatataacaataatatttaaacatatatatgtgtgtgtatatatatatatatatgaagaaatgaaaaatatttgtcggacaacagactgtgatgcaaaaacacccaaatatttacctaattgatctgtatgctttcaaatttatctcccttcatctcctttatcttgtttggtaagtttatgtttttcactttttctactttttcatcattattagaaataaaggcaaatatggaaagaggtttaatttgatcatcattattatattgatatattttgaattaaaaaaaaatgtagatgtttgtgtttttgataaatgtttgatgttttctatttatattgaaatttagtattttaatacaagtgtgagaaccacacccttaatttgaaggactacaaaatccatatcaataactcattttaaaattaagtttgaggttaaaaaatttccatacccctatcttcatattatactacggttaagtcatcatctataaaaaacgtagctagatattgatagagtaatttagagaaaatgaaaggaaaatctagaaatagatggaagaagaagagaaatgagagttgaatatactgagaaaattgacatgaaaattgttcagttgtacctcttttgttggttaaaaagagagaagataggacccatatgtaatatatgtctaaaaggatataaattaattaatgggagagggaataaatatgatttaatcatatgtttattaatttgtaattatataattggaattttgttatatgattataaattgtaatgacatgaaaagagct

SEQ ID NO: 63117 - DNA, 777 bp, Cucumis sativus
  Intron number 1 from transcript Cucsa.086650.4 (locus Cucs a.086650) derived from phytozome v7.0 (chr-ID scaffold0087 3; pos 30665 to 31441)
caccacgaggaatcttgaaattttttggcatagttgagcccccaccaaaatatcattctcgaaagtgtttgtgattcctagataattgttaagaatttaatgatgtgacaagttgtattttaattttcataaatttttcccggagccttgcatacagtcagcttccttcttttagagaaccatttgttgtcctattttcctttgtatggctactaccactttgttctctagtttttaattctgtttaggagatcttgatagccatttcgacgaaagagtattgtttctatatcttaggttgctgattctcagacctcagttctcctaagaggttggtaaaaatccccttggctttagttgccattactcttttgcttgagtttccgttaggagaaatacagaatttggctcatttgaataccgttatattcacttttgtgtcctcttgtcttaagcctctaaaaggattattccatttgtcttttgtttttgccattccgtaaggaccatcctcttcatctcgtagttccggggtgacttttaaagtgaaactctgatttgtaatgtgattggaaaaaaagatactatgaactttataggagagaaaactccatttccatcttagtctctctcttggtctttatatttacctgcgatcttttctcttcacaagtgatcaaattcaagtcttattttcttaaaaaaatgaaaaaaggaaaatgttttcctaatgtatgctagtcaaatcttattgttttcttctatactggcaggata

SEQ ID NO: 63118 - DNA, 866 bp, Cucumis sativus
  Intron number 1 from transcript Cucsa.004550.1 (locus Cucs a.004550) derived from phytozome v7.0 (chr-ID scaffold0005 3; pos 105963 to 106828)
caaaaactctggcctcaagactgcaaaaaatactggtattactattactatcatggccaaatattatgataatgtggttaagtcctaaaatattgttttctgtatatatattatcttctttttataatatatttttttaaaaaaaggtgccattttttaatttagaatttggataaagattcttattgcatgttaattatggtaataaattcaaaagaaaatagatttaattttcaagatgtaaaaacagaaaacaatgttaccaaattgagctataataatccaactatatataatgaatagagcagggtcacatatacaataataaaataagggaaagaaatattgattctacatttttcacattgtattcatttgaatcataaaactttcaatttcatccgttttgatttaatttgacctaattcatccacaatctaaagagaaagaaaagaagaaaaacaatttaaaattcattctaaaattattaattttaataaaaattcagtttcgtacacaagaaatttgaaggtgcacaaattaaatgattgaaactattctcaaatattcgtaaattttaactaataatttttttttaataatatctaaaaatgtaataaaatattataatctattagaatacaatcaagctggaagatagactacaatcaatatttttgtcatcacgatcaatttttatgatcatatttttgctatattttagtttatttttttatatttaaaaataacttttataagaaaaaattataatttgaaaacttctttaattgtggaacaaattcttaaaaaattgatgaatgaactgtataacttgtagtgatttagtggaagaatacaacaaagag

SEQ ID NO: 63119 - DNA, 993 bp, Cucumis sativus
  Intron number 1 from transcript Cucsa.135150.1 (locus Cucs a.135150) derived from phytozome v7.0 (chr-ID scaffold0104 4; pos 52590 to 53582)
gctctggtactcctctttctttttatgttttcttcatttttattttctatttctgcttcctttttctgtttgctttcatctaaccagaattgtatgattgtgattcgaattcacatccagcaagtcatttaatatgtatgcattttcttactcttcgtggcattgtaattctctttgagttgaactttctattgtttgctgaagactaagaagcgtattgaggggttctattttttagtatatttgacctgggtatttgctaaattttaaaattttcactgtggggttaagtttccatatactgttggctcagagatatgcaatatttgaaggtgggtgggtgctttatgaaaacttttttttttgctatggaaattcaaacccggttgattttatgtgttttctaaagtataattgtgtccaggcctttaggatcgtctaacctagaagctataatgtataattttggtatttttcttttcaatccttgctgcttaaatttcacaattcatcttgttaactgttttcgtttttacaatactttctcgtacaggattccttcaattctcaatgttacattatttgacgtccaaacctttaggcatttttcattttttcttgttttgaccttgggagttctgttttttatctgtactgggatgtggaatttaattttgaagatcatacctccatgggtaaagatcatttgggtcaacaaaaggcgtttgttccttgaaataattggagggagagtctttctattgattggcgttttatcatcttttgttgccttcttgttatctttatttgctggactatttttaagtgtttaatctctattaatattcttacctaacttaattgtcaaattaatagttgatcctccttactcaagtattggttcgtgtatagtaacatctcatgcaaggtttcagcttttcctatttttccttgaaggttgagtttttccacataatatgtcagattctgtga

SEQ ID NO: 63120 - DNA, 626 bp, Cucumis sativus
  Intron number 1 from transcript Cucsa.077100.1 (locus Cucs a.077100) derived from phytozome v7.0 (chr-ID scaffold0079 1; pos 187006 to 187631 reverse strand)
aacggactgttcagtatttgatcggcgccggcgtgagaccaattcccctttaattatttctaatttaatttaacgaaaattatttgatttttcaacacttttgaaaattacattttattttgtcaaacacagaattcaatttgatttatacagattcactcgttaatttttttttttaaaaaaatgattgaatttgataaagttgatgatctacttatttactaatgagagttctttttttagaaaaagaaattagaacaaacttgtaattaaagtgcatttataacatgtaattattagttcattttaagtcgggttgttttttttttaatattttattaatgtttacttttaattacatttaggatgcgatgctttttccaaaatttaatagttgaatagttaggaaggtgttaattaattaaaatttgttttggaagcaaagaagtaaacaaggaggagatgaaaaacgaatttgaatacaccaatcctgggaataagttttttatttaaaaaagaagaaacgattgaatgaataaaattatatggtaacaatggagatggaaatgtgaatacgtgggaggtgggcaggatccaggaacggagaataacccatacctaggatt

SEQ ID NO: 63121 - DNA, 908 bp, Cucumis sativus
  Intron number 2 from transcript Cucsa.032100.1 (locus Cucs a.032100) derived from phytozome v7.0 (chr-ID scaffold0042 9; pos 1514030 to 1514937 reverse strand)
cgaggatcccactgttcttgctgcagaaacaccttgtaagtatcaaaataagcctcttaatttttttttctacttttatctaatgaatagaacttctctgcccctgccatgaaacgatcttcatttttcaatgggattgcttcagtatttgtgcctattggagtgccttgattgttatctggtgtctcgaatgctccaaaaacttttattgtttatagattatatctaatttacgatttagaacccaggatttatagagtgttatatatagaccctctaatctcagtggtgcaactgtatcggtaatttttttcccctcaaatgataaaattgctctcttgctctgcgtggggatatagctaacacgttgttaataaacttcgtaaatctcgtgtcgttctttactgtttagagtcttggacttttcattttgtttccaccatataaaagtgtcataaggaattcttttagttatgtttgaattttgagtgttttcactgagtactacccttctgtattctattttagaaccagagtatcaagaaattcattcattcataatgaacatggtccatctctgttaatcttggatagcttttgttcaccccaaggcgctccattcatagggaggtcctcaaggacttcctttcaggttcacaaaaatttgtagatttaaaattgtgttttatttgaaggtagataagatagaaagtgtattacaacaattccgccaggaagcttagtacctcagttaaaacatcccacatttcaactttaatcctcgtcgactaatgatttcaaatacggactatacggcttgccaaaggctagtttataaaatatggtgggcattgtcaaatttttctgtattttggatgcagttacagtgagcgaggtagaggcattgt

SEQ ID NO: 63122 - DNA, 866 bp, Cucumis sativus
  Intron number 4 from transcript Cucsa.041630.2 (locus Cucs a.041630) derived from phytozome v7.0 (chr-ID scaffold0054 0; pos 213797 to 214662 reverse strand)
gaaggtattcttctcaacaattgtattatttgttaaccattctagccagatcatttggaccccttttggagtgaccaaaagcaattatgacaatgtaaaatgactgtttattaatttatccagattgaatcacttttcaatctggctgctatcaggtggataaaagttttgaaatcaatcatcctaaaacttcgtatcttctcctcaatatatatttttttaaatccaattctatccttccataaatgttctttttttttttttgtaacaattggttttcctaactttctatcaaatcatttatgttaaaatcaaattttacttgcagttttaactttatagaactttgaataattatcttataataaattagacattaataacaatgtaaaaataattgtagtaatacgccatagctaaaccacaacaatttagtattagtttttcaagcactgtgactaagacatcatgggttcaatcacgactacctagggattaatttcgtacaaatttccttgacactcaaatgttgtagggtcatgcatgttgtcttgtgagattagttgaagtatgcatgagctggtccagacactcacagatataaataaataaattgaagcactatatcatattttcagatttaaaattaatattaaccaaaaactaatttacttaacttctaaatggtttttcttaaaagtagagttgccacaattattttaaaaggtacaaaaatctaaatctaagccttaatataaattaccattgacccccttgttcatgatgatgccttctgagaagagtctgtaatttgagttgtattgtttgacaaaaaagtctgatgatgttatattggaaaattcagg

SEQ ID NO: 63123 - DNA, 751 bp, Cucumis sativus
  Intron number 1 from transcript Cucsa.041630.2 (locus Cucs a.041630) derived from phytozome v7.0 (chr-ID scaffold0054 0; pos 215586 to 216336 reverse strand)
gtgcctctgaagccattgccgttcagagcctcgaggtttcatttctatattctttttccccattttttttctttttaatttcatgtaatcgcgtttctgctgtttcttgctgatgggaagatgatgattttgcctcagcttgatttttgtttactgttgttgatgtttgatgtttaggtagtttgggactttaggtttaggtcattgcttctgaagctgattttgtgggttcttaatgggagtgtttaatttactctgtttttatggatttttgttcaattttaggtatgaatatgtgggttgtgaattttttagtggtatgttttggtctattgggtatatttgttggcagttcgtggggtgtgtgttttgctgggatttgggatagtagagattaggagaatgttaatgttaaaagcattggtggtgagattgacttctttttttggttgtgaattgcttcaataaatcaattcctttttttttttttggtgttacatttaggcacatggttctgatctcaatgctgctgtgaacgcttatttcaatgaaggagatagaagttcgtctgtaaagtatgctactagttccgtttaaacttctatttttccgtttgtaaaaggaattgaattgcttacctgcgtatctatactttttttttccctgtattgtatctaaccatgttttgaatgatgaacttggactcttccctttatctccagcgcacgtcaagcctctgtttctggtgaat

SEQ ID NO: 63124 - DNA, 759 bp, Cucumis sativus
  Intron number 1 from transcript Cucsa.086400.1 (locus Cucs a.086400) derived from phytozome v7.0 (chr-ID scaffold0087 0; pos 535962 to 536720 reverse strand)
gttattttataccttcaggtgattttttatttgaagtatagttttcatttaataattagttcatataaatttcaaaatgataccttttgtccatgaattttgagttcaaatttctatttggtccttatattctaatccgttataattttactttccaaccttgagttttatttcaattgggtcgtgaggtcgttaacatatatacttttaagtctcatttttttattaaatacaaactttgtcagtgttaatgtttttatctaaagaaacgttaaaaaaaaattgagtagttttgttatttaaaatatttttcctagttatacttaattacattagtttttactaatttttcagtactattcagattaatggaaaaaaaatatcataattattttaaatgctaaagcaaccaataataaaattttaagtgcctaaaagtgaaaaatattgaaacctactgctcaaatgaaaactaaactcaaaactaaaaggtaaaaagtttaacgttttgaaataagaatctaaaatggaattttaattaaatcaaaactcagtgtaaaaatataacatttccaaacctgtggaccaaaagaatatttgaccgaatgattgtttttgtttgctaaattggagtcagtacaagagcttaacataaggtcgttaatgaacttatagtatattaattatatctaactcttttaacactccctcttcattatacaacaacatgagcttgtatatatgtacgttttggagcag

SEQ ID NO: 63125 - DNA, 521 bp, Cucumis sativus
  Intron number 1 from transcript Cucsa.082180.1 (locus Cucs a.082180) derived from phytozome v7.0 (chr-ID scaffold0084 3; pos 27356 to 27876 reverse strand)
ctgaacaaggtatggatttttttctttggttaaactaccgctttgctccttgtactttgagtttcatctatttccgtcccagtacttccaacttttcaaatttgatctacatacttccaataaatcttaaaattagttctaattgtttgtttgaagtatttctatatcaaacttgtaaaattgtgaatatatttccataatttgcaaagcaaagaatagtagggtcttggatgcagtcctgtttttttttttttggaagtataagtatagacatagaattttctagcaagtaagcttaattcttaaaatcaataaatttaaatcagaatgttatcaaacagggcctcccttatgtttttgtcaagtctttctttttctttctttcttctttttcccccttaacgaaaatatcagtgtttaacattcatcagctacagcagcagcaattaaagattgataactaaaaggtagcaacaattcttgcagcatccaattttgagtcaacattctcagaactcaaa

SEQ ID NO: 63126 - DNA, 444 bp, Cucumis sativus
  Intron number 1 from transcript Cucsa.083710.1 (locus Cucs a.083710) derived from phytozome v7.0 (chr-ID scaffold0085 8; pos 466063 to 466506 reverse strand)
tgacgacgacgacgacgacgacttcttcagccgctgtaattgacctagatcgattttgattccgctgtataaatcgcttattatttccaatttcacacacaagtttgcaattcaatgcctaaggagaaatgattttccaaatacattcatagaaacagattcaatttcaacattccaataatttcccatcaaacaattccaattccaattccaatttccaatttcaattgcagtttcaattttcctctggattccatcgattttcatttttcttttgtacagccttttttctcacaattacaaagctctctatgattgtggtttaattcgccttaatcgagctcgacccgatggaggataaggagatgcaggtttatcttcttcattaacgaaactctctgtttcgcagaagtccgaagattgaccatcatcaccttcctccgt

SEQ ID NO: 63127 - DNA, 873 bp, Cucumis sativus
  Intron number 1 from transcript Cucsa.017420.3 (locus Cucs a.017420) derived from phytozome v7.0 (chr-ID scaffold0024 5; pos 139447 to 140319)
aagagatttctgccgctgaaggattaagtgataaggtgtgtatggtctttgaatcatttttgttctggtttgttctggtttgttcttatttgtgctggtttctttttctacatttcttctttttgctttttttttttaagattttccgtgacgcttttgttttgacgtttactttgattggatactaaacttggaaattagtcctcaatcaactaatacaaccaaaataacgagtaccttctagattagtcctttccaagtttgattgcccatataattactatatttcagattctttgttacaagtttgatctattttagttctatgtgacagtgtttttgaagtaagcttgagttatccctaaaatgaatatggaaaaagtatttgttgggtgggaaacataggtctaacaagcaaagctaaaaatttgaacatctggccgctcagtcaaaagatgtgactaaaccaataaaaccatattgatgttaagtgaaaatggtaggaaaagtcaaaagaatccttttgtccacttttttaagttcaacaatatgtgaaagtgaaagcgagagaacactggtgtttaatgttttgtgattattgtagaagacttaaaccatcataagttggtctagtggttaaaagggtaacatagtttcaatatctaattaagaggttatggttcaattcattgtggtcacctatctaggaattaactttttattagtttcttcgacacccaatcgttctgtaagattagtgtaagattagtcgagttacacgtaagttgatccgaacacttacatatataaaatgaaagatttgacatgtgggattgacatgagtttgaggaggattattggtgagtggtaggt

SEQ ID NO: 63128 - DNA, 358 bp, Cucumis sativus
  Intron number 1 from transcript Cucsa.087870.1 (locus Cucs a.087870) derived from phytozome v7.0 (chr-ID scaffold0088 8; pos 360364 to 360721)
tacgataaactcatcaggaggttgaacccacccaggttttcttctttctattaatgggctttctttcttttctttacgaatggaacggattttgagttttgatccagattttgattttgggtcttctcgatcatctcttctcttcttccaattttcttggttttgttgacttcttggagtaatatctgtaatgaaaaacagaggtggttttggttcatgagctcatgatttaaacctctctgttttagttttacttcagaatgtaattgatttcttcttcttctgatttgttttattttattcattctcttctgtcttctctgctgcagagttgtgattgacaataacgcttgtaagg

SEQ ID NO: 63129 - DNA, 1007 bp, Cucumis sativus
  Intron number 3 from transcript Cucsa.100970.3 (locus Cucs a.100970) derived from phytozome v7.0 (chr-ID scaffold0092 7; pos 255741 to 256747)
gccagtcatttcctttgaatgtaataataaattccttcatctgttagctctctcattcattgttattgattcatgcactcgccttttatttttcttgttaactgaaaacagatattgcattgaattattgataatgagaagtatagacaatacaagtatgtaggaccagggaacctcaaaagacagaaactgaaactaaactttgttctcgtaggttaagaagtcatggcaaactcatacattacattttttgaccaatcaaaagcatagaaaaaaaaaactgaactctatccattaacaacttgtcattcttcatgttttctcaaaacatatgcttgtttgtctgagttttatgacctaattaagggtggtactgctaacattagtccttgacttgcaacattacgataaatatccctacaaaatagtgagtgtaaatcttctggaactacccggaaaacatataactgaaatactaactgagtccaccattgaaacattgatttagcccttgtgaaccttatcctgttattgttttcttgcattttctgttacacttcatatctgttgtaactctcaaattttaaatggaggaaatagctttcaatcatttgattgggaggaagaatgaaagaaaaacaaaaaaaaatcttatttctaacaagaactttgcattgacaccccacccaataaaaagattcttgccctgaagaaattggtctgccttttacgtctctatctctcattcctcttcatgtttgtatcataggatctatacaagggtttcaaactttattatcgcgtcatctttttcattcagggtttatattgcacactcttaacaactcttcccttacacttttcctttgatgctttccacttccatgcgggaaagcaattgtgatggtttttgtttacatagtcttgcagatcatagtgggatccttaatatttgccgtaaatgcatgccagattcctgaaggtctggaaatttgcatccttgctga

SEQ ID NO: 63130 - DNA, 881 bp, Cucumis sativus
  Intron number 1 from transcript Cucsa.102900.1 (locus Cucs a.102900) derived from phytozome v7.0 (chr-ID scaffold0092 7; pos 1837388 to 1838268)
ttctttaagctcattttgctctccgcctcaccgaggtactttcttttacattactgaaggccagcgtttgtaaccctttaatgtttgtttttgcttttttatttgtaatttcttaaaaattgatgtgtttgataactactttttttttaattaggtaggaaaactgagagatgaaaagatgaagaaaaaaaaaaaaaaaaagctaaatattttgaattttcaaacgaacaaagaaatatgtttgtaaaactaaatttttaaaggtgaacacctaattgattgttggaaaaagtaataaattttcgtaatttcatatgagttggaagagatatctttttagttcaagtatcgagccacctcatggctcgtattttgctagttagttaaatagccttaattttgacgaattttaattcttttagattaattaacaagcaataatatctaagtgagtattttgtacataaatcttgaaacataaattagagaattaaaattcaaaattaacttaaatttatgtatgatagaatgttgaattttgacgaagaagtagaaactaaactacaaaatttataggaaaaagtgaaccttttactttgttatctacattatacaaaatgggttatagtcaacctccaactttttgtttctgtttttcctaattaaccttatattttaaaaagttactaattgttgtttatattaataattgcaaacatagccatcaaaatcaaaatattaacgtaaataacaaaaaaagaattaattgcaagtatagtcaaaattatcatttctacgcaggtataaaattaatatatccatgacagttacctttattatacgcaggtatctaaacggtgtggactattacggaggatttg

SEQ ID NO: 63131 - DNA, 671 bp, Cucumis sativus
  Intron number 1 from transcript Cucsa.113450.1 (locus Cucs a.113450) derived from phytozome v7.0 (chr-ID scaffold0095 3; pos 1592238 to 1592908 reverse strand)
ttattcggtatttccctactcaggtaaccctattcttctttctttctttctttcttttaattaatttacacccaagttttatattccttttctgtgtttgctttctcttcaaattttattctgattcttcccttcccttattggttggtctgttctgtgtttcctctttcatttaataccatattgccatcaattgttggattggcatttgggtgaaatccggaatttgattgataccactgatttaggaactaattaacatcttaatccacatgaaatgaaggtttaatatcttctttcttaattcttatgaactgattgttttgtgtatcctctttcatttaataccatattagaatgaagtgttaacttagtatttggatgaaattatgaataccatagattcaggaactaattaacatcttgatccccaaggagtgaggttttaatatgtttgatgcattctaattgatgtcagcatggagcatgcaagattctaatgaactgattgaggatcatttttctttatgtttgaacttttagcttatttgtgtttttggactaacctaccaaatttttaaatttatgttattatctccaaatgcttttacagaagagaatttgaattgcccataggctttcaactttgcattcaaaggttacttcaaaac

SEQ ID NO: 63132 - DNA, 896 bp, Cucumis sativus
  Intron number 2 from transcript Cucsa.124750.1 (locus Cucs a.124750) derived from phytozome v7.0 (chr-ID scaffold0100 1; pos 577822 to 578717 reverse strand)
ttataaggaaagctggtgaagaaataagagaccaggtttcaatccctatactaatttcttaaactaatttattgaatttagcccaaaatcttcatgcttcagaaaaaataaaagaaaaagagaatgagtagaacggcgcctgtaatttattcttgaacttattgagtatgagtaatcggctgtaatttcctgcttgaattcaaaaagaatattccttacgcaaactatacaaagaagagggcacttaatttataaagaaccaaatgaaatcccaatatctgattcttacattattagatcaaaacaactaaatgaaagaaataatattctttcccatttctgtttaacgatttgtgaagcaagtcagtgcagcattaaactaaactattgaagttatttatgtttggtgcgagtttgatagggtagccggtagtatgccttgagaattccacattggaaaaacaaggggactcatactctttatatgatagatggactgctctcattgccatttggttttgaaatggaacccattctctaaaatagtatgagttatactaacagtgttttccagcaacgaaattttttggaattgagttattaacaaacattactaacatgttatcttacactgtccatctttgacttaaagctgacaattacatgaaatctagattatacagcattttggagtttgttttatacatgttgcaaactatttgggcttgtatcctgtgcacattcatcttcttcctacctccaccctattcatattttgcctcttcataagggacatttttggcattacactttatacatgtttttcaaattgtctttaatttgtgctctttctttttgtagctctattgttttgaagatcgggggaatcgtcgagt

SEQ ID NO: 63133 - DNA, 693 bp, Cucumis sativus
  Intron number 1 from transcript Cucsa.056030.1 (locus Cucs a.056030) derived from phytozome v7.0 (chr-ID scaffold0060 2; pos 231923 to 232615)
gccaaacgtgttcgtgttcttgaactctctcgtcggcaagtgttcttaatctataaaactaccaatgatttcctaaaactccatttcttgttttttttttttttttattttatatcggggctattcttttgtactttcgatcctattgaagttgtaaatattgtttgatatgtagaatggatttaagtcgtttgtgtgtttttcatattaaacagggagaagacttgaagttccaagaattatttatggtagttacataatttcaaaatggagtttaaaaagtttgttttttttagtttttttttaaaagtaatatgattgttaaatagtttactggtaagcaattcttatgatactttgttgtaactttgattgtgacctttcaactttcctttttctaaaaaatcacatagcatgatctcgttataacttaatagacactattttttaccttcaaatttgttatataaaacacttcatctttatggtagttacataatttcaaggtaagatatgcagagaaaatacacttaatcttcacaaaatatatataaaacagaatgttaccccatgaaatcattgatcagcattggttgatagaagaacttttaatatataactgatatcaatggactatttcttgttgttgatttgacagattgaaacaccgaggcccagactggagtgggcttt

SEQ ID NO: 63134 - DNA, 768 bp, Cucumis sativus
  Intron number 1 from transcript Cucsa.006220.8 (locus Cucs a.006220) derived from phytozome v7.0 (chr-ID scaffold0006 7; pos 94752 to 95519 reverse strand)
agaggccaggaaagtatattaccaagtaagacaaattcttgtaaaccgtcctgatgatggtctcctatgccagacaaattcttgtaaatgagaactcctgttattgtgcttctggaatcaaacttatgctacaaagctagaataccatgaaggagaatgttgtgatgtagtggagagcacgaggatgttggaatagatagaaaaattatgcctcaatatctgtattatagtgttgagagttgagacgccgtttgtagcatctccatgctaccacttggagtcccaactgaaaatgcactctacttccactcaacagttgatttgtaggatttgtatgttagtgattctgtgagctcgggggtaaaatttgttggcaactatcctatttggggttgagatttttatttgttgtgtaatcctaggcaaccatttttttaaagagagatttgtagtgtaattctgacttatgggtaaaacttgcagttgcattagactgttgagttaggggtgaactagtatatttggattgttgtgtttcttttcttttttgtttttaccctacgatcttgatcttttctgtttgttgagtgcctgaattatttatatcgcttcaaattgctttagtgtagtcgaagtttagtttatttgtgctttcactatatatttttctcccaacaactgtagttggcagaaatgaatttggaacggagtgtttgtgggtgtttagctcttacaacactacggaacgtttttggataggtattgaag

SEQ ID NO: 63135 - DNA, 936 bp, Cucumis sativus
  Intron number 2 from transcript Cucsa.066850.1 (locus Cucs a.066850) derived from phytozome v7.0 (chr-ID scaffold0069 6; pos 1269960 to 1270895 reverse strand)
aaaagttgaaggtgtgctgttcaatctgttggtagtaagttaactttttcccctttgttcatgagtgatggggggcacttgaacatgtagagttagcaagccacggccattgttagattgatttccatttattcatgtctacactgctgtattcgattataagtatccccaaaagattatacaaaggcaaacatgtctacacaattctgttttctcgatatttagaagctggaggtacttgatttgtacttttaaacatttaagtattattgttgttgtttttgttatttttataggaatgagaactcctcattgacaattgggaagatgaattctaagcactccaaaaccaaaatcaaaaagtacttctaaaccccaaatctgaaattaaaaatttcattaaaaatggaacaaattacaagaggtttcccaacaagaaggaatccgattgcgcaaagctttatgacactccatgaagctgcaaaagtccttatcaaaaccaagctttcttcccaaggaacgtttttatttttgaaaagcctcttgttctttcaaaccaaatacctaaaaccatggatagacaacaaacataaccttaaaaggaacaagtaccagcatcagaatgtgtggataaggcttcaatcgcgatattttattttggttaggtgtttagttttctttcatagagaagagtctaggttatctgaaagttatcttccctctttgttttacattttttttattgtactagttgctgtcattttgcagtttgcacaagtgtttgtagctaagtcatgccaattcatctttatggtgcataacagttttttagtgtacacttttcaccctctctttcatccttttggacagaagttgctcagaatgtttcatctcatgaattaattgtttccctgtttttataggccggaagcgtgg

SEQ ID NO: 63136 - DNA, 760 bp, Cucumis sativus
  Intron number 3 from transcript Cucsa.058730.1 (locus Cucs a.058730) derived from phytozome v7.0 (chr-ID scaffold0061 4; pos 846250 to 847009 reverse strand)
ttaggctcaataaattcagaaactcttctaggaaggtattgtttgaaacactaagggaatgtttgaaaaacaactttaaacgggtggattgttctattacagcacactgcatacgtttgagacttcaatatcataatataatagttagtgtttacaactattataataatctataattaactgcataatattactattttaattctctttacacttttaactatttgatataagatttactatttactcatcatttatatttttctcttttgttgctacatttcctattttctttccaaactaaaatgatatgcactctaaacacaaactatcatatataacatataattactataacaaccaactctcatcagtcttctaaacacccataaaatcagtttaggaacatttatgtttatcttgttcgttatctttttaagagactagattattttgataacaatttttctttttagtttcttaataatttagaactaagaaatacataaacaattatcaagcaattttttctcttaaaagacgagaaacaaaaaacaagaaactttatcaacgaatttgtagtaattatcaaatgcttaattatgtttctataaactacaaagcaaaaagtatgtcactttttaacgacccctaaggttatgcattagtggcagccacttgctcgaaacccttctaataaaaaacaatttcaagtttatctttagattcattaaagaaagaaagcgaaaggatcctggat

SEQ ID NO: 63137 - DNA, 819 bp, Cucumis sativus
  Intron number 1 from transcript Cucsa.100890.1 (locus Cucs a.100890) derived from phytozome v7.0 (chr-ID scaffold0092 7; pos 177825 to 178643 reverse strand)
tctgctcaagaacagcttcaatttggagcttacaggtgggtttctaatttggaaggtttttgactccgatcggcacttgattctgttgtactttcgtatacttattttggggttttcagaatttggagtttgtggagaacttttaggttgttggcttcagacgaattatcatctactggttcttgattatttgatttgagatcctatcatgaaccggaaggatttaattcccctgtttaattgattattcccctgtttctgtagttttctgctgaagaagatggaatattctactgagagttttgaatgaaattcagcgagttttccaatctttttggccctgttgggatcttaatctctccttccctgagttcttttttgatttctgaaactgggcctttgattgattatacctatgctttgatatcttagtaactctagatttgttctgtttcttgtttagttctgtgtgcttagcagtctatctcactgtttatttgtcggtgaaatggagaattttgatggctgatatgaatagtttctgttttaaacttgttacgaaaagctgggatcagctggacgtttttctaacattttcaaatcaacttctgactgcttcataaggtttctttcaactgggaacgaaaagaatttacagtttgttttttagaggacgctcatagtcctatcggtgagatattagaagtaatggctacacaaaaaaagacttttacctttgcctctgaaattcttttgataatttagtccatttgcttgaattcagaggatttgccgataacagaatcgagacaagagcaa

SEQ ID NO: 63138 - DNA, 388 bp, Cucumis sativus
  Intron number 1 from transcript Cucsa.126450.1 (locus Cucs a.126450) derived from phytozome v7.0 (chr-ID scaffold0101 7; pos 345466 to 345853 reverse strand)
aaagtatatagaaaattaacctaactcatgaggaaggtgtatttgagagatggagggttaggatgtgacttgtgggaagcatgccatatgccttgatatcagaaatttgtttttggttccacatttgtatactttcacaagggaagcatgacatccaaataaaaccaatttctcattattaattgaaaagaaaacctccaaattattcctcaattctttgatttgtgtatttggaaattacacgtgtcggttactgatacagaaatatatttataagttataagtttgggtttcttattgtttttaagagagagagagagatataggatatgatggatgaagattacatagagagcagcgattcttcgtcaaacacttcggctcatct

SEQ ID NO: 63139 - DNA, 760 bp, Cucumis sativus
  Intron number 1 from transcript Cucsa.048750.1 (locus Cucs a.048750) derived from phytozome v7.0 (chr-ID scaffold0054 2; pos 3388739 to 3389498 reverse strand)
gtcttccttctcatcgctctcatcctcttcttcaggtcatttaatttctgccctaaaccctaacttcatcttaccccctccgatctttcgctcaatctaggatttttcttacataaataattaataacaattctctgagtatttttattaaaataattaaggagtgtgtatatacttattagctagggcagagccaccggtcagtagaagcacaggtgctcatgaataatgatatatatatatatatattttttggatttggttctattcccatttatgggaagggaacaactgatcttttttttcttactgcaaaaacaaaaccccttctcacctgttgctttcaaacctaatggaaactttgaccaaactttctttcttacacatttcaccacttttcacatctctccaattactattcatctactctcttccctttttctcccttcgcacaataattttattttctatttcccacttaatctacccacttggagttagttgttgtgtacctgccaattaattagcttcattttccttcttcacacgattatatactatatatatgccactcaattaaagtattataataccgtgtcatttaaaagtaattattgatttgggtcttttctatgaatttttacgtattcatataattaaatccattgtaagctgtcaatttaaacacttcaactgttaggtgagtcgcaattaattttggaagttgtgattgaataatttaatttacagattcgacggt

SEQ ID NO: 63140 - DNA, 759 bp, Cucumis sativus
  Intron number 1 from transcript Cucsa.104210.1 (locus Cucs a.104210) derived from phytozome v7.0 (chr-ID scaffold0092 7; pos 2816322 to 2817080 reverse strand)
ccatcattatcctcgtccctgcggacatctggacggtatgtttctaatgtccatcgtttcttgttgattggatttatctgatgctgttgtttgttgaattgggcgttattttgttattagacgtgtccatgctttttatatgaatctgataattggttttatgagattttaatttgcggttggaagcagatttgggaattagctcaggtgattaggttttgtgttatttctcaattactttcttcgattgaggtctggatgttaggtttcgatttattgcattgcatttagttatggtgtggttttgtaaacaatttcatgccgtttaattgataattttagttcttttcaaaatattagtgattgtttactgctccgcatctctactttcattgtcattgataatgttgcctatttgtctataaatttattgagacagacagattggacatacatgcaacatatttgatcaactatttggtattattagttattggcagtcgtactttcagttagctggttatggttctcatttgcaatctactaccggtttccctctcctgcatggaaaggactgccaattgtttatgcaaaaatagaattgaatatcatttagcatcctcttgttagccaagttttcttttcctctctggaagttttagttgattcaggcaaaaatgacgttcttgctattgattatttgatctaatttatttatgtacagactacaagtcatctgtcagagactggagtaatttc

SEQ ID NO: 63141 - DNA, 475 bp, Cucumis sativus
  Intron number 1 from transcript Cucsa.087770.1 (locus Cucs a.087770) derived from phytozome v7.0 (chr-ID scaffold0088 8; pos 315447 to 315921)
attgctttgttgaggtattcataactctatatatcatatacttcttaatatatatagtttaaccatcctaaaagtgagaaaatgtttagtgtcttctacttctatataactaattctttctcattttagtaaatggttggctacttgttttaaacattttttaggttaatcataagttccctctatttttaaaagattagaaatcatttttggtattggttttagtatattgagataaaataatttttttaaatcaaatttgaccttgattttttatttcatccaactatagattatacaatgttgttttataatttatgttgtatgttatgatttctgtattcttattatattaatttctttggaaagaattgttttggttttgtttgtttgtttgttttactcattatttagggttagatttattaaatttctggatattatgcattggttgggtttcctggtgacgggaggg

SEQ ID NO: 63142 - DNA, 357 bp, Cucumis sativus
  Intron number 2 from transcript Cucsa.066350.1 (locus Cucs a.066350) derived from phytozome v7.0 (chr-ID scaffold0069 6; pos 853934 to 854290 reverse strand)
caaagtaagcacatttcttcctttttttgttactaaattttctatatttcagaaattgtttttctttctttcattagactagagattactaactacgttaaatttcatctctcaatcaactgaaacaatgaaaagatggagtagcttctaatcgaatacttttatatagattttgatactatattaaagaaatattctctatctcaaaatgaataaatcgtatatgtttgaaagatttgtgagttccggatcctcaaacaagaactaattcaaaagatgtttaacggtgatcataaactaataagttaattctgtaatcaattcaggaagttaatttaattaaataatatggcagga

SEQ ID NO: 63143 - DNA, 706 bp, Cucumis sativus
  Intron number 1 from transcript Cucsa.113230.2 (locus Cucs a.113230) derived from phytozome v7.0 (chr-ID scaffold0095 3; pos 1454544 to 1455249 reverse strand)
gacagagaaaggaaagaagaagagaacgaacgaaggtttcctcatttccaattccatttcctttcatttctttttcttgtaatgattttagtttgtattcttatgtttctttatctcttttttcttcattgtggatattgattgcttctgttttgtgttctgatcttttgtcgttctgtgtagagatgttttgtttatctgtctgagaaatattaagcttattctcctgaccggacttacatatgtttttgattttgaggtttcatttcattcttcttttgtgtttcatttcatacttccactgtaacgttttgggtacataagctctgtttaagaatgattcgttagttttctagtattctcttgctccggctgggactcttttaatctgttatgtctctctagaatgtctaatcaaagcgtagtttgctcgcatgagaacacaaattaatgtatgagactacattggatattaacgttaagcttttccagtagctagtttgctcgcttgtttccacagctattgtttgtttatctgttaattgtggattatacagtagtacgtaagactttctttttgattgtggaggtttgacgtcggaagttgaaaatattcgcaggtgctgtattatcctgtgcaacaactttttgttccctacagagtttaattttattttctgggtaattctttcaggtcgttaacaac

SEQ ID NO: 63144 - DNA, 1037 bp, Cucumis sativus
  Intron number 1 from transcript Cucsa.096360.1 (locus Cucs a.096360) derived from phytozome v7.0 (chr-ID scaffold0091 9; pos 2020039 to 2021075)
aaccgattacttgccttactctttcaccaagtaattcttcttcttcttcttctgctacttcttcttctacttcttcttcttcactttcttatttctttgtttttttttttaagaatcaagtttttgggtgatgagggctttgtgtgtgttgaagggtttagtgtaatatgtctgttttgtttcatttctttaaccatattttttgttttccacttggttatttgataattattggtttctttttctctttatgggtttttaaagagatttgatttataaacactacttcttcttttagggttatttattttttggaatggttttgaaattcaaatcgagttttggagagtaattgagaaaaaaatggtgttttgaaaattttatgtttttttttgtttttgaaaatttatataataattcagatgtggtaatatatataagaatctgaaatctaaaatgtatgaatcaaatggtatgcttaagtttttgttaaatgtatttagtttttctaaaagaaaagaggctctagtggttttttgttttttagattttgaaaattgagcttataattctaaaatcattaacttacaaaatttgcttttattttagaacttggctaaaaattttaagatgtaaactgtagttaaaattttaaaagaaagcaagcataaatttaaattatcgagcagattagtttgcaacaaaataataacttgatagtgtgtgtaattatttagtatcgaagtattgaacggtcttaaactgacactaaactgtagaagtttatcctcaatcaatcaatcagaactctattacatatttcagttattaaactattagattgaatttcaaaaccccgagtagagattaaaaaaaaaaaagtgaattctactattgatctatagtataacaaaatactatgaacatgttaacttaccagctagttgaaacacattctggtccacctaccgatccctttatttgttcttattcttaacgcagggagtattggacgagcaattcttacagctacaaca

SEQ ID NO: 63145 - DNA, 794 bp, Cucumis sativus
  Intron number 1 from transcript Cucsa.126940.1 (locus Cucs a.126940) derived from phytozome v7.0 (chr-ID scaffold0101 7; pos 740622 to 741415)
aatcatccggtgagtggttaaagggaagagaatgatcaaagggtggaaggaatggaaggtagattgagaaggaggaggagatagagcaagaagaaatataagtgagaaattgagaaatggtttaattttcacattttgtgagtgttgatgtcatagtttgaggatttagttcttacatttaaaagtgtaggggtacaatttttacacttttaaaattttgacggtttaatttatataattgaaagtttaggggtgcaattgttacaaccaccatactccaggggtgggttttgcaattttctctatttttattttcttagaataaacgaaaggcacttgtgttgttttaattcagtagaacttcattctctagcgtcaaaaagtgagagttcccatccacttagtctaaccaaacaaatttatccccatttataattctcccccgtgtatttttccacttttggtagcaagtgttttgttgcttaatggtcaagaaacttggtttgtggtgaaatgtgctaatgaatcatctacactttttgtaacgatggatgttctattctgttccttaaaacaataaaatgttagtggtgtgaatcatggatttgatgtatttgttggcatcttgtaaagaacttcaaacattccaagagtttatatgtactgcgattattaagattattcttttttttatggacttcaaaatattgaataagattcatgtgcttcaggttcagtcggaagttagacagtctgattctttaaacaagagaagaacaatgggcagtaaagct

SEQ ID NO: 63146 - DNA, 268 bp, Cucumis sativus
  Intron number 1 from transcript Cucsa.049010.1 (locus Cucs a.049010) derived from phytozome v7.0 (chr-ID scaffold0054 2; pos 3572127 to 3572394)
ctgtttcaaaattcccccaacgtggtcgcatccaggtccccactttctctccacttttttctttttttttacattaatattatatgcattcattcgttttctttgatcttctccatttttagtcattcttatctaatctatatcacataaaaatggaaaaagaaaagaaaatcaaaatgtagatgcttacaaatattggtttatttggggatgtgggttgcgaggtgttgcagtccctacttcggcttaaaattttgaaacgtggaat

SEQ ID NO: 63147 - DNA, 467 bp, Cucumis sativus
  Intron number 1 from transcript Cucsa.066490.1 (locus Cucs a.066490) derived from phytozome v7.0 (chr-ID scaffold0069 6; pos 955591 to 956057)
atctcctcactaacgccattgctgccgccctcaaggttctttcctatgttttcttctctttcttactttttatcatcactaatgcccattcctccgtttatcaggcagtcgtaattgatagtcattttagaaatatactagaatctatccctagtagacataaatatacgatacaccaatatttgcgtgtattattgataaattttattatatttacaaattcttttaaacgactatatacttgttattttgaatttaattgctaaatttgcaactatctcttcttttactactactaccactattcgtctttaattaattgcaacctaactcatatttcgagaagatcgtcttccttaatgttcaaattttgtttgggattgtgatttttttagttagtttatgtatgttgagtgtttattgttgctgcagattggttatcgccatattgattgtgctcaactgta

SEQ ID NO: 63148 - DNA, 341 bp, Cucumis sativus
  Intron number 2 from transcript Cucsa.046870.1 (locus Cucs a.046870) derived from phytozome v7.0 (chr-ID scaffold0054 2; pos 2147784 to 2148124 reverse strand)
tcaggagggagtcaatctctactgtgattttccaggcgagttctttcccctttttcttttcctcgaacttccagattcaaagtctcccacttcacagtataataattgtctgtttcctttattctctgttctttattcactttttcaaaagctgttttttgggttatcctgggcttgctatcctgaaacaggacaagacaaataatgcaagaaaaccatataataataataataataatagtagtaataataattaacaggaataataattttcgctgttcaataatttataataataccaaaccaatgaagaagaggaaaaatccggtgtgtgcaggact

SEQ ID NO: 63149 - DNA, 965 bp, Cucumis sativus
  Intron number 1 from transcript Cucsa.046620.2 (locus Cucs a.046620) derived from phytozome v7.0 (chr-ID scaffold0054 2; pos 2020159 to 2021123)
cgtgagcaataattctctctcttttttccaccaccttcgttcgattattgaagatcacgagatatttgtgtttcattgttatcatttccctgcctgttgttttcattttatatatttgaggtgatgaattctagttgtttttcaaggatacgacctggtgattgtcatggagagttcagtttttggaatgatgctggatataccagtgctttaggctgtcttataaatttcttacttatttatagatcagtttctgcgactacgaggagatggttggtgttgagatctaggcttttagttgattccggaaatagtttcacttttctattatgaagtgtagaattttcgtaatcttaaggaagtttattggttacatgcacgagttacttcgactgcaggatagaatgcgttttgttttggagttgctgcaatagtttctcttttttaaccacgttcgctcgattattgagaaattgaaggttacgagttctctttcttcgagtgttgaaatcaaagttgtttcgtgcttgacatggagagtctagtagaatgatgttggatattcagcgacttaggctgttttaggcgttgcttaattatcctttagatcagtttcagcaactatgaggaggtgtggttggtggtgaaatctaggcttagttgattgtggatagagtcttacctttttattgtggagtctcaaacttttgtaatctaaataaagcgtcttggttatatcgctagttgtgtgatttttgctttggaattggtttgtagaatagaaaagataaggagagattgatggtgtcgaggaattaacctttttttgtcatccttacatatggttctgcaattcgtagtctcattttttgtagactttaagatgggtgaaatttgagttgctaacttcagtttctgaattaattgtagttgctgggacctccacacgtccacgcacgtttaaa

SEQ ID NO: 63150 - DNA, 466 bp, Cucumis sativus
  Intron number 1 from transcript Cucsa.086980.1 (locus Cucs a.086980) derived from phytozome v7.0 (chr-ID scaffold0087 3; pos 330063 to 330528)
tccttcaagtctcttccccactttctggattctctgtacgtaattcttcttctctgttcataactttcatttttctttttggtcaattggaattatatctgtttgggtgtcaagaaaagcgctggaaagtgaattgaaaccaagttttggtgatacttattccttcttctgttgcttgaaccttactgaactggaatttcaacaattttagttctgaaagctactgggtcgttccttaatttctttgaattattactatcgtgaagtgatgatttacttctgaaatgtttacactgtcttttcttgggatggtttggattttgaagctggtgatgacgatatagactcagatttttgtttttgatgcgataatgttgaacggtttgacgtttaaaaggattagaagttgtatgctgattatttgaagttgataattgtgttcaatggttggcaggttaatttggca

SEQ ID NO: 63151 - DNA, 977 bp, Cucumis sativus
  Intron number 1 from transcript Cucsa.100440.4 (locus Cucs a.100440) derived from phytozome v7.0 (chr-ID scaffold0092 6; pos 917379 to 918355 reverse strand)
gcttcaaactccaagcctttggcactgaaccggaggtagagcttttttccctttctcatgtctaactcaatattattgttgtaaatttttttttggggggagggagataacagataagtatgtggatatttttctcttgtttctgaaattgaaggcggagttttgtgatttggatcttaattattttgatccgtactggagccggagaatctagttactcagctcaagctgagcctacttggtccgtatgttttggatgaaattagtagctaattctttttcttctctttataagctttagttggagtgagagttttactttgaacaccattgtttctttgttcgcctcgaagatttcatcggatggtgtgcaagtggtggattattgtgcactgaattcgatttccatgtctattcttttttctattaaaaaattttggttattaattgagaatgaagattatttccatgtattgaataatatatatcttatcccacttcccgaaacttttaaatgttcaatattttgattttagtacggtatattttcgaagtcaatccttcttctatattgtaaattatagtagtctgaatcaactctgacactctagtttccatttttttttttggggagggggggttcttgggctaaactgaaatttccacttttcatgcgtacaaacacattttcatattagaaacagcttggggttatataatgcatgaatttggggatgctgagtatgcatgaaatcttcacgttttctttatgaccatgactatgaagtttgaagtaaattgtctacgcacacaatgacacgatcattctcgaataatattaataaattgtttgtttgatatctggcctcttgaattttgattatatggaggtagtccaaaatgacttttagcaattttccattttgttgcatttcttaccaggattcagtatacagctagacgtgacgtgggatcca

SEQ ID NO: 63152 - DNA, 761 bp, Cucumis sativus
  Intron number 1 from transcript Cucsa.046800.1 (locus Cucs a.046800) derived from phytozome v7.0 (chr-ID scaffold0054 2; pos 2114033 to 2114793)
tgggtaaaaacttaataactaagggtaagccaagttagaccttgattggaatcattgtaactaacgtgggtagaaacttaataattaaggatggcaagccaagttagagaaacgtatatcatccaaaaaccttgttgcccaacccaaaatttaaaccattaagaacagaactaaatgaagctaaagaactttttgaaatcgactcccttccaacaaactgacttcggtttgatcggtcaacttgatttttcgatctatcatgcttacttctatctccatagtaatatatttgtaaaatttatctcacacaaaatttataaaaaagaaataaatgtatttaaaattttgggatgataacacacaaattccaaataatacgtaaactcaacatcatcttcaacgtatatatatatattttaaattgtcacatttgtatatacaagtaaatgcatattctaattctggctcactcaacaacttcaacttctttctaatatataatacgagaatggttggagccaccttccacccacctaaaccaaaatacttctctttccttccttccatcccatttctaaaagtcaatcaaacctttttcttcttccatggattcatccttaatcttatgcctgaatcgatggtttatcatattttttgtggcaacacccttcagtccatccacaaatgttttggccaactgctttaactccatcttcaacttcggagattccctttccgatactggaaacctcttcatcaat

SEQ ID NO: 63153 - DNA, 503 bp, Cucumis sativus
  Intron number 2 from transcript Cucsa.121960.1 (locus Cucs a.121960) derived from phytozome v7.0 (chr-ID scaffold0099 9; pos 343093 to 343595 reverse strand)
gagtggagaaaaactataccaaggcaaggttcccattattttctgttgcaaatactaacttaaaacttcgattttctgttctgatatgtttctgttttggaaagattttgtgttgttagttgaattgcacactgcacttacccatctattgttgtcaccttaccttaaacgtgtgtatgtctggcagtctctagcaccgtgacttttgacttttgcttcctcaaaaatagttctttttcaatactggacttctgaatttatgatgggcattgaattgtcatttgaggatgtaaaataaagttgctcccattttgaaccccccatgcatcccacaacacccaaaaaaatgttaatatggcacctaaattactgtttgttttattttctccctcttcaattcattccacctacatcgcttataacgtgttttcattgcatgtcctccaaatgctacgtcctgtaacacaggccaaggaatactttgagaaagctgccgaaaacga

SEQ ID NO: 63154 - DNA, 708 bp, Cucumis sativus
  Intron number 2 from transcript Cucsa.017810.1 (locus Cucs a.017810) derived from phytozome v7.0 (chr-ID scaffold0025 2; pos 60773 to 61480)
ttcacgatctatcagctacaattctaatcgatcaggtaaatgcttttttgttcgtccaactttcacattgcaaattatttctttacttcagtgccattggcggcatagaaaactaaagacctgtcgtttgaagcttcctgtgtttaaatcaaaacatcttgttctgaaattttaattattttgttcttgaattcttaatacatttttaacaatttttttattttaattttctgaatttcatttagggactctgaactcttaatggctttgtttaaatgtttattctttcaattttctagtttcatcataaaaattgtacgctaaattacaaaagtactcttgaactttgttcttcatttaaaaaatgtctgtattctctttaaaattgtaatagcacccaatactttccataaacatttcaaaattacccttggtgttgatatccaactaaactttaaatggaaattggggtggttgtgacctgaaaaggaaactgagactcgaacaccttacactcccatactatttcaagttaccaccaccacgttacagtcactagcaagctaacaaacctggtgaaaaagtcttctgtgctcattgaacgacatgatgaagttttactagttttccctactttaccctcctcatcaacagacttatgaaacgctgattttactcttttttctgttaaacacaaacagggagaag

SEQ ID NO: 63155 - DNA, 683 bp, Cucumis sativus
  Intron number 1 from transcript Cucsa.074510.1 (locus Cucs a.074510) derived from phytozome v7.0 (chr-ID scaffold0078 5; pos 348049 to 348731)
ctccagtttttgtctcccttttttatcttctccaggtacatactttcttcttttttctttcacccttattctatattgttttcagttgattcctcatgatatacccatgaaactaattcaaatttaattctattcatacatcaattaatgttatcttttcggtatatcattaccaataaatgcatgttatattttctgtgtatcattttataattatatccttcataattttccatctaaatttggtatattagttaacctatgtactaaatgaagtatatttattatacaactgattaaatgtaacttatatgtcacctaaattatataaaaaaataaatgaaaatagaacatataggattgatacaattaatgtaattatgatacactatcaaagtttgagaaaataaaataggttagaaaccataacacaaccactaaggcataatctaaaccaaactattaaattgaactaactaaataaaaataacttcatataataaggaaaaaaaaaagagagaaaaatactcaaacaatgtctaccataaaaatcatgatatgtcaattgtataagtgataaatgatgcacttatatgtatgaaaatatcaaaatatataaattgactgatataacaaatatgaaatatgcatttttatgctgtacgttgtaggagaaagggaag

SEQ ID NO: 63156 - DNA, 623 bp, Cucumis sativus
  Intron number 2 from transcript Cucsa.056090.1 (locus Cucs a.056090) derived from phytozome v7.0 (chr-ID scaffold0060 2; pos 295764 to 296386)
tgatcctggtttgatttcttgctgttttgtttgcggtttttggattatagtttgcatttagtttgagactgtgagagatgcgaagtttttagtaggaacgtaattttgaccactgtcagcttaaagagctattgatattgatcgattttgattattttttattagttaacagttttccgctgcttatttttacttagccagtttgacagttctctttctgtttttgtttttcctttttagtttcttagaaggctatgcatgcgtatgatttatgaagtctttgatgaactttataacttaaattagaacatatgttttatatggaaacgcaaaggtttgattcagtggaatctttataagctggtcagcaatgcggtttaatgctaattttgtgatgtaattttgaaatgagttggggttttctgttttgatattcaaattttagcgtgtaaataatatttgatgcatatattactgttaagatagaactaagcatgttgtattactttcttcttttaatacattcttccttgttctgcttatttcccgaggaagtcatgtatgtattataacctaaattttcttggactccacatttacagagaaagaaaatctttgccttt

SEQ ID NO: 63157 - DNA, 866 bp, Cucumis sativus
  Intron number 1 from transcript Cucsa.075850.2 (locus Cucs a.075850) derived from phytozome v7.0 (chr-ID scaffold0078 9; pos 428541 to 429406 reverse strand)
cttcttagttggtaaagttctctttttttatttttttgtttgctgttctttatatattgaaacatgaatagaaatgtgcaatgtgtttggtatttgtttctgtatctttgttctctaaaattttggaattaaaaaatataatacaagaacttgaatttcataattttgagtggagaagtttattaaaaatgagaaaaataaacgagaacagttgctaatgcttccctccgtttctgaaatctggaaactagaaataaagaaactaatattggactgccacactctcagcttttccttggatgtggaaatcgagtttggcacaatcagtgatttggctaattcgattgtgcagctcatcctccttgtttttttgcgtattatgttactttgcttttgtaattagactagttggtcggattatttttagaacatttccaattgctttagttttcggtttgtttttaattgttggaaggcagttaggttgggatttgggaataggcaagggtgtagctgctgatgttcactgagatttgtgggtgaacgtttttgaagtggtgattataatgagaggtttagtgtgaaatactcattactgtgtatatcaagttatcaacatttgttttgaaaggttatcttgtttcagactaaagaaagttgttgggtggtgtagtttttatagaatagttgcacagaaatatagaagataggattctcaagtcatttcttatattttaatcatcattcacgagtcaagtcctgtcgtgtgtgttctatctgaatcttgttctattttcttacacatctcaattaatttttttttttccatttttagaggttttgtcaaatatttagcataagtcaat

SEQ ID NO: 63158 - DNA, 146 bp, Cucumis sativus
  Intron number 2 from transcript Cucsa.121590.1 (locus Cucs a.121590) derived from phytozome v7.0 (chr-ID scaffold0099 9; pos 119200 to 119345)
tatcaaaagcactggaaccattactcagacgtgtggtatgaaatttcatttaatttaattggatttttttcttctttttttgtgtttattaagttggggggttttggtttaattcgttagatttttttttttaatcaaacaggtga

SEQ ID NO: 63159 - DNA, 575 bp, Cucumis sativus
  Intron number 1 from transcript Cucsa.111810.1 (locus Cucs a.111810) derived from phytozome v7.0 (chr-ID scaffold0095 3; pos 509083 to 509657)
cccagagaagaaagtcttattgtagcattagtcaggtttgcatcttcccttttgcatttgattaccctttagtcatccttgttgagtacaaataatgtggggtagaattgaaaatatctgcgtattcctctttgatcacattgctaagctgatgttagtgaactaataaaaactgatggtgggtgcttgaaacttaaactatggtcctccaagaaaacatttggtttctctattccatgagctgtgtttttagctgctgttatgaaatcaccaatcaaagataaatagaaattttagatcgtagaaaatcaacacaaggttaaagatagagagtaaatagaaaattttttaaatcctaggaccacatttgtaaataaataaaacaacataaacaagaatacagagattcaaagcattcaaacagttgtcttcatcgctcaagatggacatttatttattgagaatgtctattcttagctgaaacttaatttgatagacttttttctcctggtgtttcaagttctttcatttttcctgcaggaaacaaacattgttgagccagagaagaatcagaa

SEQ ID NO: 63160 - DNA, 968 bp, Cucumis sativus
  Intron number 1 from transcript Cucsa.047030.1 (locus Cucs a.047030) derived from phytozome v7.0 (chr-ID scaffold0054 2; pos 2226007 to 2226974)
gcggacgttaaggtaccctattacttatccctttccctttcttcttcgattgcaatcttggctttctggggtttcggataacgggtccgattagttggggaatgtatgtatatctgagcattgttagtagtgttcggggtttccccctttcgtctgctctattcttgagttttgttagttcttaggagtaggccggtgatctcgttcggcattgtgagaagaggatcaggaaataccttgtgtaaatctattcttgcctgttttgatctgagatttggatgattttctttctgcagactttcttggctgtgtttgttttcatttctgtactcatgagagcttctgattatgactgattctgagctgttgatctctctccagtattcaagattttttttgtttgtttctttactgatcattttttagtttaactcagcccgatgcatctacgttaactcactttattaaagatatatgacgcatatatatattttttatgctacgtgaactaatttaatttatagatcgcgcttgctaccctttgtttgacattgattactgttaaattacttgcatggtatagctcaaacttttcttcccttgcctgtgaattaattttctattgaagattttcctccggaggtcaaagcatttctgttcattttttatttggtttcagcaactccttttcttggatgatttattttcctacacccattcttttttagcacttttaagggatcactgtttgttggtcgttccttctttcttcttctattttttttttttagaattcaaaaccgttgctccgtttgttagggcttcattttgatagttgtttattgagtttctattcaaagatttgtaatctttaacgtggttaatcaactctaaacaatcagctattcagttccaattatccaattgattccttccaacctcataacacagtatatactttgcaggaa

SEQ ID NO: 63161 - DNA, 340 bp, Cucumis sativus
  Intron number 1 from transcript Cucsa.092540.2 (locus Cucs a.092540) derived from phytozome v7.0 (chr-ID scaffold0090 5; pos 379317 to 379656)
cccaggcccctgatcattcattttctccggccaaagtacgttctatcttcatatataatttttatatctctttccgattcctcttacttccttgttgactgaaattgttacagcagtttgaaaatgattcatacttcgattgctaattagttgaataatagttcatttattgtttggatttgaagtctgtttcgtatttgtgttttccccccctgtgttttcgcggttatggcgtttttctttctttctttattttttgtctttagtatatcctttagagttttgattattaacgaaatgatgacttatatatgtgtgtgtaataatttgcagaatcggg

SEQ ID NO: 63162 - DNA, 960 bp, Cucumis sativus
  Intron number 1 from transcript Cucsa.109230.1 (locus Cucs a.109230) derived from phytozome v7.0 (chr-ID scaffold0093 4; pos 155952 to 156911 reverse strand)
gtgcggaaggaaagagggagtatccgctttataaggtacatgagtacaatcatgatgatgatcattttgaagtttggtttatatttaatatacatacgcatatactctcaattaaggtgtaaggtgaatctttgttttcgattagctgatggacgagctaagctcagcttatatattataaaggtacttttttttatggaggtttgcgtaaattggtttgtgtgttttctagagttgcttggtggggaagggacatcgatgtggtaatagtcaattgtgatcaatcatgaattaactatatggaatcttggcaagtgaaagattgcttcgaaagaggagatgtgagatgtgagatgtcctgtatcccatttcgtttttggctgtggagttggatgtctcacttcttagattttttgcaaaatattagtactccgttgctttcgtttcaagttgtctaaatttccttttgaattctctggtttgagaatgaaattaaagagtgtgagtagtacaaaagtttttgagagggtgttcttataattggtgttagagagagaattgtttcgtgtggttgtaacgattttttacatagtagatttccttttggtggctagcggtttgtgggtttttatcaagttcggagttatccaagtgtttcctactttcttttgatttttcaattatttttctgattcttcatgcgttaatcaatactcacatttccaacatacacaaaccagatagtttgttccaaactttgtgaatatggagtacttaagaaggaaccgcttcttgatactgcaaggacaattttgttttcataacactgtacaagttgactttgttggtttgtaacaactgtgttaaaaggacgaattcagctagtgtaaatttcatttatttgcaacatgaatacagtacttggtactgatgttactttacggttgtctagaaagagcc

SEQ ID NO: 63163 - DNA, 600 bp, Cucumis sativus; identical to SEQ ID NO: 62363
  Intron number 1 from transcript Cucsa.095090.2 (locus Cucs a.095090) derived from phytozome v7.0 (chr-ID scaffold0091 9; pos 1055157 to 1055756 reverse strand)

SEQ ID NO: 63164 - DNA, 333 bp, Cucumis sativus
  Intron number 1 from transcript Cucsa.124200.1 (locus Cucs a.124200) derived from phytozome v7.0 (chr-ID scaffold0100 1; pos 204376 to 204708)
aaagtaagaaataattttgtgatcgttaaaattcaaaaaaatataatatcaaaagaagaaaaaattgaaaggcgaaaacgaagcagatggcaattttccgaaatagaaagaaaacaaactcaaaggggataaacagatagctctatgacatgaaaaccaaagcgaccaatcaccagcacagattcttagtgaacgaacaaacaaataccaaacgaatccaaacggaaacgattcaattcatgctttgagatattatcatttttcattttcactgattcttcgcaacaaaataatgaagcaattatccaaatccatttccagtcccagtcgaac

SEQ ID NO: 63165 - DNA, 710 bp, Cucumis sativus
  Intron number 2 from transcript Cucsa.045410.1 (locus Cucs a.045410) derived from phytozome v7.0 (chr-ID scaffold0054 2; pos 1329633 to 1330342)
attaacgaaaacaagctcctctccaagaagaaaaggtttgttctttttaataatctcccttgtgaatttaccaattaaattgacttttttattagtttctagggtttttttttttttttgtccttggctgattcatctaaacatttacccagaaatatgaattagggtttataatatgaagttcatgtacacaatagaatatgccctgcctttaatttagagacttagtgaatgttttgtctaggagttcatcttgtgattgtataaattatgccattctggagataagagcagtaatgtctacttcttaaacatgctaattgaatgtgatattatatcaaatagattaacctaggcatatgacattatcattcttacatagcatatgaatagctaatcaatcctcgatgtcaactcatcggtggatcttttgtcaagcatacactcgatacttatagttcatgattgaatgacattttgtttcaaggagattagcttaggtttatgcatctgataattttcttgacattcatatgatatgagtctatgactaatagattttttgtgtgaaactgatcaacctatctttcttctggctcattcatcgagttgcaaagtaaaaaccatctgatattcattaagctcatcatttgtaaaggtttgcaagtctattcattattctgaatggtatgcttgtaggtggactcctt

SEQ ID NO: 63166 - DNA, 650 bp, Cucumis sativus
  Intron number 2 from transcript Cucsa.107890.3 (locus Cucs a.107890) derived from phytozome v7.0 (chr-ID scaffold0093 1; pos 153930 to 154579)
gataattttttggtttttggggtaattctcattttgcattttgtctaatgatttagtggtgagctgtatgggaaccgactggattgattgtcagagctattcgtttgaaatgaaaagctatggatgacaatctttctagaaagtgattgtattttgattattttagaattttcttaacatttgtttattgcatatcccattatgccagtactcttgtcactgaggccttaaagagtggatcactgaaagggagcatttaaacggttcttcatatttgagtcatgtttcaagagatttttgagttaaggggaaatctcttgatgtatttgaatggaacaatttgatctgccttcttacggaaattctgttatcctattcacactttatctacaatcatcatcacttgacttgtaaataatcattttcacaaacgatttatcctaaggttcttcaacaacccggttcagcatattatttggacatttccacttatcctctagtatcaaatcaaatggtcgtgcaggcaggacctttctttctttttcatgtttgttttgaagataactcttgcttttgtttaagtgtatatttatctgtgtgtgtgtgttctatttatttagttaacaactgccttttgtcttgcaggttgc

SEQ ID NO: 63167 - DNA, 889 bp, Cucumis sativus
  Intron number 1 from transcript Cucsa.058500.4 (locus Cucs a.058500) derived from phytozome v7.0 (chr-ID scaffold0061 4; pos 656507 to 657395)
cgatttccattttaggtgttctccagtaaccctaggttgagttattttgattttgtttatgatctagttttaattgttgtcgttagcttgttctgattggtgaggaaattttgtcgcattttagaatggtgaaatttgttgtgcattcgatctactgttattggatttataactgttgtaagacttttaaggtgcaatttcaatttctcttttgatctatctcgttgcttgacaactgatatcagaagtgaagtttgatttccagatgggtactcttcatttttaaattgcttacagtatttgcagagaaaatgttttcaagtagaggaatctgtttgacgtatcaacttttaagtcgtttctttaaataatttgtgatattacttgaattgaatcatctggatgacttcggtcgtttccagtttccatttttgtggtagtttgagaaagttgggactttgaattttaattaacttgggggattgataatgcctgggatttgataatgtctttggtcttccactactaaattattttagattgagcaccttccatctttttaggttaagaaaatggtataaaaaaaacattaagatttgaagttattaaacatgaaaaattgtaaattctgtccattgctatgaaaatttatggatccatccttgtggagagcttctgatctcatctctttacctaataggttggattaaatttccacccctttctcttttgttagagtttcaatacgattgttctctacaaaaagaaaagaaaagaaacgctattacttttcataatcaacttatgatgaggttggataagttttacttggtttatttctctaatctacattattttctcatattctctagcaggctgtcaaggtaat

SEQ ID NO: 63168 - DNA, 923 bp, Cucumis sativus
  Intron number 1 from transcript Cucsa.130430.1 (locus Cucs a.130430) derived from phytozome v7.0 (chr-ID scaffold0102 9; pos 421831 to 422753)
ttcatcaactcattctcgattactccagtttctcggtaagtcattgtaattagatgattttgatgtcgttagttttttttttttttttttaattttgtttcaaggtattgaaatctgatttctgcgtctatttattgtttatgttcgattttttttttattattattttttggttttggagattgagaggatatgaagtttcttgatgtgttcacttcagctcactgtgtgtattggccaatacggctttgttattgtattattttcaattaagcactgcaattatatgattttgttttggtgttcttcctattgattttgtttattagatgtttttttttttgaaatattgtttattagatgtagatctcggattaatgatatttgatgctgaagttatgaatcggcatttcttttatttcttgttctcttcgtgttctgtttggttccgagaatgagtggatattgatttttctacatctcttctctctctcgatttgtcaaagttatgaatcactgagtacttgttaatttggcttctgagttatttttattttttaatcggtttaatactttccatcattaattggaaacatgtgactgtgcaaccttattcttgcaccatgagatttttctagattaatattttcctctgtctgcatctatatcgctattgttggcttcgccgtttggtttgtgtttcaggtcgcgagttttctctctcctgggaattggatggttcattcattcttatttcatgttatatacgtgattatcttggactttaatcagttatatccatgtcaactacatatttgaatataaaaatattagatttagtgttatgtgattttcaattttaatttcacccaattctttctgactcgtctcatgttctgcagtttgattcaaggcacttggga

SEQ ID NO: 63169 - DNA, 470 bp, Cucumis sativus
  Intron number 1 from transcript Cucsa.056150.1 (locus Cucs a.056150) derived from phytozome v7.0 (chr-ID scaffold0060 2; pos 334830 to 335299)
agggtgttcatactcatgaaagctcttgatttgtttatttttacataaaaactttcaatgtttaataagaaatttggatttagcgtggggaaattgaaacagtaagaaaattaataggttgataataccaaacagcatcattgtcactgttacatatattgatgacagattttttatcgaatttatattgatacagatcaaatgggtgaacgaaatcaccggtaggaatcagactcaaagtcacgagatcgagattaaagaacatggtacaaaaaatttgttaatatagaaacgcatagatatacaaaaatgaatctggaataagcaaatatacaaagtaatcttatgaagacactcaaaacttttgctttcaccaattcctttacaagtaaaacaaaaagaaaataaatacaataggaacaactctgattcacaatacaaggccaatcgattgatcaactacaacgtat

SEQ ID NO: 63170 - DNA, 897 bp, Cucumis sativus
  Intron number 1 from transcript Cucsa.093910.1 (locus Cucs a.093910) derived from phytozome v7.0 (chr-ID scaffold0091 9; pos 160535 to 161431 reverse strand)
caccttctgccactccttgtacctcaattaagcaggtattcgttttctgttgcttgttatttgtttaatctcccgtgaaatttcatctcgatacatatgcttggtttgatggccatttctatgaaaattgttcgaacaagttgatggaactcggagtgtttgtgcgtcttttatacacgtatctttatacgtgtttgtatgtctatgtatgtatgtatgtacaaaaagtgctagaacatgttgctggagcttgaactgtaatctctcactcgttttaaaatgaacgtgactcgaaaattggctatgagagttgaatagggaggagatgaagttaaaaaattggatgataagaagcatgggaatggatacgagacactggtataaaaagatacggacatgcacggcaccatataatttcatgataatctagggcagaaacacaacgagtacacgtttttttaaatttatatcaattttatacccgaagaatgctcaatttcaaattttattgatcgtgtttggatgctcggacacggacacagacactttacccaaactaaagtttttgtgcgtcttggtagacttatttaatcctttatgtacgctataaacaggcatattaagtttagataagtaataattagtatagtatcagagagagagagagagagacaaaactcttcaatctatgttctctttgtttggttttggtagtttacatgtgacttcttgtgctattggcagtgttatgaaaatattgtagagattaaatttaatattttggaacttgtcttgagaagttttgaaattttcatcagcaaaccttttgatggaatgaatacaagtgcggctaaattaagctcgaactttgttttttttgtgtggggcagaaacaac

SEQ ID NO: 63171 - DNA, 980 bp, Cucumis sativus
  Intron number 1 from transcript Cucsa.103550.1 (locus Cucs a.103550) derived from phytozome v7.0 (chr-ID scaffold0092 7; pos 2330870 to 2331849 reverse strand)
gcattcaggtttcctcctctctctctttctttctcttttttacttacaagttttcgctttcatcatctcgttgttttttgctttcggtggtcgtctacgaatagttgttggggctatatgtttgagatctagggttttgtagtgtgagtcgtttggcatttcccagatctggtgttcttttgtctcctaattggtgtaacgtggttttttttttcacttaagaatacacctatgtgctttcgttttaagtagatcgaccacatttccatctgacattaacttctttggagccccactttgaacttctgttcagatccttgcatatttaccctcggttgcgttttttttaatttttttttaatgttctagtatattttggtttctagtcatttgtaaatgttttcaacaaaactgttaccttccttatgaaataggttgaggtgtgatttaatcaatttcttgttctgggtatgagtatttctatccgactttctttttttttttttttttttactaccatgtggactttgtataagcggacctgccgacgaggaagaagttttaggattcacgtaatgtgggatctggaatggttctatttgatcacacacgacatgcaagtactgtagtgaacttgaaagttgaaacatttgtcttatatagctcggtctttgtggttgaaattagtttagcatgttttcttttgcttaattaatgggatttgttcacgtaacggttctgttttaacgagttgcgttttcttgtacttttgaccactggcattttccatgtggtatacttacaattatcactctgaaatacttgaattggtggaatggatttgtggaatggatgtgaaagtcttgatcttatatgtatattcttcttgcatccctggacatgaaatataaattaaatgcactttgcgaatttttacaactgaaatctgaatgcattttatatggctcctttgcagcccg

SEQ ID NO: 63172 - DNA, 627 bp, Cucumis sativus
  Intron number 1 from transcript Cucsa.054590.1 (locus Cucs a.054590) derived from phytozome v7.0 (chr-ID scaffold0058 5; pos 159325 to 159951 reverse strand)
tgttttcccttctaaatcccccttttctttgtaagtacttttctgatttcccccttctttttcttctttctgatttctgggtttgttttcttttcataagtaatcactcataaagatcctcgattttggatttttctctcccaaattttcgattttcatcctcttttatcaactgggtattcgtaaatcgtttttttcttggctgtttaagggggtaattcctacaatttggactcttattcaggtttcttttaccgggtgtttgttttttctgccgtttgttgtgatgatgtctgcagaggcagacgatagaggacagttggtgaatcaaaagagtgagtaatcatttccatgactaatgggtttagatgaatttctaggttgtgttttctacagtagtaacttagaggaacgcttcttatgaggagaatcaggtttgaaaccaagtggttctgtctttgaatatgaatttttgagctgatttattcctctaagtgaaaccagttagataaccctactagaaatcaaatagaatttgttgctgtgcataagggatttaaagagttaagggaatcagttggttgatttgattgtttcggaaggtttggcgtttagttagagatagtt

SEQ ID NO: 63173 - DNA, 368 bp, Cucumis sativus
  Intron number 1 from transcript Cucsa.125000.1 (locus Cucs a.125000) derived from phytozome v7.0 (chr-ID scaffold0100 1; pos 814742 to 815109)
agagggaggacttgcagcctgtaagtgaattttgggtagttttcatttttattaatctattggtttgaaagttggtatttctttggtcgtttgttcaggattctgtgtgaactagtacccatgttttcaatttaaacttttgtttaacatgttgcgttcactgttgagcattcatcgacttctttttagaatatcaaattgcggctcgacggtcttttgatttcaacatcagatgaagacggctgattctgctgataaggactaatggacgattttgcaaagtagtcatgttttttaacccccgtttttatttatttatttatttatttgtaggtgttctcattcaagctccgaggagcttataatat

SEQ ID NO: 63174 - DNA, 674 bp, Cucumis sativus
  Intron number 2 from transcript Cucsa.046730.2 (locus Cucs a.046730) derived from phytozome v7.0 (chr-ID scaffold0054 2; pos 2077377 to 2078050)
cattgatttcttctcctgccttttccttttctctggtatgtctattcttcaccctccattttttcccttttaatatcacttacatttctatgttgacatttgagatatgggattttgtatttggtaacaaatggtagatctggaagtcttagaagcttactgatgggggattttataagttctagtgcttgttgtggtaaatattgactatgttttgtgattctttttcggatttcccatatcttctgtggtgatgactgtgatagtagaacttataatatggttttcgctgttctttggagactcggaggaacagaatatctgtgttgcttgttaatgaatctcgtgatcttgagcgactggttgaaaaactagttgcattgatctgagattgatggttttgaaatgcgtggtatgtttggtaggcaaatgttcaattggtaacatcttatctttgtttctttcgtgattggtttgtttcaagctcaattctgcgtttactgtgggatctgcacttataatttgaagttcttaaggggagacttaataatggaatattgttgaagcagacaaggcttagtcaacgcttgcttactgatgatattagtgaccatttgattaacgtagaactctttctagcttgtttaggatacaagcacttcgtttgcaaagat

SEQ ID NO: 63175 - DNA, 588 bp, Cucumis sativus
  Intron number 2 from transcript Cucsa.067020.1 (locus Cucs a.067020) derived from phytozome v7.0 (chr-ID scaffold0069 6; pos 1396569 to 1397156)
gccgctttgtggctgctggagaggtgaaattttctctctcctgactgtttgtttgtttttgcagttttatgaactgaactgggacatgattgttgagataatgttgatgtgagatgttggatattctggttcgtacatgtaaatgcaataatagatttattcgatagattggttttgtttaggcaaatgattttacctgctttaagaatttgagtgcatatggttttgttggatatgattgatgtgcatgggtgcatcctggggattttatatttagtggttaagtagtcagcaccagcaccaaacaacgatcaaatttcattgactgggttatgatggaagtccagattcttgtttcttaggacgttttgattaaggaatttgtctttgaagatgacgccttcaagacagttgatatatatttatatacataatcaaaagctgagacacgggccttttctgttctgcagtttgcaatgtgaaagatcaaatgatttgcttattatacgtacttttcttaccccatgttctatattggttttgcagtcagggccacaacctgcagtatttgtgtgggaattaagtggc

SEQ ID NO: 63176 - DNA, 670 bp, Cucumis sativus
  Intron number 2 from transcript Cucsa.109280.1 (locus Cucs a.109280) derived from phytozome v7.0 (chr-ID scaffold0093 4; pos 207939 to 208608 reverse strand)
ttagcgaacaacagcttgtagattgtgatcacgaggtttgaatttttttacttgtcttcgatttgctcttctgtagtgaatttgcagttttttcgtgtagataataatgatcatttatagttttctattgggtgggacatgttcttcgcacatgattccagtgttctagaaagcaaaaagcctatgtacgactcttgcttatgttgatggttttccactatgagatgctgtgaatatgtttaccactactgttgcaaaatatgtgacaattcataaatctttgcgtgtgtttagtatatcgtatgtaaatagaagatctgtactagcaaatttggcagactcgataaggattaaagtgcacgttttggccttgcaggttgcttgaactacttgataaagaacttttcagtaccctatgaatgatttggttcatttgaacttgtgggaattaggactatgtacttttgatgttgcttattgtttatgatcatttgtggagttataagtttctgtttgtcaattatatgtcagtttagtgattcttgcatatgtagcattcatgtctatctgagcacttaggagggtgtattctcttactttcatgcaaaattaaagcacatctatactttttccagtgtgatccagaagaaaaaggttcctgtgattctgg

SEQ ID NO: 63177 - DNA, 944 bp, Cucumis sativus
  Intron number 2 from transcript Cucsa.120380.1 (locus Cucs a.120380) derived from phytozome v7.0 (chr-ID scaffold0099 8; pos 2476462 to 2477405)
caaaggagctgccatcattacagagcttgatcctagtaagctacattttactgtctaccatatctaatttatgattctcttcctttcttgcaaaagttacccagctgctgtttattttggattatactatctagaaaatgctccaaagggatttgccatcattgcatgcatttgtctttttcttacattattgagacaatactttgaacccatgtgcatgccatgaagcagcatgttgtgtgatacttatttactcaagggaaaagaggttaaagatcattataaaaagattcaaaggttaataagattggatgtctgtcgagcaatggagagaatcatcccatttccttcatttttttttatcaacaatgttgattctcaactaaaataataagaaagtaagctttatggcaaaagaaccactttgatcctttatcacctcgagtgcctcaaacattgttcagctgaacctttattagtttaatgtattgttattatttagttagcaagtcgcaaaaatacacagaaaataaacatgaaattctgaaaatctgaaaatcttatcctcatttccatttatttcaagatgaattcttccctagactcatcctcatttataattgaaatgaaaattagttgtttctaaacagtagatggaaaaactaaaaagtagttaatggagacaatccatctttttattcacctctccaaatcataagatgatcctctaaaattatttttggttggtatcgtacaagtatgttctcactgtgacaaatagaaaagaaatctatgtaaacttaagattatttatttatttagatcttgtttgataatcatttagttttttttttaaaaaaatcatgatatctcatgagtaaacatttaacaaatttggaagaacaaagggaagttgttaaaaaggaaatattttggtgcaggtc

SEQ ID NO: 63178 - DNA, 888 bp, Cucumis sativus
  Intron number 1 from transcript Cucsa.051100.1 (locus Cucs a.051100) derived from phytozome v7.0 (chr-ID scaffold0055 7; pos 283377 to 284264 reverse strand)
acaactacgacctcgacccggttgctaattccaaggtttgtatattgtctttgcaagaaaatttatatgagtttcctagtttggttagttgatttgtttgttgcaatcattttccttctatgtttgtgaggttttgatttttgaagtgatttaatatggtattaggaaaaatttcttaacccttatatggttctgttttataaatttatatgtttgtttctatctcttaatttttcaattatggttttcatgttttaaagaagcctcaaagttcttgataatttctaaaaacaaaagcaattttttggaaactgtttattagactctttggataatcattttattatttttttttctaacaataatatttaagcctataaacattgttccattaaacttgaaagaatttattttgtttctgaaattaggttaaaaatttaactctcatatgcctaaagaaaaatgaagaacactaaataaaattgagagaaaagaaggctaatttttcaaaaatctagttatcaaatagagtgtatctttaaaacatggtttttgaaaagatatcaatgcattgaaacttatggtttcgagaatgacctaacattctctctagtcttttttgttctctcctacttcatgtactaaactcttattcatatatgaagcgggaatgataagggtgctcaggaggtatccacttaatggagatatcctggttcacctattgttcaacgtatagttttttttaaaaaagggaatgtaatgctgataaggttactttgttaaaagaaccaaatatttatcaaatggggacgtaatggaatactaataaactcgtattttcttccaacaggcgtcaaatttggtgtcgcgtgacccggacctgaa

SEQ ID NO: 63179 - DNA, 832 bp, Cucumis sativus
  Intron number 1 from transcript Cucsa.011000.1 (locus Cucs a.011000) derived from phytozome v7.0 (chr-ID scaffold0015 4; pos 339631 to 340462 reverse strand)
attcactctgctttttcttctcggcattaccaaaggtcaaactttgcctttcttttcaactcttccacattttatatgtattttggttttattcatttcgggtcaaacaagaacaagaacaaaaaccaaaccaaaccaatcaattttataaagaaaaaaaaaccaatgggttggttttatttggttctcggttttttacattcttttccaaaattttatttttgtttggtagttttttgccacttttctaaataaatagcattcacactccataacaaatgcttcttttttttttttctaaagaaattacatagaccacaatgattaaaatactaatctgtaatgataatgagttaactttcaagggttgataaatatatataccgttggtttgattcggtttgttcataaaagcctaacccgaatcaatattttctttggttttcttcaaatacaaaccaatacgtccaattttgatttggttttcagtttttcagttttttgttgtctgccttattgtataagtaaaagtatcttaattgtaatggtattggatagtgggtctcacgtgattttcaaacacaatagagtctaattgatcactcttttgctcatcaatcatactacattctttgattacagatttggaagtgaagtccacagttcattaggattacgaaacacgagtaaacaacaataaacatagtcaaataggattcaattgtcatattaccattgatttattacgtttctcctagaataaacatgttcaaaccctttaaccttgtcggttgtcactctgatcggtaatgcctcaataataatttcagga

SEQ ID NO: 63180 - DNA, 681 bp, Cucumis sativus
  Intron number 1 from transcript Cucsa.116140.1 (locus Cucs a.116140) derived from phytozome v7.0 (chr-ID scaffold0099 5; pos 47371 to 48051 reverse strand)
caacttttaaccaacggtaagcttttgaacatcttaattttgttgattagggtttttttagtcaaatattatatttgttttctcgttttatcttgtgttcttttgtcaatttctagcttctcatctctcgatcataatagaatttgaagcttttttttttatatatagtgatagaacgaacgaacaatttaaatacgagtttaggaacaattgaatttcatactaatagtataatctaaccactttaatttttaaactaaaaataaaaattaaatttttttatcttttctagattttcttttaattttgtataatatttaagatggaatttaggatacgattaattttcttcttttccccttttgtttttgttttgtttgtttgcttttctttctaatactatttttgacaatatgtggacaatgaagattaaacttttaatatcgagattgatagtatatatttgatataattaagttgaattatactcggtcgttttagcctctcgattatcttccatctttctttctttgctttgctctttattattcactattaaacaacaaatacaataattttgatgttgaaattgatttgggtatagcaaaatttgattgatttttctccctgtttggtaattctatagctttggagacatcaagacaacaactacaagggtgc

SEQ ID NO: 63181 - DNA, 740 bp, Cucumis sativus
  Intron number 1 from transcript Cucsa.094990.1 (locus Cucs a.094990) derived from phytozome v7.0 (chr-ID scaffold0091 9; pos 1010693 to 1011432 reverse strand)
agtttcatagccctagaaatctccttcttgccgtaatgtattaatattctttagccaaaactctatattcttgagcgtttgaaatgtggaattagattatgaatatatcgcattcttcggtaacgatatatgatgaatgttttgcggttcgttttcccgatgaggaatgagaggattgaacagtgtttttcatgtcggtattgtgttaatgaatgtttagttgggatttctcattcgttgttgaatgattcacttcaatactttctcgttcctttagggtttcattgaagcttaatcgctgaagaactaattcaaaggaagttatattgggatattgaagatcgttaggagaacaatttctgtttgccttgaaattttatgtatagtttactcatttgaccgcccagattttatctcagtttagcttagcaatcattctcccattcatgaagtacaaattttaggaacagtgaaagctgcttctgtttgaactgtttaaactatttgaaagtggattaagcatagacagagaatcatgacagccattctatttagtggattgcgcacaaatgattagtttattttaagttttgtctgtttgtctatgagaatatcccaactttgactgccaaagagaaaatctcttacacttttagtttgtcccactcttcatgccttttgactctctgttttggaatacttcaggtgtgcgaagttggggagttatcggagatattcca

SEQ ID NO: 63182 - DNA, 545 bp, Cucumis sativus
  Intron number 4 from transcript Cucsa.126910.1 (locus Cucs a.126910) derived from phytozome v7.0 (chr-ID scaffold0101 7; pos 722040 to 722584 reverse strand)
aaaaactagaagaggttacctcacaagttgagaaggtatagatttctgactagaggaaggaaacggattttttttgccagcattgtttgaatgttctgtgcaacatgctcccttattcatcatggataatgtataaaaactaagacgagttattattatttttttcttgttcatgtgacacaatgtactatatctttttggcatatacactccatggcatccattagctatcattatcgtgcaatgctaattatatacaataagaaatccttgaccatctggtcatttgttgaagttttgacgttacccattcttgcatattaacattgaacatggttaatttaactgaagaaatattgtggatacacttattcatatcctggactctgattgagaatgagttcatttaacatattttctcctcagccaaccaatttccattgttaaaatgttcctttgtgcaagaattccttcattagtatgcttactttgttgccatcttattgccagaagtctagcatcatatccgaacagtggattcaaat

SEQ ID NO: 63183 - DNA, 627 bp, Cucumis sativus
  Intron number 1 from transcript Cucsa.101080.1 (locus Cucs a.101080) derived from phytozome v7.0 (chr-ID scaffold0092 7; pos 353183 to 353809 reverse strand)
cctaaccacaatctccaccgtctcattcagatttggtccgattcccttcaccaacgccttcactcccctctttctgactcttctctctcctccgatcaacttctccgcctcatcaaccatcaatcacgtgctgattctcttcctcgccttctctcttttgcttctgaatccctcgacaatcggaggcttctctctggaattgacggactcctccccctacttgtcgatcttctttgcaatgtccatgccggtgatttgcttgaccaagcggtcaggctcttgcatttgattcggactgagattggggataaggagaggtttgtcaagaccattttgaataccgatcgtaattctatttcgtctctgcttttgattctgcgcaaaggaaccgtcgaattgaaaatctgttccgctaatctcctggaatatctcgcaatcgacgccgaagcgaagatcctaattgcagaaacagatggattgatgcaagaattactcaaattaatcaattctcaaaacgatacaaccctaattgaatccgtactatcatgcctaatttcgatttcaatgccgaaacggatcaaaatcaaattagtacaactcggagtgataaaatcagtaaccaagctt

SEQ ID NO: 63184 - DNA, 501 bp, Cucumis sativus
  Intron number 1 from transcript Cucsa.046600.1 (locus Cucs a.046600) derived from phytozome v7.0 (chr-ID scaffold0054 2; pos 2009477 to 2009977)
attcatctgctaccaattttgctgcgagttcctcggtaattttatgttgagctttattggttttgatctgatatgaaatttgtttttttgttttttgtttttcgtttcttctagttctttttctttgtgcccattagtttaatttagccccacagagggaaatttagtctcttgatgctcgtactcatgtgggatctgcttgatttcgattgtttgtgaagttgatctctgcttgagctagctgaatcgaagttgcttcaagaggattttatatttgaaggcgatttgcccattagtatgattttgtttaaatttttttaatgggtttgtgcaaaggacatttgtttatagttcttaccgctactatcgcttctcctttggtggaccagttggtttgttttgctgcctctctgcttaaatggataattttcatgtctgttatctaacatgcacttctttgggtggactcctaggggctaggagaaaagttagagttctgta

SEQ ID NO: 63185 - DNA, 506 bp, Cucumis sativus
  Intron number 1 from transcript Cucsa.091690.1 (locus Cucs a.091690) derived from phytozome v7.0 (chr-ID scaffold0089 4; pos 2633700 to 2634205)
gagatgtgagaaggtttacacaaagtttattctgtatatattgatcattttattatttcatagctgactttaattcaaagttttattttgtgtgtcactgcaggaagcaagggctgtgaaagtcataaagctaaattttcatcagcccactgagctagacattgattcaagaggttttgaaaaagtgaaaaacttggtagtgctcaaagttcacaacgtcacatcttcaaaaagtctcgagtatctaccgagtagcttaaggtggatgatttggcctaaatttccgttttcatctttgccttcaacctactcactggagaaacttactgaactcagcatgccaagtagcttcatcaaacattttggaaatggatatctggtactaattgatcgtgtctatatatacttaacaatgatgcattaatttaattaattaactttaaatgtcagccaaattatttgaaatttgattctattttcttttgtaattcattgcagaattgcaa

SEQ ID NO: 63186 - DNA, 976 bp, Cucumis sativus
  Intron number 1 from transcript Cucsa.090140.1 (locus Cucs a.090140) derived from phytozome v7.0 (chr-ID scaffold0089 4; pos 1517235 to 1518210)
aaagtctcttgcaggattacgaggagttgcataacgtaatattttcgtttttggatttttctccctgttttaatctcttttatcgatgtgcttgttcttcgattattgttgtttatttttcgagattggttatttgttgattggttgctgagttttgagactgtacttgttttgtccttgatactagaaaagatgaagatcttggcctgagaaggctttgagactgtatttggttgctgagaaaattttgaactgttgaaatattgcttttgatgtttgtgttaatttttggtgtttttaaatgctaaaagaaaattaagcttatggggttcaatctcttttatatgttgttggcttaatcgaggatacctcaaggggtttagacagttccattggctaagagatcataagttttaaactttcgaccccatgtgttccgtttttcccttagtgtagaagtggtacttaaaatgcctttaagcccttagaaaggtaatctaaacatgcaataaatcagggcgtttaattaaatgagataatgtgtctcctgtaattgtgttcaagtttgaagtaaatatgacttgatattattgattttctgtaatagagttagttgttagtttcaatgttgagtgagattagtcaaagtgtaagtattcaatttacgttgctttttgtatttgtttaggagtgatatatttgaatttatatacctagcttagctcaacttggatacccattacattggtttgaacatgatcttatcactcacgaataatgaaagtacaatctttgaggggtgggggtgccctgtatgttttaaggtttcaattttttttaccatatggttgatggatggaattcctgctcagttttacttctaatgtactgcagagataatgagggtatagcttgtgaaaatattttacgtagaacttgaccagttgaagcattttcatctcaggaaacagaagcc

SEQ ID NO: 63187 - DNA, 474 bp, Cucumis sativus
  Intron number 2 from transcript Cucsa.011040.2 (locus Cucs a.011040) derived from phytozome v7.0 (chr-ID scaffold0015 4; pos 369984 to 370457)
ttcgtggtgaaggggtaattataatctcctctctttgtttctgcatatgcttttaaatgaataccttactttttaccttatcgttgagaatgaataaacaaaatttggatagttagaaaaggaatggggaggaagagactgttgaacactgatttctttgctgtgccctgttttttggttttagataatggtgtgtagtaaccacatgaacattcaagatgaggtgaaccaagtagtaattcatgagcttattcatgcttttgatgattgtcgagcggcaaacttggattgggctaattgtactcatcatgcttgcagtgaggtgtgcatctacatttagccatttaaccatttcctttcacaaattgagtcttttttccccatatgtttacattattttgttttgggactttctaacgtacatacatttggaatttagattcgtgctggacatttaagtggtgattgccacta

SEQ ID NO: 63188 - DNA, 585 bp, Cucumis sativus
  Intron number 3 from transcript Cucsa.073240.1 (locus Cucs a.073240) derived from phytozome v7.0 (chr-ID scaffold0076 5; pos 832875 to 833459)
gttaccaatctgaagctacttccttgatccaacaggcaaacatcccctctcaattagtatatatggaaaaatagtaaaaactttgatatttctacttagtttgttgtctttaaaaagagtattcggctcaacagtcaaagctaagagagtagagttgtgaactcctctacttacttggcccaaagagcttgtgagtcctactgtctttgtgctgcttgtctctcccttaactctagaatttcactcattgtcccaaaacactaattgatttgattttataacatgaggtaacatatgaaaagctgcaataaaaataataaatcatacaaatgcatcaagcccgtcttttcaggcaatatatcaatttccatacgtgatattattagtacttcagaagtataaataatacaacttcaaattcagaatatgaagacatacctatagtttagaaactatgtagggacagccaacacttatcatagtcaatcggaagaacctgtttgcaaacttgttttttgatatgtatagaacaaaaatgttaactaatatgtatgggacagtcaatatctcaaatcagagcagtgt

SEQ ID NO: 63189 - DNA, 518 bp, Cucumis sativus
  Intron number 2 from transcript Cucsa.042240.1 (locus Cucs a.042240) derived from phytozome v7.0 (chr-ID scaffold0054 0; pos 716119 to 716636)
acgggctgaagtaccgggctctgttatcattggtcagcttttagtgtaaccttctgagtttattttaacttatcttctctgacaattgaacttgtattttgttgttcagaatgaactttatcagctttttttttttactttgaagggagagaatttaatttcttactacttgtatatttgaattcaatgaaattatttggtttttttcctcgctgtttgctctccctacttgtatatctgagttcaaattgtccctgtgataggtttctttatatatgatatatggttaatatactggccaaaccttctttgtatttctttaattgataaagtcatgtttttaatccagaagtttaatggtgcaacaagttagtaatattttaacgtgtaaagctttcatcttcttgatgacatctttaaattttaaagttgtaggagtggatgttaaagcactcttaccatatcttgtttgttattgaaaaggtggttctggttattgcaaatttggttggagcaaa

SEQ ID NO: 63190 - DNA, 546 bp, Cucumis sativus
  Intron number 2 from transcript Cucsa.092340.1 (locus Cucs a.092340) derived from phytozome v7.0 (chr-ID scaffold0090 5; pos 240359 to 240904 reverse strand)
acgtattccattctttggaaccccaatcgtattatgttcgtacccatcatcttatgtttatcttttgtctattataaacttttcttcaatgctcttgttcgactaacatttttatgaatgtctgattctcatgttagggtacatcaagttgattattatagttagtcgtttgttataatttatcttttttgatatgatcgcgtcatcttagtgttatatattttttagtataagttatattactttgtggtttagcatggtatcacaacatgtagtgcaggatgtgtcctatctttgcaccttgttttcctcgcagttaataagttcaaaaaatgaggcgtgagtaactcctttagaattaaatattatatcaaattaaaaatattgcaaaacgtatctatggtaaagttaaaaaaaagaaaaaaaaagaacagattgaattgcattgctaaaaattaagcttacgggtaatgatttaacgccttccttttctgattgacacatttatcagattttcggtggacggtactccgataagagaattca

SEQ ID NO: 63191 - DNA, 464 bp, Cucumis sativus
  Intron number 3 from transcript Cucsa.121880.1 (locus Cucs a.121880) derived from phytozome v7.0 (chr-ID scaffold0099 9; pos 279704 to 280167)
ctctagttcttaaaggaagttggcattttagacaggtaaagctatttgattttgtaaacacgtttgacatctcttcattcacgaatccgctaaatttgggtccattcctcgttttaattacatcaatttccccatttttggtaaccttccttctgcaataagtgccaatcacggtttcaggacctgtgaaaacaatcgggcattgggtttaattctatagttttgatttaccatatgactgaagaagaaaccttggaggagttcctttttcgcgtacttcactgtcagcattttgtgctgctcatgttactcttgttctctttttggtgtatccaaactggatattatatgaaaagaagttggtgttcaataatgtagattttcttttttggtgtaaaacagttttctgacaaattaatttatggtttcacttttcaggtaattctgtctgtgcttgtagtggc

SEQ ID NO: 63192 - DNA, 572 bp, Cucumis sativus
  Intron number 1 from transcript Cucsa.108380.1 (locus Cucs a.108380) derived from phytozome v7.0 (chr-ID scaffold0093 1; pos 546541 to 547112 reverse strand)
tttgttgcgaacccttgtcaattcctgttttccaggtctcattaaaactctcttctcctttaaaattgtgtttattgttcatctggatactactgatgctttgttttttctcgcatagcttttttggtttttgttactttggatactgtagtttcgcttgtgtgtggttgttgctgttgacgattttaaaatccccttttctttgagcttttctcattttctcttttcgaagtttattgtttagactatgcatttccattggaagtaattatagattgttatggaaattctggagttatgatgtaaatagtcttagacaatgggagaaaattgctttaccttgtttatattatcttgagtaaatgttcgaatcaaacgacagtttatttgatttaacttcaacttttcaattgtatggattattggattttcttcactgtttagaaacatgaacttgaaggtatagatatagaagaacatcaagtttatatttgggtttatagtctcttatattcatgattttatttgatctcataacatatactttggttgttggatgtattagtgtgaga

SEQ ID NO: 63193 - DNA, 854 bp, Cucumis sativus
  Intron number 1 from transcript Cucsa.074560.1 (locus Cucs a.074560) derived from phytozome v7.0 (chr-ID scaffold0078 5; pos 381077 to 381930 reverse strand)
ccttggctcagtcttcctcttccatcttggccgtggtcagttcttttgttttcttccatgttgttaccattatgttttagctttctttattttcattggcaatcatttgaccctaccataatttgatgggttaaacccatatggtgaatggaatccttgtgtcaaactaatatggtgaattcatatatatgtatagacatatatatttagctagatagttaaaactgaatacacaaaatatataaaaattgaagcccttatttattttgatatataactatgtgatttcctgcttttgaacattatgtttgtttccccactaaattttatgcatgattataaacatctaagttattagccaagttcaaaaaacaaaaaaaaatataagttttaaaaacttattaattttacttttttttttcttttctttgttaagttttataaacttagctttggaaaactatcctagaatatagatacataaaccaatatgttgaagtagttattataggctttttaagtttgtttcaataccaaaaaatcaaaactaaattttttcaattcagcccctcaatcattctaaaatgttaaatcactaattggtccaaaactaacttaagttgatgagtattaagtattagaatggatataatatttttacaatatattataaacacacagagctcaaatattagttcatgactgtcgaccaatacaatgaatataaaataaggtcctctcctacctatttaggtaaatcactaaaatatattctcaaataaatcattaaaatctcccccaaaaaaaattgatttgcaggtgtgaagattgtgaaaatccagaaggaaaggatt

SEQ ID NO: 63194 - DNA, 667 bp, Cucumis sativus
  Intron number 1 from transcript Cucsa.129390.2 (locus Cucs a.129390) derived from phytozome v7.0 (chr-ID scaffold0102 8; pos 354591 to 355257 reverse strand)
gcttgttttgggaatcggttgactcccctgaaactgtaatttcttcttctctatgtgggtttcctcaattttgaatttgacccacattcttggattctttctattgttcttgtttctttgatccctgttcgtcttttcgtcttttcttcatgtgggtcgttggtttctcttattgggtgaaacatgtgttagcgttttttttgtgttgaggagtgtttatggacattttttttttttcatttcatgtattaggaacaaacaacgtatcttcatattttcataatggtatgaatatgatattgtgctgtctttcgttttgtctttcacccaaaatggctatactttttaagatattgcatttcacttatccttggtctagctaatttgtgactttccattggcttttataggttctatgcctatcttattcctctatctttttttattgatgtatggaaagtggtgtcgatctgcgtataattagtggataagcatcaattgtcatctgagatgatatggtttccaccttgcaattgttgaactcaaatatgggaagtggtttgttcgatattgtttaaaatggaatggtagtggttttcttattctgatgctaatgacaaatataatatcttcttaagatcagttttgtacaattgaattggatagg

SEQ ID NO: 63195 - DNA, 503 bp, Cucumis sativus
  Intron number 1 from transcript Cucsa.046930.1 (locus Cucs a.046930) derived from phytozome v7.0 (chr-ID scaffold0054 2; pos 2167132 to 2167634 reverse strand)
gctaggcatcgacgattcccctatccccatcactggtctgcttctctctctctctcgcttctttctttctttctttctttcttccttcctttcttcctttctttctttcttctatgtaattcacgattactagccaccagcaactatcctgttcttggttttttggatttcttttatatgatcttatgaccaaaattaagtttctggcgatcagtaaaactcaaacccttgaaccaggaaagaatgttgttgatcaaacggagtagtatatttaatgagttttgagtttgaatttgtataatttgttttggcatcctaagattctaactcctaaagtacatggttggttttgtttatattttgttatttttctctgcaatcagaaatggaaataaaagatacataactatgatcactatctgttgttcatgcacataaacaagataatcaagaaccaactccttgtaggtttctttgctccttgttcacattccctactgtcc

SEQ ID NO: 63196 - DNA, 605 bp, Cucumis sativus
  Intron number 2 from transcript Cucsa.104220.2 (locus Cucs a.104220) derived from phytozome v7.0 (chr-ID scaffold0092 7; pos 2825544 to 2826148)
ctttgaagcatcccaatatcataagatttaaagaggtatatgatctgaagttgtgaattttgttttttttttatggttgttcagtttctccacagtggtcaattttttttttttttgggtttcaacagagcgtgttcatcaccacttgaccacctacctccacattaaatattcatgattattgtttgttttttcttattgttaatcattgatcggtcagatgcagttgtgagtttttatttgaaatgtatgaatgaaagaatcagagtatttatgcactgagaagcagttcaagtacatttcgtttttcttctaatttctggaaaatcgtacacttttttaagctgcttccccagaagcatttatttgattccgggtggatgtaaaacctttttgtacaaacattttcagcttaattgttttctagctaatttccatttttttgttaaaactcttgtttcatctagaccttcctttcttggccaagactacttattgtagttgacaattgaatgttgtactagttgtctcattttgtttaggaattttacttttatttgctaagaacattttcttgttaaatttttgttcaaaggggttctctt

SEQ ID NO: 63197 - DNA, 671 bp, Cucumis sativus
  Intron number 1 from transcript Cucsa.013660.1 (locus Cucs a.013660) derived from phytozome v7.0 (chr-ID scaffold0017 5; pos 39711 to 40381)
gatttgtaccatttcattgttctgcaccagagaaagtaagttctcaattaaattttcttctttactattttattttacactgtcatggttgcctattaaaactgtcttctttggttagagctgctattttcttggaatttagttggtttttttgttttttgtttttttttttgtgtataggtttttaattctaaattttgagtagatacccatcttttagcaaaatgtttaggtccagtttggtaatcaatttattttgaaaattaaatttccactttctacttatccaagaactaaaataaagtagtttctgaaaacttgtttttgtttttagattttgatgaagaactcaaatgtttcattaaggaaagtgaataccatggtatggaatttgggagaaaatgaacataaaattcaaaacacaaaatgattatcaaatggggccttggctatccactgtatttgtcactagttactgagattttcattcatttagttcctgttgctagatatcataattcatgctttttgcaagtcatggatgctcccggtcgtacctgttgtttgctctcaatatatttatttatttggtcaggctcaggtattgtttctgatctttattcgtgataatatcagttgaaatctggaagacgtcattgtgaaatatttgg

SEQ ID NO: 63198 - DNA, 476 bp, Cucumis sativus
  Intron number 1 from transcript Cucsa.087720.1 (locus Cucs a.087720) derived from phytozome v7.0 (chr-ID scaffold0088 8; pos 297814 to 298289 reverse strand)
ccaaggcaaccttcttttccctttcctttattccagttttttacttgtttagaatggcatgcttgtgtgagcactccaccatcatgtgaatgatgtacatgattgcaaagatgtttcgctcatcatgaaatagtcaatagtcttttaatgcaacttttgtttttaatcactggttgatctactgttatttaaacactatgttcgagataatggtagttaaagttttctttaggattaagtcattcttcattaacgtttcaaaaaatggattttccatacaagaacttactaactcttttgatgatgttaaagtggcattttaaagtatagaattgaacctgaaaggaattttgaatgattaaagatctgttcaaaagtgattttaataatttcaaagtaagtttgtctcaaacatggctctatggatatttatgttggtgttcttcccatgacatctctccctcaggagcccttca

SEQ ID NO: 63199 - DNA, 353 bp, Cucumis sativus
  Intron number 1 from transcript Cucsa.031240.1 (locus Cucs a.031240.1) derived from phytozome v7.0 (chr-ID scaffold00 429; pos 138466 to 138818 reverse strand)
gacgggaaaagcggcggagggagagagttcggcaagtaaagaaactaaaaatgagacgacggagaagaagggtgatggcgacggggataacaacgatcgaaacaaattcaaaaaagttgaaatgtcggtattcaatggagatgatccagattcatggctattccgtgcagataggtatttccaaatacacaaattgacggattctgaaaaacttacggtcgctacaatcagctttgaaggccccgcactcaattgctatcggtcgcaggaggagagagacaaatttacctgtcgattaaatttaaaagaatgactactgatccgatttcgatcatctcgcgaaggctctctgt

SEQ ID NO: 63200 - DNA, 478 bp, Cucumis sativus
  Intron number 2 from transcript Cucsa.109650.2 (locus Cucs a.109650) derived from phytozome v7.0 (chr-ID scaffold0093 4; pos 570088 to 570565)
gctgaattttacaacaacaaagtaagctaatgtttcctcggaacttgtagtttattggtagaatctatttagtccctctttctcaaaaaatgaacgcatggaaaaatagagtgtagaaactacttaacattagcacaaagcatctaggccatctatagagtctgtcttttctattaacacagccagtattttgttgctggaaactggaatgcattgatcttgccattattggaatgaatgaatttcatatttgattacttatagtaggtacttgtcagagatttaatctagcatgctatatgctaaccacaattcctaagtgcatttgaaatcagttgttcttgcgtccattttgatctatcttattgtggctttgtatagtggtttcattcataacaaaaattaaaatggtatacagccgacctgtttacttcttcattcaggttcttgtagagtacagaaacaaagatccaaatca

SEQ ID NO: 63201 - DNA, 236 bp, Cucumis sativus
  Intron number 4 from transcript Cucsa.065510.1 (locus Cucs a.065510) derived from phytozome v7.0 (chr-ID scaffold0069 6; pos 224977 to 225212 reverse strand)
gctgcagctgcggtggcagaagattttctttacaggtgaggagtaattaatggtttttgttatgtgttggttggtggaatcttatttatttattatggtgggctttttcttttccttttcctttttctcttaaagattcataatttgttgagataaattttgattttgattttggatttgggaatgtaaaaaacaaacaatcaaatgaaggaagtgaaagagtggggaggattgtt

SEQ ID NO: 63202 - DNA, 974 bp, Cucumis sativus
  Intron number 1 from transcript Cucsa.024080.4 (locus Cucs a.024080) derived from phytozome v7.0 (chr-ID scaffold0033 0; pos 87519 to 88492 reverse strand)
tcagctctccatttttgtctttctttactcttaaggtaaataactcgatctttatacaatacactctctctctcttctctctctctctctccaaatgagaaacagagtttcccataaagtattagtaaacaaatagtaaaggtttctctatttagtttaaatccttattatactatgatctcttaactttcactttacttcaaaattttattgtaaattatattttcagactcactgttttctacgctaaattacaaaataccctctatgctttcccctttgtttaaaaaatgctctcattttgaatttacagtattacaatagaacctttttataaaggaccatcaaagtagaaatcctttagaattttggataaattctaactgagccctaacaatgctcgagtctcaatttctattccaaatcattaccttatcacctaatttctctaacatttgtactttaagggcagttctcgtttagatttatttgatactaactttaaaaacttgaaactagatcgagcccgcgtggttgtaattttctttttttaaataagactcttgttaaacattatgggtaggaacttgtaatgtttgtacatcttttaataactaatatagatttatgttaaattatcgtccttgtactttggaactatcatttctgttcaatttattttctacattttctataattcttaaaggataagtcctcaaagcttctcattgaatggttctaaggatagatttgaacgaactttgcctcgatctttcttctctgttttttcctttttcctttttcgttttgttgtaagtcaaagattccattacagtgagtagtttgttatacataccaaagaaaacttactagattccattacagtgagtagtttgttatacataccaaagaaaacttactctgttttatacaaaacagctgcagattactcttttaaagaatcctgggataca

SEQ ID NO: 63203 - DNA, 807 bp, Cucumis sativus
  Intron number 4 from transcript Cucsa.067650.1 (locus Cucs a.067650) derived from phytozome v7.0 (chr-ID scaffold0069 9; pos 266068 to 266874)
acctcaaggtaacgttctttgctttaggtgatgcctaggttgatgtggctatcataagttttgttgaaactcttgttgaaattatggaaaattttctccataaggttttcataatcctattgcagcacggaggaaaattggaagagatctattatcctccatttaggatttctcccttagcatttattaccattgtattattttttgttttagtaagtatttgttttgccattgttcttcatgcttgctgtgaattttgatctttgtatccgttcattgctccgccacttccatttttgtctcttgacctagttttaacagcaaggctgtagctattgatgtaggatgatacatcaaatacatatataccatgacacttcagcaggcttactagagtttgagacaacgaacaagtgcagatacttccatttgcaattcgttacgaaacagaagtgttggagcttcagtagttatatcctaagaagcatggacatggacatgacgtttatacttcatattctagaaatttaagaaatgaacatgatgaagacatgtgtattgcactgtatattctaaatacgtttgaatattttcattcagtaaattgattttgattttcacattagaactagttcatataactgaagacatgtgcattggacgaaccaaaaaaataaaataactgaagccttttttaattacctactttatgtatttcattcaatttttggatccttgagggtttcaagtagaatttttcattaaaaagctatttctattgctagattcgtgttgctgagtataata

SEQ ID NO: 63204 - DNA, 826 bp, Cucumis sativus
  Intron number 1 from transcript Cucsa.032240.2 (locus Cucs a.032240) derived from phytozome v7.0 (chr-ID scaffold0042 9; pos 1613173 to 1613998)
tagcttcttcaacctcttcagtttcacaacaataggtacatgtattttccttttaactttctttctttcagttttctagcttttctctctataaccctttatttggttgctgagatgattgggaatgggaaagcaattaggcttatggttatgaatttgactgtgctatttggggttttgaaaaaaaattctcttcaattactttgaaggatgctggatttttttagctttttcgacgttcttaaggagtgtattgacagctttcaagattttagagggttgctttaagttttaattatgcagtataggttgagtcctgttgaagattcagacagaatgcgctttttcaatacttggaattctaacctttgcttatctgtttgtggtagtttttttttttccccttctctgcttgaattatggcaacgcactttctattttatgtttatgattgatttgaatttggtatatgtttaatgtatgagacagcaagtcaactattctttaatttattgaattgaattgaggattctgattacttgtaacctgtcaaagggaatgctgtctctctcctgctaaaataaatacttttgttgtctgttctgcttttcctttcaggctatagtataaaacttttaggattctaaggtttctaaagttcgttttgaattctttttatgaatgtttttcctgcaagtgggaatattacttgattcaatgatttttcatttcttctcattggcttcatttgattgctgaatttttggccttttgaaatttgatggttgcagatttaatagtttgtgttcaaatctcattttctgga

SEQ ID NO: 63205 - DNA, 684 bp, Cucumis sativus
  Intron number 4 from transcript Cucsa.032240.2 (locus Cucs a.032240) derived from phytozome v7.0 (chr-ID scaffold0042 9; pos 1614514 to 1615197)
cattgaacaggtaagatcaagcttcattagtgttgcaatttagataacttctccttgcaagttattggcagaatgaaaaaatgaacaagccatgaacgtctcgtgcgttgaatatagatcctctaaaatccataattgttaggcgaagagattgagaggaaggtgattaattgtcattttcacagagccaagtattctctgaatggtcacttttatgcccttttggcctggttcataaagtgctccataaaccctctagaaactagctttttttgttttgtcaatcttgtctttaaacaccatagtccgagttagagatatattaggattgttagtatgattaatagaaagatagctagtaagtttgtttaagtttttagttacaagtggagggagtctgttgggagcaagatgggaagaattgtgtaggatctcctttgggaaatttggagactggccatctcgaaagtcaatgttattttatattgtagtttcttcatttatattgcaatacaaatctatcttttagtgttcgcgcgtattctacttaggtggtaccttaacagtttctcattcgaatattgtattttccctgcatcaatacatatggttttttgcagatagattcacaaatttattgacattgttgttacttttttgatggggctattagaggctaagaac

SEQ ID NO: 63206 - DNA, 608 bp, Cucumis sativus
  Intron number 1 from transcript Cucsa.010650.1 (locus Cucs a.010650) derived from phytozome v7.0 (chr-ID scaffold0015 4; pos 65947 to 66554 reverse strand)
gatcgtgtgggttcaattttcaatttctctctccttctctctctattgcgcttttcctgacctgaattcactttgaaatttggaaatgtcttataatttaatgtttaggtttcctctttctatccctttgtttatacccaatgctgactgtcaattagaattttgaaattcgtaatgttttctttctcattataaatttactcttcgtaatcggttgcgtctaaaggaatgtctgctagttatttgagcccatgaattgctgaaaatgaggtgattttttaatttgagggatgggggttgttgcgaggagtttcttaagctcttgttcgagttcttgtatctacattttgatcaaaatgatgggttaattaattaatcatggtaatggttttcatccaattagctgcagaacccttaaaatgatgagatgacagaatgcttcctattaacatgcttttccataattaccttaatttccctatgcattgattatttccttaaccaatatattgtgttaaaataccgaagcttactcgaaaaagaaaataacattagatatttgaaaaagtttaggtggacaaggacaaaattgcaaattgggtcttgtc

SEQ ID NO: 63207 - DNA, 553 bp, Cucumis sativus
  Intron number 1 from transcript Cucsa.072640.1 (locus Cucs a.072640) derived from phytozome v7.0 (chr-ID scaffold0076 5; pos 102306 to 102858 reverse strand)
tattgatcgaagaaggtaccgtttcgattttgttagttcttttcatgtctcgcatgctatgtatctgtataattgtgtttcttgaaaacctaatgttttattttctggaataatattgagctttttctgtggttttaaaatcaattacagcattgttacatttatgattatgtttggcgtattttttaaactaagattgctcgagctgtttgatattgttgagatgttgtgattttcttggagtggaataagcgattatggccaagcgaggatttatggctttgattttggcattgtaggatctaagattgcgttttcagcatgcttttggaaagaaaatatgttctgttttttttgtactgttgtgctggagggaattttgttgagatgtcattggtcttttgaactggaaatacacagtctctccttattctgtgttctttctttctctttttaccactgtttttaggggaaagaccgttgaattgtaaaatagctaagtgattacgttgttttgttattggagcaggaaacgtagacggagatttctctg

SEQ ID NO: 63208 - DNA, 557 bp, Cucumis sativus
  Intron number 1 from transcript Cucsa.112960.1 (locus Cucs a.112960) derived from phytozome v7.0 (chr-ID scaffold0095 3; pos 1281735 to 1282291 reverse strand)
ggatcggcttcttgagatcgcggaaagagtgtacggtatgcttccctttcgaattccttgttgttcttgtgctgtgagtgaggaaatgtatgttgtctctgttacgtactgtttgcttggtgaataattgagctttgttctttacttcgatgcgcgtttgagtgtggtttatggtggtttaacatactaataacagttcttctcttctccaattctctgtagaagctcactgttgttgtgtacgtcattttaattttgccatgatctttttttcccatttaccttttgtaagagcaagtagttttgagttgctaagatctttattttaacaccccttgttgcatgggttctatggtcattgggagagatctacaattagcaagttgaattagttaattgttgctttgtaaactggttctgttcacctgaagtttcttttaaatatatgaaaatattttgtagtgttgttctaaaacttactatagttgtatctgcatgttactactaatgaagaagtttccaattttttttttcagtgtttgattgttgcttctcta

SEQ ID NO: 63209 - DNA, 521 bp, Cucumis sativus
  Intron number 1 from transcript Cucsa.085250.1 (locus Cucs a.085250) derived from phytozome v7.0 (chr-ID scaffold0086 7; pos 134783 to 135303)
agatcaagccgctcaaaccgccgcccggatttcaggttaattttttcttctcttatcaaacagaatttagtcttaattacaaactatttttaccacaaataatataccaaatcatagagattatatataaagtttggtctaaattctaactttttctcccttcaatttaaaccgatcataaaatgaaaggttaaattagttattaggctaacttacttatatatttataaactaaaattttaaaagatctatttaaccattattgattatattgtaattagttaagataatttttttaaaaaaagtaaacctattcttccgattatacagattggtttgcacatttagttcttagttaaaattttaaacaatattataaaaacaaattttaataatataattgaaaaaacatttacacatctatttgagcagtttgctcttctaattttcttttgttaatttaatctttattcgtctcgtcaacagtcgaacgtatcgtcgccgaaatcaccgcacaatct

SEQ ID NO: 63210 - DNA, 730 bp, Cucumis sativus
  Intron number 1 from transcript Cucsa.046090.2 (locus Cucs a.046090) derived from phytozome v7.0 (chr-ID scaffold0054 2; pos 1694921 to 1695650)
gagaataaggtataaaaacataactcgaatataagaaaggagaccaaaagactaaagtacgaagagagagaaaaagacagagacagagattaaaaccaatgagttaaacaaaatcttaattctaaacccaactttgttcatcttacaaggattagattgtaaacattccaatcattttgagaaaattttgcaaccttaaattgagaatggtgctggaattctgcctgacattttgtgaaatttctatgatatctgcaacttatcctaaattgtctttctacctgtcttggttagacacctatggaagaaaatgggaatgtaaaatgggcaaagctgactcctaaacttttagttcataggaagttcagctatttgcttcctcctgttttcttgctctttccggctggtgacgttattttgaagattatgctgctggtagtttcattttggtggtaaacttgtgattttgttctgcaagaaaattaaaacaattgtttcaataagctgaaaattggtgtcaaagttaatagcatgagaaaacttgattgccccctggattctttttttcaaacttctaatattacttatggttttgttgttttgtaaagttggaagcatttctgcattgttttttgtcaatgggatggcatattcttcctcagttggttgtttttgatatggatgtgttgcaaacactgatgatttggatttgtttcaacagactgctata

SEQ ID NO: 63211 - DNA, 499 bp, Cucumis sativus
  Intron number 2 from transcript Cucsa.108780.2 (locus Cucs a.108780) derived from phytozome v7.0 (chr-ID scaffold0093 1; pos 1046575 to 1047073 reverse strand)
gacgaaggcaggtctcctttattctaatatcatttcactttcattgacatatgtgtatgcttgatgatgtgacgtccttcctcttgttaatgcagcttgtgcaatcttcttgtattttttgtttcctcttctgtcttaatggttcttatgcttcagactcgaagaattttttttctttaaccttttgactgataccactcataaaaattgttttttattcagaactttgtagttgagcttttacgaaagccttggtaattcctttttttttaacttgttcaaggtagatttctcattatggcaacaatcacatgtgttgctcaattccaagttcttttgccccaaattgtatatcttcgaatttctctgtttttttttttgaactttcagtcttgagaatcctagatttcctttgtttttttatttttaacttttctcattcaggaaaggtttcttcattacagcaacaatcacttctattgctggatttctaagtgct

SEQ ID NO: 63212 - DNA, 613 bp, Cucumis sativus
  Intron number 1 from transcript Cucsa.097900.2 (locus Cucs a.097900) derived from phytozome v7.0 (chr-ID scaffold0092 3; pos 97723 to 98335)
cttcgcacctccaccaccgcatttaactttttcaggtaagatcgatctatcattttttatgcagaattgtgtagcttggaaaaacccgtatccgtttttgtcgaaatcttgactgctgatgatggtgggattttgttttccatgattatgagattgttttggaagtgggtttaatctattgtgatcacttaacttgaatttagaattaatatcatatgggttcagctaatactcagatattgtagggtctgatgtttgttctgtgagataagtcttatgggattgtattggaatggaaagcttaggtgcaaaatttcattaggatattagaattgctgtaaattactttcaatctggttgaacgttttcctagttcttgttttcatccgcaaattgaattgttttaatctaaatcaaatctatatgtatagcgtaaaagggtttaatccattattttcatactttgtttttgtgattacagtttataataaataaacaaataattatttattttattgggatcgtatgttatgttctcttcatgttgttatgtaacccttttctccttctgaaagcagaacaattcattctacggttttctccactgtagaag

SEQ ID NO: 63213 - DNA, 759 bp, Cucumis sativus
  Intron number 1 from transcript Cucsa.112650.2 (locus Cucs a.112650) derived from phytozome v7.0 (chr-ID scaffold0095 3; pos 1129222 to 1129980 reverse strand)
agaagttgcaggaaattcaagacgagctcgagaaggtactcattcattcaatgcttctttaactctctcgctcttataatttttttgcggccctcggctctttctgtttaatgtttaccaggagatcaatgaacccgagacaaaaaaatgttaccttgtgatctatcattttttttttttgggtgctcagttgagcttgtcccgagctgaacggaattgggttcacattgttttctaaatctacttcaattgttacccaaagcttaaggcttttttttagttttgttgaagaacgtcattttcgacgtttaatttcttttacctgctcttgggaaatctgtttgttcgttcttaaattcattaaggttgactggcttagttctttgtgtgatttataatctaattctaaaatatcgctgacaacttatttgatagttttacatcccatgttacctggatgaaatgaatcgcgttacgataaatgttaatcttgaattacactctgcgacttcactgttcctgggaccaagcaattatgaagtctgcctctaactttgaattactgtgcaaagttgctatcttttttatagggtgtacatttaattgtatagtatcactgctcaattaagaacgacgtgtattataccggtaattacttttttccagtaagtttgagataactgctgctttatgatcatgttttttatttgctttgatattcaagatcaacgaggaggccagtgataaagtattggaagt

SEQ ID NO: 63214 - DNA, 916 bp, Cucumis sativus
  Intron number 1 from transcript Cucsa.046190.5 (locus Cucs a.046190) derived from phytozome v7.0 (chr-ID scaffold0054 2; pos 1771894 to 1772809 reverse strand)
ctgcaaccagttttttctctctatctctgtcccaggttaaccactgaatttcaactttcatcaatacttttctctttgtattcttgctccctttccctgtgattgtgttcgttgaggtggaagttttcacgcttctttccatttgttgattaatccatttttgttcttaatttcttactatttgtttgcgatgtttcattgtagcgatcgcgttctcagattttctggtagcatttttgttttctggatctttcattctggataagttttctgtttatagctctttttcttcccactctgtgtttctttttaattttttaaaattgggagtgttgtatttggctgttgtatgataattttatgtatgtgagaatacaccagtggtttcattagaaattcttttgaatgttcggcctaccggttgtactgtgtatttatgattagagttctcattctatggttggaaagagcagggtttcttatggatccttgcggctttggttgatgaattttcatcattgacagctttgttaggtaatcgaccacttttatctgtttctggtcgatggaaaataatccgagcaacacacactgggagtaatttatttagcctttgggtctgacgatttgattcaatttgctaacacgatctgttcttatatatctatcataaaattaaaaattagaacagcagagatttttttcacgtaggagaaaagttgttccctcttaattctgtatttttttttttttttttcgtgtgaaagcattttgaagcagtgagatatcctcttgtttcttgtctgctgtgtgcagcatttatcacattatatgtctagagttcagcaaattcctaaccatttgattttgggctctttaaggaaaactagaagaggatttggttttctggagttac

SEQ ID NO: 63215 - DNA, 891 bp, Cucumis sativus
  Intron number 1 from transcript Cucsa.090530.2 (locus Cucs a.090530) derived from phytozome v7.0 (chr-ID scaffold0089 4; pos 1764795 to 1765685 reverse strand)
ctagttcagaaactactgcccagaacaacgttcaagcaggtgcgtttttgtgcatctatatattttttttctttaccccatttgcaatgagttatctattgttgctttgtaagaaactagtttgttatgttgattgttttcaaaattatccattttttttattgagttgaagtgtttgtgattcttgaattgagcagacgtgcttcttctttccagcaagagatttcttttcaatatgattgtaaaaattctttcagataacagtgttggttggaattgaaatcttttagttgcagaatttgttgcaaatatttaggccgaactctctccccaatcaaagattgtggaatttggagagtttcgatgattattcttgtggggtccttttgaagaagctgtcaaggacatctcaagagcctcctccaggctcaacaatcggttgttcaagtggaaggaaagcttcaaagaggatcaaatccttccttctgttggactttaagagctgctctttttttggtcaaaatcttatagaaaagcctgaaattgttgtttgatgtggtccaaagtcttttgggagatttggtggaatgaattcttagaatttagaaagataagttaagagaagatggtgtattttatttagattagttttatgattctagcgaattggagttcttttcctgatctccttggctcttggggaatcttcttcttctttttttattattgtttatttttgtatgtgttatgtttttaagctttttgtgataaaaatgcctccccatttgaatacgatccctttacaagtcttgaaaaaaagcacaacgtgttgatgttgttgtattttggtttgcaggttgttgctttccggggatattgtactgataagat

SEQ ID NO: 63216 - DNA, 898 bp, Cucumis sativus
  Intron number 3 from transcript Cucsa.055320.1 (locus Cucs a.055320) derived from phytozome v7.0 (chr-ID scaffold0059 8; pos 49555 to 50452)
aattgcctcacaagactcctctgtacgggacattggtaaactacattacgcactttagacctcagtggatgtcttttcttttcatatatgaattgcatcgaacagattatattgctaggtagctttctcagttatttgttacatgtatggtatatttttaaggcttatttaatgaaatttctgaatgttttccataagaagaacatatttaagattaacgcaatacctttcattgttctattgtcttttatgtttttgtgtattgttttgtgctgcgattggagattgtctttagagttacgtacgatggacaattctctttcttcatttgttttatattttaattttttgttcgacaaaatggtgtgtttcgaatagcgaaaaataaccttatcaaagttgtatttactcgatgcttggagcccttttctccccttttcctagattggtttcttaccttggatctgtttgatccatgcccctattttaattaaatactctctttgtttattatttcattttctttattgaagttcttattctttcatttttcttaaaacaagaaagaattagtttgacttctttttgttgggctatccttttgtatgtctcttgtttctttttgtgtatcctttatatcttctttcattctttatgaaagtgtggtttttatcttaaaagaagtaagaattagtttgacttctgttgtggggctatcttttgtatgctcttgtttcctttataatctcattccaattgataaatgatctttcctgtttaatatttagcagatttaacattactttaaaaaattttctggcagtacacttataatttctcaacgatagttttagtttgctttagcatatgtctctcttattgtatacagattggacta

SEQ ID NO: 63217 - DNA, 913 bp, Cucumis sativus
  Intron number 1 from transcript Cucsa.074390.1 (locus Cucs a.074390) derived from phytozome v7.0 (chr-ID scaffold0078 5; pos 263185 to 264097)
gcaaagcaggtgaacccatttctcacctctcttttctttaattccctttaccttcgttgaaatggtatgaccacgaaatccccaagaaatttccattcttcttcttggctttcttaatgcttcctctttcaccctacaaaacatcccacgcacaaaccttccctccatagttgcttcttttttaagttaccattggatctttcgcttcgtatcttgaatctcccccaactaattcctttccaggtatacaagctgtctcttgctttccactccttccttaatcctctatcttttctctgcatctgattcccttattttgattctcaccctttttttcttccttgttttggtcgagttcttttgctttcacatcacacgcaaatggggtcttaccaaaatttgtattttttattcgtaattttggggttgtctgttcttgtaacgtttataattgctggaaattgaagtttctgatcatctctttctaagcgatggaggaatttctctttcatgttgtgtctcgttcagcggacagagttaaagggaagtatgtccacctcctaaatggttctaaaattatagaaggagaaaatgttgtgtcgtaatttgccaaagttagacaaaggattttcttgctactcaatattgaccactataaagtttgttgattgattccatttgcgttgtctatggtaaaggtcaaaacatcgacccttttgtcgtctggaaaagtcaacggtcttttaatgagtacactaggtggtgcagcggaatacatttctacttggaattttcttgtttgaaatacttttcaaatttgagttgtaaggcatctggtgttttaatgataagtgctttgagtactatattaataccatgtgaaagatctcttctctgcaacaggcttttagct

SEQ ID NO: 63218 - DNA, 598 bp, Cucumis sativus
  Intron number 1 from transcript Cucsa.069300.1 (locus Cucs a.069300) derived from phytozome v7.0 (chr-ID scaffold0071 4; pos 122334 to 122931)
ttctttcttacacaatcgagtgccagtataagcaggtttgggtttttttttttctttttcttttctttcaatttgtgttgtttctaaatttatcatgctttggagatttcatttctgctgctgaattactccacgctttaggtgttctgtaatttcaattgggtctaggcttgtaatattagatttgtgcaatctgttttgttttgtccgcttagaacaatgatgaaatcggatatgacaattgtaaaattatgtattattatcgatgaattgcctcaagtttgtcgtatagtgtagtggtgggattgaggaaggcttattctattgtatttagagctctatttcgatgccctattcctaattctaaaatttgacgattaactactccattctaccaaaacactccagcagaagtaagagttacttagttgtttgtactcccccgttataaaatgatttccttgccaatattcctgctgtagtgtagtgagtgttttccatcatcattttgagattttttaacttttttttttttttaccttttcagttttgaacatttcctggtttaactctttcttgttttcctgtaatagtttaa

SEQ ID NO: 63219 - DNA, 739 bp, Cucumis sativus
  Intron number 2 from transcript Cucsa.069300.1 (locus Cucs a.069300) derived from phytozome v7.0 (chr-ID scaffold0071 4; pos 122994 to 123732)
cattcatcgaggaaattcacgagaagcaagaacaggtatgtgcataatatggtctacatagttgtatggttgtttttttttctttttcacgacaactcataccttcattaagagaaattgtggcttacaataggagccaaatgaaagttgttgtttccattaaaaaaagggagccaaatgaaaacagggctccaatcagcctaataagatttaatgggtaactacaaaaatcattacacactaaggctcaagggaagatatagaatcaaacaattgatcaaatcagctctttcaacccctacataagcttgattgtgtctcaacccctcgaaagactttatagtatgattgttactattgtatgttttcttaaccatcatgggttggtctagtggtaaataggggatgactttgataaagagctaagcggtcatataggttcaatccatggtgaccaactgtaggtttcttattctgtgagtttctttgacactcaaatgttgtagggtcaagacaagttgtcctatgagattagttgaagtgtgggtaagttagagcaaacactcaagaatttcaaaataagaaaaaaatcgttacccgttttgttcttggtttgataatgtgaattatttggtgttaatgcttttatgcttttgaaatcttagataagttatcgttaatacgaaggtttggggttttgatgtattcttcattggaacattatattaaaggttaaaga

SEQ ID NO: 63220 - DNA, 817 bp, Cucumis sativus
  Intron number 1 from transcript Cucsa.097110.1 (locus Cucs a.097110) derived from phytozome v7.0 (chr-ID scaffold0091 9; pos 2479267 to 2480083 reverse strand)
cgttcaggccaagcttacttctcgcggcggctgtattctacttcgttcttttacattttcggattcattttcggtttctttaacaactaatcaaacaattgaccaattgaatattgaatttgaaatgaacgcgtggcagtctacatgtttgataaaatgcttcacccaaaattttccgctttttatttactgaaagctagtgggttcgtagaaaaacgctgatgctgatactattatgtactcttctggagttacttggtttttaattttactgggccggtgtttatgaagacttagattaggaatcgagttgtttcaaaaagaaagaaaaaagataaggaattgagaatgtgtgaaccgtgttcgtatcgtagaacagattatagaaacacgagtttttgtgatctagatttttgtttacttaacttcgatagcagtgttccttttcctttcttgagttcaataaagagtgaagattcaaacatcacacctcagattttcaatgccttaacctatagatacattctcaagttggagtgttgacagcaaactcacaaattgggataaaacaaacccgtatttgaaacagaagtttgagttcttaacttcgaattatacaaacccatccaacaaatcaaatacccttcaaggttctaactttagaactcaaggacaccgttatacaacctatggaacagatgatgttcaaccttttaaggttctaatttaacgtgccaaacttcctaaaaaatttccttctcaatccttgtaaataaaatctgagagccaaacattaatttttgttatcgctgcagaa

SEQ ID NO: 63221 - DNA, 866 bp, Cucumis sativus
  Intron number 1 from transcript Cucsa.103670.1 (locus Cucs a.103670) derived from phytozome v7.0 (chr-ID scaffold0092 7; pos 2422772 to 2423637 reverse strand)
gattcagattccaactgctctagatctattttcaggtttgatttctatcttattttcattgtccgattcgtttactttcaagttttttttttctgctgtttatttattttattttactgcgatgttcttgttttacgttcgatggtttcgatgtttgttgattgggattcacagatctgtttattacgattttgatttttttaataaagtatttggtttgggttagggtttgattgatttgaattttttctttcgtttttttttacgacggggtttcgttcttgtaaatccatttcgttgttgtcgcgaaactgatattcgaaaaatcaagttcgatccttttggtttgattaaattagattggagatttcaagggcggtttttgccttttggtttgatgaaataggccgagggttatttatttatttattatttttgtgttggagtgagaaatcctatttcaacgagattgctaggtaaccttgattccaaaattagggtaattatcgatcagatgatctcaattcttgaagtgcaaaataatctttattcgtgtttgaagttttgaaattgatggaattctggatggactaccgtacgtggtgatgtgtggagagttttctcattcagctttagaagaagctgcattgtatttccatgaaatattatgtcattagctgacaaatttgtttatacttttaccctggatgtggtttttgttatcattgtatttggtttgttttattgtatttatcgttttcaaatgtggattgtatgaaatcctcgtgcttaatttagagtcttgaaagatgtttaaaaatattcattctgaaagtttcttctattattcttgttgtgtagcaaag

SEQ ID NO: 63222 - DNA, 680 bp, Cucumis sativus
  Intron number 2 from transcript Cucsa.042490.1 (locus Cucs a.042490) derived from phytozome v7.0 (chr-ID scaffold0054 0; pos 883642 to 884321)
cacttaaattacggaacttagaggtgagttatggcagtgtaggtagctgcgttcttcgctcttttacctttttgttgttgtagttagcatccgtttggaatttgatttaggtattttcgattttcttgttattattttcaatattttccaatttttgtgtttgatagatctaggtatttcgttgtccctgttttcctcactagtgatgttgaggagtatttctagtgctgctattcgaattctcttttgagtaatcggttcttttaatttttaattttctttcaacaaggttagaaagtaaatatttgaagtagtttctcagttgttgcatcaaacactcaactgcttctgtttacctaactgttttcaccgcatgatcattagttattcataaaaaatccaacttcagtagtttctccactttctggtattgtgattggtagtgaatgtttgactattatttctattaatcagtaaatttgctagtgttacttgtttgtttcaatatctagtaaactaattatccagccacattttcatttagtattagcattgagtcatgtatactaacattttttatttgctatgtattgtatgtgttatatcatgttctatgggttttatgaccaacatctaatagaccctatttttatctatgaatatcttgccttagccaatat

SEQ ID NO: 63223 - DNA, 989 bp, Cucumis sativus
  Intron number 1 from transcript Cucsa.033680.1 (locus Cucs a.033680) derived from phytozome v7.0 (chr-ID scaffold0043 8; pos 132905 to 133893)
tctttcgccgactcctttccagttttttcaaggtgagttctcattcctcttctacccgaattctgtttcccgttttcgatctgttcttttcaatgtttgtttctcccgaattgtatgaatgttcagtttaatgtatttaggtgtattttaaacttttggttagttacttttaagactctcttgaatgtatggatttgtattttggtagaacagttgatacatttgaatcatttgtttacatataaagctatatctgtctttttggatttttgttttttttttaatttaattttgctttgaaggaacgtttgatgatcgagaatcatgtgaacgatatttagggagatggtattgtaggaaattagtggcagactatttttttatcacgtggggtagagaataaaagggattttttttcattctccaatttttagatgaaaagctggaaccctgaagtgaaatttgtgcacaaaactttgcacgatgcactgaggctacgtctttatttttgccttttcaatttttccacttttctgctgttttacgtcatatttggattcctgaaattgaagaattattttgtactctgatgataagactgtagagtacatacgcctacaatactcatatgccacttgaacttatttctttatgtccttcacatgttctaatttttcttgaaaaaacaaaaagtcaaacattgaagttattcacattcaaacacattctggcgcttgttgatttctaagaagtgcaaaacaaatggaatgttcttaattgtgttcaggcttccgagtgtagcagatactgtttgctgattttgttgatttgttatactccctttcttattaattcaatgttagtttttttgcaatgtctttggccttgaaaaggcttatcagattgttaactctttagttgcttaaatggggtgttttgtttttgtatctacaggttcttcaaaacgatattgatttgctgaatcctcc

SEQ ID NO: 63224 - DNA, 956 bp, Cucumis sativus
  Intron number 1 from transcript Cucsa.088170.1 (locus Cucs a.088170) derived from phytozome v7.0 (chr-ID scaffold0088 8; pos 579233 to 580188)
agaatcaaatccagtattttagagggagctattcggtaagattgaaggaactgagaagacccagaatccttgatgtgtattaacagtgaatgaataaacaatttattaagtcaatgacaggacttgatgtttggctatcgttctgtaatctatcaaagcatggattcgtggggtaaaagaattccaaagaagaggatgtattgtcttaagaactgagaattccaaaataactttcgaaagagttgcagggaatttgcaatgtctcatattattaagccactgaaaggagttgatggagaaaataactgaggtttcaagcctctagtatgtaatgctgcaatttgaatggcagtcattgagcccgtgcaacagcttaactgaatacaattaactgtgtttacagtttgtttacctcgtcattgtttaagattttgaaatgaaaagatttatgatggcttgtttcagcacatttttaaatggataatgaaaattggaaaaagaaagaaaaatgacaaaggttattattattattatttgtattcaattaggatgaaaacaaaattaacttaatcaaacaattgtttttggtaggaagatggatgtttgcagaagtgaaacacagggatttttggatcttttaattgctgcattatacacagcctctagttggagagcctagtattgaacttacaataacgattatcttaattagtttatattggggcgcttcttataatcactcttgttgtggcttgggagatgttctttaagcctgctctttgtagccttggattctaactagattattgtgttttcttttatacatgcttgttcttataaaaaaatgttgttgtatatgtatatttataattgtcctctagatagttatagagctgcaatagttttagaccttatagagccttggtttcttgcagggtacatctaactgaactttt

SEQ ID NO: 63225 - DNA, 858 bp, Cucumis sativus
  Intron number 1 from transcript Cucsa.027370.1 (locus Cucs a.027370) derived from phytozome v7.0 (chr-ID scaffold0037 8; pos 92339 to 93196 reverse strand)
ttgtattataggtcgaggtgggtcgcgttcttcactcactatctctaaatttttatctctcactttcgatttttattttatagttttagattctactaaattaaattttaatcttttattttgcaaatttagactgtagaattatatatatctatatgtatatacataaaaagataaaaacaaaagtaaatattgcattttatgttatatggtatattacattatatgatatattacaaaataataattacacaatttttaagtttaaacaagttcataaattaattactaatattttgcatttaacctaatatttagtgaacaactctctaatgagttttatggtttagaaataaattatcaaacccattttttttaaaaaaagtgtttcaatttgaatttatttcaatgaatctatgctaaaaagtatacctaaaaacatgaaatccacctttgtttttccttccatgtttgttttctaattctctattcaacaaaacttttgtgtaaaataacaatttaattttttgaactttggtgagaaaaaatctaatctgtaccctttaaatttggtaataattgagttctccaatttattaggtaacaattaagtttttgtactttcaaaattttacaatttagccaccacacattgtttgaagttaaagttctgttcttgtaaaaacaagactctagtttttacaacaagaactaagttgtgataaattttaaattacatattgaattgttattgtatgaatttttatagaaagttaagactacactgagtctaaaacagttgattgtttatttattttattaatgataaaagaatctatcaacagcacatcaatttag

SEQ ID NO: 63226 - DNA, 760 bp, Cucumis sativus
  Intron number 4 from transcript Cucsa.018410.3 (locus Cucs a.018410) derived from phytozome v7.0 (chr-ID scaffold0025 2; pos 810269 to 811028)
gggagtgaagagtacaagtgttgatataatctaatgtatagtaacttatcagcttaagcctttgggtttattgtcgatttagcagaaagcttttatttaacttttttccccacatactcgtcattgctttaaattttgttgttaacaattaacatacttgaagaaaattttgccaacctttggtactttcagttaataatataatggatattttcttaataccttttcggggctttctgtatttgtgttatataatcctatagttgtagattacacttagtggatggagctccatacaactataactattttttaatgaactacttgatttgagttttcatacttaatttaccacagtaaataggattatattattactgggacttgaccttctacaggttttgggtgtcaccatgaaatagttgtttctgttcccattgtacaattaaaactgaaagagtaatatgtttttcttattgaagagttctggtgttgaatatttttcaaaaattgacatcccgattctaaaaattgatatcaggctttggtttctttttgcttcttagtgtatcagtttccttttgtgtctgtggattggaacttcattgatccatgactccatgaattcctcatctgattttcattgtttttcttttttggcaaatcgatttttctttttgaaaatcgtggttgatgatgattatattctcttactgtcattgtagggttttagcttaaccttttcctgtggattcggtgt

SEQ ID NO: 63227 - DNA, 698 bp, Cucumis sativus
  Intron number 1 from transcript Cucsa.042450.2 (locus Cucs a.042450) derived from phytozome v7.0 (chr-ID scaffold0054 0; pos 845083 to 845780)
tgaagaacagaacaaacaggtgttacccaaatttggtgagttgtaaaacagaaaacagcgagtttccaaacatacccatttctctctattacccatttcaccaaatttcatctctcaatatttttcagtcggcactttttattgccctttctcctttctggggtctcgcaaatcactgaccccatttgttttccttcacacactttgccttccctattgctctaccatcaagaaagatattgatcccttttcttctcttctgttcttgttgaaaactttttgtttcagagtcaaagaaatattctcacatcaaaagtaacaggaacccaccattttctttgcggattttggtctcctgttggtatgaaactctgggtttgctttgtttttgtgttttgtttctgggtttggattggtttatggtgtttgcagtggattgaagttggtgatgttacgaatgtgattgttttgagttgttgttggttgtggttgttctgtttttatgatctttcgtttgtgattcttcgaggaatttgttgagttttgagttttcgtaatgggtttggtttctttttgtgttattattattggtggattgttgattattgtcttctaacgttttcgtgtttgtttccgatttcaattcgatgttttcttttgtaggattgattgtctccacatttaagatctgtggagat

SEQ ID NO: 63228 - DNA, 820 bp, Cucumis sativus
  Intron number 2 from transcript Cucsa.078930.2 (locus Cucs a.078930) derived from phytozome v7.0 (chr-ID scaffold0079 3; pos 1430641 to 1431460 reverse strand)
gtgtcaagattgttggtggtgatcacaggcttagagtattggtttcttttctcttttcttttacactctttctaattgctctctcttggggattttctcttcataaatattgctaacttcctccaatttaactactcttttacctcaaattttgtgatagtaggttatgtaattttcatcaattgcttgtgaggtttgattgggattttcttcttcgatactgtgttaaatggttgattgtcaaaccgtttgacccaaaatccctcccttttgagtttgaaatacgcagaagtccaactagtgaaggaaataaagatagcggtattaaacacaggatctattagaccatctactcttataccaaaagctttagctatattaaatcttcaatcccaaaagcttaaactaatgagtgatggtaagttcaatattatatcatctaagactggtaaactaaaaaatttaacctggaagatcattgaaaatttcaaatgattgttaatgttaatcggacgattggatgatgttacaaggtttagacatgcagtcttcttttctgtaccatatgatactaccactaaaagtaaaatcaaaagcttaagttgatgtttgaacgtgtgaagtctcatccgtagagtatggtatagggcaggattttatactattatatgatggaaatgttgatgttacggtaggaacttgaatgtcttgaatactaatgcaagtcatggaacaatttgagcgcatttgatgttgatttttttgagatcctgaataatttgcagaactactcttcgatcatcactgtccatcccgaagc

SEQ ID NO: 63229 - DNA, 292 bp, Cucumis sativus
  Intron number 1 from transcript Cucsa.092320.2 (locus Cucs a.092320) derived from phytozome v7.0 (chr-ID scaffold0090 5; pos 229300 to 229591)
aagcaactagcaaaacactacttggaaattttacagtaagttacaatttcatttctaggaaatttccaggatggagctggattttcgatactgtactgctttcaattttggggttttttaaagctttctttatttttcttctttctttttctcttttatgtttggctgcgtcattctgcttagggtttggttcttgctggcggcttttgattttaatcaatcctcttcattgaagttttgatttgggtgtgcagtagatctggaaagttggagcttttttttcttttttatc

SEQ ID NO: 63230 - DNA, 964 bp, Cucumis sativus
  Intron number 5 from transcript Cucsa.118290.3 (locus Cucs a.118290) derived from phytozome v7.0 (chr-ID scaffold0099 8; pos 98526 to 99489 reverse strand)
tatcttatacatcaacttctacgaactggattgtaactattactcctttttacctcctcacatggctaggcctccaagatatgaacaaatatagcaatgccgtgatacaaatctcataagcctttcatttagtttatcacattacctcatcatttcttcttcatgcaagttattcttctaaaattgtttctccacattcaaagaaaatggccccatgcttggtggtgagaagtcctcatactgcctttattattgacttttcattttctcctggcgtgcctgttactgtcgctgtgttctgtatccgggactaggtatagcttaagggcagactcctcaaagtggaaatatatctaaacattttcaaacgtttgctggttaaatttcaaattagtaaccaaatttagttattgatgtttgtgtctgttttgttcctaaactttcaaacttacaaagttagtccttgaatgttgtgaattttttaaaatttatagatctactagacacaacattggaagtttagtagttttcagaaacttattagaaataaaattgaaattacaaccgtcaattttgggagtgaccctaatcttagtgtgtgtggtggggggggaacttataattaatgtcgtcttatttggtaaggctgtttggttatcaccatatttgcaaggctatttggtaaccattttgtttttagttagtgtttgaaattaagcttctaagcaccatcttccacccctaaattttttcccatcaagttttgagaactaaaaaaagtagtttttataaacttgtttttggattttggaattggctagaaataagaactaaaacgaaatggttactaaacaagtctaacatttttagtttccatcaacctgaactgtcttccaatttggaattatgtctgatagattcactacaaataaccaaaaacttttgacattttgcagggtggaac

SEQ ID NO: 63231 - DNA, 720 bp, Cucumis sativus
  Intron number 2 from transcript Cucsa.118290.3 (locus Cucs a.118290) derived from phytozome v7.0 (chr-ID scaffold0099 8; pos 100357 to 101076 reverse strand)
ctagtgcaggagatattgacccacactacaggtactccttttgtctaagatttctttgcatattcttcatttttattcacaatagtgaagccagggacctcaacattctgtacatagatgatctagatctcctcgcccccccaattgtaatcttggcatttgttttgcattcagtgatcataatttatgttgcgtgctccaatttttttcaccttgtataaagaaatttaagtaatgctaagctaatgtcattgagttttaatagctctcttttcgtagtctagtttattaggggactgactaataaaaggcaatgtttgaaccagcttctttcttagtgtttcattgacttggtatgcaatcttatctgttcagtgactaatttttgtgcaccaaaggtttcttttagttccttcttgtgcatggaggttagattcagcagttttgtgtttgtttgttcctaaaatattgctcatcgttgtgtttattgactgacagtatctctttagttatttcagtgattcattcaattgcatttaatggtgccaccctaagtttagaagtacagtgcttttttgtttctttgatcatgctatttcaattatctattatgtggtctcaatttcataatttcacattaataaatatcattgaacagtgaaataatgttgttatttgtttttgcttcagaacttgtgttaaacactgtgaagaaatagg

SEQ ID NO: 63232 - DNA, 1023 bp, Cucumis sativus
  Intron number 1 from transcript Cucsa.118290.3 (locus Cucs a.118290) derived from phytozome v7.0 (chr-ID scaffold0099 8; pos 101141 to 102163 reverse strand)
ccaacgcctgattttccttctcccttccccaaaaggtaaaggaaaacaactcatttttcgcctcctctcgagtttttttttcttcctgttcctgctttaattctactctaatgatccaatctgctatttttctagctcactcttacactgattcattctgaactcatttggtgattgatgaattgatgtgttacatttctttttaaatgggtgtttttatgtcaacccaatttctgtatcttatggatgattgcgcatctcctaatatttctggaacaatctttatctttattcgtcattttccttttctgttgtgttgaggtctgaataagcttcggagtgttatagatctttggtttcttaacactccgatgtgtgtggaagagccttgaattgaactgaattgttgcccacagtatcattgagttccttcctaaatgttgtggttgttaattacctgttccccgacatattttctaaggctccggctgataactatttacttaatggattattcacactacttctaccaattggtttcctacttgtgtttggactgtattcaaaatctgaacctatttttgagaacttgaatttggaatttggaatttgaaatttggctaagaatttaaatgtttacatgggaaagatgaaaactaacaccagtaaattgtgagaaaacaagcattttttatggggaacatatgaatttgatcgaaagagagatacaacttcggggcatagaaagagagaaccatcccaaaaagatctaattagagaaaaagttcggtgtcacacaattgggtaattacaaaagaattggttgtagttatgacatgcgtaaagctgaagattatgacaaaaagagctaggatcagtaaactatcttcaaaaagtattttgttcgttcaaggcttcaagccagcgaagccaaaaggcaaatggttatcaaacaacacctaagttattgttcttgcttaacactggaagccatttggatatctctaatctctgatcaaacag

SEQ ID NO: 63233 - DNA, 698 bp, Cucumis sativus
  Intron number 1 from transcript Cucsa.019870.1 (locus Cucs a.019870) derived from phytozome v7.0 (chr-ID scaffold0028 4; pos 13560 to 14257 reverse strand)
cccccgttactgtaacgtctttaacactcttccccacccccttttctccagattctcgattccacttcccacttctttctattaaccctcctcactctttcttcattcttctattcttcctgtttctccgtttttttatttcgatcccctcccgaggattttggggtttccttcttcttttgaaatttcaacttatactcttcccattattactcttttttttttcttttggtgtttttgttattctagtctatttggtttattagattttgtcttttgactgctaattggaattctggtatattggttccttctttctggggaagaaaacgactgtttcttgaatactatcttggttcatgagcagatatgaatactatctttgtgttgatgaaaacaactacttcttacttgcttaagcaacccttttaacagtttcgtggatattatattgttgaacaaactagatggctttggtctagggttcaagtggagccaccattactttttccatgtccactatattgttcggccctcttttgaaataagaaacgaacatttcactgaactacagaaagagtaggacaccaccccaagaccggggagttatgtaaactatgctctagtttcagatttggattgatatttattattaattatgtgaattaaccattttctgtttttctttttacttagat

SEQ ID NO: 63234 - DNA, 994 bp, Cucumis sativus
  Intron number 1 from transcript Cucsa.090740.1 (locus Cucs a.090740) derived from phytozome v7.0 (chr-ID scaffold0089 4; pos 1908716 to 1909709)
tgttcctcgtcttctcggtgattcggctaacgctggtttgtgaatcttactgtgaaagcgttttttttccagacgaatgcaacttttccttacattttggatttgcaacttttaacttgctttcgtttgaagatttgtaaaatgggtatgtgtaatcatgggctttccatggattacgaaagatgttaggactgagttttcgttaaaattgacagttttcgaagagtttgttccaaatagatcatttgcattggttttctagatcaaacttttgtatattgataatgtaacttggtttctgttgaagttagctgaaagttatgagcgaatgtgatggaagtttaacagaagtttaaaatcgtaatgcttatctatgtgtagggtccaatttgatgaaaatttgaagtttggagtaataattgattcatattgccaagtttttgggtaggatttgatctttcatcaaatttttttagaacaagtgatttctattgctttaagctgcttaaaaattcaatttctcaagttctatttcctcgtttgtaactatctttttgtaattatcatgtaggtgttatttttgcatagttggagtccattcacatatggagaggtgccttttctgtgggctgtgcttttttgtatgccggtgtattttctcacatttttttcaataaaaatcggtgtttctaaaagaaaataatacatttacttaagaagcaaggccgaataactgatttctgattctttccctacaatctacattgccttgcaatgttgctgattgttagatagttgatataaatggtttagatgtatcctggttgttgaggagaggggtgcttgaatgtttctgaagttttaacgtttgtctaaaataatgccatgtaattacatcttttgctaattctatcgttaatttctcgggagtgttcttagcttgaattctttgtatgcagggatcaaaaccagtttgccagagcttcatcttgct

SEQ ID NO: 63235 - DNA, 934 bp, Cucumis sativus
  Intron number 3 from transcript Cucsa.130070.1 (locus Cucs a.130070) derived from phytozome v7.0 (chr-ID scaffold0102 9; pos 79001 to 79934)
aagaaacttgagcaacaagaactttgggctcagtgagtatacattttctgttttgaagttgctttgtcatctgtaattgttaaatgttaattcggtagcaattatctaaatcctgtgaattttgaatctatttcaaaattttgttgtttttagtattatctgataaacacagtcttttatgtattgttagttagaacttggaagtacaaaagctgtaatgtatataagttataggttattggcacctttgtttctcctatcgattgcttatggttagaaaggttaactaggtagacattcctctgaagatggctgcttagtttttgaactaatgaacgttttgtaggctaatagttgatccatgatatagataatggcaacctctttgaatggagtctctgtcctatgttgaaaataggaatcttttttaaggtatttgaagtttgtaaaagatgagagcgagaagaaacaaaggtaacgatgattagtaagcaacactaccaagtacaaaaagttgtcaaattcattatttactaaagaggtgaactagaattacatcgagcgttaggaatacaaacaaagtctcacattgactagaaaagagagaaatctacagttccattgatatgaggttttttttttggataaaaccaaaagcaaagctgcaaaggcttatgccaaaggtagacgataatacactattgctgagagatgcggcagatccattgcccttcatgtctggaactgtagtacattccagaactgaatttatggtagttgaaactatcgtatttgttttaactgtgaacttatgaactgggtggctgtcaaagatccactcaagtttcagtaatattggtaggcattaatttgacatttcttatcctctaaattgatgtatattttctatttttcttgcaggaggaagctttca

SEQ ID NO: 63236 - DNA, 552 bp, Cucumis sativus
  Intron number 1 from transcript Cucsa.119340.1 (locus Cucs a.119340) derived from phytozome v7.0 (chr-ID scaffold0099 8; pos 1251040 to 1251591 reverse strand)
ttctcttccggtacttctccaattttgttttacccttttctaatttacggctccagcagtaatttgacgtatgctttgaacccatttgaggaaaatcagtgaaatggaattagtgccgttttctatgatattcccacccacccaaccaatggttggtttattggattcttgttatgaaaaatcttttgttttctttaaacaatttgattctgattgtcttcactgctctgtttcaaattagttcctgcccatgtaatttttatccgtttgattaaaggattcaccaagaaataacgtagcatactgttgtatattcttacaagatggtcttgcttgcccttctcttaaattgttattttctgattccataattcaatcaccatcacaattttgtttccatgttgaaatatatatgccccaacatgctatgatacttctattaggatccttgactcattttttatgttcttccggctgacttattatgttctgaatatcagctttcggggtattacaggctatattacaaggaatcctgcctcttttccttcc

SEQ ID NO: 63237 - DNA, 605 bp, Cucumis sativus
  Intron number 1 from transcript Cucsa.126590.1 (locus Cucs a.126590) derived from phytozome v7.0 (chr-ID scaffold0101 7; pos 488885 to 489489)
ttttcttatttttctacttaaaggatccatccgatgtaagcttcagtgattttcaatccgtgtagctatgtgtttttcttttttgtcttgtttgctatctaccactgtctgcaccgtctgccatccagtgatctttatgaagaactcggtttcgtaagagatgaaaattggttccagtgtgattaggtttcttttgtttcttcacgatattagacttagaagttagaacgaacatcgttacatatcgcatatgacttgttgatgtttttattcctgcgctggtgttgggaatcaaatttcgataatcgagttctagaaattttgggaattaaacgggttctaactaggaacttaagtccttaagtaaattgggagtttcacggggaattggaataataattcgtaattgaaacatggcagtgttgttctttttgactcgttttgtatacgttttcggcagaatatatttattgaatggaagttgttgacttcatgttgcaatcatagatggggtcctatgtattttgggtttatactgttttaggtatgactaattttgtctgtcatgtgaaagagttttacatcttggttccaaccctctcaga

SEQ ID NO: 63238 - DNA, 801 bp, Cucumis sativus
  Intron number 1 from transcript Cucsa.045030.1 (locus Cucs a.045030) derived from phytozome v7.0 (chr-ID scaffold0054 2; pos 1127778 to 1128578 reverse strand)
tcactacttattgtcaaggtattcttcaatctccccccgtttaattattcttaagttctattcaattttgacattcccatttaaggttttatttaattaaaatttatttttcttagttttcaaaactcctaattttttacaactttcttaaaattagacagcggaaggaaaaaaaatgggtaaaagtatttttgtaacttaattttaaagaatgaaatagagttattaagtgaagtttaaatagttattgaaaacaataaatgtgagtataaaaaaagatttgaatttttttagagtttaattacgatttgactgctacaaaaggttggtaataggagatataagttttttttccttcttttagataaaaagaggattaagacttaataagttgatgaattgaaatatcaaacgttgttggggattagaaacaatcttaagtgtggagatagagatatatacatccttagacttcaaagtaagataatgagtctgaatttaagcaatgaaaatacagatgttgttgatttaatctatcctacttgtataggatttttcttaacaatatttgctttttgggcacatgcagatcaaagcatatccagtgttagccataagcaccgaataattgcaggtaaaatttgaaaatgtgctagttaatcaggttctttgaacatagctttttcttaattgatgtatatatatatatatgttgttaagggggtacttgtaaaattggagttagtaatttaatttagtattatagggacagtgagtgcggtatcagcagctggggcattg

SEQ ID NO: 63239 - DNA, 924 bp, Cucumis sativus
  Intron number 1 from transcript Cucsa.052760.1 (locus Cucs a.052760) derived from phytozome v7.0 (chr-ID scaffold0057 7; pos 206773 to 207696 reverse strand)
aatctctacattttctcagaatcgtgtaattaaaggtaatctgctttcttttactttccaaattccttcgttgttccttccaattctccatttttatgcagcatctaaaatttgccctgaaggtgtttgatgaaatgccatattcgaatttcaatgacttagtgaagcattcttgtagtatagttacaccctacgcataaagtatgatatttttatgtagattgtccaatcatagatgtgttaatgtcggcatgacccactcttaaaaactaatgaaaaactaactttttgcttaaatcataggcattcggaacttaatatcactttaagaatgtccacccagtgtgaaatagttgtagccataattgattcatgtcaattaagattttcatttttaatcaattgttcctaaattgggcttgcaaatgccctcccaagtctcaccacaatacttaaattgtggctgaacaagcattgggttagggttagggctacaactacttcgtgaatgacaagagaggctacaactacttcgtgaatgacaagacgtctctgttgcgatattgagctctgaatagttatgtattctatgatgtaagcaaaatgtttgttttctttggtctttttagtggtgtttcactctgctttaacaccactaaaattgagtcattcatacaaaaatctctacgaatcaaaaactttgagaaaaatccttttggtcttttttatgaaatgtttaaattacttgtttgatgtgggtgatgtaaagggaatgatgcatcccagaatacacttaagtattacctttttaagtgcttacatatttttctatgtcttgatcttctctctacaacttctaatggttgcctcctttgttttcttgatacagctttgtagcaaatacttaaaagtcctttattgaca

SEQ ID NO: 63240 - DNA, 976 bp, Cucumis sativus
  Intron number 1 from transcript Cucsa.079830.1 (locus Cucs a.079830) derived from phytozome v7.0 (chr-ID scaffold0079 3; pos 2686067 to 2687042 reverse strand)
gctccggtattctagacgataccggctctatagcggtaaccaccacctttcttcttcttattattattattattatggggaagaagttaaacttaaaattcaataaatggtatttaagaaggtggataagtgttttttttttttttaattttaattatacatacttgaatggtactttgatgtatgtttctaaatatctacaatcccacttttttttttctaatattctttcaagaactatccaaaaagtacataaacttagctaaaaagggctaggtcaatctaaaaaaaattcccaaacaacaaattacatcaaagaattaccaaaaaatgcacaaataaagcaggaagcaatcataagtaggttaattttacaaacaaacaaaaacctaaactttgctatttttcttttttaaatttaaaaaaaactatatattctttcaaaggattggtgggataatatgttctgtttttaaaacttagtaattaattaattacattacaagatcttaaaagaatttttttaaaatatatatagccaaatctatggatgaaaaatgaaaaattatattgatcatacacttctattattagtgagatataatctataattgatagattttaagttaaatctaaatttttctataattgtaaattgctttaaaattttaaatattatcctatttttcttaaatttttcaaaaactcacacactataaagaaaatcaagttaaaaattttgaatagaaattgagattattaattggaaggagaatataggtgtgaggtatggttttctgattcaaaatatgtcattcataatcactatcacacccggagagttcaaatctcaatttttacatccaactttcatctaaaaaaatatacagctttgaaacgttcgtgaaagatgaagactaatctattggtatttgagatgatcatcatctttttttccttttttgtttgtagggaa

SEQ ID NO: 63241 - DNA, 1018 bp, Cucumis sativus
  Intron number 2 from transcript Cucsa.083980.1 (locus Cucs a.083980) derived from phytozome v7.0 (chr-ID scaffold0085 8; pos 659653 to 660670)
caggtatgcttgtcaatgcttgtttataactctagaactggtctactattaaattagactagtttttggtattcttcgttgttctcttcttgttggaactattagatttttgagttcagtagtacatttcttttttatgacaaagacaatctgattggagaaaagtgaagtttgggaggttaaaggaagtaagctaaatatggcctttatacacagtttttggtttctcctttaaaattttgaaatttgctctcaaaggtattgactttttagtcaagttactattttcaataacgtggttgtagttgagtagagaaactatgacgtaacattgacaaccttatattctatgaatggaaaatatttgaatgttaagtttttatctcatttcatccaaattagaaaatcccgttggccttacctaaatagaagcttacttgatggacaacttcagtgtacatgctccttcagtttcatgcaactctccccattcactgttggtgcagccttttctcttgactcatgctaccaatcccctttctcgcaaacctatattattcagccttaatgctcttagaaacctaccccatgagcatacggttctcctttcatttcttttagtaattgggtccgtgggttttcttctccaaaatagttggttggacttttttttggatgtcatagttggttgggtttttaatataagagagttggtaaatttttaatataaaaaactgccaatatttttacaatgctgcatcactgttgctatatcaatttcaaccacatttattgaatacggatgtttttgaaaaatttggaactttgaggacaaaattgaaactgtcaaattggcaaaagaagaaatggttcataaatgtaatgaatttagttaaatgctgaaacatattcaaatgcaaatttaatgtattttgccttctcttggtatatttgtacctcgctgatggtttttatttgcttagggttcgtcgtaggttcaacaaaaagttctgtatta

SEQ ID NO: 63242 - DNA, 705 bp, Cucumis sativus
  Intron number 1 from transcript Cucsa.038850.1 (locus Cucs a.038850) derived from phytozome v7.0 (chr-ID scaffold0050 8; pos 117990 to 118694 reverse strand)
ggcttgaacataagagccctgttgtcaaacagaaggtgtttatatcgtttatttattttttgcttgctctgttctgattcttttaatttcgattttgtacttagttttgtggatgtattatccagagttgtgttttttactcgtgaaattaggatttttgttctttgattcgtctgtggtgtttcgcggcaaagtcaagtttttgggttgtgttgcaagctattcggcgaaatgttgagcttttatgctagctcgggatccctttggttctgaattttgatattattcaaatgttgatagaataatgaacacaaaaattcaaccatatcccttttggttttctttttcatatgttttctagctgaagattttagagcttataattgcaatctgtagtatttttttatctttttatatgattgatattgacttagcctgttctgttttcgttcttgattcttgtcccttccataatgtttgtcgttatagatagggtgacatgaatttgaagtggaattgtatcacttgaatgattgctattatatacatttcttttagtttttgcattctgtggatgattgatcctatacctggcgtttagtgaaaaattcttgggttgcagttctaccgatcgaaagttttcttgtgcttgtgaaaatttggacatgtgcttgattttactacaggctcttaggttgataaagt

SEQ ID NO: 63243 - DNA, 572 bp, Cucumis sativus
  Intron number 2 from transcript Cucsa.131980.1 (locus Cucs a.131980) derived from phytozome v7.0 (chr-ID scaffold0103 7; pos 89142 to 89713)
ggtaattttgcctttcattttgttctttttaagtaagtgtaatttgtattttgatttgaattctcctttggaaggtctgaatcctgcattttgtggagtttttctgtagcttacattcacaatttgcaattcgtttgtttgctttctgacgacctttaactttccagagtatgcggaccaacattaacaaagaaaattgaaattgtttcttttgtgtctcttggatacttcattcatcaatgaaatcctttcttatccaaaaaaagtaaaacagtaacaatgatataaacaatttggatgactagaagaacttgagtattattgaaactagtgggatgtgaaaattttgctttggagaagtttggtggatatattactaatattcaccaacggctttaagaaattttgtagaagatttttccagcattggtcacatttggtatttgatattttatctatctttagttttaccttccctatgaaagaattttatcacatcctccattaatagccgtatgtacttgcaatgttttgcagcaatagccacagttgttacagttgctgaaattttg

SEQ ID NO: 63244 - DNA, 904 bp, Cucumis sativus
  Intron number 2 from transcript Cucsa.046340.3 (locus Cucs a.046340) derived from phytozome v7.0 (chr-ID scaffold0054 2; pos 1874017 to 1874920)
aggacgagtatgttccgtttatgagctctgttttgcgtttgcttctttttgttcgtcttctttttcgtgttgttcccttttactctatttactcttttgatttatttcgtctggttggttatggagtttctttggtggctaactggctgggattgatttgggatctgcatggtgtgcttcgtggtattgttcattgaggtcttgctgtgaccgtattcgaagaccagctgtgtaggcttcacgtactgaggcactcgtcgatttttttcctgcaccggagttttccttactttcaagttttgcgttccttttccgattatagttagtagaattgggagctggatcttgtgggagaagtgggttctcgaggttgtatgtgcgatcaatctgtttttacatatgctatgagttgctgggtgggtaatgacgatggagctcacatggttttagcttctttatgatgttaaagctcacatgattcgagatcaattattgactcaacgtggaatcaagcttactataactgaagcgttcacgggaaaattttgctggttcccgccattgattatcggatccaattttacgcaatttccaataggttaacgactggaaatcccggcatttcattaggaacgactttacccaaattcttgacagcttgagcggtgccctttcgctcacgcgatgaacgaactatttgggtttgggtcgtgtcatagaatatttgtgtttgagactatgaacagaaagttgtttatcggttctatagttgcatggtgaacagtagaattccttgaacaattaacacgatcttaggtgttttgcgattgttccggcatcctaaatttctgtctggttttcttttccagatttatcgccgtgaaactgtcagacattcggaaag

SEQ ID NO: 63245 - DNA, 511 bp, Cucumis sativus
  Intron number 2 from transcript Cucsa.077500.1 (locus Cucs a.077500) derived from phytozome v7.0 (chr-ID scaffold0079 1; pos 660282 to 660792)
gaaggtcattttttccacccctcactttattaattaattgattgattaaatttagttggtttctcttttttcttccttttcatacattaaaactcattctaataatcaaaccccctcttctttttggattttgtgtgcagtttaagaaatgtgatgtgtgctttttttatttgtaaacacaataaaattattaattattatattattatattatttaagggatggaaattttaaaactaaacactaatcttaaaaataatagcaaataggggagagatgagaaatgtatttcccatctccattttctttttatttgtgacaaattttgtccaaacagtcttgagtgtttaattttttcataaagtaaataatgtatgagatccaacttcatcttgttaattgttaatattatgtttgtattattaattttttaggaagtaacaaataataattagtgatttgattatttaaaacaggcagaagtagaatttttggggaaattcagccatcc

SEQ ID NO: 63246 - DNA, 687 bp, Cucumis sativus
  Intron number 1 from transcript Cucsa.003210.1 (locus Cucs a.003210) derived from phytozome v7.0 (chr-ID scaffold0003 5; pos 43183 to 43869)
catcaaattccgtaagagactcgaagatttttcaggtgagtacttagatcgctttttctttttctaatttttcgtttagggattcgattctatctagattctagctcaattgaaacttcaaatttcttgtgttttgatctgttcgtttgattggatgctttgattgcaaacttatttccaccaatcaaatccatagaatagaaaatccatcatacgctattcattgataagaggagaatctgaaattcttgtgtccgtgaatggttgctagtccacttgtgtttcttttagttttaattcgtttatgcggttcaacgaaggggtagatttggggatgtgatattgacatgaaatggcgtttaatgaaattagttttacttttcttgctagctcagttacggtatttagtttattaatcctcgtttttttttcattgaatcttgtacaatcttcatcaacttgtacagttattttgtgttgttgaatttaaggtcatggacttatgatgatatgaatattttgaagctgtgatcttatgtgcgtttcaagcttcaacttaaaataatgtttaagcagtgtcagttgcgatgctatttaaagcttgttgagataagatagaaatctcaagtcggtgtctttttctttcttgaaggggaaggaaaagaaaaaaacttatcggacttgaat

SEQ ID NO: 63247 - DNA, 918 bp, Cucumis sativus
  Intron number 1 from transcript Cucsa.130420.1 (locus Cucs a.130420) derived from phytozome v7.0 (chr-ID scaffold0102 9; pos 411636 to 412553)
ttgtggttgtgaggctagaaacttggcgtcatttggtaattctttcggcgtacttttgatgattctttttgttgtttacgattggcgaaagttatgtttcagtttcggttttgatcttttagaaaccttgattttattgtaccaagtcctcgtggttactaattcttaaaagaaaattgttatgatgcttaatggattgaaaattgatgtaataacaaagaagtcatttaggggtgattaaagttatttattatgtgggtaagattacaagatgtgagtaagcttttgattaatttggcggataggactatttcataaaattaaaattgagaatttctaactcaatggatgttgtctatttaatttttcatatcactttgtccataaatttagatgtgatcacaaatatttgattgaaaagacttagctaaaggatgaaattgaagctttggctttggctacttcttgtgggacttcctccttttggagagagttctttcctccctctgtcctattcccaatcctcaataggggttgacgtatggttgttgagttgctcttttggttttaataaatttcactatttcagtttaaaaataaacaaataaacaagtaaatgaagcttttaaaagttttggaatgaagttataaagggattttaacacaagagactaaatgatatattctagcgttagaattcaatggttctggctttttatcctgatttttggtcatttccctattactcactactcggtctttaagaattccaacaaatacaagggttgtgtgaagatgattttcaatttgaaaaggcattcagccttctgctttgaatgatattttattgcatcagaaaaagttaccatttctgctttttcagattctgagttaagttacctggagcaagagaaggac

SEQ ID NO: 63248 - DNA, 777 bp, Cucumis sativus
  Intron number 1 from transcript Cucsa.042640.1 (locus Cucs a.042640) derived from phytozome v7.0 (chr-ID scaffold0054 0; pos 1011628 to 1012404)
actcacctcaagatttactttagaaaagtatgcatttctcttcactctccattttttttcctctcatttgtctcatattatgaattttccatacatgtgaaattgtcagaaataacactcaaagttttttgtggagtaacttttcttggtatagtttcctagctgagacttcacaaagaaagccaaaaacgaaattattagctttgttgtgtcatttaaaaaagaaacatttttcttttgtttttgtcttgttatcaatcttggccggtaagcattaggatgagtaattaaaacaatcggtaaaaaaaatgtactatttgtgaaagataaaaaactcttagggttattttttataattaccaacataacattaggcttgaatgagaggagtaactcaaatatatcttacaaaaactgtgagatctattaattttttcaatatagaatcaccaacatgtagggatgagcatgataaattaagaaaccgagtcaaccgatcaaaattaatccaaccaagataaggagaggttcggtcagtgtcagtttggaaaagaattcaaatcaactacattttaattttttttcaaagacttaaaccaaccaatctaccggccaatggtcggtttgtaaactttcatggtaatgtaggtttgaatatttactaaaccgaccatggtaggttttaagcggtttgatggaaaaacggacttcgacggagggataaatataccctgtcaacacatcccttattctattttgtttttattctgcaggtgc

SEQ ID NO: 63249 - DNA, 653 bp, Cucumis sativus
  Intron number 1 from transcript Cucsa.057860.1 (locus Cucs a.057860) derived from phytozome v7.0 (chr-ID scaffold0061 4; pos 170233 to 170885 reverse strand)
cccatcctttacccgaacaggaaggtatgttaaatatataatacgtttttagtatccaacttcaaggtttttttttattctcagtattattctataatttggttttcatttttaaggtttacttttaccaaaatgtgaaaattagttgagaaaattgacactcattatgaaagttatgtgtttttttgttgagtattactttcaaagtgttttatagtttcacttgatgacataaaagaggtattaggctaaaaaaggacatccattggtataatactttctaatttttttaggtaggtactgcgatttatgatatcaaaactaaataagtacgccgtcctatcaatcaagagatttgagattcaaatctcacatttcatatattattgaattgattaaacaaaataattaaggaagaaaaatatatgtttttttggtttttcttttactgttgtttgagaattatggatgtgtttttattggtttcttttttaatcttaaaactaaacaaaattataaagccaaaattggtttttcccctttgaagggcgaaaaatctttttggtaatttgaaatttaactatatatagtgaattaatgatggtattgaaattccagtgagagttcttaaagaaatatctgcaaagttaaag

SEQ ID NO: 63250 - DNA, 477 bp, Cucumis sativus
  Intron number 1 from transcript Cucsa.004470.1 (locus Cucs a.004470) derived from phytozome v7.0 (chr-ID scaffold0005 3; pos 31799 to 32275)
cacccaaggaggctaacctcttcaagctcatcgtcgtaagttcatcgattgctttctatgcccttcatcttcatcactttaatcatacttcgatcgaactgaaatgtttttgcctcccccttcttttttcttttctcttcttttgtttttattagaacataaaccctagtttttgtactgaactttgtactgggtttgtgttatttcattaagaaatgtggagaataaaggaaacttcgaacattatttgattacattctcatttccttcgaaatagggaatatgtaagctagtttttattataattgggttgtatgctacttcagtggttagtactatgatgtgatttggttatttttttagttgttacgatatccaacagctgtgttgttgcaatggctaattgagtcttgttgtttttttttttttttgtttgttgtagaaatcatacgaaacaaaacagtacaagaagggcct

SEQ ID NO: 63251 - DNA, 983 bp, Cucumis sativus
  Intron number 1 from transcript Cucsa.106040.1 (locus Cucs a.106040) derived from phytozome v7.0 (chr-ID scaffold0092 9; pos 471514 to 472496)
tggatccaattcctttggaggcgtttactcttcaggttggtggttaatcgtctattctgtcatttaatccaagctagatgtatgaatcccaccccgatgtaaatgtatgatatttgaacttctaaattttttgcaagggccgtgaggtggaaaggtagtagagagaaccaatatgtgcttaggtttagttaaagtgttgatataacattaactttgccatcaccaattagcttaagcttatggttcaattagtggtgattagcttaagcttatggttcaattaataatttaacacggtatgagagaagaggtcttgccaagctcctacaatattatttcttcctcgattaattttgttttccacttgataagtcttttacaaatttccaaacctctacaagcgatggtatgggtgaattggattgctatcattagatgcccctcccacatttatcagctcttggtaggataccatggatgtgctttgagcctttgactttgataatggacgtgagatcaaagagaaaggtgtagatagaaaagtttgggtaacagaaatttaaccattagatctttgacatgttgctttgtaggtgctttttataattttatcgattcatttttgttaaaagattcataatattcaaccacattggctggtctagcgataaaacgaatagtaaaagcctatctgaattttaatattctagaattttcccttgaataccaaatggagtatagtcaatcagttgtcccatagaaaaaggaaaatttagaagtatatgtatattatatgtttgcatgtcttgttgcttctcttcggtccatgcttaaacttgtattgcacttaaatgaattttgtgcttaaaacagtacaggccagaatgcattagaaactgaacttgcatgagacattgaatttatattttttgtttaaatttgatgtaggaatcagaagtttctgctgttaaatatatacatta

SEQ ID NO: 63252 - DNA, 659 bp, Cucumis sativus
  Intron number 2 from transcript Cucsa.005300.1 (locus Cucs a.005300) derived from phytozome v7.0 (chr-ID scaffold0005 5; pos 380916 to 381574)
aaggtattttcgctaacttcctaagtgattggtttattagctttctgctaatgggcatgcttgcctacctaatatttctattagaaaagctaaaattatagacatcatatgtgtgatttaacctatcttatttcagttgtacactaggctaagtgactgaatctctttcactttctttagaaagagatttgacactcgtacagttcttatttattcaaaagttcaagatcttcttttgagagggaaccctggaacactttaagtttccgtctattatgttataaataacattttttgcctcagaaaaaatgaactgtcccgttaaataattgggatcgtgatttattggcacgtcttgtgggatacacagcattggtgggcaaggaatgcaaaatccttgaaatttgggggatctttgcatttttttaaaatcaatgatgcatgggagactgttgtgttttatagcagtaaaaactgagtgatcattaagtaagtggacaagttaaattagcctagctcactgaggactggtttgagatatttgactatgtagtaatcacattttatgattatgcttttctagcaatttcttattgatactcaataggttgtcaaatttgcttgtgatgcagctccagatctgggatccggtaatagtt

SEQ ID NO: 63253 - DNA, 865 bp, Cucumis sativus
  Intron number 1 from transcript Cucsa.125750.1 (locus Cucs a.125750) derived from phytozome v7.0 (chr-ID scaffold0101 6; pos 3837 to 4701 reverse strand)
ccaaattagtgagacttttctcctctttttccttctttaactttgatttccaatctttctagatttttatctctaatcgcgatgtcgctctctttgatttcccctttttcagaattgtatgttgattctttttctaattttcgtcgtcaattcgatttgtggcttgctttgtttaaatccctgttagtttccatttgtcggtgaactctgatctggggtttacttttgttcgccaagaactcaaattctctctcctttgattctttctaaactctgttgcttgcgaccgcttttttctatctccagtatttcttgtttattgcatttaagaaatccctgttttcatgctctatatatcagtatcttctgatgattgttgggatgatcgctttccaattaataattccgttctgatctcagctaattctctgcgttttattttgcagaaacattagtaatgtccctttttgtttttcgaggtcatttttaacattttattcccttctttgcgcaagtaatgcataaatttttttatactagaaatagcaaccttatggtaatttgattgagcctatggttgttccagcatgtttgtagtgctatggagccattgtactctgctgaaaagtaaccttttctttttcctgaacaacttggtcgtagtttattaacttcgtattatgtttggcgttgtttttgtcattcaattgtcccatttcattggcaatcacacttggaattttatttgttgaaaaaggaaatggctggatgaagatgaactatgtttagctaccactattttgcaataacacatgttaaatccagtttattgtacctttgttttgtgctcaggtgcttcttggtg

SEQ ID NO: 63254 - DNA, 565 bp, Cucumis sativus
  Intron number 1 from transcript Cucsa.003910.1 (locus Cucs a.003910) derived from phytozome v7.0 (chr-ID scaffold0004 6; pos 56413 to 56977)
acttcctcttccaattaccgttttacgtctctaaggttatccctacctttctcactattctgttccctttttcttttcaattcctcctgttgttaaattccgtgaatcttttattttaatattaattttcaagtgttccattaccatatatattactaaattatatgggtgtttgtgcgacttcaaatctcgaggttctagttcaaatattaccaggatcgttattgctttaaatattatgacccttaattcaatcatttgtaccacgtatttgttctgttggatgagggtatgaatttctgtttttgggttgatccagttgtcaattttaccttcttgagtttcacttcctaatttgattgtccttaattttctttcccgttggatctggaatgaaatcgttgagctcaacaaaagaaaagaggagatggggtttgaatttttttaaagaaatggaaacgggaattctgatttgcccttgaactcactccaagtgaagagtcattttgatttatatgtgtctattaataaatttatggagcattcttccaggtttttctgcaaa

SEQ ID NO: 63255 - DNA, 562 bp, Cucumis sativus
  Intron number 1 from transcript Cucsa.112960.2 (locus Cucs a.112960) derived from phytozome v7.0 (chr-ID scaffold0095 3; pos 1281735 to 1282296 reverse strand)
cctccggatcggcttcttgagatcgcggaaagagtgtacggtatgcttccctttcgaattccttgttgttcttgtgctgtgagtgaggaaatgtatgttgtctctgttacgtactgtttgcttggtgaataattgagctttgttctttacttcgatgcgcgtttgagtgtggtttatggtggtttaacatactaataacagttcttctcttctccaattctctgtagaagctcactgttgttgtgtacgtcattttaattttgccatgatctttttttcccatttaccttttgtaagagcaagtagttttgagttgctaagatctttattttaacaccccttgttgcatgggttctatggtcattgggagagatctacaattagcaagttgaattagttaattgttgctttgtaaactggttctgttcacctgaagtttcttttaaatatatgaaaatattttgtagtgttgttctaaaacttactatagttgtatctgcatgttactactaatgaagaagtttccaattttttttttcagtgtttgattgttgcttctcta

SEQ ID NO: 63256 - DNA, 492 bp, Cucumis sativus
  Intron number 2 from transcript Cucsa.126540.1 (locus Cucs a.126540) derived from phytozome v7.0 (chr-ID scaffold0101 7; pos 450980 to 451471 reverse strand)
acgaatctctacacgtgctgataaggaattggacagtaaggacttgaataagcataggtttttttggtttatgcaaacatagatataggaaatccattacttgaaaagtatatctgggtataccaaatgagaatttatttgatcatcgaaagttgagagtacaagaagacaaatactttatttatagcaaaagcaaactaatctgaatcctaattctaattaatcaaagaaatttaatcctaatcccaaataataaaagaaaccaatcctaatcctaataaaccaaagaaactaatcataatcctaatacatcaagaatttgacctactagtcaatatcagcaaatttacggatgtatttgggtttcaatttcccgacatatattgtaaagaatatttttgcatgttttgtgtttattgggcttactagcgtatattttatgtaatttttctttttcctttgttttctgttgcctagtcgacttgcttgaga

SEQ ID NO: 63257 - DNA, 528 bp, Cucumis sativus
  Intron number 1 from transcript Cucsa.121710.1 (locus Cucs a.121710) derived from phytozome v7.0 (chr-ID scaffold0099 9; pos 168902 to 169429)
atatttttggaggaggaagaggtaaattaaaaattaaattccttagtttgtctaattaatttaattgctctattgttatatcgtgatatttaaagtgagaaaaagaataaaaaaatagaatcgagattatttagagatatagttaggattttagcgtgttgaaacgaaacttcaaaatactatgtaaaacattaagcaacataacataataggtttgaggcgggagaacacgactttttattatcacttgaaatatatttgttgctaataaaaacaagaaacattttcaaatatagggtttatcaaaatttctcttaaaacaatgtatttgacagaagattttttagttttaaattttagtacaaagctgtagaactgaatcacatgcatgtgaataccatttgtaagtttcttagtgtatatgatgattatgatacgatgggaatgaggaaatgaaaggaagatagaaagtaattataacattggatacataaatttttggaatgatgcagttgcagacatactgtt

SEQ ID NO: 63258 - DNA, 950 bp, Cucumis sativus
  Intron number 1 from transcript Cucsa.130530.1 (locus Cucs a.130530) derived from phytozome v7.0 (chr-ID scaffold0102 9; pos 617747 to 618696)
gtttactcttccttccaccacttgttttcctccaggtattcatcacccttctctttactctctcaattacttccatattttcttttcaattcgttcaaaaccttcttcactcttggattctttctgtgttgccttcattttcttttctggcttctgtttttcttgttggatgttgagatgcacatgggctttttttctttatttgttttgtgattgtagcgatttgatgcttggttttgtgtaatcgggtgaaatgggtaatgggtttttttcgccatggagatggggttttgttttgttttttcttatttgattaatatgaaatggataatggggtttcccccaaaagttagggtaattgagcttgtgggcatggttagaagtttgcgattatttttatttggtgctgcctattcttgccatttctgaagatgaaaaggttaatgggtatcgagcactggagtttgctctttgattgtctgctggaggagatttatttgggatttttcaatttgtgaacatgttcttttttccttttcattttggaaggatggatgctctctttggtgacagctgaatttctgttcgattattcgtggggtttatatgggtttctcagaaattttcactgtttgagatggtaatagtttctgacgtattgctaaattagttgattgttttatctccttctttgatttttattatgtgtggaagattggcagtaaacaaaaagggcgattgaaaagcaaaactgggtttcgacgttcaaaatgtctagtcatttcgtggtgatagttgaatttgaatgcaccaatagtttagcttttgttttcgggttcattaatttataatttggttgattttttgtcttttaattgatggtttagtccttttttctatcctttctttttgtagggcgattaagagtacgtggcttgttagcatttctt

SEQ ID NO: 63259 - DNA, 587 bp, Cucumis sativus
  Intron number 2 from transcript Cucsa.111300.1 (locus Cucs a.111300) derived from phytozome v7.0 (chr-ID scaffold0095 3; pos 146611 to 147197)
agaacgttctctcatccgggttaccacgtgagttggtgtgttttgcctagtctgtttttcggcattttagattagttaatagaaacaaggacctcgtaggctgaagctgttttaaactattcatgtttattcatggcaaatgaagcaacagcggctattttagtccatgatgtgcatctagaaactaaaatagatattagagaatataattaacatgttgattaatttctatctaacagatagcattttttttccagtataacctgaattaactgcaaaatagtgatactactttgataaataactcaaaaggcactatgactgagatgctagtacttttggtgatgacattgttttttaatcaccaacttcagtttttgggtacgctttagttgatatctgcctggctggccatgatgtcctataactttttatcacaccattgatttccttgacagtttcttcacctgcattttaatcttggtatttgggatttttatgtcttttcctggtgccctgcacctgactgtatttatatttcctgactcttgcctctattttttacttgttcatgtcgatccagttgg

SEQ ID NO: 63260 - DNA, 497 bp, Cucumis sativus
  Intron number 1 from transcript Cucsa.044760.1 (locus Cucs a.044760) derived from phytozome v7.0 (chr-ID scaffold0054 2; pos 958702 to 959198 reverse strand)
gccactgttgaggtaattcaagcttcttatacctctttcaaagtcttgtttttgcttctcttctctcattctaactctctctttctctcttaagtcatttcctacatatgtttatttaagtttgatcgagttccatttgattgatcttgcaagctgggatttttctcatttatgcattcaaatgatctctctctctctctcgatctatataaatatattggatcgtactctactagcaaatgaaaaaacaaactcatggccttgttagaccatgtatattatattatatttttcttcgctttcggtcatttattaacgaacattctctcgtatgaaaatgatcatataaagctggtgaacaatcacaacgtgttccttttaagtcattgccattggatcccatcattactaaaaatcaacttccaatttaataatcaattgtgtgtgatctgggttttgtaggttgaatcagtcccagtagtattgccagagcctga

SEQ ID NO: 63261 - DNA, 926 bp, Cucumis sativus; identical to SEQ ID NO: 62321
  Intron number 1 from transcript Cucsa.067200.5 (locus Cucs a.067200) derived from phytozome v7.0 (chr-ID scaffold0069 6; pos 1603737 to 1604662)

SEQ ID NO: 63262 - DNA, 1040 bp, Cucumis sativus
  Intron number 1 from transcript Cucsa.122800.1 (locus Cucs a.122800) derived from phytozome v7.0 (chr-ID scaffold0100 0; pos 169781 to 170820)
aaggctcagatttgggacaccgctggacaagaaaggtttgtcaatgagttgttttttacttccatgattctgatggactctgccattgtcttggtgtggatcttgatcacttttttttgtgtttctttattgagatctaatgttataatttaagatttttatgctttaacttaattgttgggaaagtggggagggatttatagggattttgggtgtgttcttatgttgttggggatctgaaattaagtagctttcagatattgattatcacggattgcttgcttgcttcttgcgacgattatcgcgttattgtaacttgggtttctgggattatgtttttacttttttagataccttcactctcaagaaatttgatatgaattttggagttgtgaattttgatcgataatgggatgtcactatcgattttcacgtgggacctcatttcctagagtagtctgaattctctctttaaaataataatctggatctgattagagaataatgcttgtttgtgcccagacaaaatctgaattgtattgttatagaaattttaaaagtagtgttggaaatttcggttgagtttcttcatggatgtcatgccagcattttctgttaaatggaattgttcttctttcctttggattgtagtgtgattttggctcggtgcgtttccatcctcggtcagcctgtattgatttgtttgtttcctcatcttttagcaaggtggttatatttcctattaccatcatgcatcatgttattttcgtatatacttcctggatcatattgaaattaaaaagagcctcgttacatgtttaacgccatcatctgaggcttgttaccaaaatgtagtatgcaaggcttgccttttcttttagtatgtgtgtgtaaattggcaatgttgaagcctggatgagtaatactgaagactttagagtgttgtagagatttcatgatcccttagtgaaatagttagatctcttatacgcttctttttgccagataccgtgcaatcacgagtgcatactatcgaggag

SEQ ID NO: 63263 - DNA, 737 bp, Cucumis sativus
  Intron number 1 from transcript Cucsa.113260.1 (locus Cucs a.113260) derived from phytozome v7.0 (chr-ID scaffold0095 3; pos 1471074 to 1471810 reverse strand)
gcaaggaaaccattcgcagagttatacaactgaaggtactccctcttcttttgctttttaatttctttttcaaaaacttatttaatcagctgcttttcagctcagaggtaattctatgttctttaaattgattaatcttcaccatctttgtttaatcaaaatcttctcactttgttttgctgggcgattcataagctgaaaggaatggagaagggagttaattataagcactttactttctagtgatgatatcttagcaaggagctgaaaagatatatttcactttgagggtgaaaagaatgatgcgaaattcatcttgaagtatttgttcatagctgagatcactgtagcattacttagtttattatttcttgtgatgtttcaggcaactgatcttgctaataaacctcttgcatgtgtcccatggaagcttgtgattctctgttgattctttcattgtcattgagttttgttggcttttaaattggccatccaatcagttggcaaaaggggttttgcctagtttcgaaactattacctcactgtagccgcagggctctaataactggttcattggagtatggaaagatcgatccaaattccttaacgttttactatgttgttggattatcaaacacactgattgttgtttaggattcgattgagctagatgtcgatttataagtttgatcaaatcagcttctaaacagtttaagtttgattttcattgtcaggac

SEQ ID NO: 63264 - DNA, 432 bp, Cucumis sativus
  Intron number 2 from transcript Cucsa.119970.2 (locus Cucs a.119970) derived from phytozome v7.0 (chr-ID scaffold0099 8; pos 1922028 to 1922459)
tggtcttcttaaaatctggcattccatctcctactgtgagctcatctttgaaacttgtttctccatgaatgcttttagctgtaatccttctagcactaatagatgaaactatcattcttcatttgagtattagttcaatcattgtatcaggcaatttggctagaatttattagtattgtcctatttttcgtttgagttccaagttgaacttcaaaagcaatggttttgacggttgaaataatagaatatttgggttattatatcaatcaagaatgtcttggttgaattttttatgttggttttattatgttggatgtcatgacagactattttgttgatattctgtgtcatacaaaagaatctttatgcttatgaaatcctgttgccattataacctgatggcttactctacttttctaccagggctttgtc

SEQ ID NO: 63265 - DNA, 630 bp, Cucumis sativus
  Intron number 1 from transcript Cucsa.094690.2 (locus Cucs a.094690) derived from phytozome v7.0 (chr-ID scaffold0091 9; pos 809960 to 810589)
ggcgcaacgaaacgaagccatacggagtgataaacgtgtgtttatccccctccttttcctctttttttatcccttaatttgttcttcaatttgatttttttatccccttttctatgaattcccttcacaaggttcccttttagtttctatttggtcgtttatggaattttgttgattgatttctgtttctgtttgattacatgcatttttttttttctggattgcgtcgcgtcttgttctcttttaggttttttattttgtgggtatgatattttttcattgaatgattatttctctgtttctttctttcgtgataatgattaatacgaaaaattaggaactgggtttgtaaaaaaattcgttcttgttcgaatgtgcatcttgttttctttttctatttattggggttttctatgggaatgttgtaatttcctgctctttggtcattttttatgtatgttggtggtggtggttggcgtattcgtttggatttttctacctttttttttcttacgtgtgttgctttggttcagttttgatgaaaatgcattctctgcacagagttttatttaataagcaaggtttatgggtttgattgcagagatatagattggtgaggagtgcatccgc

SEQ ID NO: 63266 - DNA, 273 bp, Cucumis sativus
  Intron number 1 from transcript Cucsa.086830.1 (locus Cucs a.086830) derived from phytozome v7.0 (chr-ID scaffold0087 3; pos 213829 to 214101)
ctactccttcttccgctgcaatcctctgtcaatcggtaggttgctttccgcatctgcctggttcattggaataattctttgattcaacttactttgattttaagtaggttacattgttatcaggtgaattttgattgaaattcctgccaaaaccgatctttttttaatggaaaatttttgtttattttttttccggcatttgtcttaaattttatctctttttttttctgattatttttcccctcttaatgttctttgcttcgcagtaacaag

SEQ ID NO: 63267 - DNA, 814 bp, Cucumis sativus
  Intron number 1 from transcript Cucsa.095510.1 (locus Cucs a.095510) derived from phytozome v7.0 (chr-ID scaffold0091 9; pos 1353956 to 1354769 reverse strand)
cagagattgacattgtttcccgagcactagaggtcagttctccacattcacttgtatactgttacttcctgttcctgatgtaccatagttgcaaataatctcatttatgattatttgaagctaaacttcttgggggtcaattcttatttaagcaaaaacgtcttcttggtggtcaacaagactatgaagtgtaatgcaccaagcaccatccttccagttaaattgaatggaattaacagattttgtcggtttctattcaagttggattttggcctccatccaccataattgtaataactgtttttgctatttttattttcattttaaaataaatttatgtattttcctaaaaaacagaattttaaagaagttccatagataaatatcatttgtactttgaaatagttgtgtttcaagtttctatcacgtggttccttttctattcttctattattatttctttttggacaattttctaccgctggccaaattgtcttttgatgtcttaaatgtgatgcatctcatgctaatatgcacaatttatttgagttcggataggtatatggcaacttattgataagaacatgaaaaggttttctgtaagttgtagatgattttaagctatcaatccactcagtttgaacaattcatcttctttggaattctctgttatccagtgatattttgcacactccacttttcagtgtttgatgaataattatatcgtaagaatctattgctcacattgctgatatttctgtggaccatgactgttgcagattgtcaatttgagaactgttgcacctcctcgatt

SEQ ID NO: 63268 - DNA, 802 bp, Cucumis sativus
  Intron number 1 from transcript Cucsa.122240.1 (locus Cucs a.122240) derived from phytozome v7.0 (chr-ID scaffold0099 9; pos 537267 to 538068)
ctctcgctggaatcgccataaagtacggagtcgaggtaaactttcgttgttcctttttctttcatcaaattttcttatgttgttctgtcggtgtgattttttttttcttttcctgagttgacttgattcgattttgtgaggtctggaagggaattgaagttcttaattttgattcattttttttggagtgatttcaccacgcctatcaaactttatcccaattgttgcatatgtatattgtgatgataatgtttaattgggagtttgattgtatctatatgttcagtttcgtttggaaactcagaatgtttaatattagggcgaaatgtttatgtgtttttttgtatatccaattccattagctgtgcttctctgctggatgtaccttaacagtgttctgttgccccaaatagatatcttcagctctgaacttcatcggttctgaggttacttttggtcgattgcatttggctgaggggaaaagatgatgaagccaaacaatcgaaagttcgtattgtattttatatgttcatagtctttgttaacttaaatgcctcggttgcgggatgaataatcgattattctttattttccactctatcttgcttactgaagttcccttcatattcttttagttcataaaattctaactaggttgttagtagagatttgtttgaacaatcatatccttagggttgatcttagactcatcaatctatttgtgatttaattggtggttacccttattttcattccttaccgatgctctaaaacgtataggtagctgacattaggagattga

SEQ ID NO: 63269 - DNA, 745 bp, Cucumis sativus
  Intron number 2 from transcript Cucsa.011790.1 (locus Cucs a.011790) derived from phytozome v7.0 (chr-ID scaffold0015 4; pos 1110458 to 1111202)
accacaccccaggttaacaaccatttcttttgtttgatgaagttcttttggtgaattcttttagcattatgatatgatgaactgcacaaacattacatttagaagaaactcgaaaatggggattgggggctttgtttgtgcagccattttgcttacaaaattgatggttaattgacttggttgagttcctcaagcttgccttgttctattttgttttttgaagttcttgtagtgaattctattagcattatgatataatgaactgcttgaacactatatttagacgaaactagaaaatgggggcatgtgtttgttgtgtagccgttttgcttacaaagttgatgggtattgacttgagttcctcaaatctgccagattattctcttttgtttcttgaacttcttgtaagaactccattagtgttaaccatgttcaattacaaattaatttgttccctatgatttggaaaatattaaaatctagtccatataattttaacagttagagtatagttctcatggtttgataaagtcctgatgaatagtccctaccatacgtttaatcaaacgaacttaaaattttgttccaatcgtttataattagaacctagtgtttttcaaactataggaacttattaatataaaggtcaataacaaaatatgtatctagaagaaggtaaaatagttgtatttatagagaaagttgataatgtttattatggactttggttgcagctgagagttcg

SEQ ID NO: 63270 - DNA, 711 bp, Cucumis sativus
  Intron number 2 from transcript Cucsa.104650.1 (locus Cucs a.104650) derived from phytozome v7.0 (chr-ID scaffold0092 7; pos 3087078 to 3087788 reverse strand)
ctggtggaaggactccgaggcagagttcaccccaggcaagtagaatttcgtaaataagactttcccatttttgcgatcagaattcgttttgtacaatccaaacgctgagataatttacaaacagatatttggagaagtgtgtattcgacttataagcatataaatccacatgcttggttcttcacatatgttatcgtagatgcagttgggtggaaatgtacaacattgggatcttttaacatacactaaattgctatttatgctattctttcttggtagtacgagcatctgcaaaataaatgcttggaaatttatttttgacttgggagcaaagacatgcatatagtttttcatctgcctgctacgtgcttgtgatgcagttgtgctgtctttattaactgactacttgaagccttctcatataacatacacgaactttctatttataccattctttcttctgctgttgtaattaattgacagtgttaagaaatgttaaacccattgacatgtttctattcttatgtttaattttactgtgcccaaaagctgtgagacaaatgaaatgggaggacgaacagagtgtgttgcaaaactagtctataataaaatatagggaccaaactatgcaatcctgatattttttgtggtttaatggtgtactttttcaaatattttctgattctttgacaggtttttgttgcaggtgca

SEQ ID NO: 63271 - DNA, 561 bp, Cucumis sativus
  Intron number 1 from transcript Cucsa.123680.1 (locus Cucs a.123680) derived from phytozome v7.0 (chr-ID scaffold0100 0; pos 790882 to 791442)
tattcaatcgcctcacttttcctctcctcttgcctgtaaatcctctttctaattcttttccttttcccgttcttgttttcttttattttggcgttggggttggggttggggtttcgaagattttggaatgttactaaggtatgataatcgtttgatccccgggtgaactgcatcgaatttatttatgttgtcgttgcgtttttcttttctctctgaataatttgtttaggatcaaactagaggcttaagttgtttccgatgatgaattcgtggtaaattatgaatggattcgtttgtgtaatgttgttatttattattttattttttttgtacatatggttttgtttttgtgagacttttttatcttcctgttggagatctcgaaagtttggcagtaatgatggtgtgatttgtatccttgaagcgtatgattagatgtgtgatttcttgtacgaaatttgtttttggtttttgtttccacaatgttggtgtatgtgcatgtgaagtgtctggttcttccggtttttgatgatctatcttgcaggatttgttcgattagat

SEQ ID NO: 63272 - DNA, 588 bp, Cucumis sativus
  Intron number 1 from transcript Cucsa.087950.9 (locus Cucs a.087950) derived from phytozome v7.0 (chr-ID scaffold0088 8; pos 423944 to 424531 reverse strand)
gttttaaagtttttggtggtggcaacgcctttcaggtttgtgggttttcttgttactggatttcccagttgctaaattcaaaggaaatttgaattgcttgaactttgtgaatgattggcctgtctatcggttggatttacttttgaattatatgtgttgtttgttttttgttttttttttgaagcgggatatggatctatcgaaattgcagagcttttatatttgatttgatttgatttggaaatgaaaaatgttcttcttttgactttagtttttttcttttgataatctttccttgaaaattcttcttttaattgatcaaactgtttgaataaatgcccgtaagaattgtttggctgcagagactcatatttataatcccattcatttggtggaagccttcatgattaaggttttcttttgtttagggtaattatacgaacaaatataattgtttggagacttgttaagatctctttttaggcacttttgctatataactttgagttgaagtaagttttctggagtttttaacaaaacttttcctctgaaggttttgttggggttatttaggttgtatcacaaacg

SEQ ID NO: 63273 - DNA, 901 bp, Cucumis sativus
  Intron number 2 from transcript Cucsa.069830.1 (locus Cucs a.069830) derived from phytozome v7.0 (chr-ID scaffold0071 5; pos 174222 to 175122)
cttagctatcttggtgagcttctccaagtttttttttccctctactttcttttttaaagctttgctcatttcacatcatgttttttattataagatcatatcttaggtctcccatagaacctagattgaagtagaatagaattggaatatataaagtaaagcagaacaaccactccaaagtaatttgaggtacttcctctcttgagatcactcaagtttaaacccacgaactattgctttgcctattcttctcctcccactcaatttatacttaattcttagtaaaaagactttcgtgcttttaactctagtgccatttcaaatcattatcaaaccgagaatcttaaggggatgcgtcgtggtaaatttaatcttttatcaatactttcacttttcttcttatggacctgaaaatttgtaagaggtctaacaaggggaaacaaatattatttgaggaaatgaaactacgtggtaacccaaatcctaggtctaatgacatgaagatttttaacattcaagatgaaatcctaatttgatatatatttttttttgaagaaaatcctaatctgatatttaagatgtcctatctttgatattaattttaaccattactaatctgtcagtatccaatggtaatgttagaactaatgggcttggcctacagggtgtttatggaaagatttaccctaaaccttttttccttttttatgtctttgtgtattctatttattcttccttattgcacctactgtaaatcatcagaaaataataataactaaacatcgtagtttttcccccggtacttggatttccacgtatctcggtgttcttgtctttatacttttaatatgtaatattgcattttcttctaggtgttgacatttcttctggccctgtgtgg

SEQ ID NO: 63274 - DNA, 778 bp, Cucumis sativus
  Intron number 4 from transcript Cucsa.086070.1 (locus Cucs a.086070) derived from phytozome v7.0 (chr-ID scaffold0087 0; pos 372184 to 372961 reverse strand)
caattgctcatccggaagaggtagttttaagtatttgaagtccactgctcatgcattataatattctttttactatcaatcttttctcatgtgctagttcagccataccattggccattgtatctggttttgtgggttctttctctggtttacacttttctactagaagtggcaatagactcatatgttggatgtcttcatatatttcaaataccaatatgatgcctttttaacaagtgtagagtgattgcatccattttctgggtacaatttggttgcctagaggctgtccaaacataagtggtaaatcagacgcttggcatttgaaatatatgaagatagggctgaaaaaagaacaagataagtagagaataggattgcatttagattccttgatttttttagacgtgaacaatagacattcccttttaacccagattccaagagacaattcatttttgtgaaaaatcatcacaggaagagaccaaaataatgtcaacatttgcagaatgttactgcctaaagctttcctttacgatggatgagatctttgatttgaatatgcctgtcttttgggctactactgcaaattaagattggctgtatatatgcatccataccatcttgctttctaagaaaagaagaaactcgaacaaagaacaaaccatgattttgtcatcaattatccaattatctgatggacactggctgctttttgatgtactaaactgtgatttcttcattttttaggtattttacaacacagctcggtattatc

SEQ ID NO: 63275 - DNA, 984 bp, Cucumis sativus
  Intron number 1 from transcript Cucsa.002540.1 (locus Cucs a.002540) derived from phytozome v7.0 (chr-ID scaffold0003 3; pos 18647 to 19630)
atcaggtaagttatggaaatttagattgaaggaaattattgacgcaatggagaactatggttattgtatagctgttcctctaaaaaaaagtttaagcattattataattccactgtgatgatagtttcaatcaattaggactcccttttaggatttaaagtggtcttcttagtttgatctcaggaagcacgacaccaacatgtgacacgacacaataccaatcgattggagagagggctgaacttggaagacttttagagaggccggggtttatttgttaaaaaatattttatattttaaaaataacttttaataatattaagaataataataaaatgatgttagcgtcccccaatgtgtcatccagtgatgtcctcacgtgttggcgtttgtcagaataataaaaaaaagcaaaagaaaaaagatgacacagttttgtgtctgtcaggcgtgtctgacacatgtcaggtgagcatgtccgacatcgacactatccaaaatgcagtgtccactcctcataggtttgatccattttggcatcttaaaaccaacaaacgcaaacaatcttctttggtttttctaattctctcaatcttgcatgaagtagttatgtaagtgcatggctcttggatggacaaacagctgatcctcctcttcaatcatcaaccttctcctatttggccaatctcccccgtgcttgactacggccacctctccttgctctcagatcttttcacatttaggataataactatttttttctcttaatctttaggaaaagaagtggatgtgtaggatgatacttgtatattttggtaatgctatttatcatttgaattcgcttcttttacttttaaaattctgttttgaagatgatgctctttatattttttttttatggatactcatttgaatgttgaattgtatatgtctacatggaaatatggcatactcaggtacaggtcccagttaaaactgttaaag

SEQ ID NO: 63276 - DNA, 1016 bp, Cucumis sativus; identical to SEQ ID NO: 62471
  Intron number 1 from transcript Cucsa.027740.2 (locus Cucs a.027740) derived from phytozome v7.0 (chr-ID scaffold0037 8; pos 575537 to 576552)

SEQ ID NO: 63277 - DNA, 805 bp, Cucumis sativus
  Intron number 2 from transcript Cucsa.023030.1 (locus Cucs a.023030) derived from phytozome v7.0 (chr-ID scaffold0032 0; pos 324183 to 324987 reverse strand)
aagtggagaatttaggtaataaacttttgacttaaacagtgttgagtttgtgtggacctttgattttgagtcatatagatggaagaaaaaaggctatagctattttgtaggatcactaataactgttacatataaattcagagtattttttctaagaaaagtttatctctatcataaatagtgaaaaattactaatcatattgaagtaacctaatatattcttgagacctgagggacaacagttgtccatgctttctatggtttttattaaattccttttatgttaatgaaaaaatctcaaagtcttgatgtcaagtaatcaattagcagtgtgattggaaatcttaatatgatcataaaactatttttgaatatggtagccgacttagttcatatatgaaagattaattagcttaaacgacgattgaaattaatgaatgtagatttgcttgcgaaatatggtttagaccagtttaagcacaaacataatgctgattggaagaaaaaaaggtcttgatagtagaactaagtaaattttcaatagaccaaaaaaaacttccttttatcattactagatcatgatagacctagattatctaaaagacagaataatataatacaatacatccaaatatatatctataattatgtttatgcttatacatattgaaaatagttttaccatttaaaataaaataatttatctttattaaaatgagggttgaaacataaaatctaaatatgtgattttatattattttagtgagtgttgagttgagttattttttcatttcattgtaggtga

SEQ ID NO: 63278 - DNA, 566 bp, Cucumis sativus
  Intron number 1 from transcript Cucsa.065470.1 (locus Cucs a.065470) derived from phytozome v7.0 (chr-ID scaffold0069 6; pos 200104 to 200669 reverse strand)
gaataagattaatatttcaggtataattgttgaatcagttctctgtgtgtgtatgggtgtgtgtataaggaaagattttacgtctggaatggtttgtgttaagtgtaaggggagcttgcttgaaatttcaaacaacttataagttgtaatgcaagttgcgatgacaaattatgtacatatgagaatgaaaaataaataatctcttgagaaccttcttttgaagcttcagagagagagaatttaagtcccgtttggtgagaattttcctttgcatttttttggttttaaaatttatgtttgttttctcaaactatggttctcaaatttattgaagaaacacttgaattatttgtcaaattcttaaaacaaaaactagtttttaaaaactactttattttcaaaaacgaaatggttatcaaatgggcctaagtgattagcgctcttttcatggggaaaatcataattatgaacaagtttctttttacattttaaaagaatatttatcaatgtttttttttcctatggcacaaggtagaaccaaatcaagagtttcagggattggtctg

SEQ ID NO: 63279 - DNA, 386 bp, Cucumis sativus
  Intron number 1 from transcript Cucsa.037110.1 (locus Cucs a.037110) derived from phytozome v7.0 (chr-ID scaffold0047 6; pos 67852 to 68237)
gagagcctgttccttcattgttggtaattataatcttcgacaagctttcctgttttgttttgcttttgcttttgcttttgtccatcttcttctggcctccacttctgcaagctctctttttaaagctacaagtaatgaattccgttaaagaagataccatcaaagaaaaaaaatagcttttgaaagaattaatatcaagaagtccttggttgaatatctcatacataacatgcagcaatataatcacttcataaaatgcattgacatctagacactaccttgtttgaaacctgtgttgggttttgttcttctagttcttgagttgagaaaggagtggttaatgttttcaaaatgttggtttcgtagcgtacgaggtgtttgagagg

SEQ ID NO: 63280 - DNA, 669 bp, Cucumis sativus
  Intron number 3 from transcript Cucsa.036170.1 (locus Cucs a.036170) derived from phytozome v7.0 (chr-ID scaffold0046 4; pos 176776 to 177444 reverse strand)
gtgatcaggtattcccatcttcttttgttaactgttttggctttcgtttttgaaattcgaacttaggtcccgtttattcacccaaaggtaattaatcaacagtaatgtagaaagcgggtcagttcattatgtttgttgttatctaccgtgttttgtaatcagaatgaactctagatggtaatcaaaatgaactgtagctgttaataaaaatccaagaaagatgctaaatctgattatgcttgaaaataatgaatgacacactacttcttatcctttttatctctcacatttaccgttagtattagaaaaggtaaagacaattttaattaataaacacaattgaaaacaattcaatttaattgcgattcagacaaattacattcaatgcatcaaacggaatcccaatatgattaaactcgttttcattagggattagtaaaggtggccttaatggatttaatttcttgttatccacttgtttcacgttaaagagaaaaaaaaaaaaaaagaatgaaaaccattcatgaaaaacaagtataatcttcaaaaagccaaattggttgatcaaattaaacgattatttctctgtttgatctgttgtttgtgacatttgagtattaatgagttatatgctggttcccttatgcagctgcattttgtggaattgag

SEQ ID NO: 63281 - DNA, 671 bp, Cucumis sativus
  Intron number 1 from transcript Cucsa.127560.4 (locus Cucs a.127560) derived from phytozome v7.0 (chr-ID scaffold0101 9; pos 138897 to 139567)
gacgcagctactcagagacttatcaatctttcaaggtttttggatgttttccccttcgctctgtttcttcaatttgtttcataactttttttttcttttttattgttctttaagctgttgcgatgcagtgatgatattctttcattatgttttctttgtgggtttggtttgaattgattactttgctttgattctctgtggttttctgttgtattttgagttttgagcttaaatgattgatcccatgggcaagaaaaacagagttcgtgtcaatcgggaaggtggaggacggagaagaacggtagttttatgtattttttagcttaaactgtattttattcgttcttgagttcttctacttttcattcccatttctttcagagttgtctgctcttttcttttactgtacacaactccacatccgtgtacgtgtttgatgatactggtgtgattccgttggattaaatttcatcgtaatttcttattgtcgattagttgataatattttcataatcttagatcgtggggttcgtatccttttttttatatgtgcatcaaataactttactctgttccttcttacctttcgatctatcccttttgaacgttgaattcctaatgataaaatgaaaaccgtgtttacatattcaaagctgttgtgctaggtgaat

SEQ ID NO: 63282 - DNA, 608 bp, Cucumis sativus
  Intron number 2 from transcript Cucsa.048570.1 (locus Cucs a.048570) derived from phytozome v7.0 (chr-ID scaffold0054 2; pos 3242586 to 3243193 reverse strand)
tgctcgctctgtatctgtctgatcccagtagcaaggtttcatccctggatctagaccctctttttagctgattaccttaattgggatataaattattttttgtaattcatagaatttcaattatattattgggtcacacatttctaagctatggcacttcattttataaattcaaaccatacttgataccgatctagaacgaagtacttgaaatctcaagaattttttactgggaattcaatgttgatgactccattttattgggtagtaatgtatgctaccttttcatttggggggtgtgagtggtggtggatgagggaaggggaagcaatgcataatctcggtaatgaacggatagaagtttttagtatttcgtaatagaaatctgtgcataattggatgaatattaaaatgtcacataacgtgtgagtaagctaggcaattcaaaccaacccaaaagatttcagattttaccacttgtactggacgatcggggttcagaagaaaatgaagacgtttttcttcttcatgagggtagagtaatcatagtttctttaccgatgaatttattgaatgttgtaggaatctaccatcgcaagtctacagga

SEQ ID NO: 63283 - DNA, 897 bp, Cucumis sativus
  Intron number 1 from transcript Cucsa.095480.2 (locus Cucs a.095480) derived from phytozome v7.0 (chr-ID scaffold0091 9; pos 1327132 to 1328028)
gttatagggtattttttctttcaatggaagctcgattttactgctttgtggtcgttgtcctgtttggttgagctgttctttctgctttctgtagttactttttaaacttctgtgttcacgggttagtcatatgaagatgcttggaatttggattcacgaaaacgcttgctatgtaactgatttatatgtatttatgtgtttggattttggagagagattcgtgtgtgagagttccaattgtttagggtttctgaattgtgatttttctgctctgaattgttgtgtattttggttttgtactgaagtctataggatatttgaatgtagcttgtgaatattaacctattaagcttgacatttcttgaagatgataatctatgagctttactttgacttttacatacttacaaattacaatgtaattcaaataattctctccgttgagtttttcagttaagaaagccatgtgtcctaagtagccttaagaagtaatcctccaagaacaaagagtgtaaattaggaggaaaactcctatttatagaatttattacaacatgggataaaaaggaattaacctagaattttacctaattaacccttatttttctaaatgtttcctttgcaattcttcaccatttagttattgactatcctttaagctgggaaaattcatgagtttggaataatagcttattggtcgttcctttgtgttttcaagtctcatgttggtgtatccaaagttggaatgaagttttaaaactagatactaacctctagttatggcagtcaaagttgtaaatctaaagtaagttcaacaaagaaaaatttcttagatgttgcttgcttatctaattcgtaaatctggtgtcttgatggaaaaatacaggccctgttggc

SEQ ID NO: 63284 - DNA, 313 bp, Cucumis sativus
  Intron number 2 from transcript Cucsa.099390.1 (locus Cucs a.099390) derived from phytozome v7.0 (chr-ID scaffold0092 6; pos 213592 to 213904)
agtatcgttttcctgataactctcccttgccaaaggtgaacaccgtttgatgagtcttcaacgtatttcaagctcaaaagtgtaggaattattaaataatataacattaaatctatcttcaactatcggtttatatttttggaccaatcgatgatttaagataaacacaccgtaaagaaaacatgaaacatagacgttactaaaggagcccttattttcatcccgctcatctcattttgcaagtgctatgactacaggtttttttgtaatccttcattcattcatgttttacattttttttgaaatgcaggag

SEQ ID NO: 63285 - DNA, 942 bp, Cucumis sativus
  Intron number 2 from transcript Cucsa.096630.1 (locus Cucs a.096630) derived from phytozome v7.0 (chr-ID scaffold0091 9; pos 2171874 to 2172815 reverse strand)
gctctaggtaatgccccttttgtctccctaaatgctcaaacttcatataaaggatttgtgatggcctagaaaaccattcaagttcttctcttcatataagaatctgagttatctgaaactgtaaagtgccatactcaaagaatccagcatatttgaaagtgttttgaatgagcttaaatgaagctagcataggactaaggtttctttttctaacatgaaaagcagagaaacttgtgactgtctacgttggatgtttatttcactagcttgccatcaacagtggacagtgatattcctttcccttttgcaaaaagtactttttaccttctttaagaagggtttcttgccgacctttgtttcctaagccaaacgaaaaagggaaaaggtgatctcagaatgtcaacaagttcatattcttcccttgagtttctcacttgaatgaaatgtgaaaaagtaagggcacagtagaaattgcaaataaaggttgaactttctctttcaacttgtctgatcgctgaagtttatttgaaaaccaaggtttggaaaaggtgtacatcagactattttacatttttacatggttctccagacaagatagggccctctatagtactttccttttttcctatatattccattatggattttcttttcccttttccaaccaatttcatatttaaataccggaatcacttgctaaaccatgtaaattgaaaagacaaataagggtttacttttatatgaaatatgatcaatcatgcatcctgacatcccagttcaagattgctgagagttgtaaacttttccaagaacgtgtcttagtggttctgcgctttaatttgaagatatttttgtaaataacccatctaataatttctgcttccttttgttctctatttaactgcagctcttctcagctcctggaaacccttcctcttccaa

SEQ ID NO: 63286 - DNA, 657 bp, Cucumis sativus
  Intron number 1 from transcript Cucsa.005180.1 (locus Cucs a.005180) derived from phytozome v7.0 (chr-ID scaffold0005 5; pos 271946 to 272602 reverse strand)
gtaaagtatttgacgatttgcaattgaatcgtttgataaatccatgctctgaatagcttcttctttcaccttgctctctctttgattgatagattgatcgattactgcttctccaccctatttgtataacatcagattgattcttttcccctagatcgaacaaattctatgtacaaattaaagatagaaaatgaaaattctacctatattcatcagctgcattccacaagttttcatgtaactggaaaatttgaatctgttgtgactgatctttgatgtgtaacctcttcttcctagagcttatatggttgaagttaagtttgatgaacattggaagaatcaacgaatgattcaaatttttaccaatttgctgtgcttattcattcccaaattcccacatcattcttctcttcttttttcttatatgtacaattctatttcacaaatgggagaatcactcttacaaatttacgtgggttgtgctgagattggttcgtgaaaatgatacacgaacattaaaatgtaatattattgaggggtttattagaaaaaggaataatccttccgactttgtcatttgttgaattgagtgaacaaaacaacataaatatgagatttatgatgaacattttttctttctgaagttgattgagatcg

SEQ ID NO: 63287 - DNA, 685 bp, Cucumis sativus
  Intron number 1 from transcript Cucsa.114750.1 (locus Cucs a.114750) derived from phytozome v7.0 (chr-ID scaffold0096 8; pos 109742 to 110426 reverse strand)
cttgctctgttcttggtcagttcttcatttcatttttgttttctttttaatctctttttgtcttgttttccccttctgttctcgattttgatttagttttagtttaatggtgttagttcagttgagctgattgatgcttgtgaggggagcgaatttcaactggggatttggggattttctgctttagggagaacgagctggaatttagttcaatggttttcagattcaatagtggtttgatttgaatatataaactatcggctttctgatgggtgggattccattttcttgcttctttgactatttgagtggtttttggacttctcatttttttaaaaaacttttttaatgaatcaatgaggctttgaataaatttgtgtttgtagttttgatgtctactaatgccattgttagtacgtcaaagattgggtataaacaaattgaagaataggaacaaagattactgtgagattgaaaatactttaagtctttacttttgaaatatatctgcttattcagatatgtgattctttatggggttgtttcaatcttatcttgtcattttgagctgttgttgatattgtcttcttggatttagttaggcggattcttttccatttaaaatggcttaactttacagctgagagcaggtacttccaattcacattctgtaccgcaaaagccg

SEQ ID NO: 63288 - DNA, 581 bp, Cucumis sativus
  Intron number 2 from transcript Cucsa.098110.1 (locus Cucs a.098110) derived from phytozome v7.0 (chr-ID scaffold0092 3; pos 227671 to 228251 reverse strand)
gtagatccagcctctttgatatcactactgatacggtaacttccgtctttaatcaattcataacttacgtatgtatggacggatggtttggttttttcaagtattgtgcattctgttgtttgattccatagggttgccaagtttgatctcaagttgtaatagtgaattcatttgggatagtggctaactagaattttggcctactggttcatgagttgacgaatcccctttatgagtttgcttctctgttctagcttttcttgatcaatcttctggaagaaaaccactagtttcttgcagcaaagttataggcaaaaccgaacaagttaatatgatgagtggtttcgaggatgtagaacatgtttaggagtgatttgaaattggttaaaattaatttagtgttcgatcacacttttaaatgtgattttcatggtgtcaaagcatgtttcagagtgagtttaatcatttgcttgtaattatagaatactttaccaagtgtaagttggaatggatgcttacttgtaattccttttgtgggttcattaggtaaaagaggctgctgaggaagaacaaattcaagt

SEQ ID NO: 63289 - DNA, 946 bp, Cucumis sativus
  Intron number 1 from transcript Cucsa.032880.2 (locus Cucs a.032880) derived from phytozome v7.0 (chr-ID scaffold0042 9; pos 2127717 to 2128662 reverse strand)
gctgggggtccccaaatacaaaccctaaacagaaggtaaaactttttcacaacatttttctttatttttttttctcgctttgatttcattcccttttcgcgttacgcttcgaagatcttccttcttcttcaatcgctacacacaaaaggtttgtttttctctcttttatgttttgtcaaacacatgaattgtttcccattttcccgcttgcatttttttttattcaattcgttctgattttatgccatttcttccccacttttctcgtttacccttcaaatctcggctttgtttggttgtcttctggatttgttctcatctctgaaattgtttttcaatttgattgaatttttaatatgtcctttgggtttctttattttggttgctgagaaaatgtaggaggggattgaaggggaggaatttgcatctttttcttttcgttagttggtgacgtgaagccttacaaatcttattcttttgaatgacctgatgcttctatttagttgaggagataatgattcatgatcgatattaatcttagggtatatggttttttattacctagggtaggtattgttgtgtaggatttcgatttttatttgaattgggttccctttgttttatttatacgttagccacttccacttttttcataatttgtgaagttttggtgtccagtcctggactatttgatgtattttctttttttgctgatctgctatttgaatgttctttgtttttgagtgccactctgtggcatagttaatagtttctgagagtttattaatttattttttattctgagtgagcaacataatcgtgcaccatatactgaatgctaaagcaatacgttattttagcatatttcttatcatataccacatactatatttattttctgacatatttcatgttacaggaaaaggaatttttcacatttcttact

SEQ ID NO: 63290 - DNA, 909 bp, Cucumis sativus; identical to SEQ ID NO: 62679
  Intron number 5 from transcript Cucsa.022960.2 (locus Cucs a.022960) derived from phytozome v7.0 (chr-ID scaffold0032 0; pos 263701 to 264609 reverse strand)

SEQ ID NO: 63291 - DNA, 565 bp, Cucumis sativus
  Intron number 1 from transcript Cucsa.049860.1 (locus Cucs a.049860) derived from phytozome v7.0 (chr-ID scaffold0055 1; pos 42119 to 42683 reverse strand)
ccttttagcatctctgctggcattgattgttcaaagtatgaatagttagactctaaaatatgatttaaaattttcgttattgttttgcacgatcactaggtctattatatattcatgtttcagagagaatttcatactaacgtggtgttgtgtccaacatactctaatgcttaaatatagtgccgagtacaccttatattagagacttttgttgtgttaatggggagagtctaataacctattagttggtttaggatttctttatctctttttttgtaagggggagttgtctccgctttgttagttccattttacgaagcaatcttttatttcctcttttgagatctatgttcatgtgattggggcccttcaatttcaactcttataaccattcttcaccattccttaattaacaaaacttaaacttcaaactattctttaaattaactctcatatatatacacatgtagtttcttccttaatgtaacttgaacaaactaatgctagaattaacttagctaattatggggtttttttttgtgtttttaattttcaggattaattg

SEQ ID NO: 63292 - DNA, 702 bp, Cucumis sativus
  Intron number 4 from transcript Cucsa.114260.2 (locus Cucs a.114260) derived from phytozome v7.0 (chr-ID scaffold0096 2; pos 102180 to 102881 reverse strand)
ggaagaccattaagctccagattgtgagtgggcttgcgtagtttcttgtttttataaaattttctttcttattcatactggacatttttttttgctgcgtgattgaacatttaagcggccttggaagagcttattcatgtgggaaataaacgtatgtatgcatgtatgatattgtagcctgccgttactttcttgtattctggctaaaagtaagcctttttgtatcagaaaggctaaaatatggtgtggttgctattaaattttattttctcggtttctctgttaaaatggaaattaaatttcagaaaacatcaaaatgttggtacgaatcagatgctttactgaaataggttgtgatgatgctatattttcagcttcaatcattttttacatgcctgattccatcttctatgcaagtccatctgacataaaagctgttgtcatcattaaaagactaacaggaaacggtggataatgttgctgtgcaaattgttggagacatgaaagtgaatgtgtagtaacctttacaattattgttgactatctaatccattcttctgacttcctttttttactaaagctgtagtcctcatcttttcaaggacttgtcaaaacttaatttgacacacagaaatttggactgattctattgttttgtttcttttagtgggacactgctggtcaggagagattcaggactat

SEQ ID NO: 63293 - DNA, 567 bp, Cucumis sativus
  Intron number 1 from transcript Cucsa.044540.1 (locus Cucs a.044540) derived from phytozome v7.0 (chr-ID scaffold0054 2; pos 847842 to 848408 reverse strand)
tgtctttcctgagatacgttacattcccagcccatgtaatttctcaactctctgtttctcttttgtgcttttttcttgacagaaaagttatggtcaaaactaagaaaccccattttctctctcttttttctgtctctagtcaaagccttattttttgagcttttagctttaagttagaaagtggccatctggcaagatggcaatagttctgagatgatttactgctttatgagaatctatgccctgttgtatttaacatttttgtttcagattcttcttcttcttcttcttcttctttactggtctgcgcgcatgcttatgatctacagttttataagtttgggagagaaaaagtttgaacactgtttcttctttacaagtggaactttttttctgggacatgttggactttgatcagaggatgagggtttgatgttttatcttgattgaagtgaaatctattcagaactgttggacataattatgaatccttcatggagtgatttgtgtttgtttctttctgtgatggcagtgggaaagattccaattaatcaggtgagtaaagaa

SEQ ID NO: 63294 - DNA, 893 bp, Cucumis sativus
  Intron number 1 from transcript Cucsa.043460.1 (locus Cucs a.043460) derived from phytozome v7.0 (chr-ID scaffold0054 2; pos 262205 to 263097 reverse strand)
gttatcagtcacaatcccgataacgacacatccaggtttgatgatgagatattgatttctgtttaatttgtttgatctcatctataaatatactttttttttatcgcgtttgtatgttgttttgcgttaatattatgttacttgttgcaccaacctagctaaaaagtgtaatctaatgcgtgtagttaatctttcacctttacgaacaaatttagtccaagaagatatattgccttgacttctcgaagagggctcgggaaggcttttgagagaggaagagaaagggggataagagtggatcagggtaaatatcaaaagaggagaattaataagcgagagacagaaattagggtgaactaaaatcagaagcaataaaaaagaggaccgtcaaggagagtaatagacacagaattggggttatggttgaattttgaatgaaaaattattgacctacctgaagtttgacagttaattctcgcacgtctcttgatggattgttctgtgaactttattgcttttaattgctgccttgatcttaattgatatggaaatgaaaattcaaacattaggcgtttgcaagataggttctgatttgaacgtccaggttgaataacattcagtctccattcccggttgttggaatttaataatttaagatattgattcttttctatttttgttgtttggtgtttggtgctgaactgaattgatgtttaattcttgttttaaactttgctgtcttgtggaattttatatttttcgtgtgtgattggtagttagcagattggtgacatttgattctagcttgtgaattcattcaaacattttgtctgatgttcgttttttaataacaatcaggatcaagcttccatccggtgcgaagaaaatagttc

SEQ ID NO: 63295 - DNA, 956 bp, Cucumis sativus
  Intron number 2 from transcript Cucsa.057910.1 (locus Cucs a.057910) derived from phytozome v7.0 (chr-ID scaffold0061 4; pos 226541 to 227496)
gtagggtcttcgaggtaagtaatttccaaagcccttctgcgattttaattatgataaaaacatgttttgactgttatgatttaaatggttgcaagtgtgtttacagagttcggaaactgaatgaatttgttttggatgtattcaatgatttcctattagaaaacatgttttatgtgattgaagaattgactgaaaatattttgtatattttcagatgattttgtcaaataaaagtaaatgattgttttgaatgatggttggaacttggaagtgtttcaactgatttaaattgaaagtgtttatgttttggctttggcttctgaaaacttttgaaaggtttgaatgattcaatttgataagttaagctgctaaaattgctatttgaaactacatttttgtttcaaatgtttttggataattgattggggctatccggaaagaaatccatggccttttggctattccaaacttaatattctggcataaacctttttaaagtattagcatccgcttagtacctgcatgaagtttaagttttggtggactaattgatagcatggctttctttttgctaagctaaaagaacgtaaacttaatattctggcataaacctttttaaatgattagtatccactcattaccttcatgaggtttaagtgatagatggctttcttttcgctaagctaaaagaatgaaaagggtagatctatgctaggattataatttttgagacataacttttgcatattgaggatatattttactttgcacaatttaagtttcagtagagtaagattttaaccaaagaacattgtgcctctatgactgttggttggcaaaagaagaaaagaagaatttattgtaaattcaagcaaagttgaagtagttatgtatgtgtttctcgcgatcaactgataatttgaagcttctaggtttaactgttgaagttttgtgag

SEQ ID NO: 63296 - DNA, 753 bp, Cucumis sativus
  Intron number 1 from transcript Cucsa.104250.3 (locus Cucs a.104250) derived from phytozome v7.0 (chr-ID scaffold0092 7; pos 2842697 to 2843449 reverse strand)
aaagctcagatctgggatactgcaggccaggagaggtactttttttcttcttcattttgctttcttgttagggtttttttggtggatctttaatgggttggattttggggcagagttttggattatggatgcctttttgtactattgaattttatttgtctactagtagttgggataaaaaagggaagattattctctctttatttgatcaggaaagatgttatggcttttccatttgtttgcatggaatcagcttaccattttggtgaaatgtttatgattctgaactgtgtgtctgtattctaatgggaatgtgatgatgtccagtgctacctcgtgagaatgtgcttggggagcatctttcatgtagttttcagaaacaacagctttgttgatatcttgttgttggaaggttattgtgtggaggatctgctttttttcatactcttattcgatattcagtcttgagattcttcctttaggttgtcttgaagcttaactatgttggatttgatcccttgcgatctgatccttagtatgaaaattcgaagtttaagttaaatgattataatgtacagctaaataatttttcgaagttctaaaagttcttttgttctggggctgcttcttttattttgatattataaaattagctgagaatatgccattgaaggccgtaggaaagctacatatcttaacaaatggagtatttgaacagatacagagcagttacaagtgcatattacagagggg

SEQ ID NO: 63297 - DNA, 598 bp, Cucumis sativus
  Intron number 3 from transcript Cucsa.124400.1 (locus Cucs a.124400) derived from phytozome v7.0 (chr-ID scaffold0100 1; pos 332374 to 332971)
tcctcaaccatatttggaggctaatatcgtcttaggttcttcctttccctccctctttctcttctttttctttttcgaaaaggtagaagaaaacaaattaaaatcagacgtaaagggcctatttggtggctactggccttttgattctcttttggaaaatgatgtttactttttgaaatcatttcccttttctgtagtatactattcaaacctttcttcccccattttaaaagttaaatttaaaccaaacttgaaaagaacaaaaacatactattgaaaactaacttgtttctggttttccaaattttgtttggacaataataataatgttcagaaaccaagttacaaataaagaacgtaacacacatgcctttaattttcaatactctacttctcagttcttgaagttgacccaaaaagacatatacattcctccccccacaagaaaagagaaaagttaataaatacctttaactttataaagaaaaaaaagttctaataaattaaatcaaagatttttgtgacagttgcttttattttactcctgatatttggcatacacaattgatgtaaccagcaaatctgtaaattcagggga

SEQ ID NO: 63298 - DNA, 995 bp, Cucumis sativus
  Intron number 2 from transcript Cucsa.075960.1 (locus Cucs a.075960) derived from phytozome v7.0 (chr-ID scaffold0078 9; pos 476357 to 477351)
tacgaagaaacctgtgccaaaggcctaaatattaggtttgatttcttttaacttctgaaaaaactttgaggtttagaacttacattctgcctctgttgcctccatactctatagtacatgataggcgcaacttcgttagagctgtctcttcaattattcgtgttttttcctctagaaattacttgaatcttgaccattctactttgcattttcgtttcttactctaggtgttgctatgcatactttgggtttttttttttgcaatccttcacctatgaaatgttgataaggacatttatatgacatccccagtattattttaggatcaatttgattcattcactgttttcgatcacaatgcaaatggcgcgtatatgaaatgactccaaactattttaaattgattattaacaagtaaaccttgatttcttgacatcttcgctaatgctagcaatatcgcttcctatgttttttggtttttgttggagtatgtgggtttagttgatggaattgtgatggaattattacgttccccactgtggactgaatcagcagtgacaagattaagctattgtagttcatataattgtaagttcacgagttcaagttttaatgttgcctcaggatatttatcatctggttttcttaactttttgatattgtatggctatgcgacggccctacaatatgattaccatgcattaaattggcctttaacacccacatatctcaatttggtgtattttctgtctaactacaactacccatggcatgcttgaatagaatattggttttgtttctgttgcatgatcttcgtacaatgtttattctttattatgttcagaccgtttcttacctttttccttgcatttaaatgggttgcaactggtacagctctagtattttgaaatgattaattttgataaaattatgctttagtttaacattcttttcccaaaccatgaacagtgtggaagaagcaaaaaaaaggattt

SEQ ID NO: 63299 - DNA, 793 bp, Cucumis sativus
  Intron number 1 from transcript Cucsa.101520.2 (locus Cucs a.101520) derived from phytozome v7.0 (chr-ID scaffold0092 7; pos 785151 to 785943 reverse strand)
aaactggcgagagagaagtgagtgtttttgcatgattaccacatttctagttaaaacctatacggctacttgtggattgagcccatcattctgtgtgcaattaactggtgcagaccggtagttgggtcattttatctttcagagtatattaatcaaatatccctgcctcaatttatactgactagctcaaaagtaataagttaatgaaggatcaagattttgaattttgtatatctgaaatcttatataggtatctttcaccacttacttacattttagcatttggtaatttttatttttagttgcttcttttgagtgaccttgcccttcttcttcctgcacactttgcttaatgaaattcactctctgcattttgtttggaacaattttgttccaggtgaagtaaagaagcatggctggagaatgatggtatgataatcataaatattcttctgggactcacaatttggtgattatgtgttttattggtggccgacaatctggaaatgaagttaaaatttatcagtaataggaaacaaatatttcagggcttcaactattaagtgggggaaacactgagattcttatttattactgtgtcccatgctgcatttcttgaggcatcctcttatctcttcctcattaaaaatataagttagaactacatatataactcaaggacacaattgtactctagtaaggttgtcattaagattaatttgagttacaatcttaacccgctttttccttcctcgcagggcagatctattctcagaatcacagcgaatcaaat

SEQ ID NO: 63300 - DNA, 530 bp, Cucumis sativus
  Intron number 3 from transcript Cucsa.025160.2 (locus Cucs a.025160) derived from phytozome v7.0 (chr-ID scaffold0034 5; pos 39802 to 40331 reverse strand)
tggtactgtgatctcatttttcatcatttcacttggtagtttctcgcatctttttcttttctctaaactttcaccatctagtgatagtgtatatctaaagttattgggacatcctacaatttcttgaatgttctctttagtcccccacctccgagggggtaccttttgaaacccctttctttagtgggaccttttgtgggtttgtttttctggatggtcttgtatttttttcatttcttttcaacatgaaagtaaaaataaatattgatctgttgatgaaagtttgaaacaaacaatgcttgttatctaacatacaattggctcaacatatcttcaggagcttacatgcttgtaggaaaatgactgtatttatggaagagaaatgtttacctttgaccttatcaaatggccatcatgattgcattggtttagaatgtgtttatgccttagattgaaatctgttatcgaaattaacattaaaaacccttgaaacaggttcgctccatttattcaagaagtttgatattggc

SEQ ID NO: 63301 - DNA, 508 bp, Cucumis sativus
  Intron number 1 from transcript Cucsa.108740.1 (locus Cucs a.108740) derived from phytozome v7.0 (chr-ID scaffold0093 1; pos 1009241 to 1009748)
gatatagcccaattaataacaggtatgacaaccacttttaggcatttcacttttgtgcttctactcatagattctttgtcctcggcatctatgtttgcatattgaagatttattttgttgacacttttgctctttgttcagatggttacattttgtactatattcctaataatttgtgtcttgactatattctattcttctaaaagacttctccgtctagtggagagtaatttgctgacatgtatattctctcggagggggagagttgttccaaattattgttttgacttcaaatgtgagacgttttggttcttatgctaaaaaaattcattgacttcaaattagttatgttttatcattcaactttgctaatggtattggatttccatcctacatgtgggttttatgtgtatgatttttaaattttcactcacctttgttactctcacccctcaagtctaatattcatttatactatcatttcacttgcgtttcttactacttcagc

SEQ ID NO: 63302 - DNA, 791 bp, Cucumis sativus
  Intron number 3 from transcript Cucsa.114200.1 (locus Cucs a.114200) derived from phytozome v7.0 (chr-ID scaffold0096 2; pos 67461 to 68251 reverse strand)
agctaagtgaatgatcaaggtcttatcttcctcacactcaacgtccaaaaaacaagactaaagaaatatgatatgttgatagtagttgtagtaaccacttgattagaggaagaaatgacatttttatatctttagatgaatctcatcaaaatttagtgaagacaagtgacaacaagaagcttgaagtcaaattaggaaaatgagatatatattcttgtcaagacaaaaaaaaggagtaaaaagacgtattgatgtgtattatgtttcagatctcaagcacaatctttttaagtgttagacaacttctcctaagaggacatggtattatctttaaagatagcatatatgagattaaaaccaagaatgaagatctcttaacaaaggttcacatgactcacaacaaaatgtttccaattaaaatataccatgcaaaacttgtttgatttgagactttagtaaacgactcttcatggttgtggcattgttgatttaggcacctgagttttgacattttatctcacacgtgtcaacaacatatggtgagaggaatgccaaatattaaaaaagattaaatttgtgaagcatatatttttgggaagcatcatcgaaattcattttcgacatgaggtttttggagagcaccgaaacctctcaagcttgtctaatacagacttatgtgaacccacgagaactactacacatggaggtaatcattattttttcacatttattgatgactataatcgaaaaacatgaatttatttgctaaaagaaaagagcactactttcaa

SEQ ID NO: 63303 - DNA, 421 bp, Cucumis sativus
  Intron number 2 from transcript Cucsa.114200.1 (locus Cucs a.114200) derived from phytozome v7.0 (chr-ID scaffold0096 2; pos 68378 to 68798 reverse strand)
ttgcaactattgaagaattttcaaccatgttctcttaattgttaatcaattgagatcaatagagaaacaattgaagattaaatggtgattgaaaagattcttagaagcatgactagaagatatgaacatattgttgtagcaattgaataatcaaaagatttgtcaactttctccatcaatagcttaatgggatctcttcaatctcataagctcatattaaagctgtttgattctactccttcagaagaagcttttcatatgtaatccttctatagaggatgatatgatggaagaagaggtggacgtggtggcagagacaatggatgatccaatatcgtaacaaatacaaagtcagagagcagagacaatcaatcttctttaaatagaggaaggggaagaagttcaaatagaggaggaagca

SEQ ID NO: 63304 - DNA, 691 bp, Cucumis sativus
  Intron number 1 from transcript Cucsa.118440.1 (locus Cucs a.118440) derived from phytozome v7.0 (chr-ID scaffold0099 8; pos 336988 to 337678)
tcaaagccaagatccaggtctcttttttcagattccctcccatttcttaccttctcaatcaattcactacctttctttccccttcttcatgtttataccttttgatttatgtttactttcatttctttgagatcccttcgcccttcacatgttattgcctttttccgcttcgatttctgctgtttttgttcgtccctgaggtttttgttttttttttggatcaaattctgactagcatgcgtttgctttgattccgtatcattgcatgatccaatggatgaaggattaggaaattagcgttactgattcattttcgttttgcatatgtgttaaattgaattgttggaatgggtttttcttttttaaattatttttaatatgtttgcggtctctaagtttatgcttgttcttttcgtctggttgtttgttagttcatcatattttccatggcttgattcttttttatcaggtgtatgtttatattcttgtcacatcactttacgaacaaaattatttttgatgcatgaattggtttcggaatttaattccagcgtgccgtctttataatcgtattttgagttttggaatgtatatttcttctagctttaaacaggggggattagacaatttggttttaatggtctgttttaatgcaggacaaggaaggtattcctcctgaccagcagagatt

SEQ ID NO: 63305 - DNA, 912 bp, Cucumis sativus
  Intron number 2 from transcript Cucsa.118440.1 (locus Cucs a.118440) derived from phytozome v7.0 (chr-ID scaffold0099 8; pos 337869 to 338780)
gaggagaaagaggggattccccctgtacagcagaggtttgcatttgcctcctttaattacttaaactacaataactatattttcaatggccttttgtatatgtggatagcttgtttaatctcccctcaaatgtgtcactgtgctttctctgtttaagaatggaatttggtgtggaaattttttacttagcacaggattcattagtacattttggtaagtaaacaatgaagttgggtcaattttagattccaacattttggtaaggtatgaagtacatttataataaaatatgaaggaagatctaagatttacaatacttagctaggtaatgtcttatagtgaaggtttataaaagaaacctaaatgcaatgagtatattttctagttgtttcaaaataactaagaataggaatttgaaacagaatttcatgtaaaatagtattgttagtttcacatacttggaaaattaactccatgtttcaagttcaagtatctgaatttaaaatgtaaataaatgttttcccatggtctaatacagtaatgcttgagtacctgacaattgatagtttgatagacttagacagccacgttacttaagttgaagtgtccatgatttgtaactgtaagttttctctagttggctttccatggtctttcctttaacatccattatgttattattttctggagtggtgttaaatatatcttactctccttatggcaattagtgagtcaacaattctgaatttcatcaaaattcttttttctagtccctgtggtcagccatctatgaactcatatcggatcaacgggatctgtcatttcttttagttttatgagacttaaaatttgatattgccgtgtgcttattataacaagttctatcatactctgctttttgcaggctcattt

SEQ ID NO: 63306 - DNA, 969 bp, Cucumis sativus
  Intron number 1 from transcript Cucsa.130470.1 (locus Cucs a.130470) derived from phytozome v7.0 (chr-ID scaffold0102 9; pos 529145 to 530113 reverse strand)
acagttgtagaggccgaaacgaaccgggaaatcaggtaaatttccgataccatccgatgactttgattgtttccgatatcattgaaaatggactgggcttagctgtaaactggcccaagtaaggcccactatttacggaaatgtttttaaaaagattttctttattattacataatatatatattatcctttttttaagaaatacaaactctgtatttatatagtttgttacatatagatataatattttcaaaatatatagtcgtacaatttttagttgtttcatgtcaaattaaaaaatatttttattgtgcatgccacaattttactttgccacctaaatattcattatagtcgttttgcttgaggggttcttttaaattttattatttatattatatatttttttttttagaattggtataaataaagtaattagattaccggaaagaaaagaagaaaactagaaacttcaacttttttccttaatattaatttgtcaaaacaaactaaaatatatatttagtatattttacctagtgtacaataatgtaattgatttcttttcttaaactttagaaaactaattttgaaaaaactttaagcaagtttaggaaactcttgttttcttgttttttctttatttctttttttttcgtttggctaattacaaatctaccataagtaatggtgttagttgccttacaccctgaagcttataagattgttaaattaattaaggtctataaagttatacagttgtaaaaattgaaccataaaatgttgttacaatttctacacttgtttaagttgggtttaaaattttgggagtataataaattcttaattaggattttaaaaaaaggttggattttgacttgaattctttctattcctaagaactatttaactatattttgatcggattttttgttttgattcggttggatttgcatttgcagccaaaag

SEQ ID NO: 63307 - DNA, 391 bp, Cucumis sativus
  Intron number 2 from transcript Cucsa.044420.2 (locus Cucs a.044420) derived from phytozome v7.0 (chr-ID scaffold0054 2; pos 788141 to 788531 reverse strand)
ctaagggcgatcttgttgaaggttttgcaacttctgtaagtaaatgcgtttaaatagctttcttcttttttttttttttgctttcaattgctatatttgcagaacggtgtttgtttggatctttgggtattttctctcagttcttctgatttttcattgtcttaatgaactagggtttcaatagcaactacgggcatctgaatcttgttgatggggtggggtattttgtttatcaatttctcgtgatctttttaaattctatttttggattattactttgttttgttattctttttgcatatttgagttactaagttttctgatgtttcttctttgattcatcgtttgggctatagaaatcttcatcaagcgtaaaagagcccgttgcgat

SEQ ID NO: 63308 - DNA, 458 bp, Cucumis sativus
  Intron number 1 from transcript Cucsa.097390.1 (locus Cucs a.097390) derived from phytozome v7.0 (chr-ID scaffold0091 9; pos 2648100 to 2648557)
gcgagcccgtttctgcaatctcgaaaagtggaagggtaaatcttcttctcttaatctgcgtttgtacaatttccgtttcttgatttgaattcctttttttttttttttataaattctgttttttttttcttgtaattgaatgctatctggaattgaaaagtggaactgtggaagtattcattgaactattttgaaacaatggtgaatgcttttttactttgattttagaatccattttttacttgtgtagaactgaatcagtatttttaaccctaattattcaagttattgatccattttctttctgttcaattatatgagactagaatctttctgaatctccactccatgattgttattgttttgatttgaaatctttgttgtgtgtgttaaccttttattttcttcatacactgatcacagagtaagcttttgaaagagacaagccaatcagcaat

SEQ ID NO: 63309 - DNA, 913 bp, Cucumis sativus
  Intron number 1 from transcript Cucsa.002960.1 (locus Cucs a.002960) derived from phytozome v7.0 (chr-ID scaffold0003 4; pos 155618 to 156530)
cgactgcctgccgtcggagcccctgttcaatttgactcggcgatgatggctacgcaggcttgtaccacaaacatatcttttttttggtttttgtgcttttcttctttcttccgatctctcttcttatctgtagtttagtgtgcttgtccctagggtttttggagtttaagttagattttgtttttggattgtttagacagctcatcttctttagcaagtcatgattcctgtgactgaactgtgtaggatatgagaggatgtgggaattgtcttaagaaaatcataggatattttttctgagtttattgttggtgtaagatggccaagtttgcatctcataagctgccatccatctttcttttatgaactgctttctagtttctttccttttgtttcccttcttccattgcaatagtatagagattctcacttcttcatgcttaaattttacaagcaaacaaatttattgatgtttatgacattggattttgatgttgtttccatttttctttgactaacaaaaaaactatcctgaacttcattatatgttaacttttttgttgtaataatattaccttgaagcaatgtgataggaattgggacctaaacactgccacacttgaaacttgttccgtgcccccaaattctttatttttcatccatcgatcttatggtatggttagaatttcattagttttgaaatatgtatagaagatgatgataatactttgaataatattcaaagttgagggctgttttctttttctttctttttttattctgttttgttttgtaatgcctttcgtctttctgaagtagagcacaacacatgcagtagtttgggtaggggttaatggagtttgataacttttaccttataacttttatgggtgacaaccaattgtttcagagg

SEQ ID NO: 63310 - DNA, 750 bp, Cucumis sativus
  Intron number 1 from transcript Cucsa.131270.1 (locus Cucs a.131270) derived from phytozome v7.0 (chr-ID scaffold0103 2; pos 137958 to 138707 reverse strand)
ctttttgtaagtattctagtcttccctcatttagagaaccatattattttaaaccgactcaagtaatgtaatatgtcatctatcactatcaagaggatttagaatctacaaaccaagaacactttagtttgagtaacatattttgtctccaacctaactcaaatactctaaagtgtgtaaaatacttattaacgcaatagggttgtgtcaaataatagctataccaagggaatataagtttgacactcgttacaacttgtaggacaaacaatattagacatcagacattgagtagaaatatattacctcatgattcttaaatatgtaaattgaaaaagaaaaaaaagttaattgaagtttcttttctttgtatacaagtgatatatatatatatatatatattaataaacgtgtttgtccatcatgtatgtttggtgtcgtatacatggctctagtttgtatttgtggtttttagattttgattgatgaaaatattcttctatttcttgggatgttcataacgtacaaaacaagattctcaaattaccacttcatccaaaagttaaaagtcaatagtttactaaacgtcctactctaatctccatgtaacaacactagacttagactgtttaagataatcgactcatagtaaattatatctttttatcatattcttaaacaatactgaactttgatgggttacttgtgaatgcaggccggattaagttttcttctaatcattatatacaa

SEQ ID NO: 63311 - DNA, 833 bp, Cucumis sativus
  Intron number 1 from transcript Cucsa.091260.1 (locus Cucs a.091260) derived from phytozome v7.0 (chr-ID scaffold0089 4; pos 2275168 to 2276000)
aggttagtacctctgcatttcgacctcagaatgtgaaaaaagtttgacaatacttgttttgtgattgtacttgattaatgttgatgctacaataatggtagatgttaatattatctatttttagattacatttcgttttaaatttgggtaattttggattggtttaggctttttgttttgagtgggatgttgttcagacagtttcctggtgcatgtacctgcttttgaactgaatgttctgttttctctttgaaaaatgttgagttctatgaaatatgtttcgtctgaaagtgttattatatcatgatcttctgcccttttctttttcttctcttccctttttgtgattgtgggtgatgatagttttgccactttttttgaataaaagatatttccagcagtcaaagaagaaaacttaagagtaccatttgtgggtaggataagtgggattatagacttctagtttctccccttttagctatggttttctgtgggttatttgtattctttcatttgaaaattagtttctcctttgaaaaatgctgctgaggttatctagagcacacctattttgatagttttagtaagttcaaattgaactttccacttgatttaaacttttttactcattgatctgcttgtccttcttaatccgagtgttaatttatctttgtattcggattaatcaaccatactgataaattttcgtgtataactaatccttattttggaactgtgtatgtaaatttcctgaatagatgaaatttttataactatactcgtccaaggtctaaagcttttattgtagatcgttgtcgaaaaaagacattcaa

SEQ ID NO: 63312 - DNA, 404 bp, Cucumis sativus
  Intron number 4 from transcript Cucsa.118960.1 (locus Cucs a.118960) derived from phytozome v7.0 (chr-ID scaffold0099 8; pos 887059 to 887462)
gcacgaaaatcaggtttggtttctgtttgttaatctcccaatacctttccgaatgcaacatttgtttcactatttgtaaatgtttctaagttatcctttgagtagaaatttagacgaaattttgaaagaagacaggtcactgctgttgaagacactggcatttgaaaaaagtacaaatgtggaagttttccaatgaagcctttttcactctttctatactaacttttctcttctttctaagcttttaactctctcttcctttctttctgtgcttttccttattgaaaaatggagcataactcctcttttataagcatgagattcttattagaacaaaaaaaaaaaaagtgattctttatgtttaaccctctttcaggtaacagcaaaggaagttattcaagttc

SEQ ID NO: 63313 - DNA, 880 bp, Cucumis sativus
  Intron number 1 from transcript Cucsa.135230.1 (locus Cucs a.135230) derived from phytozome v7.0 (chr-ID scaffold0104 4; pos 102415 to 103294 reverse strand)
tgagcttccgtttgctttactctatattgcttctggtaatgggtttttcaagttcctttgcttcctgtccttgctaaactacttagctttatcttgttcggttttactgtaaaggagtaactcgatctcagtgcttgattggtgggtctagaattcagatgtatgttttgtagtttgcgtttttttgaaacggaggttggggaaatacacgtgggttttgattttattcggaatcagattagtaattaaagaggatgaatgtagtatgctgggaaaagcacgagtactctttggtgtatactggaggtgctatgttaaacagaatcaacctttggttggactcaattgattgtgaactgaagactctctttcctaaattcttaaatatttgaccatttacataagttgaagtttcaatatttggaaagatgaaatatctcattacttgttggttttgagatgaaattttatgtttatcttatttattattaaaaaccatgaaaaccaaatgtgatttcaatcaaaagaataaaaaatgaaatccaacccataaatgttaaactcaaaaggggaccattttgagaagacgaagaaactctcccattatctactagatttgagatggaactctatgtttacctaataggcactcaacattagtttaaatttaattgttttttcacatttcccaccatgatttaattaaatttcatggtgcttataaaacttcaaacacaaacttaagcttagtgccgtttgggatagggtgggggtaattgcaataaacaaatttacttgaacttcattgccactttaaggttgagctgttcatcccttccatgtaggaaatcacgatcaaggtcagaaggtagccgctgca

SEQ ID NO: 63314 - DNA, 710 bp, Cucumis sativus
  Intron number 2 from transcript Cucsa.120160.4 (locus Cucs a.120160) derived from phytozome v7.0 (chr-ID scaffold0099 8; pos 2169836 to 2170545)
tggctttacccaaggtgaatgataattttcttgttcttgattttgctgctaagtttctaacaaaatatggaaatatatgaaaaagggttctgacaagaaacttggcagcagaatcaagtacaagaaaataaaatatggaaatatattgaaatatgctgtaatccataagaaagtaaccatgtaacccctagcctttcgtgagggctagactctccccaaatttcccaattaggaagcctcacataaaactcttcacctctacctacgctctccatactatttataatcagaaaaacctaacaaacttaatatctaatcactaaaatgtcagtcctactaatcatactaattctccccatatgatcctaactaggagtcttacagaattcaacgttgaagtttctttgaataatcattgaacttttcacaccttcatttcattctgattacaaataatgttctcataactctttaaataatgatctacttgagcaatcataaatgatatggttgtgccggtaatactttgagttcgaactttatttctaaacacgttaatagatttttttggttgattgtcattatatggaaaatgcatgttgctgcagatttcccaatttctgcttattggttcttgtcaaggatcttttgaggcatcacatttttggcatgcagttttgctgtcctggaacaaaagttgctgaattctg

SEQ ID NO: 63315 - DNA, 577 bp, Cucumis sativus
  Intron number 1 from transcript Cucsa.094330.1 (locus Cucs a.094330) derived from phytozome v7.0 (chr-ID scaffold0091 9; pos 550634 to 551210)
cagattgtaagtccccatatgccattctacttctcctctctttatttttaattacctcttcattgcaaatattcattacatttggagtgattcgggagtgagttttttcattttcaaaatcactttgaaaacttggttttagaaatttaaaatcaattttgatggatgtgaatatcattcatgttttaaaagattaatggaatattaatctaaataagttaacgatcgaggatgagaaagttggtgacagagaggaaaaaaaagaccaatccctctctatttcttacatctcaattaatagagattttgcgatgtagaatggtactatgacatttaaaaatataaaatcaatcattaaattaattaatttgaaatgtttatcaacatgtttcaaagtcatttcaaaaccaatcacaaaattaatggtggaaaaaaccaaaaattaaagaaatgtaattacatgactaacattttatatatataagtaacatttccattataagaaaagaaagatgatcaaattagagctttagttgttcttgagttttgtgtgttttatggtgtaacagttgagacg

SEQ ID NO: 63316 - DNA, 744 bp, Cucumis sativus
  Intron number 1 from transcript Cucsa.044900.1 (locus Cucs a.044900) derived from phytozome v7.0 (chr-ID scaffold0054 2; pos 1040267 to 1041010)
gccctgactctgctcaacggcaagtggattctagcgtaagttctcccaattatacctaacttgttactagcaacctgattggttggttgaacttctaattgtgaattgggaaaaacatcccgaatcaatagaacctagtaatttttgtttgggatgattgaaaaactggaacgagtttaatcaaattcctttcttgctgactaatcgtatatctccatttcaaacctcttcatgaatttttaaatattggtggtaatttcttatatatgtttatcttgaagatcatatttggacgtagtatcgaccttccatgtggcagttgttacttcagtatcttcatgttaggcaaaagtcatattgttctgagataaactagaatgttatgcatgagattcgatcccgtgggccatttagaagaggttttatcaatcggattttggacctgtatatgattttgtatcaatttctttgaatatggtcagttggccaaacttgcaagttttgttatgctaaatcttagtttttcatttaaacctctcgatctctcttcattttctttgaagagaatgaagagagtctctatacaaatagtttttttacacctgataaacaggtcctaattttgcatttctttttatctgttcatagtctataacatactagaagatgattatgataagtttcttaatataaatgtttttggatgtaggtacacaactttcgcgggtctgttcccgttgttgt

SEQ ID NO: 63317 - DNA, 476 bp, Cucumis sativus
  Intron number 3 from transcript Cucsa.111620.1 (locus Cucs a.111620) derived from phytozome v7.0 (chr-ID scaffold0095 3; pos 362765 to 363240 reverse strand)
tttgcctattaataaacctccaaacagtctccgtaaggaattgggaattttcattggttttgtcaatggatcttgtaggttgcaatattcagaggtttttaattgcacaaaattctgattttactcaaattataaattgaatctgctgtgaatttcttctttgatctgaaatctcatagcatgcatcgagtttgtcgtttctcacttattattaccccaaatctaccatggtgggaattttggcagttgaccatgttcttttttatctataagcgcatgcagagtttttaaaaaattcgctaattgaagtgtgttcgtcaaatatgttaaagttcgagatgttgagtatatggaagaaacttttagttttgaccttttttgcttctcccactctgtattatgcgccatccttaggagtagtctgaagcactctctctaattctttcaggtgggaaagaaggatttgacaagaaagt

SEQ ID NO: 63318 - DNA, 732 bp, Cucumis sativus
  Intron number 1 from transcript Cucsa.018080.2 (locus Cucs a.018080) derived from phytozome v7.0 (chr-ID scaffold0025 2; pos 357806 to 358537)
ttggcaagcgctccctcctatctagtaattctctctcttaccatctaaattcaatctatttcaatttttaattgttgcagtttattaagctgattattatagtataataatgattggattctcaacaccgcagaatattctcatatataattaaagttgtcttcaaccaccagcttaagcttttggatgaattggtggtttaatatggtatcagagcaggtggtccggggaggtcctgtgttgaagcctctgaattttcgtttcctccccaattaaaatcaatttccacttgttgggcctttaaatatttcaaactcaaaagtgaggtgaaattgattccacttattgagcctttcaaatatttcaagcccacaagtgagggggagtgttggtgatatataattaaagttgccttcaaccaccagcttaagcttttggatgaattggtggtttaataatttgtaatagagaaaagtggccacaatttcatagaaggaaaacatgcatttgctagttatatgttttctttctctttattatgtaattttcctttgtgactaatgttgtaaagttattggggattttctagatgcacatgacctgacattgatggactataaaaagaagcataattctttgttgttcgcattagttaaactaatcattttcggtacccaatatttttctgaaattgtaggattactcactgtggactttgaagacgctttgaat

SEQ ID NO: 63319 - DNA, 709 bp, Cucumis sativus
  Intron number 1 from transcript Cucsa.102980.2 (locus Cucs a.102980) derived from phytozome v7.0 (chr-ID scaffold0092 7; pos 1883626 to 1884334 reverse strand)
gctttgaagatctctgctcgagccaagtaaaatcaactcctcttttgtctctcgttttcatttctcttcgattcaatgtttcttctgctgtcatgatcttcctgcaactcaaatgctgttgttttcttggaattcgggaaaataagattttgaatccacaaaactgctcaaagttctggaaattctatatattataacgcacattgcaactctatgattctcttttgtctaatagttatgaataagtagctaataggtagaatacaaatctttcaaaataattgtcaagtttgaagattttgacattttatgctataattacaaataatttttatttgcatacagttgattataaggaaaaataaatggtgggttccaaatatggttactatgttatatttgatgctcatgaatttggatgaactgtatcattgacttcattgttgttgagttcttggtttcaaaacctgaaagttcgtgaatagaatgatgattgagagattgagatgaaaatgtacgggtcaagtttcatgaattgagtactgtcctcgttagatgtgcattgcttttaatgactaatgacataactaaatcaggatttggtctaatcttaactgatttaagaacaaattgatgagtcctgatttaatgaatggtttctatttgttgtacttgacatcttaggctattgttagctttgctaaattgg

SEQ ID NO: 63320 - DNA, 517 bp, Cucumis sativus
  Intron number 1 from transcript Cucsa.096600.1 (locus Cucs a.096600) derived from phytozome v7.0 (chr-ID scaffold0091 9; pos 2144965 to 2145481)
gccgcactaaattttctttctccttcaacctcaaggtctgtccacgttttttcttcttttcttcttttcttcttcgctttcctatatctttttttttaactatctcaatttcggcaatattgagctgtagcaacgtgtttgattcacatttatttcatttctggtggtgttttgttgtagtattgtagctatctatggttttctagatgatctgtgtcattccattaaccgttgaatattcatgcctctttctattacttgggtattcgaaaatttgtagtctttaagcttgtattccttcgtgaggtgctgtttgcttgtaattcttctattggataatgtgaaagtcttaaaatcttgttgctcaaggaatttgtatctggtttttcagtttctcattgtatcttgatatatgccactacttgcacatgtttaaaaccgtactccaatttactgacttttgaacttgttgtctactttagagtatctaattgggcgctactcttacaattggaat

SEQ ID NO: 63321 - DNA, 956 bp, Cucumis sativus
  Intron number 1 from transcript Cucsa.098500.2 (locus Cucs a.098500) derived from phytozome v7.0 (chr-ID scaffold0092 3; pos 486301 to 487256)
ccaatcacacacttcccactttcttcctcttcattgtaagtataaactcttttcttgccttataatttaactgctcttcctttacactatatattatttcttaatgtctttcactctattttcatatttctttctaaaaacttgtttaaagtttggaatctgtcttcccccatttcaagcatttttcttttggtcaaatgggatatgggttgttcttgttttaagtttcttatccatctcataatcttcttttacattcttccattattttatgctaaaaaatcttccttaaacttgttcactttggctttgttttgcatttatgcattgtgaagatgtttctgttcacctttcctcaaactgggttctccagaaagtttgtgtttctttccttaaaataactgttggtgtttcatctctttcagctttgatggttctatccttttcttcgttaacaatacattctttcatttgtttttgagttctctcctctgtctagtgtgagggttttgattttgatcattttatttttttaaacttctgtttttccaaaagccattctttcttttgggtttctcagttgccttcaattgtctccctttcttgccttctggttttcagattctctaaaaataagtgatcactgtcaattctttcattatttttagctggattaaaatttaaaaccaggctttcaattttttactcccattccttgaaactaagtgattctttcttacccaacataacctcttaattgaagaggaaagttgttttcttttttcagtttgtttaagcattcattcttcattcttggagtgttgaaggaaaataatttcccttttcctaaatcctcatttggtttataccctcttcagaaaaggcttcattttcctaagcctggtaacaaaatgagttttttaacaggatcccccaaaaaatcttggcagcctatc

SEQ ID NO: 63322 - DNA, 926 bp, Cucumis sativus
  Intron number 2 from transcript Cucsa.048670.1 (locus Cucs a.048670) derived from phytozome v7.0 (chr-ID scaffold0054 2; pos 3335944 to 3336869 reverse strand)
gtggcagggtgaactgaggtaggcggccgctgaaacttgataaattgataccatgttgataatgatatcttattgaatgaataattggacggttctctgcatatctagatacaaaaacatatatacgtggtggtctcgtatacatggtaacatttaacaatacgaattatgtaatatgtatatatggaacttgtaatcgagactgcatatttatttggtggttttttacttcttcttcttcttcttcttttttgttttgttttattatttcaaccgtagatgatttgaattgaatgctttactgtctttccgttttcattcaactgcttgttcttgtggtatacatgatactaatgaagttgatgaaatctaatttgggtggattttcgtattatgttgttaaattgtgaatcaaaacgcaaattactctctgaaatagtgtatgctatttaatgtttctttacgccgcacttcaaagtattttacctacaatactctattttgccacttgcccttagaatctccacatgtgcaagaataaagaagagggccgaacaaagagcttactttagtaaagccatctcttttctactttttaggtttagttctttgtcttcttctttcatttacttgcagaaatctttctacaccttccttttccatttagagaaattgaaatcgatctcataaggatttctttgtttgctgtatggctaatctcaaatcttctggaatccattgtgtcctccaaggataatcctggaacttctcataagggttttatttgttactaaatttgttctattttctattttgaaaaaaatttgtttgaaggcacttaaactcttcttcttgtttagtattttattgatcgtacatctaacaactctctctttccaggcattgttgacaaattggaggtacca

SEQ ID NO: 63323 - DNA, 665 bp, Cucumis sativus
  Intron number 1 from transcript Cucsa.091570.1 (locus Cucs a.091570) derived from phytozome v7.0 (chr-ID scaffold0089 4; pos 2552674 to 2553338 reverse strand)
tagcttcgaaggttcgggggccgggccggcgttgggttcgatttgggtatgggcagtggcggttttggtagggcttttgattggggattatgtgagattctaaaaagggaaatttgagattttgccgccaacgttcctttttcccttttggttttccgtttgttgtatttagaggttgaaatgtggttttgtattgtatcattttaatggacagtttcttttggtggttcgatgcttactttttgaacctcattacaaatggctataaaaatataaatatttagtaaaaactaaattagaaaggaacataaattaataattgaagtgtttttattaatttaaaacaacaaaataaagagtaaatgagtagaaatttggatgtttataggcaaaattaatttagtatttccattaaattatagagatgtagttaattttcaaataacttaagttctttgtttcgttttcaatatagtttcttcgtagaatttgtctctaattcgtaagtttaaggcttcatgggtttccaattcaggagtttatcgtgtgtttagttatgagtcgtgtctccaagatctttgtgcaagtttctgttttagctcataagttcatctttgtttttagttcatacattacctggaagtctttttgtgttttagttctcc

SEQ ID NO: 63324 - DNA, 617 bp, Cucumis sativus
  Intron number 1 from transcript Cucsa.078490.1 (locus Cucs a.078490) derived from phytozome v7.0 (chr-ID scaffold0079 3; pos 857601 to 858217 reverse strand)
aggtaattatttaagacaaccaactcttttcacatttttcatacttaaaacttttttaacttttatatatatttgttttgtttcttaaatagacccattgggattggtagcacttccaggacttctaaaatcaagtgtataataggataaccttttgcaattatatatatatattgcaaaatatgtacactattgttcttccattagtgacggtctttattcactaatagtaatctacaatgctatggtctttttcagtagactctatgagtacttgaatctaaattttgctaagggaacgacagatgaaaacacattttttttttatgtaaacattaatcaagaccttagatttaaatactgaatgtttcaataatttaattattatactctcggatttgtaatgatttctcgttaatcaaattttctcatttaagctaaaacatatttaatggagagtacatactacatagagtaaattattatgtaaaggaatcatgaaaaactaaagttgaagatcaacaactcatgttaagtatatgttattttgttttaatgatgggttgttaacgaaaaatgaaggtgactcaaagaacaaaagaagtagcagggaaggt

SEQ ID NO: 63325 - DNA, 565 bp, Cucumis sativus
  Intron number 1 from transcript Cucsa.124390.1 (locus Cucs a.124390) derived from phytozome v7.0 (chr-ID scaffold0100 1; pos 325056 to 325620)
aattggtattcttcttcttcttcttcttcttcttcttcttcttttctacttcaacaaatctcaatcaatccttgtttttcatcacttttctcaactgggtttttctttaaagttagtgttgtttagtcttttctgtgtgttctctttctctgcctctcaatgtgactcctctgttttgcttttatttcttgtttttcttctttgtcaggaatcattttactttcatttttcgtttattttatttaactcattgtcctaaaatggttgtttttatttttaccatattcgtctccttctcctacttcttttcttgtctattctgattcctctgttttctgtcataacctgtcaatcaaaaccctcctttagttttctttccttttgttttttctgtcatttaaatgacttcaacttaaacatttctttttcttttttctcggtggggagctacaaactatttactaactaaccctctgttcatccttcgctttttggaactttcctatccttttgtatatttatctttaattttttctgaaggtttcgaggaacataaatctggtgt

SEQ ID NO: 63326 - DNA, 752 bp, Cucumis sativus
  Intron number 1 from transcript Cucsa.038090.1 (locus Cucs a.038090) derived from phytozome v7.0 (chr-ID scaffold0049 3; pos 137818 to 138569)
ggtacaagttagaagatcgaaaaggcgacaccaaggtgatctcaactacttatatatcttccttatatatatcccttttatttgataatcatttaatttaagtttttggtttcgaaaattgaacttataattaatgttaccatttatcaatttttttgttttgtttttgtttatctttttagagttcctttttttccaaatttctacaaatctaggaaaaagaaaaaaaaaaaaaagttgaagactctgtttgggtaactagtagaatttttatttttaattaattatttgaaattaagcttgttaatataaactctacctcttagtttttcttgttgtattatctacttcataccaaattaaaacatctgagccaagttttgaatattaaaaaaaagtgatttttgaaatttgaaaattggcttagaattttattcttttatttatgatagataaaaaaaacctgataagaatatggaagaaaatagggtttaacttttaaatacaaaaagcaaagaattaaatggttgcaattttttttttttaattggcttgttagctaaaaagttgcatatatgtttgtggtaatataattcgagatcggatgttttaaattgttaaatttaaaattgaaaggttaaggttaagattcacacattttatcttaaacaaatttaattgaaactaaaagttcaatcaaactaataggttatatggtgaatttaattctcatataggtgaaaggagagata

SEQ ID NO: 63327 - DNA, 753 bp, Cucumis sativus
  Intron number 1 from transcript Cucsa.045740.1 (locus Cucs a.045740) derived from phytozome v7.0 (chr-ID scaffold0054 2; pos 1479341 to 1480093 reverse strand)
ttcttcttccttttctattcagtgttcaacttcaagtaattcccttcttatttttggtatttcatttacttcttttcttttttctcttaattaattctttcctattttcaaccatttctttggcaatcaattacagtattatacggtttttttctttctttctttgcatgtcatattgtttcttgggattggttagactgcggtggagactggagataccattgttgctcttacttgatatttcctttatttataattattttccaatttactcttcagatgacatctaaatttgcataaagacatgctgtttttttttttttttttttttttttttttgagttgaggaactgttctatggttgcaattatattttggaaaaataaatggacgattgagaaaagatggaacgatctttggtttgttttataaaataattattaaaaaaaaaaactgaaggaagataaaaaaagatggatcttataaggatggctgtttgcagcgtgaaaaagaacagaaaagcaaacaaattaatgatcgtttatgagaatttatgaatttgaattgtggggttaatatatgtggtttgtactcagtaattttactatcatgattcacctttgtaaacataaatccaaccatataattttcgaatacaaaaaccaagaaattccctcaattgggagtgtattagagtttcatctattttcttgatcttgtaggagtgtttctggttagtcttgaagcttgaaa

SEQ ID NO: 63328 - DNA, 1021 bp, Cucumis sativus
  Intron number 2 from transcript Cucsa.099570.1 (locus Cucs a.099570) derived from phytozome v7.0 (chr-ID scaffold0092 6; pos 317562 to 318582)
gcagcttttggagactgcttacataggaagattaggcatgtatcttcaaacttccaatgctctgtagttttagttttttatattacagatcaacgtttttttcctttcattattagcttgctctcttagattctttcagtaaagctatatattgtataaagttgcacctaagttagtcaacctcctatttaattttcgttataaattttgcttgatttgacgatagcttttcattttggtcttctaattcagtttctttgattcttttgatcctgcccaccgttgctttgactgtggagtcattcattttgtgtggacaaaacttagattgaactgaagtggccaatttatttataactttttttttctctgaaagagaccctttgtttatttatttattactttatattgaaaactgtgattaatggtcatgtgtgtgcttaggcgactttttgattatttgtttatcttgttggtaaggatctatttacttagtttatcattttttatgtaaacggaaacaaaccttttcactaagataatgaaatgagactaatgctcagagtacaaagagacatacaatagtacaaagagctaaggatcaacaagtgcaaccagacatcctaactaggttgacaccccatgacactcttatcaaataaataattgatataaacaagcaaaaccgaaaaacaaggaaactaagaatacaatgtcaaaatagaacaatacattgcaaatcaaaatttaagctggaaaaatgaaagcacgccaattaagttgttaggttacgaacttgatgagaattcttggatgctaacagcctttttttttatcattgggatgagtcctatttattgagtgtaagttgtgctaatcttacttgggcacttgtcccaacagctgaagtgatgtagtaaatgctatttctgaattgcagtattgtctagacttttcacacttgtccatcttccacatctgtgtaggtgccttggaattggcttcagcgggtgtttctata

SEQ ID NO: 63329 - DNA, 599 bp, Cucumis sativus; identical to SEQ ID NO: 62138
  Intron number 3 from transcript Cucsa.065790.4 (locus Cucs a.065790) derived from phytozome v7.0 (chr-ID scaffold0069 6; pos 428104 to 428702 reverse strand)

SEQ ID NO: 63330 - DNA, 910 bp, Cucumis sativus
  Intron number 1 from transcript Cucsa.114240.1 (locus Cucs a.114240) derived from phytozome v7.0 (chr-ID scaffold0096 2; pos 86837 to 87746 reverse strand)
cttttccgcttctctttccctacttttcgtctccggtacctccttcagatccctctttctttcttccatccctcaattcatttgatgcaatttttccttttctttgttttcttgattctgtttcaatgttttcccttgattcttctgtgttgagaatcgagatcttgtttccttttttttgtttgtttgggtttttatttcatctcattccctgttaattagttgaacaagtcttttgggatcttcgttgtttctttctttaaattgtgttttcagaacttcattatttgtgtttcaaggttggttgctgtatcatgatctctgaggatgtagaattagggaatcccaattttgaatttttcacgttgatgtaaaaaattaacttcttcttgtaccataaagcagccagccgtaaactttgttttgttcattcaatagctatgcaccgttttgcttattgaaaattaaaacaaggagttttgatccatctctggctcggataccgtattcattggttttttttttttgaatttattttatttgtatgatttttggagaaaggaaattcaagcatgaaatagtctgttaggaggcgtttgggcaataactattctaagactataataacccctactgctccctacactattttacgttcatcgctttttttatcctttgttgtagtgtttattatttccttctacttgccctaaatccccccccacagtattttacctgtgtagatttcaaaccccacatggttactttttctttgagtcttatcttgaaatgaattttgttgtcgatttgtaaatgttaagtcatgaattagtacgtattgagtcatgaatacttacttttgcagctgtctcttaacacttcttttggttggctactacagccctttctg

SEQ ID NO: 63331 - DNA, 943 bp, Cucumis sativus
  Intron number 1 from transcript Cucsa.131240.1 (locus Cucs a.131240) derived from phytozome v7.0 (chr-ID scaffold0103 2; pos 76263 to 77205 reverse strand)
aactactactacgaagaagatctgctttccgttaggttttattttttgtttctcttttagtgtaatgaagaaatgatttattgttttggcttttgttgttcttattctctcttgcgaaacgagagaaagtagttgtgattttatttatttattttttttaatgttttccgtctgaattattgaaacgaaagatgagcatctttcttttttacttgaactgtattcgatttgttgccggatatacgatttttgatgctgtttgtgtattcgcttcctccactggctcagcacgtggagaaggcattttcgttctgcatgtttcgtttggagattttagggtttcagtgaagacttggagaagaaggttgagtacggatagagcatgctagaagcttaggttgaagatagagttttacgtgatcattattattgttattttaatttaaaatttaaataattagagcgagatttgtatttttccacaagtgaaggttttaccgacactgtgtgggatttcgcactgttcatcttgtgttatgcataattattggctagttatcaccgtctttagaggtagacttgtagatttagcagactatgagagagagtaagagagatatattagagctatcatattgaaattcagattcgagaccagttttacgtacgcttctctctctctctctctctctctctcttctcttctctctctctaatttgagctttaattgttctgtaattcgaattagtttttccaggagtttcttgtgatttcattcacctctactattcatgttatgatttgaatcttttttttcttttttcttttcatgattttgaagttttgaggttaattcgataaagatattacgaagatgtagtaattattgcatttcgatggtttgcaggtcttaaacgttacttttaatttgccttcccggct

SEQ ID NO: 63332 - DNA, 911 bp, Cucumis sativus
  Intron number 2 from transcript Cucsa.037800.1 (locus Cucs a.037800) derived from phytozome v7.0 (chr-ID scaffold0049 2; pos 436 to 1346 reverse strand)
catttattgctccttctctaaggtgatttcggattccttgtagcagaccacaaaaacctgaatttttgtagcaaaccacaaaaacctgaattctatgatgaaaatattttaataaagatcttctgccctttactctgctaattttcttattcatttggctttgcagatatctcctccaatatcttatttattcattcatttttttgatcatgtgcgatgttcacatgctcaggcatctgttagttttatgtttccttggtttgatgactacttgcttccctatagtacaattttatagccaaataggttggggagaatcatacgcttagttttgttgaaatataatatgattgaaggtccaggcatgtgatcataggcaaccactctcgtgaagagtatgcccaggatagatggtaacgtgtaacaaaatgtaagaaaggtttgaggaaacatcggagcctatactaatataatataaatttataatataagacaagtaatttgtagattcctgccccctggggacatcagatgaagattttagtttcttgattgggatatttttgtgataacacaataaaatatatgatataacattgctttagaagctggagcatatttgtttatcaatgtccaacatattacaacaccaagggtcaatttaatggccatgtgaatttatccaattttattattctattcgatggacgcaactttgttgtatgtttccataaatacaattgcaagaaactcttatatgttgtcttttccattcagaatttcttttgtagtttcttatctaagaaaataaaatctaattttttgaattttattttttaattcaaatttagtgactgatatccctttattgaacaggcatttcactgcaaggctagcccttggttggagga

SEQ ID NO: 63333 - DNA, 817 bp, Cucumis sativus
  Intron number 1 from transcript Cucsa.048090.1 (locus Cucs a.048090) derived from phytozome v7.0 (chr-ID scaffold0054 2; pos 2914875 to 2915691)
atttgctcctctatatcactcaaaggtatgtttttgttcaattttagttttactgtctcagatgttcgtacggttctcttgttctgattttatgatcaacagaaatcaacctcgaatctgtactgtaattgaaggccattggattccctggccattgcgtattgaacttgctgtttaaattttattctccctatgtgattcttcgctttgttttgatttgattttataatttcaaatgatctgataaaaacatgtttttattctttgctgttttatgtttctgtaatgcatatctctaatgtgaatctgtgggatgacacttatttctgttaactgtaatttttacttttagccaaaaaaaattaatgacatttgtgaaagcataaaggcataaataaggctttgtagacgttagtatatatgttcaattcatttattgcaggaacagatcatgattgttgatagttagccttgcgttaccttacgtggaggatgacaagtttgatatgaactctagttcttttttctcgggcataagagaggaacctaaatgctagttctttcttgctccgcaattttcttgcgataactattaaaaaatttccatcgcaattgtcaaatattttattaaagctcttctcctggcacgggtgttggaagttaaacccttttttaatcttggtattacatttagtaaagaaggaactttccactagtcagaatggagaggagcctcttgtaagtcatgggtgactgatgattctttcggactctttttgcagttgtaatcaacttagtagactccgtcttgtatatt

SEQ ID NO: 63334 - DNA, 565 bp, Cucumis sativus
  Intron number 2 from transcript Cucsa.042270.1 (locus Cucs a.042270) derived from phytozome v7.0 (chr-ID scaffold0054 0; pos 732749 to 733313)
ctgctcgagtttggcatattgagcctcacggacatgtatgctttctcttctttgattttcccgtgaaatcgtcctcaaatttctcgattagggttttgtttattttttatttttcttttttggggtgctgtaaatggtcgaatttgagcttaaatcttcttttaatacttgtctcttcatcccaccgatttgataaatgtatatgtggggatttactatagttgaatagcatacataagtgaagttatgaaacaaaagggttagggaaagcttcaacttttgagtttcctacttccactttttacatattgttccataagctcttgctcttgtgttttcctttcttttatgttctggaaaatgggagtacgatttacagagttctttagttgtgtatatatgtgttagtgtgttacgcttgattcctcctgagacctgttttgaatggttgctatggttttaccacagtatttagtgttagcattgtttgtttgtctttacttacaaccctgaacaaatcatttcaatcatgtcagacgatgtttgcttcagggtaaggttaagg

SEQ ID NO: 63335 - DNA, 841 bp, Cucumis sativus
  Intron number 1 from transcript Cucsa.087930.1 (locus Cucs a.087930) derived from phytozome v7.0 (chr-ID scaffold0088 8; pos 415900 to 416740 reverse strand)
gtttgaaatttgaagaacaagttgttcaattaggtataaattttctaattttgcttttgtttttctttttttcctttctatttacgtttctaggagggtaatgcgttggaaagaagggtgtttttgtaatgctaaaatcatttgttttcttctctttttctttcaaaagcatacataatcatcatatacacatatatattaagtttatcatatgtttgattatatggttccatctatagtttcttttaattaattcatgttatgaattaattgaacttcacattgctgatctggttagtattttttattttttaaattaatgatttttctatttgctattggagtttggggaaaaatgagagagagcagtggttaattccatatatatatatatgtgttattctttgacatattattttgcttcaatttacaaattttgatatttatttaattaaaattaagcataattcctctagctatattcttaaaatggttaaaatttaaaatttctttttaattttaaaatgtgacaataaaaaataaaaaaattgatttgattttttaaagaacattggtaagaaataagaaagctgttaataggcctaatttaaaaaagttaatacaaaatcatattgttgccaatgctaacactatttcttatttctaaacaatattaaaattgaagctaaaagagcttataaaaaaagaattaattaaatgaaagatatagtgagtatagaaaccaaaattggattaagaattgaatgattgattaattaattttaaattttaatttatgggggtattattaatttagtgtgaagaaagcagatcagttgca

SEQ ID NO: 63336 - DNA, 818 bp, Cucumis sativus
  Intron number 1 from transcript Cucsa.027650.1 (locus Cucs a.027650) derived from phytozome v7.0 (chr-ID scaffold0037 8; pos 429347 to 430164)
agcacgaccaatgtacgtctaagtaggcaacgacaatgatgaagtcattttggacttgggaattcgtaagcccagtgacagagtacctttgatgttattgatagctttctaatggagggatgttcaattatgaacaaagaggcttaatttggtgatgacaaacgaattttcaagtctgatgtgtggaaggtactgaagagttccttctatgtgagatttgtcagtagttcttcctaattggctgttaaggattttctagtgactacgtggaggttcatgggttgatgtgaagtaggcctagtctttcgggaagattcagtgcacacttggtctggttgggatggattccattattgcaccagtaaactgaaataccaaggaagtagcagcatagatttcctaagtcctttgaagcaaaaacgttagtaagttcaacaacaaaatagttgatgaaaacattgtcatttcctgtcactctgtcaccaagatgccatcaacatagcttagaataaaaatcttagtctatatcataacaagaaaaaaacagaaaactataaactctataattttagaaccccgttgcagtaacacttgttgaagcttgttaaaccaagccatcggggcttgtttctgtccgagtcttgtgtatcttacaaacatgattggaccactactgcttcataaaaccttccggttgtgccatagcgtcatattaaggtcaatgcttagtgggtagtgtcttttgtcttggtattgtttttccccctactccctctgaaccctcgttctgtctgtgctctattctcatttcctgacag

SEQ ID NO: 63337 - DNA, 270 bp, Cucumis sativus
  Intron number 1 from transcript Cucsa.092320.8 (locus Cucs a.092320) derived from phytozome v7.0 (chr-ID scaffold0090 5; pos 229300 to 229569)
aagcaactagcaaaacactacttggaaattttacagtaagttacaatttcatttctaggaaatttccaggatggagctggattttcgatactgtactgctttcaattttggggttttttaaagctttctttatttttcttctttctttttctcttttatgtttggctgcgtcattctgcttagggtttggttcttgctggcggcttttgattttaatcaatcctcttcattgaagttttgatttgggtgtgcagtagatctggaaagttg

SEQ ID NO: 63338 - DNA, 599 bp, Cucumis sativus
  Intron number 1 from transcript Cucsa.058350.1 (locus Cucs a.058350) derived from phytozome v7.0 (chr-ID scaffold0061 4; pos 536279 to 536877)
gtaattttttttatgttcacagggggagttggtagttagctttgataagatgttgttgatagattattatatggaggtgttggtggaatatttatatggagatgctttgttgatagattattatatggttcggttatgatagttatttctgcagttaaatacctttacatatagctagagaatattattgatcatcacgtttatttcagtcttcaacctaccggcctttgatgccaaagctaatcaatatattccgtccctctgctcagcctcatcaactcttgctctaattccatcgttgtgttatgttaaagtttttcctttgatttccatgagaaaaagttcttatacagtgttaaaaaaggatacctttcttaaacagtatcattccatatgcaattcaaactattcattttttccataaacattgctccagtacttggtttcatttaaaaaatctctttcctttctacaacaatacacaaccaaatcccatcaataattacttctacacagtgcaaacaaaacatctcccatttcttttaatcttctctgcaagcttgctcaaaatgaagaaatttgagttggttttcatacca

SEQ ID NO: 63339 - DNA, 639 bp, Cucumis sativus
  Intron number 1 from transcript Cucsa.125280.1 (locus Cucs a.125280) derived from phytozome v7.0 (chr-ID scaffold0100 4; pos 8077 to 8715 reverse strand)
gggattctttcaggtactttaactattagtcttttgtctgcaagtttcaggttgatgcgaagggcatgtttcttcacgtattcaaaatcaattcaaaacatatttttaattattcaaagttgatttttcaggacatttcaattgtgcttaaaaatataaaatataactttaaattaatttttaacggttgatatgtttcaaagtgattttatcatgttcaaagtatgtcccaactatagtacttgtagtgtaacggctggtgttctagtgtttaaagtgccacttggtagctatatggttattggtttttgaaaatcgtgcctcatttctcacttcttcttacttctaaagttttcatagttcacttgaattctaaatcaatttctaaaaacaaaaataagtatatgaagactacttttttttttttttgttcttttttcttattttgaaactttaactgactttaaaaacacttctaacacagacaacaaaacaaagaaattaaaagatgaaagtggtattttataagcttaattttcaaatattaaaaaccaacagttaccaaacgggacataaatatttggattatggtttgattaaaaggaatatatgttatttgaatacgtcagctggtgaacc

SEQ ID NO: 63340 - DNA, 627 bp, Cucumis sativus
  Intron number 1 from transcript Cucsa.102750.1 (locus Cucs a.102750) derived from phytozome v7.0 (chr-ID scaffold0092 7; pos 1719613 to 1720239 reverse strand)
aaataatcaaaggaattgttctggtaattaatctccataatttctcactcattttcaatcttcattgccattattctcaagaattttgctctttatccatctcttttgggtaatccccgaaatatatataagaacatataataggacagaatggcaacgaagattcaaagtggtggccttgcggcctgggggacccctatcgtctctcctctacatttagcatttcccctcaaactatttttaaaagcattttggggcaaagatagaaaaatgctctaatattttcatgcacaaactgtttgctttgagtgaaaaaagaaaaagtcacgcacctttgacgttggggaagcacttggccatattgtagagagaaaattaccattaattaattttcatatttaattatggcttacaagctttagggttaggagtaacatgaaagagtgtttgctttgaaataacattgtttagattttttttactaatttttccatatttagtcctaattattgacttggtaggatttgtttttgttttgtgatatctgttttgtgtgtattatatcaaactctaaacaaaaataagcgtacaggtgttactactagctggaacagacacatcagctgt

SEQ ID NO: 63341 - DNA, 349 bp, Cucumis sativus
  Intron number 2 from transcript Cucsa.014710.2 (locus Cucs a.014710) derived from phytozome v7.0 (chr-ID scaffold0018 9; pos 27778 to 28126)
tgcaatctcttcagggcaatttccagaagtgtgtggtgagttctggaaaccaattatttacaaaacttgctaattcccaactggaaaaaacatgctgttgaaagttttgcccgtggctgttgtgatgcataagcttgtgacttcacatgctgtttacatgaagagcttttcgaatgggatatttaatatcgtttatttgatttaggatgctactttgttttattgacgtagaagattgtgtatatctcaatccagtgcaatgaagtttaacgttttgctcctttaaatgaaaaactttattctcttcagtagttgcacgttaattattcaatattgttgcagagtgcga

SEQ ID NO: 63342 - DNA, 629 bp, Cucumis sativus
  Intron number 1 from transcript Cucsa.017540.2 (locus Cucs a.017540) derived from phytozome v7.0 (chr-ID scaffold0024 5; pos 317616 to 318244)
ctggtataatacaggtacttatcacagtcattacaatattattttccacctgcttgctgattattccatcagtggtccatgatgctttgacaatataattttgtaacattatatatatattaaaaaaaaacattgtcacaaaattcaaaatgaaatatcagacgttgtcccagtacaaaagccaaggaaattatattgtgaaaggccccacaactgatatccatgaaagagaaaattacgaaaataaatttggtgaacaactctcattacaagctgggagacagtctatgagatttcatttatataatgataaaaacctggatggtaaatgaaaagtgattatggttctgttcacccttcttgaaaaggatgcatcatcagggtgggctggacagattcatgtctttatttataaataatgagttttctaagagctaaaaaccagcaagtaaagacagagacaaaaaaaaaagaactttctttttaaaaatgtagttgtagcttcttatgttcatctggactcatgcatattagatatgtttctagaccttatttttttgttgaaagaagcagttgagaagagggaagggtattttagaggcttcctaatattcacttatttgtaggtg

SEQ ID NO: 63343 - DNA, 799 bp, Cucumis sativus
  Intron number 1 from transcript Cucsa.134470.1 (locus Cucs a.134470) derived from phytozome v7.0 (chr-ID scaffold0104 3; pos 140721 to 141519)
aagttgatctgtcagtttagaagaagctgttggaggtaaatttctcagtccttatcatctctccactttctaacactatgctcaagaaattccttatgccactacaagactagatatcctttccgtacgctctttttgaacttttgaacttccaagggaaattaccaacgaaaatttgggcgatatttgctcattaccctacgcaatgtacttcgtgtcttgttaatatgtagcgatgagccaacaaatatacaatcttttttatgatcttgtttacaattcaatgctgtcgttctgattagccagcgctgtagaagacaattaatctgtcaccctcttccgtagctacctgcggacattattgattatcaattaaataaatagccatgtctgagttaatcaagatcgcggatcgcaaattgttgttgaacaagtttatcctttcgaatttcttcattgtcgtcatcttcttctttcgcctgattttttatgtgggttttttctgtttgcctgtatttagagttctgggttttcgggggttttctgctaattgatctgttgctttgttagcaattaccctgtttgattcaggttcttcgagctccaaatttttgtgttttcttagttaaaacttatttggtgggattccgttttctttttctactcaaagattggcaccaaatcaaccgtgaattttgtctgctgttatgcttaggaaccggaatctagctatggtgctttctcataacatttctcttttacagtcgcaaccttttggaaataccgttgagttgttgtg

SEQ ID NO: 63344 - DNA, 519 bp, Cucumis sativus
  Intron number 1 from transcript Cucsa.116690.4 (locus Cucs a.116690) derived from phytozome v7.0 (chr-ID scaffold0099 5; pos 549277 to 549795 reverse strand)
atccgaggtaatattatataatatcgtcatcattttcatttcctttcttcaaaatcaaaattttccattcattattctttagagagaattctgtaagtggaatccatattcttatctgaaataaaaggataattataattataagaaaagtttgtaaaaaaattagattttgtaaatttttatcaagttgaaatcaaactgaaggtccaggataagaatttgcatgtccataaacgatctaacttttccctcggaaaaggtatagaatgattttcgattaatcacttttctgggtttctcttaggtgttgaaatcaccgagaaaaaagtcgattttactggaaactcgcgcaaattctttgggtttccttcaaaatccctaattttacttttttttttccttttaatgaataatacatttttctccatttctacttatttttcaaactcataggcactgacacgaagctttttgatgaatcaagaatttgcgtgattgaaaagagttgaaacgacaaag

SEQ ID NO: 63345 - DNA, 392 bp, Cucumis sativus
  Intron number 2 from transcript Cucsa.055940.2 (locus Cucs a.055940) derived from phytozome v7.0 (chr-ID scaffold0060 2; pos 120754 to 121145)
tggactcgtaatttgtgtcactggtttatccaaaggttggttatatggcataaatcttttcttcagaacttttactctttgtgatcgctattggttttgtgtcttttgagtttctttgtgaattagactggatcttctgtcagtaagatgaaaattctaatggctttttttgggttgcttaatcaattagtccagtcgtggtggcagtttcttaatagagaagcattgttgaggtgtctgttcgtgttctctatgatgatgatgatttgaaaaattgttgaattggggcttatatgtttttctttatataatttttgcttcaattattgatactttgcatcatgtttttggcagaagcaaggaaacaagttaaggaagctactgagagatta

SEQ ID NO: 63346 - DNA, 813 bp, Cucumis sativus
  Intron number 1 from transcript Cucsa.057980.2 (locus Cucs a.057980) derived from phytozome v7.0 (chr-ID scaffold0061 4; pos 299256 to 300068)
cagctggggtagctggtacgtctttttcttgtcttcaattcttcccttagtggctggagaagtttgttttgtttggaaaatactttcgggaaatgagtcttcacttcaatttggatatacccttttgatcatttttgttataacgtgtttcgaaattgttttgttttggaacctcttagaggggaagtggattttgccttcaatttggacatgcccttttgatcatttttgttaataacgtgttccgaaattggagcttctgtgtttgttttgctatgtcgtttgtttattgattatttttcctcccctgtattttatttctttgaatcccatttcattcatttctgctatttggtatctcattgtatttgttttgattaaaatgaagtttgtttgatgatcagcagtagattaattagattaagttattatgaactctttgtatctgtaaagaacagtgaagggaagggatttgaaaagattcgtaatagccccatttgataaccatttttgggtttttatttaggtttggttcatcgtcatttcttttgtattgtcttcaccttcaagaagaaagggttgaattaacaagtttttggaaattagaaactagttttcctgttttaagtttagctacaaattcgaaaagatgacaaatattgtaaagaaaatgtgtgaaaacaattacactcttgaatgattaaaaaccaaatgatcgttaaactggaactttaatctttattttcctgatgaaaattgtacttttatccatttgcagggcacatatttgcttttgggcttttcctgtcaccc

SEQ ID NO: 63347 - DNA, 890 bp, Cucumis sativus
  Intron number 1 from transcript Cucsa.047910.2 (locus Cucs a.047910) derived from phytozome v7.0 (chr-ID scaffold0054 2; pos 2775795 to 2776684)
acaagaagcgggtttcttgcatcacgccctgcgaggtcagtccctttcgtaggtttttcttgttttttttttttttttttttgttgttggattcgtgttttagtttgttcttggacattgtgttgtagaacttggttttcatatctgcttggtctcaaatttgtgaataacattgaaaatagagataataaggttgatttatcctaaaattgttgaacatttcttaactaacacctcctccagtctttgctaactcctaagcagccgttttaccctcaagtacttcgaaaaaagatgtatacaccttaatctggacattttagaagaaaaatgtgtatgcgcaaattctagccttggtttcaaagaaatctgggttagtttcttttaggttttggccctctcacgccttctctcagtcgattttcacggttcttttggaattgtatattccatttcttaaggatccaatttgatttattggcattgatctggatgcgcgtttgtactttgtagctagctgtttgtgtttaaaaaagagtcgagacttcaatcctctgtattagataagcattcttcaagaccaattagttagttatgagaggagtaactcacctaagattgtgaagtatcttatctatataacgtatgttactcaacaggccaagatgatgggttttagggttcaccgttcttgaggtagatctcaaaaaaaatttcgatcatccatctcaaaatcaaggattaactcatttatcttataatttgaagtgtgaatctttcaaactttttttagtacttgtgtttacaaaaggtttcttttccctgtgtttatggaaacttggacagaacggcatcctgcttacaggtggagacgaccgttgtcttacagc

SEQ ID NO: 63348 - DNA, 988 bp, Cucumis sativus
  Intron number 2 from transcript Cucsa.047610.1 (locus Cucs a.047610) derived from phytozome v7.0 (chr-ID scaffold0054 2; pos 2572356 to 2573343)
tggcttctgtagtcaccgcagcagacaaggtgagttgtttagtgtaatttagtcttgtttgattaccctttagttttttgtttttaaaaatgaaacaaacattactattactcttacttatggttttctttgtctgttattacttcttacaaatgtttttaaaattcaagccatccttttcaattctgtttttgtttccattatgaggttcataattcaaaattttcctaaaaaacagatgaatatttttgtatagggacgacaaaaattcaagtacaattttaaaaaacaaaaaacaaacaattaccaaaataaccatatggcatatattactaacagtttatgagttgaatgtcgataattgaatttatattctaaccaacatgtaaaataacacagtaggaacttaggaataaaccgagggaaaccgactttaaaggtgttattagacaacatgagattttatctcaaaatcaattggtattgaaagaagtagtccattaatgatataaagagtacgaggtcgcttgattttattgtgggatccttaacaaaggtaacaattttaactgctagggttatcggtaatttaatatacatcgtgatgaaccgtctgtgagtgatgaactcagggttgagaagggaaggaacgttgcatatgaaatgcattgttgtagaacgacctcagtaaaccaaaggctacatccaaagttgctttcacgtgtaacaaaatggaaatcaagtagtgcccatgtaacctttgattatacaagccctgtggtcgcttctattctttgccctctttaccctttcatcaacattcctcaatatttttatctccatgatcgtcttcttgagcctttattctagggcaaaatgttatacttgttctcagtagatatggaaattcttgattctatttcaaactaatgacaatgtactttcttctccatgttgctgttgttttgtttccagggaggagcaactc

SEQ ID NO: 63349 - DNA, 569 bp, Cucumis sativus
  Intron number 2 from transcript Cucsa.032580.1 (locus Cucs a.032580) derived from phytozome v7.0 (chr-ID scaffold0042 9; pos 1885331 to 1885899 reverse strand)
tttggggtccctccaaggtcaccacctcatctgggaaacggtggtttgtaactttcattgatgatcatacccgttttacctgagtctaccttatcgccaataaatcaaaggtttcttctatttttcaaaacttctatcacaccattgaaacctaattctataaaaaaaaaattagctattatttggagtgataatgaatggaaatttcaaaaccatagccttagtgaatttctagcctctaaggggattgttcaccaaaactcatgcgcctacactcctcaacaaaatggagtggccgaacaaaaaaattgtcaccttctggaagtagctcgttcccttatgctatccacgtcccttccttcatacttgtggagagatgttattcttacagcagctcatttaatcaatagaatgcattctcgtattctccaccttcagactcccttaaattgtcttaaggagccctacccctatacccatattgtttctgaggttcctctttgtgtgtttgggtgtaccgcttatgttcataattttggctagaccaaatttacccctcgagctcaggc

SEQ ID NO: 63350 - DNA, 718 bp, Cucumis sativus
  Intron number 3 from transcript Cucsa.091360.2 (locus Cucs a.091360) derived from phytozome v7.0 (chr-ID scaffold0089 4; pos 2410741 to 2411458 reverse strand)
tcgaggaagaacgggaagatcgccttcaaaaaaaggtcaatcatctcaccttaattttaatttgaatgtcttcggtcattgttttaaataattagatatatttaaatcaattttttttatgtagacacatcatagatgattttaaaataagtgattttggagagatatcaatgtactaaaattatcatctagatttgttttttttattatttggttaattagtttggaaaatgattttttatttttttaaatccatttgaacaattatataaaataaatctaatactatatttacaaattataaaattagttggagtttaattatctttgtatatttgacataattatggattttaaaataaaattattaattttgttaacaatatatagaatttgaattcaaagaaaaataaaataaaaaatgtttgtttttaaaatttgcacttcttgaatcaaaattccaaaaacaatttaagaaaacagaatttgattcattagttatctgccaaataaatatttgttaaattaacaacaaaatataagcatataacaaaatttgaattgcaaaccaaataacatatatacaaatattaataataacactaatttttaaagtcactgaaataattagtgtatatatattttcataattaacaacatgcattgatattaatacatgttatgtttttgtggttttgaatgggaacagataaaaagt

SEQ ID NO: 63351 - DNA, 738 bp, Cucumis sativus
  Intron number 1 from transcript Cucsa.074410.3 (locus Cucs a.074410) derived from phytozome v7.0 (chr-ID scaffold0078 5; pos 280404 to 281141 reverse strand)
caagttctgtttttcacgttttcggttgttttcaggtgacttttcttcctttttagttgtttgtttattgtgggaaatcatgaaaagatgggtaatgatgggaaatttgttttgctttttttttaatttttggtttctgggtcatttagaaagtttctctacatagttgattggaaatttattttccattgttcttatgtgggtttggtttttgaagttgttttgttcatctactctgtcaccagctagttgggcttgtttgttcttatgtttttgggatgagtagttgtatcttttgacttttacttggggtggaattagttgatttctagaatgtataattgaagctcaatcatgccattgctactagtcaatgattacaatctccttgattctgagacctttccttcagtcatgacgattgatcccattatggttccctgtcacttaccttgcgtggtgggccgggatctttagagcatagtagaagatcacctttctgctagctttcatgaatgtatagcttgaaaccccaccatgccatttcttctgttaaatttatagctagtaacgaacttcggggagctagttttgtaataatctgaatgaagttctacatgacatgcattaggttccaccaattggaagtataaaagtatcgtgttaactgttatatatgttcttattctgattattatttccttctcatgttatgcagtattaagttcttataccttc

SEQ ID NO: 63352 - DNA, 1022 bp, Cucumis sativus
  Intron number 1 from transcript Cucsa.083190.1 (locus Cucs a.083190) derived from phytozome v7.0 (chr-ID scaffold0085 8; pos 135139 to 136160 reverse strand)
attccccctccttttcacttcacttcatatctcaggtaaatcctctatctgatctcactctctttcccttttgattttcatcctctcttcagttctttttatgtctttttcctatcccacctctcttttacacctcctgctcccggattttgaggtttttgttacctttacgctgtttttcttcaatcccatttccctgcttttcctttgttgttgagttcttttggctttttttggatattctagaatgtcatttgaagtggaatgctgttttactgtgaaatcttagatgtgggtgtaaatattgagatgggtttctagtggtttgaagttacactgatgggtttgtgttttcttcgatccagtcgtttttttaaagcttttttttttttttggttagctggagctggaactcttcttgatggttctaaatcttgagcttgtttgtgaatgtgtcttgaccgtttgttggatgatttaagtatcttttggggctagtgatatattggaaccaattgatttttattattactcaatctgctgttatttgtactgtagttatttcttatctcttcatgttttctctgagatttatcactcggggtttattttttttattttttattttgggacttttgatgtgtggagcagcatattgagttcttttcaaccattgggatatcaggagtaactgccaacactggtggtttcttttgtgtacttgaataaatttttaaataacagtttgggaaatcatcatacctgcatatgtctttgtttatgaaaatgacatcaaactttcacatggcttgttaattttgacaattatgctgtttccaaatgtgacaacagcaacaataatgataatagcagaaatgacaacattagtaagacaggtaaccttgattagcgatgcacatttgggttaaactgttgagctcttagggtatcttacatatatcttcaactaactcatatcttgagcatttttatgatgatttcatgtttgaatgttgcaggtt

SEQ ID NO: 63353 - DNA, 749 bp, Cucumis sativus
  Intron number 1 from transcript Cucsa.059920.1 (locus Cucs a.059920) derived from phytozome v7.0 (chr-ID scaffold0062 1; pos 489640 to 490388 reverse strand)
tgactggcagattactggtaaaatcatctttgttttgtttgcttgttacttcataaggtgatgtttgaaaaatcagtttgtagttcttccttgtttgataaggagcgttaaagttatgtctgccattgttatgctaatctaaccggatttgcgtaattgataaccactgacagctccataacaagtatttctacttgcttttacacatgagagtgaattttagagtccgaacaatcaaaaccaaaccaagcacatctagagaaactcattagtctagataagattatttgtatttggacaagcatatgtttgctttttttaatcttttcttaatcttgatatttttaacctttatttgatttttaacttttaattgcacaaatcggctatgcagcttgagaaaatttgcaagggtaatggaattaggaaatgggaacctttaatcaatatgatatatcttatatgtattaactgtatgggccagagtatggaatcaaccttgtaaacatgctgcaaatcactggctacaccaggggagatagcaaatgagtggctattccagccttataagactatgacagaacttgagattgttataggatagattgagttatatcaaaaagaagaagtgatgttcccccaatcttttgttgtcaagtaaagctaacaaaagttgataggttctgaatgaatgacaagacttttattcttattcattcatttgttattaacttattattattttgcag

SEQ ID NO: 63354 - DNA, 741 bp, Cucumis sativus
  Intron number 1 from transcript Cucsa.112440.4 (locus Cucs a.112440) derived from phytozome v7.0 (chr-ID scaffold0095 3; pos 1019708 to 1020448 reverse strand)
gtcttatcccctaactccaaaaccctagcccaaaggtaattcactccttcctcttcgctcttcatctctttctattcctcgtcttaaatctgttctcccctttggttcttcgattcttcttttcttggactcttttattctttcctcatggttggccttgtaagtttagacgatgtttttatagattggtttgtcctgtttctctatctattcgcatgctagggttttctttttgttttctattgtgctctacttctgcaaggttgtgttctttttttcttcttcattcgggtcccttttcttaaccgatattaaattaatgcaaatttgtttgggcttctaattgggaagccttttggaatatctcgacattttgattgctgcatttcattttgggtatatttctatgattgaaggatgtgggtctgttcactgcatgcttattacttatgcagctatgcttattgagtctcagtacggtgggtttgtttgtttgtgcaatctgtttccggattcataatttttgagcagtagatgaaaaatgatatttgtaaaattccttgagtgttggtgggtatctgctcctgctatttgcttttggattttacttttattatatctggattattcgaaatgttctgttcttgttataacttatacccgaagatgtgttcctccctgcatccagctttgtgggttacttatgatggacatgatttaattctgtttggtgttgtgcag

SEQ ID NO: 63355 - DNA, 587 bp, Cucumis sativus
  Intron number 1 from transcript Cucsa.033020.1 (locus Cucs a.033020) derived from phytozome v7.0 (chr-ID scaffold0042 9; pos 2316229 to 2316815)
aagtggtccggcacttcagttctcctagaagctgggtacttctgcttgcattttccctttcttgttttgtaatcgtttatttgaagataatgtattggaattttaatgagaaattctttttgaagaagactgattatatgaatgaagtcaagcttcatttgttgttcttgttttggagacattgggagaggtggtttattatttggtagcggcaactttagttttaaccatttttcggattttttttagtgagattcaattttctcattcagggtcgtgaaaataattgtcagtgagagcaatgcttgtgtatgagtatatatttttcatttcgttggtggcatttgtttgttttcaaagagaacatgttgtggtcttgtctgaaagatgagttgttgtatcttacgttatatttaaggcattgaagaataaatgctcaaaagtttcactgattatttggaatcaaataattattacaatattcatcgtaaatgtgaatggagtttttggttttacacaatgtagtgatttctatattcttattgactacagcgaattacttgctaaagaacaaaaagacctttact

SEQ ID NO: 63356 - DNA, 818 bp, Cucumis sativus
  Intron number 1 from transcript Cucsa.009110.4 (locus Cucs a.009110) derived from phytozome v7.0 (chr-ID scaffold0012 3; pos 42072 to 42889 reverse strand)
ggatcatgtaaattctctctctctgatctctctctcttcttgttatttctatctataatgaacatgtttaggaaggatttttgacgagttatgtcagcttcattttaaaacagtggtttttacattttttgttgggtgttttggaatcatttccttgagatgtattgcatatatatgtgatgttatatctcaaaaccaatgaacaataagaaggaatatatttgtgtatgatcgaatacttgctttgagctacgttagcaacaaagatgattattgattgatgtattgtctatcaatacttgtcagttttgatgaaggtagcaataacaactagccaattaaccaactagtcgattattgttggtattgtatgtgggataagttgatgaggaaaaaacaagagaacaaagaaaaagatgagagctggagttggtatatatagaggaactagaaaaaaagattaaaaagaagtagttaggggcaatgagaagaagaaaatagaagagaaagaaagaaggaataattaggagaagaaataaaagaaaaagaaattggcaggaaagtaaagaaaaatgaaaatgaaagaaagaaagatcgaaaaagcagaacgaaagaaaaaggagagaaattaatgaacgggaaaaataaaaggattgaaaatggagaaggggaaaggaaaagataaaataaaataaaatgattgaccatatggtggctaaatttagaagtatatttaatatttcattttgatgctttctttataattaccctaactttaactatcttttatctttcataatattaggttgctgtacagc

SEQ ID NO: 63357 - DNA, 957 bp, Cucumis sativus
  Intron number 1 from transcript Cucsa.124230.1 (locus Cucs a.124230) derived from phytozome v7.0 (chr-ID scaffold0100 1; pos 223052 to 224008)
aattttgcagtagcgatcttgaagtttgtaagtcctttcgtttctctttttttctttatctctctctctcttcctctctattggaattgatttttaaggtggtggattcttaggttttggggttctgtgattcttctttatccctggttttggagtttgagactctgctgatttttcagcgattagggattgcgtctgaaggggaatctcttttttcttgactgttcattatgaaaattctcattaatttgaattcgatgggccactgatcccatttatttttttattgcttaacgaggaaattaatctgaaatgatcaaatggatggcatttgggcttttcaaatcttctctctaattttttccggaagattggatatttgatataagcatgcgacatcttaatatgctataacttgtttcagataagatctgggctatgaagaatttattggtctctaacaccatgctgtaacttgtatgggtggtttggcattgaagattgtttgcctgagttttgtgaccataatcacagcctttataattggtttcaataatcaagtttccaatgtatattttacatagaattcaaaagtcttatgcctaatccttaatcttccaataaataaccattctaatcctgggtgtcagatggcttgaattacaataacaaaagaaattcttatctatccttgtattttcttggttggcatgtttctcttgatttctcttcaatgtggagggtattactgttaacttttttttatcagggagggatttctgttcactcctaggtttctacttcgattacagagagaattagggactcagattttcatatagaaaagggatcagtatgggtaaaagttgaaatgaatttagagaaactaaaacaaagtgactgacaatctctgtttgtgtaggtcttcttggaagtgtggctccttgcattctgtat

SEQ ID NO: 63358 - DNA, 514 bp, Cucumis sativus
  Intron number 4 from transcript Cucsa.121790.1 (locus Cucs a.121790) derived from phytozome v7.0 (chr-ID scaffold0099 9; pos 218393 to 218906 reverse strand)
gaagaaggttggtcaatttactagtcactgtgacgtatttctcttgcttatagaaaatcgtgacttgtttggcagtaaattaaaagataatttttagcttttagtaaaggaggaatgaatgagtgatggtctgtttgctgatctgtgtaactatcctgctttcaatcatgacaatatatttgatggaagagctgatgtatatcagttactcacttactccaaaaacacaataacaaataacttttttgaggactttactgtggtaaattttgaatttgagggcagaggatcacacccaacaaacccaagctaaccaccttgaataacaaggtgacggcgaacgatatttctattttgatttcagataggcttgcttgctttaagaatatttctttagttgcgattaagctatacttgtttgtataagaagttcaatttgttttctgtactgtgaatgaacaattgcgctacttttacagtgaaggagaacacatctgctaaggagaaggaagtt

SEQ ID NO: 63359 - DNA, 628 bp, Cucumis sativus
  Intron number 2 from transcript Cucsa.090680.2 (locus Cucs a.090680) derived from phytozome v7.0 (chr-ID scaffold0089 4; pos 1876197 to 1876824 reverse strand)
catttaaaacatttaaaggtaattgtatacttatgtatgattaacggttttttttttcatctgctccaaatttgatggtttttcagtattaaggcgcagaaatataatgatttgatgaggattatcctaactcttatgagttaataaaaataaaacaagcacacataaacttgatcacactgagtgtgttctttggcactcagtaatgaagtaatcaacagtgatttgtaccattaagaataccttttgtgtgtttaaaaattattccacaactgagttaagttcacttacaatatattttcttacaggaaactattcagttttcattgtaattaaaatgaatgctaagggcattttttaatcacccatgaaaagtggggtgcaatttttttgcagtggacctggtttttagattcctactagcgtggttaggatgtggaaacgttgtctgtggtgtttcatgtgtgtacgtgtttcttggaagagtagttgtaatttgctcaatgattttgtttgtgtattgcttctttgaatgttggttctgtgcaatctgcgatgattagatagttcattttaatgaatgtagcctttgtttttgtttctacaagtagatttggaacccaagtcc

SEQ ID NO: 63360 - DNA, 574 bp, Cucumis sativus
  Intron number 1 from transcript Cucsa.124260.1 (locus Cucs a.124260) derived from phytozome v7.0 (chr-ID scaffold0100 1; pos 237404 to 237977)
ccccaagaagaagagaaatttgccgggaaaaccaggtctggttttgttgctctctctcttgatattttatctttattttcagctaatttaaatattttttttgcgttaaccatttggaaaatttcataggctttgattcattgtttactgaaataagaaaatatatgttgagacaaatacaagaattttagattaaaaccctttgttttttttatgaatttaatggagtgatttttttttattcaatgttttatttaaaaattaagctttttttttattaactactttttctattgttccaaaaactaaaagaaatagcttttataaacttggctatacttttgaaatttggattagaattaaaacaaaccaataaatgatacaacttggtttttattttttcttttcaaattatgtttatcaaaattattttcacctgtaagtttctatatgccgtcatctattttctaatagaaaaatattgaggtgcaacggaggctacacagaagaggtaattgttatcaaacaaagatctgataatatatgtatatggtgtatcttcatgcagatccag

SEQ ID NO: 63361 - DNA, 809 bp, Cucumis sativus
  Intron number 2 from transcript Cucsa.121880.2 (locus Cucs a.121880) derived from phytozome v7.0 (chr-ID scaffold0099 9; pos 279359 to 280167)
tcttctcaagtttgacaaagttactgatttcgctggtatctatttcctttctttcttaacaatctgaatttgtgtttccgaggaattcggggtagagagaatggttggaatagcttttattgaaggtttaggttttaaatttttagtatcctaagtgaaatgagactgtaaaaaagaaactgattccgaatttcacagtgaggaattagttggttgtttgtgtgctgggaaatggtgggggcatatgtcttttcatgtactgggtatcattttttagttttgatgtcgatttatgaagtttctgatttacaggtagcacaaattttgtgatacttgctgttttgactctagttcttaaaggaagttggcattttagacaggtaaagctatttgattttgtaaacacgtttgacatctcttcattcacgaatccgctaaatttgggtccattcctcgttttaattacatcaatttccccatttttggtaaccttccttctgcaataagtgccaatcacggtttcaggacctgtgaaaacaatcgggcattgggtttaattctatagttttgatttaccatatgactgaagaagaaaccttggaggagttcctttttcgcgtacttcactgtcagcattttgtgctgctcatgttactcttgttctctttttggtgtatccaaactggatattatatgaaaagaagttggtgttcaataatgtagattttcttttttggtgtaaaacagttttctgacaaattaatttatggtttcacttttcaggtaattctgtctgtgcttgtagtggc

SEQ ID NO: 63362 - DNA, 536 bp, Cucumis sativus
  Intron number 1 from transcript Cucsa.113720.1 (locus Cucs a.113720) derived from phytozome v7.0 (chr-ID scaffold0095 3; pos 1814618 to 1815153)
ggtatgttttttcttgtcttcttcacttatttactttatgttcggtgatgagtacgtcagtcgtcacccattccaagatattgctgtgaactttttagcttaaagtagttgaacacaaatactttttgaaagcttctttttatcggaagatcaagaagaatgaaggtactttagcaggggaagaatagacggctagaaaaataaatattcgtagtccttgcagcaaagctgatgtttcatcgttaaagacctcggctcataccaaaagtcaaacttttaaattgacttgaaaatgatgatgtgggttacttaatgccacttttgaatgaccaagaaatcatgtagcacaactgaacaagccacatacagatatgattataccatttctgactgtaaattaggattctcaagtttacgcatctgaattctggtcattttgtgtcgatagcatacagtgtttgtcatgatcttggagatgcctttatttacactaacatggattttcaccaacatatagattgtattatacatacata

SEQ ID NO: 63363 - DNA, 930 bp, Cucumis sativus
  Intron number 1 from transcript Cucsa.105860.1 (locus Cucs a.105860) derived from phytozome v7.0 (chr-ID scaffold0092 9; pos 326545 to 327474)
aacttgatcgctctcctcccagtcaggtttgttactctgttcttctatctgccgcggaaagggatatgaaatttatgaagctttagattaagttcattttagtgtcttttggagtttcgtagttctttaatgtttgtgttgtagatttttatttgcttggacgagtttcttgagatttataattgcatgtatggatgagttttgccctcggtctttcatcttacaacatgcggacattttcacgaacgattacaaaattgagcatcgctgcgtttttgtggattgttctaatggggttttcgaggagaatggctctgcactatcatcttgctttacttgaactattaatatttttgggaatggaggtgattattgaacagaatttctggtcttgtacttttatttggtttcgtggtcgtgtgattaatatagtttcataagtaactgtgcaagttagtaatgggcgtttgggattacatattcatatatcttttgtttcgatgcttctttcaaattttaaatcacaactaacttaccataacccatcaacttaagctttttgatacaatgtaatttatcataacccatcaatttaagcttttggatcaacaatcaaatcccaaaagctttaattttaaaattaggacaaattcaatcctatatcaatactttgacactctctcgattgtgagttgaaaatttgctccatgtccaacaaatatttagtgatattaatttgagaaataaatgacattacggggggtttgcaatatcatgttatgtaactgtcgaatggaaagaccaagtcgatcggttacattaaatcgaatacaattaaaagaagaagaaaaaactactagttttgtacttataattacaagacctcttcttattttcagcctgttacaaaatttggggcatttactgttg

SEQ ID NO: 63364 - DNA, 499 bp, Cucumis sativus
  Intron number 1 from transcript Cucsa.050830.4 (locus Cucs a.050830) derived from phytozome v7.0 (chr-ID scaffold0055 7; pos 55384 to 55882)
aatctgcggggttcggtttctgtattcttcaacttttacatgggatcattactattattctattgtcatgcagttttatgaactgggtttatttatttatttattttttttcattttcccttctcgatttgtttgatttctgaggtatttcagtggaaattgctgctgttactctggtgtaacttccattctttgttttcttttttgagtttgtgtacacaactagtgaagcgggggctggatatgctgtttatggtttcagaaatttgttgttaacagtacaatattagtgagctagtgttgtgtaattttttgttgttctaatccttgtctaagagaaaaggatggataatagaatgagattttggtgttggggagtatgaagtgtaaagaaaaagattgtttctgctgagagttttagtttcagttgcaacaagttaatcacttgtgttcatatcttgcagattgttggggacaattctctctgtagcagtactgt

SEQ ID NO: 63365 - DNA, 934 bp, Cucumis sativus
  Intron number 1 from transcript Cucsa.094080.1 (locus Cucs a.094080) derived from phytozome v7.0 (chr-ID scaffold0091 9; pos 293272 to 294205 reverse strand)
gatctataggtaaatttatatatatatatatttgttcctttttatgaataatgttattagtgatattttacttttttttttaaagaattaatttagtgcatgttagtgaaatctaatgtttagggattatgaagatgagatattattagcgatgtaagactattttttttttaagtagttgtcgaacaaaacaataattgatatttataatgcttattcactaccttaggtttagtttaataaccctttggtattttgtttatgttttttaaaaaagctgagcttatgaacgttagcttcatctatgattttctacatgcattatgctatttagagatctataaacactttagaggacggtagccatttggaaaatatttacaaatatagaaaaacgtgagtgtaaatagtgatattttgctatatttatagatgttttggtttatttggctatatttgagaacaacacctagaagaacatgtctttataatttaggatagttttgattttttttcaaatttaccttagggtttgaacatttttcttccttggagatgaaacccaattttctatttgagggatcttatattttagtgtcatttttgcaaaatagaatttagtttgtccaattttagtccctatactactaatgaattgttttgaacagcaaaaatgttggtaaccaaagaagggctgaagtgttataatctgaagtatatattttcagaatgaaatcatccttgcgcagtcctattgactattatgtattgactctttttatttttcaattttagtcaatgtcagtggaaatatcttaatatttattgtaatgtgattacataataatgtaggtcattagctggttgaattacgagaatcagtattttaattaaagtactaattgaatgtgtgtttgaacattgtcctataggt

SEQ ID NO: 63366 - DNA, 754 bp, Cucumis sativus
  Intron number 1 from transcript Cucsa.095680.2 (locus Cucs a.095680) derived from phytozome v7.0 (chr-ID scaffold0091 9; pos 1555208 to 1555961 reverse strand)
gcctatacctcacctgagtgcttgcaggactgcaggttagaattctattcctaactaacacgttcatttgatactcgtttcattttgattcatgtttgttcttgtgttttgaaacttcgatgttgaaaatgttaaactactggtaaaacttgtgatgaatgatgatgttatagaattgtgatcattggacagtctgttttcatactacagccaagtactattgaatccaaaaggctaaaaagttgagatttttgttctcttattagtacgaaaatgatttagtggttgggatatcttttggtgcttatgctaaagcttaagataggagtttgaaccaaagtccttttattcttggtatcaaattaaactactattagaagatgagttaacctatcccggggaatggcgacttgtgaattaatatcctcaagttttcttgacaaatgaaattaaaccacttctaaattcaaaagcttatctggtatttaatttttaatgcatcttctttggaaggaaaaaggtttaggccaggatatcttgttaaatgggtagcatatagtacaagaaaattaatgccgaaactagagcaaactaatatcactttgataaagatacataagtaaggatattcagagttactctctgtttagaatcttgattgatgagcacttgtttcgaaaagtagttgattcgacttttgctgtttcaagtttaaacaggtatagcgataagagcgacatcttcagcttcggga

SEQ ID NO: 63367 - DNA, 509 bp, Cucumis sativus
  Intron number 1 from transcript Cucsa.120530.1 (locus Cucs a.120530) derived from phytozome v7.0 (chr-ID scaffold0099 8; pos 2609725 to 2610233)
tgttggtgaaaatcattgtagcattgctacagcgagtaacaagaaaaatggcgcctgtgttagaaacaaactggtgagatacacgtaatggtttattatttttatgcttttctgcttcctcatttaaactttatgcacgattactttcagtgagtgcataatataattttgacatgaatattctacagccttgagagtgatatccaatttgatcaacaaattattgtttcattgttgtgtattactaataaatctaacaactcgttaggttcgcaatccacttgtacaactgaagtcaaaatacagccaattttcatttagctatcgaaggatgcgtccattccttgaggatctcttcaaagataatccagagaactgtatgcatcctctctcacaattataatatttctttcataatgtcatgcttgtttctaatgctatagattatctttaatgaatttttatatttttcaggtgactcgggaaacatcaacagttcggtaccagag

SEQ ID NO: 63368 - DNA, 962 bp, Cucumis sativus
  Intron number 2 from transcript Cucsa.135430.1 (locus Cucs a.135430) derived from phytozome v7.0 (chr-ID scaffold0104 4; pos 304141 to 305102)
gatattgttttccctgattggtccttttgggggtaattattttcttttccattatcttctctttttattcttctatttccattttattatcattacattttcaagtcttccattcatattatatattggtaaaaaaaaagtcaaaatgttaattatatttactaattattttttaagagctaaaattactctttaaaatgttgttaatggtataagtatattagggatgttgacggctcggtttgattcggtttaaagctgaaactatacctaatggcaaaaattgaaaagaaaaactcatgcatttggtttcgattggtattgaaccacattacattcgattttagttttcagcttttttttttttaatttttgaaaacccctaccatatataaatatgagttatgtttttaataaagggtaattttggatcttctttttttaatatttatattttaaaatataaatattaaaataacctaaagtttatcctccaaaataaatattttgaaagtataaaaatcaaaatgaatcgaaattgaaagtatatagacagggcgtgttatcaattatgaagtagtttgtaaacattttttttttaatacaagttggtcaatggaaaattttccaactttttggttaagtttaagagtctatttgagtgaattaattcaactcagttaggtaaagtaaatgtagggttttcttaaaacttaaggaaagttatttaaagtactaattaaacaaaacaacaaacttattaggcaataagtacaattattttttttttcttaaaacaaaagctcaaactatataagaacaatgaatagattaatgggtaggtactatataagaacaatgaagaagagttgtgaaggcattatatattgaatgtttaattaatttgttaagtttattatttgatattaattaggggtgaaataaacataaaaccttggaaa

SEQ ID NO: 63369 - DNA, 567 bp, Cucumis sativus
  Intron number 1 from transcript Cucsa.059010.1 (locus Cucs a.059010) derived from phytozome v7.0 (chr-ID scaffold0061 4; pos 1116706 to 1117272 reverse strand)
acaagttttgcgagtccctgaacgcagcaagtgtggtaatttcccgtgtacttcccatgtgatttcgatctggaattcgtatatgtatattctgaggactaatggagattaaactcgaggaaacttttgcacatttcggagttccagcctccgatttgttcattattattttttatttatcttttaattacagcaaatatagttgtgattgaatctgtaggactatttttcttcaattgcggtagccgcgagcttgtcgttttcttcaaaattttctgtcttggacagtcgattaccgagacttattcgttgtggttatcagtgtcgcttttgacttttctcttgtagaatcattacatgttgaaaattgtggaaactgttttcatttaattctttttttcctcacagtatcgatgctacattacagttgattctacattatactgccaactaacgaactcatatatatctgtagaaagatggtcgatcattaaaaattgtaaatagagtttgtttatgatcgtataatgataaattctgtgggggtttgtttagaatttagttgag

SEQ ID NO: 63370 - DNA, 841 bp, Cucumis sativus
  Intron number 1 from transcript Cucsa.133100.2 (locus Cucs a.133100) derived from phytozome v7.0 (chr-ID scaffold0103 7; pos 898335 to 899175)
cttgtcagatcggcaaggggagctggtaattcaaggtgggtctttttcttcttcctctctgtttttcatcttttttttttctttttagagtttcagagttttagagttttttttaatggtggatatgaattcccttgtcttctttttcatcttttttgctgtgttctgatgaaaatggttcttttttgttgtcttttttcttcttctttgatggctttgagttgttttttaagcttgggggaaatggggttctctagtatttcaatctttgtgtgtgttctttttctttcttttgggtgtggtggaattgggattttgaattaacccttttgattttgtgggtcaattcaaacttttgaactttccttttgcattttgagcttatagttgaagctttcttgaggattcaatttgatgtttctcttttgttccttactttttgtggagttttttttgggaaactaattgattttcttagttcagaagtcaattcctctttttataatatagattaaataatttggttggttgttgtcgagaggctttttgtttcttttgaaccaaagttatatcaagttgagtgagtgtaagtttgtaatttttgtatttgagcttcttttgattttggtttggaaaatgatacctatttctttttggaggattttgattgcgatgttgttggtgtttttggtgcagggtcatgggtagggaaattgttggtgatgtactggagaagccaaatgatcttgtagtggttttaaatggcgtttctcatgaaaaagcccatgtttcccccaaaatttcagaagaaagtattgatttggaggaatacgaagagaag

SEQ ID NO: 63371 - DNA, 734 bp, Cucumis sativus
  Intron number 3 from transcript Cucsa.066290.1 (locus Cucs a.066290) derived from phytozome v7.0 (chr-ID scaffold0069 6; pos 827776 to 828509 reverse strand)
tcctaaagcaaaagatcagaagacaaattctaaaggtactggaccttgtcatttggcctagtgttttccctttccctctatttgtaaattgatgctatcttcttcacttgcgttttgctgtattttagggagagagagagtggtgtatttatggattttgaatgtggtgattttaggattttgtaattattcttctcagcatgaaatctaaatagaaaacttcaagacatgggtaccaggattatatatctgtatagtttctactataacattatcctctcttttgtttttagtgtatgctgtggttttttgatctctctacctcaacatgccaaactgtcttcaataatttttcttttgaatgatttcttcttttgttaggctcaaacttgtcattaggtttggtagtaggatatcattttatgttcattcactagattcccgatcttatagtaatttatacttttgagcattatgttattcagatttatgtgtatgtttttgccaccaggttttcttcttctcacaccttgaagtgtgtattatctgaactgttaccatctttttcatatttggaattattgtacactttttcttttagttattcctaatcacatccttcactgttttattatgccattgctaaatagtgttctgatcttacttagacttatgttttcttcatgtttcctttgctagaagactctaatagtggtcacacagattcacaagag

SEQ ID NO: 63372 - DNA, 725 bp, Cucumis sativus
  Intron number 1 from transcript Cucsa.099680.1 (locus Cucs a.099680) derived from phytozome v7.0 (chr-ID scaffold0092 6; pos 386597 to 387321 reverse strand)
ttgcggagggatctaggattcaagactccgagaaggtactgcaaaatttgagggtttttcatgtgctatttatttttggggtttttttattttttattttttatttttggtggggaagtgggggttgatcttgttaaggcgccaattttttttgggggagatttgtacgttttttttttttcctttttcaatttggttttttgcgggtgtgaggagaaaaatacgttgacaatatttgaaagagtttccttgaatttcgcacttttgaattttgtagttgagtttttgagtatctcagtcaaggatggttgacttactggatttgaaatgggttaacgctggcttttagttttggttcaaattcttatcttcagcatatttaacttttgatgctcacaatttgatatattagcatttactgggtacttacttatatcttccttaaaaaccatatgatttgactgtcgtatttttaaacgaaaaagttcagatttgtcttttctccccttaattatttctatggtgatagatgtgttctttttttttttttcccattcgtggcactctgattcctagtcctgtttacctttttaattagatctattctgtttctgggagcctcgcccataatgggaaaattatttgcttagtgtaactgttgccattggtttattccttttgatgtttcagggtgaaaagtccatttctgctacaaacccatcaga

SEQ ID NO: 63373 - DNA, 554 bp, Cucumis sativus
  Intron number 3 from transcript Cucsa.102080.1 (locus Cucs a.102080) derived from phytozome v7.0 (chr-ID scaffold0092 7; pos 1175072 to 1175625 reverse strand)
cggattcgggttattcttattccgattctgatgaaagttcagagagttttcgtgaacattcgaagaagaggaagaatgctttagttccatgttggctaaatcgtaagaaaatgagaaaggacggttcgtctacaatcaaaatagaacctgcagatgcagaagaaggtatgctattttctccttgtattgttttagattgaatggtttatttatatgcatttatgaaacaagcaactttttaatagagattcattgtttgataagctatgtttctggaatagtattcgttttaaaaagtagtgtagtgtggtttcatggagtgataaaagagtgaagttatatagttgacagccgtagagttttaagttttaaccataggacccactatttaatggaaaaataccattcttgtccaacgtttagagctttttccacttaattgtggtatttcatttttagtactcactttcgatggttgatgttaaattgttttatttaatttataaaaactaaattagtggtaattgaattagttttcaccaagtctttaaaaa

SEQ ID NO: 63374 - DNA, 899 bp, Cucumis sativus
  Intron number 1 from transcript Cucsa.112480.3 (locus Cucs a.112480) derived from phytozome v7.0 (chr-ID scaffold0095 3; pos 1043582 to 1044480 reverse strand)
ctgccggcgcttctccggctacatactcgtttaaggttaatcatctactcatttccattttaggttttcttcttctttacttgcttcttctatttctcaatgcgattggtttttctgtttgattaccttcttttttcttgctttcttcatcttccactctctgtggatctactctatgtttccgtcttctttgctttctcggttgctttcagaactctatattctcggatctttccgtttctctcacttcttcctttgcgttttttgaactttattcctctttcgtcggtgtgagatcgatagatcctgttcagtgatttactgatttttagttcctctcaacgtactctaaacatattttcttgtgctacgtttagggttttgtagttacttgttggttttgatgtcaatactatggctggaattacttttatcgttagggtttggtttctgcgctatttcatcttttattttgctgctggttctctggtgaacgcttataattttcctgtccgtttttactgtctcaccgattagaaaatactgttaaattctttgatctctgtttgacttttcttttcaaaatccttcgcattgatattttttgtttttagtttcatttcttattatttttaaagaaagccactctgatcaagcattgaggaaatacgaatttattctgtgttttaaattagcggggaatatttttactcggattgctggttatgtcgggtttttattattgttttacagttctatatgtatttgatcatcaggaatcctgttgtttgtctatagtcaacaataagtgtgtgctgatagaatgtctgcgctacttttagtcatcatttatcaattctaactcgtctggttcagctctccattttctcgtagtgatc

SEQ ID NO: 63375 - DNA, 987 bp, Cucumis sativus
  Intron number 3 from transcript Cucsa.052870.1 (locus Cucs a.052870) derived from phytozome v7.0 (chr-ID scaffold0057 7; pos 272682 to 273668 reverse strand)
ctgaggtaaagtgatgaacatcttagcttttcctctcatcatatctggaagtgctttttatgataattaaaattagaaaaaatagtttgattagaactactttactacaaagtggtttattacatagctttgaagaacaaaaagttttcgtatttctaagcattttcccgagtggctatagaagagggagattgttattgatgtgaaacgttgagttgccaatatgggtttggattttccgggagaaagatctatttcataaatcagttaatggattggagtcggggtgatccctgtggtgatcccttttatttttaacgctagaggatgtttaattggaatgccttaaatttgttatttggtgctccaaacgactaatggtccgtttggattgaattaagaaaaaattgattttggatagtacattttcttttaaacactttttttaaatgaatttaaaatctaaacacttaatgtttggttagacttcttttataagtgtttacatgtgaatttgttttttaaggatttctctgtaatagattattttataaatgaattttaaaaatatgtatcattttaatttaccaaacactaccatttttttcaaaatagttgtatttgatttatgttatttaagattttaccttaaaagtttagagtagaagttggttgataaactctcaattctatgagcacctttggtctataacttgatatcttctatgtaataataaactgctctcctctgtttatggacaaactaattgcattgccattgaaccatgtatttgcgttgattctctaccatttacattttctgttatatctttatttgtcgaattcttaacgtgtctttgtgaactaattggagagatcattttgggtttgctcataattcagtttttaccttcagatttatattaatatgtggtacatattatcataacagccgatcaggaacctcaaagtcgaactaaagcgtta

SEQ ID NO: 63376 - DNA, 373 bp, Cucumis sativus
  Intron number 2 from transcript Cucsa.063210.2 (locus Cucs a.063210) derived from phytozome v7.0 (chr-ID scaffold0066 7; pos 67695 to 68067 reverse strand)
gaatagctgcgcagggtatggctttggattgaaacttgaattttaagaacgttagttttctgccccctggataaaagaaatttgttgtgatgtagatggtgtgctttctgttggtgagattcactatcgattggagtagagccacatggcatttgttgaaagttcatcatgcagaaaattttctaatgagtgttgcactatttgatttgtgttcattgtttctttatttcttctctggagttatcatttgttcttcagaaaaatgggtttggtgaggtgttgaagatacttaatggttatcaaaactttaggaactcggtttatggttgacgatgagaagctaatagatctaaaatcttataaaatatgatct

SEQ ID NO: 63377 - DNA, 634 bp, Cucumis sativus
  Intron number 2 from transcript Cucsa.134540.1 (locus Cucs a.134540) derived from phytozome v7.0 (chr-ID scaffold0104 3; pos 198673 to 199306)
acgaagcggtaggaagattgaacgaactagggaaggtagcggaccacgatacgatttttttcatttctctgtttgctaagatatgcgtgcgcttgcaaatgttttgaacttgttagattcagtgagtaattggacgatttgcatgtggatcttcgtctgttttatgtgattctgctgtagttttctattcataatataaaaatgtatagtatggaccatgtaaattgattttgttgactgtttgggtcctttgaagtatccccttcattgattcggatattaaaaagttccggctattttatataattttattattctttcttagaggtcttaatgtaaattttgattgaaagacttggggaatttcccgatttcttttttatctctgaagttttttccttggttgctttcgttttcaatcatcaaacactttattctatgccctactgcatatattatagcttagtgcatgaaaaattgtcctccccttcccccagataaacctgatgaacaccagaagttgagttctaatccaactagaaactgttcgatggtgagttttctgtgttgtgttaaatattccgagttggtaacacgagttgtcttacgattgttcccaattactaggtgagtg

SEQ ID NO: 63378 - DNA, 627 bp, Cucumis sativus
  Intron number 1 from transcript Cucsa.043040.1 (locus Cucs a.043040) derived from phytozome v7.0 (chr-ID scaffold0054 2; pos 5282 to 5908 reverse strand)
ccaaaaactccttacttcaggtcttcttttatgaaaaagaaaacacacacatatatttctgttcttcattttctatctatcacatcctctttatctcaaacaaattgtttacctaaagtttgacatgctccttttttgtctcattatttttagtcctttaattttttcttttaaattacaaatttagtctttcaattttgaaatttttgtgcgtctatatatatattttattggaatttctaaattacaaattttaatctctagatctttttattttaacttttatgctttttaagtttttaaaattaaatctataccttcaatttttttacaatagtgtgtgcattttgattaaaagattatagttgtttcaaaaaaaaaaattaaaaactaatttctatacttgcttttataaaaaaaattgtaacaaaacaaattgaaataaaatgagcattttatagacttaatttaaaaaactaaatcaaaaaacaagtcattactgtgtggtctttatctctttttttctttttcttttttttaaatgaatgtgaattactacaaagtaatgctaactattaatttcttttttggggggacaatcttatagcaaaaggcaacatccatagc

SEQ ID NO: 63379 - DNA, 476 bp, Cucumis sativus
  Intron number 2 from transcript Cucsa.034500.1 (locus Cucs a.034500) derived from phytozome v7.0 (chr-ID scaffold0044 4; pos 263064 to 263539)
ctaacgtgcagcttattgttgaggtacttcatctttccaatcaaatttgcattattatcttctagtccaagcgttggccacatttaataaatgggctttgtttctcctggaaaagaagggaaaaaaaaaagaagaagaaaaaactctttctttgatcatcaaagtaattcgaacaagcaaatcctcatagaaggttatgaatacatgtttcagttcaatttcactaaactctaaaacagccaaagtgtaatttagaaattccaaacgtcaattttactattgacattgggctttatgatttgttgtggaaattgtgtgttttgagtcctatcaaatctggattgtatttgttgtgaagatgctctcacactgattagaaattaggtagcttcatgctcattacatgtttttattttttagggtttttttgtcctgatataaagatctttgtcatattaaattggtccattatgtag

SEQ ID NO: 63380 - DNA, 980 bp, Cucumis sativus
  Intron number 4 from transcript Cucsa.130390.1 (locus Cucs a.130390) derived from phytozome v7.0 (chr-ID scaffold0102 9; pos 383469 to 384448)
atatcaaggtatgatggaaatttggtgttaggtttaaggttattttctcttctcaacctccaatatatgatatttatagcgtatataatgcagtcaggaatatgtgtttgacaaccaacctagatttaaaaaaaaaaaaaatgtttccaaattttgtgatctaaatggtgaaaaatttgtaaataaaatgtgtacccaaaatttgaattttaaaaccaataggtgttaaaaactttcagaaatacactatgttatataataaactcaattatctttcaaaaatagtatatatatatatattatataatgttaacaaattatataatattacaaactaataattatatataaattttttaaaacttaaatcatatttataagtaattgaataatagtttattgtcaaatatttgtggtaactacgattagttttagttttattgcattttgaaaatgtatattatcaaacacattttaagagattgtttgaattagaattcaatttctgaatttgttgtcaaacacgtagctgtcaaatttatgtttctaaactcaaatcaaattcaaaaaaacgaaaacataaatttggattttttaaaatatgggtgggtgtatgtagtgtctataagctttattttcaattacaaaatgtttaccaaataggactctatcaagcccttacaattttatttttctatttaaatccctttaatatttgttataaataatttatttaaaatcaatgacagagtataggaagattttcttttttgttctgtttgcacaacagactgtttcaactacataaattttatgtgtcaaacggagaccttaggacaggcagtaattgcatcacacctacaaaatgtgctaaaaaaaaatgtgaaatcttagttaatttcctttgatgatgttttttcttacagtgacaagtgaaactttctgctcttaatgtcattcacgttcttatttgttgtaga

SEQ ID NO: 63381 - DNA, 694 bp, Cucumis sativus
  Intron number 1 from transcript Cucsa.108860.1 (locus Cucs a.108860) derived from phytozome v7.0 (chr-ID scaffold0093 1; pos 1154726 to 1155419 reverse strand)
gggaggtgtcgatactgagattcttcagcttagtttgtcccactttaactcttgaggtctttttcgttttggttgaactaatttggaagaaatagagatgtatttgaatgtagtgtgcactttggttactgagaagtcagatgggtgtctgtgtgtttgacgctatagcatatatatgagtttctgtctctcactttcgttctttttaatttttgccattactaatttgggaatattacttttgatggggaaacctattcctttgtgttgaatatttgtgattgatgtggatttttttttttttttacttaactagtataatttgtcaactagcaatgtagttgggagtataatattaactcaattgtctagattttccttccttcattgtttgtaaggctggttcagccctgtttgaattgtaggctgtgttttgaatggcaatgaaggatatggagaagatataaaatatttacagactacatagttgcttatgtctgttctagctggatggatctgatatcattttaaatttttcttgggaaaattgtcttttgtgtatcctactgaactttactggttccatgcaaacctagtaaatgaatgttacagtttaagtttcaattgtaccatctgaaggctaataaaaattcatgcagaggacacactttggactggaactccggcagactat

SEQ ID NO: 63382 - DNA, 953 bp, Cucumis sativus
  Intron number 1 from transcript Cucsa.058150.1 (locus Cucs a.058150) derived from phytozome v7.0 (chr-ID scaffold0061 4; pos 395062 to 396014 reverse strand)
cattccttctgttcatcaaaccatccagcattgtaacactttatcccaaacttcctttcttatttttcttattttttttcaataataaaggaaaattgtcaaaaatttaccctctgtaaaaatatcgaaaaattaagtgattttgttcgattttgttctatatggataaataatttgtcaattttctttttctatttttgaaaaaaaattaataatagaatacactaaagtcagtttattgggaaaatttttagttttagaaaactgggtatgaaatgcctatgatgcccttacatgcttcctcccacctcacctttttctctcattttttcccctctaatttctttctaacttacttttcgtactaataaaattgattttaaaatatcaaaagtatttttcatcattttatttagtttttaaaatcaattttaaatctcataaaatcaattttcataaatttgtttgtctacgaattgattttacaaaattagttctacttaattttttttcttttcaaaatactccaactatcactcttaaacaataagtaccgtaatcatataattttttttaaattattgtaaaataaatttaaacataaaaaaatagcaaaatatcacttcaaattgagttaaaaaaatttaaaacataattttttcttttttaaatatactaaacaaggagctttttttttctggaagagctcgcttccagaaaatttctttcgagattttccacctccacccaagtaaaattgaaggggaattaattttcgtgagaatacatgaatgaaagagagcacaaaatatttaaaatttttggttaaagtattctttattttattttacgtttgtgttttcatagttaattcattaaagttaccaatagttttgaaagtaaaatttaaaggactattttgtttgattgggagtgtagggaagaattcattc

SEQ ID NO: 63383 - DNA, 727 bp, Cucumis sativus; identical to SEQ ID NO: 62841
  Intron number 1 from transcript Cucsa.050560.1 (locus Cucs a.050560) derived from phytozome v7.0 (chr-ID scaffold0055 5; pos 199368 to 200094 reverse strand)

SEQ ID NO: 63384 - DNA, 717 bp, Cucumis sativus
  Intron number 1 from transcript Cucsa.045250.2 (locus Cucs a.045250) derived from phytozome v7.0 (chr-ID scaffold0054 2; pos 1237744 to 1238460 reverse strand)
tactgattttggactgtctgttttcattgaagaaggttcatctttttgttttcttttaccctcttggatcgatttagtttctgaactaaaagttgatacttttcctacttgctgagagtccataagtacgctttcttatctggaatatataccccaaatgggttagtgttgagtagtgaaattattcttacgccgctatggctcaactagactccatgtgatatgagagttttgattatcactacatcacagcaatttgtacttttcattggacatgcttcaaaagttaaaaggttatcaacctgccgtgcattttaggtaacacaatcattatgtgttcctttcttcctgaccctggggcaagccagagatcagaaaacgatgattaatatataaaatggtgatttagttcaggattatgattactattttgtagaatttggcagattctttggccatagatgtatagcctgtcaaaatcagtgatttagcatcacttaatggaaccagcttgcaaatttcattctatcctatttttgttcattcttctttattctgtatgaagaagcttctattaatatcctactttctcatgccatttaaagaaatgaatactctatgataacttagtgatgattcttgtgctaaactgctaatgaatgtattttggatctaatttcaggtaaagtgtaccgtgatatagttggcagtgcttac

SEQ ID NO: 63385 - DNA, 903 bp, Cucumis sativus
  Intron number 2 from transcript Cucsa.089510.1 (locus Cucs a.089510) derived from phytozome v7.0 (chr-ID scaffold0089 4; pos 927396 to 928298)
aattcaagctgtggtacagaagatactcttttctggttagtattaatttaaatgacaccttatttcatgtttagatgaaatggctttaatttagtagttttgaaaatatgctttatgtaacaaatatttttaattgtttttttggttctactgcattcaaaagtgggaaattataaatattttactctatattttgaaatttttttaatcactttaaagttgtttgttgattagaggaatacttaagtgtattttaagattcattcatcagatgagtatatcttatttttaaggaggtgtatgtcaacctaattcgttgagaagtctggacgtacatatttgtctcatgttaaaataaatcttttcttttcgattacacccataaaagagaaaattgaaatatttttaaaagaggtaaaataaatttgtgaaggaaccatttataaataggacaatttgatgaatatactatctcctctagagtttcttgaaagggggagttttttaaagggttgcttttattaactttttaaaagaaaattctagttaatcaaattaaaaccattcaagaaacggtgccaaactcttctagataactaaactctttcaaaaaccaaaagtgattgtagacaatttgaatttgttttattaaaataaattcaaaacatttgatacacctcaaaaacctaataaattaaataaatcagtttagcgaagtaacttttttttatatttgttaataagttagcgactcatctggctgtatttgattttctgatatgaaaattcccattttgattccacagaattataagcgacttcctgatcaaactttttcacattgatttattttcttaaacttgtgtagatttatcagcaactggggtttcatattcagattca

SEQ ID NO: 63386 - DNA, 556 bp, Cucumis sativus; identical to SEQ ID NO: 63026
  Intron number 1 from transcript Cucsa.009150.3 (locus Cucs a.009150) derived from phytozome v7.0 (chr-ID scaffold0012 3; pos 95201 to 95756)

SEQ ID NO: 63387 - DNA, 654 bp, Cucumis sativus
  Intron number 1 from transcript Cucsa.114160.1 (locus Cucs a.114160) derived from phytozome v7.0 (chr-ID scaffold0096 2; pos 23479 to 24132)
ccacgcgatatcaaattcccaggtttctgttcttctattttctcgctttttttcttttttgttttttattcgattgtgattctgattatgttttcttgatgggtttttaacttaatgatgattctgttgcttttgatcgatatatctgaatttctgtctgtataaggtttgaattacattgaagaatttagagttttgttcatttcatctcaattaggagaaattctatgtggggtgggatcaatgggattgactataatctacttgttaaatgtataagagatgatttaaattttgtatttggaatatcaaatgatcattaggggtaactccattgatggtttgtttctctggaaaaggatctctggcaagtttgtgaaacaaatcgtatatagatatgtgatgttgatcatatttaagtttggtgatctttctagagcgttcaatctattattccttaaatggcaacgaagattatcaatcaaacctttcgttttgtgttttttttttatattctactcaatcttgtttagaatcaagcaaactttatattccttgaaaattttatcactttctactctaggataaagtttaatgtattcaaaatacatttagatcttcgtttgtgtaattttgacatgttcaacagatcta

SEQ ID NO: 63388 - DNA, 806 bp, Cucumis sativus
  Intron number 1 from transcript Cucsa.093820.2 (locus Cucs a.093820) derived from phytozome v7.0 (chr-ID scaffold0091 9; pos 114763 to 115568 reverse strand)
tctctggttttctagagccacattctcccgaagaggttagcttagattttaagttatatgcttgtgctttgagtctttgctttgttattttccgttcataacaatgaaacagcaatatctgttctcgttcctcattagttgaatcttcctcattagttttaatttcatcactaatttttcattggcattcctgtttggctcatttcattatatgaatgatgtagtttgtttgttttgttgtatcttctgatgtcctgtactgtaattactctaggtttagttgtcttgctaaacagctttgtttcggtgtaatctcgttttcagttgaaggctgttctatttctcgctctgaaaatgagtgaagagctagacatttgagttttagtcaagtaaatcataattcattggtctgctgtataccctcttgaacttcacttctttgtgctaagactaagaacaatacttctttccgcattgagattccagttgagggagtggattagttgagatttagtattaatattgtccaccatggcttatggtaaaaaataatattacaccttgaatcaagatgacgtcaaatttctgatgagcagagtacagttagtattggggttccaagcatgacaatcgcttatgcttacctcatgacccataatcgcttgtgttcttatcttcgtgtgaattttatagtaaaatgcttgcttcttctgccatattcccactgaattacactgacatgagtgtttccttcatatctccatactttaggtccgagttgcacctcttcttgctagatctaattt

SEQ ID NO: 63389 - DNA, 556 bp, Cucumis sativus
  Intron number 1 from transcript Cucsa.122890.1 (locus Cucs a.122890) derived from phytozome v7.0 (chr-ID scaffold0100 0; pos 216932 to 217487)
tgacctcaacaagtgcgagccttgggagcttcctggtatatttactcccttttaatcacttttctcatctttttttatattattattatttgaatttttaatgacttcccaatcactgatttccatacttttcaaattgatattatttgaacgttttaatctatttccaaataataccaacaatatttatatctatgtgtgttttttctccacttagaagaagtcccaacttctgttgattaactatgttgatatctcagttttttacattaacaaacttaattagcaaaaaaactgaagtctttaaagtttttggattgcatatatacaaactcatttgtttcagaagagcatagcttagtcgccacaatgaaatttaacagaaaataaatctaattcatgtgattttattctcttttaagtttaattactaacattttttgatccagagtaacttaatgttcttatacagttaggaagaagattagaaatgttgattattaaagcttttgaatctaatcgtgatgattaacacaatgacacagagaaagcaaag

SEQ ID NO: 63390 - DNA, 804 bp, Cucumis sativus
  Intron number 2 from transcript Cucsa.122890.1 (locus Cucs a.122890) derived from phytozome v7.0 (chr-ID scaffold0100 0; pos 217726 to 218529)
aatttgcttatcattacctctctggatcttcaaaggtactttatttttctttattccaaaccctaatcaaccaaacatctttattaatatttcttactcttcttcgtttaattctagtaatcctctcttgttttgaggacgtgttaggatttcaagtgtgttctttgttctcatgcatacttccattcaatttttttgttggtgaaaattagggtttggtatagtgatcagaggataaaggatgttggtatgattttttaccattagtttaagattgtgatatgtataattttgattttgatgattggttattggaagatagtttttttaataactttttttataaagtatatctaatgatcagttattaaagtgattattggttgtgtgtttagtttttttctttcttaagagacttctaaaataattgaaatggattgaaggtttgatttttacccttcaaattttcgaaatgaacatgtgttttcttattattaaaatttattttttattggtcatttgtatcataattatgtcgaatgtcttgtcacagctacttagagattgataataaacaaacaaataatgtgaggggacactatccctttatagattagaatatatatattgagataagaatggagtaaatatatcttaaacttagattataaataatctaatctctaacatctctttttttatgttaaatcaaattcataatatgttagtgtgagtttagctcattagttcttaaaaagttgggatttttggaaatgatatttatgtatggatgcaattaccagg

SEQ ID NO: 63391 - DNA, 674 bp, Cucumis sativus
  Intron number 2 from transcript Cucsa.112230.1 (locus Cucs a.112230) derived from phytozome v7.0 (chr-ID scaffold0095 3; pos 896294 to 896967 reverse strand)
gttttgggtttgttttcacgtggctgtatgtctctggactatttggtttctatacgttctcttggaatttttgcatctgggacataatgatagcgctaaggggtatcaacctagttgagatgtttgggtgcacctcctgatcctttctctctacttgtttgttttttctgttattctcgttgtataattttttgtactttgagttctatattaattaagaagcttgtctccttttaaaaaaataataataaaggacaagaataattacttcttgaggactaaaatagaccctttaggatcaaaatatctttgttttttctttttaattttatttttatgttttaagatttttaaaggatcaaaatatctttgttttttctttttaattttatttttatgttttaagacaaaaatgaatattttgaaagtgcagagggaatcaaattgggacaaactcgaaagtataggggttacaatgaaatttaaacctttaacccttctcttttctgtatgttgatcctttctaagaagcatgcttattaaactgccaaaaccttttgctgtatattttagagaactccagtttctattgacaaaaagtatgagttccttgtcacctataacgtgaaatttgttcaggtcgaaactgttgaaggcttgaaagacctccaaat

SEQ ID NO: 63392 - DNA, 532 bp, Cucumis sativus
  Intron number 1 from transcript Cucsa.120390.3 (locus Cucs a.120390) derived from phytozome v7.0 (chr-ID scaffold0099 8; pos 2498078 to 2498609)
attctttcctgggctaggattttctatgtaggttctctgttttcaactctgatctaatggaaaaattaatttttgtgaaatgttctcttcagtgttctttgatgttatatggttggtgtttcacttttagaattagttgaagttcatagaaataaagactaagaaaaatggtcttttcattctttctgtatgtgtcttgtcttgtatgcagagcatatgagcttttgtctcttctaaaatctttggtgtttacattctcatatgttgaactgagaaattttatggcagcttgaatatttagatgctatgagcttgtttgagctttggagtatgctgtctgtattttatttgttggcctctgccagattttagattagcaacaaactaatatcagaatgattgaattgagccaatttattctataatatgttgttttcttcatttttactaagatgggaataattcttctgctgatttttggttcatatgtgcagcagctttagataaaggtttagaacagcaactcttggag

SEQ ID NO: 63393 - DNA, 860 bp, Cucumis sativus
  Intron number 1 from transcript Cucsa.083860.1 (locus Cucs a.083860) derived from phytozome v7.0 (chr-ID scaffold0085 8; pos 550865 to 551724)
catctttgttttcactcgattagatccgatttaaggtacgtgcttccaccattgttcttatatttttcttgttctctggccattattcgagtctgagatgttgcaatgaagttgaattttatgatttcgagcttatatagagcatttggacgagttcaattgtcagttagtgaacctttcgaatcttcttcaagttctaaatcagtttggcgaagacaattttagaaactgcatcgttcaattgtgatcttctttacagaaattacttgttaggtaaacgctattgctgtgttatggagtttgatagtacctcatgaaacacttgggagtagttctgtatactgattttgggtaagtgtaaaggtttttgttcgcttgaaaatgcagattagcttgtgaatttacaatattgtgtgagcttgaagatatccactcgttaaggggttagaatcttggaagttcattgggatttccaaagttgtaaagagaatgctatgagtagagaagcatacagaattttagttgggaatgctgaagaggtgaggaactgggggatcccaagtgataagttctatgtgaggattatttcacatctaaatcaaaacaaaatcaattcttcatactggatatgtgtttgagttgagttacgttatgcttgtatgcatgtaatgagtagttatgcttttgcttgaactagcatcatggaaggttaaacttttgagcatgcggattttggatgtttacctctacttttttaattggaaatctgagactggaactgtaacttgtctattgatgctaaattttcgttctctcttattgcaggacaagtgagaagtagctacaagtgatatatattc

SEQ ID NO: 63394 - DNA, 413 bp, Cucumis sativus
  Intron number 1 from transcript Cucsa.128350.3 (locus Cucs a.128350) derived from phytozome v7.0 (chr-ID scaffold0102 4; pos 380985 to 381397)
tcaggtaccattctttttctctctttgaagttgtctgggacgagttgcggaagaagctatttcgtttaagtattactctgttttaagtaattatttagttttttttttttaagttctgcttttatgaatttattgtatgattttttttagctgtatctttaggtttaatgtatatatttgaggaacttagatgggttgttactttcattgctgtgctacctcgttatgttttccctctcaatttgctgatttgaaacttggtttggatacaattgtcttaagtttattattattttttatgttaatgaaagtaaatagaagttattgttctttcgtgaatttgagcttacatggatggttgatggattcactttttaataaccgtagagtggtaaaagttgaagaaagttgca

SEQ ID NO: 63395 - DNA, 517 bp, Cucumis sativus
  Intron number 1 from transcript Cucsa.122970.4 (locus Cucs a.122970) derived from phytozome v7.0 (chr-ID scaffold0100 0; pos 261224 to 261740)
gcaagaaggagcgttccaagacttcttcatcccaggtacttcatttttcatccctcactcgctgattgttttctttttcttgatatctcaattggggcttggctttatttgatttctcccctattttgttggatgttctgtttggtcgctgtgtaatgttcattgattaggctgtaatttgccataggatttgacgattatatctgggtatccttctgttagtcgatttacatgcttggattttaagtttggatgaaggagtttttccttcgtctttccctttctaagtaattttttgttttctctcggttggcaactgaaaatatcatgttcgtattgtggttgccggtaaaatatggatgttttctccctctttctccccttttgcctcgtataagtttgctttgatgccgatgcgaatttcttttgcatccattcttttttttgtgttttatttttttgggtggaaccatgaagagaagtaggagaaagagtaaaagtagtaggaaattgaagt

SEQ ID NO: 63396 - DNA, 744 bp, Cucumis sativus
  Intron number 2 from transcript Cucsa.074490.1 (locus Cucs a.074490) derived from phytozome v7.0 (chr-ID scaffold0078 5; pos 331418 to 332161)
ccatttctggtaaggctttcgcacgaacactttttaatttcacatgttttgaacacttgtgttaatgcaatagatgtgttacacattcatagaacacttgttgagaagaccaaagagatgcatatatataaagataataatagatttttgttaccagtagtatcaccgttaattaaattctgtgattatggttattatttgtatgtcaaatacatcaaactaattgtttaacggtataaatgcatcaactcatttattttgaattttcttctattttaaaaatgatacacacgcatatatatgtttttttttttaaaatgtatattttaataattgtgtcctttctttgtcatgtcctaaatttttagaagatggcgcgtcactgtgtttgttgcacggctcgtatccatagttatgcttcttagggcttatgctctcttcctgaggtggaagatggttctacttcaatcttgttataataatttattcacgttctttttcaattcattgtttgttcattctttaactatgattggtaatttcataagtaactgtaagcaatcaggtgtataggatcataggcaacctcttattttccttttaaatcctgcttttcactccaagtaaaataggctgtactttacctgcttcaatgctgctgtggtttagcatggattttcttaattttatttcgttttcaatattccagcaacaagtttccttgcagtagacgccgcaaaggct

SEQ ID NO: 63397 - DNA, 866 bp, Cucumis sativus
  Intron number 1 from transcript Cucsa.094970.2 (locus Cucs a.094970) derived from phytozome v7.0 (chr-ID scaffold0091 9; pos 983211 to 984076 reverse strand)
cagtccgattgcgaattggaagatctccagtcctggtgagtgcccgtttttctctgggatcttgattttggaactggatttgtttgcacatcgtacatttttgttttatcttgattgtgtagatcgttttttttgccctcttttcttcttaaggagtttgaattgagaatgagctgatcttgtttcttagttgactgaactttttgtctctcaacttgtatggataattgcttgaaatcaactgggcggtctctatatttatctttaagtttgtgttgattatggaaacttagggactaaaacagattttccttttagaaaagaaagtttcaaggttaaaacagagtagtaattttgaaatttcagagatctaagacttaaactttcatttttcccctacttctcttgagaaaatgagtctgtttttttttcctcaatgagaatgtggttttttctacttctagctggttggatgtttgttctgtactggtggggtgaagtcaaaagtcctgaatttgtcttcactctatcttgtgcttatcactatgaattcttgcggtcccaattttacaagctggttatctaccctgttttacgtgtaatcttatcttgaatatatatagaaaataaattgttttccttaaaaaaaagcattgaaaataaatattgattcaacatgatttatgacaggggattttacaatctagtcttttttctgtcattttttgaactaccttgataattttaggactccacgggtgttaagaaaatattgacaaaaaaagatttaagtgtacttggggtaagataagacattcttctgaacttttgaagctgttttgctgatacaggtgatcatccagaag

SEQ ID NO: 63398 - DNA, 677 bp, Cucumis sativus
  Intron number 1 from transcript Cucsa.122180.1 (locus Cucs a.122180) derived from phytozome v7.0 (chr-ID scaffold0099 9; pos 498470 to 499146)
gaccgggacaatttagcattcggttctctttacaggtatttatgccgacgtaatttgattgttttgaatccctctctcttggtagttttggagacgtggaagacgagtttaaacagagttgaatatacttgttttgaaatttgaaaatacatgctcacaatttaatcagatggagaagaattcagctaacagaaatgcatatactagttttcattttctcttaaataaactgcgtggaagttcaatcaatctccagaacttgtttaaagcacccatttcgctagttgtgtaaatccaattcatatgtacaaagaaaagaatgaatctgataatttatctatttattcatctaaaggcaataagattacatctacatttattcacaaaaaggaaaaaggggtaacccccaagataatgttagactgaaaattgtaacctacaaacccaaatttctttgaagcggaagccaggaattcaggacctctttaaccttgagtacttaaatatctgttggaagcggcagaattaaatttgaagttttcaattttgagaaagaacattatgtttggaactattgccgaggcttttagaatcagttttttcaatttctttttccatggaagctgagcatcccgaactggttgcgaagtttacagtttgttttatcacaatacagg

SEQ ID NO: 63399 - DNA, 404 bp, Cucumis sativus
  Intron number 1 from transcript Cucsa.016510.2 (locus Cucs a.016510) derived from phytozome v7.0 (chr-ID scaffold0022 7; pos 225583 to 225986 reverse strand)
ccagcttctccttctcagatcttaccttatctctggtttgtttttacccaccccttattttcttcatttcttcttctacattcttaatctcccccccgcctcttcgttttttctcttcttttccctcattcatttcctattcctattccttttctttcttattgttgttttaattcattggattttgattgattgattttattttatttattttactttttttggaagagattctttacaacctgtgttgtatacttgggaatggaattttccgatcagattaggtttttgcgatctgatgatttcgttagtttgtaattttttattttttttaatgtttccgtgttttttctttttggtgttcgttaggttagttcgattggggaaagatagccatctggcaa

SEQ ID NO: 63400 - DNA, 833 bp, Cucumis sativus
  Intron number 1 from transcript Cucsa.126340.1 (locus Cucs a.126340) derived from phytozome v7.0 (chr-ID scaffold0101 7; pos 254401 to 255233)
tgaaattgcacaggtaactttatttactttttcttgtctgatgatcttttaattaaattggacgttttggatcaaattctgccttgaccatttgaactcaacacatagggtcatttttactcttaaatttgacaaactgtctccatttttatctgcaaatttctattttctttaatcagtttttatataagcttaaaaaaaattgttatatgggtgggatctgaggagtttgttatgaaatcaacaaataaaacaagcataaaaacgtaaatgaggagagaatcgacatagaagcatattagctacatttatgctcattagaaagaatatttcagattacagaacaaagacgcttctataaatggggagttcatacaaccaatttgatcttcaaatcttaagattaaaatggtaaacaacgtaaatacagtgagatcttaaacatttttgtttaattagttgttgagaggtgagatatcagatctaaatgtattcacctcagttataaaatatatatcaggcaagaaactgatgtgttttgaaagagaaattaacaacaaaaacaaattttgggctgaattttggaagatttatcagacaattgacattgtaaattgatgtagctcaattcgatcatgtcaaactttttttttgttgaaagcagcgcgagtcttaaaaaggaggattttacatgttaaacaaatttagaaacaaaaattttaaaatttgagacacacaattgaatattgaagaggacaactaatgggtaagtttagattataatccaaccacattcaggagctactgattccagaggcagcagaggcagttca

SEQ ID NO: 63401 - DNA, 742 bp, Cucumis sativus
  Intron number 1 from transcript Cucsa.135600.4 (locus Cucs a.135600) derived from phytozome v7.0 (chr-ID scaffold0104 4; pos 427854 to 428595 reverse strand)
agcagctacggggagagagctagctggagaaagaggtaaggttttacattatactcagtccaccggaccaccatccgctcgcgataccactctcctttctccttaacatatcggtaaaatcgattttttttcttggtaatttatttggtttgtgctctctctgtacccatttttattctttttatttgatattctctaccgtttcccatctttctcaatttgtttgattcgaaattttgttacttttgcatttcccctgttttcttaactgtgaactataattgatttggtggttcgatgttcagtgagtttgtgtcactatttaaataattttactagcttaacttcttgtattttttttctctgttcaagaagcaaaatttaggaatgggcttaaagtgtcaaaaaacgtgaaatcaaatttgggttatgttctaagatacaacgttatgagcccaacatttctatccagcttattttggttctgtttgcatgtatggcataccgaagaatatggtctttttattctgtcaacaagaagtgaaatacacactacccttgatttctgataagtggtaagattgagacatttgatcctaagatcaaagtttttgattatgaaatcgagatatttcttttggtgtttgaaatatggcagtgctgatttggtcttggttttttttttttttacgtcttgaaaatttgaattttctatccagattggcaattttggaattaaaca

SEQ ID NO: 63402 - DNA, 370 bp, Cucumis sativus
  Intron number 1 from transcript Cucsa.065820.1 (locus Cucs a.065820) derived from phytozome v7.0 (chr-ID scaffold0069 6; pos 472819 to 473188 reverse strand)
gggtttgggatcaaaccaggtattcttctttctcatattttccatttcattttactcgtttttcctctttttgttggtgttggaaatgttttgtaatccattgattcttcgttgagaaaatgaacagaaatggatttttgagttgagggattattgacattggaagaacgatttagatagggatttattattgtttttttttcttccttattttgatttatgggttaatggggattgatgtattggaagaaactgcattcattttgatgttgggattgccacattgtgcccattggggatttttgtgattttttaggatacatgaaatgcttttgattggatttttgcggggttttctatggtactaggc

SEQ ID NO: 63403 - DNA, 765 bp, Cucumis sativus
  Intron number 1 from transcript Cucsa.113320.1 (locus Cucs a.113320) derived from phytozome v7.0 (chr-ID scaffold0095 3; pos 1504231 to 1504995 reverse strand)
ttcgatctgttaagtctctttgtctttctctcgcttttacctaattcccatgcttaattttttttttttttcattattgggtcaagtgttgatgggaattcaaatgggttttctttgttttgagatgggtttgacttgtcctgcttgttgatgctcatttggaagactatctttgcccatgactgttcagactttatctgagttttgctcgtttaattgttactgttgttgattttgacttcgatttgactgcgtctgagcttattggcacttgatttttactaagaagtgaggaattgtggtgttttgaggacaataagagggtgaatctatctgaaatgggacattctgagttttagaaagggagttttgcaattgcgtttgtaagtaacttcaagattaacctttatcttgctatttgccgaaatagtttagaatcagctccttgatcttttattgtctttctttttctggtatatgcctgattacatgtattaatggctttgttgtagttctgaagtaaaacaaataatgtctttgtaagctgctgtgctttgaaacattttacttttaatgaccctgtgctgggttttaactggagttagaaaaggaacaaagatccagagaagttaggctatagggcttcttagtgatagatatctatgactaggcatagaaacgagatagatattctgattttgatgaccttattattttatttatacatcaggtaggagaaaattccttcaaggaaatacttgagag

SEQ ID NO: 63404 - DNA, 456 bp, Cucumis sativus
  Intron number 1 from transcript Cucsa.123400.1 (locus Cucs a.123400) derived from phytozome v7.0 (chr-ID scaffold0100 0; pos 631419 to 631874)
gcttcattactgcatccactctaatccttcttggcgttagtttctcttatccttttgggttttgttgtttttctcttaatttgattcggaatctggcaaagttcgaatctttatgtcatggggttctttctttgtttttttttccccatcaaatatcagattaagttcagggaaggatttagttattccttttttaaaaatattttttcttctttttcagctcttttgctcgatctttattccgaatcttccttttttatagactcggcttaaactgttccgatttgtgtttgtttttttttttttttgagattctgagtcgaccctattcagctttaatcgaaatttgattactcacttatgctgtagttcttgtgtttttcaaatactaaaggggtttttgactaattgaattttgcagctgaagctgttttactggcttttcagcactatatt

SEQ ID NO: 63405 - DNA, 769 bp, Cucumis sativus
  Intron number 1 from transcript Cucsa.037040.1 (locus Cucs a.037040) derived from phytozome v7.0 (chr-ID scaffold0047 6; pos 17518 to 18286 reverse strand)
ttgctgcattattggtggcatacgattttacatgtcatttcgcggacaacttcatagacgacgatgatgacaaacaatcatcatcacatcaaaaaataatatcttcttcatgtatatatgttagtcatttttctatacatttagttttcgatactcacatttgtttaacgtttgttggtttttatgtctgcaagaattatgacttcatttcttagtgatattaatgaggcaaacatttacctaaacttggatgcgttagataacgcgggaggatcgtcttcgatgggcaacaatccaggttagtcacgttaccttaaacacttgtagttatggttactggatcgatctaataatttatgtttttcagtagatccctctcaaccctctcccactcccactatgagaagtcaacagcactctcgaaacattgagttggagaggtatgtccaacagaatggaaggatccccatttcaatcccccaatgaggggacaagcttgtctcaccatacgcccctcgtttcagctgcacgatcggtgtgttaacgcatgacacgtttctgatacaagttctaaagtaggttgatgtacctcgagagtacatcaaggttgtcaagagaggcttagcgataagtttgtaaaatttttaacatatatgtatgttcaattacctgcatatgtagaagactaatctcaaacctatttcttttgtagcaatttttcatgctcaatctcgaagtttcaacacttaatcggtttgttgagcatcaa

SEQ ID NO: 63406 - DNA, 788 bp, Cucumis sativus
  Intron number 2 from transcript Cucsa.106680.1 (locus Cucs a.106680) derived from phytozome v7.0 (chr-ID scaffold0093 0; pos 204437 to 205224)
gggttactagacacgactggctgactcacttcgaggtatctgtctctacgctgaaatggtcaagtttgacttcacggttttcgattcgtttttcattttcaatggcgttactctaggtattcggcattgcatgatcttgtttcgttctcgtgatccacattcggtttagtgggaattttgaggaagattttgtttctttacctatatgctggtaagtggtaacgttgtttctgttttcgtggagaatttgttgcgttttccttttctttttagtttttgaattctgttggagttgggataaatttgggatggactgtggacttttcagaagagaagaaactaatttctaatattatttataaatcaaagtcggaactgtctcttctgcctgggatttttggcgaggtcacaaacattctttgaagttgatttttagaatattcgaagctgagattaaagctcgtttatgattattgtaagttttagaaaatgatttaaaatgaatgggggagacttgaagtctttgacagtctgttaacatggaccattatcagaaaactccaaattgtttatataatagaatgaattgatggccggttgtttgtgatcctttgagtatgcacatgttctgtcgttttttgctaatagttaataagacaaagaatctaggttcatgcttctgacgaaaacgctgaaaaaaatgtatgcgaatttacactcaccgtctgacccatgattagtttgttggtgcagatcgttgaggaggcaaggcagtgaggcagtgaggt

SEQ ID NO: 63407 - DNA, 849 bp, Cucumis sativus
  Intron number 1 from transcript Cucsa.053520.2 (locus Cucs a.053520) derived from phytozome v7.0 (chr-ID scaffold0058 1; pos 485577 to 486425)
ccggctgccgttaccttctgactggctgtcctcaggtgggtcttcatgtttttcatctcatgtttctctaatgattagcaatcttgatcacgtgaattctttttatccgcatttagcaattttgattttcttggcactcaatgcaatgcaacttcatttcctgtatttatttaggcatttaacgaatccccccttttcattttgatgaattttgtcgtggtttgctagggctgtatgtgtgaaacaatagcattcgagggcatttctaattaatgaccatgaatctgatactttattcaaggacatacgtctgttaattacatttaaattttttgtttcaccgctataccaaattacttgaaattaacaatttggagattatttttacggtagcactactttggatctttacgactgtttaagtatgttatttgatcctagagtcaagtgtgtttctttttcctgatttagcgtttttcttaatgtgaatgttgtggtgaatatctgcctccagctctgtaagtgaaggtcaggggattccatctgccctgcctactccattgtccatactagaatatattttaagaaatgaatggagagtaaaaagatttattcgtttacaagaaaagagaacagaaagggaggaaaagcaaaccttccaactagccataattgctgaatgctatccaattgacttttgtatcacatagtgcacggtcaaatacttaaagttgtaggcctttcattattccctgtcatttttcgttttttcttaactcttatagtttcttttggttcaagttgaatcaaaattcgttgctgattggttgatctcatatttatgcagtt

SEQ ID NO: 63408 - DNA, 479 bp, Cucumis sativus
  Intron number 1 from transcript Cucsa.116130.2 (locus Cucs a.116130) derived from phytozome v7.0 (chr-ID scaffold0099 5; pos 38931 to 39409)
tcttcgatttgtacggcgccgtcgtcgctgttaaggtcaattactccaccgaccggattcgctcctttcatcttcttatgtcacaaattttcttttacgactgttgataatatcgttacgtcgtgtatacctcagaattatgtagctctttaggtgtttctgatggaatatttgattgcttgaatataagcttttttttcccaaggctatttgaagttcagagatcaattcgagctcaattcgagctcaattgtttagtttatgacgtttctttaggagtatagacgtgttttgcattactgaaaatggtgaaaaaaaattggattgtgttgaagaatttttgctattgtggagaatttgagtagttagttcacttttgtgtttgttaaaatgcttcaattaggcttgttgaatggcttatttacatgtggtttaatgtatttatagttgaatgctttgatttggtgttcagattatca

SEQ ID NO: 63409 - DNA, 656 bp, Cucumis sativus
  Intron number 1 from transcript Cucsa.050970.1 (locus Cucs a.050970) derived from phytozome v7.0 (chr-ID scaffold0055 7; pos 168611 to 169266 reverse strand)
atttcaacggtgtcatccccaagtaacacaatatcatcaacataaacgatcaacgcaacaatcttcttggccttgatttcgaagactttcgtaaacagagtgtgatcaaagtgcccctgactacatccttgggacttgacgaaggtggtaaacagagtgtggcttgatacttggaaaagcctctcattgcactcctaaagctagttgttgactgtaccaaattcttttaagcaatagtagctttggggggctttttatcattctcttaattattatcatttggatgtatttgatcagatccgtatgtctcaaatcatagaagtttaaaacagcgatcttataattccctttacggctgaagaatttttccgtgcaattatgttacttggaaaaaataaagcctggggtccaaaccatttcacggtggaaatttttcttaagcagtggattgtatttagcatttctatcaatttctagtgttttctagagttttgatggttatagttttagttcccaaaattcaaaaatgaaattctggatatatggaaacgtaaatttgatcattggtttatttatgccaatggcatattttgtttccaaaagaagtggattgtattgaaatctgattttacagcccttttcaggaatttataaga

SEQ ID NO: 63410 - DNA, 634 bp, Cucumis sativus
  Intron number 1 from transcript Cucsa.032470.1 (locus Cucs a.032470) derived from phytozome v7.0 (chr-ID scaffold0042 9; pos 1762314 to 1762947 reverse strand)
ccttttggccaaggtatttcttcttcttcttcttattactattattattattattatatctggtcatgaataattgaatatctaatctcctcatcattctttttaattagtttatgaacatattaacattaaagacaaaatgtgagtgtttaatgtaaaaaacaaaacttcaatatcaatcatgaaatcgagaaactaaattttaacctaattcaaaaaaagcttacatgcaaatatttttttcctacaaaaaaattgctatccaatagaatgagaggccatgcatggttgcacttaatcatttttctttctaaatagttaaaaactaattacaaactccataaagtaaccatatttatcaatcaactttaaatcatttttctcgataataatttgagaacaaaaactgtgttataggaagttattgtgtagtgttatagcaattagggtgacagtaaaataagacaaaaataacaagtgggtaaaatggagatggagatgaatcatcaacgtttgagataagaattgattatctatctcaaattgataataatattttgagaattcaaacataaaagaaaaaccaggtatttaactcactattactttttcctgtaaacaggcataacctttc

SEQ ID NO: 63411 - DNA, 952 bp, Cucumis sativus
  Intron number 2 from transcript Cucsa.075990.2 (locus Cucs a.075990) derived from phytozome v7.0 (chr-ID scaffold0078 9; pos 498190 to 499141 reverse strand)
gcttattagtaaatacaaggtgagttgtctcctttctccttgaatgatgtttagacctcaattgtacttaatgaatctgaaagttcaagtacctgaaaagtgagttcatatgggaaatttaaacctccagcctcaaggttgaaggtacattgtgttagttgagctaacttttctgttaaaaaaaaaaatttgattttaggtatctagaggaagtgtatgcttaaaggctgacattttcatggttttaaaccttcttctctttgaaattactcggtggttttctctggtggtgtacttgttgatttcttttattactcaaatcacttgggtttcgtttgataaccatttactttttggtttttgaaaattaagcttattttctcccaatttcttacgacagtagttgaatttttggctaaagtccaaaactgaaaacaagtttttaaaagctagactctgtttggcaagctattttttcccgtttcttagaatgatttgctttttttctgtagtataatgattgaattcttagccaaattccaataacaaaagcaagtttttaaaatatactttctttagttttcaagttttcaagtttttgcttggttttttagaccattggtttagaatttagataataaaggaagatgtgaggtagaagtagtggatttagacttaatttaagaaagaaaaaaaagatagttaccaaacgggaccttagttaattatgcatgccaaagaatttttgctcatatatatcaatatgtggggaggatttagattgcatagaatgaagctttgtgcattgtgcttccttccattgatttgtttttgagttattatcatctgaaaatctttattggagtcatcttgacccattaactacaaatgtttctctggtttttgatggaatgtagatagaacttcgtaatccctgtcgtgaaggaaagaa

SEQ ID NO: 63412 - DNA, 766 bp, Cucumis sativus
  Intron number 1 from transcript Cucsa.118500.1 (locus Cucs a.118500) derived from phytozome v7.0 (chr-ID scaffold0099 8; pos 409265 to 410030 reverse strand)
atcctgatatccctgtcgtcttctccaagactaaggttcgttaaattggttcttcgttcgtttctattatagatgtgggactagctaatttgaatttggttagtattgaaaggtcagatgattaatgggtattggtagatgaacagaaatgccatatatttttttacatttgttttgaaatgaaacgatgaaagggggaaaaatcatccaagttctacatggggctaatggctaatgagtgagaactttccagttcaggagttgagattctgagtttttttcaattttgttctattgcacacaagacgagatatattattggtggtaactaagataaagaaagtgattttttatactatgcttgggagtgattgtgaaattgttaacttcgcttttgtggtgtttagatcacgctctgaaaaacacttgcaactaattgagcatttaagtttatacttttaaatttaatttaaatgtcatgaaaattggttttgaactattaaaaacatgttttcaagtgattttggcatgaaaattggttttgaactattaaaaacatgttttcaagtgattttggcttctttttctcatgcacgaggaagctgtttgttgtttcatagttgcttgtcatgtttgtaacgttcatgttctcatatctgcataaccccataactgcaaaacttctcatttttttttggataatgaccaagcagctcatgttcgtgacttttttattatccattgatacttcagttcttagttctgg

SEQ ID NO: 63413 - DNA, 1032 bp, Cucumis sativus
  Intron number 1 from transcript Cucsa.095060.1 (locus Cucs a.095060) derived from phytozome v7.0 (chr-ID scaffold0091 9; pos 1046978 to 1048009)
tcaccttcgtcattcaacttcacatctacatctgatcatcccaaaatcaaactcagattcttcctctatttccaatttccaggtacatacgctctgtttcttctgttttcgactcctctgtctgtataatctctccggatggatctttgttttctatgaatttgtcggccgcgtagtagagtgaagctaagcacatatatacatattattatgttgaaatacatgtatatttttaactttaggttttgaaatttgttgaagaatgatgatgatgatgatgatgatctcatcatctcatgaattggaatttgttaaatttgtgttatggagttgttgtgtgatttagtgatagtaagtaatatttatataggtatattattattatttaatgtgggtaaggtttaggttattatttattatacatacatttattactactttaatgtgggtgcaaatattgtctaatgtctcattcattctatttaatttctgctttatttacatacgcatctccttacttcaaaattttttagatcttttacttattcaagtttattaaattattgcaattgttactttcttttttaacttttaggaattcaaagtaacttaatataaataataaacctattaattagtttaaaaattaaaatataaccaaattttatatgtatcgatatattatgttatacattactttattattgacatttctaaaattctgcaattatccttaatttataatgtagtaaactttaatgatttaatttataatgtatctctattcataggcgttcatactcaagggtcgatctcactgctagttcgaaggattaggctattaatacataggaaatcaagaactaaaattgttaaactcgagaaaaaaaagagtgaattgatactttaatgaaataaattgaagcggattggaacaatcatattaatagtttattcttattattaattattgtaagtatggttgaataatataatatttaatttgttttcaggtcaattggtgatttaaag

SEQ ID NO: 63414 - DNA, 639 bp, Cucumis sativus
  Intron number 3 from transcript Cucsa.059160.1 (locus Cucs a.059160) derived from phytozome v7.0 (chr-ID scaffold0061 4; pos 1265734 to 1266372 reverse strand)
gccttttgtctcgacaaggatcccaaggtctctctcttttcactttggtaatgctgttctagatctggccagttactcttgatcctgagaaggaacttaatgttatccttattcttttaacgttgtcattggtttttccttggtccccctcccctcttttttggcttctctatttttttcactgtataaccctattgtactttaagttttacattaataaagaagcttgtctccgtttaaaaaaaaaaacaatgtagttgcttctatgtgcttgtgaggtcaagatatggattgtatgctctcttaatgctctgcccatcaatgctttggataaatcaaattatcttgctcctatgatcatgattaattaaaggcatgttgcatttagctaacaaagaatatgcatagctgttggtttatttacttcatgtatttaccatatgtaatttattagatgtatttaaattgtgaccgtaagtctttttccttatatcttagatatattagttctttcttctactcaagagagaccctcgtaactactgtataatgataatttattattttctgaatttcaccttgaaaatcagcagtatcgtcttatctacttattcttaatgatgctgcagattgcacata

SEQ ID NO: 63415 - DNA, 898 bp, Cucumis sativus
  Intron number 1 from transcript Cucsa.116170.3 (locus Cucs a.116170) derived from phytozome v7.0 (chr-ID scaffold0099 5; pos 94682 to 95579 reverse strand)
ctccttctcttgcatcacctcacttcatcttccaggtttctttctctttcaattcatgttttcctttgtttcattgctcaaactgaactgagctttgttttgaaattgtaattgtaggagcttgtttgttatttacttttttttttttttaatgaagatgatgatcggaggatgttacttgttttatgtgtttgtaatgtgctttcattttcttcttcactttctaattttgctatgtttggcagttttcttcctccagatctatggttcactttgctgttttgatttatgtttctggctttaaatctggatttcctgttgccatgtgcttgtacttgatgaaaataggggtttgttgttgttgttgtttttggaggttagggatggggtttcggggcaaatgcatctcgatcttaacttggaaaatgccttatgttgtctctggaagacttgtttgtttgggtttttgtgaattctaacagattttttttttgttaattcatgaatctgacctttcctgaagcttctgtgtacttattttgctttcggacctgcacaagcctgctaaaatgagcttcagcttataatgattttgctttaagagatatacttctacattacttcaaggattttcgatggaagtttttgtatagaatgccgttggagtatgaaactattgcctttccttcccttttttccttttttcttttcaactcattctttttacttctttctctttttcacatttactttcatcaatttcgtccgttacagatgtttcaaatcggagcttctttattatagttaagatttcaaagttatatgagttgtcttatctgatttaatttctagtgttcacaattttaagctttgattaattgatgccaggcttatagtt

SEQ ID NO: 63416 - DNA, 691 bp, Cucumis sativus
  Intron number 1 from transcript Cucsa.135160.1 (locus Cucs a.135160) derived from phytozome v7.0 (chr-ID scaffold0104 4; pos 57880 to 58570 reverse strand)
tattccctccaaggtaatcattattcgctttagggttattgttattttggttgattttatgtcgatctaattcttttcatttcattggctgaatattgagtttaatgattcgtgggctagttttttttgtctggttgagttggttctatttacggtgtccatgatcatgctcagttgtttgatttatgctcgcttttgtagttggttggatttcttcgagtttttcttttcttttctgaaatttgatctgttgcttgtaaattcttcaagacagcttaggcctcctttgtttttgtgaattttaaactataaacacccatttcttactttgttatcttacttttttttttattcgttgttcgaaaacttagaaaactcaaaaaaaaaaaaaaagtttttgtgtgtggaatttgtctaagattcaaactatcctaagaattcgagaggaaattgatttttttcttttaaacaaacagttacaataaatggggcctaaatatcagcccttgtgagataagtctaccatttttctgttcttttttttcttcattcttttgcatgatcttgtgcattgctagtcgaatatttttaattatttaggttcaccctatttttgaaaaaagctggatcgttctctgaactctgaaataatttacctcaacgtttttaggctcttctccattcttcccac

SEQ ID NO: 63417 - DNA, 863 bp, Cucumis sativus
  Intron number 1 from transcript Cucsa.099770.1 (locus Cucs a.099770) derived from phytozome v7.0 (chr-ID scaffold0092 6; pos 468965 to 469827)
ccattgaaggttctgtccttcgattttttacaactctgattgtgtttgttggatttttaaaatgaaagtgtttagccctttgatttagcttagtgttttgatcatttttaacccggcatggagcttcattgtattatatttgtatgcttattttttgtttattaatgcctataacacaatgaattggagctgcttcttcgttgatacaatatccgcaggaaagcttatttaaccaccatttgttctaatgctgagagtgtacaactccgtgatagaatatattggaaaaatattctgagctgaagggattgttctgctggggattttattagcttttgtgtagaatgagtattttttctgcatagatagaacgatggtccctatttgatggatggttgaaggaatccgataaatcaaagacttaagttgatcaaatgatgcttgtctttgtagagtctccaccaaatatgtatcataagaagtaatcttataatagcattgtgttcgtaaagagattaagattgaatactggaattctaatgcccctcatccactttctagacttggtctcctcacttatcctatgtactgtgttcatttttatcaaggcccaatatctaggcttacattgcaatcgtgttctttgaataaagatgcaattcagcaaagggtaatttcaaagcaatatggcatactcttttaccatatgtattgtatgcatctttatctccaaatttcaagcccctatacttgggcaatgccttgccgttggtttttgagttgttgctgaatgttagaaggctatttactgactgattatttcaattctactgtattcatgcaggaacatatattgataagaa

SEQ ID NO: 63418 - DNA, 609 bp, Cucumis sativus
  Intron number 1 from transcript Cucsa.097440.1 (locus Cucs a.097440) derived from phytozome v7.0 (chr-ID scaffold0091 9; pos 2667208 to 2667816)
caatctattgacgtaatccatacggtattttttttgttttcttttcattcattttccttctgtattctgctattggatttcaatcttaaagtggtgttgtcttcgtggatttacttgatgccctgtaagtgtttgattaaagttctgatagagaaaagacaattatcttttcatttcccctctccaggttgttgtccatcttgtttataaatcctttaggtcatctgggatttcgtgtttttagttttacttggtatcttcttaagattttattctaggttgagaaacgagtttcttgaaatgagttagagaatgctttgtaaagattgtgatttatttcccacaatcatgactttgtaggtatcatttttcaatgtaatataaaagtggagttttggatacaataatgtcgttagagaagctgattcttcgtgttactcactatcgaaaaacttttaaactcgctccagttgcaattaattggttaaattcttctctgtttaatgcgtatacagcagaatttgaaattctctccttgatatggttttgatttgacactttatattgaggaaagcctgctgcacctgtaactaaggaagtacttggaag

SEQ ID NO: 63419 - DNA, 815 bp, Cucumis sativus
  Intron number 3 from transcript Cucsa.042830.1 (locus Cucs a.042830) derived from phytozome v7.0 (chr-ID scaffold0054 0; pos 1155503 to 1156317)
gtcctggacaacatccaactcaggtttgtcagcacctttgttttttatcttgaatggttgtctgaaatttgaaaaagaatgttcatttgagagtaaacactaaacagtaaggaagtgctataaacacaattattggtaattaagtacaacatgagtggcagaaatttgaaaacagaatgttcatttgagaggattttgatgcccaaatatttcactgaattttcaatcgtcacaagaaaattcagttttggcgaattagtggttccatacctctcttattgcattcattaggcgatgtaaatagtaagcttccatagagtttcttgcaaaatgattaaataattgactaaaactgagattcaccacatgccgtatctctcagttgttacatgcacattacaaagaatttttaatgaaactaatcaatttagtgtatttgttataaatatatagccactaattaagtacgtgcaactttatctgcgattctcctagcatctgtatttggctgtgttgctgaatttcgttcaatagtccaaacaagtaatttgaatgttggtctttccatgtgtttgattccagtggctaccatgaataccatgaatataataaaagaatgagatatctaacttaatttggtcattaaaaatacataaagaaaaagaagtatggatataggttccaaagcttcttttgctaagctttgcaagaacttgaaaataattctgttagtaatcttctgctatgatgcatgtctgcatctatttcttttttgagaaccttgaccttgtttttgttctggcaggctcttctag

SEQ ID NO: 63420 - DNA, 214 bp, Cucumis sativus
  Intron number 1 from transcript Cucsa.005480.1 (locus Cucs a.005480) derived from phytozome v7.0 (chr-ID scaffold0005 5; pos 559658 to 559871)
aactcttactttctcggattcgacagttctacacagtatgtttttgccaacaattgagattcttcgtttcttctatggattcagttttgatttcgtttagaatttttaatcattattgatgtgtacccccttttcttttctttttttaatctttttcactgaactgatttttctgttaggtctctgaaagcaactgtgttagattccaatctca

SEQ ID NO: 63421 - DNA, 571 bp, Cucumis sativus
  Intron number 1 from transcript Cucsa.077440.2 (locus Cucs a.077440) derived from phytozome v7.0 (chr-ID scaffold0079 1; pos 596614 to 597184)
actttcctttcttcctcgattcctcttctcctaatgtaagtttcctctttccttttttttttttccttctcttctttcttttgtttcttttttttctttttttcatcttgcctgtagtgttaataaactgtgttattctctaggaatttattgttttgttgctattgagttagcgtcgtcgtcgtcgtcgttgtcgttgttttacagggctttgaatcttgattttctttttccagatggatttaatttaatatgttgtagttactgaatgttgtggatctggagtgtgcgtttttctttttcgtcggcattagagtctctgaaatgattgactttgctgctgttggtaattatgttcggattttgtttgtgtgaaattttaagtctttgtagatcgtactatcacaacaagggaatttgtgattctggttttggatgatgtgtgtgaatgaggatgtttgaatgttagtaattggatatttctcgtttcttctcttagttaaattagcaagtgaatgtggtttattattgtacaggtggttcaagtgagtaaagaaatagtgttgaaata

SEQ ID NO: 63422 - DNA, 428 bp, Cucumis sativus
  Intron number 1 from transcript Cucsa.095250.1 (locus Cucs a.095250) derived from phytozome v7.0 (chr-ID scaffold0091 9; pos 1171993 to 1172420 reverse strand)
ttcacacccgcaacttcacccgagttgcattgcaggtgaaattccccaaatacttcaggatgaaaccattcttctcacttctatctctgctcattattaaccaatgacagaaagttttgtttctgcgttcttcgacatcttcatgtttgagtttgattcatatcaagtgcttactcatattcggtttttgtgtatgtataaatattgctagttcatgggattcttttcatttctggttatttttctctttttatatatttcttatttaaaaattgaatttgggtttctttccttttggtgtatgggtgttcatattcttttgagcatacttttaagctaggcccttgttttttaactctctgaactttagttctgacgtttttttccactctttttctttgttttcttttgagaattttagttccctg

SEQ ID NO: 63423 - DNA, 811 bp, Cucumis sativus
  Intron number 1 from transcript Cucsa.066210.1 (locus Cucs a.066210) derived from phytozome v7.0 (chr-ID scaffold0069 6; pos 755324 to 756134)
tcaatcaccatcaaatctgattttgccttcgaacggtgtcgttttcatgataaattatttgacaaaacaaaatacaaccttaaaaataaagtataatttatcacgtgttaaaacgacgaaaaacacaaatataacttaaattgacatgaatatgcgaatcaatatcgtaaaaaaatagacggagtattagcatttgaatgtaaaaattgtgtaaaaattaaattatttcttcttcggataggtttcaattttttactcgggcttttttaattctgaaccaaaatagataagaaaaagtttttttaaaaaaaataaaaattgaattgttatccaatgatgcagaaaatattagagaagtatcatagattatgcctttgtcatagaaagaattttcatgctttttatcattgttacacaatgcaacaactagccactaacaatcaataatttaacaaaatcactcagtttaaaatatataaaatacttatcgatataaaattaaaaaaagtagaaaaaagaaatccaaagttgtataattttgtgatttttgatccaatggtaatgtttatgataatttaagaataataatgtaattttgaaagcataagagatttttaatatatacatttttgttttttttttaaaaagtggaatttagggaaagagagaagtacgcgtagggagaagcgaataagaatgcaacaggtggacggtgaatagagtcggacgggggactataaattgagcctaaaatggagtgtttggaaatcaggaagctttgagttatcgacaagaaattcaaaagaaaatc

SEQ ID NO: 63424 - DNA, 950 bp, Cucumis sativus
  Intron number 1 from transcript Cucsa.058130.1 (locus Cucs a.058130) derived from phytozome v7.0 (chr-ID scaffold0061 4; pos 378310 to 379259 reverse strand)
cattccctctgtctatcataccatccaaatttgtaaacactttatccccaacatttccttctcatccttttcttcttcttcaaataagatttaaagaaataaataaaaattagggtttgatttattttattacatttttgttttgtgtttgaaaattaattttataaacttttattatttcatctctattttcaatcaatcctttacaaaaccatgtaaatttttaaacactaaaactaccctactttttttccttcttagaataatttacttatttttacttgagaaaaattaaaacgtgtaagcaaatggaaggcttaatttaatttaatttaatttaatttaattttgtttttttaaaagaaaattaaaacaataaaacacatattccaagtaacaatttgaatatttggaaagatataatttcaattttataacaatttagtcataattgaaatctatcttcaacttttattattttatgaggtataatatactatgtatttggtaaaaataccttgtcacttattagtttttcggcttattaatgaaagaaattttattcaattgtaacactaaattctagtatagaatttaaataattacaaattttataggataataactaaatttttatataggaactaaattgctatattgttgtaatagctccaagaagtaaaagtatatatatcaatggtcctcgaagttatgtttactgaatttctacacaaattaggattctaatatattcagcagtcaacctaatatatacatagtttaacagattaaaatagagatcattggataaaaaaattgaaaaattattttaaagggtagaagtgttcaaaatattttacatctatcacttcagtaaaactatgcctaaaatggattatcaagtcccaatatatatgttgattttgaactgtgcaggcaagaattcattt

SEQ ID NO: 63425 - DNA, 754 bp, Cucumis sativus
  Intron number 2 from transcript Cucsa.120010.1 (locus Cucs a.120010) derived from phytozome v7.0 (chr-ID scaffold0099 8; pos 1978649 to 1979402 reverse strand)
aagtttggtatgttagattgtcattctacaacactcttgattttttcccctgctcctcccttatcccggatcataattagcttgtttgcactatattagtttgattataatgagaaattgtccactgtatgctacctcggacagttaatttctttcaaattgagctgtatataattttttttctgcccatacttattttgcattttttctttgtatttacaacaatggttgcacttcgagatttttgttggcctcatttaacttggtgtgagcaataatatttgaagttctgtcttttgctcaaatagttcagtttgaacttgggacttattatattagttgcgttgttatcgtattcatttcaagcatttatgtagtctgttggtcaagttattgtttagtataaaatctatcatggtgggttctgtgacataaatagttaatgcatagttaacaaatgtgataattatctcttctttgtggtggatagagattgtagaagaaaggcaaatagatctctcagctattaattctgtccattctttacatatgcctttaaattgttgattgttcgaactgtatttactctagtaaatatgtttttggctgctgagatatccaagttcgtggagtttatatgctccctacggacaagacaagtatttacatatgaccaaaatgaagtttagttttcagtattcaagatcaccattctcaattatattctccttggcagaaatagaattggaaaaat

SEQ ID NO: 63426 - DNA, 506 bp, Cucumis sativus
  Intron number 1 from transcript Cucsa.086870.1 (locus Cucs a.086870) derived from phytozome v7.0 (chr-ID scaffold0087 3; pos 250338 to 250843 reverse strand)
aatcgatttcttcggctcaggtagctggttttgttttcgcgttttttgttacttttgtttaagtttagggattatagtggtatgtgtttgttcttatatggctttgttgttcatgtttggctattggttgtatatacttggctgattttgtctttatgattgagggattaaaaatagtaggtgactgataaggggggaaaattggaaatcgtatttgtaatttacttgtctgcaagcatggttgaagtttttcccctttcagtagtactgttagtgcataactacattgttagaagctttccagatatgggagatgcttatccatccaatgtaagactaaagtgctgatgaaatgttaaacctaagtacaaaacaagatcgatacaattcttcctctttttttttcgtctttttattttgttaatgatcgatgcaattcaaagtaaaaatagttattacagtttgatttctttttaatcttttttgtttttcaatttgttaggtgt

SEQ ID NO: 63427 - DNA, 1001 bp, Cucumis sativus
  Intron number 2 from transcript Cucsa.121910.1 (locus Cucs a.121910) derived from phytozome v7.0 (chr-ID scaffold0099 9; pos 306589 to 307589)
caggaaagaagctgagaattgtgattctcttcagggtaattaaccaattctccatctctctttgagtttaaactcatagatctcaattatagtcatgctcgtgacaaaatttgaaagaggttcaaatccggaaacgtgtttttaaccattagaaaaataatgtgatgatttgaaaatcatgttgaaaattgtaaaaccaaacatcaaattgattttaaaagatgaagaacgtggttttcgaagggaatttaatcacaacaaaaatcactctaaaaaatgtctgatatagtttattgggatgattttgttgagttctgcctgtactgatatgaaacagttgatttctattgcttattctagagccttagcataggttctttgatgtgcttttggttcaaaataaaggtatatttattttctaggtcttgattaccaacaataataaaacagagcttttggttttcaaaatctaacaaatgattcaagatttgtaaaagaaaaggacataaaagtgaatcacatgactacagaagtgttttttaattgactagccggcttttaatctgtcaatatcatcagttcctacgtaggattttccttctgctaccatgccatgacactttacagtctgaggtccatataggtcttgacacaaggttaaaattctaatgattcatcaaagaggcttggactcgacggataactagatccaagtctaaaccaccacataaactaagaaatttctgaaaaaagtagagatgtgaatcctatattagaggaattgatattggaaatggaaacaaaatctctcatgcgttaaggaatgaagtaatgaagcaaaatccacgaggtttatggctgaaatggacaaccaaatggaaataagtggagtttccgttcaaaatgttcttagttcataaaccaagttaactttgtctactttctattttttctcaaacttttcagggtttcaagtgtgccattcacttggaggtggaaca

SEQ ID NO: 63428 - DNA, 486 bp, Cucumis sativus
  Intron number 1 from transcript Cucsa.113200.1 (locus Cucs a.113200) derived from phytozome v7.0 (chr-ID scaffold0095 3; pos 1443935 to 1444420)
ccaatcaccgctcttcggtcttccctcctttacgagtattcatttcttacttttattcttctatctttgcctcaatgcgttttatctggattctcagcgattgggatgtttttgttagacacccaaaagctctctcatttgattgatgaaattctggagtaattgcttgttaatttttatttttagtacgtatttgtctgaaccctttatgttaaagattggttctggtctagtgcttggctaattgttctgaaatgtgctgtgggttttttttttcttttgttttttgaaaaaaatacaatgatcttccgtttatgagatacgtgaaagtattacatttaaaaaacgtagggtgatttttagattttggggagccatattccattaggttttccgcctaagttctatttgcaaataaatcactaatactaaatgtgtgatttttgtacagggaacaagctcctcttggtgtacgctccatctcca

SEQ ID NO: 63429 - DNA, 208 bp, Cucumis sativus
  Intron number 1 from transcript Cucsa.084570.1 (locus Cucs a.084570) derived from phytozome v7.0 (chr-ID scaffold0086 2; pos 286943 to 287150)
cttctcaagttcttgacgaagcttgcgatatcaaggtttctcctctacttccacttctctttttttctccccttttctctttcttttctcaataaaccaaaatcttccaacaaaattagttttacattccttgttcctttttctctttttgattattattatcaatcaatcaggtgtataagaggcaacacctccaccaccacattca

SEQ ID NO: 63430 - DNA, 966 bp, Cucumis sativus
  Intron number 1 from transcript Cucsa.135310.1 (locus Cucs a.135310) derived from phytozome v7.0 (chr-ID scaffold0104 4; pos 161547 to 162512 reverse strand)
ggtcatgttggagaggaacaccatgattttcctaaacagaaaacagaactactcgaaagatttgggaagatgtcaaaaacctctcaggtttatggaccgggagatccaatctctttaaaaattatagcattagcacctgaacgcttttgtataatttcagggctattctctagcccttgtactctcccacttcctgtactgattggtctttattaatgaagtggaaatgatgtgggtattaaggagtatccacctagtgaagatgtccgagtgcatctactgacccaaaagtatcctttaaaaaaaagtagaacaaatttaaaagttaattaaaagattaaaatggattcaataaattagtttaaaagaaatataaaatttaaatcatgtgggacatgttttttaaaattgattttggaattgtaaaaatcattcttaaaaaaagatttttaataattcaaaattcaattttgatgatgggaacatcacatttgtaataatatttcacaaattcttttggaaaaaagtttttaatttctcttttttcaaagctaagaaaaatatcgtaattaagctaagatcggaagagatttttgtataattgtaagaaattttgtactgtgtagttatgtttttttcttaaaacaaacgctcaatcatattctaattaccaagaggaaaatcatgtgtagtatggaagtgacagttttgaggagtttatatatatattgccaaacaaagagagtgttcatgtgatgatggtaaagtaatgaattagggttttatttaatctttaaactaataatgattcatcactaaattgtgtattaataattaattaatctaatctctcattgcgtagagaacgtaaggaaagcaataaataagagttggttttaattaggttttagacagagaataataacatcaatagagaagaggtgtaatagtaatactacaaaggaa

SEQ ID NO: 63431 - DNA, 880 bp, Cucumis sativus
  Intron number 1 from transcript Cucsa.061690.11 (locus Cuc sa.061690) derived from phytozome v7.0 (chr-ID scaffold006 51; pos 189743 to 190622 reverse strand)
tttaattggtcttactatcgtcccggaaagaccaggtttcccccttttttctctattctccataaaattactcttcccaactgggttttcacttttatgttgttatcatgtcctccttctattttcagaaatctggatgttctttaacgcttttcgccaactgggtatttctcgtattgtgcgtttgtgtgctttatcctctttcttcccccttgcgtggtttccttgggggctggtgtcattagaatgattgctttaggacgccccttcaatttcatgctcaattgttgtttatgattgtcatctccggatactaaatcaaaaaatcgtgttctatactttgtgttttttttcttcttttctcttggtttctatggactacagctcacaatactgaaggttttttactcattcagaggtttcttctgaaataattttgcagtcagaaggaccagaggtacgctcgagcctacatagactttaccagacctgaagatgtttttgagtttgccgagttctttgatggccatgttttcgttaatgagaagggtaaagccgaaagctttttctctttttcctgtattgaactcatcggtggcttcttgtttcttatggattttgtgggtggttcactgaagctcaacccatttctgagaagtgggagataacaattttatgaatgacaccaatgcttaatatagattgctcccctttatgttttctgatgttcattttccaattgactacatatcaccttcgctacagtgaaaatgtttaattgttcaaaacatgtttcgttcaacatgcttagagttttgattgaagttaacttattctaatcaaatgattacaggtgctcagtataaggctgtagttgaat

SEQ ID NO: 63432 - DNA, 486 bp, Cucumis sativus
  Intron number 2 from transcript Cucsa.100060.1 (locus Cucs a.100060) derived from phytozome v7.0 (chr-ID scaffold0092 6; pos 673813 to 674298 reverse strand)
gcctcgagtagtagcaaagaacttctgtctggtaagcagctaaattatgtatctgtagtagtgtgcaattaaagcagtattggagatgaaattgggtcgtgtcttgagtacaattcatgagtagatgttgaagtttaatggggttgtggttgtatacctattactactgcttcaatttgattcataaatcgttgcttttacgtttttcagtactttgtggatatggggttagtgaaagggagaagattaggggggtgatgaaatatagtgatgtaagagcaaaattctagatatgggttttttttggtagataatatcaccattaccattttctttgttcgcttcctcgctttttatgaatggtttgttgtttttttagacgccttactttctctcatataacttcgtcctttttctttcttaactctttatttttaaatgaattaaacaggttcttcggacaacaaaaacgctaaatctgaaaca

SEQ ID NO: 63433 - DNA, 939 bp, Cucumis sativus
  Intron number 4 from transcript Cucsa.120980.1 (locus Cucs a.120980) derived from phytozome v7.0 (chr-ID scaffold0099 8; pos 3013330 to 3014268)
tctaccaaaggaataattactgcccctcttggattgtatggtcgacttgtctctttcttttgtgatgtcactgcattccctatgtaactgaattacatataattcaatattatatgtctctctgtcttcttttttcgtataaaaataatcacatttgttcaagaggttctgcataatcttgatgattgaatcacgtataattcaatactatatgtttctttgttttccttgttgtataaaaataatgaagtatgttcaagaagtttagttggaatttgttaggcatgaaataaacatacatatgatcgaataagacttgaacctaggcttggagagagttgggagactgttttaatatgagctaacttttaaaattgatatgatttcagtttatatatatatataatacaaatagcataaatgttgaacactctcaatatcggtcgtgcaaatacatatgatttttcaattcaattaatgagaatacgaaattgtcctttgaatttctttttcaacttcctagtaaaaagtaatttgaaagcgaatatttattaaaggatagataagccgtgcttatattgattaacataataagtttaggcatttgatgaatattaatattaaatattatacgtgtcattgtatcaattttttactaaccaattttttattcatctttatcaaaatgaataaaattcaagtgatatagtatttctcaaagtcaaatatttaatttgtcatctcatccataataaagaataaaagagtttactattagatggatataaaaatgagattcactacaacatccattgttccatccatttgaaataaacaacacaagttaccagaatagtgttgagaatggggaaatgaagttcagattttttcatcaatcaagctgtaaatggttaacagtttctacttttcagattactt

SEQ ID NO: 63434 - DNA, 725 bp, Cucumis sativus
  Intron number 1 from transcript Cucsa.091810.1 (locus Cucs a.091810) derived from phytozome v7.0 (chr-ID scaffold0089 4; pos 2704913 to 2705637 reverse strand)
ttcatattgatttcgtcactgttagaaagctcactgtaagttgttttcttttatctccccttcaaattctagagagagaaactgaattcttgtggtttggaaaagctgttgggtcttgaatgatcattttactctgctgcgatccaatttgtagaactattcttgaagtgtttcctttacagtggaataattataatttagaagaatctgttgatgaacttggggtatgtttatagaatttggaaatgtttataatatacattatcagaatgtaggcatcattttgtgatggcttgtttaaaatgaaggccatcagaagatttgtaatctcttaaatttacctttgctgttctaaggtcttggttcaagacccgaaagaaaccctcgaattcttggtcaaagttcaaaagtaaaaaagcctacttttttagtttttaaaacctgacttaatttttaaaagcatcatagaaactagaaactgggtaacaaaggatagaaacttataggtggaatggagaatgtgttttatgagcttaactattaaagaccaaacgattatcaaataaggccgtgataacccgtattgtctctcaagagtagtcttcggtggggaaagcttctccaaatagtgaacctatggtattatgtacacactaaaataatgaaaagggagatgtacgaagtctgatatgaattaataacctggtggccgtagagcaaagctg

SEQ ID NO: 63435 - DNA, 987 bp, Cucumis sativus
  Intron number 2 from transcript Cucsa.112340.1 (locus Cucs a.112340) derived from phytozome v7.0 (chr-ID scaffold0095 3; pos 978534 to 979520)
ctaatctgcccaacaacacagaggtctggctcaaggtacatcattctgactcaacttcaactattttcttttacagaaactcgtttgattgtcttcccgccaacgtggtaatggatgcgttacatccatcatttctctgttagagtgtttgtacatttactgtttattgtttctctgtgatacgttttgtgctccactctatttattcaataagatgaactctctttaatttgataggctattacatcatgcacggcacttttaagaattttgccccgtttcatacttcctcagaacataattttgccggtggcctttctgctgatttacggaactctgctttccgtgtccgaaaattgattgagagttctatgatcagattgacagtttttcgtttgaagagaattttgtatgtgaaactttcaggcgcatgagcaacattaaagaacaatataggaccataaaataaataatatatcaactgatggagggagtacataagcttttctggcttcaccatgccttcactttaatggtattttcatatttcttctatccacaattgaagtatctgttcatgcgtgactgcacttttgcccaaggacttcagagtcacacttcgatgtccttatcaataaaatatttcaattccaattttgagtccctcttagatataatattaaatctgccatcatccactagtttaagctattgggctgagttggtgatttaagatggtattaaagtagtgtggtttgggatgtcctggttcaagactctgcattgttgtttccttttaatttaatattcattttcattttttggatatttattcatatttctaacccacaagagaggggaattagatataatatctaattttgtttctaaatgtacctagcttagttattcttgtttaactttttttttttccttatttacttgtttacactaatgaaatattcctggcaaaatgaatacagcgtg

SEQ ID NO: 63436 - DNA, 357 bp, Cucumis sativus
  Intron number 1 from transcript Cucsa.017790.1 (locus Cucs a.017790) derived from phytozome v7.0 (chr-ID scaffold0025 2; pos 44843 to 45199)
tgaaggagagtcagacagttgggattttggtgtcggtatgttacttctgactgtcatattgtagttaaacaaaataactttgatattattttgttgctcttcaaattgaaccaatgtacattgaagacctagcccttactattactaaatttttctcgtttatggagttaattgtattgtgtatgtatagtcatattctgaatcctaccttcgatgtattttacatcttgttctatatggcagtttagtttctcaaaataaaatgcattcttgttcccacgtacaaaattatgaatttagtttaatttttgccttctctttttcttgtttcttaaataggtgctggattttatctca

SEQ ID NO: 63437 - DNA, 279 bp, Cucumis sativus
  Intron number 2 from transcript Cucsa.076090.1 (locus Cucs a.076090) derived from phytozome v7.0 (chr-ID scaffold0078 9; pos 553543 to 553821 reverse strand)
tcgaattcgattgccgtctagctcacgcacgcgatgtaggattccttttatgtcttctattgaagtgatttagactgcatcaagttctggttgttgattctgtttgatgatttctttttattatcttacgcttaagtaagtgcgtctaattagaatgaagaggatgaacaaacccactcccccatccttttttcttttgagattaccaatctttgttttttattcgaaactttctgtttttcagttataagagctgttgcaactcctaattcggcgttg

SEQ ID NO: 63438 - DNA, 745 bp, Cucumis sativus
  Intron number 1 from transcript Cucsa.132910.1 (locus Cucs a.132910) derived from phytozome v7.0 (chr-ID scaffold0103 7; pos 745965 to 746709)
catcgagggcaggtcttggcctgcaccgcttagaggttccttcctctcgaaatcccacgttcttcttggaaatcttttttttttcggcgccaggctctgtttaatttgtttgaatgttgggataagcagacaaaatgatagtagaattgggtaatcgtgggtttgtagttactttattgtttgtcatttgtttgattctggatcagatgcatgattggttgggaattagcgtttttgttgtctttgattttctgtttctgaaaaccatgcttatttaagaatattttattgggggcttttcaaataaatttaatttcttccttttaacattttttgtcagaacttagaagctttagttataaaactttcgtagtatttcagatatttggctataatttctagagcttttatagagtgaaaaactaaatgaagacttcatatgagaagggttttttccccccggaaaataatgttagtttattacgccatatacgtttttcattttatttttaatataggtgaattgcagatgatccatgtgagattttacgctatgaaaaggatttgaaactaaaataacaaacattgttgaacattgtatgtttgtgagtgtcctattttagttgtcttctttatttttttgtagtggtgtatcttttgttaattaaccttttctttgtgaatatggtccagtaatgattgttctaaattatgaatttgatatctgaaggccgtctttggattc

SEQ ID NO: 63439 - DNA, 858 bp, Cucumis sativus
  Intron number 1 from transcript Cucsa.079890.1 (locus Cucs a.079890) derived from phytozome v7.0 (chr-ID scaffold0079 3; pos 2806942 to 2807799)
tcatcaaccaggagttcgcacgattgcaggttcgccttttcttttttatcctatatttgtacatcttctccctaaaacttgacaaatacagggagatcgatctggattttgcttatttctctttgtaagaagttggaaaatgatggatgtttgtattcaggtttacataatggtattcctgaatttctctattcattctactttcttgctaattgaatttttaagctttgctcgggaagtttctaaatgaggttctagtattgtggaatagaataaatagattttatggattgatcaatgctgtgtatcaatgtcttggattttgcctgggaagcatgtacgttttgtttgagtaacgtgtccacgtccaacacatgttggacacttgacagttcaacaatttatagacacgtagaagtatagacatgtgtcaggccctggttctgcaagcatgaaatacttatgagacatgatcaatggaagaaatagcaatataccatgaaaataataagttttaagtgcaaaatatatctctcgcttggttaagcatgcagtatataaacttattattaattttgaatttcattcctatgtaaaattgatatacattttgaaacggtatattttaataaaaatgtcaatgtcatgtcttatgtcctaagattaaaaaaaaaaagaatgtgtctccatgttcatctctagtcgtttcgatctcttgtgttagtaattaggattttatattaccgtttctaagttgatcaatgtcttgaatgttggcagatcattttttctatgttctaattctcatacactgttgtgtcatcgttgattcaggccaagagaataactgcatctggt

SEQ ID NO: 63440 - DNA, 327 bp, Cucumis sativus
  Intron number 1 from transcript Cucsa.100260.2 (locus Cucs a.100260) derived from phytozome v7.0 (chr-ID scaffold0092 6; pos 809073 to 809399)
ctcttcgtcgtcttcccttttcagcttcagaacaggtaggggtttttttatttgtttttctgcgttttttttttttttctgtttaagttgattctatgtcggttctcttcatattttagtgggttcttccttgatttctgtacccaagttcatagctaggattgggattttaagacctggatttgattgagtttaaattattgcataatcatgtggatttggacttattttgtgctcctttttgtggggggtttcttgtttttcattcttgtagttgcggctactgcttcatatgtaggaaacaaaagtccaacactcagccgagac

SEQ ID NO: 63441 - DNA, 321 bp, Cucumis sativus
  Intron number 3 from transcript Cucsa.043400.2 (locus Cucs a.043400) derived from phytozome v7.0 (chr-ID scaffold0054 2; pos 210945 to 211265 reverse strand)
acaagagatatctccgtctgaggcagagagttgaggtctgtgattttttaatatcaaatcctataatgcaatgttttttttctcatcacttcatacaatatgcctccatattttggattagttgaccaatgttgatagaaaaaagaaaagaaagaaagtatatattgaagaatgatcaaaggatatagaatactatagtaatggaaatatctaccaatcttggttaatgtttctgtttagcatgcattcatacagaataatgtaaagaggactaaggttttgtttggtaatgaatcttgcagtttccaggggataaacaaa

SEQ ID NO: 63442 - DNA, 464 bp, Cucumis sativus
  Intron number 1 from transcript Cucsa.104800.1 (locus Cucs a.104800) derived from phytozome v7.0 (chr-ID scaffold0092 7; pos 3155818 to 3156281)
ctggtatggatccatgctatatatatatatacatatattcattcattttaatacacatttactccctaacttacaaacaaatgttatgatagtacgtgaaataattctaattttgtgttcaacaactccaacaactccttaatatatttgaaattttaaaaaattagaactcaattagcataatgtattgacttggtgtgctctcttaatttaatctactttgttttattgtgtttaattaaacgatggttgcttggataaaggaagagaaaacaaatttcaggtagtttcgttaaatattacattgtaggaaaagcagagcaggaatgatatatgtaaaagctcaaaatcttttctctctttttttttcttgaaaaaaggtaaacattatatatatatatatacacatatatatagtgtataattatgttgaatatataatatttttgtattatgtataggat

SEQ ID NO: 63443 - DNA, 960 bp, Cucumis sativus
  Intron number 1 from transcript Cucsa.100430.1 (locus Cucs a.100430) derived from phytozome v7.0 (chr-ID scaffold0092 6; pos 907331 to 908290)
ttttatcgactaggaatctcgaattcctttggtgggtaagctttttcttcctgtatttgagttgggaagttgatgaatgagttgattttatggttttttttctttttcttgtttgatcttatgttctcatttgtttctgtttcttactgagggagattggttttcttgccccccttaaaacgattcattgagcttttgttcaaacagtgctgctgggagatctaggtgctcagttcagttgtgatttcttgtagttgatctagttttcaactcggtttgttgcttgtggttctgtttcttttggagtttggttgtggatatgattttaaacgagttagaaatatgaacactttttcccccctccttgagtacattgcggaagggcttttctgccatggttaactgcaatcaggtttttcttttggacaatatccccgcctgaacctgaaatcttagtgctcttttcttatagttcttatcagatgagtgattttatcacgcttggtaataatttattttttagttttcaaaacttggcttagtacttgaaaatacaaacgtagatagtaaaacaaaggaacttatgggtgaaagtagtgtctataagttggattttcaagaataagaaatcaaatgcaatggttactaaacgactcctaattattagatttttgaaactttttagttttgaggttaaaaattagctacgagtttcaaaccatacaccattgaatttagtgtttttcatggttcttttcttatagcaacattaatgggcttttttgaaggatagaataacttagttttcactttctttatcctaaaatggaaattaggagttcttttccgaatattgcctaaacaagtaaagtgtttaacgtatagtgaatatttgtacttgtgtagtgaaggatggtggttattaattcatattgtctttcttttcttatagcaagttta

SEQ ID NO: 63444 - DNA, 818 bp, Cucumis sativus
  Intron number 1 from transcript Cucsa.096620.7 (locus Cucs a.096620) derived from phytozome v7.0 (chr-ID scaffold0091 9; pos 2168246 to 2169063 reverse strand)
tcctcccgctgccgccgctcgccacattttcagtagtgggtaaattttggtgttttcttataaattctttctggaatgttttttaatacccactaagatttggtttgatggtttggattaagccacatttggtcaaaatttatttggagaccgttacattttattttgtgtttcggaactagggagctaagtttgattatggttgtgttaggggctttgatccaagattactaaatattttggctgaatttcgaggtaggtagctttacgcttgttggatattatattaaactgaatgtccgtgaccaagaatccttgttgttgatttaagcttttggtgatttaggatgatattcatttacatacgatgatatgttgtgagaccccttatgccatgcacgatgtatgttagttcaattagtgacaactgtcctcctacccgtagctatgcacaccatacaaaggtttgtgttcctttggttcacatgataacagttcaccagattgtacatctcatctaccgtatgactggtttcattgttcactcagatgaccttacatgttacaattaggttccactagttacagacattcagttgcatctgctttcatagaccgactccagtagtggaattatgagcaattcgtgacttactgaatatatttattatccttgcaaatagtttccaaaataccctacattttgctaatattttgaacaagaatcctatttctgcatttaatccgtctggaagaaattgataatacatcattttccattctcacaagggttgattgaagcgttgaaataacataca

SEQ ID NO: 63445 - DNA, 588 bp, Cucumis sativus
  Intron number 1 from transcript Cucsa.010890.1 (locus Cucs a.010890) derived from phytozome v7.0 (chr-ID scaffold0015 4; pos 257212 to 257799)
tttcttctactttgccccctcaggtaagcctactcttttctgcattgggattttttgtatgaatggcttcttttcaaggatccaactcagttgcaccattcaagctatgggtttttttgccttttgttaatgaaattaccaaagtaaacaaaatacatgtgtgacgggctagctcctcaattctccatctcgcttctatatctggctcctcaatacacgtttctctccttctttctctgtttgtttcctctatgttccctcgattctcgttctttctctttgatctcacaacaatgcatgctcgctctccaacttccatcgtgaaagaggaaggacaaaagaagaaagcttttatattgaagaagagaaagagaaagaagatggtacaacaagaagcgagaattgggaggcgaagcaaggtccatcatgcttgcattttttgtaattttgataatttcattcacgtaagttttcaaacgttgggtcagatatcattttagcctccagaaataggcgattcgtgcagttttcccaagcaaaagcaacaggacatgtatcatttcttgttatctgcaggtgcagttggtt

SEQ ID NO: 63446 - DNA, 1038 bp, Cucumis sativus
  Intron number 1 from transcript Cucsa.107660.2 (locus Cucs a.107660) derived from phytozome v7.0 (chr-ID scaffold0093 1; pos 27679 to 28716 reverse strand)
aagtcaaagtgaggaagagtggcaaaaaggataaggtactgatttttcttgtcaatgggttttctttccctttgatttctttttacttgcatttcgtagatctttagctgttttgtaagttttatgttctacgttgctgttacaactagctcttgatttgatttcactctcctgctcaacttgtgtgctgttggtgtatacggaaaatgtgttctttttgccttgttagttagtggtgggaatgcaaccgaagtcccatagataaggcctaagggacgataatgagtatatcttcgttattatgaggaggccttttgatttcattagtacgaggcctttggagtgttgctcacctaggtgttagaaactatgacttctgatgggaaattttggctgtgtagacagttaaaagaaaggagatagatgactaatatttggggagaaagtgtgttgtcttgtgtatgcttctgatattggacctattagctaaaactttcctatgactttctgatctgagtaaatgacttgccttcttcagctcctatggctatgattccctcatataatttttggccaagttttcccatcagtttaaagtttctatttgcattgtgaatgaactattttttatctcttgttaggccctttctgtttaggcttgtgtgaaacagcaaactgtaatgtcatttttcattcaaaagatgcaagatgcaactaaagcttgcgttagtgtaacttccattaacatcttaacaaaagaacatgtttcttcctcctaatgtcttctggttatttgcttttggtattcaaatattgttttttttttttgataagagaaaaagaaaaaggtattcaaatatgtatttgataaccatgaatcctattatcatgtggaacgttaatacgaaaaggaagtctgtataaagatcagataactgatggtggccaataatgttctgttcattttaagataaataattagttggatctttgtgactgattctaatgttgcagtattattttgaaccctcaagtcaa

SEQ ID NO: 63447 - DNA, 800 bp, Cucumis sativus
  Intron number 1 from transcript Cucsa.091550.1 (locus Cucs a.091550) derived from phytozome v7.0 (chr-ID scaffold0089 4; pos 2539580 to 2540379)
gccaacagaaatacaggttgcctatttttgtcttttttgatctgggtttgtttctttcccctgttttttttatgggttggggtacctttcttgttttgctttcaaatcgtgatccgggtgtcgttgatgcaatcgtaccctgtttttgaaggaatttttgtagtaatttgagttagtctctgttgaatgatcctaccgttaattggagttctgtttcccccccctcgtattcgatctcatgatctttgaaagtttatctcgttattgatctcatgacttctcttcagcgaattttatgtggtatgggttgttctttgtttaattgaatgatctatagaatttgagcgcttctgaagtggttggttggtgagctgtgggaattttgtgatagtttgaaagcatttgtggctgtttcaggttccttggtatctggaaaatctcaaatctcttgttatgtattttgcaactagctgtgtgttaaattttagctcctgttgtaggcttgttcaatcttgtgagttggatgagatgatttagttgaagcgtgaatgcaaaatgggcttgtttgggttcatggcgtctagatcattaatgaattggtgcttgtggaagaacaaagcaatgccaaaaacttgtggaagaacaaagcaatctgattcacacttttacacacacaacacagtaatggctctgcttttctgctagaaaactgattcgatgcctaaaaaatgttggatgctgttgtcgcttttgcatctctattgattcaactggttttggcttttgtaggtatctttcag

SEQ ID NO: 63448 - DNA, 673 bp, Cucumis sativus
  Intron number 3 from transcript Cucsa.100480.1 (locus Cucs a.100480) derived from phytozome v7.0 (chr-ID scaffold0092 6; pos 934731 to 935403)
atagctgaattcaagaggtaccagatttaatctttttgtcatgtgatgtttttgttccttgattgctctaatgtttacggtaatgctttttgatctctaattttcttcaatgattgtggtttgtgaagttctgtcaatataaacagccatttatgctctgcctaattctatgtcatggttctcttcatagtgtcttgtttattggttattgcttcttctataagaaaatttctacgttttgtgttgttctggctgattaaaagcaatgaagtaccaaattatggaaagcaacgaagtgttcttttaattgagtcaagataagaaggaaatagaatgcttgaatgaatcttcgaatgtgcatgtattggtaaccattctatttctccaatctgagtatagctcactacttgaggcatatgctcaaccaagaatctgacgtttgaatccccatacccacacgttgaactaaaaaaaaaagtccctttttccttgcaatgtgttgggttgattcttggccatgtatgtggattatattgtgacgagattttgttcttcatttgctagtttcgtatactttttgggatcaatgttttacgacgtccactaaacttcctacatctatgtttttgttagcatagccgtggtaaaggacttgggaaagaatctgtcctaa

SEQ ID NO: 63449 - DNA, 598 bp, Cucumis sativus
  Intron number 1 from transcript Cucsa.012170.1 (locus Cucs a.012170) derived from phytozome v7.0 (chr-ID scaffold0015 4; pos 1645210 to 1645807 reverse strand)
cttgatttcgcaagggatcggtctaacctgatacggtaatatggtattttcaataatgcactctatctgtttgataaattgcctgagagaccaacggtattatcaaaatcgtgttttttgaacaaaaaaagggtgttatatctcttgtctttttgggctccaaatatgtctacgaactccttggttttgaagaatgtagttaatcaaacaggtttattgctgcattgccaagttagagactaacccgaattttgaatgttactgtgactttctttactgttctttcttcttattgcattttttattttcataaaagatgttttatccataatctcttgccttgctagggtatttgtgcaatattagtactctctgaagtaaagcttaccattcttctaaaaaaaattgagttctcttttggtatcatctttcctgatgtgtaaaaacagcctactaagttgggtttaagtaccaagaagtacaagtatctacttaacttcgcatcttttgttgcagtttccttttgtcacatgtctgagaaagtgcagtatcttttcttccaggtccttgtccaggaaagacttagaggtgattgcag

SEQ ID NO: 63450 - DNA, 792 bp, Cucumis sativus
  Intron number 1 from transcript Cucsa.130110.1 (locus Cucs a.130110) derived from phytozome v7.0 (chr-ID scaffold0102 9; pos 96427 to 97218)
cattagacgttgtgaaaactcggctgcagtgtcaggtaatatcactccttctttcgctcgtttcttaattttcttttttggctaaaggactttgtcgatcatatgagtaaaaaatatcaaatttataccatattaacatttctgaggggttcttctattttggattgttatctaagtacatcttcgcaatatttctaagttcttctattttggattgtgatctaagtacatcttgacaatattggattaaatgtacaacttgtgagatttgattacctcgatatacttcaacttacactcacctcgattaacctcacgagataatctgataacccggctaatcctacaacatttgaatacccacttgatcctacaatattttggtgtcgaacaaatttgtaagaaattaattcttagataaatgattaacataatatgaacttgtatttatttagttattgaaacttggtgtcttttcttgccactaaaccaacccatgatggttccaatggacacgttatcaattgaagctacaacttttcacaccattctatcaaatgaggataacccaatctagaagtgcacacttacttaacgagcatacacactcctaacattaactacattttattttaaagtacctagataaccaccataacttaaataaactcatttagttaacttatttcttcaaaatcaatttttattagagaaaataatctcttgtacaagcagccctaactggaaacttagatgtgattctcttctgctttgactgtacaaacagggagt

SEQ ID NO: 63451 - DNA, 552 bp, Cucumis sativus
  Intron number 1 from transcript Cucsa.044480.2 (locus Cucs a.044480) derived from phytozome v7.0 (chr-ID scaffold0054 2; pos 815764 to 816315 reverse strand)
acctgcaacggtttctctctcccgattttttaaaggtaaaaaacaagatgatccctgctctctatttctctatattcatcttttatttttcagccttttttgatggtgttttctcgtttcatttcctgcgttattgatgtaaatctcttgttttgttttcagatttgtttacaagccctagttttgttcgaaacccatgattttctgtaacttgttattgctccaccgattgtgtttcttctgattgagaagctgccatctgagactttatctttcatcggaattgtttcctatcgtcattgtcatttcatttagacgatatttgaacgaaattgtaatttggtcttatctttccaccccccccatagcaatctgaatctttgttgttattatttttaaaattttccaatagtaaatcatctctgtttgatgaaattatgcttcttgggtttatcacttatgcggtacttgtgattgattgttatgattaacacgtgagcttgtttcaacaaaattgtttagacgtttttcttggcgattcttggcgcaggt

SEQ ID NO: 63452 - DNA, 917 bp, Cucumis sativus
  Intron number 1 from transcript Cucsa.111770.1 (locus Cucs a.111770) derived from phytozome v7.0 (chr-ID scaffold0095 3; pos 476946 to 477862 reverse strand)
tcgtggactgattttgcttatacttcgcctaataggtaatgttctgtgttaactctttgggatttctcgtttgtgaattcttctagggtttcgcgtcgatggaggaagtttgatagtgtagacgtagttggatcatgttttggatgtttatccttttttaattcgaattcaagggctgacgacatctttaacttctccaattaattttatataatgtgctttcaaattttaaaaacgataacttagtttagatcgttagacaagtatttattctttaaaccctatgaaatatggcaaaaatctcactgtttcagtgaaaatctccctctcttctaattatttatattatcatccaatcttattctttttggttgcttcatatatactgattattttatgtactatagcctacaagtggagacatgctgtaaagtttgatattaatatttaattgggatagattagtgtgaatactatatatatatatatatatatatgcacacaactcttgttaatgtgcagccttttttgggaaagggagactctcaaactgaatttatttttaaattttctcatccaatttaaaaatccaagtcaaatacaaaatgttgtgagggagaatgatgtcggtgtactaattgttgaagtaaaactaggataacatgctcatccaacttgtacttttatgagaaatcaattagatgggaagtttgacttaggttggtttgctatgaaaacttattgctcatccacagaatgtctacaacttcttgaaaaatcaataccttttagtagtgtcattgaaaccccacaaacagagttgtgaaagttttctaatcacatatttgtggtttcctttttctaggcatttgtttctacattctaatctaatttccatgtggtttcaggtcggagat

SEQ ID NO: 63453 - DNA, 833 bp, Cucumis sativus
  Intron number 2 from transcript Cucsa.093790.2 (locus Cucs a.093790) derived from phytozome v7.0 (chr-ID scaffold0091 9; pos 98280 to 99112)
tcttcttaaatctctattgggtttccttcactcaggtaaatggctgtttttttgtgagaacttaaggtagagtttctatgtttctgttatggtggaatggatatatttctgtgtttgtgaatggggatatttctgttatattgctatgcgtatatttctgttatattgctttgtgtatgcttagaaacagaatgagaatcatgagacttaatttagtagtttttgttatggtgataaaataactacatgaacttgtttaattttctttaccatggctatgtgcacatggacttgtctatgtttggttacgggattttattgtttaattttattttcacaggatgactttatttcctgtagacgagacttcaaaacaaagttgttctagtctagtgataggaaaaaggaaaaaaaaaaagacagggaaaattaatcttcttgttgatgcagttagtcagaatggcatgctcgctaagtctaattgacatttaagcaaaaatcctggctagaactgcattacacatcatgccacatattatacaaatttagtgtgacttaagtgtttacattggtcactctaatttaatatactttcatgctactgatacagaactatacgtgcccatataatggttggacgatggtgtgtgggaagatgacaaacttttcttttgaatattaaaccgactttaggtattgaaaattttaacgggggtagttgctttgattgtttttggataattcgttccttttttctaatttaggttacatttatatcttgtttgttgaattcttatttaattttctcttttttatggcttcatttcagtggt

SEQ ID NO: 63454 - DNA, 949 bp, Cucumis sativus
  Intron number 1 from transcript Cucsa.132870.3 (locus Cucs a.132870) derived from phytozome v7.0 (chr-ID scaffold0103 7; pos 715123 to 716071)
tacccaacaagcccaaactccgaatcttcacaagggtatgcgccaattcatcttcttcttctttttttcttccacttttaactagattctttctatcttatttctcccaattgttgtcattttacgtgatgcgtttctgatttacgattctcctgcaattttttctttttctgggttggttttgaatttctctgcgtgctaattggttttgtgatttggaaagaatctggaagagtgtgtttggagggttcttttgaatggaattcttggactgtttttgctgttatgttgaagttcgaaagcgattttaaagagtgaaagagacgtagatttggtgtaagtcgggtacaggtagcatataattcagggggccatgtttctggaaacgtatacaaaacaaactcctccaacttttgtaatggcatgtagtttgagagagaagcaaggatatcgtcagaagctcccaaatgaataaagtctttaaaagggtagttatgtatggaaagggaaagtgtcctttttggtggttgctatagtttgtaactagtgatgtaagcatatatcacagatatgtttttaagtagttttcggagtattctttttcacaaatggtcatggttcaggttcagtgaagtctatttcatctgtctattgtctatcagattcaaaatccatctgttatagcattttaggtggaacaactaatgaactctaacttaataactattaaatcttttggtgatctcaatactcattactcaatttacttgagatccattgttatttatttggagttttgtcaatgctaatgattgcattgatctataccacttcagctgaaaatctattttccatgccatgctgttaccctctcatgattagagcatgtgatatacgttagcattatgttgcagggggtgcagcctgttcgtaagcattcaactctcat

SEQ ID NO: 63455 - DNA, 405 bp, Cucumis sativus
  Intron number 2 from transcript Cucsa.114780.1 (locus Cucs a.114780) derived from phytozome v7.0 (chr-ID scaffold0096 8; pos 132186 to 132590 reverse strand)
gcattcaaatcttcccacaggttatattttaatacttgtctcactcttccgctcctattttataatcatttaacttctaaacactactactacttcactggtataattttcttttcctgtttgttgtctacattatttcagcaataatatattcgaaatccatacgtactcacgttatctagacaaaaagagaaggttcttaaaacatttttttaactattgaacttcaacaaagaatattcaaatgttatatcgaaaaaatagagagctgttgattttctcaagagtcaaagtggctattaaacaagtatctagtaaaacatagaataaaatatcactagagaatatgcacaagttgactagtgaacacataatttttaatatggacgtttttgcaggtttggg

SEQ ID NO: 63456 - DNA, 745 bp, Cucumis sativus
  Intron number 2 from transcript Cucsa.104280.3 (locus Cucs a.104280) derived from phytozome v7.0 (chr-ID scaffold0092 7; pos 2862196 to 2862940)
ttactcgaaaggctctgaagaagcccgttgaggaggtaattgtctcagaaatttgaggctgtttctttattacttaatcttaagatgatatttaacaatgtaaatgatggtcccctgcagacactaacatggcactgaaaaagaaattgagtcaccatggacggtcaaatattttgaaacttgcaaatcaaagaaaatttgtttttctaaatagcttaaataatatagaatttagcaaaaaatgcctcgaagaaagacgatatctgtatatagtaatttcggttgtaattattgatgaactccaatttcttggagatttggacagactttgaaaagtgaatgttcttaatatggaaaaaatacaatgagaggatctagtactgaaaactggcattgaactccaacaaaacccaaaaagatttttagtcttgggaagcttaaaatcctgaaacacataaatgggctctgagtgattgaattgtattggaatcacatggatgtgtggtggtgaagaaaatttacgtgctgcaggaaatttggttacagtgtgaaaaaacatgttaagaaggtgaaaatgaaccttaggatgtgatcaaagcaaacttttatcctttataacaaggtttaataactttatggctttcattttgctaagatgagatgctatttcccatagcctctaagtatttatgactttatgaagactgcagctttagctcaaaagacttccgaggccactcgagca

SEQ ID NO: 63457 - DNA, 816 bp, Cucumis sativus
  Intron number 1 from transcript Cucsa.077900.1 (locus Cucs a.077900) derived from phytozome v7.0 (chr-ID scaffold0079 3; pos 64300 to 65115)
cctacaagtgaatccaacttcttctcccggttaaggtatgaaacccattttccaactatgggttcaatattttcagacttttttccaaggaaaaataaatgaagattagcaaaagatcaaaatttacaaaattcataatcagatgcgacaatgcttttgccttggttggttttatttctcactacttgtgccaataaacgctctagtaattgttcttttgtgccaatgatatatagtttattgggtttaggtacgataggggtaatgatagatgtactaatctaactgagatgtccaagtatacctacccgtccctcttagcaaacccactctaagtattttgttaaaaaaaatgtaaaaatagcattctataagctcaaattttaaaatataacgattgtcaaaagaggcatcaatatcaatttttcttaggcaaaaaaatctcatataaattaactttcacattttgcagtttgctgaaggaagaattgaatcttccatgagcgaaattgtttagaagaggaaacaaattgaaatgaatgattttattgaagcaacatcaagtacagtacaaaattccatcataaaaatggtcaccacaattagagataatattcaaacttcccaagatgatgaatttccaatgaagaacaataataatcataatcactcttcttcttcatctcatacgaatcacaatctaaactatttacatagtttcctttacagtcaataacctaaaattagttgggaaaaaacacccaatttatttctctaaaagagacccttcaaaatcccctccatttttaccaaaag

SEQ ID NO: 63458 - DNA, 779 bp, Cucumis sativus
  Intron number 3 from transcript Cucsa.115580.1 (locus Cucs a.115580) derived from phytozome v7.0 (chr-ID scaffold0098 8; pos 186224 to 187002)
gaatcagttcaccaagacccttgacaagaatcttggtaatttaaccctaaattctcacggagattcctagtacattagctgtattagatagtaataattgaatggtttagttaattacgaattgtgtcccatttcggtttatgcttttgtttttcagctggaattctcataatttgttataaagtatggacctttttaggttatttgaacgataggttgtatggtttcacttaattttaaagaggtgtaggagaaatatgtagttccataccttactgattgatggtttggttttggtaccttgagatttgatactatgttttgattggcattgcaagttcatttgggagtcgatagtaagcttcagtctcttggaacctagattttttcttgtgaaccccattttccaccttgggtttgttggatcatgcttagatcttccgcattttgggttgtttagacattctaacgatcctactgtcataaatggttctctctgtaggaacctattatacactttatagtatatggtcgtgaatgaaatgtgcctttgttttttatggtagttatcatttttttttctaatttccattttggagaactgtgtcgggaaattcttctggtcatctttttatttggttttgattgaatattggatttaaggtgtatttgggcttttgcttttttacttttcttgtttcttggcatttgttggatgttggttagtctgttatttttaaatgccttttcatgcatttgcagcaacaaatttgttcaag

SEQ ID NO: 63459 - DNA, 823 bp, Cucumis sativus
  Intron number 1 from transcript Cucsa.115510.1 (locus Cucs a.115510) derived from phytozome v7.0 (chr-ID scaffold0098 8; pos 115776 to 116598 reverse strand)
gccgtttctatcaatcctggtacgtttttcatttttttctgggtattttctcctccactgtttacttctactttaatacttcatttatcgattccccttttggtgacagctcaaacggtgttgttttccctattctttgatctctcattgcactctgtttcttcacttgacttgggtttcattcatttatcattttcgttttggaatcaatctttgaatctttgtgatgggttcttttgtaaactgtttgttttgcttctcattggatttctcgacattgtatgttgttttgcttgcttgattcttactgggttttcttttattagatttttttttcatgctttgatgaaatatgagactagtttgttgttgattgttctatgattatggttttcttaacgattcttttctctttctctttggttttttgtgttgttgcttttgattctatctgttcttaaatttaatgttttgtgtcttcgtcggtggaggagattagagatggttgtggaataaagaagataatggaagaattttttatttggattatctgagattgttttgaatttcatttcacatttttttggcattaaaagaaaatttactctggctatccatgctttaatgtaataaaagaatatggatcatgctctgttttatggttttatgacttgtgaatcaaaagatttgaggaaaatatgagatgttgaacaaatgatgaatagatgtatggagttttccaaattgtgaaatttctttttgactagagatcggattggcttttacaggtgatattaaggatctttcctcaggatttgaaaga

SEQ ID NO: 63460 - DNA, 921 bp, Cucumis sativus
  Intron number 2 from transcript Cucsa.123980.1 (locus Cucs a.123980) derived from phytozome v7.0 (chr-ID scaffold0100 1; pos 49612 to 50532)
ctaggcaactgctataccttggacattggaataaggttcttgctcggacacccaaactactgctttttgttgcccggttctttgccttttaattcttttgagtgggttgattagaatcctcgaggacaatttttcttgtttattatatagttgaatcttttggtcagtcttcatatgttcgggcaattgccatattattttgagtaaatttacaatgaagggtttttctttagaggaaacaacgactgcattgatgtgattaaattacaaaaggggttcctattggtggattacaaaaaaattccccaattagtcattagttaaattgtagttacaaaaaggggtgatcaatttacatcaactaagagataagagagttatagaagcattgtagtcttgttccttatctctaaagacgagttctgctcaagccaagtagaccaaaagaaagctcaaaccaaatttacaaatgaagtttgaaatatactttctactttagtcattttttatgatattgaagtatcataattcatagatcagtcatctgtgagtgcaccaatgacaatactgataatctaaggtcctgaagcatatctaatttatgttgataagttttattgctcttatttccttggccctttgtagtttttttcctgatggtttttggagctagatattatttgaggttgtagaattttggttaattgatgtaagcatgtcatctgcttgaacatttggctttttgttcgacacatctgcttgaacatttggctttttgttcgacactcttctgtttcacgcacggtacactcttttatgtgttcaagtaaccaatgaaaaacataaatgaaattgactaaattttgagcgagaagtcatcatctattacaggccggagatcaccttgggcgatttctaaac

SEQ ID NO: 63461 - DNA, 917 bp, Cucumis sativus
  Intron number 1 from transcript Cucsa.061640.1 (locus Cucs a.061640) derived from phytozome v7.0 (chr-ID scaffold0065 1; pos 139848 to 140764 reverse strand)
tgcagtccttgaggttcttacagaagttccttctctctttagagtcttattcatttctctgccatttgctgattttcaccttttttttcccttgcatgaaatatattttcttaacaagttatttatcgattaccttgattaaaaagatataatattttgatatctttaccaatgagataagaatgtcgtagtgttggaatattatgcgcaactcacatgcacaattgcactcacctggggaagtggtggatttaacgtcctttttgtggatgcttgtcactaaatccttttgtaattatgagcttggtcagtccttttctatagactatagttggggtaagactccttttctgttggtctggtgttttatgtatgccctgtaaggtttttcattttttacgacgaaaacgtggtttattttcaagagagaaaagaaatgcacacgctaaactgaacaaattcacatgaagtgcacttttatcttttgctaatatttatcatctagttcacatttatatatcaagaatttctttagttggatcatcaacttattagtgttctcaacaagttttatgcaaaagaaaaatgcccttggtttaaagggtgggcagctatggctagttcatagcattatcacttttgctctctgatctttgattggcttttcttcgcccaccattcagcttgataatcttcgtgtgttcacataatgtcttcttagtggaggaatggatttcagcgggcagtcaattctcatgattgtcttgcacaaactgttcaccttgttgtgataagcttcttatttttggggtaccattttggctttattgatttgcttatatattattattactcatgtgcctgtgttgatccgtcaccacaattaatttgggatattaattcttaggtatttgtgg

SEQ ID NO: 63462 - DNA, 670 bp, Cucumis sativus
  Intron number 2 from transcript Cucsa.117110.1 (locus Cucs a.117110) derived from phytozome v7.0 (chr-ID scaffold0099 5; pos 812843 to 813512)
atatacagacgaacgaagaggttgcaattaaactcgtaagtgttctgatcttaattcaacactgcgattctaactctacttactctctctcttcctacgcttgttatttcccctccggctccacgtttgtggttctgaagtctatatatgccggtatttactatgaactgttcacttactaccgagccaggttttcaattatatcggaggtgttccgaactttggttttgtatcgtatatgccaagtggagatgttttgaatgagaagaacgttaatgtgtaaattgatgtttcggtcttcatagaataggaccgatttgtgtgacacttcaagcaaatagccggagttttttaagtttagttgagtgaaacgttgatcctctctggttacgctacttggagggatagtgaatgctacgaatgttaatgtttgaaccgaagttactgtcgtcttagagaagcagtgatatatgtgtcacttggccaaaataaagcaaatagaaatgatattcgtgtttagttgagtttggatgcgtaattatttgttcgacgtgtacgcttcattgatctgaatcctgtagtcttcgcttcttttttttttcccgagccatttgatgttcttagttaaaatctaaatctaacttgcatcgtgttccttatttgcaggaaa

SEQ ID NO: 63463 - DNA, 445 bp, Cucumis sativus
  Intron number 3 from transcript Cucsa.116190.1 (locus Cucs a.116190) derived from phytozome v7.0 (chr-ID scaffold0099 5; pos 107854 to 108298 reverse strand)
gtagaccgttaccctacttggtaaatttaagttcttccatgaagtattcgcttctaaagatggattcattataacacttgtgatttacttgggtgggtgagaacagaattgaatttaattcaatagttttccttgtttgttttatccccttaagttacatatccagtattgccctgttccttgggattatttaacatattcacctcactttcaccttccaaaaataattgattatggaaacgttggactttctagaccaataagtctatgaagtgggctttgatttacactttttttttataaggtggaagtttttgaagcctccctctgtcttttctgctttagctgatctcttcttccgtcttttattaactatatgcatgagatattggagattgttgtgcttacaggggtgatacggttcaagtagacacttgggtcagtg

SEQ ID NO: 63464 - DNA, 728 bp, Cucumis sativus
  Intron number 1 from transcript Cucsa.116190.1 (locus Cucs a.116190) derived from phytozome v7.0 (chr-ID scaffold0099 5; pos 109027 to 109754 reverse strand)
tttcagtttcaccattttcaaaagccttcttcaaggtttgcattcaatgttctttcctggtattctcgttttagattgctgtttttatgttgttgagaatgtgagagatgtgtagtgttcatttttgtttggagaattggaactcgatatattctggaaatttgattttgtcgtgagatttttgggtttttagttgaactcgttccatttcgtttcgttgttctggaaactctttgtttgttctcgatgtttcactttgcgattctcgtatggttttgatttataggtattttaaatttcatgtgtttgttctttctagtagttttgtgtactattctttgacttcggaatggttttttatcttcttctttggtcaagtagtggggtgggacagagtagatgtataaattgaaggcacggttcttttaggtagtctggttgctgttggttattattattattattttttttggagtcttcagtcataaggaactttaattattcggtctaggactttgctacagttcaatcgtgttgttttcaattcatttctgattagatgctgatctcatttgatttgttttcttatattccaatacagatgaataatctgcaatttggttcttgttgttttttatatttcatttattagcagcaaagcttgtgttcaagttatttattgatatacagtatactgaagtgtttgattttgttgtttgaagttcatc

SEQ ID NO: 63465 - DNA, 697 bp, Cucumis sativus
  Intron number 1 from transcript Cucsa.102850.1 (locus Cucs a.102850) derived from phytozome v7.0 (chr-ID scaffold0092 7; pos 1796790 to 1797486)
tccagctcgaattaagaacaaaaatactgttacatgtgagcaaatgttctgtttatgggcttttcttagattctggtaatatgggttttggaatacttggtgtttaagtaagttggagttgtcaatagctgcacttattcgctagcacttctgatgatttccatgttattgtggataagtacttggtatcttttatgcttcatgtttttcctccatatgtgaattatatatgatattctggcttcaaagtgagaattttttggttatcctctctttctggtttaagtcttactattttaaaattatgagagattaagattgatttaagtctttaattttcagaacaaagcataataaaaatgctgaaatgatgacaaaagtgatcaaggaatggcttctaatattctcaactttatactttcttgaatggactatcgtttgatgatttatgggtacttttagaaaagaactcttctgaaacattattaaaagttgaagaacatgtacatatattttaagctcatacttgagaaagtttttaattgcagtatatggtctcctttcctgaaaaaattggcagcaacttcctatagtgaactgtagtttgtaagttatgagttcataatattttcttgaatggtttgttcgtgcaatcacttacttccatttccttgtggattcctcagacactgcttgg

SEQ ID NO: 63466 - DNA, 565 bp, Cucumis sativus
  Intron number 2 from transcript Cucsa.130690.1 (locus Cucs a.130690) derived from phytozome v7.0 (chr-ID scaffold0102 9; pos 746709 to 747273)
aattacggcctcactagaggtattatccctggattaacccttttttaggtgctggtagtaagttggaaatggtttaagtctgaaattcccttttatcatttttggttattgtccgtttctcttgtgtctttagtggttgaatgaatctctattgttcctaacctaggtcaattttggattttgctgcactttttcattcaattgagctctgttaaaacgtgtcgctcttttttgttcttcctttgggatattgtgtatttaaaaggagattttgaagtattggtttcagatttacgttttttgtatacccactgtgtctatgtccctttacatactaacggtggaagtaagattgaaatgattaaaatcattttgaaatatgtttttaatccttcaaaattctaattaatttaatatttgatttcactcttttaaatgaattttcataccatcaaaattaatttcgaatgacaaaagtaattttaaatatttagaaatgactttcaaacatgtcctaattttgcatccttgcaaatcattttgcagtaagcagaaggctgaaggt

SEQ ID NO: 63467 - DNA, 395 bp, Cucumis sativus
  Intron number 6 from transcript Cucsa.046320.1 (locus Cucs a.046320) derived from phytozome v7.0 (chr-ID scaffold0054 2; pos 1866911 to 1867305 reverse strand)
ctgcacacttgttggctttggtaggcattcatttttctcactatttagttgggattccaacagtttcatgaaatccaaattagacttctatttttatggggtgaagtttaactcacagggtaaatttctgtaatcatggataaggttcagcctttattttttatgtcagttttatttcaagctataaggttttctgatcccactaccgtataaaacaacgttaagtaaatttaggagtatgtgttcttcccaataacaccatgtttactcacctgctctgcctctgatagtaaacatttgcacattttgttttaataatttattgcttgtttgaatttatttagctggcatgcaattgtttttttttgtcaatttagctaactgtattttgcagt

SEQ ID NO: 63468 - DNA, 792 bp, Cucumis sativus
  Intron number 1 from transcript Cucsa.111550.1 (locus Cucs a.111550) derived from phytozome v7.0 (chr-ID scaffold0095 3; pos 312341 to 313132)
agagattcagtagctttggacactcaaatttcaaggtatctttaatctttctttttcatgcaatttaatatatatgaacctatatttttaaatatagtaaaataaattaaaataaattttagattttatcgatacgattgatagaagtatatcagtgtctattgatgtttattattgaaagaatctgaaaacttgttatatcttgtaaatgctttgttaaatttgctatttcttatgattttctttttagttattgtatattattacgacaaaataatttttttagtctaagaaattttaacttttggtgtgtttcgagtatattagaatacgttttttgaattggtttattttcaaatagtgtaaaattaactaaaatatttataaatatagcaaaaatttattatttatttgtgatcgaagataatagataccatagtcgaaacccgagataagttagtttagttatttaatgtatattttactaaatgaaggctttggagtcgtcatgtaatagtgtccttgtagtttgtgaattttgtagggtttggttgctttcatacacatttgcttaattttttctcacatacaaatgattgacttttgcttaaaagtaattgtaaataacttttattatttttctaataaattatttttgtaaagttagtctgtaataaatacttcatctcaaaatctattatcgttgttgttattgattttattattactaatttttcatataatttattacatgcagaataacagaaaagaatcaaatagacgtcttatctc

SEQ ID NO: 63469 - DNA, 638 bp, Cucumis sativus
  Intron number 2 from transcript Cucsa.033800.1 (locus Cucs a.033800) derived from phytozome v7.0 (chr-ID scaffold0043 8; pos 319621 to 320258 reverse strand)
gccaaaatgtacgctctccgcttcgctttcaatttctgcatgtcttttgcgtattaacagtatcttgatattttattccgcatacattcgtcgattcttgatgttttgatacgctctccaagttatcatttgatttggttcccaataatcttggttagaattttatacaagaagtgtaatacgtgatatatatctaattctcttatgagctgaaagattgttttggtttgggtttatcaaacgctattgactcaataatgtttctccatattctttttctggtagctgatctcctacccattattttgacattttattacattttgaaaatgtagtattgatgaatatcgtggttatgaattttttttctttcttttatttcagcactcaatagttttatggattttttaagggatgtttaaaactaagcaactgtaaacataggaaacgattattgccaatataagcatagttctgtgataagaaaagttcagatgcccataccctgtatttgttgcgattcaaaaaataaatgatgattcatttgttttgtaggtttgaaacctttattactacattcatccttgttatcgtactatgaccaattgaccattttctggtgcttttgtagttgggaa

SEQ ID NO: 63470 - DNA, 754 bp, Cucumis sativus
  Intron number 1 from transcript Cucsa.059980.1 (locus Cucs a.059980) derived from phytozome v7.0 (chr-ID scaffold0062 1; pos 529640 to 530393)
ccacactccccgttctccttccccttcaccttcaggtacaactctcttcttctttttcttcttctttttcttcttccttttgaattttcatctcataccactctgttctgcgatgcttttgagtgggaattcatctcgatcacaaatttaactgttgttttttaagtgttctaaatcttataagaaacatccttggtgttgtgttcaactcttatttgtcttctttgttaaggtgttgcttctaattaaatttaccatttttaagcttttgggttgattagtgatttggtatggttttgtgttcagttggaagaatttaattttctctcagttaatactcatttgatttctacttattcgccttgtacaatttttcaagatcaaagtcaaggatttgatataagcccattaagcttttagtgatttaacaaatctttccttcatcttttctatatctatgtttatcttcatacacatttattgatgaggtaagtcaataaaaaaatgtgtttattttatcttgaatatagcttactggttcactagttttcattaggaacactgcattgacgatgcttaccacattcttttttacttgtgagttttaaaatatatcttctctatcaaaaacaattatctgctgatagccaatctggctggttaagctttcaagggtgaatgttaaatagtttttttctttatgtgggttttggaaacagtttcttgggtgcctttagttaccacaagcaaatta

SEQ ID NO: 63471 - DNA, 531 bp, Cucumis sativus
  Intron number 1 from transcript Cucsa.089380.1 (locus Cucs a.089380) derived from phytozome v7.0 (chr-ID scaffold0089 4; pos 739987 to 740517 reverse strand)
tctgccgctgagcaggtccaagaatctgccgatacgtacgtttttttttttttaactgcaactttgatttgggttttccttccctttttctttttctccatgtttgattgagttcttttttgatatattgtgtaacttattgggttcttttctaggtcagttttattttggtctgtaatgatctggtatatgggtgctttaagttcttattgttagcttcttagtcttctatattcgttttcctttttgttttttaattttcaatatgctttagattatgttctttgttttcgttgggtgggtttagtgatggttcaagaacctaaattttattcccaaaagaagttttgttttctatttgctggatttggaaagctgctctgaattctattattttatatgcttaatggtgtgtaaaggtttttcttttgctttcttcatttgttgaccattgcttaggccttgaaactttagctagtcaaagttgtttccttcccctatattgattctcctattgacttttatttcagg

SEQ ID NO: 63472 - DNA, 686 bp, Cucumis sativus
  Intron number 3 from transcript Cucsa.067670.2 (locus Cucs a.067670) derived from phytozome v7.0 (chr-ID scaffold0069 9; pos 309341 to 310026)
ttcattccacttacaccctccattggctctctcaggttagtcttcgtttctttcacgttgtctcttctttcttctctccactcattaacactgcttttttataaactaaacccacttaaggccttcaccccaacttccactactagtgattggaaaataatttatcatgatacatcacgggttcgtttttgctcataacttttgtgtgtgtaggggggaggggattgaaaatttgaaaaattggattctaattgtaaaaacatgtttaaatgtactcaatagcttgactctgtaaagaatccttttaaaaatatcaaaataaactaaaatatttactaacatatagtaaaatttaggattctatcaataatagttaacagatagatttttatcaccgactatccatatgattgatagaaatatatcacagtccatcaatgcttaaattttacaaaattaaatacttcataaaaatcaaaccaaatacattctaaaaatgattaatttgattttgggggtggaaagaagtgttgaccaattattagagatggccacaaaataatacttgaattaaaatgtttggaattagttttgcagttttatgtaggtgtgaaagtctatgtaaaattgatttaagaattttatatacaggtccctgaaggtataggtaacaaaaacaaagggaa

SEQ ID NO: 63473 - DNA, 978 bp, Cucumis sativus
  Intron number 2 from transcript Cucsa.092290.1 (locus Cucs a.092290) derived from phytozome v7.0 (chr-ID scaffold0090 5; pos 217193 to 218170 reverse strand)
cataggtagatattacagccatgaaattgtttatatagttttaaaagtttgggtccataaaatattattttcataatattgttgcataaaataataggcaaagaaaaaacgtcgttagaaaatcataaaaggattatttatcttttcatatgcaaagttgagttattttttcaattaaagtgtatctctgattaattgaaaaccaatagtatcttgataacaaaagtaagttcttgatggtttgaaaatagttttctatattattttttaagattatagttaagaaaatcttgattgtttggatgttagattttttcaattagtaaaaattgtagaatttaaaaatatttgatttcctttattgttagtgaaattttggttgctacgaactgagttttagattttttttaaaaaaattattttggtccaaatttgtgacggataattctaaaaatcaatttactatttttctaataaaatgaaaggttttattttaatatttatattgttaacccaaaatctgataatttttaactagttgtctaccaaaacaattagatttgttttaagatattaacatatatagcactatataagaagaaattgtaaatataataaaattcgtgaaagtttatcataaaatttgttatatatgcaatttcttaaaagtgatatatttaattattattgtgaaaattgctatacaaaggaatcttgaagtcggagaataacaatgttcatttccagggaataacaatgttaacgatgtttagagatggttgtaattttaataattaaattattacaattaaattatattaatcatccctataataattgatatccttgtagtcatctatccactaaataattttataaggattttcttgacatccgttaatataaaaaaataataataaaactaaaagagaatagtgtttagaatcattggagaagcaaatttcaaacgaaggggag

SEQ ID NO: 63474 - DNA, 984 bp, Cucumis sativus
  Intron number 1 from transcript Cucsa.100440.3 (locus Cucs a.100440) derived from phytozome v7.0 (chr-ID scaffold0092 6; pos 917372 to 918355 reverse strand)
gcttcaaactccaagcctttggcactgaaccggaggtagagcttttttccctttctcatgtctaactcaatattattgttgtaaatttttttttggggggagggagataacagataagtatgtggatatttttctcttgtttctgaaattgaaggcggagttttgtgatttggatcttaattattttgatccgtactggagccggagaatctagttactcagctcaagctgagcctacttggtccgtatgttttggatgaaattagtagctaattctttttcttctctttataagctttagttggagtgagagttttactttgaacaccattgtttctttgttcgcctcgaagatttcatcggatggtgtgcaagtggtggattattgtgcactgaattcgatttccatgtctattcttttttctattaaaaaattttggttattaattgagaatgaagattatttccatgtattgaataatatatatcttatcccacttcccgaaacttttaaatgttcaatattttgattttagtacggtatattttcgaagtcaatccttcttctatattgtaaattatagtagtctgaatcaactctgacactctagtttccatttttttttttggggagggggggttcttgggctaaactgaaatttccacttttcatgcgtacaaacacattttcatattagaaacagcttggggttatataatgcatgaatttggggatgctgagtatgcatgaaatcttcacgttttctttatgaccatgactatgaagtttgaagtaaattgtctacgcacacaatgacacgatcattctcgaataatattaataaattgtttgtttgatatctggcctcttgaattttgattatatggaggtagtccaaaatgacttttagcaattttccattttgttgcatttcttaccaggattcagtatacagctagacgtgacgtgggatccagtttctg

SEQ ID NO: 63475 - DNA, 541 bp, Cucumis sativus
  Intron number 1 from transcript Cucsa.091230.1 (locus Cucs a.091230) derived from phytozome v7.0 (chr-ID scaffold0089 4; pos 2250016 to 2250556 reverse strand)
aaaattataggagctcgcaaacaagcaagaaacgagtaatgctgtcccttctcttctatgatctgaaatgcacagtgctgggttctgaatgtttcttgtttttgtacttgatatcagctgtctttttagctgtgaatgtgaatttttattagttacttgctcaagattaagtatggaaatagaatatagggaagaatgcgttagtgtagtttctttgcagactgtctatttcaattatgatgtcagcagttgaatttcaggacatccccagagagtatcagtcagtattttactaatttttaggtgtgtataagaacattgaattgacgtcacacggtgcttcatgaaaatgccaggattcttttttgctttttgatggtggcggtgtgcgtgtgaactttccataaaaagttgtcccataaagggtcttcatcatatttatatacttcaaagtttacaaatctcatgtgtacctgattgtcacgttgtctgttgtaacctcctgacagacgaagaagttgtctgataagttaggacctca

SEQ ID NO: 63476 - DNA, 662 bp, Cucumis sativus
  Intron number 2 from transcript Cucsa.116110.1 (locus Cucs a.116110) derived from phytozome v7.0 (chr-ID scaffold0099 5; pos 17341 to 18002 reverse strand)
ggaaagaataaggttttagtgaaggtgagtgatcataggaaagtaatgtatgtttttcttgaagacatagccaccagttacatccacattcccgtgtgtgttatctgtacgatgctatctatattggttacagaatggatatgcaggtggagattttctgtttttaagatgcattgttcagaatggtttttgtttttccactagagtgactggaagaattgataatattatatatgtgtaaagagaatatgtggtcgataacttccatttcaacctttagtgagtagtaacgcaatgttttcatatttactttgtacagaatggtctcacatattttaaaccacgtctgttttacataaaaaatattaagttgttttgaacagacttttagttttagtccttcgcatccttttggaaagggaaatttagtttcacatttgacttctaattttttttaataacctcagtatgccatttttcccgtgctggggattgtggtttgaattaagcttgcttaatgttttgtgtctagaatttgtgactcaaaggatgtattggttttgagctaggatgcttattgtaaagctacatgtcacaggagcatattacatttatttttcaacttcttccattttctttacaggtacatccagaagggaaat

SEQ ID NO: 63477 - DNA, 569 bp, Cucumis sativus
  Intron number 1 from transcript Cucsa.116110.1 (locus Cucs a.116110) derived from phytozome v7.0 (chr-ID scaffold0099 5; pos 18042 to 18610 reverse strand)
tcttgaagctcagcgaaacgagctcaactctagaggtaacactgattacttaaccgtatctccttttctccaattatagggtttggaattgtaatagctagtagttttatagattttggtcggagagctatctcgatcagcttacctttgttagatcaacgatgatttgcattttcgtgtggtgaaattttgtttacttgcagactggaatgtttttcttcgattgttgtcaatgtttcgataaaacttcgggtctctagattaagaaaccgacttcaattcaaaactagggttcttgattcttttaaagtaggatatggataattcttttcttttttatgcgacgtggaaatgtgaaatagtcagatgaatctaccagacaacatgagttttgtgttagatatcaatacgttttggtaaatcaattttgtgttatttgttaggatcgtgaatggtttaggattatgttctgtttatgttctagctcttgtatcacatttgataaaactagttgtgctggttgaaatttcgtagtgaggttgcttcgtgaagaacttcagctgcttcaa

SEQ ID NO: 63478 - DNA, 676 bp, Cucumis sativus
  Intron number 3 from transcript Cucsa.048020.1 (locus Cucs a.048020) derived from phytozome v7.0 (chr-ID scaffold0054 2; pos 2889143 to 2889818)
tctatcgatcgctgatcgtcacagacaacaaaaaggtctgttcaacatttcactttttgaactttatatttattatttcaagattgcttgtagctcagtagttccgtttctttaatcttcttacgtttgcttcttctcatacaattgtatttaccttgcgatgtgttgtatttaccttgcgatgtgttgtatttaccttgcgatgtgttgttttttcttgttgaaatatttgactgtaggatgttttgcaaaaaaatgtgaatcgtatttaacaaatttgaggaaaatataaacaaacaaagtcaaatttgcctctcggtgaataatagttttgggtttttccacactataatctgttgctatgaatagtctgttgttgtatttgcattgtcgtgtatggtttctccggttgaaacttttctcttctaggatatgtaggatagggtgtctcatctacgatatttaagataagatgtgaattgtgtgaaacacatttaagaaaactgcgcaacagattagatcatatttgccactctgcgtgtgcaccggtttagagttcttcaactcttatttttttaagagagatttctttcacatataatttctatgtggcataatgtaaatggtcaaatgtcaagcaggtcaataaattgtgggaggagttggaaggatacaa

SEQ ID NO: 63479 - DNA, 298 bp, Cucumis sativus
  Intron number 1 from transcript Cucsa.125340.1 (locus Cucs a.125340) derived from phytozome v7.0 (chr-ID scaffold0100 4; pos 85412 to 85709)
tacccaattccccagtttatcacccccaaattcaggtacatttccaattttccactccccaaatcatgtttttcttgccctagattctgtgacgctacttctgatccgatctccgtactttcttttttttattattatttttttctatttttttggttttgtttctaaatctgaattacttcttcttcttcttcttctgttgttttaagtaatttgggttactgggtttcagagatcttttactgattcaactttgatctgcttcttctggttgctgttttgcagtggatttgttttg

SEQ ID NO: 63480 - DNA, 313 bp, Cucumis sativus
  Intron number 1 from transcript Cucsa.031280.1 (locus Cucs a.031280) derived from phytozome v7.0 (chr-ID scaffold0042 9; pos 271373 to 271685)
tcaaggctcaagcaggtacaaatatttcatcagtttcatttatgattattcaaggtatggccatgtttacctaatgcatcataagtttgattctcttgaaaagttcaaagaatataaggctaaagttgagaataaattagaaaaaacaataaagatacttcgatcagatcgaggtggagagtatatggacttgtgattccaagattatttaatagaaaatggaattcagtcacaactctttgcacctagtacgcctcaatagaacgatgtatcagaaagaagaaattgaaccttgttggacatagttcgctct

SEQ ID NO: 63481 - DNA, 878 bp, Cucumis sativus
  Intron number 1 from transcript Cucsa.013870.3 (locus Cucs a.013870) derived from phytozome v7.0 (chr-ID scaffold0017 8; pos 7040 to 7917)
ctaggctttgaaagcaagaagacgagggtttcgaggtgggtttcttcttcttttcattcaaatcagtggtttatcgagctgtttttgatgtttaagaagtgggttttatggaatttttatgaacctgtttattttttgaattcagattctcataaacgaaaaccccttttgaactttgcttcattaaaactgaaatcctttcactttgattgaatccaatttggggttttatggtcttttgtttttggaaaccgacaatacctaacacatccttttacttctttcgtatatctatatattcaagataggttctatttttggacttcttttctcttctttccttaaatgattccaccccatctgcttaagtagcagaaacaatcttatgctaagttatgatttgctgtaaaaaatgagtgtagaattgtgagaatctgaaatggaacgggataaactttggtgggcctcaagtgttaaaaaagctttgtgacatgtttggctttggtaattgagttttttgttttgttatgtatcagaagactcctcttttactctttttttcccctcttattatccttcgtgaacttctgggttgttacctctatgtttgttagtctccaatgtccctttcaaatttcgcaattcaaagctttaattaccactttgtttatatcatgactgcattaatttccattgcctcacagaaaactgacaatatattttattattaatattattattgttatatttactattactattattattattttttgatattatggcattcagatatttcttatggtccaactgaactctgttgccttttcgttctttcaataggtcagctgctcacaagagtcgagttcttgtgctgt

SEQ ID NO: 63482 - DNA, 992 bp, Cucumis sativus
  Intron number 1 from transcript Cucsa.127910.2 (locus Cucs a.127910) derived from phytozome v7.0 (chr-ID scaffold0102 4; pos 57502 to 58493)
ggttcgatcgtcggcttcataatcacacaacacttgtaagtttttctcctcctctcgcttgtctttggtttcactgcttactatcggaattttgatcggagtttgctttcatcaagcctccatttcacttcagatatttgtgcttgtttttctttttatctagtattgataaaatgataaagtataaggaggaatactgttgaaattttgagtttatgaatgagaagaacagagtgttaccgaaattcgattgtgaaagtgattctgaaattgaaatcgtcgagtcgaagaggttgtcgtcttgttgtgttgggaattatgaatctgctgtttttacttcttttttctttttatttcttattttcttgtttgtttgctgcatgcttttcggcaactggagatagacctttacagagcctctgttttggatctatggagtttgcagaggttgaagtttgtatagagtaaatggaaactgattagatggagtttgtaacgaatatctggtgtatttactatgctgttttcttgacatagtttagtatctcttcttatgttatttagaatcccctgtaatgtatggtcagttgtatggatcgctgagaagtttttgtcaatattaaataatcttccatctggcatgctggagctatttcaatgatttggtggtgctaagtatttcaggttcattaggatttgaactgggtattcttgtaacctacttaaggttgtgtgttcgaaacattcgacgagcttaataagtgaaagcacttgatgtctcctaagtctggtcttagctcttgaaggaggcttgggtttttctctcccttttttaaatggaggagccgaacatatcatggaacttagtggaatagattagttgaaaatctcctgatgctgttgtgtagtgtgtgatataagttgaagtgaattaatttgttttccttttgggtttaattttctcccatttacggtgacatgataggttttga

SEQ ID NO: 63483 - DNA, 676 bp, Cucumis sativus
  Intron number 1 from transcript Cucsa.095220.1 (locus Cucs a.095220) derived from phytozome v7.0 (chr-ID scaffold0091 9; pos 1140157 to 1140832 reverse strand)
ggacagtagcccaaatcgtcaaagcactcaagtaattttttcaattacttttccttgtttctctctgtttcaactttatcaatcttcagctttttgtgtcatgcgcatatatatcgtagtttgataactgtaacatatcactctgtaccaaatatgttttcttttgtgtttgtcccgtttattcttttccccaattccgaggaattgagttcgtacatcgtttgccagtcaattggtttaaccttcaaaagtagttcagtcattttctgaggatatgaatggccagtagataggcaactgtgttctttcttctagaccctctttctgatttctggtgatactcctctttgttgacatgcttgttgtgtagaatcaaatcctcttttttctccttttgacacaaagtttggtgcattatctgttcctaatctgggatagtacttgcttgtagttaattgaaaattcccaggagttctgttgttttctctttttgtttggaatctgatttaatatttatcctataaactctttcatgatagttaatgcttgatgtctctggtttatctattttatcattctcaaatgaagcttaaatacatgtaatgctaatgccttaccacttctgtatccactttttctagatttgggatttccatttaggacggttaaggggaca

SEQ ID NO: 63484 - DNA, 1016 bp, Cucumis sativus
  Intron number 2 from transcript Cucsa.119060.1 (locus Cucs a.119060) derived from phytozome v7.0 (chr-ID scaffold0099 8; pos 972995 to 974010)
aaagattaatacgccaatagaactttagtcaagtggtgagttacgaaaatcttgtgttcttgttgggtcttttgaatagaaagttcacttggattttccacctctttggaaaatggaagagtagttatgtggagttctgatttcgattgcaacttgggttttgattcacctgtatattgtttttggttattaattgttgggtttgtgatttttcttcatttaggaaaattcttagttatgtatttatgccgttctggtttcttctatgcatgattatgcctctcggatctgtttttcaagtaactgatcgaatttatgtgtgtgcctaaagattgatagttcttttcacttttcacctgcactgagttcatctgcttcaaaagatggcttatgaatgcagaagattctgaatctttaccacgttatgcaagaaattggaacttctaacaattttattaggataacgtaatctagggaagttcttggatggattgtgtctgtgagagtcataacgaatctccatcatttgaatttcttattgattaaataaattgaatctgggtctgtcaagatcagcatgttttgatatttatgggaacttcagaaatccttgacaccattctccacttgggggtttcgtgatagaattttcaagaggcgaccattcagaatagaataatctataagcttacccatgttcgtgtcagttctgggacccaattaatattatattcgaagcagtggattaggatgatttgttttgccgtttcatcagttatcttatcactgcaatgaatgggatgcttttggtttattaatgaattcctagtaaatcgtgcctttatagcttcttgtccgaattgttgattcttttgtctgcttttttgcatccttgtatttacaaacagcagccttttactgtgaatttctattagactttagttctgagttctgaccttgtttcttggatatgtttatcagcttgaggcattatagaaagtagactgtgctgaaac

SEQ ID NO: 63485 - DNA, 272 bp, Cucumis sativus
  Intron number 2 from transcript Cucsa.108110.1 (locus Cucs a.108110) derived from phytozome v7.0 (chr-ID scaffold0093 1; pos 328727 to 328998 reverse strand)
cacgaggtttctaatccttcttcactatataatttcttgatttctgagcaaatttttgtatacattaatcagctctgaggcttaatttcataccaaacaaacaatcaaaaacctcttctctatagatttaactatcgatctctcatgttccaaataattatttttacaataaaacagagaaaatggttgaggggctttgaccattattgatgttgaatgttttgattattacaacagtcgcatcataaaccaagagaaggaccattcgaact

SEQ ID NO: 63486 - DNA, 473 bp, Cucumis sativus
  Intron number 1 from transcript Cucsa.094950.1 (locus Cucs a.094950) derived from phytozome v7.0 (chr-ID scaffold0091 9; pos 972757 to 973229)
gttcctccaactccatttttgatttcactgtcaaggtattcaacttcgtgccttttcaatctctcttcttctctttcatttgttcagctgatttgttggatccaagtttttgagctattggttttctttttaattactttccgctgaattttggattagttggacattcacttcgaaatatttgagattaattagattagtttgtttagtttttcatttcgtccactttggcttctttattgaagtgatttcctgtttcattcgtttttattttcacttcggcaatttttgtttggttctggatttgttttggatatatcagtaatgtaagatctaaatatctactcaaatgtattctgactttcaatggatctgttttgtacactataattgcttgttcttcatttctttgactttggctttgggagtatgtgaaattgtaaaatggatttgtttgcaggatattcgtggga

SEQ ID NO: 63487 - DNA, 339 bp, Cucumis sativus
  Intron number 1 from transcript Cucsa.074650.1 (locus Cucs a.074650) derived from phytozome v7.0 (chr-ID scaffold0078 5; pos 535229 to 535567 reverse strand)
ttaacaagcagattcaggattcttttttaagatatgttctagtttttagaatgtacataaggtgatttagggtaatggattgtgtttgattttcatagaatcttaattagtttttggactatgtttttcttattaaactttgttagtttgatgggttttggaatctgatgagagaaagttccattatgatttgcactctatttttcttattaaacttgtgatgttgagaatgaattttgcaggtcgggaacaaaatgattaagaagagaattcatgttggagtcgagcacgtgtagccttctcgatgaactgaggaattttgcttgaggaaggtgaaga

SEQ ID NO: 63488 - DNA, 792 bp, Cucumis sativus; identical to SEQ ID NO: 62136
  Intron number 1 from transcript Cucsa.051300.1 (locus Cucs a.051300) derived from phytozome v7.0 (chr-ID scaffold0055 7; pos 471072 to 471863 reverse strand)

SEQ ID NO: 63489 - DNA, 954 bp, Cucumis sativus
  Intron number 3 from transcript Cucsa.102350.2 (locus Cucs a.102350) derived from phytozome v7.0 (chr-ID scaffold0092 7; pos 1397287 to 1398240 reverse strand)
cttaatcaggtaactaaatgcctcaagttgtggtagtgaatatcttttttgaagttaccggctgttggtcgtatggaagtttatgtttaccatgaccttgctcctttctcatcatgttataactatcgtattggaaccatcactaccgatgtgtttgtttcattcaaaaaggtgttgttagtggtagctccctaactctatgatcatggacatatcaatttatggagttcttatacttttttcgggcagtgtagaattcgctttaggaggtaaagggccatagttaaaagaatctttcccaaaataaaagatgcagctttgcagtatttactttaatactaagtttactaataacacgggaaaaaatttcaaacaaagagaagtaagcttacaaaaagcaactccagttgttcacaattaaaataatggaaaaccaccaaaagctatgttcacagaaatccatatggtgagattaaaccctaaagtaccctcctcctcttcctcttaagcaaaaagatctcaaagaactggaaagaaacccatctttccattgccacaaaatagcataaagaatgtttactttgagaattcaaaattaatatcatacttctaaatgatcaggtattgaaaatttagatgggtattgaagcttcttatttttcttttgaatctatgggtttatatgccttgtatgcataatgtttgaagcttccttatagaacttttacattataggtgcttatttggtggtttctttgggtttatgtacactccctcctcgccacccttagataaggagaggatttaaggccatttatttcttcttaagtgcatctcattatgtggaatgatgtctgtattcgttctctagagcactttgttttgttttttgactgagggctctcacttgatacattggaagagctaacttatttcattttgttttagggactg

SEQ ID NO: 63490 - DNA, 614 bp, Cucumis sativus
  Intron number 1 from transcript Cucsa.102350.2 (locus Cucs a.102350) derived from phytozome v7.0 (chr-ID scaffold0092 7; pos 1398762 to 1399375 reverse strand)
gcagattctgggtttcaaaagattttcctttataggtctcttgttctttgaatgtttggttattttgaggttgagaagttccctttcttcgtttttggaacaatttgccttaaatgccatctgttttggtctctaattcatgcaacttcctttgttcttcaagggtatttgacaaactacaatgtattttttttagtgtgatggctaagtctttttccatgtttctgtgtaagattcagcttctgggttttggtgtttttcttttggggtgggggttgcgtttgctttactttttatttgaacccagttgctattatcattcaattagttgtcttttcgtttttggtttattttttcaaaattattgctttagcaattattttcacatggaaatgtttccaaccaaactgtggtatgggttattcaatattcatcacttcatatcttaatgttcctggcttcctgcattttttcttcaattccttcaatatttttgtgaaaatctcatcaattggatatactagagtaattatattgagataataacccatattcctttccattttcatggttcctcaggatacgttgattctaaaacctccaaagaaatctcc

SEQ ID NO: 63491 - DNA, 1003 bp, Cucumis sativus
  Intron number 1 from transcript Cucsa.128170.1 (locus Cucs a.128170) derived from phytozome v7.0 (chr-ID scaffold0102 4; pos 263254 to 264256 reverse strand)
agggaaaggctgcattgcctctcaaaagggacagagtaagcttgagcaagttcttgtattgccctgttttcaatctagttgattgccattttggatatggttttagagtttgattggtgggttttacttcgttttaggttttgttttgttgttgtagctctgacctccggggttttaattttagacactgttgcctttttatggagatgaaatatgtcttagaacttttacttttgttttcctccgtctacttccattttttgtcctccacaaattaggctggtttttaatgttggtttggctaatcatttttgagtgaggcccataagtatgcattctaaagggccaggtatgatgtctcaagtgatcaattgtttcaatgtgaaatgattcatgtagatggaagggtacttcttgttggggaaatctagataccgttaataggccgttcggctggttggctttgccgtcccagtaaaaacttttgtacatgcgtctctagtttgttattcttgtgttcattggttctttcccttcttacgtatatgtttgtttcagttctgtaattcacttaattttgattcaacatctagttaaaatttttcttgaattgttctttctctttctagtttcattatcttctaggattaatagttcctatcatgtctatttttgatcaatggcttcattagttgacttggaaaactctagcaatcgggcggtttagtactgtttctttgctttctaccttcctttgtagcatcagccgttccagttagttgttatccatattttcttttgagttctactctgaaccagcaatagattacgagagaggttcataaaggatatgtgcattacttttagttcatattgtaagccgtgttctcttaaaatatatatttgcccccttctcttattactattgaatcagctttgacatgaaaccgtgttctgaaaatgttcagacccggtcaaagaggttcctggaaattcaaaaact

SEQ ID NO: 63492 - DNA, 634 bp, Cucumis sativus
  Intron number 1 from transcript Cucsa.054280.3 (locus Cucs a.054280) derived from phytozome v7.0 (chr-ID scaffold0058 2; pos 591805 to 592438 reverse strand)
gtccccttacagaacggtacgtttcaccgtctttccgccattcttaccggcttctctaccttcaaccttcttcttacttcctaatcaacattgtcttttatcggtttaattttttctggttattcgaactgttctctcaaatttatgccttgtgctccattttaatgcctttaagcttcttctttcatcttttgagtttctctagtgttttccttgttttccgaccgcatttggtctggatctggttagttgtggagtagctttggggagttactcataacaagcttcatctatttgcatttctggtctactgagctccgcttcttgtttgtttgtttgttttttttccgattgagcgtggtggatgaagtgtagttgttgatcttgaagcgaaatcaagttacaaagattttgcagccatggattttctggtttaggtgtgaggaaactgttaagtaaatgaatgaaatgactggcttgcatgttttcatttgctgattactgaatgatttggtaccgtggtccgtgatggaggttattgatgagtgcgttataagtcttattgttttgttaatttttgctcttttttttcagtgtaggtgttgattgacggttgttctggagtgtgttggtt

SEQ ID NO: 63493 - DNA, 644 bp, Cucumis sativus
  Intron number 2 from transcript Cucsa.129380.2 (locus Cucs a.129380) derived from phytozome v7.0 (chr-ID scaffold0102 8; pos 341563 to 342206 reverse strand)
aaggattactagtgtcccaactccaagtaagccatgtaattcttttttttttttgataaagatggaatgtgtttttggtattttaaattggatgtaaggttgctaagctgttgactagaaaaatactttgaaatgaatattgccttctctgcaacattcaagtgaaacattgattttattttctaacactaattagagagtgctgtactgtgtacaaagttgatgttttatcaaattttgatcattattgttcactttatgctagttcctactattgaaaattgaaaaagacagttctttgaccatcttgagattatccaaaaactttcttgcatttttatgttagtttaattatagcaggggaattctgtgtagcatccccaatatttctgcaaatctaccttcacaatgtaaccttgaacaaatttacattgtgttcatttttatatttttaaatttcttatgtaatttgtttttatgatggtgttgactaatacatgtaggatgcacatatgacacaaattctttattcttcatttaatgcaaaacggtcatcaaattttcctcatacattcttgtggctaacgctagactttgcctagattgcatattcaagctatataccaatgttgatgcagtgggaa

SEQ ID NO: 63494 - DNA, 924 bp, Cucumis sativus
  Intron number 1 from transcript Cucsa.032560.1 (locus Cucs a.032560) derived from phytozome v7.0 (chr-ID scaffold0042 9; pos 1862922 to 1863845)
caccttgcaccaacgccattgctcaagaacggcaggtttctctttcgtacatccctttccttctctctctttctatctctctcattcttcttgcgcttctcgctctttctcttccttgtgttgtacgtattctcctgaccccatttcatttcttctgtttctgtggtcgtttttccctcctttttactgttttttctcttctgggtattgctattccgtcttcccctgagattttcccttggtgggtattgaggattttgtttgtttcttcaccatctcatcatattcgtttgtttttttaatgggtttctttcaatctttgtgatgtttggtttctgttgaatgatttgaggatctactcatttggattgctcttattttggacgattcttatggcatttggttgttttttagtgttctatggcttcctcattaatgaacaagttattttcaatcttttcatcaacttatttccctgatttggaacgtggagactagggtttctgcttgatttccattttgtcttaatatcaccatctgatttgtctactgatctgtacatttagctttccatcattgaaatgtggatgcaattaattttatttccaattattttgtgtttctttaagctgttattatctatttgattttggcatatgcagtaaatttctgattcttatctaaattttggtttacaattctgggttttgttcttttttccatttaaaatacatgagctagtagttcacgcaaagcttgaggtcgttgttcactaaaaattaataaaaaaatttgcggacttgggggtttgttatatttgttttattcatcaaccttgtgtgaagtatatatatattattgatttggtgcatttgttttatttcttaagggtcttggtccgaatttgaacagcttggggttgtt

SEQ ID NO: 63495 - DNA, 771 bp, Cucumis sativus
  Intron number 1 from transcript Cucsa.001840.1 (locus Cucs a.001840) derived from phytozome v7.0 (chr-ID scaffold0002 3; pos 81905 to 82675)
aagctcggttctggattgactacatcgacaaaaaggttagtttgtttgttttcacatttttcttaaagtattttacaacatgaaagacttggaaatgcacttcgaaactcattgcaaacatgcattttagaattgctttatcttatattatgaattgcatttgaaattgggttagaccaaaaactctgaatatccaaggcatatatgcatggttttcaattttttttttaaatatcaaatggggacataaattattgaaatttacctatttgtgtgcgcttagttttagattaaaaggtttagatttaacttcaaacttgacaatattaattattttctctaaccctcataattacgatatacaatcttccatagtcataactagttgataacttaactacctaataataaaactaataactatttggtttttggtttatacttttgaaaattatacataaagcaatagttgagtcttttccaaaaaaatacaaagttcttaagtcatattctgaatataaaaacaaaacttttaaaaactctttttttttgtttttgttttcaaatagtatattcaattagtatttaaaagactaaaaataaaaacccaatagttttcaaacatttctgaaatcagttatcaaacatcatgtaaactggttttcaatactattgttctctctgcctagctagagttacacacattccatatgttttcactttcaagaataaataaattcaaaatttgttttcttttgggtaaggtatttg

SEQ ID NO: 63496 - DNA, 885 bp, Cucumis sativus
  Intron number 1 from transcript Cucsa.106470.3 (locus Cucs a.106470) derived from phytozome v7.0 (chr-ID scaffold0093 0; pos 69224 to 70108)
caccccattcttctgacagttcgatcttctctttggtcagtttgatttcttcttcttcgtcttcttctcttcatttgctattttctaattcccttatttgatttctttttcttttttttcattttccagcttcgtttttccaccctcaacctcttcccgttttcctcctattctcgttctccctcatcactgtgattttctctattatttttgcagttcctttctgggttttttccctttctttgaaaaccttcacttttattaggatcaggtgatttttgggtttcagttgttgtttgatgagcagattctagggttttggaggtgttgggggaggggaccttttcgagccgatgagactactattgggtcttttttgttcgttgatttaagttttgcaaggatgttattattaggaatctgatagctttgagctcgtttttgcttttagatttactatgtatcatcatctggtgcattcgtattttgtttgttcgatctttgattgtgagttctagtttaaccaattttgatgaaggaaggtatagtttatttatactcaattatctacttgtgctctgaagtatcttgtaagtccgatgtagcccgtgagatgctgatttacttattttcctttggctggtagacattgtgttgcttaaatgttaaaattggtgtttgaggtttctaaaggcctagatgatatgtacataatttcaatgtgttacactgatggtgttctaggcctgtttggaatcacttttcaaggggttataaatatttaggaaatgactgcaaatagactgtctctttgatgtcaatattttccgcttgggagctgatttttaacatttctttttgcacagaatttttgtaagtacagat

SEQ ID NO: 63497 - DNA, 972 bp, Cucumis sativus
  Intron number 1 from transcript Cucsa.027620.1 (locus Cucs a.027620) derived from phytozome v7.0 (chr-ID scaffold0037 8; pos 359465 to 360436)
ttcatttcctcaaggcttttgctcgagcgtgagttcaattccttttgtccttttttgttattgggttcaatctttatagaattgggttgttgtgtaatccatgatcttgaatcttcattgtattgggcttgtttgttttctttatgattgttctggtttctttgatttggttcttttgaactattgttgtgagagaaattacctggttcttgaatcttggttgaatttgttatattttattgagtaacttctcgtagtaggtctatttgatcaaatttagtccttttttcggtgtaaaatattttcgtaaaattgatccttcaaaggattggaatagcatttattcattgataaagactcgatttcttgcaaaaaagaaagtaaggaagagaacacgaaaaagagattagtaaatacatgttctattttaaggcaagcaattggtttcgatgttcttccccccgatgtcatggaatctttaattttatgcttgttttactactgagagatattgccacgtttaatttatagggcctggcagtggttgtttggttgtcttcagaatctttacttctttaatgttaaaaagaaaaggaaaatggaaaactagtaggggaaatttcttttcttgatgaccaacaatcaacaatgattacaatgaaaagaaatgcttaactatttgttcaattatgctttagtttctgcccatactgacttcttgaaatttattgctttttgatgtactattgctgtaaaggtccttcgatttagaaaagtaggtttaatttatagttagtgaaagaaagaagcatgggatcaggatatgattttgttgactatgactatgttttgcattgactattaagaatgctgtctgatatttaagatgttatttgtctgtgtttcctatcatctttcttagaatcaaatggaaggttagaatgtaaacgtatttatttgtataatccaggt

SEQ ID NO: 63498 - DNA, 669 bp, Cucumis sativus
  Intron number 2 from transcript Cucsa.041550.2 (locus Cucs a.041550) derived from phytozome v7.0 (chr-ID scaffold0054 0; pos 114954 to 115622)
tggtaagtgatcctctccaagcaatttttaccaatatatttacttttttctagtaggaactttagattcaaaatattaacatatataacaacatttaaaaaaattgtaaatatagtaaaatccgtcaaaacctattactgatcaactgcgtgtggcaaatattggtctatctatttttacaatttctttaaaaaatatttatatactcttaattattattcttaaaatttcttccaaactatagcaatactcatttttaactccttaccctttccataaattctctcaatattttgtatttaatcttagtttttaataatccttgaatttagaccatttctaaagttcaaaaggctcaaaaattgaaattccaatttttttgtctagagtttacaaacgtttaaaaatgcattatagatatcttgttaaaagtgtaataatttagtaagatttggtggaaaaaactcagttattaacaaccttttgttgaattaacttataaaaacagagatattcaataagtttacgaatgaaaggggagaattgaaagaatcaataagaaatgatgaaaatggtttattaagtttgtatgaagcgtcccatttgagaatgaaaggagaaaatatattggatgaagcattagctttcacaactactcatcttaaagca

SEQ ID NO: 63499 - DNA, 734 bp, Cucumis sativus
  Intron number 1 from transcript Cucsa.050460.1 (locus Cucs a.050460) derived from phytozome v7.0 (chr-ID scaffold0055 5; pos 27010 to 27743 reverse strand)
tggtgccgctgcccctcatttctcagatccctaaggtcttattttttatattgtttccttggataagaaaatttagaacagccctgtagttttgttggctataaaaagacttgttggaattataaactataaaatattcaaattaaatttatcaattcgataaacccaccaaaatacaatgcacaggctaaattgaaaacttaactttgactctagtttgattgaatagcactgagtctcgttgaatatagaagaaacttcatggcaattggaggcggctaggcagatattattatatttgtagaattggaaacataattgttcaagtttacgaagccatcgtgggtgttttatcggtaaaaaggaaacatactcttaataactcaccaatagatcctgacacttacttgaaaattaattttttaggttcaaatgttatagaacacgctgttcactcacgaatattcataaaagaagatttaaaatcctctcttatcagacctatgtaaaccaatttattttattttatttaaacaaaaataagatttcaagattcctacccccatttttatgcatcctaaattaatttgaagttctttccacattaagggattccaagcagagggttagctttatctattatgaaaatatattttatagtttataggttttcctctctgtgccttaatctttactgttgtctattttagttcaatcaagtttctagattttgt

SEQ ID NO: 63500 - DNA, 454 bp, Cucumis sativus
  Intron number 1 from transcript Cucsa.088610.3 (locus Cucs a.088610) derived from phytozome v7.0 (chr-ID scaffold0088 8; pos 886400 to 886853)
tctcaattcttccgcttctcaattcaattccgacggtgagagctctcttccgattctctctctctattattttctttttcaaatttttcttagctgcgatggaaaaacaggttcctgtgtacgattatctgcttaaattcgtttcgagctgtcttaaatgtctatcgtattggtcctcttcatcttgaccgtgcttacatctgttcagctcaccggacattgttgataacttcatttcagctttggaaaccgagtttttttttcgtttttgttgtttttctttttgggttatctctatcagcccattgtcgtggtgatctattatgcaatcaggaatattatactgttttcttcatcttctttgattaagtgcgcgatcttatcattctggattgctttgttgcttcttattattctgcttggaagtgcaggtacattaggtttctcctaattt

SEQ ID NO: 63501 - DNA, 558 bp, Cucumis sativus
  Intron number 1 from transcript Cucsa.032500.1 (locus Cucs a.032500) derived from phytozome v7.0 (chr-ID scaffold0042 9; pos 1804349 to 1804906)
ggacctccctggtcaactcctctctctctctttttttcttttaaattaagttctattcgtatttttttcgatacctacaatattatttttttttcccttttcgaatttattttgaatgaaaattttcaagtctttgtttgataaccaattaaacttttttttttctatttttaaaaatgatgtatattttctcctatttcatattattaccatattttgaaacttcattctgaatttttttttattcaagtacattttattacaatttcttactatgatcgacataaatattaagtacactgtagtagtcaaattcatacaacacatttttaagaactactttttaaaatctagtttggttttttaaaacgttgataaagttagttaacaaaaataaacaaatgaaaacatcgttatgaaatgtaaattgaagaaagttttgaagtagtaataataatatatatatatataactaattgcaatagtaattgaattaaaataaaaaggttgaattaattaataaattgttgttgttaaacataaacagagaaagcattg

SEQ ID NO: 63502 - DNA, 187 bp, Cucumis sativus
  Intron number 4 from transcript Cucsa.072760.1 (locus Cucs a.072760) derived from phytozome v7.0 (chr-ID scaffold0076 5; pos 281894 to 282080)
gtatagacaagcacgtaggtggaatcaggtatattttaggatatgtttgaataacgttcttaattctaaagttctaaatcttctttccaaaatggttcatatttcgatttgaagtttctaaaagcaaaaaaaataatgtttttcttttgcagacagcaattccagttttgataggaacaaagtttga

SEQ ID NO: 63503 - DNA, 562 bp, Cucumis sativus; identical to SEQ ID NO: 62581
  Intron number 1 from transcript Cucsa.012570.2 (locus Cucs a.012570) derived from phytozome v7.0 (chr-ID scaffold0016 4; pos 159521 to 160082 reverse strand)

SEQ ID NO: 63504 - DNA, 396 bp, Cucumis sativus
  Intron number 2 from transcript Cucsa.095340.1 (locus Cucs a.095340) derived from phytozome v7.0 (chr-ID scaffold0091 9; pos 1240054 to 1240449 reverse strand)
cagtacgtgttctagttccttacaaaatttcttgtatttggtatgaatgaatacactagagcttatttagttatgtttcattttttcatttttaaaattataaaatggtgaaagttataatccataattcatttttgacatttctcaaaggttaaaaagaaagagatttaacttctcagaaaacaagaaagattttaacatggaacgctcaacgccattctatatcttctgtttgttttatcaacttttagttttcttttacttgaggaaacattatcgagggtgtcattttaatggtaccgtgttcggaaagagttttctgaatcgttttgtctatctctggtcttgtaatatgcttatgcttgtgaacatctgcttagtccgagggaggtaacc

SEQ ID NO: 63505 - DNA, 609 bp, Cucumis sativus
  Intron number 1 from transcript Cucsa.109510.5 (locus Cucs a.109510) derived from phytozome v7.0 (chr-ID scaffold0093 4; pos 443971 to 444579)
ttcgtattcgttgagctttcaaagcttcctccaaggtaagagactcgttccctttttttgctttttcctcatgattcgtttctttccctttttccaatgttgattttttttatgttgggtttaattagatttgtaaatcctgcctttatctgaggatgaatttcactttcttagcttttctggatgtttttccgtttcttctcttgtttgtattgtttttcaattaagggatgctattttgtttcctgtgattgttgatttgtgggttgtgttagtttttggatctaattactaaaaaaacgtttttgtgtagaaccctaacgatagtttgattaataggggagaatggtgtttgttgctatgttttgattaaatgaactaggccttggaaagtgttcatcgcatgcaatttggtggaaaccccttgcccttgaaggtttttgcttccaggatcccgaacattcaatgtattggggatctttttataacataatttttttagggataatcaatatgcatattttttgtgaatgttatgcaaaatgtgcaagaagttgaataacttgtatggattgggttatatgcagatagtgaagcttttaattctca

SEQ ID NO: 63506 - DNA, 814 bp, Cucumis sativus
  Intron number 3 from transcript Cucsa.101200.1 (locus Cucs a.101200) derived from phytozome v7.0 (chr-ID scaffold0092 7; pos 459270 to 460083)
cctgtcaccacgttcttctttgcttttattttaaggtttgttaacattatgttatttgaatttatttacttttctcctaaataatttaaagaaacagttcaaaactatatcttaataaaagttataggcaaactaacaaaactcatcatcatgtaggtctctgcttttttaaaattaaggtatctttgtttatatttttgttttacttttgaaaatttgtttaattcaccctcgttaagatacttcaaaattcaaagaatatgttctgagaactacaaagagtaagtttgttatatttctttttatttttttaattaagaaatcaagtgctacttaagaaaatatataaaaatcattatataaagaacggtgagaaaaataggcataatttttaaaatagaaatgattacaagatgaatttaaattcctagttttttgaaattggaatttagaatttggcaaatcgtattggtaaaaagtagtaattctgattaaccatccaaaatgggtaagaagtttataccaaatgcactactttaattaaatcaataacttctaaaagaaaataatagaatatctaattggtttggttattcaagccctgaataatgcaacttgtatggataaattattcataaattactagttgaagtgaatgaagataaaataacatttaagaagtttgaactcaagatctccagtatggactaacctactctagtatcattttaattgatccataaacataaactctatcgatatatatttggtattgatagggtggagaaagtaaatacaaagaaagcaagtggaa

SEQ ID NO: 63507 - DNA, 603 bp, Cucumis sativus
  Intron number 1 from transcript Cucsa.103450.3 (locus Cucs a.103450) derived from phytozome v7.0 (chr-ID scaffold0092 7; pos 2228968 to 2229570)
ctcaatatctctctagtttgttcacatcttgaaaggtttctactgtttttatttatttctattttgtttcttgattctagtatgaaaattattctccaacaatgctaaattgcattgatctatgcctttcttctgttaccatttatgacattgcattgttttgttttgactgtttgttcttttgtttcgcttgtttctttttgttaacatttctttgtcagatttttattttatgggtttaatgtcagtcttgttatggtgactatagatgatgatttaattgtggaagttcactcttgaaattggtatacaatttctcattttgatttattttattttgttgggttggggtgttggaagtggggaaggcataaaaatgagtggccacgggtttatagtatcttaaaatttcatccatttatgtgtcggtgacgttctgtcagaagatgctacactggcgaaggatttaggattgatgtgcacatttttaaatgagttctagttccatggaatcatattgcacattcaatggctaagcaatctaactatcaattgtttatgttttcatcaaatgcagaatcatattcttttgaactattaatc

SEQ ID NO: 63508 - DNA, 709 bp, Cucumis sativus
  Intron number 1 from transcript Cucsa.105680.1 (locus Cucs a.105680) derived from phytozome v7.0 (chr-ID scaffold0092 9; pos 243791 to 244499)
ttcaggtatgattgttgttctcgtcttttttcttggagatgattttgttcccttttccttttccgatgatcatttccttttgttctctttagaaggtttttgttttttgttcgtggggtggagggtttttgattgttggtaaaagggtaaagtgatttttaggagcttgatgatcctgtttagtcgtttgatcgttgttcccccccttatattatgctgacagcgagaaatctctcaaaaaaacgagggagtttgcaatttaggaggtgtgatcagggattttaattctatctatgattggttttattgttcttattggttttatctttaaattttgattattttggagtatttctcatcgtcactcttgtcctagagttagagtgagcatatgtagtttttttttttaatttcgctttaatggatttcagttgaaaatggggacttcgagaaattggttttgttattttggaactcttcttacttttccttatacatcaatctattacatggtgacaacgagatatcatgtttagaaacatcagatgaacataatcctattttgtgggtgctagccttgctataattcttcaagttgaaatgtgttgtatttgatttgtggttacttttttcatgaagagatgtgttactgagattaatgaacttaatcctgctatgttctattttgacagggtaaagtaacgtgcat

SEQ ID NO: 63509 - DNA, 698 bp, Cucumis sativus
  Intron number 1 from transcript Cucsa.087990.2 (locus Cucs a.087990) derived from phytozome v7.0 (chr-ID scaffold0088 8; pos 432391 to 433088)
caatccaagtaatttcgcaatttttagttctcttcgaattgattaatctatgcagtagatttgtttgagcgaaaatgagtgtgacatagttaggtgccttgtttgtgtttgatgttttgcctgtgataaatttaaaatgaaatcggccaaatagaggtttatctggccaatgggtatacaaaagggctcaattcacagggtatacaaaaggtgtttctcttttgcaataagaaaagctttatgttggttcaaaagatatatggtgtttactgttagggataaatgagccatgaagatacatgaaaggctttattctggttctattgtcctcgaggatatctgaattaatttaaaacaaaaacaatctacattgtttacttggtatgtacgtggattgctggacatttcatgaaaattctggtgtttgtcaaaaagatttctcatgaagcactttttgttaaattgtttcccctttggggaagccatgaatgcaaaggatttgaatgtttaagttgtggcatggacttgttttgtccttaatatgaattataaaagcaacttgagctgtttggtattgaaacaaatttgttcttctagttcaatgtagaaatttgaggtttttaatttcacatatttaaatgcgttgctaacctggggtcacagtgaccatattgtccagcaaaagggttattcttcgc

SEQ ID NO: 63510 - DNA, 577 bp, Cucumis sativus
  Intron number 1 from transcript Cucsa.109320.2 (locus Cucs a.109320) derived from phytozome v7.0 (chr-ID scaffold0093 4; pos 254162 to 254738)
tccctccgacaaccacaaccgtcgcggatttcagggtaattttaatcttaaactatgtttactctcagtcactttttaatttgtttattcaactatgaacttaaaatattcaattcttgtctctgcatatgctaagaaagtacgctctgcttgatttcttctgctgattagttctgcatgcaggttatgagtagctttatgttgattgtttcttatatttcttcttcttcttcttcttcttcttctttttatgtggtttggtaaaaacttctgattgatggttttttgttgtgaattggtttttcttaatatggctttgtaaaaatttagctgtacattaagtaactgagaatctatggttttgacttttgttttaattttaacgtttcactgtcattggtggaaagcttgtgaagaagtatggaattgagaaccctaagaataggccatcttgggttgagttttttgtttttgtttttgttttggacattcagttggactttgattaattggtgactgaaaattgtgttaggtgacaacagtacttgagttcgtcacggtggaatccgaaaaagct

SEQ ID NO: 63511 - DNA, 642 bp, Cucumis sativus
  Intron number 3 from transcript Cucsa.135370.1 (locus Cucs a.135370) derived from phytozome v7.0 (chr-ID scaffold0104 4; pos 217655 to 218296 reverse strand)
cttgcaggaaggccagtatgcatatatacatatatatattatttgctacattcttacgactttaattacgttgtcttgatcgataatcgtttgatttttttttacataaaaatggtctttgaactattcttaaacagctccttattctagagaaaaaaagttttaacaattttttctttcttctttttcataatttgacttgaattttgaaaataaatagtgaaaaaacaaagaaatttattgaatccaattttcatttgtgtcttttccatctttgaacgagttcttcaactcttaatacgtccacaactcaagaaaaacgttacctctaatagtttctccacttctaaattttgttttcagtctcatacatccctcccatattcaaaattcttaaaaaatttattggtaaactttcaattttgtatttaatatattacgtaatttttttctaaattttttttaatagggtaagtaaaagcttaataaaaatatttgtttaaaattagggatggaatagatacaataactttataaaactgtaattttatgttattttaatttgtagctgtgtatatatttaaataatagagagtgtttttaattgctttaattttgactcaacagattgccattaatctt

SEQ ID NO: 63512 - DNA, 1034 bp, Cucumis sativus
  Intron number 1 from transcript Cucsa.135370.1 (locus Cucs a.135370) derived from phytozome v7.0 (chr-ID scaffold0104 4; pos 219140 to 220173 reverse strand)
attcaagaagttgatacccaaaacctttacactttgtaagttctcttctttctctctctctctatatatatgtatgtatacatatgtaacttttcaaaactttgatgtgagtttttttctggatttggttgataagagttctaattatatataaatcgatgagttcgttcttgttttaagcttctaatgaacattataattttttttttttcagttcgacaatatatgatgtctagaatttgaattttcgacccttttgtcaaaatttcatggttaataatgtcgataaaacaaggatttgaaatgaatttatagatttttttgttttttttttcgttgctcaaaagcttttgcttctattttcttgcatcaaattgtccataaagattagagaaaggtcgaagaatttattgtgagaatgtatacatttcattcttgttgagaagagtaatgagttcattattgtttttaagcttcaattgaagattacaatttttttttctgttcgacaatatgtgatgtgaggatctgaatttctgacattaacaagaatgaaattatttgtaagtttttgattttttttcttgctcaaaaacttttgtttctatgttcttgcgtccaagtgtgttgaaaaagattaaagaatggttgaagaaatttattgtgaaaatggaagaggaaaagaaacgataggaagatgaaaagagtggaaaggaaagaagaaagtaaataatgaaaaaggtgtacatttttacgtatagtattttagttaaaagttaaattttagcaaaaataacttagtggtatgcatcaagtttatgtcacatcatgcatcacacgatgaaagtactcataaatctaaatgattcgaaagaagaaaagcatttgttctttcaaagtacatttgtatcacgtttaataaataattggaataacgacttttcaaatgcttcatttcaaaccatctttgaattttttgtagtatatcgttggttttgaaactttgcaatttatctttagacaggtcaaaaaca

SEQ ID NO: 63513 - DNA, 685 bp, Cucumis sativus
  Intron number 1 from transcript Cucsa.115390.1 (locus Cucs a.115390) derived from phytozome v7.0 (chr-ID scaffold0098 8; pos 9646 to 10330)
acaaaacaaattttctttattcctctctaacaaaggtttgtctttgttttttcacaatgcttttctctcaagtcaatatgttttcttcgtttctaatcttcttcctctttctcttccatttctctcgaatttctcttgttcgacgtgtaagcttttgcttatctggagtttttccttttaagtttcatggtgtttctgttgttctgtttcctcgtatttttgtaacgtcttaaagttttttttttttttttttcttgtgatggtggtggagattatgaatttggatgatggttttggtgggatttttgaatgatttatgtggtttttatatctgggttttttttatttatttattggaagttggaaatgtcttttttttttttctttcgatttttcatgatattgattgagtttggttttgaagttgttgtgtttttgtgaatctatgcgtccgaatttgagaaattagtttttgactttgatttttgtaagaacttcgtgggttcgttttgagaagctcttattgaagtttgaggctcttaacctaaaaatcaacgtttaactaaattaatgattgaattagaaatttctgatcgtgtattcttgtttaactcttgcctaatataactttctgtaaattatttctgcagattgcaccggtagaggaaaataatattgttgttcg

SEQ ID NO: 63514 - DNA, 776 bp, Cucumis sativus
  Intron number 2 from transcript Cucsa.046160.1 (locus Cucs a.046160) derived from phytozome v7.0 (chr-ID scaffold0054 2; pos 1744152 to 1744927 reverse strand)
gggaggcctgggacgaatgtgagtagtatttttcttctcttctttttcttttacctttacttcactatatattctatatgtttcatctagatgtaattttcctgctttctgacttgcaagttcgagcatgtatttcttgtagttttgtgtgatctaatctattttctatcaagtgtacatgccatcacatttgtgtgttcaattgattagcttattcagattcatcgaaagtctggggcacagggtgaacttgggtcgaatatgtcaacttgctatagatattttcagcaacggtcattctagacagaaaattattggtccaactgaaaatttgtctgcttccactttgattttttccctcctttttttaatttctattgaagcaatagacactagtgttgaatagcgttattatgacttgtggtaaatatcggcatttggtgaacattttgctgatatttctgtttgaatgtatttttgttagactaatatctggtcatggagttcattgagcttttgtctctgtatttttcaatattaatcatagtgagactcgctttcttaaaaaaaaaatctggtcatggagttcattatatatcttgatacgttgtaactttgaccagttattaatacgtttttagtgattaggaaatctttatagaaaaacttccttgttgctacaactttaagaccttggaaatctgttacctttcaacttttttatgttattcatcaatataaattgttgctgtcattgagtcgcaaggcttggaaga

SEQ ID NO: 63515 - DNA, 677 bp, Cucumis sativus
  Intron number 1 from transcript Cucsa.046160.1 (locus Cucs a.046160) derived from phytozome v7.0 (chr-ID scaffold0054 2; pos 1744937 to 1745613 reverse strand)
cacgcagaaatacgctgccctcacccagattccctgtacatctttttccatcttccattcttacataatttttctctatttcgctataatctttacgcatttcttcgcttatttcattaccccatgtcccaagattagatggctgcgatttgctttgttagtttaagaaactttctcaatgcatagctagaaactctattcgtgaatgttggtcgaatgcgaagtatcgtggtgagatgttgaatttctcctgtctggttgggttattagttgttattattacacatgattctgccaggaaagtgtattttgaatgaatctgttgatgggaatccgcgtatttgttatactaattgattgtcggagaatatacttgcaacttattgggaattttaggttttatgaaatctatttgtgatacggattaggcctcctgttatattcatctatttgacttgggcagcgaatagtatttgtttacgaataaaattgttagtttcacgtgtgatcctttggaatccgatactaagatacttcgttatactagaagttaggggattataattaatgtcagttatgtttatgtctgagtttgagtagtcttataatacattttctgcttctgcataatcgcaatggtctcaacgtagggcgggtattttgcaaaaaggggtgtg

SEQ ID NO: 63516 - DNA, 445 bp, Cucumis sativus
  Intron number 1 from transcript Cucsa.065350.1 (locus Cucs a.065350) derived from phytozome v7.0 (chr-ID scaffold0069 6; pos 93076 to 93520 reverse strand)
aattctctgctcaagattaccctgttttcacccctgtgagttcaacttctacctttctttcttttttttttaaagaaaaataaatttaaaactatgaattgtatatgattgtttgattatgattaacggatcttatctgcattactcacatggatgggaatttatgggtagcatttaatgggtttcttctcctcttgagtttaggaggacattttaggatccaccgtctttctctttctgtcattttctcttggttggtttaattgataattttgaaattttgggtatgttttggtggctgtgtacgaaaagatttagactaacaatttacatttatgaggggttaactgtcagtcaaaggttgagacaatttgtttggtgagtaattaaaaacatgggttttggcgaagtttatttgaattttggaaatctctttaacagagtt

SEQ ID NO: 63517 - DNA, 998 bp, Cucumis sativus
  Intron number 1 from transcript Cucsa.118210.3 (locus Cucs a.118210) derived from phytozome v7.0 (chr-ID scaffold0099 8; pos 38793 to 39790 reverse strand)
aggtaaatcccttgttctttaaatcactgtctgttacacgaattacattgctcttgtctcttgtttggatcgaggaattgtgtttttttgtggtattttcttcttttgtctagacctgaaatttgaacttcataattggttgtgcgagaaattaggtttcggaaatgtttcttgggattttgtatggaaggcttttgctatggttcaacttcaatagtctatccagatggataagaattgatgatataaaactgtgttcaatgaaaagaactcaatattgatttcggctcagctcagttgaagtatttgtagtggtgtttataaagatctcagtgagacatggggcattgtgatggttgttgttgcttcaccttggagttcttggtcaaagaacttctttactcttcacttcctttataatagtccctgagttggtgtatatcttctgtaatcttgttcttatcaatgcaactgcttgttctaattaaaaaagattactgatgtttggttgattctctatttctaggtccttaatccttatatcatacatgaatttccagatgggaatgtgttgaaaattaagaggttgaacttgaagtttcctgtggcttggaaatttggaactttagtatacagtggatcagatatggcgtctgggagttcattgaatgatcatttatccaagaagacttcattttggggattgtcattatgggttttgatctgcatttgcattggtgcatttataattttgattcttggtttgttatctatgtggatcctgtttagaaaaaaatctaaaagatctatggacaaattccctaattttataaaagatatcaggatagatcaggttgggattcaaactcccaatgaccaccctgaacatagacttctttcagttgatgtcaaaagaaatgatgaaaattcagaagttagggctgtaacaaaatcaagtgaacctgataacaatagccaatgcagctccacttaccaac

SEQ ID NO: 63518 - DNA, 776 bp, Cucumis sativus
  Intron number 2 from transcript Cucsa.076200.2 (locus Cucs a.076200) derived from phytozome v7.0 (chr-ID scaffold0078 9; pos 621357 to 622132)
attcaaagcataacgtatcaattttgtgagtattctattttagtaaatacgtatagaatgttatataaaaattacattaacatttttcaaaattgttcaaatcagctagtttacaatgtttgagatattttatttataaaactatttcaaactttctaaaagaaaataaagagtgagaaatatttcgtgtttagaagtaaattagtgaagagaatatgatttttaggatgattgaaaaaatatgatattcttgaatcgtagattaatatatgttcgtaataattgtttattaaattgtatatgagagagtcttttgaacctacttctacacatatatgacatatgctcttgggtagctctacgtgaatgtttgtgaactagacatcttgagataacttgacatttagcaagatcaaatgtgtcatgttgatgcattttatgaccggggatcgctctctatcaccaaatataacagaagaataacgatatcggtacaaatttgatgatcgatttgatattgtctatatgtatgatttaaaagttcagattatcgaaactattcacttcattacattgcaacaaaacttatgtttaaaagtcaacatttgatcatttctgctactgcttcgcctttgccttgcaaatgaatgaatgaatatgcttttcatagttattgatcaactataaatatgtattgacaaagtgagtttgactcaacaatcatggtcatctggtgttgcattttgtaggtgtaaattaaagtaatccaagactag

SEQ ID NO: 63519 - DNA, 318 bp, Cucumis sativus
  Intron number 1 from transcript Cucsa.099140.2 (locus Cucs a.099140) derived from phytozome v7.0 (chr-ID scaffold0092 6; pos 41355 to 41672 reverse strand)
aaattctcaactttctccccacttttcatctccttgtaagtcttcttctccttcaatttcccccctacttccccttgatttctacttttcaaaatgggaattttagttacttcctctttacatcaaacacagagaaattctttttcttttgcgttatgcttattctaattccgaaattgtttctctttcagaaattactctttaatttttatagaaaagaagaagttcaaatttggctgttctatagtttatttatttttctcgtttgatgtttgtcgtcaaggaaatttctccaacggtggaatttctgaggcctct

SEQ ID NO: 63520 - DNA, 923 bp, Cucumis sativus
  Intron number 1 from transcript Cucsa.066920.1 (locus Cucs a.066920) derived from phytozome v7.0 (chr-ID scaffold0069 6; pos 1314273 to 1315195)
cggtttctgctgccattgttgaacattctttctctgtaaaacattcttcattcctgtttctttttctgtctttatttttttttcatctttcttctttcattccttttgtatttttctaaataataattatgcatcataataatgctgctctaaattatttctaagcaacaaatatacaaatatatatgcatgcatgcaatagactaatcaaaatattaaaagatacctagctagaattagagttttaccttaaaaggtatatagcttccatttggttcaattttaattctttttttctaataaaaaactatccaaaccagtaacatttatataattttcttcaaatacaaatcaaaatgttcaattttatactaacgagtttggtttgtttttttgttattttttaaaatatatagctttatataattataattaaccccacaatggcattaattgttttttctttaaaagaatgatgaaattgttttcaaacacaatatatatttacttaaactacaagtttccttctatgatgttcaaaatctgtctgttatttgatattttgaagtttgaaaatttgtgttaattttattttgagtctaataaatttgaagtatttcaaatatattataaaaatctttatttttgtattttataatgcctctcacgtagtcaaaattttaattgttgtgtttttgattgagcgtctaatttttttaaaaaaattggatatatgcaagataaatttaaaatctaaagcatatcccaccaaaaaattgaagatctagaaatttatcgaacatttttttaaagtgaaggaaatggacatggatagactaaactttatattgaattaacttgtttattattttcatttatttctttagaaaattaatatttttcttcattcataggtggaagat

SEQ ID NO: 63521 - DNA, 289 bp, Cucumis sativus
  Intron number 1 from transcript Cucsa.111200.2 (locus Cucs a.111200) derived from phytozome v7.0 (chr-ID scaffold0095 3; pos 83381 to 83669)
caaggccttcagttccagcgcagtacttctctaaggtaaatgttttgaatcaaagaaagttgatacatactatcttgaatggttgctgacaaaattttagttaatcaccaaactaggatcataatctttgttccgtttcttgtggccctttaatggttttcatggctttttctgcatttacaagtttttgacctctaagtaaataatctcgtctgggagcattttgtttctgtttttcttgggagattttgaatttgtgatgatgatattgtcttctttccagacaact

SEQ ID NO: 63522 - DNA, 519 bp, Cucumis sativus
  Intron number 2 from transcript Cucsa.105340.1 (locus Cucs a.105340) derived from phytozome v7.0 (chr-ID scaffold0092 9; pos 73611 to 74129)
ttagatcgaggagtgcaggttaaattaatcttttaatttgtctgcactttaggaactctttgattactgcaatgctaaattcatcagaagggaataagtttacttttgtctcgtgctcttttggggtcatagtgcataatgtaatcatgtgattggtttgtttgtttagtgtaattcttcttaaacgatcaaatacttgatgtattttgaaattataggattgaaattttttctcaatgacattgttttggcttccatatttagctgctaaagttaagctgtgaccctttaaaatgttattgtattaccattattaatgatccagttagttatattttagaaacttggtaaaattagcggaatagtagcaaattctacacgttcttaagttgatagtatattatgtctcttcttcttgaagaaaaggtctacttgttttttctctctttatattgttggtgactgtaagattttccttctcaaggttttatctgctaaggaacaagaagctgtggagac

SEQ ID NO: 63523 - DNA, 1032 bp, Cucumis sativus
  Intron number 2 from transcript Cucsa.078980.1 (locus Cucs a.078980) derived from phytozome v7.0 (chr-ID scaffold0079 3; pos 1515435 to 1516466)
ttcaatcattgctttgcattctttctcaggtacaagaactaaactcagctcaatcaagtctgaaccaattattaatgttgttttcgagtttgtttttcaagtttaaacagggttagatcagtcctgtaaattgttggtttgaatgtgcaaaaggaactgttttacgcctcagaagtccattttgatgctaactttactttgtttagaagcaaaggaagctttaatgttacatctcttcctttatgctgccattatcatggcaacgtgttcagctaacttctacagtaaacacatcaattttcgcatcctcaataattcaccaatcaaccaactactataactattaataattaacaacttaacaactcaaatgggcctccttgctgggtaataatcagccccaaattattaacccatatatcacaatataaaaaaattacaatttatcgacgataaaatttattactaataaaagtctgttaacaactaagtctgtcattcgataacttaagaaaatgtttcaaactatgagaaaatgtttttcaaaaagttcatttttatttgaactttttttcttttggataaaaacctattgaaaaatatacgtttcaaaatttattttgattagttgcggaacaattcaagttttttaaattttgttctgagtagttactaaacactccaattgtttttctaaaataatttattttcaaaattaaacaattaaaaagttaaatgaaataattaaggtagataattgttttagaaagtcctttttttgttgggtgggatagaataaaatggtggaccaaacttcagtattcataaaatctggttggatttcagagctcaaaaccccacatattaggaatagacaatagctgactttgtttcttgtcgtgttctttatttattctttagaatcatttattctgtgtgttgatttgtcatgtcttcagtacggttctatttttggtgatcaaagtcccaatgataatgtcccacaggtggaggaagcaattgagacatacc

SEQ ID NO: 63524 - DNA, 854 bp, Cucumis sativus
  Intron number 1 from transcript Cucsa.085910.1 (locus Cucs a.085910) derived from phytozome v7.0 (chr-ID scaffold0087 0; pos 255889 to 256742 reverse strand)
cctcaagtgaaggattagctacggtctattgacttggatttggttcagtttcgacccatctcttatattaaatagttaacatgatataaagtaatgtatttgttgaagtttattaagtctaaatagtaatttataactaataattaaaagtaacaataatgattaatggatattaacttgttaagtaatcatactttcttctttcttcattctccagccaaatctcataacaataaacatattttttgaaagttttaagaaccttttctaaaacatttaaaagtttatatacatttttctgtgtagtttagaaaaaaaaaaagtattaaataaaaaatatgacgattttatagaccgaaaatagtttatctacaaatacgaatggaaaaccgttttcaaaaaatagaattcaagtttccaaatattttaaaaagcagagttcaaaattgaaaagaagaaatagaaaacataaaacaaaatgacagatgtatttagaaatgtttaacgatttgtagagaaaaaaagaaaaacattttattttctttgttctaagtgaatccaaatgtgaaaggtttggtgagtttttgggataagtaaaaacgtaccaaacaaattatttttattttatttccttttttaaaacgataaatgtaatcgattcccccactggcccccttctctttgtttcctcccttttcgcccattatcggcttctagggttagggtttctctctttgtccagacgagacactcaaaactctcttcttctttctccttctttcctcactaaggagattctcttatcccctttctccattaccatgcagcctgcacctggtgttgcccctcacaac

SEQ ID NO: 63525 - DNA, 977 bp, Cucumis sativus
  Intron number 1 from transcript Cucsa.051180.1 (locus Cucs a.051180) derived from phytozome v7.0 (chr-ID scaffold0055 7; pos 362402 to 363378)
agatattaattaaagaggtggaaaagagagtacttgtaagtcttccaagttgaatgtaaattcttccaagtaatttaatagtgtataaatataaatgagcccacattttgagtcttaattatttgttcgaaagatatcaaaatggatatattagaaactgcagaaaacacttgtgatctcgaagaaattgaacatcaaactcatttcaacacaattctcccatcctttatccaaaggttctttctctttctcttaacactttcgtttctttttttttccttttctttttggcttttaaatttagtttatgctcttcttttattgtccaccttgcttctgcttctgctttaattctcccatactccccatggggagtttacgagacgtcgaagaatatgtttacatgtttgacaaaaatcataagatcgctatattttaaatatggatgaaaacttatgtttttttttgtcattaaaatttttgtcttacaatgattttacattaataacctaaagctgagttacataatttgggttttccagttttgaaattcaatctgttattccatccgaggatttgtctcctaaagaagagaacatacctcaagaaaatgaattaaagcaggtttaacctctttctttttctttcatttatatatgatgtttagttcttatttctaatatccccaaaaaaaaaatctcattacatttgtcattttctacacacaggtcgaggatgtggtaaagattgaagttgattctcacctaaaattctttctgtcaaggtttgcttaatttattttttattcacattgttttcctgattaataatttttgttcatcattatcaatcaattttttttttctttcatgatccagaagcagccaactcactaaccaatttggaaaagaaagaactgtaatcggatttgaaaattcgaagctcaagctatctttcattaatcaaatagctcccac

SEQ ID NO: 63526 - DNA, 475 bp, Cucumis sativus
  Intron number 1 from transcript Cucsa.118600.1 (locus Cucs a.118600) derived from phytozome v7.0 (chr-ID scaffold0099 8; pos 466740 to 467214)
agaaatctcactcccacacccttctcattcgtcaggtaatcaatcatagttccttatctagttatttggattaagaaatcgagtttctggatgtgggatttatgccattacgcttggattttagagggtttttagtagtttggcttcttatctgttcatctgatagttgttagtgttttgaatgcgggagaaggatcgtctttttttagtttgtttgttatggaatcttttcgggctagtgaaattagagcgttttcagtggtgcggagagggacccaaataatttttggttcttttgtcgaggttccatgcttggctctctatttgcgacgttttatattgttgggattactttatttaatggggactttgcggttgtttttttctgttctctttagttttttccttttcctctcaaagttgttgtttctatccaagaaaaatatatcaaaaagaaaatttgcttggatttcag

SEQ ID NO: 63527 - DNA, 589 bp, Cucumis sativus
  Intron number 2 from transcript Cucsa.107310.1 (locus Cucs a.107310) derived from phytozome v7.0 (chr-ID scaffold0093 0; pos 705620 to 706208 reverse strand)
ggccaaaaggacatacttggtgcaacatatccgaggtgagatgatttcttcctcttcgtcctcaaaaagcatgcaagacatatactgaaaatatattcaaatatgaaatacccacacaatgatattaaaaagtatcattacttcagtgtgtaaatacaaacatgataacgggaggagagagattaaactttattgtttgtgtatggatgaatgcaataggcaatatgaaggaaacccaaaaagagaaatagacagataattgagtatacggaaattgacagaaaaataaatgaggccgaaatgtcaactaactcaaaattcaaagtcaaagtccacttctttaataagccaaaaagctaatttgtaataaaataaaataaaaattttaaaaaaaagatatcataaaccaaactaaataaaatacaagaattagtttgaataaggaggaaaagacctaattttccatacccaaacatgatttagaagttgacttcagttataatctgcttaaagataataagatttgtccctcgtttcacatcaattagtctaatacttggttgttgcatacttgcagaagctactatag

SEQ ID NO: 63528 - DNA, 1003 bp, Cucumis sativus
  Intron number 1 from transcript Cucsa.108220.1 (locus Cucs a.108220) derived from phytozome v7.0 (chr-ID scaffold0093 1; pos 418823 to 419825 reverse strand)
cggcgcaaacttctgctactcctctgccgtgtcctgtaattatccctctctttcttccccgccattacttacttcagaagacgagctatacttttctttatccatgttttttggtcgagttatacgaaagtgaaagaggaaacgtttcttttgattgcttaacttgctttctgttgaaatcaatggagcttaagagtccacgattgcttaacttgctttctgttgaaatcaatggagcttaagagtccacatcttttgtttttggcgttctttttcctgcattttacattgttgccaagcttactagctgactaattttcgtagatgtctttcgaattagacgaaagagaaagaggaaacaattgttattattgcttaacttgaattctattgaaagttttggagtttaagattccacggcttttctttttggcgttcttttttctgcattttacatggctatcaaccttactagctgactatttttcttctatgttcttcgaattaaatgcaagagggcgaggaaacgattgctattattgcttaacctgaattctattataagctttggagcttaagattccacagcttttctttttggcgttttctccagcatttttctttgctgccgagctgagaatatttttcttctatgctgttggaaataagggaaagcgaaagaggaaacattcgttttgattgcttaatgtgatttccgtttgaaacagtggagctcgagattccattgcctttctttttggtgtcccccccgcattttcttggctgccaagctgagactagtgttctataatttctttgaattaagtgttagtggcagatgaaacaatttttttggttgcttaaattgaatgaagcaaacgattacgcagcgtttgtttttggaaaatccggtgtttttttggatgtatagctgagactaattttcttccttgtgtttggttgtgtgcatgtacagatcaccgtccagcttggacttcggagg

SEQ ID NO: 63529 - DNA, 903 bp, Cucumis sativus
  Intron number 1 from transcript Cucsa.135220.2 (locus Cucs a.135220) derived from phytozome v7.0 (chr-ID scaffold0104 4; pos 84791 to 85693 reverse strand)
gctccaatcaccttttctctggtagtatttcactctttctcccttgctctcttcacttttctttcctcccaccccctttttccttttttcttttcaaatttcaattaatctttgttttccatgttctgttttgtttatgaatttttgattactcgatgaccaattggggagtttgaatttatttgttttctgttctgaggctgaattttactcgatatgtttagattttgagctgtgttcttgtcatattcaattggggtttggttttttgtttgttttgtattacgtgattgtgttccttgagttattggatgagcaagtcgatgtttgacttagattccagtatggtggtattaattagttttagttgtcggcaggttttgatgttcagggactcgagtcaagcatgagtctttaatctggatgcttagtcaactagttagttgctctttttttaacgacctacttttgccctcttcttctccttagcttctgaccttcgcttgttggttatgaagagaatttgttcatttgagtttgtttgttgtttgctatcaggaaagtagtttatattcattctagtggatgtttatgttaatagtaggagtaggaccattttcttttttagacctttatttgaaagtatcatcattggagtcagattcttgattgcacgaagtcagatatcatagtctgtaattgagttgctcggtaaccttgttgcttcctagttactgtattctggaattggaatggcaagtgggtgtgtgttctatttctgcttgttttgaatagagtacgtttgaatacaacttctaattttttttttcttttgttctctttttgggccttgctttggattcagaagttctctagattcgctgaatcttgacttcacttttg

SEQ ID NO: 63530 - DNA, 830 bp, Cucumis sativus
  Intron number 2 from transcript Cucsa.113700.1 (locus Cucs a.113700) derived from phytozome v7.0 (chr-ID scaffold0095 3; pos 1797630 to 1798459 reverse strand)
tttccttcaaagctctgatagggaagggtatgcattttttaacaattcttgacagttgatgaaattagaatatttggttaggacttagaagcacatctaccagaaagtcagtttgttagacttgaactaatttgctggtagattattgactccaacctttcctctttgaagattatctttgggacaaggtagtctgatcatgaactataatttgataaaataacaattagattgtctgtaatcagacttttgttgaaattttaattcgattgctgcattctcaatccttaatgagcatgtttcactaagatccagctggtttttccttttctgtttgaaggctccgtggtttgtggtgtttccaatcaatgctttgcttttagcttttgttgattgaagatctcttggagtcctcagtgctttggtcttcaagaagcctaaaagtttctgtctctgttgttgtctttgttctttcaagctgatgttcttttgttctttcggatactcattttcttttcaggctcttggaacttttgtcgtcttattttttcattgggtgccttgtttattttctcttaatttgggggtttgtattctcaaatatatatcttctttttgcatctatccgttaagtttgtttcttgttaagaaagataaagcacgattcatttgttggagtttgttttaccagaataatcaaatgtttctttcccccaaaaaatgagttattgtccaggacatagtattggggatattattatttcccagttgttgattattaaaatagtgaagagattttatgttcacttttatttcaggtttcatcgggg

SEQ ID NO: 63531 - DNA, 355 bp, Cucumis sativus
  Intron number 1 from transcript Cucsa.113700.1 (locus Cucs a.113700) derived from phytozome v7.0 (chr-ID scaffold0095 3; pos 1798506 to 1798860 reverse strand)
atcccgggaagaagtacgatcgtacgcgccataatgtccgtatggtccttatctctgctatatgaattccaagtttctcctatcgtttatgttttagttcattttttctttgagcgtgattgcttttccagaaattagcctcgatctcgctatagaagattatgcgttgttttctgtttgatttaagtgtggggataccacatagggaagtttcccgagcatgaacttattattattttggaggaaattagggtttaatgttgattatgagtgttatctggatgttctttatgaagatgaattgaaactctatcagtagctaatgctatgactgaatttacaggtaggttttgag

SEQ ID NO: 63532 - DNA, 849 bp, Cucumis sativus
  Intron number 1 from transcript Cucsa.132220.1 (locus Cucs a.132220) derived from phytozome v7.0 (chr-ID scaffold0103 7; pos 238338 to 239186)
ctcaactaaaacgtttctcgtcggcgacaatctctgtgagtcttttttcttctttcttcttttttccttcctaaataaattaaattaagtttatcaaattcactttactaaatttctattatttctcatttttcaagtaatgttttacataaattataaatttagtcttctaccattaagaaaactagaattttgacaatggaaaattgaaggtttagaattgaaattgataatataaaagattgtgttagtttgtgatctttttggttatcatattgaaaattatggtttaatagtttgattcatggttgtaattactttttattttattgtcttaatctataattagtttcaaatttaattattattggttgttgagattttgttaaaaattgatgagaaattataagcatgacttatgttcaattatactttatactatattaattgatttactatatcaaattatttgttgatttgaaattaagttctactttctatccaaaattttactattttgtatttaaaatattctaaaatgttagtgatttgaagatacactcaattttttacattttggtataatcatacacaaaatatatatatatatacatttgaaaaagggacaaactatactccagaaattaggtaagaggttgacacaaataagaatctttattaataaattgtataaaataaaaaggaataaataattaccaactaattattaagaattaataattttcatcaatgtgtttattattattaattccaaattcttaattgcaaacttttttcaaaaaaaattatgcagttttcaacttcaccaccggacagcacgacgtgacg

SEQ ID NO: 63533 - DNA, 737 bp, Cucumis sativus
  Intron number 1 from transcript Cucsa.058970.1 (locus Cucs a.058970) derived from phytozome v7.0 (chr-ID scaffold0061 4; pos 1090391 to 1091127 reverse strand)
ggtgtgctatcatcatctcgtgaaggtacttattgttgtcttttagattttggaaatccaatcaagtacaattgttcattgtgtacgatttttttatagttgtttagagcgccatactttaggaaagtaatggaggactccatttaagtgactccgggattgccctctgaacataactttctctcaagaatagtaacatcagataagttttttggactgaaattgggtaaatgaaaacctaaatctctatggttattgatattcacatcccaggatcatagaatactctgattagagcagttactaatgatctttattacaagcctttgccattaaccaactcacacatgatattcacatcccacaattaaattgcagttctttttgttttttaataaaggggtcaagcaatcatctttggctgcctgtggacaaaattttaaaaagaacaaggatgatctttttcttcctattttctcatatactgctggttatttttaagcttgttctgcttaaaatttaataattcgttcaacactgtaactgcccctgtgtcaagtattatgttattaagttgactggttcaagtctcttttatattgatggaaagttttcatttacgacctattttgagtttttttgttttgttttgttttcttcttgttctcggatgtttatttccaccccctctgtttctttcaggattctttacctgatattgtttattctttggtgtg

SEQ ID NO: 63534 - DNA, 496 bp, Cucumis sativus
  Intron number 1 from transcript Cucsa.128310.2 (locus Cucs a.128310) derived from phytozome v7.0 (chr-ID scaffold0102 4; pos 337552 to 338047 reverse strand)
aaccgttagtttccattgcttcggttcttttttttacttcgtcgttgagatagaaatgcacgagaattttgaatttgtttttgtttttctactgcgaattttgcgattcgcgacttcggaactcactgtttacgataatgaattattggagtttgggagaagttgtacatggaacagctatttgcaggcttaatttctctattctagtcaagttaagctggtctttgaagcctccgcatacccaattatttttacgcctaatcgaattcggggaaagcaatttctggttatcatttcttcaaatgttttttcttttttatctaccttgttactgcttgtggactttgtcaaggttcctgactattgtaattttgtagtttctcgttcctacacctgcggttttgagttcgtttcaccaatataatgccatgaaatcatttgacacttccagcccactgcaggctttcttttggggactaggcaaaccattttagag

SEQ ID NO: 63535 - DNA, 497 bp, Cucumis sativus
  Intron number 1 from transcript Cucsa.113460.1 (locus Cucs a.113460) derived from phytozome v7.0 (chr-ID scaffold0095 3; pos 1597284 to 1597780 reverse strand)
tcgtctccatcgttcctcttgttcagtctcttattgtaattcctctctttttaactattttagatgcaaatgaataatggggtttttcttaattctgttgtagggtactagaggggaagggtagagtgtcgtgagtctcgtgatcgagggaaatttgattttgaaaaccgtactatttttaggtttctataaattctactcgtgggatgggaaaggctggagttgtttattttcagagatgggaaatggggcggagttgggaaagaaattaattcatccattgaatgtttctgtattcgatgaaggattaattgttgaaaatgtaattcagttctgttctttactgatttcttctcaaattcgaagtacttcgttcgatttctctcttttctgggtttctttttattttttttattttatctttgatgttttattgattatgggtatttgttttggttttaggatcgaaaagccagtagttccttcacgaagagggg

SEQ ID NO: 63536 - DNA, 983 bp, Cucumis sativus
  Intron number 2 from transcript Cucsa.090460.1 (locus Cucs a.090460) derived from phytozome v7.0 (chr-ID scaffold0089 4; pos 1739278 to 1740260)
cactttcgatctccattgcttccagtcactcactggtacgtttttccttcctgtattttgtttactttttttgcctcaaacacatggtttctgcctcacattctgtgattccatagataagcagttaagtgaatcccagagtgggaaagcacagctgaagttctagaaacgttattgatctttgttaagtttcttgttgagctcgagaacttatgaggatggggattcaaacataacttttggttgaaattattgtgcctgattggttgagttttgcttgattgtaaaaatgatattgatgctctagttgaaaaatgtagcctttttctttatagccatgctatagtctccatagatatgagtgtggggattcaaatataaattttggttattgaaattgatctttgttcagtttattgtttcaagtataagaatgtatgagagtggggattaaaacataaattttggttgagattattatgtcttgattagttgagttgtactcagatagttagaaatgacattaatcctttattagaaaagtgtagcttttaatagccatactaatataccgtagtctccttcgcaaatatttttgtgttgtcaaacttttggaggaaaaaattagcatgtggtcaacagaaaccacaaaattagttttttgaaatctcgactctgtaactgttcatgtttaatcttttgtcattacactttgctacttgcatagggggaggagatttaaagattgttttgatatggatatgaatggcttttggtgtgaagaattaataaatttttcattatcaaccaacctacataagaaatagaaatgcttgttccgaagtataattttatatttccttgttcaaattttttttatctctgcaaagtgtcacggcattaactttataaagaaccagaatcatggatggaaattgtctgttgcagggacaaagttttttgttgtgtgtgaacctgggact

SEQ ID NO: 63537 - DNA, 409 bp, Cucumis sativus
  Intron number 2 from transcript Cucsa.076050.1 (locus Cucs a.076050) derived from phytozome v7.0 (chr-ID scaffold0078 9; pos 533148 to 533556 reverse strand)
cttcaagcgcagctgcaagaacatcatctgaaagggtgagcttatgcattctgtactcgattgaaagaaaaagggtaaagaacacccaaaaacctttgatgaaagcaaagaaaatgtcattgagtagtatgcaagatcttgttgaaagaaaccaccaaatagacaaaaacttaaactgaagaaagctaaaaaagcaaaggtagggtgcaatatgttaactttctcaataagaaccttctcatgcatgccaacctaagtaattagactaaaacacagcacccattgtctcaaccaaacataaattgtttagagatacttaaccaaaagctcttcaatctagttgatggttgacccaaaataatctggaattccagagttatctggaataattcattgtatcctcgttttt

SEQ ID NO: 63538 - DNA, 524 bp, Cucumis sativus
  Intron number 3 from transcript Cucsa.075670.1 (locus Cucs a.075670) derived from phytozome v7.0 (chr-ID scaffold0078 9; pos 322272 to 322795)
ttctagtttttcttgacggcaaggtaattttttgtttttcttctctaatcctttggactttctttagatcttaagatggctttcttggatcaatttagtatcttatgatttaatcgattgtacggacgattgtcggttggctggcttgtgtttgattggatagagatgcattgctttctgattagatttatctataaaccgtattctcttgaaatgaatgtaactataaatcaagtgtctccatttctttaaccggccaattgaattacaattcgtatatgttcttacctgttagaaacttgagtttcaacgatcaattcaggaaaaagatgcatcgaaatctgtttgagagtaaggataactatgagagtttgttcgtaacaagttagagaagatgaaacgcctgagtttcttcgtaatttcttcaaaggactattagagtctacagtacagattttctagctgaaatggacacttttaattgtggtgtggaatgaatgtgttgcaggtcgacaaagctacac

SEQ ID NO: 63539 - DNA, 913 bp, Cucumis sativus
  Intron number 1 from transcript Cucsa.120190.1 (locus Cucs a.120190) derived from phytozome v7.0 (chr-ID scaffold0099 8; pos 2193674 to 2194586 reverse strand)
aaaggttcgcccatttcctcttttccgatttctacccttctttcttctcttaatcaatcaggaggtttatgatgttgtaattttaggtgtgcgaaatgggcttttcgaaatttcattttattcaaaacctgtccattttgttacttcagacatcctctcactcgactcttcattcttgcccttttgcacaattccatttagtagtataaaatcaaggtctcccagcaaaaatctgatttatactctggtactcaaattttttatatagattcagtatgcagcgagcttggttttgattttagaatatcccattcttgacaccttagttaactggaagtttcagtacactgctcattttcttgttgaacttattcttaggccgatggaagttagggacgttgttatttttgtagatcattatgattaatatgcttcgggcaccgtaaatgttaggacgattatgtttctgtttgagttcaaaaatttatgggattgaactgttgatcttaagaatggtagtaactattttatccactgagctatactcagatttgtgttatgatgtggatgtgcttgtttagatttaagttttagtctagttagcatttagtagctacattatgtagatttggttgtacagatttcatctattctaatattatttctcctcatgtaatgccgtgttatttaaaggaataaccatttgggtgccatgactcctaaatttatcagaagaactcttgccttacacgtgttatttgaatatgcagtgtttatgtcatacgctgattctcttcttagactcaattttaggacatcttacaactgaacctaccattcctctgtctcaatcctttgtattatttctttattatcaggaacaagattaaaatagttgcagctggtgccattc

SEQ ID NO: 63540 - DNA, 763 bp, Cucumis sativus
  Intron number 1 from transcript Cucsa.130610.2 (locus Cucs a.130610) derived from phytozome v7.0 (chr-ID scaffold0102 9; pos 684297 to 685059)
gacatttggcgacttttctggtgagatttaagttccgatcacttttaaatccgtcgtgcctatggtggattgagccctaacttctgaatttttgctgtgttgaatgtatatgtgtaatcgaataagaagaatcctaaaacaaaatgattctaaacacgctgaattttaatgaatttgacagattgtgtttggatttatttagtttgtgttgtgatgggcagttctcgtgactcaaatctctgaaaaccttactgttaccaaatgaaacttcggaattaagaaagacgaggtcattgtgttgttcaataaactgttaccaaatgaaacttcggaattaagaatcacatcacattaatatctagcaatcttagtagttttgggttgttatttctccgtgttttacttttacatatttcactaccatgttcgttccctgaacgaggagtctcgatattgttaaatgtaatttgtaatttccaatctcaacatgacttctttgaatatgtaaaggttatgtaattttattgggagaactatttcctaggtcgtttattgggattctctagagactcctgttgacacctataaatagaggtgttctctcccttgtaaccaagcaattaagaagctaagaaagctccaattgagcctatgtgtcaaagcactgcatagaagaagtttctccataattttccatctattctaaactcttgcctaattctccttcattgcctccaatagatatttgaatcggaggtttgtg

SEQ ID NO: 63541 - DNA, 721 bp, Cucumis sativus
  Intron number 3 from transcript Cucsa.130610.2 (locus Cucs a.130610) derived from phytozome v7.0 (chr-ID scaffold0102 9; pos 685389 to 686109)
tgtggcaagatttattgttccattgaggaaactttgtaggttaaactatgagtttattatggttttgttatcctgattgttttttgatatttaccacaacattttttggggagttcttctctttctcattgtcttgatttgatttcttttaagtaatagggtaatgtcattgaaaacaaaagaaattggaaacgtttccaagccaaggccagaaattggcctatgaggtgaggagagctgcattaggtgcatcttgcaattaccatggtcgcctcttggtcagtttttgtaattgcgttttggttgcccttgggcctgtatttagaccattacattatgaataaagtgaagaaattctaaccaaaaatatacaagaggtagcagttgttgccttttatgtcttagtaaagacgagaaattaccattttgaagtattttcttttgctaaaataaagaagttttttcctatcattatctcttgaaaataagtagcatcaatgaaatttattcagcatgtttgtgtcaagtaatatatcgttttatgtatttcttttctacttacaatatatattcatcttctagtctatttacaatatctatgtgcattggtttacattcacttgggcgacgtttcataataattttttttaaattgtgtctcttaataatttcttctatattttcagatttcttattgaagtcggggccttacatctgctgg

SEQ ID NO: 63542 - DNA, 256 bp, Cucumis sativus
  Intron number 1 from transcript Cucsa.010690.1 (locus Cucs a.010690) derived from phytozome v7.0 (chr-ID scaffold0015 4; pos 107558 to 107813)
ctgtgttccttgatccacccaattggccttctcaggtatggtttatttttcattaatttagtttctttttcttaaatattttctctatatagcttcttcactacaaaagcaagaaattaaaaagaattatattccctattcttttctatatttacttgaatataccaaacatattttgatctgggattatattcttttccttgatctttctctctcaatagcaaccaaatcagctccaagtaagtggttgtgagac

SEQ ID NO: 63543 - DNA, 882 bp, Cucumis sativus
  Intron number 1 from transcript Cucsa.065610.2 (locus Cucs a.065610) derived from phytozome v7.0 (chr-ID scaffold0069 6; pos 303836 to 304717)
ccaatctcttccagatctgaaacttctcatttcaggttcttccctttttcttcatcttcccacttttcgatttccttctacttccaccttctacttggtctctgttgctttgttcattgtagttttgtaatgcggttgtggttttgcttgaaatttcaattgggtattcttcttttttctggtttcttatattctttgatttagtaattgtctctttgtttaatcttttgtaatgggtttgtgattttgtttgaaatttcacttgggtattcttctgttttccttaaatttttttattgagtaatcctctctttgtttaatctcttgtgacgggagatttatgattttgtttaaaatttcacttgggtattctttctgttttctgttttccttcattttttttattgagtaatcgtctttttgtttaatcttttgtaatggggttgtgattttcttctcagaactaggaatttctctaccccaattttacaatatttgggttgggagttgattatttgctgactcaacttgacaaactatatgtttcttctttgttgtggagagatctaaagacttggggttgcctgattttactttaacctactccatcaggcttaatcagttaacaggaatcctgtattgtatgctaaataaaataacttttaacgattagatacttgcatattgtgtttgatctttactccctccttcctcaactgcattgttcacaggatacttgagttgatgtatgcaaaataactttattcatttgaattggacagtgtggaaatttcatcattagtattgtaggtgagtgagtgtgatgtcgtttttgagactgatatattttttgtatgaccataaaggggtttaagtatagga

SEQ ID NO: 63544 - DNA, 871 bp, Cucumis sativus
  Intron number 1 from transcript Cucsa.018160.1 (locus Cucs a.018160) derived from phytozome v7.0 (chr-ID scaffold0025 2; pos 504626 to 505496 reverse strand)
tggacagacagtaaaggtagttgtttttactcaaggtaatcgctaaatttgacttgaatgatattttcatgggttaggatttaatggtagaaatatctagttttctatgagttctggttccacttctttcaatgagggagtatcgtggaatggatgttaatacatgatgcaactagttatatgaactttaaaaaggctcaatggaagcttggtttctacccaaaaaaaaaaaaaatagcaggtattattgtctccgaagtgtttgtggattagatagtttgtggtacagaatcctctacttgaaagggaggtttgcttgctctgttagtgtcttagtgagattgcttaaactatcgtggtgttacttatatgaatttccctctataattgatgagtgaaccagtgtgacatgtgtgatgtatttggagaatgaaaatatttatttgttctttattaaattttcatacagttttgcagtgtgacatgattaatactgattagttggttttcccccttgaaatcagtttacaaatttgagtgaagagaatgagatgaatgctaggatatgactttttaattaactcttatatatatgtgtatatatatatatattcgttatttatttcctcgatgtggtcacatgtggattctctcatctgttaccatctctctaatcaactataaatttctatctttttaatttacattggccatattatcgtgctgctttttaaaaaatgttgtttgtatctgcatcatatctcttctcgtggtgccttttttcttcttcagttttcattttctttcactcgtttcatataatctcattgctttctgaatcatgtaggtgaaaaattggacgaagcaaaaa

SEQ ID NO: 63545 - DNA, 334 bp, Cucumis sativus
  Intron number 1 from transcript Cucsa.075380.1 (locus Cucs a.075380) derived from phytozome v7.0 (chr-ID scaffold0078 9; pos 101695 to 102028)
caaatacattgtaagtataatacataggcttaatccaagaaatgtaaataaaatacctggcaatataaggaggcagctttgatttatttcaatgctcctccaattttctgctgatagtcttcaattgttggcgatatttccatcattttccccaaatttaagacttcttcgtaagtttcatcttctgtccacaaaccctactttatattctagaatccaaaagattgtcatggttctgaacttctgatatacaagcattgttgttacactggttgagtattgacattgaaatctggggtttgaaccattttggttttgcatttgcagggccgct

SEQ ID NO: 63546 - DNA, 692 bp, Cucumis sativus
  Intron number 2 from transcript Cucsa.130010.1 (locus Cucs a.130010) derived from phytozome v7.0 (chr-ID scaffold0102 9; pos 18326 to 19017)
gcccaaccactcatccccctctcactttctcccaagtaattatttttcatcccaacaaatattattccaatttaatttaaaggacatagtaattatgaaaataatgataagagatttcttccctcaacaagcatgcaaatttaacttaatgtagcctaatggtcatgtctattgctatcttaatttctcttcatctacattaataattttggtaaaagtacagtaagataaatgaagatgaccacaagacatatgacccttgcattaggaggctataacattcacagttattcccaactaaaaaagggtagaagacaatatattagattttatttgtttgtgaagagtaggtcatgacttagtatggttcattgattaaaaaaaaaaaaaaaaaaaactcaaaatcaaaatcatttttgttttttaaagtttaaaaatataacctatcatgattaaccgataataatcttctatcctattgctaatatacctatcatacaattagataagatctaaatcttgctacattcaaatttttatttgcatggtttatatctacaaatactcagatataattactttatttgcaactctgtcaatctaaatatactcttcaaatatcaaatttaaaaaataagaaagttaatccatgattaattgttgcttaacgatattacaggcaaagtaatcaa

SEQ ID NO: 63547 - DNA, 1001 bp, Cucumis sativus
  Intron number 3 from transcript Cucsa.046430.2 (locus Cucs a.046430) derived from phytozome v7.0 (chr-ID scaffold0054 2; pos 1911785 to 1912785 reverse strand)
agacgatactatttgaggtctaagcatcaacggtatgactggatttatttttgtcgtcgacgttttggaaattgtggtaaaatattactcgagtagattatgttttaaaaaagaaatcattcttttttgtgatgaatttgagctgagagattcagaccttttgttcccatgactttatggagttgttgaccattcatagctgatgaaattccaaaccaagtattaagttcagatcttgttattgcacatctttatgtggaaaattctatgtgttctgtttatcaattgaatcattggggcttagaccaatatgatattccagtttcatgttttgtggtcaaagaatttgaatttacatgtgatgtttacaaatctttatcctctcaatgctttgtggtattactgtctagtcattgtctgaactgaattttcaataattagactgtaaagagctcaatcttgatcattttattggggatgttgaattaataataaaccataagaacgagtcggcaaggttacttgtgaattttcattttattttgttcattgatggccttaattttagtaatacgacaagtatgatattgatttcttctaccactcagattgcaatgatgatgtatgatgaatatcggatggttcgagcacttgccctcaaaagacaagatgctgaaataaagtcatgtgttgcttgtttttcgtgtgcaagtagttcagtgacattgggtttttttatagcattaggaagaaacaaactcataactgagtttgcgtagattcatatgagttggcgaggaatgattttgttgtattcaccgttcttgatgacagttcaaatccttgagttatccctactgtataaatgttctttgtttttaaactttggggactttacttcagttcgtatcctttcaatgttactttctataaaatggtgttattacatcaattgtcaccctgaaacgtgaaacttctacgtttatgttgtagattcttga

SEQ ID NO: 63548 - DNA, 945 bp, Cucumis sativus
  Intron number 2 from transcript Cucsa.011710.1 (locus Cucs a.011710) derived from phytozome v7.0 (chr-ID scaffold0015 4; pos 1032072 to 1033016)
ttattgaaagaatttttggtcttttgaagggttgatggacaattttttgaggaaagtcctactaccccgtctaagtccaatgtcacacaatactaacatgttgtctactgcacaacctcataaatagagagctgacaaacacaatgtaatgaggatattgatgagggtgactcgatgtacgacataactataggtgatcacatttacaatattgagacctcgaacaaatggagttaatggcaggatgatttagccaaagaaatgttcagtcaatgggagttgcgtaaacaatagtacccctggtgtagcagtctacttctttattttctaaattgtcttattatttgttgaatgtatgggtgtagccacgaaatgaatgaaacattcacaaatgactagaagtaggacctattttgttcgacgtgtttacttgttctataactcaaatgcttaacatttgtttttcttgcattgtttgtgagtatgacaagttcaacatggagcctcaaacgtttgtggatgaaagaggagaagtccacccttgtggagtgcttgatggatttggtctctactaatgggtggaatttgagaacgacacgttcaaacccaagtacctagcacgactagtgagaatgatgatggggaagctgttaggatgtaccatccaagcgaccagtacaattgactgtagaatcaagactccgaaaagaacgtttcaggcgatgtcagaaatgcagagctcatcatgtagtggacttggttggaacgatgaggtaaaatgcataatcgcttagaaagaattgtttgacagttgggtcaacgtaggcaaataatttattgccacaattattcgcttatacaaaaggaaactgacaatttatttgaaatatttcacaaagccaccttgcagcgaagaatctcctaaacaagtcttgtccttattac

SEQ ID NO: 63549 - DNA, 385 bp, Cucumis sativus
  Intron number 2 from transcript Cucsa.112930.2 (locus Cucs a.112930) derived from phytozome v7.0 (chr-ID scaffold0095 3; pos 1262430 to 1262814)
ttcctaccagggtacaagtttcccttcttttttattttcttctttgtttttttctccttttaatagaatcgtccggattcaaagtactgcatcataagtagtcatttcagctatgatttttgagatttaagacttggattaggttacggtatctagaagttgctcaaggtaccatgcgattgtgtttaattctaagatcttctgttacaatgcgaatatcattattgtcctattctacgggtatctattattttatttgttcactgttcctaaactttctacagcaacactagctattgacagaaatgtcaactactttactgatgcaaggttttcttttctgttgacagtcatctccgtgagttcagctaggcaggtcatcgat

SEQ ID NO: 63550 - DNA, 752 bp, Cucumis sativus
  Intron number 1 from transcript Cucsa.053420.1 (locus Cucs a.053420) derived from phytozome v7.0 (chr-ID scaffold0058 1; pos 198155 to 198906)
aggatttttggagatactactgcaacaagtgtaaatgcttgtccatcaacaagacttatttcatattctaaaaatgaaaatgaaaataatgttgaagagaatgataaaggaaaaggcagaaaacgagtttgaagaactaggaaagacaaattcagcagtttcttttcaacattcataaatgtatatgtagagaatgccaagagaaaaaatgacatccttgataaaagatctgtaggttgtacatctagtcaagttgatgagagccacacatcaaccagaaaagatgatctcgatgatgagttgatagaatgtttgaacgttttaaatacaatggatgatgttgatggagaggcttatttcaaaatattgaaactctttcacggtaattttgcttggagaaaaatatttttgcgaatgcccgattcaatgaggagagatttcataaatagtctctagattgaccttagggatgtttagccttagggatggattgtgtatgtttgtaccttatgtgttattttcttttttaatattctcatgatcatggattacttcttttaacatggctacgttgtttttgcgatgaaatgaatttatacgttttttttctttgatttagggacatactagtgaatagaaatggatgtgattcaagttgatcattttgaggattttgatcctgacaacgatgattgcatccttttcactttattacacatgagctggcacaagatacagtcttctaaacaacc

SEQ ID NO: 63551 - DNA, 490 bp, Cucumis sativus
  Intron number 1 from transcript Cucsa.111340.4 (locus Cucs a.111340) derived from phytozome v7.0 (chr-ID scaffold0095 3; pos 173023 to 173512)
agagctaaataaatccaaacgtcgaactcgaagtggtaaacaattacaagaccaaaatttattcacacatttaatccatcaatcaaattggccactctcttttcttagcttcttccttctttcccatcttcaacctccaaaccctcaaaatttcgcatcctcaaagagactactaacaatttttattcatttaaacggaaacacttgcttcctaattgccctctccagttgcttcccatttctccttttcgctttttatcacctggggttctttcgatttttcgagccttatcgtcgagttacgcgtttcaccatctctctccctttctgggttagtgatagtattgtttgttctagcttatttgatatccctcttacgttttttttttttttttaattctttctcttttttacttttgactgtttagaaagtttttcttctcatctcaattttgagtttgttcgaaattgatttgcagacgaagaaggc

SEQ ID NO: 63552 - DNA, 548 bp, Cucumis sativus
  Intron number 1 from transcript Cucsa.084740.1 (locus Cucs a.084740) derived from phytozome v7.0 (chr-ID scaffold0086 2; pos 408278 to 408825 reverse strand)
cccatcaaagttccgtccaagactcagtttctaaggtttgtttctctattcttctcaacacattgttaattttgtgattctgatgggttttgatttgagttcgttttctgtgattcattcccaacccattctgtttttgatatcaggattgtttattcgtaactctctaactatggattttgattggcgaaagataataagggtttaaccgaatttactcatccgatgccactttattctgctttctagttgatttccttgattttaactgtgttaaatcttatatttttctctgtttggcgaatggggtagtgggtatttgaacttttgcgttatttcgatttgatgttggatggagttgctgaattgccaatgaaatgggttttacatggatgttgcctttggattgttttgatgtcggagagctttgtatgctttcttttaaagtgtgtatttttctcatttttaggtttgcttactttacattttcattttcatgttgtgctgtagattaagtgagaagaaaggtctaaatttttcagtcaagc

SEQ ID NO: 63553 - DNA, 1014 bp, Cucumis sativus
  Intron number 4 from transcript Cucsa.047060.1 (locus Cucs a.047060) derived from phytozome v7.0 (chr-ID scaffold0054 2; pos 2242919 to 2243932)
tttggaattcaggagcacattgatcttggaattaagtgagttaccattctgttattgtttatattcccctgtgacggttttttttttgttgatgatgctgataattattatggactttatgcgaatctggatttcggcttatgatatgttaaatcctcatgaaatactgaagtgaagagggacaattggataattttaatttcgttaggactatattaaactcgtgtcgtcaattgtctataaccatactttgcatttaggattacatttgcttcgctatctgaccagtatcaaggttcagaacatgggtttcttgaactgctttgtgcaccagaattattggtatatacccaatacgagtaatagacctgtcacctgacctaaaccggggttaatacacgtcaaaacgatctgttcactgatataatgaagcatagctttgtgtatggttggagattcagccatcattttgtttgatgaataagagttctatattaactcttgcatgcttaatcttatctgaaaaaatttgtgcggaaatggtatctgtttattatatgcttaaccttggttgcattcaaactaaatgtaaacatatttgatgctgttgaaaaaccttgttccaaagcattgcttatagtggtatcatcttaacttatttgtaagatcacgtccaacatatataatatggtgtcttatttatatcgaacatgaactgaaaccaaggaaaatattcatacacatgctcaactttggtttcttgaggctataacttgtgtgagttctttgctgatttacatacattatcttcaaataactgtctagtatacaagttgcatctccatgccacattttcgtatctctgagtaatcttcttgtacaagaagagttctgtagatgcaagtgctggcagctttgagttattttgaaatcttatcataaacatggtttatactcacaagtacttgatcacttcttattctaaatttcctttgttctattttttctacagat

SEQ ID NO: 63554 - DNA, 674 bp, Cucumis sativus
  Intron number 2 from transcript Cucsa.107900.1 (locus Cucs a.107900) derived from phytozome v7.0 (chr-ID scaffold0093 1; pos 160134 to 160807)
accagttcatcgcaaggaaggtaaagcttttccgtgtaatttggttcttaatgtattaactaaccaaatcaaaacaagccactacttactgaactttaaataagtacttaccctcaagtttctttagtattcaaggacaagttgtacgacctatagaatatatcttgctctaataagcttggagtgcggtaaaggaaggagtccttttttagctttgagagtgtggcagactcctacaattatatgagtgatgagtgaccttgcaagtttttgttagtttaagtattatatttatgcagtaacttatacaggtaactcatcacttacaagaatatatgtgggcttgcacccttgaatttttgctatatgttatcttaaaggattttatattttctttattgcatgtggttgggtgagggtgggaaatcattagcagatccaaattatgtattttgttagaacatggatgctaattgattggcggatttattttgttattcaagtcagaacaataatttctacatcacaaatttaccatggattcctaattggtgtttcatttacaatagcttttcattaaattggctcttcttaactgtctttgggtgtttccatatggaaacgtcccctttcccctttgcagcaagtgtcagagtttgatctatttacactgg

SEQ ID NO: 63555 - DNA, 799 bp, Cucumis sativus
  Intron number 2 from transcript Cucsa.089030.3 (locus Cucs a.089030) derived from phytozome v7.0 (chr-ID scaffold0089 4; pos 289608 to 290406)
gatcttcgtcgcgtcacagctgattccagaagaaggtttgtttttgcgggattttcctgtttttccccttaatttgtttcctttgattccttttctcctgtaggtcatttttttatattgcttcccggagtttaatgcagcttcattttatgaattgtttcaacaatttctcttagattcattttccgtttactaaatctgtctataatcccttccccgtcggtttagatgttaacgattctgtaatcgggagcatacattcatgtagtttcttaatttgttaaagatgtgctacctctcatctaacctttttcaaatgggttccattctgcgtgaatgttcctccttgatttcttactttttatgtgctcttcatcatattctgaaatgataattaacgcaagcctatctagattttccttggtttttttgtttaagttcccaaattggtttattttgcaaagttgagcttatagtttcatacagaacatcgattgtttgtcttattgagttttattacatttcatgctgtgatatatgtcaatatgttgtcggtggttgtattttagataccccttttaagcgtgatgtctccagccaattaattctagagtttctttctgaaactttgttgtagagtgtaatgatgtagaagactgtatctcaacaatgatggtactttttgatacaataaatcaaattaaacaattctaaaactgatttcatctccatatttcaaaaaaaaattctaaatttaatcatcatttgaaccttcttttgttcttcatttatttcagat

SEQ ID NO: 63556 - DNA, 473 bp, Cucumis sativus
  Intron number 3 from transcript Cucsa.032260.1 (locus Cucs a.032260) derived from phytozome v7.0 (chr-ID scaffold0042 9; pos 1625705 to 1626177)
cttatctgattaaggagcagcgcagggtatgtctcttcaatttggatcactccagttacttttgattgtttttacatacgtgttctggtgttcattgattagttttagtttgttgtttcttcccaattgcaaagagaggggttggggagaagacaaattaatttagattacagtaaatcctgcttctttttacttgctaatggttgatgtacttttttttgggtttgatttaaaatttttagcaacccacatgacaacacatttgagtggtatgaaaattcataatctttagtttaaccaaagtgtggggacttggtggagtataggctgattgattttgctgtcatagctttgttttctcatgttgggtgtatctccatagtagaggactcagatgggtttcacacttttctatcatttcaatttttttgaatttagatttaccaaccggttgaggaagaagtcgttaaggt

SEQ ID NO: 63557 - DNA, 937 bp, Cucumis sativus
  Intron number 1 from transcript Cucsa.118650.1 (locus Cucs a.118650) derived from phytozome v7.0 (chr-ID scaffold0099 8; pos 528708 to 529644)
ctaggcctgaatctcttgtatgcttcttttctcccttcctaaaactctattatctttttagtttttatcccgtattccccgattgataaattcttctcttaaattttggcatcatgctctactgtatgttatttttaaaatctctttcttccatggacttacctcatttttttgatccacttgactgctctattggaatttgctttcgttgatcagatttctaatttaccagttttaggcctggatttgatacccatttagttttttggtttctcaaaattatgcttatttacgttcattttcttaccgtaatttctataatttcaacaaccaaaactacttttagttttcaaattttgatttttttttttgttgcaaatatggtaaaggtgtgtatgtagtttttaaaaactacttttaggggtgcaaaggtatgtatatagttaattttcaaaaacgaaatggttgctaagctaggtcttaattattcgaaataagcattcgtttacacttgctttgtcaagagagaaatgtatggagttaaaacctatgctcatgtcataaacctcactacttccattcaattattttcatttgaaatgcctcctcattttctgtaatttgaagaagacagcaatcaatctcttcatacaagccagtttgtcttctctgcaccgtgtcatttcagctgcatcaatttgcttgctggtactttcaagtgttttatctttctctccatactatctcacctttaaatccttccaccttttgcgattttgttgatctgagattctggccttataaagctacattttgtgaattctttggactgtcagaacataaatgcgccatatttttctgtagcagtaggtgtagtcttacaattgagttcatcagctgttttgtttcttatttttgtggtttggatattggacag

SEQ ID NO: 63558 - DNA, 767 bp, Cucumis sativus; identical to SEQ ID NO: 62983
  Intron number 3 from transcript Cucsa.098600.3 (locus Cucs a.098600) derived from phytozome v7.0 (chr-ID scaffold0092 3; pos 525757 to 526523 reverse strand)

SEQ ID NO: 63559 - DNA, 782 bp, Cucumis sativus
  Intron number 1 from transcript Cucsa.098600.3 (locus Cucs a.098600) derived from phytozome v7.0 (chr-ID scaffold0092 3; pos 527127 to 527908 reverse strand)
aattcttattcaaaggttagtttcgtatttgaatacctgctgttttacatcttgccctttcgttagttgaattagctaattcttttgccactttctttttgggtttgttcttgggttggggattggttgttggtcgtatagttgatttctgttggtagcggggtaaattgatgaggaagcttaaacattagcatctttaagtcttgtgctttccggttttatgtttccttttaccagaatgtgcggatttttccctggtgcgtgtgggaattatgtagttatttagttgacctacgagggttgtcgggaaacaatagaggatatgttattcggatactggaagctctagcttctgcctttgaatgttgtgttgtgtttcgtcaccgactccatagtttgcctttgtgtagttttggtttgttttgcggcagtgcaagaatgtttgtgtaggcaaacttgataagcttttgttagatgcggggtaggtagttgtctttgtgcactatttaggttacatgctttcagcggggatttgtggtcatgatgatagtcataattattcagctcccccaactgtgtagttatggagattgtgattcattttgtcaatatgggctaactatgttctttattgtcaaattacattctgtatcaatagttggataggtttgttttgaattcttcataaaattttgtttcattattaatttatttcaattcctctgtaatacagtaacaataggtatgtttttatctttgtttgaatcaggtgcattgattaa

SEQ ID NO: 63560 - DNA, 771 bp, Cucumis sativus
  Intron number 1 from transcript Cucsa.017410.1 (locus Cucs a.017410) derived from phytozome v7.0 (chr-ID scaffold0024 5; pos 107306 to 108076 reverse strand)
gtccatttctcataggttcttccatcatcccaccagtaatcttacttcgaccctctcttgtttttctttctttccttttttttttcctctttccctatctctctctctttctctctctgggtgttgtcagtttgattggtttctgtttgtgtttgatttgattttagggatcttctttacttctagtttttccctcttttcttttttctagatgtcatttttatgctacagttgttttacttgactaatgtgttcatttggattcatgagtggtgcttttttgagatttccttgttccaaaaccttgtgttttcacttcccttttgtctctttttgtgatttccatatatccttgaagctgtgaatctgcaagttaggtaagaaatcatggcatttttcagctgaatgaatgaggggtttggtgtttagtgtctagttcttcacttggagataaccataggaagatggagatgtttctctggtttcaaatccaactagcacatgactaatcttgttcaataatttcactttttgagggtttctttctgttatttggtttgtgggatctaatagcctaatcaatcccccaatcttacgtctggaaccaatatcttcattgtttagcatcttctttttgtgtatgcaaagccttacaacatgtttttgctatctgtctttatgttacttcatgttttgatgtgcgagatttgtgaggtttgaggtgtaatttgtgcagtggcttattgttccttctacgggaagaaggtggac

SEQ ID NO: 63561 - DNA, 575 bp, Cucumis sativus
  Intron number 1 from transcript Cucsa.002580.1 (locus Cucs a.002580) derived from phytozome v7.0 (chr-ID scaffold0003 3; pos 56555 to 57129 reverse strand)
aggtaaattcttgcttttatgtgtgtatgatatatatctcttttatcatatagtataaaaataaaaataaaaatgaggattttcttttttctgttgcaggtgttgatacggccttctttagcttctttacaagggaacttcatattttataacattaaagagctgtggtggattggttctaattcaaatggaggatataacaataatgcattgctcaccttcctccaaatctgtcccaccttagagcgactttttgtcacggtatgtctttttgtttctccacttctttaatcttttatatactgcttcaaacagccaagtacggaatcttactgactaagtttagagaagtgcactatatgaactttttgtaattttttaaaattctcttaaccgtatggacatagttaacacatcgttagtgaactacataaaactgcatgtgtcgattcttatctattgtacatttttgacaacaatcaattctaaaagtttcctggactgtatttaaattgatgtcctggtttctctccaatacagattgatcctaaaggctacggcacaccgagcaagga

SEQ ID NO: 63562 - DNA, 578 bp, Cucumis sativus
  Intron number 1 from transcript Cucsa.128450.1 (locus Cucs a.128450) derived from phytozome v7.0 (chr-ID scaffold0102 4; pos 466316 to 466893)
attgtttcgttagagtaagtttcaaaagcttttttgattttttattgtgtttttcttttccaaacgatttgaatacaattcatcaaagtttaatttgatttctaactttttaagtgttttctcttttgtccaatcaaacactttgataagggtaggatgaattatttgggtgttttttcgaaataaatattatgttatttagtagtagattttgaattttaggagttattatgtttataaagaaaaagacaggggtatactcaaataattattattagttaatattctaattatagtttgttgttaataatgtataatttaaacgtattaatattatgcagtatgggttaacaaacttaaagtcgatggtttatagtaaatttaattatattaataattcaataacccacttttcaaatgaattttacgagtcaaaattgaataaacgaggaaaatatttcatacttagatccctttaatactacatttctctctcattagtattaatctaacattcaaattttctaatatgcaattattcagggttgtgaagcttccgtgttgctgaagtccacacc

SEQ ID NO: 63563 - DNA, 526 bp, Cucumis sativus
  Intron number 1 from transcript Cucsa.129540.2 (locus Cucs a.129540) derived from phytozome v7.0 (chr-ID scaffold0102 8; pos 423607 to 424132 reverse strand)
tggttcagtgaggcgaaaaggaaaaaagaataaaggttttgctctgtacccaattttggaattttattcttgttttgatttttttaacgaggtgggtaatgaaaggaatgctattagaatagaattagtgtatcagggtatgttgttaattatgtaaggagataattttttgttttttggagagttttgctataaatagagtgggctagaaggatatggagtgaggcatttggtgagtgagttcgtgatttagtgaatcaattagggcttgaggagtatctcaaaaggagttcagctcccctaataatttgtttttatcttctacatttcaatacattctggttctgttttggattctgtcagaggtatcaaatgtatcttgtacttgtacaagtctcccattaacgaaatgttatacatttcgtaggaaaagaaaggactgatagagtttttgcttgtctgttgtgaaatttcctattttgtttctgaagattggtcttcaattggattggaaccactccaaaaa

SEQ ID NO: 63564 - DNA, 641 bp, Cucumis sativus
  Intron number 1 from transcript Cucsa.071930.1 (locus Cucs a.071930) derived from phytozome v7.0 (chr-ID scaffold0076 2; pos 51552 to 52192 reverse strand)
tcctccaccaagctcaaatctgtagatttctacaggtcacttagatctctttctctttctttgcatttcgtatttacaccatgtctctgtttctcaaacacccatttctgcgatatgtcatgcacttccacgcttctttttcttattatgttttgtttacgctttttctttgaaatgttgctgcttatctcaagcctttcttcttgtcagaattttgtgattggagttggcggtatatgtaaatcggcttctggaatttttgtgttcattggcttctttgtttttttattatttaatttggaaggcgaggtggtcgaatggtggtttgtacgaggtttttatggccttgttttttttcttttccgtcaaatgatctacatctacttttttttgttcttggcggttgtaactttcgcagagttgttccagatcaaaataatatgcaacctaatcgcctgtttggaagtgatgtagcattcgtttggaatttgattctggcttgaatcatgttatgcatttagccttagttgatttacccagggttaagaggcttgaattgattgcaaatgcagtactccacacgttgacatatttctttatgtgcaggaaaataccaagagatttaacggaggcaacattat

SEQ ID NO: 63565 - DNA, 1025 bp, Cucumis sativus
  Intron number 1 from transcript Cucsa.059120.1 (locus Cucs a.059120) derived from phytozome v7.0 (chr-ID scaffold0061 4; pos 1211701 to 1212725)
cgcaggtcaccttatcgtcgtttttttttcctgaggtaagcttaaaacatggttgaaatttttgtttttactttaataaagcgtgaaatgaatactatgcgtacaaacaacaacataaatgaagttttgagatgtgggtatttcaagctttattatgttcattaagaatcttcaatttcactaactttacttttaattctctaatttcagttttaatttcaatagttttcttgatcttcttgaagttttatttatttatttatttttctatgtattgatttggggttaaagaatttagggttggtgtattttttaggtgtcaaatgcaaattatctatgtgagtctgtaattggttcattttatatacatttggactattttcaactctagtaaacaatgcactactactgggaaacttattggaaaaaatctatagaaactttttaggttgttaatcaaagtgaatgtcatgaaccatttacttcttgcgtattttacaggtttttttgaaagttttgatagttaaagaggcacttagatacttcttaggtactttttaagttggtttgagggtgaaattgttgttgaagtaattttgagacttggaatgctactttcacaaaagcccatgggatgctcgaatccgaagcagccacctagcaaatccctatcccaagttggagtgcccaaatcaaaccctagcctgcccgatttccttccattcttttcctctatgtagatcttcctacagtttcccagatttttatgaggatctatattgttcatcgttaatgccttcacaatctattggatgtggcagaaaccttaaacctggttctttggtgaagagatcctttgtaataacggatgatttcagctttagttgagatgttaacctttattacttattaggacactatttttggtttgtttaccagtaatttttttttataattttgttcacggtttagtttgtttaaatttctttttgctgtgtgatttatcacagccagcatagctcttg

SEQ ID NO: 63566 - DNA, 624 bp, Cucumis sativus
  Intron number 1 from transcript Cucsa.108030.1 (locus Cucs a.108030) derived from phytozome v7.0 (chr-ID scaffold0093 1; pos 279727 to 280350)
aactgaaggaaatcgagatcaacgaattagtgactgtgagtttctctcttgtctttttcatttgagcctgttgtttcgattactgtatgattctttgtttaattgagaaacagatgaacggcaagaaatcgttgaaaagtgattaacaagattttagggttttgtatggtcaaagttgcaaatggaaatttgttgtcctttctcacgatctatgccgtcgacggatgatgaaataagaacctggagaaatttcataatggaaaattagggtttttctatatgttctttttcaatttgattctctgtttttgagatggctgaagtatgatctgaaattaggaaaaaaaaattctcacggattgagagcgaaagattaagaaaaggggaaaatgttagccttaggcaatcttcattcacaatcgaatgtttttagttctctgtaaccttgaattggattacattcttatttccgtaggtttcattacttgagcattatgcttttattataacggatcaaaatgtagtaaataggccttttgcctcgatttcatcgtttaatttgcctactgggttccattcgttctattcgcaggagagaatatacatatctgtactatcaacaac

SEQ ID NO: 63567 - DNA, 675 bp, Cucumis sativus
  Intron number 1 from transcript Cucsa.114750.4 (locus Cucs a.114750) derived from phytozome v7.0 (chr-ID scaffold0096 8; pos 109752 to 110426 reverse strand)
cttgctctgttcttggtcagttcttcatttcatttttgttttctttttaatctctttttgtcttgttttccccttctgttctcgattttgatttagttttagtttaatggtgttagttcagttgagctgattgatgcttgtgaggggagcgaatttcaactggggatttggggattttctgctttagggagaacgagctggaatttagttcaatggttttcagattcaatagtggtttgatttgaatatataaactatcggctttctgatgggtgggattccattttcttgcttctttgactatttgagtggtttttggacttctcatttttttaaaaaacttttttaatgaatcaatgaggctttgaataaatttgtgtttgtagttttgatgtctactaatgccattgttagtacgtcaaagattgggtataaacaaattgaagaataggaacaaagattactgtgagattgaaaatactttaagtctttacttttgaaatatatctgcttattcagatatgtgattctttatggggttgtttcaatcttatcttgtcattttgagctgttgttgatattgtcttcttggatttagttaggcggattcttttccatttaaaatggcttaactttacagctgagagcaggtacttccaattcacattctgtacc

SEQ ID NO: 63568 - DNA, 573 bp, Cucumis sativus
  Intron number 1 from transcript Cucsa.128880.1 (locus Cucs a.128880) derived from phytozome v7.0 (chr-ID scaffold0102 8; pos 38893 to 39465)
ttcgctatctctatattgtcattgacttctccaaggtattcttttctcttccatgactattactacattagtgttttttttgtgataacttactacattagtaaatgtttcaactgtttgatttatgaggttctgtgccttgccctctcatcttcttattgagaaattgaatttgttctaatgttgaagttaaatgcatagcgtctctcctgaaatatatcataaccatcaaattgcattggtttttttttagcttacctaagaactgttatatggtataaattcgttgcctccccaattgtttgttccctgtttatgtttcaaagggtttggagaagcatctccacagttattccatagaggattgctactcatttaatccaactactatgtagtgaatgaaaaatgtgctgccttgagtttttttttttttggagcaagtatgacttatgttcataaaaactgtaaattactggagataaataactttgaatatatggtgatggaatggaagtttttctttttctatttttttcattttgcttattccaccatgggcaggctgctacagaa

SEQ ID NO: 63569 - DNA, 870 bp, Cucumis sativus
  Intron number 1 from transcript Cucsa.095750.1 (locus Cucs a.095750) derived from phytozome v7.0 (chr-ID scaffold0091 9; pos 1608278 to 1609147 reverse strand)
gttcagagaggctccgatttgaagggctccttgttgtacgtttcttttcttttcttgggttttatgtgattttgatcggtggtttggcgatttttcattctcggcttctttctgtttttctgggaagatctgtttgatgcttatgttttgtcggtttctatgtgtttcgttttgtttatgtggcgatgggttttttttttattatcttgtttcaattttgtgatctctcttttcccggctatggatggttcatttcttcctgtttgaatgactggtgtgtagaactgcattagaaggatctgtcttttttttttcttctttctttctttttatgattcttagatcttagtgtatcatgcatcgtcttgaattgtgggtttgcttttcaagttgatgatctagcatagaataggattgtttaatctctctatagatgttacctcatggttttttagctaatttcttactgtgcttcagtgtgttcagttctggaaatgataataatctgagaaatataggcagtcatatatttcgtctggattgaactcattcgagaactcgcaagtctctgacaacagagattgggttttgactttgaagttgaatagaaacctacagaattttctgatttataatgattatttcgtttgcattattgtatataaatttcaatggtgcgattgttcttagctggttggacaatctgtgcctccaagtggggtctgtctgaatgctcgaaatgaattgattagcactccaaactttggaggcttgtctatgtttaacatctgtttatcctctgattgtgttgggctacttatgtgaaactatggatatgttgttattgcagtgttaggtgttcccaaggtg

SEQ ID NO: 63570 - DNA, 664 bp, Cucumis sativus
  Intron number 1 from transcript Cucsa.089090.1 (locus Cucs a.089090) derived from phytozome v7.0 (chr-ID scaffold0089 4; pos 382593 to 383256)
ccgaagccaccactaaactgcatctccggactagggttgtgcactgcacaatgcaagagcgattgttgtaatgctaaatgtgggcagcagtacaaaggaggagaggggttttgtgacacaaacgttggagtttctttgtgccaatgcagccatccttgctaattaacacaatattgtgtaatcgtgaaaatcaaaatgtgtgcattgtaaatgcacggggtatgggcaattgatttttgtaacagtatttttagaattgtctgcatgttatcgttatctactttaaacggcatgtgttttgttttgttgttgtgcttgtgcttttagtgaaagttctttttatgagagtatcttatctttgccatgtaatgtttaatttcaatcttaataagtgttaatcaagaaaatatctggatcttcatgttaccagagtgtggccaattaaggtgagatataacaaattgtcataataaaagctaaaatttatttcttttaaaaaattgcaaaaaggatggtcagttgtaactacactctcaaactctcaatggtaaattttggatccttaaacttctacaagtgttaaaattggaccctcaatgtcaaagtaattctcaaaattggacttggaggagtaaaaagagtaaaggattcattattaagctca

SEQ ID NO: 63571 - DNA, 494 bp, Cucumis sativus
  Intron number 1 from transcript Cucsa.090710.1 (locus Cucs a.090710) derived from phytozome v7.0 (chr-ID scaffold0089 4; pos 1890748 to 1891241)
tttcgacgaatcctcgaccggaggattatttgacggttggtattgatttttgattttgtatttgaggtgtggatgaagaaaatgggggaaaaggagagaggagcctttcattatattggtttttctgtttaattggggaaaagccgaaccaagaaggaagtgggaagttggaaaatttgaaatactagtgatgttttgttctgtgtggattgaatttggtgttctaattggtgcttaacttgtctgaagggttaaagagaaaaaaagaagaataaaaaaggacacttctttatccttataaaaatttgagcttgggaatttaacctaaaccaatttgatttatgctataaaaatgttgtctttagtttaattcggtttcttttgttttgttttctttttaaaaatttttttgactgatccaaaaggtttatttattattattttgttctctttggacaggttttggcgttgccattgcctcataggccattatt

SEQ ID NO: 63572 - DNA, 593 bp, Cucumis sativus
  Intron number 2 from transcript Cucsa.133890.1 (locus Cucs a.133890) derived from phytozome v7.0 (chr-ID scaffold0103 8; pos 125 to 717 reverse strand)
agctgaaggtaatctattaattatttcacttgttgccaagtacatgccatgtatgtttggactatatgtttttgtgaaatttctaaattattgaataaatcataataattcagagtacataatgatgttttacataggaatatatatagactttaaagaaaccactaaaggaaaataataatggaaaatactaatgattcataaatcctaattttccttcaacagttttcttccgttcaacctagtttaaacgaacaaatcttgccataggacctctttttcttccttctgtttgagcagtgcacttaaggaatcactaatcatccaaaaggaggacgtggtagtgagtttttctggggctgttattcctatggtcatattcatctttacatttctagcatgtttgatttagcaaacaacgtggcttctttcaagagttggattttgcgcttgctcgtaagagggatgcttgttggacaatcggggagtttttcctccattttgcttttgaaagagatgtcatttctttggtttgtggggatgtgtgctttgttgtgggatatctttttggggaagataaacaacagtgtttc

SEQ ID NO: 63573 - DNA, 738 bp, Cucumis sativus
  Intron number 1 from transcript Cucsa.032400.1 (locus Cucs a.032400) derived from phytozome v7.0 (chr-ID scaffold0042 9; pos 1702172 to 1702909 reverse strand)
gctgtggtcgccgttctcttctactccgccagtaggtaaaaacccaaaacacaaatctttcaacgcaactttttcttttccattttgcctccactgctgctctgttttctatagatgagagctcttaaacggactccaacttcctcttctccggatcccaattccaattctactcctcctcctcatcctccttcatcttcatcttcctcatcctcatcctcatcctcatcctcctcctcatcctcctcctcctcctcatgggttcatttgcgttcggttctatttgttgtcacttcctcttcaccggcttcttcttcctcctcctcctcctcctcctcctcctcctctgatcggtgagtctctctttccttcccatttctcttattcagctttaacctacttttccatatagatcttccgtttttcgtttctacgtttgatctttttgttccatctagatgtttaggttgtcttagactacgctcaggttcctttcccacattgtgtagttactatctaaatctccagtttgcttcggccttttagagcacttgatcattttcagtcttcttttatttttcaactttaactactgaattgtttgatatattgatgatgggtaattgtgtatcatactgaggagatgctattttgtttcatgagattaatattaattgactttgctcttttatccatgttttagggggcgccttaaatcaccttggtcacgcaagaaaa

SEQ ID NO: 63574 - DNA, 611 bp, Cucumis sativus
  Intron number 2 from transcript Cucsa.116310.1 (locus Cucs a.116310) derived from phytozome v7.0 (chr-ID scaffold0099 5; pos 247783 to 248393 reverse strand)
gacatcttgctcttcttcaaagtggttagtttatattcttctttttcaacagcaccattgcataaacttagatcctgcgttcaatatatgtctttatatgctatgaatactgttgatttttgtgctgaagtaggcatctccacgaccacaatctgaaactatatgaaatattaggatcgtgtttatgaaggttacattggaactgtaatagaaatgcgttgtattgttgtggattttgttttgaattgtccaagtgaggtcaagtttaagtcaaatttggatccaatatagaagtagacagggaaagaatttaggaatcgtaattgcagtctctactccagattgcatttaaattcagaaacaatttgtgctgagattcacattttctgatccattcatgtaaacacatgcactaataaattaataaggtattgaacttattatttgctaggcttgatttttctctatctcagtgagagattttcctcttctacacagtttatactactgtagattttgctttggatgctttcactgtgtaattggtaccttacctcgtttaattaacataagactatgaaatttcttttttacatcacaggggaagttct

SEQ ID NO: 63575 - DNA, 449 bp, Cucumis sativus
  Intron number 1 from transcript Cucsa.058850.4 (locus Cucs a.058850) derived from phytozome v7.0 (chr-ID scaffold0061 4; pos 964529 to 964977)
cgtcttcactttggaagccattaccccacaatcaggttcatattaatgtttaatatgttcttaaaaaaactttattctaatatcattttcataagcatttcgattttgatgctgatttttttttttgggttaaatcgatcttcgtttaattatcctggattttagtctttttatgaaaaacaaagatgggttggtagtcgattttagttctgtttgcttcaccagcagtagccacctaaatatgaccttaggactacaatttcctctttggttggtgggattttaatggttggtggtaggtgggaggagaaatgctgtcgattagactctacttttggtctatttttaagcaacttctttgcaatttcacttgttttcactgctgatcatctttcatttcactccgctgctcagattgaaaacccgtcgggcttggttttttcagttct

SEQ ID NO: 63576 - DNA, 751 bp, Cucumis sativus
  Intron number 1 from transcript Cucsa.004230.2 (locus Cucs a.004230) derived from phytozome v7.0 (chr-ID scaffold0004 8; pos 132887 to 133637)
gcggtgatgtttgtgattgtgaatctgtcgggtttttttttttttttttaattggatcgggttgtggtttcctttcatttcttgatctgcgatctgtgtggttttcattcgttcaacaatgtttaaatctacttgttcttccttgttttctttgcgatctgatttctggagccgggtttggaaatctttgcggacaggggaatttctttctttttttttttcgtatgtttgaaattttgattcgatttatctagattggagtttcaattacgccttctcttttgttcatcgggatttctgatctgtcagatccgaaatattgttattgtttcgtttctatactagggtttcatcatgtaaatttcggtgacttccatatggttgaatcctagtttggatcagaagaagaatgcacttaggttttgatttgattgatctgtatgactggaatcggatttgttcttaaatacttattcgtttagtttttgttttaagcttacaaacacaaagttttgaaaactaaaataatttattctttagaatctcgtaaatccaatcttttatgcatgattttgagaaccaaatgattatcaaactgggtttaagcaagttttatgaacagaatgaaatagattgccctacttttctcatttgttgaagtttgtcctccatgttctatattttgttgatggttgattttgtttgttgttctaaaggtccgtagatcagttgtataactacattccaaaac

SEQ ID NO: 63577 - DNA, 508 bp, Cucumis sativus
  Intron number 4 from transcript Cucsa.135100.1 (locus Cucs a.135100) derived from phytozome v7.0 (chr-ID scaffold0104 4; pos 20600 to 21107)
gaatttacggtcttaactcttctaagatcacacaggtctgtagagctaatttcttgtctcgtctctttactttagcctgcgcacaggcatatatgaatcgcatatgcactggcataagtatggagataaattaccttgcccgaattctatacttgctatggatttatctcaaacctgcctttttcgtttttggtttttctcctaatttcctgatggacctgtgttttgattattaagtacatgtttagatgcctattacttatctcttgaattgaactttgtacggctaaagagtttttaattttttaatcttccttagcttgggttttggcttatcccatcaatgaaattttttctacttaaataaaaaaattgacaaaagaaaactattgtcaatgtattggtttttggccttgtacttccgctttccaatgggcaacaaagttcttcgatgattttttttctcatgaagtggagtttataaattatgaaaacaacattttcaggg

SEQ ID NO: 63578 - DNA, 842 bp, Cucumis sativus
  Intron number 2 from transcript Cucsa.004200.1 (locus Cucs a.004200) derived from phytozome v7.0 (chr-ID scaffold0004 8; pos 97544 to 98385 reverse strand)
tgatatcaaggtgcaacatccttcttttctcaatgttacaagttttttctgcacctcgatattaataaaagtgcttatcagttcatcacaatttgtggagaagttgaattggtgttatttaaatttgtttattacgatcatgagggagagtcgttaataatgctcatgtggggcagttgaatgatggaaaaaaagtaaaataatggacatataggaaaaaggatggacagttggggttatttgatctacattcatcttttggtttcttacatgtgtacaagggcagaacccaacatcttcacaatgaaggttgaaggacaagattttatactctgcatatcttttttaatctaagatgaactaagggcacaattttccctcttggccctctcaattgatcttttcattatctgcaatcaacttgcatgatagctgacctaagttaatcacaaattttcttaatcaatcaccaacatgctatgtagctggaaggctggaaagaaaaaatgaacaatagtaatggtggataataggaggaagagaaacacattggtcttatatgatatttaattgtattagcatgtatggtcttgaaatcatatttcacaagacttccttgtcttccctttttaaggtatcaactaggtcatagtcatgcaattcctgtgggagctgctttctcttgagtccctgaaaactttccttctatagggttctacattattaggaccacttattaatatttttcctcttccttttcttaaaaaagattttttaatcattatttatcctcaaaaaataatcaaatgattgtgttattaccttcttccaggaaattatca

SEQ ID NO: 63579 - DNA, 974 bp, Cucumis sativus; identical to SEQ ID NO: 62710
  Intron number 1 from transcript Cucsa.076150.3 (locus Cucs a.076150) derived from phytozome v7.0 (chr-ID scaffold0078 9; pos 593002 to 593975)

SEQ ID NO: 63580 - DNA, 830 bp, Cucumis sativus
  Intron number 1 from transcript Cucsa.005430.1 (locus Cucs a.005430) derived from phytozome v7.0 (chr-ID scaffold0005 5; pos 518704 to 519533 reverse strand)
tccccaccggtagtccccttaccaccattctcaaggtatttttctacgcttaccactaacatgcatttacttttatgcatttcattcccgtgtataattaaatatagcaaaatatcatcacatgagtggctaacactttttttaaaaaaacatatatttttatattatttttactttataattaaaagaaaatgcaaagaagatgagtgtagactagattacatcaaagtatttgctttttttgagtgtagcctaaagtttaatatcctcatgcatccactcgatcgagaaaagaaaaatatatatatatatatatttatatttttggaagtattaaaatatgtttcttttaagaaaagtttgctatgtgccatcaatgattgagtattagagaggatagcgtagaaagatagatacaactcgagttgtaccgaaacattttttttataggataattgcaatatggataacaattctatggctaaaaatgagttttatataataacaattttaaagcattcgaaaacatagcaaaattgatcagtaatagaatctattgctaatacagtactgctattaataaaaaaactatatcgacaataataaactcatattaccagcaatgtagtttattacggatagactctagaagagtaagaatctaaactttacttatttgcaaattctttaacattacactatattatatttgttaatggtttgagacttatttacaatcggcccaagattagtataacgcatttaatataattatatgaatgatgatataattaggtactagtagcagcaacattgaaccgtaggagcaa

SEQ ID NO: 63581 - DNA, 609 bp, Cucumis sativus
  Intron number 5 from transcript Cucsa.065640.1 (locus Cucs a.065640) derived from phytozome v7.0 (chr-ID scaffold0069 6; pos 323529 to 324137 reverse strand)
gggcagttcttggggaagaagtaagcataatttttctttcttcttttctcttttacagccattgttgatatttatttcttgttttatttttttactgtctctttggtgtttgatgaacccaatggagtaacctttcattgagaaaaactttattttctttttttctcttaataacatggttcaatacaatacaaatacgtccttagaaatgtcatttctaaaattatggatttttattatataagaacctattgtttactcactgttagaaccatagttgacatgtatttattcttttcaatttagtcattcatatttttctactctccatgttatattataatcaagtacaataaattttaattaagattttaaagatctaatctacacgctcattattttatgtagaatctaaaattagaaaccgaaaacaaaaatatctaatttatcaatataagcataactcaactgatatgaaattgtatgttgtttgatactttgatacacttatttgtaaaaaaataaaccctaattttctggtttcatttctcaaataagaaatcattgagtcggtatgtaatggtaatttttggggcgttttgtgcaggt

SEQ ID NO: 63582 - DNA, 811 bp, Cucumis sativus
  Intron number 1 from transcript Cucsa.045780.2 (locus Cucs a.045780) derived from phytozome v7.0 (chr-ID scaffold0054 2; pos 1502046 to 1502856 reverse strand)
tcgaggtactgtgccttttgatcttacagtgtaattttttcatttttaaaatatatatatgtatcgtgtaagtcctttttgtgttcattcttctctaaccctccatttcctgtaaaaacgaaacatgagtttgggcgtgagcttatgaattctgcaactcttggcatgtattttaacaaaataaataattaaatctgttattggttacaactcccatataactcttatttagtctcttcttccatctcttgtaattttcatctgtatccattgtctttataaagggccttcatcaataataataaaacaagagagagattttatttacccagtgtgtaatggtatcataggtaatatttggatacagttcttttagactctgttattctagaatatcgtgatttgtagtcctatgctttgcatcactgccgtgcatacggcgtacaagagcagttacagttagtattttcttgttcattttctgtgttctataaatttctgttgatgaatggaagggacgatcgggcaagtgctaaagcaaacacgtttcgttgtttttttttgtagtttattatattttcgagagcgtaatttgcttgaaagtccgtgggatacttttgtagatgtggataaatcaattatgacttacataatttatgactgcaatctgcattcttgtggaaaccatgaattaccatcttctttttggaggatattaacatgaattaattaaaccgaacatttcccggttttgtagtatttattatagaattttgtgctaaactaattttaatatgcttgcagatatttg

SEQ ID NO: 63583 - DNA, 558 bp, Cucumis sativus
  Intron number 1 from transcript Cucsa.124700.1 (locus Cucs a.124700) derived from phytozome v7.0 (chr-ID scaffold0100 1; pos 542772 to 543329)
cgtggaccaattacggtgaacatcatatttggtgcgaacaattggcctttattctctcttgcacttcatacgcgtttgtgtctcttcaacgaaaagttcagtcaaagactagaattattggttgataatatgtcggttctgtttttccacttcgtcggcgattggctacaagatagttatgaggggtgtataaagtaaattgttcatgcaaatttgtacatagtttagatttgaacttgggattgcgtagcctatacttcagagaattatctgttcaattaagttgtccttgtagtctacgatatcaattgcttcttcacgatactgtacttttgacttcatggtttaatgatttacgggattgtactattttcagaagatagtatgtgtagtctcttttggttaggtcttttattttggcaatttatactttctgttgaaattggtatagtcagagctaataacttgtcaatgagcagatcattacccattttaatgttctttaaagtcgtctaattgtctcgtgtgactgcagttgtcttccttgtgggcacttgt

SEQ ID NO: 63584 - DNA, 729 bp, Cucumis sativus
  Intron number 1 from transcript Cucsa.116880.1 (locus Cucs a.116880) derived from phytozome v7.0 (chr-ID scaffold0099 5; pos 692700 to 693428 reverse strand)
gctggtacgttcatttaatctacctttcgtatgtgttttttgctttttaatgttgttgtgtatgttttaacttattttacgtagtgttctttatgcgggaggagtaacctcgttttagtggatttttttactttatttggaagtgcgtgctatgaatttaatgttgcttcatttgtcatagaacaatgtagatcgtttaatattggttttacgtcaaatttagtttttaccgtctatcgaacactgtggaaaataccccagagtctatgtagtttgatgtttggaatctgttcttaattgaagctgtattcattgttaggcaacgaccgtacttaattaactggcgtttcatttaggtactgaccgagtaagaactcgaaactagttttgtgtacgaatagccagaataaccatagtttcgcatataaacatgtattttttttaatttagaagttctaaccggtgcctgtgactgggcttggtttgttgccatatatgggcgctgttacttttactgatatgttgatttttgtttatacgttgatttttctatgtaatagactatgattgacggtgtatagtcatagcctcatacgttcatctctactctatcttcataattgtatgagtaatgagtaaccaaaagaaggtgttgtgtagtactcattagcccttactgtttgtgaatgaacagcacgtttaagaagaaggctcccaaggccatcaagg

SEQ ID NO: 63585 - DNA, 377 bp, Cucumis sativus
  Intron number 1 from transcript Cucsa.047280.2 (locus Cucs a.047280) derived from phytozome v7.0 (chr-ID scaffold0054 2; pos 2366394 to 2366770)
agttcccttcttcaaccagctcttttcctcatcaggttagtgatcaaaatactacaaaaaataacttaatatatacttgaacaacatttcattattgtccccaaatctctctgtctcttaaaccaattgaaaaaagaacttagattcagcttctgattctctcctgctcattccactttgtaaatccataagaatgagactgaaagagcattgttttttaccccaaaaattgtatctcataacatgttttgtctcctttcttatgggatcaacaataatagtcagcaaaatggaaacaaaaatatttgaagatttgggttttgattgatgattgatctgtttggaatttgatttagggtaagttgcaaataaagggg

SEQ ID NO: 63586 - DNA, 790 bp, Cucumis sativus
  Intron number 1 from transcript Cucsa.100940.1 (locus Cucs a.100940) derived from phytozome v7.0 (chr-ID scaffold0092 7; pos 228369 to 229158 reverse strand)
caaagccagagaaatttcaatctaaatctgagctggtatggtgctttcttcgctttattgtcggtataatttcattttattgtttggtattttgttttgttgcaagatttagtttagcttgtgctttcgtatcgtcattttcattaccgttcttttgtttccgacatgttagctgcctgtggtttgataatttggaattgaaatacacgtatgtgaagacattggattgagtgtgaattaagggtggcatttgtattagttgaaatctagctagactgcgtaagaacaacactgtgtaatgtagatttttcttttatcaaataaaatcttaaagatgaagagcggaagaagcaacgtttcaagattgcatatcattcaaagggtgaataaaaaatactctcgttcaggaaactttgcctagtgctaaattattttgtacaccttcaacaatgtagaaattgttctgaagccagcttctttttatcacgggtttcttttttttatttatttcttcagaatttaggaaaaaaggaagtatattcaatctaaaagtgcagtgtcacagctatagtaaattcctttgtaagtactccccatcaccaagggaatggagggcttctttccttagtagtcttcattaggagggggagttctcttccccctgctcccaggatgttattttttcgtgctttaatgaattttgtccagttccttttaagaaaaggggggaaaacagtcactaaattggctgtgctctttgttatgaagaaatctgttgatcacctgtgga

SEQ ID NO: 63587 - DNA, 860 bp, Cucumis sativus
  Intron number 1 from transcript Cucsa.102680.1 (locus Cucs a.102680) derived from phytozome v7.0 (chr-ID scaffold0092 7; pos 1657312 to 1658171 reverse strand)
gcttggagagattgtcaccactatacccaccataggtatctgtcctattctctaaaacccttctattgttggtgtctacgtatttctctactgttttgcttttgtttttccaatgtttcaggagagatcctctgtttatttgtattgattaggtcttcttgtagtatttatttgataacattttggtactataaatttctgccttttcttctgtcttgctaattttgaaagatgttgatcagcttcttttaaatggttgacctcttctttacttttaccttatttaaacaacattgttaggaaatgcttctagggtatgtttgaattaactgttgaagggtttagatttgaaaaaaaaaaatcatttttaaaaaatttgaaatatttgataatttttcaaaatgcattttaaaaatgatgaaattgaaaagtaatttattttaaagaaaacactccaaacttggttttgaaaataggtttttttaaaaaaagattatgtacataaacatttaaaaaatgatctaatcaaatgtgtaagtgtttaaattttaaatttgttttaaagaaagtgtttaaaagagaatgtcttcttgaaaaacattttttcccatagataattcaaacacaccattttctttagtaccgattagtagttacgtgaatttaagcttttgacttcaagagagatattacttgtcaaattgtcaattgagttatgcttcagtttacatagtttgatttctttatttattgttaatcaggttgtcaaattgccaattgagttatgcttcatttgacatagtttgatttctttatttattgttaatcaggttttaacgtggaaacggtagagtacaaga

SEQ ID NO: 63588 - DNA, 781 bp, Cucumis sativus
  Intron number 2 from transcript Cucsa.135730.3 (locus Cucs a.135730) derived from phytozome v7.0 (chr-ID scaffold0104 4; pos 543790 to 544570 reverse strand)
attaagcatagcaattccgtttcttaatcttttatgtatgtcataaaagcaaattggctatggagattttactgctgttgattgtagatgagattttcaagtgcaatattctaaagaatgaacttacatgtaattttaacttgatatattttggtcaatattggttttgatataggatctgtagatctattgttgaagatgtatgttttatgaagttctatagatggtaagaatctttgttgctttcctgtattgtatttgaaacttatgctgtatgttgcgattggttgtttcttagagcggtatcctccaccctcatatttaatttgctgacctagttgtgaattatttgattttgtttcttgtcttttgttatttgatgctctgcaaatcctgaaaagaattggtttgactttttattctgttgctagaaaatctaaaatcttgagatctggatacttgtaagaaggtttagacttcttatgcgtagactacagtaccattctcgatctttatgtgtatcttaaagcatattttctatggagattttactgctgttgcttgtagatgaatttttcaaatacaaaattctaaagaatgaacttgcatgtaattcgattcaaacttgatatattttgatcaatatggttttattcctgttgtttaagtactcctgaagcattctacctcctttgttcaacaaattattccttaccacgtaatctgatctttcctgcagtcattacataacatcaagatctcataaatacttcagttcacg

SEQ ID NO: 63589 - DNA, 431 bp, Cucumis sativus
  Intron number 1 from transcript Cucsa.135730.3 (locus Cucs a.135730) derived from phytozome v7.0 (chr-ID scaffold0104 4; pos 544577 to 545007 reverse strand)
tttagattataacaattcgtatttctaacgcttaggtgagccatttttattatactttttggtttctcgtaattgttaggtttagatctctatttcgtgattctttatgggattcgcttgctttatggaagtgtgttgactgttgaaagacttggtaaaattttagatctcaagactttgtttactgtttttgtattttgtgttggttttgatatggtatctgtagatctgttgttgaagatgtatgttttatgaagatttttagatgataagaatctctgttgcttttctgtagcttatttgctgacctagttgggaattatttgattatgtttcgtgtcttttgttgtttgatgctctgcaaatcctgaaaagaattgggctgactttttttttctattgctagaaaacgtataatcttgagatctggg

SEQ ID NO: 63590 - DNA, 440 bp, Cucumis sativus
  Intron number 1 from transcript Cucsa.121950.1 (locus Cucs a.121950) derived from phytozome v7.0 (chr-ID scaffold0099 9; pos 336184 to 336623)
cgagttcagtttccccaggcgaaccaagggcaccggtatttctcctcttttttcctctgttccctgccatagaaatggattttgtttctgggatttgctccttgaaatagcttgcagttttatttcatactttaaagcatgttttattttagtaacaagttactggcaatgatgaatcaaaggccggacttacggctgcttccgtttggatggtagtaggttgacgatatgtctgcagtaaggtgtttttcttgagccagttattgtttctcacagtttcttgaagtaggagtgttcttatcatcaatccctgtctctgttttgtaatttcttaagtttttttttgagagacaatttgttttactgagttctgtctactttgagatcatttatgtacttttgtagattgcttttgtgctgtgaaaattgttgaccagtct

SEQ ID NO: 63591 - DNA, 836 bp, Cucumis sativus
  Intron number 1 from transcript Cucsa.094510.1 (locus Cucs a.094510) derived from phytozome v7.0 (chr-ID scaffold0091 9; pos 723566 to 724401 reverse strand)
cactggcttttcttcttctgaacttgctaaacaaggttccttttttctttttatttcttctgtttttaatcaacaccatgttctttttgggattgtcatttcttttaacaacaattggaaggtgaggattagacttcaacttttgaaaataaaaatcatgttaatattactttttcaaataactgtatggatctttatgattgatgacttgctcctagataaccttctgctttatgtcatattcttacagtacacataatcatccctatcgagataccttaagaaaaaaaaagatgataatagagtgtgaagtaagtaaaaggttatatattaaccctcgtgaaagggttatccatacaaaacattttatgtagtttttgggtaaaattaccaaaatgatcctccctctctcggcttcctctctctcactcactttctgtatacactctctcgctttctggcatctccacttttctctcgctctcaagcggccatccaatgttctgatcccactctgatgacccaacataatgttcccaagtctaccgctaaaaaaaatggagaaagagggtaatggggtggaggaaaagacaagagagaacttgaaggtgatttgtgtaattttggatgttagataatgtaagcgagagggcaaaattcctaaattttgaaaaatggggtataaatcattttagactttgggattgggattttataattatctctgtttttatctaacttctttgttcattgcatagtagttgagggaataatgctattattctgatagcattctgaatttgatgctttatattgtgcttctgttttaggaattg

SEQ ID NO: 63592 - DNA, 234 bp, Cucumis sativus
  Intron number 1 from transcript Cucsa.126810.3 (locus Cucs a.126810) derived from phytozome v7.0 (chr-ID scaffold0101 7; pos 641841 to 642074 reverse strand)
gcctcaagtaagtcaaaataaattgaccataccccttttcttttattttttttgttgctttccctttggatttggaacaatatttatgtttatgtattagttccttattgtttcttttgttcttctttttttttcttttgattttagatgatgaagaataataatcatccaacaagtttagatcatgatcatcaaaagggtttgaatcttataggctcgtcttctggaataata

SEQ ID NO: 63593 - DNA, 825 bp, Cucumis sativus
  Intron number 3 from transcript Cucsa.046680.1 (locus Cucs a.046680) derived from phytozome v7.0 (chr-ID scaffold0054 2; pos 2055480 to 2056304 reverse strand)
ttcaggtgatcactcctttgcccctttctaattttgtttcaaaatctaaatacaacttaaattaattaattagtttattaaggttaaggacttagatatatatatatatgcatattatgtaaattgaaaattaagatcctgtaagataggttttaaattaaattttaaatccagtcttgacacaaaagaatgaaaagtttgaagatttataatataaactttctaaaaagtacacctcgtttcatattatttcttgttttttttaaaactaacctcgtaagtacttatattcatgtgtttcttatcttaaattacataattaaaatataaatacattttaaaaactgaagtcaaattttgaaaacaaaaaattggtacactttttagtactttaatgattttagttttctgctttttttattctatcctacttttccaaattctgttttcacctgtattcttaatcaatttgatttctaaaataaaaaaaaattactctgttaagttttcataacttggttaggttttcaaaatgtagttgagaaagtgtataacaaaaacttaaaaacctataagttaaagtataatgtgtgtatatgattacacaatcaaagcacaattttttttagataacataaaaataaaaacgaaataagtatatataaaaccaactttaatgtgcatggtggcttcgctcatggagtttgaaaacaatgaggacatcaagatcctctgcgagggattacaagtatatagaattaattagtatatagatttaaatgtaacactgacataatcgtatatgttggggctgggttttaggtg

SEQ ID NO: 63594 - DNA, 760 bp, Cucumis sativus
  Intron number 1 from transcript Cucsa.098920.1 (locus Cucs a.098920) derived from phytozome v7.0 (chr-ID scaffold0092 3; pos 709793 to 710552 reverse strand)
atttcactagagacaacctcaaaggcatcttagtttcttttcttcatctctctaatttgtgatacttttattagactacatctgttgttttttcgatcactgaaaaaatattacatatagaaaagagagaaaactacaattttaatccttagtttttaaagaataggagcattttggtcaatggaatttcaaaatatacctttttggtttgaatttttcttaagttttcaatatatatatttttttagtcgaatttttttatccatgttcttcaaaatttggagatgaaaagaactttaggatacctaacatagtaaaaaagacgaaaagaaagtgaaactttatgcaatgcttactttatatcttctaataatgtggaatcgatagtttcaatttaaaaaaaaaaatccaaaaatcccatttttttgttttttaaatgttcaatcatatttcaaaattttcttactcattttttaaaataattaaaataattatatattatgaaaatatgatacataaagataaaaaatttctctaatttgtgtttattttcctctcttaattgtaagatttctacaaatggcaactcaaaatgtcgcaacacacaataataagtattagatgtaatgaatttgaaaatctagatattctataaattaaaagattttttaatttctcttccatagtatgttagaatatataaagctaactgtgaatcaaattgtaatgaattttaattttaaggtttcaaatgcaggac

SEQ ID NO: 63595 - DNA, 249 bp, Cucumis sativus
  Intron number 1 from transcript Cucsa.072770.1 (locus Cucs a.072770) derived from phytozome v7.0 (chr-ID scaffold0076 5; pos 290603 to 290851 reverse strand)
cacacctcagtttttggcctacctccttagtggaggtgcttctttattttttccttaatgcaacaaatctgattctaaatcatgtttattaggtcaacaaatcttatgttaggattcttctttcaatgcgacactttgattttgcttcattttttgtatctaagtcttttctgtccaatctgatctttgtggattgtatttggttatgccacaggttgattttgcttcgaaactctcgaaacctgttgg

SEQ ID NO: 63596 - DNA, 1035 bp, Cucumis sativus
  Intron number 3 from transcript Cucsa.033150.1 (locus Cucs a.033150) derived from phytozome v7.0 (chr-ID scaffold0042 9; pos 2547894 to 2548928 reverse strand)
ggctacattctaatctcaaagagcctgacttgaaggtattgcctcttcttggtttcaactttaacttttacttctttagttgtcttaacagatgtcgttcaatatgctaattgtgatgcattagttttgtgccatgttttagtttaattcattttaggctttgtgtctttggtttgttgctattcagtgttgtatattgcgttcgtataatataggttttttcagtacattttggccttctcctttaggtttcaatccatttgggttcctggattaatttttagaccttatacttttcatacattttaagatttgtccctgcaggatattttccaaaacatttagctctcttttacactattccctttttaatcaattttgataataattttactttgatggtctaaatttgagttttataaaaaaagaaaaagttacaggaactaaaatgaaatggaaccggggaccaaaagggcactttaacctataatttatcacttacgtcagttgagtgtttaaagtattgttgatttactttgttgcttgttatctcagataatgctctttttttttccttcttatatccatagtgtttggtctagcttttgttcaccttaactattctaactagataattgtttgaccctcttggttatttaaatgcttttaaaacataaagtatctatgcttccagcttcttttttcgttcagaggtgtgtccatgtcttctgtaccccaatgcttgcagtattcagaattgggtttgtttgcttatatctgtgaagcaattgattgtggttgatattttttcttgaagttccacaatttctcgatctagtcaatacatattgtttttgccttgagaccatgtctttcttgttgatttatgtcgactcataaaagaatatttggctccttgcttgttaacatatcttgatcatgactcgaaaaattatgacatgtggatctggtagctctatattttgtatttctgtaaatgtttaaccttttaaactgcttgttttcaggtgttag

SEQ ID NO: 63597 - DNA, 492 bp, Cucumis sativus
  Intron number 1 from transcript Cucsa.093410.1 (locus Cucs a.093410) derived from phytozome v7.0 (chr-ID scaffold0091 5; pos 30665 to 31156)
atctccccggtgtggctccccaggattttcataaggtttgttcaattcccatctcgttttgagtcaatcaagctttgattgaatctccatcgtttttcgttcttgggtttcagatcttgcgtttgcgtgtgattattaagcgttaatgattttcttgctatttgggtggtttgaaaaaatgaggaatttcgttttctttttggtttcttctctggtaatgcttgtcggttattgaatttttcccgaatctgtatgatctttttgaactggaaatgaagtgttaaaggactatgaaattgaaaatgggttcgaaattatcgaattaaacgagaagattacatgttgtgtgattcctttgagtctctgttccttgcagttgaataaaatgagatttcatgtttttctgttgaatggtaatgaaattcagcttagatgtctaattcttttactggtgcagggagatcttctgagggtaaaagttaacaaattgac

SEQ ID NO: 63598 - DNA, 649 bp, Cucumis sativus
  Intron number 1 from transcript Cucsa.104000.1 (locus Cucs a.104000) derived from phytozome v7.0 (chr-ID scaffold0092 7; pos 2629021 to 2629669 reverse strand)
cttcgccttccacattctcggtatctatttcccacttcaatcttctttcttttttgttttgctttgtttcttgatgcctttcaacttttgatattctcagtagtgttctgtgaaattatttaggaaagaaatgttgatgttttgattttagcttcggttgctgtaaagagaaaagtttatcttagtggagaagtgggaaaatcttttcctgtaatagttacgcctttctttttcttccttttcctgtgcaattcttcggaaatgtagagacagaatactgtggctttcttcatttatagtatgtttggtatgatttttttattaaggtttttgtaacagaaaataaaaattggaatgttcggtttataattagttcagttttagtggaatggtgcttcgtagggtcattattagctagctgtggttacatctaacctgattggcaagggcttgaatgtataggaatggttatttttcatctcttgttcaacttttctttaaactctatctacttttcctctctagtagacatattattttgttatggcttttgggttgtaaaattagactggtgggtgcacaattattaggacttttatgagttcttaggattgtgattgatgctttaattgggtaacctcttatagga

SEQ ID NO: 63599 - DNA, 851 bp, Cucumis sativus
  Intron number 1 from transcript Cucsa.058810.2 (locus Cucs a.058810) derived from phytozome v7.0 (chr-ID scaffold0061 4; pos 941584 to 942434 reverse strand)
gcagagcatttctcccacatttctaaagctctcacgtacttttcttccttctgtttgcgttatactctgtcttccccttagctatgagcttcgtgataaacaggcctcattcaatgtaattttcacttgtgctgttttttctagtgcttatgcaattgagatcgaccgaagtctaaatttagttacgtagtttgtgcttataaattgacacaacgtaattaattgtgcgcaagcgctattatgctatacttttaggaaatacagaatctttttgttaatgaatttgtgaaagcgttgcatcagcctccactgcgttcttttttgttttacttctttgtgatgtactatacgtttcatctttttttcaaatcatcatgttctttcttactctttcaatgatgtgaaagcataccattttccgtagcgtgcctggtgaacccggagaatccgccagaaagaaatatattggttatgaatattaataatgggcatctagtttaccggtcatatcaaagaaaagaaaaggttccaacccaacacgcacccattagttaaacagttggatggttaattttggtggtcattgttcctaagttgctttgctactttacacagccgttttgcaccaccatcgcttgctatctaatggtatcatccattaaaaggtggaataatatattgtgttttgtttgtcgtgctaaaaacatatgccattgagtattgactctggttcatatattgttaagaagtatttctcatggtcttatgtttgttgtactaatgttatacatagtcaggatatactctaatagtttaacttatccaatggtcaggcgtccgtcttgttactc

SEQ ID NO: 63600 - DNA, 639 bp, Cucumis sativus
  Intron number 2 from transcript Cucsa.251880.1 (locus Cucs a.251880) derived from phytozome v7.0 (chr-ID scaffold0222 9; pos 955726 to 956364 reverse strand)
gagcttgcgttaattgaccccaaacgtgctaagaggtaattcataagtcctctctctctcctttaaacaggagaaagaaactgataatatgttatttcatgatttctccatatcctaaacagattttgtgctttgctttattttgctcatttatttctactattcatatccatgtgcaactcagaactaccgttgctgtacaatttatgataactcaacatttgaattttgttggatgctttgcctaaatttcaagaaatgagatagtaatgaagtgtttttgccaatagctgtcaagtagtttaggttaagcttctcttataaattttttggaacatgaaatgaaaagattgttgagttatcaagcagtttaagttaagctttattgttattaatttcatggattgcctttctctctaatcttgaagagcctggaggccttcttttaccctgtattttccttccccctctccatcataagcatgtttttctaaaacttcttcatgttcaagattatttgcattggtgtccttcaaatttcaattattatgctttctgtttcctgtgaaaataatagtaataataataaaagaacagaaaatttgtttgtaagggccttttttgtgcattgtataggat

SEQ ID NO: 63601 - DNA, 609 bp, Cucumis sativus
  Intron number 2 from transcript Cucsa.175630.2 (locus Cucs a.175630) derived from phytozome v7.0 (chr-ID scaffold0122 5; pos 225129 to 225737)
ttgttggtttgccctctcatatctttaagaaagtaaaggcatttatgttattgaaccatttgttgtctctttttgtctgcattcttatgtaactttatatgcaattatccgtaatatttttttttctgaatttctttctccaagtgcctttttgttttgactagttgaagttcatgaactttgagggggtgaattcagctatgcgatcatacaaatttttgtttggatatagtgttatatattctcaaaatcatttcattattgtgccattcagaaaatcttatgagtatttgagattaatggatcgtgctagatgtattttgtctggcatcactgaatctgatattattgcaccctttaatttattttaggaattatggtaggaactagcacgaacattctgctcgtgaagattattagtgatttctcttttttcaagctggatttattatgtatttgttgcatttttttttctttcctgatggcgtgcttttgactttcagtgggtttcatgaatttatcttttctcctgcccccttattttattttgacgagcattatgtatgttgcttaggttgttcttgccgcatccattgttagcaagtccgg

SEQ ID NO: 63602 - DNA, 693 bp, Cucumis sativus
  Intron number 1 from transcript Cucsa.143950.1 (locus Cucs a.143950) derived from phytozome v7.0 (chr-ID scaffold0108 0; pos 320013 to 320705)
gagttgtggactattgatcctaaacgtgccaagaggttttgtactattctattctaatgtgcttcaatttatgtttaggttctccaattgcaatgtgttttgtgttaatctcattcttgaaatgtgttgcttgttgattggacttttgattcatggctggaagatcgagttaaggaatgccttttctcctaggacagtactttgtgttttcatttgagtaaatgggaattagttcaattctgatggttggatgaagttttaatgattgattaaatgttggggggatttagctatatgtatatgtatagactggttttagttggttaatatgagagattcttgtgatattagatcttactaggtttttgacaaccagatattgtaggccattatgtggggtttgaacctattcttcaaaatttcaaagcatctttaaccatatttccattttccttaatgaccattaggccagctcatagtggttcttcaagttcaataattttaaatcaggtccctaccttatcaatcaaggaaagggaaaaacacgtattatgttaatcgatatcttcttaatcagctgtctcagtctgtgtcgtctttttctgtttctaaaacttttacaactagttttaatctgttcttggtacttcacttgcaggattttggcaaatagacagtctgctgctcggtcaa

SEQ ID NO: 63603 - DNA, 855 bp, Cucumis sativus
  Intron number 3 from transcript Cucsa.308400.1 (locus Cucs a.308400) derived from phytozome v7.0 (chr-ID scaffold0297 8; pos 530919 to 531773 reverse strand)
gcaactccgatttgtcggcagagctctctgttccggttagtattattacactttcggttcacccgcgggtgtctctattaccctcttctgaaccgaccgccgacacaaccggcccggtccaatatacattttgaaatccattgatttatcaattctttttcccttttttaaatgtgatattgttttaatataaggagaattgaaattaatggcaatttatattttccaaaaaagaaatttaaacatttcgaatttcaaattaaattgactaaggggacgttgattgtgaagacattgggtgtaaattttgacaatatatttttttaaatattttggattgaaatgaatttaatatgacgtggtgataagatagatataattagggtaagaaatggacaagattatgtagtaattgattaggatgtccacctggcaggccacgtgggggccattttatggtggtgctttgtcattttacgcttgattgtaggcgccaaacacacatggaaattcatttaaattaattatttttttctatttgttcaaatttcaaaatcccccctttaagtaaaagggtatttcagtcatttcactggagcctccttttttgggatctgtgttcattataatattgagaatgataagttgaaagtcagtgtataataataatatttgtacataatttttcacaatttctgccatgatattattttggaattattatcatttttacatgcactgacggttgattaatacacacaatatattgtcaaaccataggggaatatgaatttattcaagaacttagaagttttattaggtgagttaatgagtaattggtttgttgtttgcagt

SEQ ID NO: 63604 - DNA, 625 bp, Cucumis sativus
  Intron number 1 from transcript Cucsa.308400.1 (locus Cucs a.308400) derived from phytozome v7.0 (chr-ID scaffold0297 8; pos 532327 to 532951 reverse strand)
tggactccatttctacctgttagttcagttttcaggtgggtttttcttcaacttcaatgggtctttcttatcttcttcattctcctcagcatccacttcaaagtttgagctttgttgagtctggttttgtgggtttcgtttgttgagcacattattacttattgtgagaaaaatgcagggggttttgaacaatggaatttgggttttttgttctttttttttttcttttgtcttaaggggaaaatttaatgagaaaaatgggcgttttgaaattgggttggaatgtggaggaaaatcagtttgaaacgaaatttgagggtttttaattttgtatcttttgagtttattggaattagaatcttacaaaaccccaattttcaaccgacaaaagtaattacaataaccccagtttcgttttcttttggtttttggaattaaaacataaacaaattaaaacaatcttagttactttctgctgcattttctttagaaactgaaatatgaaaaacgagaagaaaaattataaaccttagtcttaacgccattataaattgaaaccgagctcacttctccaacccctttttttgcaggttcaattttgctttaccaaattcaaactctcaaa

SEQ ID NO: 63605 - DNA, 921 bp, Cucumis sativus
  Intron number 2 from transcript Cucsa.240350.1 (locus Cucs a.240350) derived from phytozome v7.0 (chr-ID scaffold0204 7; pos 295663 to 296583)
cgagctctcgcggttgctataccacatttcctgaggtcccatctctatcaactttacaccctctcttcttccgattaaatacttatcttgagttccaattatttatttaacatgattgaaaacaaggagggctcatttaataaatttgaaaatcatctatcacatccagtactactcccctatcctttctttgaagataaagcatttggattattcacatatttattacgtgttttatttagcaaccacacatgtcacctttggattttgtgaacagagaaattgattggtgcaaatgggaactccatcctatcctagagctgctgtataggaaccttgctagccttaggtcttttatgctcttcacttcacacatatacctgctactcatggctgttaattaatgatgcacaaattaaacactagaatagctctgttaaataaaacaatttttctaaatgcttactaacaacctaaataattaaatttatcttcaacttcattcaactttttggatgaatccctgatttaccacttaaccacaacaaagactaaagtatttatttataagttataggataaaataaacattaaccttaaatttttaatttttaaaaattagtctaaaagttatactcatttttgtttttgtgttgttattttttttaagaattgccaaaatttgaaaacaaacaaaaataattttttgaattttgaaatacctctagtttgaataaaacttaaaaatggtcctcattcaatttaaaatataaaaaaaaagatctgacttggccaaaaaggtatatatatatgtaaaacaataaaaaaaaattgtattttctttgtgtggaataatataaatataatgaatatagttgtaatttaatgatataatctacttttgtttgcagatattcatca

SEQ ID NO: 63606 - DNA, 367 bp, Cucumis sativus
  Intron number 1 from transcript Cucsa.259410.1 (locus Cucs a.259410) derived from phytozome v7.0 (chr-ID scaffold0222 9; pos 5925580 to 5925946 reverse strand)
tggaacataatttccaagccctgtaatccacttgttttagcgtttctgttagaataatattttctagtgtgaagtgtcgatttatttgctaaggtttctgtatcgttatatttttctatttgtaatggaaagtcttccatataagtttttttcatcacaatgcttgatggatcccaatccaatattagctttcttatggccatggtttcattccttccctaggtatctcaatttttgcaaattttttgcttgttaatagcttctccattttttagtatcataatcttgggccaataagtaaaatgctcatactttagagggaccgaagattttgattctaatgctaattttagaatccattttaaaa

SEQ ID NO: 63607 - DNA, 653 bp, Cucumis sativus
  Intron number 1 from transcript Cucsa.258630.3 (locus Cucs a.258630) derived from phytozome v7.0 (chr-ID scaffold0222 9; pos 5484456 to 5485108 reverse strand)
gaagctgttgttggtactcactcttcacccatttcttgtttctgtcaatgtttatgcatgtaaccttttcgtatcattgtttagattctctatgtttggtttttgatttggtgttttcgttacttcttgttggtttccataacctcgacgatcacgaagcctgttagatccactgagcttcactgcgtattttttatgttttaagttttcgatttttttttcaagactcttggaaatgtatgtagttagggttttacgttattgttattggtactgaggttttaggcattggggatgcttgaaaatgacatcttgtaagttgacttagtggttgaggatgattgttgtatgcttttgaatggtcgaattgtactatattattctttcatttgataagattggaatgtgtcaagttgatttggaaatgagctttatattggctagtttgatctgaacaaacgaactcagagctcagtttcggttagaattgagctgagtcgttgtaggaagaaactattttactggtctatgtgtgtaaatcggttcttgtagttttacttcctgattagttgttagaacagaggtggtcaattggtcgatagaggaaagtaatgcgattctgtctgatggatacatttttatcctcaggtttc

SEQ ID NO: 63608 - DNA, 945 bp, Cucumis sativus
  Intron number 2 from transcript Cucsa.201890.5 (locus Cucs a.201890) derived from phytozome v7.0 (chr-ID scaffold0137 6; pos 113895 to 114839)
acttgattaaggagctggataggctaactggtctggtgggtaattctgttcggccattaatgctgcttaattatctgtggaatttagcgactattgagcatctgcatttcttattgtacttgtactgagcttaagctgaacttcagctactactttctgaccagcggttcaagtattacattgattgaaagttcttttttcttttttaataataataattaattggtataaatatccttaacggcatcgtagactttaatatgcgtagggaagaagcggtggttgattgttccatggaggtacttgaaatataatacattacgtgtttttttacttcaaggttttccctctcttgaaggaacattaaggcatggagaaattcagtatgggtttgttgattattatattttatataactggcatcttgttacagcttttttggtaattgttaaacaagtacagactgctgttgtttttttaaaattcaaggacaagacaacctatggaatagatattgttcaagtaactaagttcatagaggctgttcttttcttttttttcctatcttttgtttgttttttctttagaaaggtatgagtggatacctggatcctaatactgaagtatttaaatcaaccaaaatttggttatttatatttaattatcactgtgagatgggataggatgatttaaattgcatatatgcatgttatttgcaattaccaaagagtttatggcttaaccaaaaattggagttgtggttatcagttcttggctttgaattttttatttttacaccccatcttttagctgcaggtaccgttgcattgcaatttgtgttgatttccgatccacttaattactttggtcctctctggattatttgaattgatccattgtacctgtgcagggacaatctgccatttcagtggacgatacattaaa

SEQ ID NO: 63609 - DNA, 793 bp, Cucumis sativus
  Intron number 1 from transcript Cucsa.266000.2 (locus Cucs a.266000) derived from phytozome v7.0 (chr-ID scaffold0235 2; pos 422228 to 423020 reverse strand)
gggtttctgctctctcttgctagttagccgaagtaatcccgtttccatgttcctcacttatggattttagtttcttcttcataattggaattagggattccatagagattagtttgtatagttcaatatcaattttgattaggcatttcgtaatcatctcttggacttttgacgatggtttcttgttaaacgattaagttattgtttgttactttgattgtttacagggtaattttaagcgattagattgcatgaaaatgtggttaatcaacttttggatttcgctcggtacttttggttttttaagagatgcaataccctcatttagattcgggatatttcgtgatatgttggatgtgaaagatggagcttaatcctgttttacattttgatttttctttacatattatcttttgacgttttaacctgatggcagcaatcttttcgattcattcaattattgctggttgttagggaagatgaataaaatgctgaatctagtttatcttttggacgttcattttatcatttttatgattcagatatcctagtttgtattgttaacattccctatctaaacaacttgtcgaccaaagtttatgtgattgtttattcatttgtacttgtgtcttaaacttataaacttagagtagaaatcttgttgtaaaattcttttaattttttttaaattattgactctcattattcttcataattgtttgatctgtaatgtttataccttttataatgttatgtagacgaagagaacgaagaaggctggcattgttgggaa

SEQ ID NO: 63610 - DNA, 536 bp, Cucumis sativus
  Intron number 1 from transcript Cucsa.181820.1 (locus Cucs a.181820) derived from phytozome v7.0 (chr-ID scaffold0125 1; pos 70271 to 70806 reverse strand)
cttctctaccaagaccttctaacaggtgacactcatttactttgttttttttcttcttctaaaaccacttatgttctctctgtttttgtttttaattaaaatgaactccaatggatttcttttgacaattatttgattcttttgttcgttttctgcagtttctaccacttgttttcatacatactttttaattatgtcgaaataggcttttgaaaatttcttagatttcagattttagctttgggtttaaaagcattaacttagttttgtttttgttataacatcaatagaaagcaaaatgaaacaaagcaatgggaagggttgtatttactaaacatgactttggtttctcgttttagaatttaggtaagaatggtagagtatttagttcaaaaagatagaaacatattgctagaaagtagacttctttgtattatgaaaaccaattcattaggataaaggcttttagtttttaattattattttcttagaacactcatatatcaattagatttttcgaacgaacttttcaggtg

SEQ ID NO: 63611 - DNA, 779 bp, Cucumis sativus
  Intron number 2 from transcript Cucsa.284740.4 (locus Cucs a.284740) derived from phytozome v7.0 (chr-ID scaffold0265 3; pos 1377365 to 1378143)
attggcatttatactccccttgtaagctttctctccattgtccttttatatgtattgttctacctgctcgtctgttttatggttcgaacggctgagatctataccatctgggtttgcttgtctctgatttaatcttttggttcctcgattttgatctttcctcacttatggaagatctatccttttactagatctcccttctttcagtctcatatgatctggttttggctgtccttcaagtccacattgaacgattgcgaggaaactttttcacttcttcctgaactctgaagctaatgtcgcttcttagggagggccaatatttctagctgaaatgctcctgaactttacaggttctgggcagatgtatataccaatatttctcgtggtcttgtaccctggaagaatgggttgtttctcaaattttatggactggtttcaaactctgtttactgtagtgcagaagactgatggacatgatatttgggtttggggattatgtctttggtggatggaatgagttttagaactcgaatccttttcatgacgtgtgtatgctatttgatgtcttaagcattcagaggcggaaatacagggcttgtgctgataatgaattccaaaatctgaaaaatgaattgagtcacttcattctgcctgttctttatcattgtaatctttttgtggaatgtggtcttccattttgttctattgtgaaagagctcactaaatctattttgcttccagattacatcagtgtttggcctatatatctggtgtgc

SEQ ID NO: 63612 - DNA, 679 bp, Cucumis sativus
  Intron number 2 from transcript Cucsa.277620.1 (locus Cucs a.277620) derived from phytozome v7.0 (chr-ID scaffold0260 4; pos 28560 to 29238 reverse strand)
ctcctaagaagctaaaggtcactctctctctctcttatgacttaaaataaaattgtttatgaagaaattcactttccattcaatttatttctgcaaacaaaatataatacacttaaaaaaactattttgaattgttcggaagcattctaattttgtttcgaaataacattatttttaggtttatgtaatccaaatattttatcaactgtttcatttgtaaaattatgttggtttggtcgaagtagtgtaaattatttttatatgtttttattgtatcccaaatttgaattttacattttaaaatcaaaattatatatattaaaagcatttttttataaacttaattaaaaaacactaactcatatttttaaaaaaataaaactcaactcatttttctaatataatatgtataacttatgaattataaattatataataaattaaaataataattatataaaattttagattaaattacaaattaatccatatggttttaaaagacaaaatttagtatatatggttttgtaaatttaagtttataaaccctacctttatcctgataaaattcatttcattgcatgaattttgaaactaaaaagaaaaaaagcacaacttttaaaaataaaaaacatttactgtgtgtgtgtgtgtgcagatatttacattgaagttgtta

SEQ ID NO: 63613 - DNA, 519 bp, Cucumis sativus
  Intron number 2 from transcript Cucsa.304050.2 (locus Cucs a.304050) derived from phytozome v7.0 (chr-ID scaffold0295 1; pos 1810790 to 1811308 reverse strand)
ctttcagggccattacacttggcttctgttgattggtaagagtaaactcctctctctctctgtcttgaaaatataaatttttagaggttgagtgcagatttcaggaagtcctttgcgtaggtttaactatttcatttttagttttttaaaatttaagcctataaacacatcctccacctctaattttttttgttttttaatattgggtttagggtaaaaaaaagattagttttaagaacttatttttatttttgaaatttgacttggtgataacaatggtaaaaagtagatattggtgaaagaaatttagaggcggaggagttgtttataagtttaattttcaaaaattgagaaaagaaaaaccaaatggttatcaaatgaggtcttttctatttctagctttgtaatttctacatgaaccaagttcttgtgatggcttttcaatatatttttaatttgttaacagagattttaaattagtatggttgagtaggggataacattatgactgcagggaga

SEQ ID NO: 63614 - DNA, 467 bp, Cucumis sativus
  Intron number 3 from transcript Cucsa.142700.1 (locus Cucs a.142700) derived from phytozome v7.0 (chr-ID scaffold0107 9; pos 917072 to 917538)
caaaaccgtcctcaagaccttgaggagctctaaaggtaatctattgattaagctttcttctttttgttactgatctgatctctagattttgcatcgatggatgttctggtatcttttttttttagtttagttgtattttatttagggttttagctgtaatcactgaaagtttcgagtcacaatctttctgaggatgaaaacgtcgtaagctgtcgatctgagattttatttcttacggcatttgattattctttttattctggtcttcatccatcaatcaaatagtcgacttaggtatccaatttatgttgttgtaccaattgaaattacactgtgcgtggggatctatagtttctgatttgttgttcatgattttgtatgcccttagtttctgcttttgtgggtatatctgattttttgtttgttttgcaggtaagctgatcatcattgccaacaactgccctcca

SEQ ID NO: 63615 - DNA, 894 bp, Cucumis sativus
  Intron number 1 from transcript Cucsa.166790.1 (locus Cucs a.166790) derived from phytozome v7.0 (chr-ID scaffold0115 4; pos 153030 to 153923 reverse strand)
tcattccaacttgtgttgtggtagatgttaagttatctttcaaaaatatattcctgtttttggaaaacttgtacatagttcataagattaaaaggaatcttatatttatttcttgtcttattgaaaaatcatataatgtaacattttctttaaataaagtgtttatttcaaagaatggtgtacatatttgttcagctaaacttgaagacaacttgtatttattaagacctgacgaagcaaaagcaattttaaatcatgagatgtttaaaactgctaatacttaaaataaaaggcaaagaacttcttctaataataatatttatatttgacatttaagattaggtcacactaatgtcgataggatcgagtgattggtaaagaatggacttctaaatgagttagaaaatgattcattgccttcatgtgaatcttgtcttgaaggaaagatgactaaaagaccttttattggaaaatgttatagagctaaagaagccctagaacttatacattcagacctttgtggtccattgaatgtaaaagctagaggaggtcttgaatatttcatatcttttatagatgattattaaaggtattgttatttatacttaatggggcataagtttgaagctcttgaaaagttcaaagagtataaagctaaagttgaaaatctatcaagtaaaatgattaaaatactttgatctgatcgaggtgaaagtgaatagtacatagatttgagattccaagactatatgacaaaacatggaattcaatcccaactctcgacatctggtacagcttaaaaaaatggtgtatcagaaaggagaaatagaaccttgttagacatggtttgttcaatgataagctatgctcaatggcctagatcgttttgagggc

SEQ ID NO: 63616 - DNA, 611 bp, Cucumis sativus
  Intron number 1 from transcript Cucsa.219620.1 (locus Cucs a.219620) derived from phytozome v7.0 (chr-ID scaffold0165 8; pos 1335811 to 1336421 reverse strand)
ttgtctcccaaaataagcgaagataccaggtttgttgcccatagcattagcttctttcgtatgtgaccattttataagtttttagtgctaattatatacatagatgcagttttcttatgaagatttacaccatgtacgactgaacctaagtttttttagaatcagaggaagataggattttatgattgcagttttcatggagtattgatgtgattgcataaagttcataatttctttttggcattctaatttttctaatgaaagcagaaaatacaaattttggacctcaagcagcggttatatctgttagactaaaatcggctgtcatatgtctaataacatagatactcagtatgctatgtgtatgtaatccataaacttctagtgcgtttgttatgccccatttctctgccttttctatcagtgaacaagagtaattggaatactaggtgtgtttgtttttgtttaacacaaatatgatataacatatggagtaaatatactggttctggttaaattgttccctgcatttgatttgtgcttgcttttatattattatgattatgattatatggttcctccttttacaggaaggtggatttgatttggat

SEQ ID NO: 63617 - DNA, 1014 bp, Cucumis sativus
  Intron number 2 from transcript Cucsa.148850.2 (locus Cucs a.148850) derived from phytozome v7.0 (chr-ID scaffold0110 7; pos 843245 to 844258 reverse strand)
agcctggtgtgttcttacttcttactaaaatctagtcattagagttactgctattataagatgaacctcaagttgaaatagctgtgaaagtatgtattgaactaaacgcaacaattactagtcattgtattatgtttaactattgaagaagacttgccatgtttaacctagaaaagcttgacttggtttttctttctgaattttcatcaacttgatactgtatctattttgtcctgtatcattagaatgtaggaataggataaggaaaatcgttagaaatacaaaatagcactttttggcgaattgttctaatgacacatcttggtgtgtcatgatcaaaaccgagactaatacaaaaaccaaaactcaactttttaaatggcatatccaaaggaatgatttttttgggctttttctcggtggaaactcggccagaagatcaagacgaactgctttttttctgcataagctcccaaaatcttattccctccttatcatagacactttccgataagatcacatacataatatttggaaatgtttgcgaaagatttggagaatgcacgcataaattcaaaataatagtcagtcccagttttatcaaggagttccacccaaaaaaattgatggtctgaatgtgccactaaaagaagctaaatttttgtttgggtctccgtttcaattctgtatgaaaggtaccatggtgaaatatgaaaacaattggccaacaagggtgctatttgtgaatggtggaaaattcaaaattgagtgctatttctaagtaataaattcaaattccagcatgggcaattggtcaagtaaaaaaaaggaaaacaaaccttcccaaatagcccaagaacagcccacactcaggcacacactcactaacccagtgcaaggatcagacaagttttttttctgtgctctgctgctgctggctcatggatttgacctctgatctttgtatttatgtatgtaggtacatctgcctgtgcaagagggaaattctattgt

SEQ ID NO: 63618 - DNA, 1033 bp, Cucumis sativus
  Intron number 1 from transcript Cucsa.218870.2 (locus Cucs a.218870) derived from phytozome v7.0 (chr-ID scaffold0165 8; pos 818950 to 819982)
tcgtatcctgtcatttctaaggagcttcagactctgtaaacttcttctcttttttctaaattcttgttcatttcccattctcattcacttcgattctgtgaaatttcccgtttttatgatatctgatacctttttcttgaaacccatttgatattgtatgctaatagtgtgtgtgtgtgtgtgtgtgttttggtttttggttgtattctgatttgggtttttttcgagaattgatgtcccgcgtgaaggttggaactttttaccctttcttttctcgggctgttcttggtttactcttcatctgcttaatgatttaagttacgtaattggttcgtaacagttctttttttatatatctagagtaggagagttggtttccagtgaactttgaatttcgttctgttctacttctatttaaccgaatgtctatgattgttgaatacgtatgagtaactcttgagccaagtcaatgagattccgtatgtaaattagttaattagccgtttggcattgaaggatttaattgattttgatcatttaatgtcaatttttgaaatgggtagtggattcttggctcaatatgttatgttgcttaagtaggtggtttctactttattaggttggtattgtttctcaacatttatatgtttttttccagttcttgtgaatttgcattattggacaaaaaaaaaaaaaaaaaccttagaattttgagagaagttgacaattctttgagacaaaatagcatagcaagatggtgaagaatttttagcaagtttgactgtaccgagtttttttgttaagtagctaagacgtagtggatactgagaaattatgaatttaacttgtcgacatgtgtgagccatttcattgttactaccagagaatcagacaaatatatatgtgaaccgatgcctctttttctgatttggagttctgacataaattggtgcgccagtgaaaacatcttacttgggaatagtgttatcaattgttgataaagaagagtggctttgcaggttttcacaaaatc

SEQ ID NO: 63619 - DNA, 315 bp, Cucumis sativus
  Intron number 1 from transcript Cucsa.282560.1 (locus Cucs a.282560) derived from phytozome v7.0 (chr-ID scaffold0265 3; pos 22561 to 22875)
gaagccacacagttgctccattcgcaggttctttacgtgaatcaaacttgtgttggaaatttcgtagaaagcacttaagaacgaattactttggttttacttttacacacttacagagagtgttttcgaagtgcttgggtgataaagaagacattgcaaagcactctctaaagtgattatgactattttgattgaaaatttgcttttaaccacgggaaagagtacaaagtgaggtagtgtagtcgtgaaatttgaggtttatgatatgattactaagattttgtttctatatctgcactctgatttacaggtttg

SEQ ID NO: 63620 - DNA, 837 bp, Cucumis sativus
  Intron number 1 from transcript Cucsa.219050.1 (locus Cucs a.219050) derived from phytozome v7.0 (chr-ID scaffold0165 8; pos 921191 to 922027)
tattgcggcaccatcaagccactaaggcctctcaggtttgaattcgaattacagtttcaacttagttgctgaaaattaatgcagatgttcttcctagtttggttgatgtgaaaactgattatggggttcttagtttcctttatatccatttgcgctagcttttctgtttggtttgaagaacttgttgagttttgttcacccttcagtatagtgcatgttttagtgggttggaggaccgtttctaaacaactcatgttgttcagtcatatgtagagtatatcaagagtggggtttaatgtcataatatggaagcttctccttcatgtttggagaatgaggtattacggttttaatttataacttttggggttggcgaagcttcttaggtttagtgggtgtgagtcataggcataaatcaaggagtgagtctctgataactcggttatttaactgatatgatgtgaaattcagcgatcacggttaaatgttgtgcaatgtagtagtagctagtttctaatatggagagatgcataatcaagtcaattaactgtcttcttagactttgaatgcaaacattagttgatgcttggaactttgggtggttcttttttaacttatattggaaatttgaacttctatccttcttaggtttgattttcatttgtcactggggaaatctttttatctctttcaacgttttatcaaggacacgttattaccagtcaatcaaacaatactttagtttcttctactcaaagtatttcatttcttaatctccttgcattgagggtgctatttgtgtttaactatctacaatgttttaggagggcgttagcg

SEQ ID NO: 63621 - DNA, 671 bp, Cucumis sativus
  Intron number 2 from transcript Cucsa.157260.1 (locus Cucs a.157260) derived from phytozome v7.0 (chr-ID scaffold0114 1; pos 254770 to 255440)
gcaccgcggaagtctctttcatcatctcgttcattgtaaattcctatttcttaatcacttcttatttatgctttcacttattcttgtttttttatgcctacgcgtacatcttaattggcatcttatttatttgaagtcatattgcacgccttagatttttcttagcaagtttcgaagctgaaagttgtatgtagttgcgttttctcattcggatgatcatttaaaacccttcaaaggtttgcaggaaccttcagagcagccccgctctcaagtctttggtgtgaaattgcgaaatactgcagttcatttcatcaagaatgtgtttaggcaaaatggaattgaaaatactacatgaaactcaagtacttatatttcattgcttaaccttttaaaggattagcaaatgtacttgaacgttggcactctgctatatctaatgactgcatcatgtattcattgtgtatattttcttattttatcgcacaaccttttgagggatttattaatgtagtagaatggaagtacttttctagatcacgtaacaatttaaaggattcttgttggatacagtaattaaaagggtgaagtcaagatatattaacttgattttccattttgcttttacgtttggaaaagacaactcactggtgagcgaacggtaaaacgactgc

SEQ ID NO: 63622 - DNA, 990 bp, Cucumis sativus
  Intron number 1 from transcript Cucsa.231830.1 (locus Cucs a.231830) derived from phytozome v7.0 (chr-ID scaffold0198 9; pos 34152 to 35141)
ggcggtgactgctgttaaggatcaaggaagctgtggtatgtttatgctttgtttttttaaaaaaagataaattattgtttagtgataatattgaatttgattgaactactctgttgtctgccatggatgcgagtatctgagcaaaaacttttgggttaattttgacctttacaaatgggatcttcttaaatgtcatcattttaaattctgtatatatggctgtctcttacaaatagaaacgaagaagctaatagaaggggagaagtgcttctgttaatttcttaatccagaacatttggtcatatgcgtttaagcatttgctttttactatgcattgttttctttctttcacttttgttcatttgggttttccaaatttggcatatatgccattgtctgactttattattttcttcctttcactcttcactttttcctccctaaaatttatataaaattttactcctgtggaatgtttgagaatttgtgttagcgactgggtttactataatctcataacttttttttggtttagtgatagttttaagattgtttgatgagcggtttgtgtgaattcaaattctacgatgttatgtggtatcttctccattctattttaagtatctgcaaggagtattgcaagatttaaattgacatttgacctaacattttaagaagagtgttaagactgtacaatattaataatgttagtctagtgtttagttttggatctcacgatgatgttatcatataacatgatagtgatcaccaaggtagcagaattgatttcaaagtcctgtcttcattttcatctcttcatgataagccttgaatttttttccttttttatgaaaagatagaaaaaggaaaaaagcctcaagttatttggaagttttactcatcatcaccatcatcatatttgtaaaaaaaactgatacctctcattttcacttttcaggcgcttgttggtctttctcagctacaggagcc

SEQ ID NO: 63623 - DNA, 771 bp, Cucumis sativus
  Intron number 2 from transcript Cucsa.292840.1 (locus Cucs a.292840) derived from phytozome v7.0 (chr-ID scaffold0277 9; pos 493717 to 494487 reverse strand)
ggtaggttttcttcaatggtttttggcttaatatgaaggctttccatctctgagaagtgcggatttgcttcctagtgtttgttcttttttgtttattatcgttagccctgctctggctgtttaatttgttctactggttgacattggattataatttatgcattacatgacggggtagacttaaattttgctttgtttccggtgttttctttatttgggttttgcgttgtctttataatgaaacagtttgtgcctttcccactttctttaatttctcctcgtgtttagttgtggcttattaatgtatatgtggtgcatttattttcgtttggtttacgagtaatagaattaaatttattagttcgtttcatcaacttttagaactaaatattcaaattcttctatggtttcaatgtgatatttgacaaaaagaattggctactctaacttatgaaagcttgtgaagaatattcagtttaagagcctgggttagtgaattttttcatgtgacatgcttcatagtcttacatatttgttcaagtttgctgctgaggcatgtgaatactctgcattaatgaaagtcttttctaattttctcatgtggaaactcaaactcattgttttttatgcaactaatcggacatttttcctattttcatttcagtgcagtctattgatcctttgctatggtgatttgggttactaacatgttaataatctatgtctacctttgcagccattgcaactgttgttacggttgcggaaattctg

SEQ ID NO: 63624 - DNA, 506 bp, Cucumis sativus
  Intron number 1 from transcript Cucsa.193010.2 (locus Cucs a.193010) derived from phytozome v7.0 (chr-ID scaffold0133 5; pos 33089 to 33594)
actgctttgtttgctattggcactttggggatctggtactttcttcattttcttcgttcaaaatggataatgattgtgactcgcatttattgctaatgagagctacggaaaatttagaacgcatggaatgtattttctggtgttggattgtgtttgttttgctgaggattctttattacaaagaaaactagtgggaaatcgaaatggataagaaatttagtttcattcttgaatcatacttttagaagtaagcattctgattaattgaacatggaaatgatctttttgatttttctgagactctgcttcgtctataactaagtaaatatctcaaataatcaataaaattgaacaagtttaataggcttactctttgcatattctggttgttgttgttgcctatttaacgagtattaaagatttttctttttgtgagctaatatgggaaagttggtgaatgtgggttcaaaggtctgagaagaccaaggttggtagcacagtgagtg

SEQ ID NO: 63625 - DNA, 640 bp, Cucumis sativus
  Intron number 1 from transcript Cucsa.218720.1 (locus Cucs a.218720) derived from phytozome v7.0 (chr-ID scaffold0165 8; pos 706256 to 706895 reverse strand)
ggttatcaccgtgcagtgttgctcgccaaatacaagtatgatagctagttttttgtagcatttttgttaatcttgcaacttaaattttccaattaaaaatggaaagtagctattattggttagaatgttttcacttttttatgttctgagttagctaattgattagaacttctgaagtaaaatttctaagttagcaaccgtgaattacttgagtctgtaataaggctttgtaagaggatctttgattcaaatttatttacaatttttttagtgtcttggatccatctaatgctgtttcccctgatcttcgttttgagcgatgtacatttcagcaatgtggtgatttttgtggttgtaaacagttttgaaaccaggcagagttatactataactccaatatcatttaaaattgaccacttaagttcatgaaacttactttcgagctcttaaccatgttcgagtttcaggacttgctatttcttctattatagattattgactttgaaccaaagaaacagtttgtttggggaattaaacctgacaattctatttggtttgttttcttttatatttgttcttatgttcttgtaactgattaaacaaaggtggcagccaaagtattctgcatctggtgatcaaa

SEQ ID NO: 63626 - DNA, 461 bp, Cucumis sativus
  Intron number 1 from transcript Cucsa.257040.1 (locus Cucs a.257040) derived from phytozome v7.0 (chr-ID scaffold0222 9; pos 4441340 to 4441800 reverse strand)
gaagcctcttggaagcttcaaggtctcttttcattctctattgctctttcttttcttctttctttcttcgtatatattctgctcaccgcgccattgttatctatatatgttccttcattatcgagcatcgtctcatgcatataatctctattttttaaaatgaacattattacatgtttcaataaagtgaacttctaagtatgatcagttactgatgattcacagccttaaatcactgttcaatcttttgattttcggtaatttttttgtgctagggattccgattcgcgattagaaaaaaaaactgaaaatctaagcatgaactagatttttagtcttgtggatgttttatctgctttgcatgtttattattgactaaagtctgttgaaatgaaactgaatcgatgcggaaatttctggttgcagtatcttgttttggctcctggcgtgattcacagttt

SEQ ID NO: 63627 - DNA, 863 bp, Cucumis sativus
  Intron number 1 from transcript Cucsa.260020.2 (locus Cucs a.260020) derived from phytozome v7.0 (chr-ID scaffold0222 9; pos 6332124 to 6332986)
aggcccctacccttctcatactcttcttctcccaggttaaacttctcttcttcttcttcatttcatctcctcatttcctcctccagatctcctttcttctttgctttttaatttacacttcattttaatatttcacttctctttttacactcttttccccaccttccccgaatgtgattttatggaatggctaaaaaactttgacaatattgcaatttcactgcttatctcattttctaagcttcttgtttatgcaatctactccacttgggtttttaagtttctaagtgctcccagggcacggggttgtatcgttaaccttcactcaccttttttccccattgcaggatgttggttctcgattgcattaggtttttctgaataataatttgagttctcgcggatctctgtttccctttacacgaatcttcttcacattgttaactgcttttccttaactcctagtttctttcaatacttcttctccagctctcctcattccttttcttttcctaggtatatctcctccccctttctgctttgaaaattaggtagacaaccgtggctacttttaagggtttgttttctgttattatctgcctttatcgactgattgtaaaatcacaccatttgcgagacctaacaaatcgttttctcactgttttccccccctgttgttcaactggttttcttgtgagaagctagtatggcacattcatttaatttattttatagaatgcctggaataatgaataaaaatacattgattagtaggtttgtttttttagatctcaccagttgaagataggattaactgaatcaaatttcatttccgcagaattttttcccttggaaatttctct

SEQ ID NO: 63628 - DNA, 790 bp, Cucumis sativus
  Intron number 2 from transcript Cucsa.241860.2 (locus Cucs a.241860) derived from phytozome v7.0 (chr-ID scaffold0204 7; pos 1691716 to 1692505 reverse strand)
cccatcgttttcttctcaatcttcccttagtttttttctttggattatgtgtgtattgcctgtagttttagagaccattagagtagaattagattttccccaaatattcatctggcctgctgggtaatttgaaacggttgattaatcgtttaagtggttgatgtgagagctcaagtattggaatatgctttaggtaacctctgatttaagcctggcctttaaatcttcttactttggcctgatttgtttgaaaaacgtaatgaaggatgagttttctgtggtatttttctttaaaattttgtttcataagaacttattggtgtttaaggttgaactcaaaataataccctctatctatcaatgtggtctagatttggatctttattggatgccaagagtttgtggttttttctgggatcttgtatctcatcttgtacagtttgtttttcattagaactgttgaatgttgaatgttattcacttgtgattttctagaaaagaaagtggctgtttcagaattttgatattgttactgcctaccacttcctctagtaacgaaggatcacaagtgaatattgagcatgggatcaagtgaaaattttggattagatcagtgtgctttcttctaagttgctgacttattatgttcttagtctagcagaatatgctgtttatgctacatgttaagacagttaactgtgttgagactagattcaaatacatcactttctgttacttttcgtttgttttcctctaatccatattgctaatgagaacaattcaggcatct

SEQ ID NO: 63629 - DNA, 972 bp, Cucumis sativus
  Intron number 3 from transcript Cucsa.253870.1 (locus Cucs a.253870) derived from phytozome v7.0 (chr-ID scaffold0222 9; pos 2352325 to 2353296 reverse strand)
aagaaattgaacttggttggacagattcaaacttggtacggaatattatttggcacaattcccactttaacttttcttattttcattattgaaaaagtatgaaggggtgatgtttgttatactccaatcccaattcttcaagctagaacaattagacactaaacaagcaaagtttttgagttaattcatttttccattagatatttattctaaaacctctattctaaaacctctaataataattataataaataaaacatagatgcattttttataattataataaataaaacatagatgcatttttttttgtatcactaagtcgttcgatcataatttgtcggttaacaaattcttcctagggagcaaaaatacaaactaattagtgatagctcaattgagaaaagttgttcaaatcttatctctaatcaccttagttatatactttagaagagattaactttggtaatatgaaaaaaaagagatgttagcttgccccttctaaaataagttgaactattattaagaatagacctagtagaaaacgacggccagtaaattagcacaccttcaactttagagattcttaattaaatcattatttatctaatatattgtaaaatcatgaattttctttataaaaaaagaaagagtagttgttcaatggtgaacaataattacaattctattattatactaaacctcaacagtatataattgcacaaaggagttgctatcctacttcatttcgtaattcaacatctttcttaaatcctaccaatatagctagaaactaacaacaattcctagtccatgctattctatatagtatactaaaacttgtctttgttctcgtatgatcttggtcgagaaatgcaagaggtaaacgaggcttcatgtgattctaataattgaaatgtgaaatatttgtacacagaggactttggaggtaataacaatcatcacaagtgc

SEQ ID NO: 63630 - DNA, 138 bp, Cucumis sativus
  Intron number 2 from transcript Cucsa.253870.1 (locus Cucs a.253870) derived from phytozome v7.0 (chr-ID scaffold0222 9; pos 2353302 to 2353439 reverse strand)
gggtatttcttatacaattttaccttttctcttcttttgttattttttgttcaaaagtatctatttacgatcattttccaatagtaatttgattatgaactttgtctctaacttgattttctgttttttcagatttgc

SEQ ID NO: 63631 - DNA, 624 bp, Cucumis sativus
  Intron number 1 from transcript Cucsa.137360.1 (locus Cucs a.137360) derived from phytozome v7.0 (chr-ID scaffold0105 3; pos 70712 to 71335 reverse strand)
gacgcgctacggaagcttcatcttgatcgaatcaggtctcagatttcccctaactcatcatttgatcaatccttccttttcatctctcagtttgatcaattcccaaagcactgtctaattcctcgaaattatttgcttagattttctgtgttctcctcattttgcatgatttctgagttatttagctaccgggtttttgtggggttttctttttcaattttcaagttttatgatatgtaatcacggattggattgaatttgttgaatagcgttttgatgttctgagcgatattgctcctccgagctggccctcctcttttattctctttgccggttgaatttacagtctactctgtttgatgaattactttaatactcaccttcttgagattttataataatcatggaattgagtgagtttttgaatgcttaaaggttatattgaagaaatgatacatatatccagtaacttcaactgttgctttatttaaatttatcaagaggtttccttacttgaacctgggtttttgttgatttgagaaattctgtttctagatgtgcaatttcaactgatgccatttcctgacaggtactagtttttttggctcggggggttgcagcaaa

SEQ ID NO: 63632 - DNA, 592 bp, Cucumis sativus
  Intron number 1 from transcript Cucsa.298590.1 (locus Cucs a.298590) derived from phytozome v7.0 (chr-ID scaffold0290 1; pos 174477 to 175068)
attcaggtataccagctgttcaaaaaactttttttttctctctgtctctctagctctatccctatctttcatatttatatgctgtttagatattaatcaaactcctgatagaaagtaaaaaagtagccattttcattttctataccacatgaataattcttctttaagatattattttaaagcaaaagttaaccataagttaaaggtggggattgattttagggtttaaagcatttataggaaactaaatatttaagattaaaacagaataaatctgaatttccttttctgttttgtcaaccaaaactctattgggaaagatgtgattaatttaggattatttaagtataacattttgagttattctttttgatcttttcacccttcatgattactttggctttgacaagcaaagaataagtaggtcgacgtttgagtgtgctaatgaccacaatgtttgtaatttgaatcctcacatgcctccacaattctgttaaaaaaagaaacccttaataataaaaaggaaaatttcctattgaattgatcgacgtatacttttttctgtcacccataggagctggttttgcatcaa

SEQ ID NO: 63633 - DNA, 473 bp, Cucumis sativus
  Intron number 2 from transcript Cucsa.237010.1 (locus Cucs a.237010) derived from phytozome v7.0 (chr-ID scaffold0202 3; pos 78770 to 79242 reverse strand)
tatttctgctcctaaacttaagaatttgaaactatgtgcttctcccgacaatgatccaactttttccgaagttcaattgcttacaccaaccctagaaaatatcagtttcgtcaatgtgttgcctactgtcaagtctgattatgaattttctcgcatagataaagtagatatacaacttgtctctagatttgaaagggatgaccgaaactcacgaaaatcaaagtttagagagttgcttagtgtgtttcatatggcaaggtcattcacactgcctttaaagctcacaatgcaggtacgtactatatgttctataataatattaactttgctttcactcattgtatatgagtcgacattttcttatctaatttgaatttgtttgtttacaaggtgatgtcgttggataattttgatgcattatgttttcataatatgaagcatttgaggttgagaaccaaggagactgggttact

SEQ ID NO: 63634 - DNA, 404 bp, Cucumis sativus
  Intron number 3 from transcript Cucsa.237790.3 (locus Cucs a.237790) derived from phytozome v7.0 (chr-ID scaffold0202 3; pos 533401 to 533804)
ggtaattttctttctttcttttcttctttttttatttctttctctaataattatctttatatatatatatatatatatatatttctctctctacaacgtgacttgccaactcatttcttcactttaattactttatgactaacaataaagtctattttcccctccccttcataatcactctaaatcaaaattcatattgtttcctctttaagttactacaacattattttcagtttgttttaatgcatatatatatcaatcaatattatgcatggcattgcatgtattttttgtaatattattaattgggtatatagttaaaaacctttattgttaattaattagttttcttttcttttgttcttttaggtactcttcttattcgccagactacacttacccta

SEQ ID NO: 63635 - DNA, 1041 bp, Cucumis sativus
  Intron number 1 from transcript Cucsa.166470.1 (locus Cucs a.166470) derived from phytozome v7.0 (chr-ID scaffold0115 3; pos 1659067 to 1660107)
gtcttactctttcgtggtctgcatcggtcaagaaggttagccttgtaaaaatttgagttggttgaaatcgttaattgctttccttgggctttgtttgattttagttcacatgcaagtctgagtttgcatcaagatttttagttgtttatgatgtgatttttcttatattttcctgttttgggcttttgatgctttggtttggcttgggagctatctgcagttattaagatttggaattgagttgaattcactgttgaaagttaaaaatatagcttagtattttatatctcagggaaggcagaagcggctgtattggccagtttgtttctttggattttaataggcaccatgattctaatcagttggaatacttgggaaattataggaacacttgcaagcttctatcaatggctgaaagctaattgaatagatgcataagtgttgtaattagtatggtggagtgcataaatgtagatacagtttttttaaaatggtttatgggatataaaccattatctatgtgctagattactgcatattcaggatattgagacgtgcatggataaaacctcaagttctaaatttcattaggtctttaatcagcatatatttcgaaggggaaatgtagatatggactgccaaaatttctgtctcataaattaatctgaaggcaaccattttgctacttgatataaaagacaaatgttgtttactgaacccgctattaggaatatcagctcctttttaggcagggcgcgttgcttgctagggtatgtacttttatgactatggatactagactaaggggatattactatactttagtcataccttcacccaagaaaaatttagaatgcatgcacttattgttgttattattgttattagtattagataaagtctttcaaacgaaacacaacctttatttaatcaccgtcattcattaaataaaggcttgattttcttttggtattctactgactatatcaattaattttcttttcagtccgaggtttttgctgttgcatttgcactacttgc

SEQ ID NO: 63636 - DNA, 1056 bp, Cucumis sativus
  Intron number 2 from transcript Cucsa.212580.2 (locus Cucs a.212580) derived from phytozome v7.0 (chr-ID scaffold0154 3; pos 379407 to 380462)
agaggcctcaaagtgatcgaaagatctccgtcaaggtattcttatgtttctttctcttttcgttttgtctatgtacgtatgtcgtaggatttgcaataaggaagatgatgatatgtattgtcgccccagtcttagttgcatctttggatgcactatggtgattgaccagtatctgattcttgttgtagttagcagctcattcattctaatttttttgttgaagatagtttcattaggctttctgtttgtagcaattttgtgttttgccgaggcttgtttagttggatctgatgataatatgacatcagtctgaccggtgtctttggattcaatctgatgaaacaaagatcgactatctgatccttctgtcggagttaattgatttaagtaacttgttaggcttagtctttacctcttgatgaaaaatcaagttcaacgttttttgtgttctcattaaacagtgtacttagaaattaattataatttctatatttttcattagatatacaacaaggcgtgatgattataacccatcatttctgcatttgaatgatgaatattttcatgcactaccatctgatcttcgttgtaatatctcatttcttgtattattttaaacacattttattttttttaattttaactcgtaacttatggctgcaatctatgatgcaaaatacccaatctcctgatttctagtgattatataatcaaatttcaccatctttcggctgaggttgcagtacatatacatgttctttgtttttcaacagtttattaatttctttagttttgcatcttaaatagcccgtggtatctaatgtccagaccatttgatggttggatgtttcgttttgagggcttagagtaataaaacacaggtctttgcgacacagttagcttcttatatacacaagctttctgttacttaaaccctgcgtacatactgtaatgatgactcttccattctctatcacacaatcaattcatgtgtgcttaccttttattattcacgtttcaggaaaactggagaagaccaaaaggtattgattccag

SEQ ID NO: 63637 - DNA, 640 bp, Cucumis sativus
  Intron number 3 from transcript Cucsa.169220.3 (locus Cucs a.169220) derived from phytozome v7.0 (chr-ID scaffold0116 3; pos 168390 to 169029 reverse strand)
agagactgaaatattagcaggagtgaaaaatagtaattggtccttacctgtcaactacaagcgttgaattgtccttatttttgtattatcagcaacatttggcagttttttttttctctttctttgattacaaattggggtgggagatttgaaccaatacatacagatatgagttgagctaagcttttgctactaagcttttgttggcaagagatgacagttttacaattcatttgttgacttaagtggctttaattatagttaattattgttgtgttgtctccactcagagcaatgcacgatttccactttgtatttcttgattcttccttttattccaatttgttaattgtttaacttattattttaatctccgttctctgcatgtagtagtacctttttcattatagttttatttgtaattctgatggctacaagcgcatggctgcacaaaaaacagtgaggtcccccttatcgagacctgcatctgcagtttgaaaactttgtcttgaaaggattgtttgaagttttcctttttgtgttcgcaatgatggagtccctgctgggtttttgtttgaagttttctgctatgtttcttacttcgtttcttttggtgaaaaaacaggggattctagcttga

SEQ ID NO: 63638 - DNA, 609 bp, Cucumis sativus
  Intron number 1 from transcript Cucsa.169220.3 (locus Cucs a.169220) derived from phytozome v7.0 (chr-ID scaffold0116 3; pos 169300 to 169908 reverse strand)
tgcgctccttctccttgcctcgccttttctccaaggttttgcttccttaattctttatctctaagtattttcttccacctgcatatgtttaaactgttagctctagatttaatcgaatttcgatctcgcttgcatggttgcggctttaattctccatttcattgagatccggtttcatttatgcatttggcgctccagcttcgtcgattttctgttggatcttgtgcgtgttagattcgctaattttcagctataatctttgaattttttgttcttcaacatttataagctggccgatagcctttctgtggctcttcgactcgcttatacctgatttcagattaagtttttttttttggttcttcttagaggggatgcacaaaattgcttgggcagcgtttttagcgtatccatatcaactttataaattaagctcgatatttgggttcgttgatccgcgccattctaatgtttttgttctggttaattgctgggtttaggttcttttgttaaagttgttatccatcttccgcgatgtggtggatctgtatacttcaattcgtgctttgtttttatgtattttgtgtattttgcttcttaagttgtcag

SEQ ID NO: 63639 - DNA, 734 bp, Cucumis sativus
  Intron number 2 from transcript Cucsa.136440.1 (locus Cucs a.136440) derived from phytozome v7.0 (chr-ID scaffold0104 4; pos 1063200 to 1063933)
ttcctgtcgtcactggggttatcattgccagcggggtatgaactcttctttttctttattttcccactaatttctttcttattctttgcttgcctaattgctgtcctgttttattactttgaattatggggttctttatgaggaatttaatgctcttattctttttgtttgacttgaaattggtagttttaacggtgaaacagttccttacctaatacctaccgtttgttgcgctctttccactatacccaaagatgtacgtatgtattctggagtggaagtagatgctttctgttccgcgttttacaattttgactgggtatatcgttatgggagtggaagtagaaggtttattttccactttttacaattttgcctgggtatatcgttatgggagtggaaaactactatttcgacatggggtttcggtaatcatatatttggacttgagctgagattgtttcttacttagctcattgtatgagtttaatgaagattcctagtctttttgtttgttggataagggtaagataaaattgatgctccgtgtgtgtttgtgtttatttaatcagtcttttaacagtgttaagtttctcaatttcttatctggtttcattttgttctattgtattgtcaatatagtatgaaattaaagagagcacatgctttgtctcttacattttattatcatggcaacagggtgaaccaagcttccatctatttgggtttctgat

SEQ ID NO: 63640 - DNA, 306 bp, Cucumis sativus
  Intron number 1 from transcript Cucsa.255450.6 (locus Cucs a.255450) derived from phytozome v7.0 (chr-ID scaffold0222 9; pos 3443140 to 3443445)
aactccgttgaaattcattctcagaaacagagtaggtgagggataacatcaaggtctggatttttttttgacttttgtgtttaatatttgttcggaactcttatcggttaagaaattggaatccgtcgtaagcatctcttgtttttctcttttgatttttgggcaaaaactgcgatttgtttttcataattattcttcggccccacgtattggatcgatttaacctgaaatgctccattgacttggttccaccgttcttgtgctttttcagggctgggagtttgagggtgctcccattattgcaga

SEQ ID NO: 63641 - DNA, 658 bp, Cucumis sativus
  Intron number 1 from transcript Cucsa.181940.1 (locus Cucs a.181940) derived from phytozome v7.0 (chr-ID scaffold0125 1; pos 133882 to 134539 reverse strand)
tcccgattgaggttctcaaattcgtcgatcgcaaggtttcttcttaatccctcgagttttattcttctctaacataattctctttcgtttcttcttggctggatgaatatatattaggttaaatttagaattttgtttttatggtttgtaattatggcttactttgtatgatttctggaggattttataaaatttatgagattgtatacaatgtcatgctttcgtactttcgtattcaaaatggagtctgtaccaattttgcattagaaaggccccaagatggatgatggatagtttgtgtgttgaaacacttgttataataggaattcgaaaaattgagtattgaattgagatcggggctgaacaaccgtaattcgttaaaggaaacttgatgtttgtagaaattgatctaaatttcagagtctgcaagggttagaattgagattagaaagattgatgttgaaattacaagtagaaagattttctgtagttaatcaaagactcaaagcctatgctatttcgcttgaaatgatgccaagaactgatgagcattgagcattagaacattgcgaaacagtttagttcacaggaaacttactttgtttaattgtaaatatgatcaggtggacgagtcagtgacgaagatcgaccgccacgt

SEQ ID NO: 63642 - DNA, 894 bp, Cucumis sativus
  Intron number 1 from transcript Cucsa.212610.1 (locus Cucs a.212610) derived from phytozome v7.0 (chr-ID scaffold0154 3; pos 394725 to 395618)
gcaagctcaaggttcaagttgccaagcaacagcaggtgatttgagaattcccttgtatttcagtttccattcttatgggttaagatccaaatctgttttatgcttcaatttttcgtcggaggaagaaaggccagtgtgattgatattgttattttccctggtaaaggagaggaaagtaaaagtcaatgagttatcttagtggtactgttttcttttcagtgtagttagcattctgttataagctttaacttgatcgattgaattgtccgttattataagcaactgttgtaagatgctgaatttttattttccctttttgatctttcatctttcctgtatggtaatggctgttcaaattattaattttgtaaacttattttgctatatttgaacttaacgaggcaagcatgctgattccaagctgagaagtctgtctgttttcgtcccattatttggttggcttagttagattcaaatgattgacatgttttttcatgtccgtatgtcattcaatgcagtgtggttttgaactgtttttggttttgaaattaagcatactggatggacaatggtaaaatatttttcaagttaggaagatatgactaccattaggcaaccgaacaaattaacaaatgttctgaagtttgtttatttggtttatagtggtcaaaactcaaaagaacttgaaacaatggtgattccttccttataaggttcttacatatttaatttagctgggcaaaagacatttactttttggaactcaatcatcttcccacgtttcataattgctttatggaaagaatagcaaagaatatgaactctaaaatgaaaagaaaaactactttttttttgttattcaggctgtaataaagcaatttggtgggtccggct

SEQ ID NO: 63643 - DNA, 370 bp, Cucumis sativus
  Intron number 1 from transcript Cucsa.255000.1 (locus Cucs a.255000) derived from phytozome v7.0 (chr-ID scaffold0222 9; pos 3152654 to 3153023)
tctctctgtggtaaataaatgctcttcatactaactatatgttatataaatagtatatatgcaatgtgcacctttcttacaccatgtcttctttagtaactattttggcttttggtttttgtttttaaacactacttccactttttatttttctttctttctttcttatctatcctggtttaaaaaccaaatcaaatttaaaaataaaaaatataattttaaaaacttgtttgtgtttatttggatttggttaagaattttactgtcatatttaaaaaagatgcaatggagtgatcaaacgcagccctagttatctgttttgttttaagtttaatctgttgttgtgatgaaaattataaggtaaaacctc

SEQ ID NO: 63644 - DNA, 741 bp, Cucumis sativus
  Intron number 1 from transcript Cucsa.258360.1 (locus Cucs a.258360) derived from phytozome v7.0 (chr-ID scaffold0222 9; pos 5347076 to 5347816 reverse strand)
tcttcattgccaggcaatttccccttaaattccaggtaaagagttttgaaggttctgggaaactgggaatctttttttctttgccaacattgattccatggcctttttttaaatatatttttcctgtaacttgtctcttttgttctctgcatggtttgatctcaatttttctaatgcatcttctagtgagagtttttactttttcagtttgcaactttgttaactgccgtataatggattgagatacatctgttttttaatggctttttatattctttcatttgctttagtacggttttttagagaaaccatgaaggatatattttaagtgtaacatggttttttttcttccaagttatgtgtggagatttgaatcattgatcttttggttgagaatatatgccttagttagttgagtatactcaagtcgacatttaatgggatagttgattaaactaaaaagggtacaataagttttgggtttcttgttttattgttgcaaaatcatggtgcaataatgaatggtggttccttgtttgttgcttacaatattatgggcaatcatagggattggtattatgccttgcttgttgttcaataattgtatatctgggttgatattttgatttgcctaatcttctttactcttctttttcatactgaaattatttttcccaaagttaaatgaatagttcttgatttacaggcggccagctccacttacagcgtacaagttgaagt

SEQ ID NO: 63645 - DNA, 1029 bp, Cucumis sativus
  Intron number 1 from transcript Cucsa.240930.2 (locus Cucs a.240930) derived from phytozome v7.0 (chr-ID scaffold0204 7; pos 1118441 to 1119469 reverse strand)
ctctccagctcaagcctcacaatctccttcttcaggtgagatttcatgttttcttattatgggtgactatatttttctcatggatccttctgtttactttagaattctaagtatgtggttgtgagcttcacttgttgaaatctggttgaaatttgagaaattgaggaaggtggtggctggaaattcggattctatttttgaactctcgtattttggatagtacgtcagctggggaatttcgttttattcttggatttcaatcataagttgttcttgagagttgagaccagccctttgtagatttctaccctggactcccaatttattgaagatgaaatgaaatctgctggttctctataagttggtaaagatgatcaatctttgagggggtttgaaatgattgtttcagagttttgattttgtgaaaagcactttatatggtagcgttttctttaaactatttccactgaatgtgcttggaagtttctttaggattttcaaagttacttctgattgtataaaattataaatcttgacaagtgtttttaattggtcaaaaataaaattcacggttctaaaaatctaaccttacaaacggttggaacttttaagaatttgttgggtcttgaacatgactgtgtttgtttgtgttcatttaagtataaaacttctcttttggtcttgacatgtttcatattttagtgaacattgttctgattctacacaatccgtcaagttaagtgtgcattttgtaaacgtccaatttctgaaatcattttgtccggacaggtttggtatttaattatttgttcaacacttcatctgtttcatttcagtaagagcctgaaagttatttcattatttgtttctttgttgaactcgtttttatcgtagtatcagattccaagtaatttcctatctgtttcttcaagactgttctctaatggacactttcaccattttaatggctttgaatgatgttgtttttatgtaggaaattgtgcatcattttgacgtaccaattttaca

SEQ ID NO: 63646 - DNA, 906 bp, Cucumis sativus
  Intron number 1 from transcript Cucsa.273610.1 (locus Cucs a.273610) derived from phytozome v7.0 (chr-ID scaffold0251 1; pos 688373 to 689278 reverse strand)
cgacatctgtcaggtatgagttatagttactcactctctttaccgtttcatccatttcagtaattgagacagatgggtttggagagttgtgatgtgttaatgaaatttttggaattaatttttttttttttttgtggtaatacttagattgggacttagcttctacgatcaaatttgattgtgttactatgaatttgagttccatagactgaagtagattgattatgtatacaccccaaaataaaagatcaaggagtaattgaatatgcttgccaaatcccatgagtttctttatatttttgttttaaatttattataaatatttatgtccagatcttataaagggctaatgataatcctactggcaaatgaaagaaaagctggttccagctcaagatgaatctatgggcagttttagaagtttgaaattatggtaaatagattttaaagattttctagggtgttgaatgttttccaatctattaaaagaggaaatcgtacttcattttttaggtcagtgatgtctaaaagagagtctggaattgaaacattcttacaggtggacagttgaggggtaatataagcattgcaattttctcctctctctctctctctctctctctttctccttcttctctgccgtattttttatgtttgggtagtctgttttatgtagcattattcagttcaagttcatggtgctgttaagaaacaggcatagtccctcctatctttctcatgcataactgggtagtatgtttgttatatgttcttgggagaatgtcagtcaatagtgaattttctttctttttcaagcccctttatctgttgagaatgttactctttctgaattatctgggatttcttgcaggaagctagtggatatatcttctgtttagaggatcg

SEQ ID NO: 63647 - DNA, 323 bp, Cucumis sativus
  Intron number 3 from transcript Cucsa.244230.1 (locus Cucs a.244230) derived from phytozome v7.0 (chr-ID scaffold0213 5; pos 50876 to 51198 reverse strand)
ctgctaaacggcggctatcttctgctgttgtcaaggtgagactcaaattttgtttttgtttttgggtttctatcttggggtgttcttaacattttttttctttaatgtttctctaatctcgtttgcgaaaagaattttctatgggttcttattgtttcttgctagaattatgaattatgctagataacttaatgaacatgaaagatgggcttggttggcctcataattttcttcaaaccatgagtgccatgttgtatgtacatttgcatagtttaacacttaccctttttatctttacttctaaaataaatattggagcatag

SEQ ID NO: 63648 - DNA, 787 bp, Cucumis sativus
  Intron number 4 from transcript Cucsa.181160.2 (locus Cucs a.181160) derived from phytozome v7.0 (chr-ID scaffold0123 9; pos 155756 to 156542 reverse strand)
aaaaggacctgtatctatcttaccagttcagccaagtatgcaagatcatttttttgaattcttgtaattcatataattacacttccttcagttttgctatattataggaattattgtctgatacgaatggtttttctctttaacttgttttggttctctgtctatgatggacgagtgtaatgtcttatcaattatgtgtatggttgtgatacgaggaaatcaatttattgttgttttacccttcttctaaagtaaatggtttacctatttagtagttgaatgttgacatattatattatgacaatgaagaaatatgttaccgcctgttagacctttgtcaattttgaacaggcctcatggctttttctgcttttttctttgtggggggtggggggtgttgtggtctttgcttgagaatataaggaggatgtttagacaggtttagtggtcttgagagaggcttagtttgtcttaaggtttaatatcttttgatgttggtcccaatggtttaattgtccagtaagctcaattattttagattggagctctgttaattttttaacttattttgttggtcttgtatgcttctctgtaatattttcttgaagaggctagattttctattaagaagtcatagtatatgattattatttatttgcaaacttataacctccacgcaaacttatagcctccactagtgttggtttttccttttcctttttttgaataaatttccttgattatgatagttaactcagctaacatcacagatatctacctggacctg

SEQ ID NO: 63649 - DNA, 346 bp, Cucumis sativus
  Intron number 1 from transcript Cucsa.177570.2 (locus Cucs a.177570) derived from phytozome v7.0 (chr-ID scaffold0122 5; pos 1551973 to 1552318)
ctccgcccccgcctctcgcccatcttctccaaccggtacgacctacttcttactacgatggaaactctttttttcttcctttttattaatctcactttgaataaatactacacgacatgtatttttgggttttattcatctttgatctttttttttttaaatttaatggatctgataacatattagataacacagaggtttcatatatctcaaaatagttcatctatttttaaagagtgtaagttaggttgttgattgtatattgaaagcaaatatttgatgggtgtattttgtttatgacaagtaattagaaggatcaggaggaggagtttttacggaggtgatt

SEQ ID NO: 63650 - DNA, 787 bp, Cucumis sativus
  Intron number 2 from transcript Cucsa.177570.2 (locus Cucs a.177570) derived from phytozome v7.0 (chr-ID scaffold0122 5; pos 1552533 to 1553319)
aagaaagcttcaaagaacaccacaccctttaccctgtaactctctctctcacttctcctatttcagtttatgatttcagaatattctttaatttttaaacttcttccttttcttaatttatttttaccattgtaaaatgttaatttatgttagtgtgaaaagattttgcaatgataaactcaacaaaattgccttattttaaaaaaatgttttcagaaaattaatcgttttctctctcacaattttgattaagaatccgagtatatcttcgagtgctgtggcaattattttgtgaaatttatgagaaaaaataaacattaattttgaactctaaaatgttataaaatcatccacttaaatgataaattcgtagttatttttgaaaatattgattgacttagaatttgatcaaaaatttgagtgtcaagatttacgaatttcgaaaaataagtgattattttcacgataaactaggataagttttctttaactttgctcactcttgatttttttataaaaaaattgttcctttaaagtaacaatgttatgtttgttatttaataaaaaatgtttaaaaactaatgtgtgtaggagtaaaaattcatgatgatgttatacaaaattgagacctaaagagtatatggtggtgagcttaatgaaactatccaacctgctactatatccattttaagtctcaatttttaacgtacactttgtttaattaaaagtaattgatgagattaaaattgcagaagcaaaagctagaagttgcaagaaggttgaatct

SEQ ID NO: 63651 - DNA, 417 bp, Cucumis sativus
  Intron number 3 from transcript Cucsa.195650.2 (locus Cucs a.195650) derived from phytozome v7.0 (chr-ID scaffold0135 2; pos 34140 to 34556 reverse strand)
aagtttgggttgtgaagcagggtaccagaaaaattgtaggaatctctctaaatattttgatttagtatggcttcgttttcatatttgaaagttattaatttgttgcatttcttctagtaggttttttattttttatttattaacctgatagctactttctttgaagatcttcaattataatttacatcatgttcactagtagttggatcatttatggagattggagtgaatgaatagcaaaccgttttataacagagctagaaattaggattctaccatagttttggagattaatgtaatttccttattgtcaagtaaactatgatctgtttcttccgacttctgttcatttggttaactttgttgtattttcttaacttcttggcttttacttgtagattcaagcacaagatattc

SEQ ID NO: 63652 - DNA, 843 bp, Cucumis sativus
  Intron number 1 from transcript Cucsa.195650.2 (locus Cucs a.195650) derived from phytozome v7.0 (chr-ID scaffold0135 2; pos 35424 to 36266 reverse strand)
gcgattcaggtacgatttatgttctttcttcttacgaatccgtagccgagacgattttgtttctgtttcctatgcttttttttctcaattttggatctgttttttcatttatttctaccatgttcgattcctttgttgacatttgctttagcttagtaccttctaatcaagggttcttttcttgaattcgtatcgtttgatgttcagaaagatttgttgctatgtaattggcagtggcaatttgtgttctcgtgctcgacccattagttaggtctttaaagagtattgagtattttcttgattagtttctgtttaggaaattgtaatgccattcattagttgtgtccggtggtgcttgaaggaaaataacaattttaatggttcggagagctgagctttccattttgattgaggcaatgcttattaagcttaactaagagtttttttttttcatttcaattcaaaagattggtacgctgtttctattagtgaactagttaaactcatccattaacttgttttcccaatgcaacttcgatttggctttgcctcagtttctttcttactttctttccattttacctttctttttaaattcatgttcaaactcttgcatatgtgtacttttggtgtgtgtatgctaattgataggctagacactagacagacagccatgattattcggagagaagtgcaatagaaatgcttggttattttgattcgtttctccatcatattttgtttaatctatctatactgcattttaggaatgacaacaatatatgaaattagaaatttaccctcgcaggaagtcaaagtcataagtaactgcagcagatcttt

SEQ ID NO: 63653 - DNA, 853 bp, Cucumis sativus
  Intron number 2 from transcript Cucsa.292590.5 (locus Cucs a.292590) derived from phytozome v7.0 (chr-ID scaffold0277 9; pos 80461 to 81313)
tcgtaagttttctttattcgcttctgtttattgttgtaagcagattattctagagtgaactgaggttactacgcagctgattgataaccatttggttttttatttttgaaaattaagtctacttgttctcaatttcttaacatgattttcatttttccttgagtaaccaaaccagaaatttaaaagtggtagaggtgtttgtagcctcaattttcaaaaactaaaaatagaaaactaagagtttgggacaagaactatcttggctgtaataaccgtctctgatatttattatttgctgccagagtgtttactatttccttctcaaactaaaataatttatacctcaaacgtgtttatacctcaaacgcatactgttataacccaaattaaaataatctatacctgaaacactaactatcataattcatcatttattttattctttgctaccgtgtttactatttccttcagtgtttaccatttccttctcaaactaaagttgtttatacctcaaatgcatactcttataacccaaattaaaataatctatacctgaaacactaactattataatccaactacaataaccaaggactttaataaccaactgcttgcccccaaatgccctctaaatggttaccaaacggacctacatttttttctcttggttctagttttgatgctttctgtggaaatttttttgagaacataagtttgtgtttggctctttagaatacttgaaattttattaagtttccagaatgattcagtctaatatgagcaatttgggtcaaataatactgacactctcctcaaatatggaagattactcaagaggctggatttccctgaa

SEQ ID NO: 63654 - DNA, 760 bp, Cucumis sativus
  Intron number 1 from transcript Cucsa.150310.1 (locus Cucs a.150310) derived from phytozome v7.0 (chr-ID scaffold0111 0; pos 1243698 to 1244457 reverse strand)
agtctgaaggtcgtacattctcccttttcttcacatcataatcaacattagacgagtcttcttttctatcctttttcttacctgccgtattaaaggtttaacttcacgttcatgcaaaccatgtattttctttacatataatgaatgtttctcccttccatttcaagaaagaaaacgatttgatatatatctgaaaactttgcatgcttttttgttaattattttagaactagtaggcagctgaactgcagaagcacaaaacaccggatctaattcacattccattagttgattgaaaccagttgcttttatttttcaaccaatagcgaactctggggggattttttgtgaacttttgttgtgtacttctgtgctgataaattctcaagttaaccacaaagcatgcatttgctatttttgctatatccatcttatactcattacctccgtagaattactttacaagttgataagtgttgtttaaaattgcaatgaatgcattctcctgttttttgagcttagtgatagcagatcagaccttttccccgttttgttagtctttttgcattgttttttggttctttgagcttgccaacatcacatttcagctacaaaatacggggttttctttttaatgtataaaagatgactactatatttgatatgaacaaatacacctgaacttttccctacctctctcttgtttatatgtttttgtgcgaatgtgcagggcctaaccactattggttgaatacgtcta

SEQ ID NO: 63655 - DNA, 304 bp, Cucumis sativus
  Intron number 1 from transcript Cucsa.253580.2 (locus Cucs a.253580) derived from phytozome v7.0 (chr-ID scaffold0222 9; pos 2124615 to 2124918)
ctcgccgtgctgactcttttgagaagcttgataaagtatgttccctctttctcttccatgaacggaattttgactgattagagtttgggttttagttgaaaatatgaaaattaatgggtagaattgaaggggaagagtttctttgatgtttgttctttctaaatatgaccatatctttcttttgaaattaccatgtttgaattatggtttagttttgttcctctttcatttttatgaacaagattggaattcctcaaagttatatataatgttgttcaacagattgggcaagggacgtatagta

SEQ ID NO: 63656 - DNA, 627 bp, Cucumis sativus
  Intron number 1 from transcript Cucsa.163050.1 (locus Cucs a.163050) derived from phytozome v7.0 (chr-ID scaffold0114 4; pos 2497982 to 2498608)
cagctgctgcaggttctatctctaacttctcttgaatcatatcataaaaaatgtaataaaactcttgtttagaaactaacgactctcccattatttatacaatgatataatattgtgtactttgttgaacagaaaccttcatggtttcacctaaaatattattttgtatcactgtagatagttgtcctatctttatcttaattatctagtaaatttagaatctttttcgaactccaaatagaccaacatggatcaaatttgaagatcaaattcaaacctttgttactactccatggttaagatgtaaagtctaatagaaagcgtagaattccaataatgtaatatgaatatgagttaacattcgatgcgagtccaaagttccaagagatttggtagtagttattatcaatagcaatgagacatattttctcttcttagtagcttaatcacaggaactctcactgtattctaagcatccatgtatgaaataaatgggttgtatgcactttattgaaatcatattttctgtatatcctcatctttttctcatcaacaaaagattagtctaaactgcttgattttcaaccctcagctctggaattgataaagaaagaggaagtgcaagcc

SEQ ID NO: 63657 - DNA, 839 bp, Cucumis sativus
  Intron number 2 from transcript Cucsa.143320.2 (locus Cucs a.143320) derived from phytozome v7.0 (chr-ID scaffold0107 9; pos 1662324 to 1663162 reverse strand)
cgaaattgagtgttttggcacacgttgggtaagattctaagccgggtgacgagcacccatctaagtttggtactaatgtagaataatctatggtattggatgctagatttcgaacttagaaggttgttcgagtgctgtgcattggaattaaggctactttgataagtgtttgataagattttgggtaagtttcgtgaatatccatttagttttgacatgacattaccacaagattggagacttggagaattctaaagcattgttcaccatacttaaagatcgatagcttgagttgtcataatgaagtgttttggagattgttgtgtcatcttgccatgtaatgtttacttagtaaccccaatcattgttttcaagtcaaactgaagttggaaaagtttattatcccggggattgcgttattgatggccagtagttcattttcaagctttctatgtagaatctatatatgtgttattttatgatatggctttgaaactacctttgcttaaacttctttattcgtgttttaattaatacttaaatgatgtgttcactcttcatcattttaagaatttgtatggcttgaattttataaaaaatgtgttttcagtttttgattggtactttcatgcctcaatctaggttagtgtggaaaaaccagaacgaggtgtgacagacaattttgtcataaaaacactaaaccctttatttgaagtctctccaattaatatgattttcttcttgcgcaaacctttgatttaccaagaaattttctttccttttttgttgattttgattttgaaggttgagatcttgacccattggaactgccttctcct

SEQ ID NO: 63658 - DNA, 666 bp, Cucumis sativus
  Intron number 1 from transcript Cucsa.143330.1 (locus Cucs a.143330) derived from phytozome v7.0 (chr-ID scaffold0107 9; pos 1680793 to 1681458 reverse strand)
attagcccatttaactcttcttgaatatcttagaggtaaagggttttctggatttgttccgttttggctcttaataagtttggtaagaagttttgtgttgtagtttaagagtaacttgcttcatcaatagtttcttatgtatcatttatgaggaatcctgtctgcccaccaagtgtttgtttatttgccttggtttgatgtaatgtatcaatcagcttgctctctgctttaggtttatatgatcccttttcctcgtttcgagtttgtggatcttggagtgtactttaagatcaagtttggtataaagtttaactagaaaccctttttgctggtttggttactttgaaactatttggaaagcatttaagaactcagaggtgagtttcaggtgacttttgagagggtgaaaaaacaatttttcagcctataaaacattactatcaaagaaattgttaaatttgattagataatgagaaataatttttgaaaatactaaaaacgattagaatttgctttttgaagtagcactgattggtgtgtattaaaaaatactttgatgaaaaatcatccgaaactcactgctattgttctgaattttgaaattgggttatttttctctcttctgacgtagataatcgtttgactgggacgaagcttggttgtggc

SEQ ID NO: 63659 - DNA, 648 bp, Cucumis sativus
  Intron number 1 from transcript Cucsa.169140.1 (locus Cucs a.169140) derived from phytozome v7.0 (chr-ID scaffold0116 3; pos 123222 to 123869)
gacaatagcagggaaactagaagtagaacagaaatgtattagaaaaagatcgaatggagaaattcattacaaaatattgtgaatatttacagcattgtgaaatgaaaaacaactttaaaaactttaagattaccatttcaacatctttgacaaaatatttagacctatggccatcactgcagcattacttgaatcaggagataagtttctcacgagaacacaaatgacctcaaccaacctggtgaaaaatactaaattatacggattgataacaaataagtaatggaactttacacagaataaaaagaatttaaaatcaccacaaattcttttctgttggacgagctatgtctgcaacttcaggattcgaaatgtgtgtaccacccatcaaagcaaaacagacagcctatataggacattctaactattaacaaaacgaattggacagaaaatgggcatatttggaaaaatagcaagtgtttctctatgactatatcataattaatatttattttctcatttttatcttttttttatattgtaagttttatttctctcattgtaatattttgtttaatgaagaagcatatatgctttttatactgaataattcaaaaattagcaacaaagatgtatgtctggcagata

SEQ ID NO: 63660 - DNA, 997 bp, Cucumis sativus
  Intron number 1 from transcript Cucsa.179970.1 (locus Cucs a.179970) derived from phytozome v7.0 (chr-ID scaffold0123 3; pos 340234 to 341230 reverse strand)
caacgatttgagggactctgcggagaattcctctggtgagctcattctttcttcttatgagatttgatatgattttttttttgctgttattttcatttctgtgcgtggttatttggaattgttttgccacctttgcgatcgtgttcttctggagcttgtttcgatgtgcttactagtcggtgggttttgtttcttgtgtaatatagagggctgtagcgttgtaggtgggaagtttgggaccttgtgttggacgattttaatttttttggttgattacttgtagtttaattttgtcttgctttcacatctatctacctttgttgaggtttttcttcgcgtttaagctattttttaaaattgttctgcaactgtgtttgcattcgagtgttttatggcgttgaatggtatgtgttgctgccattaagttggtcatttctgtggtggtgtgatccgtttgatctgacctttggctaaggggaggttaaatcttgctatgaaagaatgctcccagagacgtacttacctacaccatttaatgatttgctgtccattgtttttgcagttaagttttgcattcatgttttgttctgatttgttggaattgaaagacatgctccacaaaccctgtgtttgtgtgatgacttgaacggtagtattgatattagctcttaatatctttggaatagtgtactttagcctttaccttctcatagctgttatctagtttgctttttattttttttcttccgttgaatcaagttactcagctgctgggttttggtcctcttgtttttatgtcccattcttgttgaggtctctgttttctatttaatctaagtatctcactaggttgttttgagatatgcaacgaggtggaaacttgtaattggggtcaattagatggtcttcagctgatgacttcttttttcctcttctttattttgagaatgattaattaataatcttctttttattcatgcagccaattcgctctttg

SEQ ID NO: 63661 - DNA, 793 bp, Cucumis sativus
  Intron number 2 from transcript Cucsa.253610.1 (locus Cucs a.253610) derived from phytozome v7.0 (chr-ID scaffold0222 9; pos 2158441 to 2159233 reverse strand)
tttcgaaattcaaccagctgaacttaagttcacttgtaagtataagagagaagttttttatcttttactttttgttccaatgtatgatgtacatgcaattacatattatcaggcaagatggcagtgataccgctgcagaatttgagttgcactgtctcgaattgttttaatgaacgtgatgcttaaatcactacgtaaaaaattgttaggcctggtttaggctgagttatagcttacaataagaagtaagccaaccaaagctttcaaattatttagatcctgtttgataattatttggtttttgaaaattgtgcttgttttctcaccatttctaacaatgattttcttcttttttaggaaacatttaaattcttgaccaaattgaaaatgctacttttgtactattcaaaacttggcttgaattttgaaaacatttgtttagttgtgttaggaacctataggtgaaagtagtgtttataaacttaattttcaaaaaccctaaaactaaaattcaaatggggatcaaactgggtgttagctactggaagtttgtttcatgaccagcgtagttaaaatgttctacaagtaaatacttgctacttaccaaaccttttagattttaaaggatcccaatgtctacctgtttgtatctgaacgtatcttctgcaaaggaaaaaagataagagaatgttttcttctagtctaccttctatgtactcatttcctgcatttttatttttttaacaatttttgcacgctttctttctccagttgagttgaagaagcaaagttc

SEQ ID NO: 63662 - DNA, 611 bp, Cucumis sativus
  Intron number 1 from transcript Cucsa.253610.1 (locus Cucs a.253610) derived from phytozome v7.0 (chr-ID scaffold0222 9; pos 2159248 to 2159858 reverse strand)
tcaagttaattcaatcgtgtaatcgcttcaactgggtcggtattgtacctttaccccatttgcttaatctatttattgtgctgttttttatcggagtcttggtgttttcttagatccttctgtttttttttttccactttcaatctggtgtgtgtttttcttttcttcacttgtttagcgagttttgtttagaaattggttatggttggtgtgttctttgagattggtgatgatggttgtatgtcatgaagaatgtttttcgattattttaacttgcgggtttgtttatttggtagttggtacacggattaactcgtgggtcttttggtttcatgctagattacgagtttctctgcactctccgttagcataagagctttgtttgtctgtctgtctgatctgattgttttacttaattgcataggagtgttcattgttcttcttttgttaccaccatactctgccacggagtttgttactgtgtcattttttcgttattttatgaaatttccacttcttgcttcacttcaacgacttaccttggtgctgatgactaaaattgttctgctacggatttttagaagttcatcgttagttcagcggttagactc

SEQ ID NO: 63663 - DNA, 1019 bp, Cucumis sativus
  Intron number 2 from transcript Cucsa.259480.1 (locus Cucs a.259480) derived from phytozome v7.0 (chr-ID scaffold0222 9; pos 5953935 to 5954953)
ctcccactgaattgaagattcagcagctcacagaggtatgatgactgtcttcttaacccaatcaaaatctgaattatgggcaagtctaaatggtgtttgtgacacatataggtttagggtctatcccaaaaaattaaagacaagatacaagtgttttccttggacattgaaatttgagttgtaaattaacatggttaggcgttgaatatgtagaatggatgggtatacgattgattattggagaaggaatttgaatagtttctgttgaagggaattttttgggggagtctagggaagagcaaaaaaattggagatttgggcaatagaaaaggcataaaccttcctgtgtagatataagagatgtaaatttagcattccaataactaaactttttattagcattccaagaagaaaatgagtgggattgattagagccatgtcctaattactctaatgggcatggagagaaactactgatactagaacactgcaccaagttaatttctataaaaaatagtacagaggaccctctgtagctcagctgctcaatgctatttgtatttgagttttattctattgagtgaatgagtcaactcaaataaaagtaaactcttcaagtggtaaagattatggttaaactttcaacaatcttaacaaaactgacatgtggttaagttctcttgggaatattgttggaaggaagacaaggaggtggtcctttgttagtgattgtcaaggctttaagggtgtgaaaaagaaagatcatagctatataaataagcccagtatctatataggcaaaaaaaaaaattgtgggtggaatctaactcggaagagctgactaatttgattggttcttttctttttcttagaatgggacagatccctttgtcctgataattctagaatcaaaatagaaatagacaaatctgtatagtgaatgcttgccgaacatatctgatgccattggtttttgaagttcaggagaggaaagagttgatcaaagggtccttcagaga

SEQ ID NO: 63664 - DNA, 349 bp, Cucumis sativus
  Intron number 4 from transcript Cucsa.142350.1 (locus Cucs a.142350) derived from phytozome v7.0 (chr-ID scaffold0107 9; pos 651664 to 652012)
aacctgagtggtgaatctgtatgtgattgagaaactttttttggcttctgtcttcttataagttgggttccttgtagtcttagactcttaggtttttattattagagttcatagattcatttgagtgaattcatcttgcaaaattatgtcgactttgaaggggaagaagctggtagtcgttctaaaatccactaggaagttgggaatacagttcctgtgaaggctaatgtagctagttcaatacatgtctatgatatcttctttaccgagattggtttgatattgtaaatcttgtttttttcatcatactgcaggcaggaccacttgcagcttattacaagctacctct

SEQ ID NO: 63665 - DNA, 783 bp, Cucumis sativus
  Intron number 2 from transcript Cucsa.250320.2 (locus Cucs a.250320) derived from phytozome v7.0 (chr-ID scaffold0221 9; pos 489571 to 490353 reverse strand)
agagaagccatttgattttttgcgaactgtatttggtaagctaaatcttctatttccgaagggaattattttactgatttgattgtaggttgagcattgtcttacttgtcaagttgaaggtactacatttttttgatttatcggtatgatgattttgttgaaatattcatattcttatcttgaagtatgttgtgttacaagatataaagtaggaaacaaaattaagaagtaatcttgtttcgttggagttagatgaaagtactgactgagatacttgtaaaatcctatttgcttgctcaattgtgctatattgtgctcgtggattttgaacatcgattaatctatacttaccggtagctattattttgtctttgttggtaattggtattttactaaactctgttaaagaagtcttattttgagcaataggctatgagacagagacgactgtgtctagctgaaattatttctcttcaggtttattaaaagggacttttctgaaaccaaatatatgcatggaaggaaatatggccgattggattttgaatgcaagtcatacgagatctatagattgttctttttcatttgggttgtgggagggggagggggggttgttacgggctagagctaattcagagcacattacagctgatgtcttgttttcttacttcttgatccttgatctatcatttgtctactattttcagtttcatgcatgaagtttcaattatattcccaaattttgcagagggtgtcatagcaggaggtactgcgggtgtggtt

SEQ ID NO: 63666 - DNA, 330 bp, Cucumis sativus
  Intron number 1 from transcript Cucsa.250320.2 (locus Cucs a.250320) derived from phytozome v7.0 (chr-ID scaffold0221 9; pos 490372 to 490701 reverse strand)
gacgcgaaaacctcctccttgccttcttcaggttatctctttttctttctacaatctatacttttacatttccacatttttcttcacttcttttcaatctcatcaattctcctttccttccccaacttctcgcctcctaatttgcttcttggttttcttcacattgggcatttcttttgttttcttcccaataattcattccaattttcttctccgtttatgtcttcacctcacttttacaacgcaccagtgattattattaacatatcttgttctcattttgaatggtatattgacatttcctgcaggtgattcaagaaaagtttttgc

SEQ ID NO: 63667 - DNA, 548 bp, Cucumis sativus
  Intron number 1 from transcript Cucsa.165850.2 (locus Cucs a.165850) derived from phytozome v7.0 (chr-ID scaffold0115 3; pos 1146298 to 1146845)
gctgctcagtatgttaccttcttccctttctttctttgctcgctgtacgcgaaaatggagttgttatacttgtaatgaaattctttatgcgagaaggaactagcgtgtttaaagtttaggttatttctagtatctttcaaatttggatttcttcgagtatagatgcatgggaattgagtgttggaaggtggaagaaatttgatggaatcgaggattaggattcagtggcaaagtttttcgacgtacaattttgagttcgatgatcgttttgacggattatagaagaaattggcgaaattacatttagtttctattttgatatttcaatgttcttactgatttaatttttatatcgatgtcttgaaacttatgaataacacaagcaaaaatttaggttaaatttatatcagtgtgtttggataaagaaacatttcgttggaggttgaatttatattagtgatttgttttaaagtttctttctgtattttcacttttttgtgttttgtgtgaaagagcttttcaggaagttcttcctccagccctcactt

SEQ ID NO: 63668 - DNA, 554 bp, Cucumis sativus
  Intron number 2 from transcript Cucsa.165850.2 (locus Cucs a.165850) derived from phytozome v7.0 (chr-ID scaffold0115 3; pos 1146876 to 1147429)
gaacaacgaggttggttggttcaattttcctcgttaaatataatattctaacacttgctcgaatgttaatctcatatttgattctcatcaagtaaatgttaacatcaattggagatgaaatgacattgtagcgcttcgaactctggagatcatgtctcgatatcatataacatgtttgggaaagttttatacaaccttttgatggtatttatggcaagaaagaaatagaagaatttttttcaaggaaaagagatccccttttgtggattgtttgatgctatagttattacagttgtgacttggtgtagaagttcccccaatttcaccactatagctttacatctctcctttccaaaaaaaacacaaacgtgtttaagcatcaccaaatctaaacttataagttgattcatatatattcttaacattcactctatcatgtgaaaattccttgttatatatacaagcgacctgccgatatttcatttgaatgcctatgtgatgctgaaaattctgctatctgtcttcaacaattgtaggctttacatatcttatac

SEQ ID NO: 63669 - DNA, 632 bp, Cucumis sativus
  Intron number 2 from transcript Cucsa.136510.1 (locus Cucs a.136510) derived from phytozome v7.0 (chr-ID scaffold0104 4; pos 1134841 to 1135472 reverse strand)
caaaaagttaatccaaaggaagttatcgttgggtaaagccgatccttctttactttgtttgtcagcttaagtttatttttaggataagaagttggctatcattaagaggaccaaaaatttcagagttacaaagaatgactaattaccagagcccaacacgagaaaaaacaatattatccaacaaatgaacgggccttgagttcttattctactcatctttatcaactacagttaaagtgccttttctcatttccaaagcttgtttttgcaactactgcttgttgctgctttggttttggccattggcctctagttttcttaccttcccaaattaattttttttctcactaggaggaatttggctggtaactttttttttttgtttgttattttttttaatgccaatataaagatctcaaagtcctttattgtttagtttcatctcatctatattacacctggttgatgatttgaaattgattttttgctcgtaaagttgctacatagtccatccaatgttcttgtgatattaaatcctcttcaacagcttatgtgatagacatattagagtgtcttatacatgatgaatactgacaggtactccactggtacgggagtaacgggtggcagtg

SEQ ID NO: 63670 - DNA, 509 bp, Cucumis sativus
  Intron number 1 from transcript Cucsa.136510.1 (locus Cucs a.136510) derived from phytozome v7.0 (chr-ID scaffold0104 4; pos 1135491 to 1135999 reverse strand)
ctgttccccataacgagttctcggatcaggtaatcctccctactctccattcaacttatctcttgtgtttccttcgagtaattgtttcggcagtcacttgtttttggcgttattcgttttttattttagtcgtaattgaagccctagtttctgacgattgatttcttactctcttctgtaggagaaattagggttccctgccttctttctcttctttatttcaaattggtttcttcgattatattgtactttgtctaaatttcttaacgatttatgcaatttgacttattcgagggaatgtgaatatttaaaaattcggttgttgtacattatttgttttattgaatttgaatgatatattatgttcgacttgctagtgatgattatcatttgttctacaaacttgcaataaatttgtgtattctaaattcacaattccactctttcatacccaattttcgttctttttatctgaacaggttgcgctggatattgactatcatcacaat

SEQ ID NO: 63671 - DNA, 283 bp, Cucumis sativus
  Intron number 2 from transcript Cucsa.219800.1 (locus Cucs a.219800) derived from phytozome v7.0 (chr-ID scaffold0165 8; pos 1418708 to 1418990)
ttgatcctggctcttccttcctcgagctttctcaggtttttgttggttaccttgttaattgctgtgattcttgtttttggcaggagaacggcttaatttcgttttttcacttgttttgactggaaaaactgttatgttatcaattattaactgatcgatgacttgttattattattattatatttctatcgttctatcatttgtttgatctgggtcttctttttcatttaagtatgtcttcattccatttgaaatatggggtagctcgcaggccacgaactgt

SEQ ID NO: 63672 - DNA, 288 bp, Cucumis sativus
  Intron number 1 from transcript Cucsa.156030.1 (locus Cucs a.156030) derived from phytozome v7.0 (chr-ID scaffold0113 9; pos 262512 to 262799)
ccgattcaaagacgtacgtctcatttttctttttcattcaaacgtgattaaataattcttcgtaaacaaaaaaaaatatatagttagttagttggattatttgtttttattaacttaactagaaaattagttttataaacacctttacctttcttattcaatttctatgaaggaaaaaaagagagagattttgaagaggttgaaatgtgaggatagtccatatttagagaattgaaagagtgtgacattattattgtatatgcagtgttttcccaggagaggcttgcg

SEQ ID NO: 63673 - DNA, 757 bp, Cucumis sativus
  Intron number 2 from transcript Cucsa.167030.3 (locus Cucs a.167030) derived from phytozome v7.0 (chr-ID scaffold0115 4; pos 404267 to 405023 reverse strand)
ctttaaaacgtgctgaaggtgcataagcataatgcttcttgtatttgcatttgctatagattgagttgtatttgcgagtatgtcattaattttatatggactttgtttgagttgaatgtttggttattttgacaaattctggtactttaagtcctcaaaattcaatgaatttcttctgtttattgtttgttgggaagtcggttcagtatatgcatcctaagtgacattgataatacattattggtgtgctgatgtcttctgaactcattatacacattattttatatatatatttataggttcaggatatgcgtccttagggacattgataatacattataggttcaggatgtgcgtccttagtgacattgagaatacattataggttcagtatatgcatcctaagtgacattgataacacataattggtgtgctgatgtcttctgaactcattttcttttctcattttataataaatataaatataatataatgtgtataacatacttttacgggtaggtggagaatattagaaaatcattggaaaatctcttttcttatcctggacgtataaaatgtcagtttgcctatgttgtggcttgtgtttcttgttacttgagttctatgtttgtgtttctagtccaccactgttgatctatttgccatactttgaaatttatgatgtgtctattgtttcctgtgaaatgaagcttatcaagtatttaatttattcttattgtctgttcagagctgataa

SEQ ID NO: 63674 - DNA, 873 bp, Cucumis sativus
  Intron number 1 from transcript Cucsa.167030.3 (locus Cucs a.167030) derived from phytozome v7.0 (chr-ID scaffold0115 4; pos 405089 to 405961 reverse strand)
tgaaggtctttcgtggaatttttgttcgtcttcaagtaagtttttcttctgaataattactaatcgtcaatcgatctgcgattatcatcattgtggatgctactttcctcatttcctttatatggttttggtggattttttttcttttctggaaaatctatgatctgggtctgagaagtcaaataaagctgaagcacttaagttttccgctattaaatcgattgcctcttcttcattttcgtcttcggacacccgatcaagtgggttttatggttttacctgtaatttgggttttcatagaacgctttgttttttagtagtaggagaagaagacaacgggatttagtcccttttttcttccctcggctagtggagctgagcgtttcaacaaccccgttgctttcgcctttgatggatccttttgacgggtttagtttcagggatttaaacgagtttctgtaaaggatgcgagttgaaaatcagagataaatctagagtttcatctctttaatttgctgggtagaaaggaagaaaaccggtaaattgaaggtgggaagaggaaggtttgcaggaaagagctgtaattaagccatggatgcttcaatttaggggttatccaactaaactgcaaatctaggtttgcagaaaagagctgtaacatgaagctgatatacttttacagtattgttgttattttttttttttaatgaacagacttgctttcctcttgagagtgttattggattctagtttagttttttttattcttttattcaacgggagttggttcttagtgttgctcatgaagtttgcttgttttgtttaagccttcacaatagttcttcttggttgtctcaggtcattcagcgttgc

SEQ ID NO: 63675 - DNA, 425 bp, Cucumis sativus
  Intron number 3 from transcript Cucsa.177290.1 (locus Cucs a.177290) derived from phytozome v7.0 (chr-ID scaffold0122 5; pos 1324533 to 1324957 reverse strand)
cagactttgaggtactcatattgtctcctaactgtatcattatattctgttatcatcatgtttgttcctacattttactattaacttaatttcatcttgtgatctcatccatatatctaggattttgatcctcattccgttacttttaaatgaacttacatgtcactctgaagtttgattcttttatttgtttaattcttattttggactgctgtaacttcgtaagtcttcgagaacttttctagtcataactcgtaaaatattttatacacatcgctggactatgaatgcttattgaattgcgtaaagtgtgcactaataataacaagtttttcttgtatagatactcaaaacagtgaacagcagttttgttgttttgttggatgttttgtttggcacattagcattcattatcagttcagagc

SEQ ID NO: 63676 - DNA, 710 bp, Cucumis sativus
  Intron number 1 from transcript Cucsa.156860.1 (locus Cucs a.156860) derived from phytozome v7.0 (chr-ID scaffold0114 1; pos 19589 to 20298)
cttctcaggaccattccttactccgatcaccagaggtatgaatgcatcacaactcacagaccttcttcttttagcatctaccattcttttttcctttcttcacaactgaaccaccatttattggatacccatttcagctcacctattaactctttattattattggtatcttatattgtacccaactaaattcaatctcttcggctttgagatcaaagcgtattatcgcaattagtgtatggattaaattacctcagcttacatcatctgtgccagatgaaattatagtttgttaacccagaatttacttcccactgccttgtcttttttttttttttttttactttcggaagatgctgttcacattgtacaaaaacatcttcatttaggttttctaatatttctcttagtcttttacatgtagcagatattcctttctctgtatcgttgcgtgcaagatatcgcaattctctatccattccctgataaattcttcgcagaaaccacgttctagttttattcttgcgtttttttaaactttagtcacgcattcagatggtgtcattactaaatgacgttgtactcctatcactcttcatctgtctcgtttggtttctttttagcattttttttctgaacaacgcccactttttatgtttccgtgtccctctttaggtggtggtctacagaaaccattgcagtggttactg

SEQ ID NO: 63677 - DNA, 680 bp, Cucumis sativus
  Intron number 1 from transcript Cucsa.158400.2 (locus Cucs a.158400) derived from phytozome v7.0 (chr-ID scaffold0114 2; pos 528141 to 528820)
cttctcttcttttctctctctgagctttcaaacaggtacgccatgacagaacttcctattgttattttttttttttacttttcttttatttttcatgtctttcgtgtcgatttctatgtttctatctcttcgtttgattgttttggatgatgggtttgctttatgtttccctttcaagatctgggttgtggattaattttgggaatttcactaaattcttcattcttttttttttttgttgtgtgtgtgtgtgattgacttgctcttggtttgaacttcctccttttctatatacccttttgctcaaatattctgggaatctctcattctttactttttcttcacttttccccaatgttcatattctctccctttaaccacccgcattgttcatgctatagagacttagttttataatgaatatataacagtttacaattttgggataagcctgctagtgataaattatacctttggaccattaattataattatggatgtcagagtcatcatataccaagttggaacattttggttgggggttaaaggtgttaaaaaaagttttatgaatatgaagtgtaggggtagttgatatttcagttttctctaaacaaactggtggaacaccccaggtattttgctctaattcaagttttcaacatagaaagctgtgtgaaaca

SEQ ID NO: 63678 - DNA, 751 bp, Cucumis sativus
  Intron number 3 from transcript Cucsa.158400.2 (locus Cucs a.158400) derived from phytozome v7.0 (chr-ID scaffold0114 2; pos 529554 to 530304)
cttttgctctggaaactgctatattacttagtgtaagtgcttgaggattatttgattttggttgacttgagattcttctgttctccttcattttgaaatggctagcttctctcgtttatacttaatgtatcaatcatagatttttgtagagtactttccttttgtttctcctcgcttgtgtgctttgatgatgtatgtgaacacacaaatacactctttagggtgagtggatgaggaggagacagctttgcaaaaggttgatgtgcacaattggagaaatggttcgaatcctaggattgggacaatacaatttcatctttagagtatcaatctcttgcttttagataaagctatgtacatgtctctttgtttctttctttttcacaatgtttcagtttctccaacttactcattcactttccatttgtactttcaagcattcccatgagccaggacactagtggatatttgttcttgtaattcttctgattcagttcatcttttaatgatgtcaaataaatattttttaagtttgagatgctctctccttgcatcataggggcatggtttgaactctcaatccacatttcacttttttagaagaaaattgaacagttgtgatctctcaaaacacatgcctacgtgtacgttgtaaccattcaaattagttatcttcaaacatcccttttaagcttttataacgaattcatttattgattttttcgttccagggagctgaaatccttgatca

SEQ ID NO: 63679 - DNA, 952 bp, Cucumis sativus
  Intron number 2 from transcript Cucsa.188150.1 (locus Cucs a.188150) derived from phytozome v7.0 (chr-ID scaffold0129 4; pos 48512 to 49463 reverse strand)
cgttggacccaaccgtagaccttctgtttctcccagtatgtgttcttctcattatctgcttatctgattcttatgttgcccttttccttttgagctttgcatgctgtgattgagagctttgaacacgtatttatggaggaaagaggatggagattgaagaactatgcgagttagttgaggaatttggaacattctctgtttttcttcatagttttgctttctccttgtattggactcttattgaaatgtttgtgaataaggtgagttttagaagtgaagaatttttatatccaagactatctgttatatgtagcaatgcatatagtttcattatttacatattgctacttgataaaattattttgtgatcttaaatgatcattggatttcacttgtataactgtttccattagttttgcttaaattgttctattcttagataatacaactagattaacatgtatacttcatcaaacgaaaactggattatttagtaccggattttatttgttataattcattgatttattggatagcaattaagggcccatctggattgaaaaaattgtttttcagaaaactcttttttatttaaagattaaaactatttaaaacatacttcaaaaagttatcttgggtggttgccaaacacccttccaactattactagttcgttgaagaatctccgtgtagtcttttagttttcagttgtgaacatgaaacatatcttagggaaaatatgtcaaggtatcacatctatttgacgaattttaaggcttttgtgtcatagaaatctgttgtttagttttgaccatttggagccttcgacccaattattgtttccagattttgttcttttttggtcaaatgatatgatttttggtttgatgatacttgaattactgaaatttatatgtacagttcatgaactgcagttcttgtcttgcagttc

SEQ ID NO: 63680 - DNA, 692 bp, Cucumis sativus
  Intron number 2 from transcript Cucsa.174140.1 (locus Cucs a.174140) derived from phytozome v7.0 (chr-ID scaffold0121 9; pos 99355 to 100046 reverse strand)
gttttggtacagttttgttctaaacaatatatacttaaatagtagtagtattattttgtgttgggatggaccataccttcagatggtcacatattttatgttttatcattcatgcaagttacatgcgagcctggtgtcacttagatgggaacattgttgatcttacacttttcttttaatcgttgattcttgactgctttattttggttttttttaattccctaaggctgatcttacttgtgaaatatcctgaatctcatataatgtccagtgtgttatcctagaattctgagttactttcatgcattagggttttgtttatattacttttggttagttatagtgacatctctgtttttgttgatatatgttagattaaactctcacatcttacttcaggcttcttagggctgaagaaagtttaatatggtataagtaaaggctgagtactaatcaattttctttctgagaaaaatcccataccacttttctttggtctctttggtttcaatcatgtatgttgttgcgatgcaactgacctgtgaagtgtttccactcatgctttttgtggttctcaagtgtttccattcatctaaaagaagcattgttaaactttaatttctctgtatttctaatgaattatccttgttaggtcaggtagtggagaagaacaaggagttagaagcaatttg

SEQ ID NO: 63681 - DNA, 725 bp, Cucumis sativus
  Intron number 1 from transcript Cucsa.280890.1 (locus Cucs a.280890) derived from phytozome v7.0 (chr-ID scaffold0263 3; pos 848340 to 849064)
gtgctgttgttttcttcttttcatttcttaaagaggtaagaggatgactttttagatttaatgcatttgtattcactttaccttggtgggtttttcttttcaggtaataaatcaaatggggttttgttgatgtggtgttcttactctttcctcactgttgaagcttggttgggcttatttattttttgttttcagattttgaatttgatgtctttaggtgtttattgagcttcacttttcactttttggaaaatatctttagctttcaatgggtggatttaactgaaagatctatcgaagaagcagtttaactgtgatcggtagttgcctttttcggaatttaagcttacagatcgaggagttttaatttcagagttcctgggttaaagcagagtctttctgtctatataattgatttgaaacaactctatttctttctgtgttagcttaggatgtttcttaattgaggcaacctttgggtgttaacttgtcaatggtgacctactaaccagactcgatactgcatcttaatcttagagatggtcccctccattttgctcgtcagatgggtgttcacgtgggaccttattaaagtttgattagaattattagttttttttctttctaaaaagtgatcttttttttatctcaatgttgatagccatagccatagctatcccacctgccaatgctcagtctgccattatgcataaattttcaggaag

SEQ ID NO: 63682 - DNA, 417 bp, Cucumis sativus
  Intron number 2 from transcript Cucsa.167460.2 (locus Cucs a.167460) derived from phytozome v7.0 (chr-ID scaffold0115 4; pos 799140 to 799556 reverse strand)
tgaccaacgaaaccaccattaaggtttcactctgtttcttaaacatggttttacttttatctttcacagtagatcacattggtttggttggcttggttgcttacctttttattgaagatagaagttttggttgaagttatatcaaattctatacttgtttaatcttctaatgatttaagctagtttttggttttggtgcatctgggattttacagattgatagaagcaggttttttctgaaccccaagtaaaagtagaatactctcacaagttttaagcgttgaattaggttgtgaaatctactttataatgaagaaattttttctttttactgtgcattttgtatacgatttttattatttgtttgtcaatgttacaatgtatttcaggcatctgcaaagtctatagaagaaagat

SEQ ID NO: 63683 - DNA, 889 bp, Cucumis sativus
  Intron number 1 from transcript Cucsa.281580.1 (locus Cucs a.281580) derived from phytozome v7.0 (chr-ID scaffold0263 9; pos 298662 to 299550)
ctagcagaggtaaatatgtttacacctttttatacaggcttatagtggaagataaagtaaacatttttccccttcttgttgccaatatcactcttaagaggagcttcttttggcaagttcagagtaatcctctataaaaagttctaaatgtatgtttgattaaacaatagttacagttcagaattagtcatgcacagtgcattggtctgtgtgattctcattatccacctccaaacacgatatatgctgcagttcgaataaaaaatgttaccttttagtagaatattactgaaaatcacttctgcgtggcaatgacttgctagatgaatagaaaattgatagggatcgttactgaaagtgaggttattagaaaataatactaaagaaaggaaaataataatcttgccaagaggcttgggttcttctaaaagtaacaaagtctgcctgcctacttttcacctcttggtatttatcatctgttgtgttgagaactcgttaggtaaggatgaatgtgcccttcctaatattttcttacccatattcctaacaaaagtctctaacctgtttatcctattatctaattatcagaaacaaatatttaacctttctacctctccttttggaattttgtatccttgtgcattgctttttttttttttttttttcctattttcttaatgagaagtgtcatatcttcttttaaaactgcttaaacactgtatggtcattgtataatgtccactttttgcaaatggtgctatttgcgttaattattgaaaaaggattaaaatttcaattttgttaaggcaagattaaaatttcactagtaactgagtatctgtttcattttacagttactggagttgagtggaatactcacagttttctt

SEQ ID NO: 63684 - DNA, 281 bp, Cucumis sativus
  Intron number 1 from transcript Cucsa.253470.4 (locus Cucs a.253470) derived from phytozome v7.0 (chr-ID scaffold0222 9; pos 2072938 to 2073218)
cgcataatcttcggcctgtttttctccttttccaagtttgttcaattttgtaattcatttcctcttgataattcttctttatttcaattaattttccttattctggaacgtggttctgattttgtgagttgaattcaattgctgcaatttgacgctcgaatttcggttgctctttgcttggtgtcataggtgttggtgattgtccttttgatcgccttgcactgtctttccgtgttttgaatttttcttttgttattatgtttcttttagttttctggact

SEQ ID NO: 63685 - DNA, 203 bp, Cucumis sativus
  Intron number 2 from transcript Cucsa.253470.4 (locus Cucs a.253470) derived from phytozome v7.0 (chr-ID scaffold0222 9; pos 2073251 to 2073453)
ttttgcttgcctgatcgttttttccgtcggaaggggtaatatgttaaacttgtttgttttttcttggttgttttgattattaaatgttgtaacatagtgtgcatgttagttcatttatttttgttcggtgaaacttggaggtcgtctaatattggccttgaactcttcaaattcagagctcagattgaaccacaagcacagcg

SEQ ID NO: 63686 - DNA, 580 bp, Cucumis sativus
  Intron number 1 from transcript Cucsa.239770.1 (locus Cucs a.239770) derived from phytozome v7.0 (chr-ID scaffold0204 6; pos 654655 to 655234)
aaaacgcccacaatttctctgcaacattgctttgagtgagtttctcttacctcgtggaatattctatatgttatacatttttacgtgctcgtttgctacatatgttgatcccttgcgttttccattcgaactctcaacattcacacaattaagcattcctccataactgatttaggaatttacttgcaaaatatagttatatttcagggacgaagaatgtattttagcctttgaatcataattgtgatcgactggatttcattgctcttcaatcaatttcatggaaaacttggaaaagttttggaagggcattggaaaactgggttaaaagacgatcaatacgatgtcaatgaattttattttattcatttaaatatttttcggttatgaagcgagtttctcaaaactttactatgtatcttcatatgcattaagaaattaaaagcatgtaataaaaagattatctacttctgtaaactttttgtaatgtcagtgcatttgaacttttatgcgaccctacctgatagtttagttttttctgttttcagttacgtgctgttcccgctactgctgctattgg

SEQ ID NO: 63687 - DNA, 606 bp, Cucumis sativus
  Intron number 2 from transcript Cucsa.198020.1 (locus Cucs a.198020) derived from phytozome v7.0 (chr-ID scaffold0135 7; pos 1193191 to 1193796)
cagctctcacaatatttgtggggaggaaaccggtaagcatgaatttatattttatctgttgtttgtggtctttttgtagcctgcgatgatatctttaggcatactactttgctgtatgtgtattagtacatgacaagaagtcaatctaatatttgtaactattcgatttagtattttctcaatcacatttgttctaatttttcaccatctcatccgattgttggcgtttctactatttagtatttatacatatttatgtataaatattagttgacaatatttggtttttatgtccgttgttctttccttacttttaacaggtctcttaagttgcatagtttaagatatagctcaataaatacttttttattctttactaattaagaattacattctcgtctacctactaatggacatcaattctgttattgttcttatattattattgtttgagagtagttttcagtttggtatttcttgtctattattttgttggtcttttggaaggaaatgcagaagggatgaaagactctgaaagagcacaatttcagctactttttgaacttcccatcttttttctttgacttatttcccactatttttcag

SEQ ID NO: 63688 - DNA, 355 bp, Cucumis sativus
  Intron number 1 from transcript Cucsa.170750.1 (locus Cucs a.170750) derived from phytozome v7.0 (chr-ID scaffold0117 9; pos 83215 to 83569 reverse strand)
aaaacacacaaggtccctccaccactctctcttctctatatttttgtatggttaaattctggttggattctgattaatttgaagctaatttcagtcttctagatagtttgaacatattttgttgtttatttcaaacgaatttgtattataatacgagaatggcatgttgaattttaaaccctttaaatcacccaattctagacgcttactgaatgagctaatagcattatgaattgttgaacaatacgcctctgtcttctctgtttttactgggattttccctgttcattttgattttattgttttgtgttactgtttaggcttcggcgaagcgattcagagtaacgggtcgggg

SEQ ID NO: 63689 - DNA, 1022 bp, Cucumis sativus
  Intron number 5 from transcript Cucsa.274640.3 (locus Cucs a.274640) derived from phytozome v7.0 (chr-ID scaffold0254 1; pos 4175 to 5196)
attggccataggtagaattgcgtttcttgtggggtatttggttctagctacttttttgaaattagattctgttgaaaataggcaaactaacttattttcctttatggtttattcttttttttccatccaaacggtattaacgaatgtaatagggcatttaaatgataggctattagggcttttgttggctaaatttctctctgtgagttcctcttataatcatgcgctggattgtcttaagatatgacaataacagacgtgggtttgtgatgactttttgaggtgaagccttttttctataaatacttgtgagagaagcacaaattaagtgtttttaaaggcatcttaatgtattgagtattttcaaacttactctttgactatttaaccaaaaatatgaaatattgaagtatgctttaaaattcttcttcttttagaaaagggtagagagaggctgtagaaactaaattgcatggtcattttcatagcatatgagatgggaatgttaacttatatacaacaatagaaacttttcttctccacgtaaaggaaagttgtggaatctaaaaagtgatgtatggtctgttcacattttaagatggtccaatgtaagactcgattggtaaagctgcaagttatattatgttgtttaaattcttgaaaataagttatacgagtttaaggttctctgttttacaatcataatgatacagagattttctagattgttttctatgtaaataggaagtaaatttagaccggactttctgactgattatcatacgttttgtattcttctcatatacagaaagtagttttgttatgtagttgttatagcagttttctccctgaaatgcataatcccacgttaatcttccatcatccttttatgtttgtgcagttttaatctcgatgcattatatgactggtttgatatcgcttctttgtttatgatggaactaatctcattgatttttgcttgattagcgcaacttccaacagcattttagatcgtgcaattg

SEQ ID NO: 63690 - DNA, 656 bp, Cucumis sativus
  Intron number 2 from transcript Cucsa.277760.2 (locus Cucs a.277760) derived from phytozome v7.0 (chr-ID scaffold0260 4; pos 357604 to 358259 reverse strand)
gctgtcaccgttaggtatctccttctcccatgctccacttcttatttctgatttattggttcttgttttagttctattttattttgggtttatttttctgacgtgagtttggatgaaaaatcagtttgaacacttgcagttagttaagtaactaattctcagcatttgaacttccagttttgttaattgagccctaaattttttcaaaactacaaaattcaaaattactcaccaattaagtacttaattatacagatatcgacaaataacataataagaaagcaaccaaaccacaaaaattcccaaacccaacttcggaaaggtaagaaaccatgctacaaaataaagcaggtgaaaagacgctccagctataacttaaatgatgaaatctaagttcatatttatcaacaacctaaagggaagaaatgaaaactaaactgagggaactaattttgaataattttaataaaattgaaggtataaggttaaaatgagtttattgagcttaattcttatccagcttagcatgagttaattacagggataaaaatgagttctccggcgaattctttaggcttcttattcatataactcttttgtcatgcatatgattgatgacaggaaagtcatcaaagagaaggcttctggaggaagag

SEQ ID NO: 63691 - DNA, 1031 bp, Cucumis sativus
  Intron number 1 from transcript Cucsa.136020.1 (locus Cucs a.136020) derived from phytozome v7.0 (chr-ID scaffold0104 4; pos 781805 to 782835)
ctttagctcctttgcttcaagaagattttgattgatccatccatccatccatcacttcatatttcaatttcaggttccatttttatttccttctttcttttacttcacaaactaaaactctccttcattccaacatatatgatagagacacgttaatgttctttttaattcattcgcaccattgcaccaaacaatttcattatcaatcaatcaattatttaattcattttaaataaagcatcaaattaaataaagctgttaattaaaagtagaattttattaccactatttttatatatatttcttttttatatactgtacccaaattttttaaaacaacacactactacaatagtaggtacatatccatatcctttaatatttaacatgagcctaaatttatttacctcccttcatataatcctcttaatcaataaattaattctttcttaattcaacaatatatataaatatacaaatggggttccacataaaaccttattttgaaacaaatcattcatatattcgtttttctcctcttacctttaataatatatcattcatatctagtacaaatgaagatatactgttgttatcattattatttttatttctaacaatagtacaatcatggaagagtcatgagtttattaaaaaaaaaactcaattcattcatggtggtaactaatcacctatctaactggatgtgtacaaactatttttcttttgtatatttttatgcatttaactcaattatccaatcataataattaccaactataaattattcttacttttttagtgaaacatgttaattctatgttggtgtaaatgataaaagagatgcataaagtttgatacatcattcaaacggtacaagtatccatatataaaaaactgtagggtaaagatttagatatataactttacaatccacaatacatgacttaatctagctgtgtttatatataaacgatgttgatgttgaatatgaaactcacctcatatatgaatgattttttgcaggtaag

SEQ ID NO: 63692 - DNA, 710 bp, Cucumis sativus
  Intron number 2 from transcript Cucsa.163030.2 (locus Cucs a.163030) derived from phytozome v7.0 (chr-ID scaffold0114 4; pos 2486737 to 2487446)
ggaaagagtggatttcagtgtcccgacgttcgattgtaggtacctttttgtttggtttttatatatttttgttcatcaaaaccctaggtccaaaaacgcgggttttcgaccgatagatgagatgggtatatctttctcttaatgtttttagtggttctgctttcttttcacaatttgatcgtacttggagagtttttcattcaattggttggttcttgacggttgaaatcgatcgaagtgaagcttaattaaggaatttcttattttgtgttttttttcttttaaagagaccatgttcgtcatagttgctgattttttttttttgttgagaagttgcctgtacattgctcaatctctatgaaccgaggatgagactgaaggagcattttttttaaaaaaataaaaataaataaatcactgttcttctctaacgattcttcttctcttttctaccacttcattttctactttttccacccgaattttgaaaaacggagaagatattagtcatttgatatgattattgtggtttaaggcaaagtgatacccagtttttattagctttaaatgctttcacgatgatatgtgtgtttgtaattagatactggaatttctgttttttttgtgaaaatcagtttacattgttcttatagggcttcatttttgtaggatcaggcttgtcgctgttgccacacagaagttcgttgcgg

SEQ ID NO: 63693 - DNA, 843 bp, Cucumis sativus
  Intron number 1 from transcript Cucsa.157950.3 (locus Cucs a.157950) derived from phytozome v7.0 (chr-ID scaffold0114 2; pos 142419 to 143261)
actgctcctctctgggtactgtcaatgaacttattactgtttctatttacaaatttgtttttctggtgttggtttatgtgttagtgatgtctttttaacttgactgtgatggatcttatctgctttttgggtgtgcaattatgaaagttttatatcatgatgttggtcatttcagagtccactggagaagctgattgattttttttgttttattttattagagatgaccgtggatgacgaatccaatttattattttttttataaagttttgttttgtattttgtatattttggggtcaaattcttatctaggctatattgaggctaagttttcttgtgtacattaatctgcattactatttccatgaggtctctcagtgatgcaaatgacccttagattctgatgattagctaccaaaataagaaaatttggtctggcttgtctgagctagtgcagtgcaaactgcaaacacaatgagcaaggagaagacagttgagagcaaagtgcaaaaaaatagcttaaacattatacaaacttaagcaactttttgaattaatccttaatctcatttgagaacatagggttgtattcatataagctacataatcattttattctaaaaatatgaggcttatatatatataaagaagcctaactggttagatggaactacgaggcttttaattaaaacaggaaatgacattttggggaatagaaaccgtgaccattttgaacaaaactttaaagtttgtaattggcatttcaccattcatttctattaattatagtaatctgtgtccttagttcccttcttttttgttgctagattgttttggcaggac

SEQ ID NO: 63694 - DNA, 862 bp, Cucumis sativus
  Intron number 2 from transcript Cucsa.285460.1 (locus Cucs a.285460) derived from phytozome v7.0 (chr-ID scaffold0265 3; pos 1830855 to 1831716)
ggactatcgctattgcttccattttttcctttctggtacctgaactaaatcactccccccttttttaatggctcttcttcttcgtatactaacacagcaaattctagaaacgggttcacgtggatttttagccgttaaattaaacagattattgagatttctcgtgttcttgcgtcctttttctctctctactcgttctcgttctgcaacacaaattaaaaagagggagagtgaagaagagaactgaagaacaagtcgtccggagttgcttgtgtgaacttgctagagcaggttatgtggtttcgtccagaagaaaaacaccacataaaaagagaagaattaagagaaaaatgacaatgattaggtgcttttcattacacaagattaagtacacaaataaaattaccctattttgataattttatttgtatgtgatgaagagatgaggagtagtagaaagcacctaagctttttatataaaagataaatatattttgagaagtgatgcagtattactcgttaagaagagacaaaagcaaaagcacttaagtccattgttggaaaagagttaaaagcaatttgtggcagctttaaattgggtgtagcaagggctacacaaataaacgactgaatgtagcccaattacacctaattgtctttttttctaaaagtgaaatgaggacagtttaatataattgttttgggtgaggtcaaaattcttaaattttaaaaagcaaaaaatcatttgggcctgaaaattgggttttctttaatcaattctctctaatttaattcttttgaaatttctcaaaaaaaaatttacttaatttactgaaccaattatgtaaccacaacacagggg

SEQ ID NO: 63695 - DNA, 771 bp, Cucumis sativus
  Intron number 1 from transcript Cucsa.301710.1 (locus Cucs a.301710) derived from phytozome v7.0 (chr-ID scaffold0295 1; pos 15391 to 16161 reverse strand)
gaggtatgctatttagtgtgattgttgccactgttcgatttaatggctctttttccgtcttatatgctcaatttcaattttgtatttaggattgagtttggtaaccataaattaaaaacagcaacaaaaaatgaaagggttattagacagactctaattagtttcatggaagtagtttatcaagtggaatcaagttctaagaaagggttaaaatactgattttcgtcaaaatatttctaaaaggaaaaaaattatatttatttagattaaccgttgtttttaatagaaagtttatgaatatagttattggtatatttctattcatattagactaaatagataacatattgtcttattagtatttgtaaaagatgttagagatattcatggttatttaatatcaatattgaattctttgaacgggtacagtatcatatattcatggttggcattttgtgaggtaaacatgttagtttttattgttttcataatctagatgatttgaaattagcaaaatcaaatttagatcatctgtcaaaataaaaccaaaactctcttgctttatagacgatttatcaattgaaagctttgatgaacatatttacagttctttaaatttatatacagaacagaacattatgggcaggtgatatttctgctcttccataaactaactcttcattctatgagcaggtttcagttaagcaatgtttctgataatagtgagtttgaaaaggttttctcagggcaccaagagcttttggatagtgg

SEQ ID NO: 63696 - DNA, 670 bp, Cucumis sativus
  Intron number 1 from transcript Cucsa.228260.1 (locus Cucs a.228260) derived from phytozome v7.0 (chr-ID scaffold0193 3; pos 220111 to 220780)
ttccattcccggcgacagtcttcaagacaattattgtattctctctcttccctttctcctgcaatggctggccctttttctcttcagttttttttgtctctttcttatctttgcatgaaggtgtctgtggtttctagggtatttcatagttttcatgcatctctttagagctcagtatgttttgatcagatttttctcatctcgggaatgcttctttgtgttgttctgagaatcctctcccgttctacgagctgcatggctttcgattattggatcattgtgcttgaatgtctttgtttgtcgggtttcatttctataccattgtattaaggctccgattacggactaccttttcctgttcttcgctggcatttaaactggaaatcaaagatgcattttgctctgacatttatttctcgatttcgtcaactctaaaacccttatccatctagcgttttgtaacaccagaatgtgttcaggatatgggatgtttattgttctttgtttattttccctgtctaatttgatatctgcctcgtcttattatggctggaggagatgcttcactcgaggatcgtgtagtttcaatatgtaatttgctccctctacttttgtaaatttttatatgattgagttatttatatttatataacgaacaggttacctaaaa

SEQ ID NO: 63697 - DNA, 649 bp, Cucumis sativus
  Intron number 1 from transcript Cucsa.195170.1 (locus Cucs a.195170) derived from phytozome v7.0 (chr-ID scaffold0134 9; pos 127342 to 127990)
cttcttcttcttcttattatttttattggggggatgttaatggaccctgagttttttttttttgcagtaaattagtgatttagtggatatcaatattcttttagtaaactttgttcttgatcgagtaagaacgaaatataatgaatagggaaaggtgatgaatacgtatggaatacttgtataattcttatgcacactcaaagcaattgacagcaatgatgggtatgtttttggataagaatacacaaagaccacgtagacaatcaatgaggcttacctagattgcttgaaattgttgttggtaatgaaagaatttgagtaactgttgcaattaatggagctaactattagatgggtcatgttatctcttaattgatgtaggaagcaatatctgttcatttgactttattatcaagaatgctcacaaactgatttaccatatttattagactaagtttttgattattgcattaccctctgcacccactacaattatttagatctgtttgattacatttttggcttttctttttccttctcttctctttaaaacagggggaagtaaagtaccagattttggaagaacagactaatattataagattttccttggaaaattcagggtgttgaaggccccacttcttgccgt

SEQ ID NO: 63698 - DNA, 1032 bp, Cucumis sativus
  Intron number 1 from transcript Cucsa.308900.1 (locus Cucs a.308900) derived from phytozome v7.0 (chr-ID scaffold0297 8; pos 868537 to 869568 reverse strand)
ggaagttttcacatccggcaatcgtgtggtcggtatgattattccttctcccattctcattatatctctccttttatggagaagtttttttttttgtcttagttcttggtttctaaaacattgcattttagtttagttttgggtttgattttaattcatactatcacaaaaaccttaacgtcattttgcctttgaaaacaaaaaatgtcacattttaaagtttagagattaaattaaaatcaaacttaaaattttaaatcgaaagaaatgtgatatttaatcacattgataataaacataaaaattagggactttttagctcaatatgtctatgacttattaaacacaattttaagtttaggttttataaccaaagtgaaaataaactattacttcgttgtaaagtgagattctattatcatcccaaaatgtaggtttttaaatttggttcatctcgtttgttaatattttttttttttaactttgttgattttcatatagttatttattctttcgatttgtttagagatcataaacattttttatcgattaaatagttaattaatttctcatgaaaaaaaatccttcatcaaatatgtttgtttagtacattaatcaaccctatatataagaattcaaaaaaaatatatgtttgtttgtttcaagtgtgtatgtgtaatagttttttttgttaaaaaatcaatgaagaaaataaattggtgagaaacgaagatgtgaatgtattctccgtctccgttcccgtgaagctctagctcggaaaaatagacttatatgtactgtaactccgctgtccatgaagggttactcattagaattctttgtcaaacagttttcgatgatcaaaattcatgaagtattattactaccaaacaaattgcagtttcaactaacaataataaacaataaagtaataagtaacaattaagaatgcagcttttctattgtatatatatgatttataaaaagaattaattttgttttaatggtaattcatttcatctactttcagtt

SEQ ID NO: 63699 - DNA, 282 bp, Cucumis sativus
  Intron number 2 from transcript Cucsa.181110.3 (locus Cucs a.181110) derived from phytozome v7.0 (chr-ID scaffold0123 9; pos 127071 to 127352)
agaaaaatgtaagtttggagtatagttagtgttcattttctgtgaacttgttctacttttttttcttctaatcattgctgtctatgtgcttcatgaaatgccaagctgaatcttcttgatttttcttttgttctttaacttgctttcatcttcaatttcatttgtatcccaattatttgttttctttccaagatgatcgtggtttctgagtgaacttttgttgttttgatttctgatccgaatttttcagacgaggagccatagttctgtggaaaggaaaaa

SEQ ID NO: 63700 - DNA, 269 bp, Cucumis sativus
  Intron number 1 from transcript Cucsa.259210.2 (locus Cucs a.259210) derived from phytozome v7.0 (chr-ID scaffold0222 9; pos 5810823 to 5811091)
caaatccgaccgatcgctattctctctttctcccggtaccctctcaaattaagcaactctgattttttttgtattttcgtttgtttatgctttgtgttttgattcacaccatgattctgcattgtgattatgttttcttaggattcttctttttcctgtttgatgtgatcaatttccatctgtttttgtatacaaataatatggaatgggtaggattgtgattacaacttgagaactaaaagcatccagttttttttttttacacagaa

SEQ ID NO: 63701 - DNA, 586 bp, Cucumis sativus
  Intron number 2 from transcript Cucsa.259210.2 (locus Cucs a.259210) derived from phytozome v7.0 (chr-ID scaffold0222 9; pos 5811215 to 5811800)
gagattgaggcgcttgtccaaacgatccaagcaaagtaagaaacacaaatttatgaaagagtttttatgtacttattgtggaacttcaaacatccagttgttagatatatcgatttctgattcatgttttactcaaaagtgcaattgaacttgtaagttataactttgttaagtttgaccttcaacttgtaagttatatattacttcagaagtaaaatgtttttattctttacagatttgtgtttaaggcgtttatgacattttttttatggggttttgtttcgtgggtgtattgtgagtttgttttaagactaaatttcaatgttcagtccaaggtttcggctttctttttttactttattttgtgcttggattttggagtttaagtggctgagtttgtgtatttgcctttctctctagattttgggtgttctgatgttggattttataaggtttaccaatcggttttaggccaacagtttagtttgattttgagatagtctacttactcaaattcaggatccatttcaatgaaattatccccatgtacatgaagaaaaccttgtgttgttttctgattgcaggg

SEQ ID NO: 63702 - DNA, 335 bp, Cucumis sativus
  Intron number 4 from transcript Cucsa.196790.1 (locus Cucs a.196790) derived from phytozome v7.0 (chr-ID scaffold0135 7; pos 353160 to 353494 reverse strand)
aggtgattttctcacctgcttgttttattttaatcaaaatttatgagatgaggttttatactgtgggtattatcttgtttctcttggtcaaccattttttcgacttctcttctcctccctctaacctcacctttctgtaataaaactttgattaggcatatttttctttatatttcaagtgcattatgatcacttaaaaattgaaaaatgaaaataaagtactttcagtgtctagtatttgtaagttaaggcattggtgtgttcttctgtgcacaatcatgttcttacttttcttttttgtaacggatagatccccaacggagctacctttgtca

SEQ ID NO: 63703 - DNA, 931 bp, Cucumis sativus
  Intron number 1 from transcript Cucsa.196790.1 (locus Cucs a.196790) derived from phytozome v7.0 (chr-ID scaffold0135 7; pos 354337 to 355267 reverse strand)
tggagtccaacattgtttatagtccactgatctcagtatgttccctagagtataaaatatttggtaaatagtaggttaaaatgtactcgtagtctttaactttcatcaaagtaacaattttgtcttaaaactttaattcaaaacgatttactccatgtaatttcaatttgtaacaatttagttcttaaactttgacatttaataatttagtctctaaaccttgaaatttatgaagatctagttcctatcatgaaaaatatcaataaaatttaatttgattcttccatatatagatcaataaattgatcaaggacccaacgtgcttataaactagaaagactaaatcgttaaatgttaattgttttttccaagtagggattaaattatgcttttagcggatgtggattttatatttgaaactgtaaaatgcataattatagtaaaaatgataatttaacagcacacggtgtttcatcacttcatgttataaactcatttatctttatctatgtaaactatagtatagtataaattatatgatattgtaaaacaataattttacaaaacttttgaggtgctatatattcataatttaattaatactaatttataatcaacctaagatgatttataaatatgttatcaaaacatatttaaaagtgagaatggatttctaaatcttctattgaacacgtgaaatataaaatacaactatgatttcattgttttcaaatttagtttttaagattgcctaccaaataggttaatttgcttgtggagaagttctttatagccatatgtttctcatcttatttgagtcctcttatgcacaactacgaaataatacgaagttaatttttaatacgatattgcttgtgtggtattacttttgacatgaagcatggaacaacccttctctgttttgctcagg

SEQ ID NO: 63704 - DNA, 807 bp, Cucumis sativus
  Intron number 4 from transcript Cucsa.248470.3 (locus Cucs a.248470) derived from phytozome v7.0 (chr-ID scaffold0220 7; pos 309240 to 310046 reverse strand)
accgttgcttcccttatccacggacaggtactatagtaaaattcaattaatacactttactttcattactttaatattttacaattgcaatttcttttctcatgccttcctgcttgcttctaaaacaatccaaacaaagcttaatttatttattgaaaacgtaatccaatggtaatccgaaaagtgggtcccattttattgtttattagtctaacgtttctctaactataatgaaagatggatctcacaactaaatctataatcaacaactccaattcattgtaaagactagagtgatcaatttgattgtctatgaaaatcatttgagactttgttttcgggatacttttcaacaattttctaatttttaccaccaattattattatcatcatagatactactactatatagtatgggaattgtgaatttgtcacacttattattatcgttacaagtactattaccaattgacctgaaagagtaaaattaactataagaaaacaaagatatcaaaccatacaaccttaatcgtcctcaaattatgtttccaaaattctaagtgcacttccaattgatagattatgattacactaattttaattacatattaataaacatgactctaattgttttttactatagaagatctgaatttaatccaaataaggttttacctgatttgggtttcatggaaatagaaagaagaagaagaatgtttgaatcaacagaggttggtaatccctttttttttttttttgtgtgtgtgtgaaggccgagggagtgaagcactcaggacctgctaaaat

SEQ ID NO: 63705 - DNA, 688 bp, Cucumis sativus
  Intron number 3 from transcript Cucsa.213800.1 (locus Cucs a.213800) derived from phytozome v7.0 (chr-ID scaffold0154 3; pos 1728306 to 1728993)
gttgaaggcttgaaggtttctaatggtttacttgtttggattgcatggccatgcatagacatagttacaacttttgagaacatcatatgtgtctgacgattatttttgtgcaactattttctatttcacttctctgtgattataatataattaaagtataacctcatatagaaaggatgttcggtacaattatagcatggggaacagataatagtaagtgaatttaaattaatatttagctactctcccgttgacaaatttcatgtgattgttgatttaagttgtcactttttatgtattggaccaatatgacatgttcctgacaatgcaccgaaggagcctccactgttcttttgctgcaagcattggctaattcatgtagatcttattttctcctctgttttattaattattattattattatgaggaaggatgagtaattcaaattgaagatagtaattcatacttttatttgttagttcttttctaaattgtcaggtatcattcatactgtctggcagtcacatcccctacttgtgtgttcgatgtgccatttgttccatgagtttattgctgtgttgtttcttttgtttccaaaatttatgcaacttatcgaaacaatccgggtattacctaaacttttgttttctccatcatcacagatacttgaaaaggttaaattagcat

SEQ ID NO: 63706 - DNA, 359 bp, Cucumis sativus
  Intron number 1 from transcript Cucsa.146740.1 (locus Cucs a.146740) derived from phytozome v7.0 (chr-ID scaffold0110 0; pos 117915 to 118273 reverse strand)
acgtttgccctctctttctttctcttgattccaaggtgttttactttagactaatctcatggttaaaagggatgagctcttaatttactgtgtgtttatgataatttcatattcttgattgtggtatggtatttcttctaaattttgatttcgtgttctacttgtacattctgaaatctgtatgggaattgcaactgtacatggttaggacttagaaggaaagaggaaggggagaaaagaaatggttattacttataaataccacggagcccttcttcttaatcttttcatcttgctgggaccgccatgttttcctgtactgtttgttaatacatatcttttggtttttcgtcagtcga

SEQ ID NO: 63707 - DNA, 753 bp, Cucumis sativus
  Intron number 1 from transcript Cucsa.165870.1 (locus Cucs a.165870) derived from phytozome v7.0 (chr-ID scaffold0115 3; pos 1165536 to 1166288)
gcctcgaataatattgtcacttttgatcacaagaggtaatgtctttcattcattcttgtaaaatcttgtatcggttcttgtttctccacgtgttccgaaaccaagggaatcaaacaatcaatctgtcgagttatctgttcgtagggtttttcctagatcgtatatgtctgatctaacggatttcggttgccctgacagcattacacgcgtttatgttgttagttactaccgtcggatattccgatcgtatcgggttagctggccttatggtttgatttgacgagcattagttttggttggttttgaaatttggcttgtgtttttttttcttttgagttgtgaagaaatgtgtgccttctgtcttttgtttgagtagttgtgcttcgaacagtgggattggtttggtaattaatgtctgtatcgggattcaatatacgtaggcgtgtaattgaaaagtgaaagtttgatttgttagtatcgaacgctatggaaagtgaaattcagcattcagaaatcaaaatatgttattgtctagtctaaattgcccgtcgttggaggatgatggcaggtaacttagactgggttagtcttggaagttcacctttgcggtatctgcttctattttatgctagcctcagtttggaattgtttcaattttgtaaattcatcaggaaattggttgtttggtgtttcttttatcgaatgtactgacgttttttgtgcattgaaaaattggttaatattgacacaggg

SEQ ID NO: 63708 - DNA, 560 bp, Cucumis sativus
  Intron number 3 from transcript Cucsa.273770.1 (locus Cucs a.273770) derived from phytozome v7.0 (chr-ID scaffold0251 1; pos 804241 to 804800 reverse strand)
aaggtaatctcgaaagtatgttgtggttgtaggagcgtcgaattcttttgacatatgaatgactataggaccaactatgtatttaagtgtagtttcgtctaagttttattggtatcgatctttataaatgacattcacagtgatgatcaactatgagattatcttttactgaatgaaaaagatgtcttatctttctttctaactttggtttcgtgtgtactgaatttagaaaacggttaaattttaatagtaatttcaggaaatacccttctgttttcttcattccctaagctgctaaactcgggaatgtgcttgcttagattttacttaacatggaatacattttatttagagacatatctgattatcgtttcactgtttttattgaaataatgttatatgtattccttcactttgggttccttttcttccgaccctttggcaaatctttgtcgttagtttagtccgtttctataagcttttattctatgtgtctatttgtactgacttcaaagtacttcgcaggaggtgttttcaaattggaattattcttacctgaa

SEQ ID NO: 63709 - DNA, 974 bp, Cucumis sativus
  Intron number 4 from transcript Cucsa.280150.1 (locus Cucs a.280150) derived from phytozome v7.0 (chr-ID scaffold0263 3; pos 45304 to 46277 reverse strand)
ctcatagcttattttgtaaggtaggttaatgatcattccttttaagaaaaaggaaatttacgttctgtttagcataaagttattttgagttattttactaaactttctttagcataaagttattttactaaactttctttagcataaagttattttgagttattttactaaactttctttgcacacgccaaaaagaacaaatgctatacgatgcaagttttcaaagcttcaagtctttattagatgaaagttatgatacacaattctcaaatacaaacaatttattggctgccataactgcaattaccgtaactttttatagtataaaggtaaatataggagcttaccagtcttttgtccttcattacaattttactgttcttactaaaggtataggagcttgctagtgttttgtcctccattataattttactattcttagtttagggattccttgttagcgtatatattaaactctaaggttcagaatgagtaaggagttgtcttattctggtatactaatatcataacataaccaacctaaccaactaaatagattattaactaactaaggacctgttcaattgactcggattaaaagttgtttctttctattctaacaacctatgcaataagcctctatattagatttctcccactccaaaaataactctacctcgagtattcaaatatatcagccacactgaaggtagcactaatcagaagggatgttgggagatccattcaatagggccttatctccaatcttttcaaggatcttaaaacttgtcacagttttcaaggttaaacttttttatcttctccgttggctgtcggggtagaagttacttctggctataatgcatcatttacggtaacacaaatttcttggttaatgatacattgagtagtaggtcttgtgtagctaattatggtctattgttctccagactctctcctcacttctgagtgta

SEQ ID NO: 63710 - DNA, 976 bp, Cucumis sativus
  Intron number 1 from transcript Cucsa.170810.1 (locus Cucs a.170810) derived from phytozome v7.0 (chr-ID scaffold0117 9; pos 131762 to 132737 reverse strand)
gaaagaagcttcttggcatttgttttggtcatcaggtcttgtatattattacatcatacttatgcatactacattacatattttatataataccatttataataagatcattcatttccaaaaacagtgatttattttgagggtgagatttgagttcaaatttctactaaaatattttttcccctctctgattaatataataatagttgacctaatgagcagagcatactcctttgtggtcgtcttcaatttcaaaaatgtgataaaactaaagtctagtttggtaaccttttaacattttatttttcttataaacattacttacatctttttttactaatatattaaaagaccaatctaatcttcgactcttgtttagtaacgataaggttattagttttgagtatccaaaagttaatcctataaacctcttttccacttttaaattttcttgctttgtatttgatatatatacttttgttcaattttttaaagaaaaattaccttttaaaaacttgtttttttttatggaaattgattaagagttcaactattctactttaacattgatacaattaaaagaaaatagtttgttttcaaaaaaacaaaaaacaaaaatagtaaccaaattaagcctaaataattagtttgaaaaacatgttttttctaaaaaaaaaaaaaaaaaaagactaaaaaataattagtttgaaatgagcttaattttcaaaaataaaagaccaaacaaatcaaagaattatcatcggaacctaagttgcaaaatttcttattggctgccattttaacgagtgtaaaactttgtattcttgtcgacatgctaggtctatgaataaaaaaaatacactaaaattgtagagtgcaacacgctgcaaacatacttaaaatattgtattgaaaggtcgagttttgtgtggtcatggcaggtattgtgtagggcattgggtgggaaagttgggaa

SEQ ID NO: 63711 - DNA, 1058 bp, Cucumis sativus
  Intron number 1 from transcript Cucsa.251700.6 (locus Cucs a.251700) derived from phytozome v7.0 (chr-ID scaffold0222 9; pos 699786 to 700843)
aggatcatcaggagattacagtcacaagacaggttttgtaaatctgtagctgtcctttattctgtgttgattttcatccattcttgataaattggtcatttttatttttacttacaattatatggtatgttattactttggcttgttaattttccattactattgtctaagtttagtagcgggatttgaaacagcgtcttgatagtttgttgcataagtgctgctgttcatattttcccattagagtttctcactaactacgtaagctgtgtggaaaattatagatattagtaatttgtacaaaatttgccgattaagtggataagacactaattgctattctaaatgttcatgattcgttttccacccattgttgtcgaactcaaaaagaaaagaaaaagtaatttgtacagtattcatggaaatgtataaacattcctggtcaatctaatatataacttgcactctgaaggcgtggttttaaactagttgatagttgggtctctctttttattttattttcttctgttagattagtttgtcgctgctgctgctatccactgtcatcttacggggctttgcttcacatacaatatcttagactcttccaagttttagattttctctttgagtttatccatttgcattctgattagaaggcacattccaatgcttttaacaattcaaaatcttaggaagcattagacttggacatcagaatcttgaaagtttaaattgaactctatttcatgtgatatttttttaagggaatggaagttccttttttgacaatcgtgtgtcaggtgagtaacattttcacgttttgggttagaggatagcatgcaccataccgtagctcaaagagaaaaatgtgtttgctatcctctacaccatgacatacatctttagtttttgtgttaatagaaagtaaagagaaaaacgtgaaattttcctcaatcaatggatgttcttttgtcaaattatcaaatttgatgtttgaagctaatttagaaaattgtacagattgtggttggagggaggaacaagtatttgatcaa

SEQ ID NO: 63712 - DNA, 944 bp, Cucumis sativus
  Intron number 1 from transcript Cucsa.302880.2 (locus Cucs a.302880) derived from phytozome v7.0 (chr-ID scaffold0295 1; pos 937403 to 938346)
ttccgccaagggccttgaaaacacagattacctctgtaagttcccgctcccgatcgagatccatcctttccaatttccctctattttgcgatcttttatgtgttggttgatattttagaaagtgatggttgaaatgagattcatagaccaaaaggtgtgttgggtcgcctttgtgtttgatattgaacttttgctgtcctgaatctatttgatctgcacgtgatcaagtctttgaggaaatgtattttgagggttaagtttgtaaatagtgagaaaacagagtcgttttatgggaattcttattgggtactagtttcttgtgtagtacttaatgttgtggtggatattctttgcttatttggatcctggactgatctgattcttctggttttctgttaaaaaaaaaaaaggacattgctggcagatctttctgatgttttatttaccaaaagtatctttcttttctcctttttaccctgtttctagaatctatgaacaaattgtgagttgggaaattcattaggcgatcagattgaaaagacgttgaaatgtcttttaagttactgccacatcaaaataacttggttgttgaagcatctacttttttttaaattggaattacaaatcttcacctcaaatttgttgtactaaagaaatcatttttagtgagttctttttcttttttttctttgaaataaattaaaattttcaaaggtgggggtgctatgcatatgctatatatttgaaagtcatgaattgtatttgcattattccctatcctttagatcttgtgtagtgtatacattcatgatgtcgcagatcatagttgatatatatttttgttaaatttagaggtggtcttgtattaaaacggtattccccatcccttaattttaaggtagttatttgtatttacaatgtcttcttggatttgagcaggtaac

SEQ ID NO: 63713 - DNA, 990 bp, Cucumis sativus
  Intron number 1 from transcript Cucsa.253700.1 (locus Cucs a.253700) derived from phytozome v7.0 (chr-ID scaffold0222 9; pos 2246659 to 2247648)
ttgcggtttgtggttcttttcaattcggatcttgtgtaagtttaaactcaaccctaaattcgaatttcatgttcttttgattttctttgagtttttacatgctttcattttagtttctcaaattgttggttttgcttcatttagagctcgatttgcgtacgaattgaaaccttaaattctaaattcttttctctttctttgtttctttttacattttagttttaagcttgtctatgtatcacgagtatagctttatatatatataaagaaaaaagattacaaacttgttttgaaactgtatccaataacttatgtctattagttattagaagacaaccctttttaacattttaccacgtagtttagctgatgtgtgtatataccctcgatttaagaacttataatatatgtttttttgaatcagtacaaaaagcaaatattgttacttttaaaaacaagaataaaagtttttttattcacgtataggaaagaaaaattgtaaaaaaacaaaacatttgacaaaatatttacgtaaaaaaattcaaatcaaacgtcttgatttcgttctacgagtaaatagtttattaaatttttatatttaataattaaaaaaaccttataaatataggcttagccaaaaatccatatataaatcgattttaggttaaaggtaaagaaaccgtgaaagtggaaagcccacttgcggcccaaattttacttgggcccaaataattaaattcccatgtgtttaaattgtagtattaaaagaaatcttgataagtaagagacaaaaaggttcacaatatcattttagaaaagaaaaaaaagaaaaaaaagatggatatgaatatgaatatgatttcaaaattaaaggaataaataaaaattgaaaaattaaattgttgtttgatgtaactttataaaaaaaaaagagtaattatgggtttccctacaggtgggatattcagcaccagcagaggctgcaataag

SEQ ID NO: 63714 - DNA, 918 bp, Cucumis sativus
  Intron number 2 from transcript Cucsa.236140.1 (locus Cucs a.236140) derived from phytozome v7.0 (chr-ID scaffold0201 4; pos 126523 to 127440 reverse strand)
gttccttggaagatcatctatttggtatgtttccatattcattccacaatttatatgcttcttatagttataaaattataatttattcctcatagttggatacttattcttagattgaaaaaaaaaaaaacttcacaccatgttctttctattattgaactagggactatttatgagaattaatatatgagtttgtttgtattagaatggatgtgtagatgcaagaatttccaagtatgttgaagcaaacataataagtcacatatatgtgtgagggtatagctttataagtaacaatacaaatttaactaaagcatcatatattatgaatccaaagtgtctcaaattacaaggggaaaaacatattctattcataaagaatttaacaaagaaaataaaaaatactatgtatgaaaaaaaaattgaaaataactcactacatcaacatgaatttgaggaagaactttgacaacaactccataattagttgaaattaaatatgatattgaaaaaaacaaagtaagtaattccaataatgcaagtaaaatttaaaaaaaagtagaaaaaactttacattatatagcaattttgttgccttcaagattatgaaatttagagtacttgtgaacattattatttgtaggctcatcaacgcttcaacaatgttttatttcagacgatggaataatttcaggtgatgatcttcaaatattttgacgacttacaatatttataccctttacttatataattgaagttcaattcaaaattgaagcattgaaatttctttaaccatggattatgattgatgaataactaaattaaagattgattaataatcttgggcttggcacagtataattgatctgtatattatttgtaggtagtacaccttcaaataagccacctctagactgg

SEQ ID NO: 63715 - DNA, 432 bp, Cucumis sativus
  Intron number 1 from transcript Cucsa.197380.1 (locus Cucs a.197380) derived from phytozome v7.0 (chr-ID scaffold0135 7; pos 799821 to 800252 reverse strand)
gtttccactagtagtgctaatcaattggttagttttttttgttttctttctcatttttcccttttgctctcaatttggctacgttgacccagttttggacaaaaatgatactggtcaaatttgtatactgtttgttcggtgtttcacttttaaaagatggaactctttttctttcttttttgaagggaggagctcccattgaagagaaaacagctattaatctttatataaccattattgttgttccaagattatcaagaaacttgacttgcccattgatgtatgcagtgatcatatatctcgacactggctaattacatttaagcacgttgtatttaaaattttcaatcagttgtcaaatctttgacttattgatcaaggtagtaatcgccaatttattttgtacgttccatttcatacagagtaattcaa

SEQ ID NO: 63716 - DNA, 1025 bp, Cucumis sativus
  Intron number 1 from transcript Cucsa.143770.3 (locus Cucs a.143770) derived from phytozome v7.0 (chr-ID scaffold0108 0; pos 136360 to 137384 reverse strand)
attgctgattgtatttatccgtcagcatttagaaggtgctctcttttgcgttccctcttggtagttcaacaattgttttgaatttcattgccttttacactatgggatcactttgaatagattatagattgtcagtatcaaatgtcattcgagtgttggttctgaatttcaacagctaacttggttgttactgctccttgttaagatacaaataagtgaggttgctggccatagtttacttgggacttccgttaaatctattaacatttaactccgttagtccctgtactttttagctcacttacaacttgattgcagaggatgaggtttgatcatgtgaattttggtttggtgtgataaattgtacttgatgtgttttttccatgctttagtactgccattgtatcactgtagctctaaaagccactgtagtatgttataggatttcttgcaacgtgggtgttgtaagaggtagtgacaaaatcttccaaaaagttgaaacagcgtcagaactagtttactgtatttttagaagtaaagtcaggtggagaaaaataacttaattaacgtttttgataattggtttctactactagcacatatatcatgtattggaggatcaaatatgtgttgaaaatgaagctcttggaattggggaagaaggtgttgagaaaggagtagaggaatagtgtggctacagttatggtagcatcagatcatttggtttggagatgtcacttttccataaaactttgaaacatatttttggacatgtttgtttggtagtcgacatatacattaattatcgtctattacctaaccaaagggagttacagtactacagtattatttggtataatcacatacccatctaatgatcaacttttttccttttttttcttaaatttcattgtcttctgctttttagtctcttgctgtaagcctgtaacattcttctgaatcttgagaacttattttcttgtatatttccagggtttttcatcacaatttggatatcagctgtt

SEQ ID NO: 63717 - DNA, 920 bp, Cucumis sativus
  Intron number 1 from transcript Cucsa.142970.1 (locus Cucs a.142970) derived from phytozome v7.0 (chr-ID scaffold0107 9; pos 1286547 to 1287466 reverse strand)
gtggctttaagaagtccaagccaggtttgttaagcttcattaatgcttcttttttttaccatttttccctaccctttttggcattctcaacttctttgatgttatcttgtttctctggtttatgggttttgtttccccttcttggtgtatgtatgtggatgctttgctcctactgtttgtttgcttcatcttggtttattggctgaattgatatttgggttattttatagcattttgttctttttcggtttgcttgtgggtactgctgtttttgtcttcgctttagctaaaggaaaacttgccggcttctgcgttttagtatatggatgtgggaatagtgtctttttggtttggagtttctttatttggtttttgggtagtatctggaagctgctttacgtatttggttaaggattgtaacgtcttgcttctgagatagactactactgtttacgggaatacaatttcacatcttttttttagtagctgtaactattgttttcccctgcaatttcttatatctttagagtcaagagatgattttttagtgttttatgtagtgtaattggtttaatgggtaagttatccggttctgagttgactttactgtttgtatttcagacttttagtgtataaaataatgttaatttgttgctaaatatgtattttttgaactttctccagcgaaatgtagttatgaatttaaatggaaaaaatggttttaagattttgaggtgtgttttgttcgaggatttaatcttcggaacatggttttctttcttccttttcacgccataaatagtagtgtgttgtcttagtaatggaagatgatgaaaacgttattagatattttaagctgggagatcaacaataccctgaaattttaactaaggaaagttaattaatgttctccgacagaa

SEQ ID NO: 63718 - DNA, 891 bp, Cucumis sativus
  Intron number 1 from transcript Cucsa.307060.1 (locus Cucs a.307060) derived from phytozome v7.0 (chr-ID scaffold0297 7; pos 375092 to 375982 reverse strand)
ctcttccaaaggtaagatgacgatgatcatttaaatataaatcatctgatttctgttggtttgttgggaagaacagtgcggatagaacaatttcagttttcaactgccaatgatcctcccccccacccccgattctcctttcgagcgatcttttattatagaaatgtagaaatagtttttcagttagcttattgtcttacacctcgagtttgaatgttcctggtctttaatataactttgttttaaaagaactttttgtttgttgtttgtaggataattcggtgagaaaaaaaaaagacatatttttttgcataattctttaacggatacgttggaggtcttgttgcatggtgtgggttgggggtatgagcaatacattagatgaaaaattgataaaagttatgcaacctttcttgtattattaaggcgtggcccattgttagctttatgttgatgaccaacactaatctttgaaagcttcgccaaccccgctatttttcaggagccttagtcaaccaagaattttaggaagggagctttcagtctttgtttactttagtattcttttctttcttttccagattctcaagcattttgggcacattgaggttttaacttcattatcctgtagaaatgtctgggaatagcatcactgttcctcattttgtatgagctcgtgatttagtgcctgtctgttggttcttaagtctgaaatagttaccaaataatatgcatggtaaacatgaactgtgatcattcaccacagtacgtatataattagcacgtcagctgtttccagtttgttaatttatctagatttcctccttaattcttgttgcttttgtgaaccaatcaatcatgtatggcttttatttgcttttcacttttcag

SEQ ID NO: 63719 - DNA, 708 bp, Cucumis sativus
  Intron number 1 from transcript Cucsa.244260.1 (locus Cucs a.244260) derived from phytozome v7.0 (chr-ID scaffold0213 5; pos 110228 to 110935 reverse strand)
gtcggctttcgtcaccggcggtgcttctggaattggtattttctttttttctcttgctttttctatttcctttgatctgtttctgctgatgtaattggctatttattctcactatgaactgtcctcaatatcataatgatttcacgatcaacgttcaacgattttcttttttaaacatgtagttgactgaattacttttttctgtatccaactaattcaatcatgtatttgtcgatggagtttgaattgaatcggtttacgtgtttcttctccggcaagcttggatgatggtttcagattgagctgattttcctctgtttatgagttatgttgaattgcatttgcatcacgagggaaaatttttaaaaatcacagttgttcttaagtttagaagttgggtactgttgtaatggtgttttagtgcttgggccttgtttgttgtattttatttgaatttgtgtattagtatgtttgaaaataacaaagacaaaatgattttctttttcgtttctatgtatcggaaagactggggagccgtttgagaactaaggaaagattaaacaaaaatcaatttgtttatcttaaatgctgtgattttattattattctctaaaatttggtactttacggcatgttcgttatgtcttgttatttggtggttatgtctgtttaggtaaagcgctctgcctagctctgggagagaaggga

SEQ ID NO: 63720 - DNA, 660 bp, Cucumis sativus
  Intron number 1 from transcript Cucsa.250940.1 (locus Cucs a.250940) derived from phytozome v7.0 (chr-ID scaffold0222 9; pos 90969 to 91628 reverse strand)
ggactctctctgactaagctcttcaagctttcaaggtttcttttaattgatttctcttcattgtgatgattttatacacttttctagtttagtttcttcattcagttcattggatgccatgattttgttctttgatacactgttaaagctcactgtttttggttttgtttttcaaatttaagctctcgattttcgtgttcggcctttgtttagatgggaagcttgatgcttcaaagattaatttactgagtttggttcgttctatcgtttccccctttctactctgggcaagaagggcccggagtgaggatgtgttttaattctcgatttgagttgctttccgttgcatcactgtttttaattctcaaacgatgggaaatttgatgaatttgctttgtgtaattttagtgaatgaaggttataaacatgttgcgctgagtttaatttcaatttgggttttcatctggggttttttctcatggacgtagtttagggttttattagtcggaagggaaattggactttgttgatctcgagttagattgcttttaatcttgttagagttggattttgcttctctcattttcgtattcttctgctaattcttttttttttccctccatagatccttgccactaacggttggaactccgacagcac

SEQ ID NO: 63721 - DNA, 723 bp, Cucumis sativus
  Intron number 1 from transcript Cucsa.308510.4 (locus Cucs a.308510) derived from phytozome v7.0 (chr-ID scaffold0297 8; pos 593996 to 594718)
catcaacgtccctactgcctctttttatttcttttgtatgtacagaaacctttatctttttgtgtttcatcttatcgttttcttttcttttcattcattcattcatctttcctttttcgcaagtcattccttttgacacccacgttgataattgttcttttgctgatttttttgtgattttttatttcctgggtgggttttgttttgatcgtctgcgtgacttcttatattccttttctattttgttgggtttgtttggatttttacgagtggatggttttgttaaattagggttcttctctgtttgcgtttgttttctttagataactcatctgtgattggtatttacatctcttgatcaataagcgaaggataccaatttttatctcatccctcacggatgctttgagaattttaagattgcgagcggtttttcatccaactctcccccttgtgctgtgaaaaacaagtgtttttgaattttttagtcatttactttttcttttaattttcccccaatctatctatcttacccggaataaatggtttctcaggcttgagtttaaaaatgtggatttttttttcttctgggtgatggtgtttgattattatattgttatatggttttctaggagttcttttatgtggtaaagaatgattgtcaatgtcagttatctttttatttcagttatatatctatccatttggggtattcagaagaag

SEQ ID NO: 63722 - DNA, 782 bp, Cucumis sativus
  Intron number 4 from transcript Cucsa.241480.4 (locus Cucs a.241480) derived from phytozome v7.0 (chr-ID scaffold0204 7; pos 1480506 to 1481287)
taatttctcgtgaaactgatcctcttgattccagggtaatcttaacttctcctgcaaagcataaaatgttattgaaaccagttctgcttttgttagttcacaaactgagttttggtttaatctaattttttaaccaattgttcgcttcttgagttaatttttcttttcattcatagaagaatctcttaggagtagtcaagatcgattacttttttcttctcacaagcatgttgttgtaaatgtatctcttttatttcattgatgaaagataaacctgaaaaagatattagtcttaaaataatatctcaaatggtttaaaaactgaggaaagttatccaagtgggttagaaactaagtgtgcttagcttgacctgcccttttaaagtgcttatagatgactaaaaaaatttgtggtgttcagttaaaatattaaagagtgattttatcaactaaaagaaatttttagaacttatcaataatcaaatatgatattgacaatttctaagaatagatacaaagcaatacctaaaatgtttttagagcagaatttaactaattattctattttttgtccagaaatgcttatttattagttctttcacttaaaaccgctttcttcaaatggaatgtcaaacacaccaatatcatagtttaatcatattcatgaggtgcaatttagctggcagttttcagatgactcctgtgaacacttcaaaatttaacactaaccacatactttttgggcaggtgatcactgtgggatttgtaaagggtggacaagc

SEQ ID NO: 63723 - DNA, 949 bp, Cucumis sativus
  Intron number 1 from transcript Cucsa.142750.2 (locus Cucs a.142750) derived from phytozome v7.0 (chr-ID scaffold0107 9; pos 960985 to 961933 reverse strand)
acccaattcttatctctatctctcttgttcttcaggttgccttctttctttttagtatttatctccttgattgattattccttttcctccccttttcttttctttgatttattttaagtggggttttggtttttttttttaatgattttgatgctttgtgatggtttattcttcttatgagttggttttgtgaggtgggttttgtttgtagatctgaatttgtttcatttttgtattgaattttgattctggggttttttgaggatgatcgactgtgatggattctgatgttctgttttccttttttttggagaggatttcttcaggttggagatgagatctgattgttggttttgtgatagatttgtttggaagtgtttgatttagatgtgatgtttaatgctctgtttcgtttgtgttttgattctgaatttaattttattacttagtcttgttgttgaacttgatctgtgtaaaacagattaagaagtgtttgaagaaattgtcgttttcccctgtttgatctactttgtttgattgaacttttgcatgtaataagattattttagaaaggaagaggaattctcatggtgattggtgtgaagacatggtttggcttttgctttctgattagaaggaataaatctcttggtgttctttgttacatgtatcgatttgtggtttcggtagtgactcgatttgggatgaatcaaacatctcttttgtttttctagtaattgattctgagactgactgggtttttgctatgaaatttatgtttacaggtgaggaagtatagagaattttagtagcttccatatcatatctgataccaggtgaaggcagtagctgattaggatttgtttttggtgtaaatctggttgttggatctcacccgagtttcgtcatctgagtttagcaaatatctgctgattcatttttgggggaa

SEQ ID NO: 63724 - DNA, 322 bp, Cucumis sativus
  Intron number 3 from transcript Cucsa.298390.4 (locus Cucs a.298390) derived from phytozome v7.0 (chr-ID scaffold0290 1; pos 44316 to 44637 reverse strand)
taaggttggtcaaatcttttatcatttttcattccttcttccttagttcttatctctgtggacaggttctttgtaattttgtaattgagctttcatagaacacttagttatttgttttctcacttaaaaatattatttttttctctgtttcttttgaaatctaagttccttcatggtatttcttttaagtgtgaaaaggaagttattttaaatatcaaaagagttttggctgctcattagtttctttgcttttctgaacaagtgaatcttattcccactttgaacagaaaggaagaggaggaggaagaagaagaagaagaag

SEQ ID NO: 63725 - DNA, 867 bp, Cucumis sativus
  Intron number 1 from transcript Cucsa.298390.4 (locus Cucs a.298390) derived from phytozome v7.0 (chr-ID scaffold0290 1; pos 45130 to 45996 reverse strand)
caaaatcctaactcacatcataattccctttccaggtatctcatctttctccttagaattttaatttttgatttgattttatcttttccaatctccaatattgtaacaagcatgttgaaatcgtagcaatagggttctttatatttaacatttcctgctcaccccgatcgtatgactttaatttgaagattagggtttgcccttagcctttttgttttttgttttttttgtttttcaattcaatttgcttcgtttcgacatgggtatatattgtaatcgttgaagacgaaaggtgttacttgatatttgaaattatcaatggattgaaaggaaggctttagggttacggtaggattggattatatggaatgcgaatgaagtgggagtcttcattcccgttcaattaggatatttggccatccaattgcgtggtcactttgtctgcaccgacgttccttcttattaaatggggttttgaccttatgaactttaggacgtactctacttcattccttatgctttggtagatggatttcttattttctatttagtttaagcacatttacagggtgatttgaactgatttgaacctttgacctttttagcgagggttctgttgacctaggtagtcttttagtttatttgtatttatatatctttgagattttggcaggtttttgatgttctctttttccaatttgtgttatgttcaactttgaagtcatagtttgttattcttcgcatttgacattggaaggctttggacatgtaaacaaatctgtttcttttattttctcaacaaatgtttctgacgtgaaaaaaaaattcctagttggccttgagcgtgagccttctttctgctgcttt

SEQ ID NO: 63726 - DNA, 1029 bp, Cucumis sativus
  Intron number 1 from transcript Cucsa.161510.1 (locus Cucs a.161510) derived from phytozome v7.0 (chr-ID scaffold0114 4; pos 1414874 to 1415902)
tgatctcaataagtttgaaccttgggaactaccaggtacttgctaataattctaattaattatgctatatttttaatcagggtttctacttttttttcttcttctaagatttaagttttgttctattttagtcattaaaatcttttaacttcagttatttatattattttaccatctaatatatatctacttgtctaatacttaatctaaccttatgtatgacatgaagcttaattactaacatgcattaaacatatctctccaagctaattaagatgtcatttaagtttattaaatcaaaacaataacggtaaggactaaattttaaagtttaattataaaaaaaacatatattttaaaagatttaaacagcataaaaattataactcgagttttaataattagggtttgcatggaatattggaagttggtgtttcaaactattttattcttttattttcaaagagatgatcatttctgaatattgatgaatggttgttgatgtggacaatatggtttacaaaccctttaaagctaaagatagatttcaaaaaattaactcaaaacatataaatggaaccaaagtttaaaagcgtaaaatcgaacattattaatatttataatactattttgttcatcatagtttgagatatatacatttaaatattcaatttaattaatttaatcttttgaatgaattgtgaatttatctaccaaaactaaactaaataaataattatactaattttcataatgaatagttcaccaaaatgtttcatagagttaagaaaaaaattagaaaaataatctagccatgcaaattaaatttcatatatatatatatatatatattactcatcatttatacactaaagactaggatgtattaaagacatatatgagatgatttcaaacatatagaaaacgactctaacaaacgttttaaaattgctctcaaacatggatgtaaagatgttattaattaagaccggtgttggtgtcggtttttgaaaaacagggaaggcaaaa

SEQ ID NO: 63727 - DNA, 338 bp, Cucumis sativus
  Intron number 2 from transcript Cucsa.284360.1 (locus Cucs a.284360) derived from phytozome v7.0 (chr-ID scaffold0265 3; pos 1174095 to 1174432 reverse strand)
aaagttggtaattctcatatcttcaaatttcttttcttaaaggaaataccatttcacaatttcgttctacttctgcactatctctcaaccctgtgaatttgtttcaattgtttaggctgccctcgtttacttcaaataattttactttttcttaaatcaaatttcttccagtaatgaaatatttataataaacaagttgctaaaagattaaaaaaagaaaaatcagttgatcttcccctttgccactggccagaaaaagttataccaaaaataaaagtccccatggaatttatatttgatttcttttacagaaggtgagcccatagtttgccattcaa

SEQ ID NO: 63728 - DNA, 916 bp, Cucumis sativus
  Intron number 1 from transcript Cucsa.135870.1 (locus Cucs a.135870) derived from phytozome v7.0 (chr-ID scaffold0104 4; pos 664507 to 665422)
aaagaggaggaaagaggaaaagaaaacggaaagtgagttttctacttatctgttttcgtttccctttttgtgtttcgataattattctttttttgctatatttagactagttggattactgtagctagctccattaccgattctgttttgtgaggaaccttgaagaatttgtgaaatctatttctttctaaaaataattgtgggttttagggctgtttctactaaaacaccagagtttgttaactcaaatctatctgggtttatggattttcttatgtgggttagaccatgtagaaaatcatttttcgaattcagaatcttggttatatgagttcccgttggatgcacgttgagctgaggaaacgaaagaggaaatgtacgaatttaaagtctacgctgttaattttaatcacacgcttctgttctttggcgaataacagattttaccacggtccatgttctttattttatattctttatgtaaagaacacttatgttggagtttttaattttccagttgccacgaatggcaatttttttcatttttttgttcatactgtacacagttttgtaccgggtttctaatattaaaatgttggtgttgaatggttataatggttgatgcttcctgaaagaataaataaagaataagggaattggttactttgattttagttgtctaaggaaaactggaacttttctacagtctctttaaatgtataaaatattggaacatcgagagatcaatttatgttttcagtgtggaggttttttattctcttctaatatttcagttgggattactttcttgatgcattgatggtttaacctttcttttgaccatttcttgcatagaaaaattgactggaaaaattaattccttttccttttttcattcagctttggatctcagtaa

SEQ ID NO: 63729 - DNA, 1006 bp, Cucumis sativus
  Intron number 1 from transcript Cucsa.206880.1 (locus Cucs a.206880) derived from phytozome v7.0 (chr-ID scaffold0144 1; pos 62154 to 63159 reverse strand)
aggggagacctatttactcgagtatgtgtactgttgcctgatcttgtgcttcttaatgattattttcttttaactcaagtggagtgaagataaatataattagatcttgtgcattttaataatgtttagtactttcttgtttggtcggggagctttgtttctttctcgtttggttttcatcgataattgattaatagggaaacaacggaggttgccacttctctgtctttaattggggagttcaggtttttaggcttgggagaagggatattgagtttggagtctcgactccttagagggtttctcttgcaagtcttttggcatttgctggatccctctctcgttagtaagtctgtcttggttgctttgtggagaagattttgaagaaagtcaacttcttttcttggcaagtttttctcagttttgtgaattgtatggactgatttttgaggaagttaacctttgggtattggttttgaagaccttctgttgttgctctttaggcaacattatactcagttggaccccttttctttaatggggggtttcgtgggtttgggtttttgaattattccattttttctccataaaagtagttgtttctttatatataaagctttggagctgttttagtatgaatcagaattcaataagttaagcaagttgtactcatagtttgaagccaaacccgtctggaactttgtttttcggcttgctttaatggatgatcttttcctttcatttttttttctggaactgaaactatttttcattagcttgtcaataatgattttcaagtgctcaaactaatagggaaaatagttgctgccacaaactaatttggagtagtgcgtagctttggatggagatcttagaatctaacaacaaataatttttgttttggctctgttagcctatgtttgtgatcaattaatcttgacaatttctcttatttactacaatcctataaagagattactgtttgcccactgtaatgaacagagag

SEQ ID NO: 63730 - DNA, 842 bp, Cucumis sativus
  Intron number 2 from transcript Cucsa.265890.2 (locus Cucs a.265890) derived from phytozome v7.0 (chr-ID scaffold0235 2; pos 347929 to 348770 reverse strand)
agtgtaagagaacattccaggtgattttcttacttatctcactttaagttttttggttatgacttatgagtatgactttgtgagaaagatgataatgctggaccaatggattagaattgagttgattgtttattgttttagcttcaccaatcgttctttgaggtctgaattttgtaatgtaccttacgtagtacaaaataccccagaagtaagaaactagagtaatattacatgaagctagatctttgtatgggattaatggaattttctttgattgtttcaaattcatcaaataatttaaactctggatataagttatttatatttggattgtaaacttttatccgtggagttaattgtttgaagtgataatatattattataagtgtcactattttattggtagttagctaggtcttatgtctcttaactagacacctttctggtagtttgacgccatttcttgttgttcagctctttttgtgggtttttttctttttgtatgtctatgtattctttcaatactttcagaatgaaagtcatatttttgtattaaagaaaataaaaggagaaaaaaagtagatgcctgtttaatacatgtagatatacattttacatagtttgtgatgttttcttttatcccggtttttactacttttcacacttctggtgtttgcttttcttctgggcagacacattttccatgtttcttgtatttgctttcttaaccagatgcatatgcatatatttcattaatgataaaaaaaagttgtcatttagatttgattgggagtgcttatatttctgttctctttgtaaattcatttagctcaaattcatca

SEQ ID NO: 63731 - DNA, 1022 bp, Cucumis sativus
  Intron number 1 from transcript Cucsa.253820.1 (locus Cucs a.253820) derived from phytozome v7.0 (chr-ID scaffold0222 9; pos 2319634 to 2320655)
cctgattctgtttctcccctacgcgattcttctaggttatctctttacttcttcttcctttttttttcattttttttatttttttatttttactgacctgctttatttccaatagatgactgcaacctttccctaaccacctctcttcaatgtgtttttgtttatcgtaatttgaattatatagccatcatgaggcatggggcagttgggttcagtcatatccaatggcttttcaaaccactggtactgcttcaaatgttcatcacgaatgtcgtacttaattatgagttttaatctatagcattttccgtgttttcttgcttgatattgttcaaattcattccttgctgaaggaatttcaaatgactagggttttggaggggttggaaaattgctgctcacaacagttgttatggccttatgatgtgagaaggattcaatggatagttgcaaattaaggtttttgaaaggaccttttttagatatagatgcaaaatgagtcattccaaagcttcacttcaagctttatttgtaaatcttctattccttgtctgatttggccttgtgatttgagaaggatcggatgcagtatgattgttaggtcattggaactaatgacgccgaagtaccgtcgagctatcagtcaagttgactgttcaaccacaacaaaaacgtcataaacatatattgacaatattgtaatctcaccatccgttatttgagttagcaccagtgccttggaacttgataaaatgtaaccatttggcttccttggttgattcattattaccatggtttcctttgtttgatgatgttgtgtttcttatcaaaagaagacaaacggttgcttgggatattggcttttggttggaatttaatttcatcacagaaaactctatatttcgtggagttaaactcccctccttgcagaaagaagttcgcttggggactattgtctgccttaatgaagctattttatgttggtaggactgtttcaccttcccctacagttgaggatcagc

SEQ ID NO: 63732 - DNA, 572 bp, Cucumis sativus
  Intron number 3 from transcript Cucsa.219580.1 (locus Cucs a.219580) derived from phytozome v7.0 (chr-ID scaffold0165 8; pos 1297109 to 1297680)
cgtcgtgtactcttcagaacattaaatacagataggtaaagatttttgagttgtcatcaggatgaagaactttcagtttgttcatttgcttttaaagaggaatcatctgaatttaatccttcagctgtttaagtattgatgcaatctgtttgatataatcgttgttacttttatttttaggaatttgttcttctaggttttcatttcacatgtcttgttcttattatgggcaacccaaatctgaatttctgaatttctgaacttccaatgttattattgggcatacctatgttactgtctaattagccaattcttcctttttggccctgtttttttccttattttaaaaatcaactttaaactggaaaggccatcttatgttatctgagatttaatgtctaaaagtgtcaaatgcaatagaccattaatcctcgtttgtttttgtttatgggaggtcaatttagcaatgtgttttgtaaactgtagagtcatggtcttgtagtgaagaaagtcttccaaacttcaactaagaaactttactcacctttgatccattccaatgcagaggtctc

SEQ ID NO: 63733 - DNA, 697 bp, Cucumis sativus
  Intron number 3 from transcript Cucsa.259180.3 (locus Cucs a.259180) derived from phytozome v7.0 (chr-ID scaffold0222 9; pos 5798853 to 5799549)
tgatcgatttcttatccattatcccattacctcaggtaaaaaaattgtacggtttcggttacactagctctcaactcaagttcaagtgatagagttatggtaaatttgattctttagcaacattttaacactcccattattacatgtgggcttgaaaatatgcaaaagttacaacaattagttatcaatattaaatggaaaggtaatgatgttataaaagttcaaactttgaatacaaggtgttatgctttgataccatgttaaatcgccacacaattcaaaattttaagtttataggttatggtaaaaaaaaaattctttaaccatttctaagatacttgcagcatctagtctttgcatcaagagcaaaacatttgatagttcttcttatttggaatgttacatattttggatgatgaattctttaaagccaagtccacaatcttctctctgttaacattgtactaaagattgtgtgcttgttttgttcgtatcctgttttaagaatggattgttttttagtcgttggacttttaagattggattatcttttagtcattggacagattcttgtgaatcctttgttttgactaagcagtattcattgcctcactgaagtgaacttactatttaagataacttggtctctttatgtcattcagcttttggtattagtaatcatacctgcagcgaaagg

SEQ ID NO: 63734 - DNA, 958 bp, Cucumis sativus
  Intron number 2 from transcript Cucsa.306690.1 (locus Cucs a.306690) derived from phytozome v7.0 (chr-ID scaffold0297 7; pos 134772 to 135729)
ataatttgcaatctctatactaccattggaagcaggttcctgtttcattctctctttcaccatctttatcactatttttttttcactctctctctctcttgtaatttgattcatagttatccttatgtgtgtccacatacttaattaattatgaaaaaaatgcttgatgttgaattatttacttgtttattcacatgatatatatatgacaaattatgtttattaatctgtcaaggaaaaagttcaaactgcacattttgatataaacaagaaaagaaaaaaaagattcaaactcctagtttaactcaactgatcatataagtttgtaggatactcaagtaaaaggttcgttacttgcctttccatatatattcagaaaagaaaacaatttatccaacaaaaaaacagtaattgcactttagataattatttccatactctaccagctcaggttttttttttttttttttttcttttctgtatagaacaatcttgggagaggtgaatatttttagagttgtttggaatataattatgatttcatataattgcttgagaagtaattgaaaaccttttatttgagttttatttagttaattaatatgcaaataaatatttaaaaactaattttaattgagagggctttttgggaaactactttgtaggagaatatttttcacttgaaaccctttctataaaaagtcacacactaatgactaaattacttcactataaataataggtcatcatcatgatcattttttttataatcccaaatctagttatgattatatccatagtattgctaaaatgatagcactgatgtgtaatataactattttgaatttagaagattagaaggatgttattgagtctaatctaataaatatatattgacttttttgtattacaaacatgtgtaggtggtcagtaattgctgcacaattaccaggaagaa

SEQ ID NO: 63735 - DNA, 761 bp, Cucumis sativus
  Intron number 1 from transcript Cucsa.165500.1 (locus Cucs a.165500) derived from phytozome v7.0 (chr-ID scaffold0115 3; pos 869620 to 870380)
gaagatgttatgcttgactgcagacaaggtcctggatacctgtataagagtaatgagtttgatccaattttgttgacagtgaagaatgccgaaacactcaccatatgtaaatggacttttgaggtatttcttactttattttgcacctcaactagtgtttgtcttttctttcttttcatctgctgggtttgtttgagttgtgaaagatattcttggggatgtctagccttcggttcgagtagatttttagaccaagcaatcactaaactgactatagtcagtctagtaaatgtttaaaccgagttagaccgtcaatgactaatagttaatcaattttacttggtcggttttactctttattaagtatgtttaaacttgtcagtttggattttttcctctatcaaaccaagtttttagtttatcatgttcacttctagttgttgttgttgcaggctttgatatttccttctctttcttggaacttccagttctataagttgaaagagttgtggtggattgatgatttaaaagaaaacttcaatgccaaaccattgattgctatcatcaaattatgtcctactttggaacgtctatttgttacggtactacgttaggcgtttttaaaagtttttatatatttgaaagagcaagtttgaaaatgacttttcaagttgaatacaacctatatttaactaatagtgtatgtaatttttttttactgtgtagtttgatcctgaaagttactgcatttcaagcacaga

SEQ ID NO: 63736 - DNA, 545 bp, Cucumis sativus
  Intron number 1 from transcript Cucsa.284780.3 (locus Cucs a.284780) derived from phytozome v7.0 (chr-ID scaffold0265 3; pos 1407274 to 1407818 reverse strand)
cgaattgtaactttcaggtaacttagtttattcaggaaattgtttttctgttccatttgatttgattctccttgaactgaactaagaaaggttctaagtaagaattagattgtacagtggagtgggaagtaaaaaggtcgaggaaatagttggaaatcaggagctaatgtacctccttttgaggctaataactgaaatcaaagaaagaacttatttgtttgtgtgattagatgacttcccctcctcactctcttgccagtttttggaggaaaagaacatgtggggaagtgagatcagtgttaggattggattgcttttgtgttctttaactgtcacttcttgttagaccttcaaccaaaaacatcatgggtgttattgcatgttttcacaatggtccgtttggttctttactttctatactaccgggtttgtttgatatttattctgttccactcatattttaaacgtcttttaattattgttatttttttggtttgaaaaacgttgcagcctgaaagtgcttttatttgctgggatcattggaa

SEQ ID NO: 63737 - DNA, 1004 bp, Cucumis sativus
  Intron number 1 from transcript Cucsa.265870.1 (locus Cucs a.265870) derived from phytozome v7.0 (chr-ID scaffold0235 2; pos 314881 to 315884 reverse strand)
ccattgcagagctcaatcatctttcctctaccagagtatgccctaccgcgttccttcactactactttgtcttcttcgtcaaatttgtactagatgtacaactatgtactgtcattccgtttggaaaaattttccgaactctgcctgtttttcttttcttagctgcgctagttactagggtctaagtggaactgaaatctttattacatgttaatctaggttttgagtcttccaataattgttgaactcatcttcttttggattcgattttaggtatttttgaaacactagacggacttctggttttttttcttcttattgtttctaagaatgttagtttggtagtgacttctgattgctctatttttcattttgttgagctctaatgaaggattaaaatgtctcaaattaatggaaatatatgtgaaaacattcatgtgaatcaattgatattcttacaagaacatgtacagatgttgcctaaattgtttcatttctgcaaatattagtggaagcattaatatgtggatgaacacaattttttttatatccatgagtgtttgtgactaatttcatggacaagctgacacattagaaagccttcagtaggatattaaattctaagcaaatgacaactatggattgaattcatgacttcttttgacactttttaggattgtttatcattttttaacactaggtcaactcaggatggttgaacacataatatcacttcagtaactaaggtcctttcgtgattatgatcatagttggatttcattggattggagttctatattttttatggattttttttatgtctttgtattttctttttattctgttcaatgaaacttaggtttcctacttttggggagaaaagcatcaagaagattaaaagatgaacagccatcgcctctctctgagcaatgtttcactcattctgaccattactattgcaaattgcaggctgtctttcagaaaaacggaaacctgttttttcg

SEQ ID NO: 63738 - DNA, 497 bp, Cucumis sativus
  Intron number 2 from transcript Cucsa.255670.1 (locus Cucs a.255670) derived from phytozome v7.0 (chr-ID scaffold0222 9; pos 3575697 to 3576193)
ggaccttcttgatctcctccttcatttggtttacggtatgttcgtatgaacttttgtggtataacttttatgaggatgaagatttgacttctttaccttcgttcgggatagaaaaaatgatgctttaacatttgtgttacgcatagtttgaaaaggttgcatcttttaaaataattctcagtagttggatttttaagataacataatttgtttctggcaaaataataataaattgttattatttagctagaataaccatattgtttctaaagttgctaaaaaagcagaaattaaaaagaaatttgagatgaatgaatgaagtatacagtgttataattgtacgctgaaagcataccttctgattttatttaacaagttggtaaggatttcattttattcgaatcttggtaaaattacacacaaggaatgtttaaccaaacctcttgccttttatgtataagtttgtacatataacatggttttctttaccgcaggca

SEQ ID NO: 63739 - DNA, 782 bp, Cucumis sativus
  Intron number 7 from transcript Cucsa.240740.2 (locus Cucs a.240740) derived from phytozome v7.0 (chr-ID scaffold0204 7; pos 877034 to 877815 reverse strand)
agtacaaaactgcatactactcgttttacctcccggtaagtacactgccttttatgtaaatttttatcatcagaagtagtgaaggtaattgatatatatatatatatatattgcagttataagtaagaaactttaacttttggtacccaaatcaagtaaagtgcctaatttagcttctaaaacaaaccacagaactacttgcatgtaaacaaaatcaataggctttgcaggtatgtgaagaaactaatctcataggttgtacagatgtcaatgataataaaggagtttaaacatgatcccatgaactttaagaatgacatgggagccatcgtcttagattagatgtgtcccttttttctttaatttgtataatacaacagttaacactaatattgaaccatatgaatgaaaacagaaaatattaaggatttttaggttaaggggaaaaccatttttagaagcaaaaaagaaacccacataataaaacaaaagttatgtggacctctaaaatatctgaaggccaaaatagaaaataattaacttggcacataaatttcatactttatggaaaagtatgaatacaattttatgtgtcataggctatttttttttcatgatgcacacaccattctaattacacacttctagcttctgattgaactaatgattttgatttaatgacaaatattctttatctatctccagttctattggaacttcttgtgtcttatggaatgcagaaatctaccctgacacaactctttgatttgacactaggttgc

SEQ ID NO: 63740 - DNA, 688 bp, Cucumis sativus
  Intron number 1 from transcript Cucsa.251290.3 (locus Cucs a.251290) derived from phytozome v7.0 (chr-ID scaffold0222 9; pos 420996 to 421683 reverse strand)
aggtatgttatatgatatcataaatcaaatgcaacaatcaaaacgaaagctacacatttttcttcgataatcaatatctatatgattgagttgtttcttggaaataatgcatctatgaataattatatgaatgtttggaagataaattttgtgctggtgagttcgaattccaattgttttctcttattcttcatcttattgagtcattgaccacatattctattgacatcaatatcaatattttttttctttaacttgcaagctttcacttagctcaacctttataatcatgctttaatgtttcttacaagatgcaataaagcaaatagttttctgggcttacgtgtttgtgtgacaagctatatataaaagtaggtaactataatggatagccaaatataacaaaatctaaatctactgccgatagtctatctgtgatagattaataaaatttgacaaattttgctatatttgcaaattttttaaaatgttgttatatacttaattattttgaatctaattgctaaatttgtactacgttaagaaagaaacatgcgttacgtggaaatacaaaaataagacccctaaacacaagaaatttagcattttagtttagtaaatttgatttttttgtagtgaatatagatggaaaaattctaattgttactacttttataaaaaaaaggta

SEQ ID NO: 63741 - DNA, 933 bp, Cucumis sativus
  Intron number 1 from transcript Cucsa.271330.1 (locus Cucs a.271330) derived from phytozome v7.0 (chr-ID scaffold0250 0; pos 249388 to 250320 reverse strand)
actgttttgttgaggttagttaacttcaaaccgatctgcttttcttttggtaaaacgacgacgcatttcctccccaccgttgaagcccttatttttcttttctactctgacttaatttatttaatttagtgagtaaatttaaattttttttcagtttttataagaattaaaaatataccacaaactaaattaatacacatctgaaaaaatatttggatttttttagacatggttcatatttcctaaaaatctggttttaaaattttattttagtagttgaatcttttttgtttgatttattggaaataaaaaaaagatatacgtagaaaacgataaataaaaatagtatttataggtttaattttaaaaagaaagcaaggtgacagtaaaatttcaacctttttctactaattgtttgttgaaccacattagtacctttatgagtactaattttttggccgtgcatgtccatacttttaagcattattaagtttacggaaaaaatattttaaatttagcttgtaaattttaaaatttatactttttagacttcaagtttcaagtttcaagtttttaggtagaactcatccaaggtctattagttaattaaagcatcattataacagttttgcatataagtaaaactacttttatctttataactttaatttgttcggatttaatttttaatcgatcttcagagttatctttataactttaatttgttcggttttaatttttaatcgagcttaagagttcttaaaattgaactttaatccaaattgattaagtaataattattatttacatgcaattaattacaatataatgatataaaaaagttaagaattattaaaagtgtagagattaaaataatgttagtagtatattattttatcaactgagtgtttcaaaatttcaaaacatacaggg

SEQ ID NO: 63742 - DNA, 394 bp, Cucumis sativus
  Intron number 1 from transcript Cucsa.281970.2 (locus Cucs a.281970) derived from phytozome v7.0 (chr-ID scaffold0264 1; pos 125017 to 125410 reverse strand)
cgcttggtagagttctctgccatccagcgtcttatgtaagtattttattgctgttgagtctaattctgatttcttcctgccccatctttttccccattttttggttttttttttttttaatatatgatttaattacgtttatcattttgattttgtaccctgcgtctaagcatttcaaaacaaacgcatggagaaaaagggtacgacttaaattgaactttgtgccttctctataattcatttccaatacgattaaggtgacacgtattacgagtggctggttatggtatttaatgatgcgaatcagagttatactagtttagggtgttttctttgataactgaacttaagatctactagatttgcatttcttcaggtttcagcttctacaggg

SEQ ID NO: 63743 - DNA, 407 bp, Cucumis sativus
  Intron number 1 from transcript Cucsa.144310.3 (locus Cucs a.144310) derived from phytozome v7.0 (chr-ID scaffold0108 0; pos 699852 to 700258)
atcgctgccggttgtgtgtttaatcaggtctctgatttgatcggactttctttttggtttggattattactactttatttgtgtgtattgttgtcatgattgatgatgaacggctgcgtttggtgagcgaggttttgaggaaggaggttgattggtttttgtgtaatggtaaattgttgattggtttgttttcttttttcagcttgaattttggttataggtattttcatggctgtttgggtgggggggttgttttctctctctgctctgtcgattatggagaatcattatttcttctggctttcctcagctgacggcatttattattaatgaagggtttctccatttttactgatgatatgattggtgtttctcagaagtggagcagtgaaaattcagccaccacg

SEQ ID NO: 63744 - DNA, 624 bp, Cucumis sativus
  Intron number 3 from transcript Cucsa.144310.3 (locus Cucs a.144310) derived from phytozome v7.0 (chr-ID scaffold0108 0; pos 700714 to 701337)
attatcgtaatagtcgcctctctctcctttcttttcattttacctttccgatgttgccatgatattaacttcaactattctgagggttcagttccagaggttgacaatccaatattattcattgctatcttttgttggttttcttcgttatatatatatacaaacacacatacatatatttaactctcatgtattttatttttcttgttatcgttgaagattgtctaaatatagctgaccaagaaaagtaaaagaagcatttcactgtggcagttaattattatctagctagcatcggaaatttaaacagtggcagttccttttgacatgttaatggttgttgctaaagttgatccatccactgtctcgttgcttaagttctgacttacacacccttttgtttttcaagtctatgtgttgatggttttttggaattttcaaaacaaatctgcttcttttagtaacatatgttagataaatcctttgagatgttgcataacacggtacattcagttcatttggggttgtcaacttttttttgtcgtccaactttaatttataagcatttcaagagttcaacttttcagttaatactctaatttctttctgaaagcattcgaggca

SEQ ID NO: 63745 - DNA, 904 bp, Cucumis sativus
  Intron number 4 from transcript Cucsa.144310.3 (locus Cucs a.144310) derived from phytozome v7.0 (chr-ID scaffold0108 0; pos 701563 to 702466)
caaagtccacagcctgtaagtgattttctcttcaactttctgagctagtcttagcctagtaatgcccataaatttagccccttggttttcagagtcttcaactgcttggttgttattcctcagatttttgtaatttaacatctcctcattattgatgttctaatatctgaaatattttagtttcatgaaataaaaataaattttgttttgttcaatctgttgaacttcttcgtcttcaaattgctcatgtataatttttgcaagtattacatttcttctgcaattatatgttgctttgtttcctttttgttggaattctggattagatccttctcacgtgttgtttgaaattttgatacacttgaagtattttcagtgttcatgccatgtgttaagttcctttttcatataagatacgtgcaggttaatctgcagtgttttgcaaaatcacctttttttttctcttttttttgggttaactatctaaatatttttgtatagaaatttgtcaatgctcagtttatgtctttttgaaagtgttgcgtttcctatacatgtaaaacaactgcaatttctctgagcctctgttttttttcgatagattgcaatttctcctgctattaatattgacatgacacttattatcccggaaaaggaagataacttcagactaatttagagtgtgtttcattaccaggcctctggaaaaaatgccaattataaacttactaaaatactgaagttgcttttagtgaattccacaaagttgaaatggatagtggtcttagctccagaatgatttctggtttatggttttggctccagaagattgatatatatttggaaaaatcttgttctttatctggaccttaataaacaggattgctttcttaggtgtggattg

SEQ ID NO: 63746 - DNA, 539 bp, Cucumis sativus
  Intron number 1 from transcript Cucsa.196640.1 (locus Cucs a.196640) derived from phytozome v7.0 (chr-ID scaffold0135 7; pos 240156 to 240694)
aaaattctcagctgtacttccattccaggtttcattaaccgactctcatatattgatttcgttttgcgaatttttcatcgccaaatcaaccagcatttccgtaacagttttttttagatggaaatttgctatttcagaagttcagatgattaaaaaacatgttaagatagcttaatggcagaggttttgattgaggaataatcttattgttctatagcttgacaccacaagcaattcgtagtagttttgttgattttcttgtttattagatatcgatttgatgtactgatgaaaaacatctgtcatgcatcgaactgttagatgctgagtatggcggtatcttcacacagtttcttctatcttctgagaaatttatcctgctgttagtccattatttcttcctgtgaaagaatttcgctgaatttcgatatttctgcttcaatgttgccatttcaacttcattttctactgctaattgttacttacttgcgttacttcgaacagtagtggattttatcacgatcctgttgtcggttggt

SEQ ID NO: 63747 - DNA, 779 bp, Cucumis sativus
  Intron number 1 from transcript Cucsa.251040.1 (locus Cucs a.251040) derived from phytozome v7.0 (chr-ID scaffold0222 9; pos 181472 to 182250 reverse strand)
tacgccagccctggtgactctgatcctatttacaagtaattttcctttcccttttcttttctttgcacctttttgttttcctctcttccccctctgctttcttcgcctttttttccttcttttttctctctcttttttttttattagacccctcattttgattttcccctctttaccctttcctacacttgtctcgtaaatgggaatttgatttaatgccttattcttctgagtttgtggtttaatttattgtttgcttgcggttattgaacgggttggtctccgttataggaaacttgattttcgttcttttaatttgcgggaatttctactgtgctcggctgcaaattaactaatccaatattttgtaattctatttatcctgttcattctactatttgtttgttggctaatttcccaaatacgaagacggcgctttgttattgcctcaatttttcttccctcttccatgaattatgaaaataattgttttagttcactatttgagcatccatgaatcttatgattcgaagttccacggtgattagatgcttgggatttgtgaacattgcttatttaggcattagtttaagtgggctggtaattaagttaagtcgttgaatcttatactaaaacattggtttggactttggatagagtgggaaaaaggtgatctaatttcttattctttgtatggagagaaaatgcggtagttcagtgatttccttggctatgatttgtcagggattgtgtggtgcagtgcgagaaatctgggtgtg

SEQ ID NO: 63748 - DNA, 489 bp, Cucumis sativus
  Intron number 1 from transcript Cucsa.179850.1 (locus Cucs a.179850) derived from phytozome v7.0 (chr-ID scaffold0123 3; pos 214078 to 214566 reverse strand)
accttctttctgacccaccttgttccaagtacggggtgcgtattcgatccttgtttttccctttttttttttaataatgtttcatgatcccttcgttttgtttcaagaggaatttggagaaatgaaatcaattgggaaatttgttctcctgtttctcgggaagattctgttctgattctgccttttcaacttttgcttttatcggctttttgtataatggggttacttctcttccattctgctgatgttattggggattatgtagtttacctctgcttgtttactttaattaggtagctgatttggctttgattttagttaaatcagatgttcgaagtgcgagattctgctctttctttttatgtctctttttagtctactttgtatgtgagggaatcagggaaaggcataaatggattttttgtgacttatcgctttctatttcatgcttcaggaacctgtcgtagctcgaaatcagctatcatctct

SEQ ID NO: 63749 - DNA, 530 bp, Cucumis sativus
  Intron number 1 from transcript Cucsa.258840.1 (locus Cucs a.258840) derived from phytozome v7.0 (chr-ID scaffold0222 9; pos 5604874 to 5605403)
aaatctctggttgctggtggagtcgctggcggagtgtgagtttcatttctcttctgtaagctgtgatttctgtcgatataaattggcctttgaatgattacgtacttttgttcccttcttttggcttcctgttaaaattataggacgtatgattaagttctagttcgtcggtcgagtatttttttttgtctttgatgctttgattcggtttagagtataaaatgtgggagagaagagcttaacaagtgagttttggggtgtttgggctttgatttcgtaaagcagacagaccactgaacttgatggtgtggtattatttttgacttgggaaagaaagtcggtaaatgtttaatgtgtgtatcgtacaggtttttctataatttgactccgtcgcttctctgtagtgtttgaagttactcgattttcaaaataattttatatattagtctactttacagtgaatctgtattctgaaaggttttcatatcttttcaggtctcgaactgctgttgcgcctttggagcgtttaa

SEQ ID NO: 63750 - DNA, 688 bp, Cucumis sativus
  Intron number 1 from transcript Cucsa.273020.1 (locus Cucs a.273020) derived from phytozome v7.0 (chr-ID scaffold0251 1; pos 22568 to 23255)
actcagcgttgcagattccaaatctttgattttcggtaatcttagaactgcttcatacttttcacatctacttttctgtgttttctttgcttttttcccctttattctacgaccctcttatgcttcttcttcttcctttagctgtgtaaatacacatcgcacaacaaattttgttgaaatcacatatatattctttgtttttacgattcgttttaggagttcgagtttttgtttttgttttttgttttttgttttttagccatctatacggatttctcgttaaccactcccagattttaataccctgagcctatttttattttcaaaactgtctctgattggttgttcactctaattctaggcgtatgaatctttgtttctatcaattttgagaacaataattgcttcctgttgggctccgctatgaaattcttgctgaaattgggatcaaaatgcttaacttgaagggttttacccccaaggcctggaataattgacatcagaactgagatgtgcccctttcaatttgctcgaacttttttccattgattgttttatagtgatgttaagaagcactaaacacgatgcttattcaaaaatcttctagcttcgtagctttggcatgacgtaattttcattttcttttctttatcttttcatctttgtaaagaaaagctagtaatctttg

SEQ ID NO: 63751 - DNA, 642 bp, Cucumis sativus
  Intron number 2 from transcript Cucsa.301810.7 (locus Cucs a.301810) derived from phytozome v7.0 (chr-ID scaffold0295 1; pos 73697 to 74338)
cttaccttaattcttgctttgctcacactggggaggttcgtttgttagtttttttttctttctttcttatttattattatctttgtaactttggtgttgaatggtgatgtttgtaatcataaatccattaggatttcatcagtttctctagctgatgacattgttggtatgaaatttagatgtgggtaagtggatttttgagattttctacttttagttaggtcttttcgaataatttctcctgaaattgtctggtgtttggaagtaaatttgggtgtgtaaaattagaacgtgtttgtattttgccctattggtaccgagatctgaaatatagtgtgagggagagcctctcttatgaactttcatgccactgaatggggatgagttttgatgcacgagagccgtgctagtagaaacaccaatgtataaaactatagttttttatagttgttttgttgttatgttccaataccccatgcgaattacgaatgtctgatgtctatttgttgtttgtgttctagaatttgagtaggcacttgtaactcagctgcattcagacaagaacattctgtagtttgttgactatgatataaaatttttagtacaggtaatatcaattaaaattattcgcaacaagatcac

SEQ ID NO: 63752 - DNA, 910 bp, Cucumis sativus
  Intron number 1 from transcript Cucsa.181120.1 (locus Cucs a.181120) derived from phytozome v7.0 (chr-ID scaffold0123 9; pos 130376 to 131285 reverse strand)
aaaattgctcgattgaaccatctgtgcgagaaaaggtactcttcgattgttcctttccttctaattcatacccatatttttgcatgtcaatattatgtttaacccttcttttgttcggccattttcttcttttgatgaagattatgatagcttgattagtgtgaatattttggattttcgtattgtctcatcattttttctttcttttttgatttcctggtctttaattgtgttcatcgcatgtaaaatgaattttgattatgttaaaaggttgcagtaactagctagggttgtgggtcatgagtgactaaaatcatgtccaattattatgattaagaattaacatttaaaaagtgtaaattaaacatcatattagtttcagagtgattttgaatatcaaaagaaaattattttagccttttcaaaattagccaaaacatgcaattattagagagctgaaagaaaattatctgttttactagttaaaccccacatgatcatatttgttgattgatcagtggttttgttttgtgcatacatgctcgtaccctagtctattcatgataggtcataagtgttgaaactcctcttttgctcctttttggcaaatgcaaatctattttgataattcatgattaattcagattttgctaatgctcttttttacaaatactcttttggcttttacattctagcttagtttatgcatctatgtttctggtggctattttttcattatattgatggtataatctgcaaccatgccgaagaacaagggaaagggagaattcagattttgctaatgctcttttttacaaacacttctttggcttttactttctagcttagtttatgaatctatgtttctggtgactaattttccattatattgatagtataatctgcaacc

SEQ ID NO: 63753 - DNA, 443 bp, Cucumis sativus
  Intron number 1 from transcript Cucsa.150040.1 (locus Cucs a.150040) derived from phytozome v7.0 (chr-ID scaffold0111 0; pos 1000286 to 1000728)
agagatcctgtcattctctctactggcgaggtttgtcatcatttctttttttctttttttttccccttcctgttctaggtcttctaattaatccctaattcgctgtttttgcttctttgttcttctcaagatttttagccttttggattacgttttttaatttaacttgttgtatgtttattgacattgcatcttttttttttaaaaaaaaaaatttaaatgaattcaaaccctttggactggatcctctgttactctgaattgtctagaatagagtaggaggacgagacgttcttgatggatcttttgttatattatatgtatatggttttggttttgtggggactggatatggatatgatcttcttgcccattattatgaatcgtttgatttcatttcattatgttggttttgaagttttcttcttctcatttgcagacat

SEQ ID NO: 63754 - DNA, 695 bp, Cucumis sativus
  Intron number 2 from transcript Cucsa.178160.1 (locus Cucs a.178160) derived from phytozome v7.0 (chr-ID scaffold0122 7; pos 135657 to 136351 reverse strand)
acactggaattcagttcgtaagtttcatcatatcattttcttcaaaatttgcctctcaaaatgtcactatattcattgttaaaatggtaactgtctttttttcaaactcattttattccttcggaagttaagaagtcaaaatgtcataatcttgctctcaaatttgggttttgtttcttaaattgaaatgaaatcaaaatttaaggacgacttaaaggtttcctcttgaaactaacttagagattgaatagaaacaaatttgaagtattttttgttatttgtttattttattatatatatatatatatatatatttgttgaattctctcactttcaaaatgccaatattatcattatccaaaagtttttttaaactcatttcattaccatcatctttttcttttaccaaagaaaagaaacgatatttggatacacacaacaaccaattgtttgaggagtttctagatgaaagttatgattgagcaattgattgagatgcagaaagttaagtaatctaaattatacacccaaatatttttaaagaaaggccctaatacagaaaagctcgagtaacctcaatataactcaacaaattaccacgaaaatgagagaaggatagaagactattgattataatgagatgatgttttgtatttgcagttgaacataataagaatcagacagcaattggagta

SEQ ID NO: 63755 - DNA, 1017 bp, Cucumis sativus
  Intron number 1 from transcript Cucsa.197100.3 (locus Cucs a.197100) derived from phytozome v7.0 (chr-ID scaffold0135 7; pos 614269 to 615285 reverse strand)
gttcagtagtacgaccactacctgcagaattagaggtgagtgacctagttttcgtgttgttttggggtcgaagtagtttttctttttttgttcttcagcgtctgttactgatggttaagcctctgatgctttttggttgatgattaaacccctttccagtttgtgattactgattactgattacggacttatttgctcttctctactgagattagatatgcattttttattttatgcgagattcatcgttgcataactgtaacttttaggacctttgtgtcgtttattcgaaatggaacgatctgaatttgtatcgttatttttcttgttccatttcgctcatccttttggtgattcttttggtagaaaaaatgaaggtcgaataatttgtgaaattattttctcagaaagagcaggagagagtaattggaatgtgtgagagagctgggtccagtaggatatgttgttttgtggttattagttctcttggtctctatgtatcaatcttagattcgggtcatgataattagttgcattgcatgcatgacttgttacttgttaaatgagaggcggggcttaagagctagtgttgagactcttgttttggtcactctatttcaaatcaatcgattataaggtttttattggaaatgagcaaaactaaaacaatgtttgataaccattttggtttttccaaatcaaacctgtaacatttctttcatgaattggtttctgtattttgttttctagattttaatagtgttttacaaaatcaaaacgaaaatttcaaaagtttacattggaccacaactaagaaattgtgagaaaacaagtacaatgttcaaaaaccaaatggatatcaggtgaggcctaaacttgtacacaatttctttaatggtctagaatcataaatttatggctggcatttcatcttcagattatttacttttgttgtttttgaaaagtatttagtctcacagtttctagtctttcaattcaagcagcattagtgcagcc

SEQ ID NO: 63756 - DNA, 942 bp, Cucumis sativus
  Intron number 2 from transcript Cucsa.181890.1 (locus Cucs a.181890) derived from phytozome v7.0 (chr-ID scaffold0125 1; pos 99800 to 100741)
attaccgtcacttctgacagcaacttctccaagaggtatacttttcccctcttttgaatctgtagtttgttctgaatcgatggaagttctatttcgaatgtgggtattctacatgatgaagttttgtatgaaaatgagtcactaggttgaggatttgttacttgttagcgttttgaatgtttacacaagacgagttattgtgtgataaatcaatatggcgtgtttggactttgtcctagggtgttttagatttgttatgataaggggaaaattaggcttcttatgtttgaaacatgattccatttttcgaatgagggttggcattatggctgagtaattgattctagaattagatttgtgggtaaacaatttgagagctccgattatgaaacttgtggccagttttctattattataattttcggaaagaataggctattcaaactagaaagttacttggtagttcccttccattatcgtaccagaaacacagtttgcttcgtctacttaaagtgttcatttcataggtttgtttatgaataggaagaaatagattactgtgcgagtaattttttttttgttattagccaattatccagctgttattatattttccttcaagatgatgcgtctgatttgtagtttactaatcacacacacaatctgttttactcaattgtttggccgtagaagtttagtatctgaatcgtattagtttctccatgttctcttctagcatttagcattattcattagttgttttaactttccaatcctcttttggccccaaggagtccttttgctataaaaactattccatgacttgttaactccttacactgtggggatccaaaatagacaagtttaacaaccttgttttcttctaaacttgtgtttttctggttaggtatttgaagtacttgactaagaagtacctgaaga

SEQ ID NO: 63757 - DNA, 635 bp, Cucumis sativus
  Intron number 1 from transcript Cucsa.149550.3 (locus Cucs a.149550) derived from phytozome v7.0 (chr-ID scaffold0111 0; pos 403212 to 403846 reverse strand)
gaatttgcacataatcagaagcagctccgtggccagttagtagttttctcttcacttcaactttattcattttttgcttctttaattcgatttcactgtggcatatactacctttaattcgtttctaaatggaattctgatgatataatttatgaatatggaattagagctgtccttttgtattgccttaatagctattgtgattcaattttttgttatttttgtttagaagaattttttagttcattttgattattggactttcagtaatgtgattttggatgggcgtagttagcctgacagaagattagagaagaaatattagtttttttttgtttttcaaaatcgttaaaaatgagagaaacgtatgctgttaaaataattggtatatgttgtaacagttgaaataatggcaagtatagtgttagcattggttatatggctttcagcacattcaatagatgtttacatttttttttttcatcttttccttgaaattggttattgaacaccagtttatgcaaccaatccacaaatttagtgatatcagtatattattgagcataagcgagaaaatggtgggaaattatatatttagttggaagttgattagttcaatatatgttttcttagta

SEQ ID NO: 63758 - DNA, 648 bp, Cucumis sativus
  Intron number 2 from transcript Cucsa.308070.1 (locus Cucs a.308070) derived from phytozome v7.0 (chr-ID scaffold0297 8; pos 311725 to 312372 reverse strand)
gcgtagtaggcacgaacgccacggtcatcctggtacgttttatttatgtatatcattaaccaattactggatatctatcattttggaatgatgcacaaggtacgttaaaacattcccttaccgactattgctaggattaggaatggtttattacaagaattagtgaccactgacattatacttatatgaataaaatgtgcgaccaatacgtcatttatcaaattatgtaggtctaaatagtaatttggtatttatactaccaactttggtccatcttggtcctctgccttcaaaacatgcattttggtcctggttcaaagcaatccttttgatttcttcgttttcatttttatttcattcttaagaaatcaaaatgatctccttttaaaatggatatgcatgaaaatgaactacaattgaaagtacgagatcaaaatcaaccaaaagtacacaagcaaagtgtagctttgaaagtacatgggctagagtagtatttaaaccaactatctcctatacaaacaaatgcagtttttatgttctttcttttaagtttcttagccactgctttattcaattttggacaaagtttactttttagctgttgcatatatatactgaatgcttcctttctaattgatgcaggtggag

SEQ ID NO: 63759 - DNA, 1020 bp, Cucumis sativus
  Intron number 1 from transcript Cucsa.209580.2 (locus Cucs a.209580) derived from phytozome v7.0 (chr-ID scaffold0147 0; pos 6067 to 7086)
tcattaacaaaagtcccctgaaagctccgagcaaggtaagattagttgagttttgttataatttttcttttagacgttatgttttaggtcattatataacttaacttgaaactatttacgcttttgaggtttttgaattcgattttttatagcttgacgataatattttcattgttaatccttttctgaaatctcgagttatgatcacatccaaaaacaaaaacgattgtttgttttcttctttatgtttcattagttgtttaccatgtaataggtattataattgattttcgatagaagagtataatgaacatcaaaacgagaaagtaaagaaagtaataaaattcgagaataaagtgacacggaaaaatcaaagtggtagaaaaggaagttggcttaggatgaggctgagtctatcaaaaggcttctctgaaagtgagtttgctcgttagacgtaaaaagaaaatttcagtcgataacattttttagattaatgattgagtgtataacaagatctaaggaagtgcaaatatagagaaatttaacactaagttttatatctacaactatctttaattttaacttagttggttaatagaaggaggagtaaatgattacaatgaggtaaggtagaaatctggagtgataggtcatccactggactcatgaaaaaaaatgtaaagatatccataaaagtttaataccaattttgatgtgacgttttctatatatagaatttgtatgtcacaatcccacaaagtggaaaagaaaaagagtatagtaattaggcataaaaattacaaagggatcccttcaccttcgtgtgaaaagcaaccaagattgaaacgtcgaagtaaaaaacaaacaagtgtaagaggcagcttccttctctccctctttcgaattgactcgctcttcattctcaattccttcttctctataaatctattcttcattctctcttttcattcaacatcttttgcaggtttcctttaaacccttttccttagtctctccctt

SEQ ID NO: 63760 - DNA, 607 bp, Cucumis sativus
  Intron number 4 from transcript Cucsa.209580.2 (locus Cucs a.209580) derived from phytozome v7.0 (chr-ID scaffold0147 0; pos 7501 to 8107)
cgcccaagattttcaactgtgtatgtttttttttcttcccctcattttgaaatttatgcattgagatcatggatttaaattttgatgtagttgtttagaagctatgtcatcggtttgattgctccttctcccaaaataatggatctgtgaatgctgtttcaactttcaactccccatccacgtaaatgctgtactaaaaaaacaaaaaaagaataaactcaaactgatcttatagaaaagtggaacattaaatagctctagtttgtggcccatatgatttgtttcattttatcattgaaacatgaagtccaaggacaatgatacttgtaaaagtgcaataattcatccctttagaagcttcatctgttgaagagtttgtccttttcatttaatttaattggaattacctttctagttatgatgatttgggaaaatatatctttggattccatgtctaggatttcttttaccagcaaacccagtttctgtttctgtattttttttttcctcctttccctccaaagagggatttcacatgttttcaattagtcttgattgatttaacaacacaggttgttgagattacaaaaggaagcaaggtcaaata

SEQ ID NO: 63761 - DNA, 807 bp, Cucumis sativus
  Intron number 1 from transcript Cucsa.163630.1 (locus Cucs a.163630) derived from phytozome v7.0 (chr-ID scaffold0114 6; pos 79231 to 80037 reverse strand)
accgagctggctctcactgtctcagaggtgaatgaaaacaaattgttgtcgttgatgctcaaataaaccaatcaattagagtgaaattttatattaatagatcaaataaatatcttgaaggttgtgatgaataggtctctaaacttaaaacttagtgtcttaataggttcttccccactaaagtgcctcataggtctttggccttttaattttgtattttgtagattctcaacctatcagacagacgtattagaaactacctgtataaatttttttaaatgtctaataagtatccactagacacaaaattgtaagttcaaacaccaatcacttttaaagacaagattgcatgtttaaaagcctatgagacgttttgaaacttcataagatgtgttagactcaacttcaaatgtttgaaaacatccattgtagtttaacctatttaatgtatccaacactgtttttatttaaggatggagagaaaatgagagagaatacaagttttgttctttttagcaatcttgagcaattttacagtttcaaatcgtaaggttcttcctgaaaaccatcatatcagctggtcaataattgtttgaataagtaatgagttcacatatcacgacctcacttgaacaaatttgttctctaggttgcacaattgtgtccttgagttctaaagttatgaagtcacatatcttgtctaatgatgcaattaatgtcacttcgtttgttgtgtatctgattctcaaattatcatttgatgattgtacagtattcagtctttggttcaatattgacaattggagc

SEQ ID NO: 63762 - DNA, 829 bp, Cucumis sativus
  Intron number 2 from transcript Cucsa.280720.1 (locus Cucs a.280720) derived from phytozome v7.0 (chr-ID scaffold0263 3; pos 640580 to 641408)
actgtttgtgcagtcatcttcttcatcatttcttggtattttcctattcttaaatcaatatctagaattggatagaatatttagtgatggatctgtttatcttcattttgcctgatttctgtatcttgttgtgtgaatgaatcatttggccttgaagtttgaagtgttttgagtaaaatgctgtagattggaggatttgtgtatatgtctatattactaaaaggtaaaatcatggccctttcagaagaacttcaccaatttagttcagatcatatggaaatgaaaaccactataattcaagtaaaatttgtttggccaaatcattatttgttactaaatatctttggttaatgtgtttgcttaattgtcatcacaagatgtttgtatgacgatgtgattgtgataaagttattcttattctctggtttggaagtatgaactgatactaagactctactgagcattaaatcactattaaaaatccaaatcctctagtttggtaaccatttcatgttcggtattttaattttgaaaagtaaggacatgaacacgtttttacccatgttttaaaaaacttgggctaaattttaaaaacttgtttttgtttttagaatttagttaagaattcaactctattatcgaaaaacgacatcaacaagaaattgagaggaagatatagacttaattttcaaaactggatggttaccaaaatgagacttcagttgattcattagggcaaatcaaatctctttctatatgttcctttgacactaaattttgaaaaatgcaaccaggcatctcttcttgggagctgagtccttattgctgg

SEQ ID NO: 63763 - DNA, 510 bp, Cucumis sativus
  Intron number 1 from transcript Cucsa.273010.1 (locus Cucs a.273010) derived from phytozome v7.0 (chr-ID scaffold0251 1; pos 15204 to 15713)
cagcctctgctcatcctcaacatcatcattcacctgtgagtttgtctctcttaagttgttataccttttcgatcctttttctgtttgctttgttatgctttgtttattctccggctgttgcgctttggaagttttacgtttttcttcaggatatcttttatggactggatcactccgatttcatttcgtttgacttcaatcgttggttgtagtatccggtttttgaactaattgtgactaattttggttggtgaaccattagacccttttgtttgtcttaatcgttaatctttatgcataattttagggtagaacgtagaaggttagattccttctgttccaattgataggggatttcaaagaactactaaatatgcacgcatttttcttgtaatcaaaattttctttctagaaatgtttgttaatgggacttaacttgcgtgtgatatctctctgaaacttggcagccatgtctaatctttaattgggtgcctttgttcttctaggaaa

SEQ ID NO: 63764 - DNA, 763 bp, Cucumis sativus
  Intron number 1 from transcript Cucsa.267090.1 (locus Cucs a.267090) derived from phytozome v7.0 (chr-ID scaffold0236 4; pos 168392 to 169154)
acttaggttaacaatttacaaaatatacaacttattacttagctctatttcttttctttttctttctttttctttttttatatagtttagagatattaattatttacttgttgtctccattcttcgtttgtattctttaaattttacattttttggtttaaatcttaatttagatattgaaataattattttattttaagcccattgcttttctttttatttcttcttgtagttttcatctttttaaactaattaaaaagttgaattattaggaaaaaaatggcaattgtttcgtttttttcttagaaaaattaaattttttttcaatcccttatattatttgcatttttctttaaaaataatgttgatttcaacaaaaaaaaaaaaaaattaaactttttatcttctagttttcaaattttggtttggtttttaaaacatctctcaaaagtatattacaaaactttgaaaccaaaacacagaagaatatatttctttaaaaagaaatgtaggtttaatttttaaaaataaaaaactaaaatccaaatagctaataaacaagttttaagttggtggattttgacgttagttccaacaaattcaatctttgaggaagctttcaaaatgtctatagacgactaaactgtgaatttttttttcattaaatttgggtacatgtaccatatgtttaaaataaaattctaaatctactatttattttattttaggtgaacacctcattaacatccacaacacatacaat

SEQ ID NO: 63765 - DNA, 505 bp, Cucumis sativus
  Intron number 1 from transcript Cucsa.165670.4 (locus Cucs a.165670) derived from phytozome v7.0 (chr-ID scaffold0115 3; pos 984856 to 985360 reverse strand)
tgtaaggtaacttttcctctctctttttcttttttcattcaaagtttcattcatttaacaaaattccaacttagactttataaacaaaaaacaaattccaacttggcttctttaaaaaaaatacaaaattccaactcattacttctctgcaacaatccttttttacttaggctgagatcaaatcaaataaaattcaaagaatgtgattattgactgaataaaacgagtgataatgaagcaaattcaaaaggaaagtataataataataatacgtacatgtgatgtgatgcgttgtgcacgcaaaggcacgttgaccatatcaaagccttttgatattaagaatagaaaaacaaaagagcattcgaccttttgctttggttggaatctttgatttgaagacctaatctcgattttcgagctctattattgttaataaaatcaattattattatgtaagtgtagggataataatgaaatgtgtgatataatatctgacagattgctg

SEQ ID NO: 63766 - DNA, 547 bp, Cucumis sativus
  Intron number 4 from transcript Cucsa.250510.1 (locus Cucs a.250510) derived from phytozome v7.0 (chr-ID scaffold0221 9; pos 639410 to 639956 reverse strand)
gatttttgggcgtccttgcagggcagcttcctggggtaacataccataaactttatatttggctcttttgcttttctatgattgaaaattagtcttataaatactctctctttcttattggttctttttttctgtcactctctgggaatttttttaaagattaagtcaagtttgaaaagaaaggaaaatgtagttattgttacattcaactatattacttagacagatgtaaaccgctttaaaaatgaaaatgaaaaagttaggagtttttagaacttgtttttgttttgaaatttggctaagaaattaagtgtttagtttaagatcaaagccatagtaaatgagtcgtaagaaaagacgcataatttttaaaaactaaatgattatcaaacaagtatgcgttgctcgttttaaccatccttactagtgaactctatgtttgtttactaattgaaagttccttattcttatcctgagtgctaactcttattgaaattttggattcaatataggattggggcttctttgtgccatacttgattggcag

SEQ ID NO: 63767 - DNA, 495 bp, Cucumis sativus
  Intron number 2 from transcript Cucsa.198350.1 (locus Cucs a.198350) derived from phytozome v7.0 (chr-ID scaffold0135 7; pos 1435351 to 1435845)
aaggtactcttctatcttcttgcatttatattcttgaaactgtttcaattgtgcatacttaatttccaattttttcatggattggttctgttgttgtttatgaagtatgaaggtatcaacaatttcatattgattttgatactttctgctccaatcaaatttttttttggatattcttaatatggcatgattggaagaactagggattatccttacctcgagaaactaatgtggcaaggaacattatctgctttatttctgaaattctaatctcgttggctctaagtacaaataagaaaatgtgacatagctagtggattatagaacttgtgtgatatgaaatttgatatagttgcgttaagactcaacctactagttgcgtttttgcagtattctctgactcaaagcttgttaaatttgtttgtctaagaaatgtccataatttttcctagctgctatggtgctaatctgtctatccttaattattcataggta

SEQ ID NO: 63768 - DNA, 583 bp, Cucumis sativus
  Intron number 1 from transcript Cucsa.232580.1 (locus Cucs a.232580) derived from phytozome v7.0 (chr-ID scaffold0198 9; pos 475981 to 476563)
aagccaagctcagccaagctgatttcaagactaaggtgattgatacactcttctgtcttagcctatttgatttcgtgctcatattggaatttgaggaaaattggttgcaagtgaattgggaatcatgttttatgttctctgttttattatagtttgatttggtttctgtttctattgaatacgtaacccgatataaaaacatgggcaatgttgatgctattctagtgtatagagtcaggttacgtgcatgtttggatgtgattttaactgtcaaaatgattttttttacgttcaaaatcactttgatactcacctttaatcattcaaaattatttaatgtttaaatttacaatttttattggactcaatattggtttggatcactcctaaatcatcttcttttgcatttctgactatattactgcaacaatatggtctgttatttctaggatgaaggatcccctcaatcaaatttggtttactccgcctgtattggatcttatttggtaactttatcatgatgttgttaatcatttgtttggttgaattgaaaggctgctgaagtgacttcagaggtgaattc

SEQ ID NO: 63769 - DNA, 646 bp, Cucumis sativus
  Intron number 1 from transcript Cucsa.161450.1 (locus Cucs a.161450) derived from phytozome v7.0 (chr-ID scaffold0114 4; pos 1355161 to 1355806 reverse strand)
atagtgctactacttacctcgtcgtcagagatacagtaagaattagtttatttcaattcttcttttttttttctccttttaatttctttactttaatttttgtgggtttaattactgagaaagaaagaaaaaaaaactgttcattcagaggagatcttcaaaaagggggggaaataagagttataggaaaatctaattaaggaaatttattttattttttcaagggatgatctttcactttcttgggattctgtagcatgcgcaaaatagtcagaaaaaaaaaaggaaggatcttatatacagattgtcataatcatgaatctcttaaaaaatccaatatgaaagaaagtgcttttctatttcttttgtggattgaaaaagaacaaaaacaaaaacaaaacagtctccggaagccatgctgtgtttggattggattaaaccttaaaacaaagtggacactccacttcagttccactcaatgtttttgttttgttgtttgtttgttcttcactttcagattctgtgggttagttttgcaaataaggaaaagaggagggggtgggggtgaaattgaagaaggggttgggattgttaaataaatttttgttttggtgtgtgtatgaaggttcacgtactaccacgagag

SEQ ID NO: 63770 - DNA, 1021 bp, Cucumis sativus
  Intron number 1 from transcript Cucsa.163640.1 (locus Cucs a.163640) derived from phytozome v7.0 (chr-ID scaffold0114 6; pos 87636 to 88656 reverse strand)
ttgctgtatctggctcatacgtctttggcactgctgtaagtgttcattttttttcttcataaaaaggctctgtagaggcaaacttcaattcaacttgctagctgttgatgtgaacttaatgtgatgatgttataaaatggattgtttgtaaattgttaggtactttcgatttgaatgttcagggtatgtttggtatgagttttggatgttaaagtgctttccactcatgaaaagtgtatataattgtcaaaatatatatggtattttcgttttgagtgagagactgatggttgaatttgaaagttctaaatagagtaaaactaatttaaattgtttttagaaggaatacttttgttgtgttttgtcagaaaaagaaaaaattaagatacaaacttgtctaatatcatggaacaacttacttcagagtcgagaaaaactcataagatattaaattctcagtaagaggccgtctatagtttcaagtgctatagtaaattgtcagttatcttcaatttgaggggtcatttggccaatccatttattaagttggtggctaacaactcgaacttttttactaacaagtgtgacacttttatcgagcaactccatcttctcattcttttatacttttgcatttaccaaaaaattcttttttacttttttaatcaaattttcataattatagaagaacacaaccccaaacaccaactactaactccaatatatcgatctcacacttgttaaccaaactcagtgggccaaatgccaccaaatgttaaaaataagtttgggatggtaatgaaaacacttttcaaaatttttattatgtttggctagataaagtggtttctgataattctacattctaaacataattaaaatggtttccagaaagactcttcttccaagagtgctttgagaagaagtgactccatatgcacccatagttctgtgttgataataagcttttttatgctttttctcagattggatattcatcaccttctgaggctggcatcat

SEQ ID NO: 63771 - DNA, 913 bp, Cucumis sativus
  Intron number 1 from transcript Cucsa.259440.1 (locus Cucs a.259440) derived from phytozome v7.0 (chr-ID scaffold0222 9; pos 5934666 to 5935578)
ctgctgaaaaagatcctaccggtcgatacgttcgggtataatactgaatgctgggatttattttaattgctctgcttcattctatattgaaattttagataactgagtttttttattcatgggtaacaattattttttctgtatttttcaattttgaacaactttgatgcacgtggctatgttcttgagatctgttttattgattcattattccacatccggctatattaagttatctcaagattcaatcgtctctaggtcatccctgttagaatatttgtttccccaattaaaagaaaacaatacaatatatgccttggaatgcaagttttcacttcaggacaaaagaaacacaacccagacttgtattttcttttgaatagtttagtttgtgttttagaccatttacttccattgacagtgaggataagttgtgtggtgtctctttctggaaagtttattcaacgaggtcgggaaaatgtggcgttggtagattaaaaaatgtgcttgctcctaataaccactagacacaagttcaaagtacatttaacaactttcttcaatacatccaatggtgcaaaattgtcagctacgttgtggcagcctcttcaaataatttctcctgcttctggtttgcacttttgtttccttcagttatttatttaaatttgtgtattcatctcttttccctcgtctgtggacaacagtacgatgaaatcctgggaaggggcgctttcaagacagtgtatggttcttagacttgataactctgttctcttactgctttttagatgtcttgtgaaatgtatttgctttagtagagaaaactatatgaaggattcttttggtggtttctaagaatttctattttcttttccccctgtatttagttacaaggcattcgacgaagtgg

SEQ ID NO: 63772 - DNA, 567 bp, Cucumis sativus
  Intron number 2 from transcript Cucsa.202410.4 (locus Cucs a.202410) derived from phytozome v7.0 (chr-ID scaffold0137 6; pos 411582 to 412148 reverse strand)
tggccgcactctggccgactacaacatccagaaaggtatattttacttacattttaggtagcctacgaagtagacgagatgaatttagctgaaatcaatactgtagactcgcctggtgttgttgttcgttttcctattcccttagtctttgaacgatactggaataggactccggaccatgagttttgatgagttagtcgtcaattttagagacgtcaaagaccgtactggtcttcatcttaaaattttagaggcgttaatgttgaatgaatgacattctttgagattgggtggttgcttagaaatttctgttggtgtctgattgatttcaattgctgtcttttatacgaaatttgtagtgtcaagtggaatgtcatagaaacatgtggcttttagagttggctgattagtaattcaaggacattcttgcacttttgcctataaatacatgaactactttttgaatgaactatagttttctttgcgttttcattattagattaaatgtacgataccgtttatgtttgttcagagtcaacactgcatttggttctaaggcttcgtggt

SEQ ID NO: 63773 - DNA, 994 bp, Cucumis sativus
  Intron number 4 from transcript Cucsa.286570.3 (locus Cucs a.286570) derived from phytozome v7.0 (chr-ID scaffold0265 3; pos 2607445 to 2608438 reverse strand)
gtacctcagaggtatagtttttcctaaatacttactttcaagttttgatgaattataaccttttggctattgatgacctattttatggtttcttaattatatgtttggtgttagacccataaatttcatgcaaagcaattttattactggtttgatcattccaaataattttgtggactttgttgcctgttttaagttgaagtatttgaccccgctggtactttgaagaataatgttcagatttaacaggctggctgcaagcctacaacataaatgtggtaaatgctttagaaggtgaattagctaaaggttaggatgaaggccgaccattgctgttaaaagaacctaggccatagtaacacccccttgtgcccacggcctagcatcgcagtgtaaataggccattctgtcattgtctgccaataaacaagatttaagctaggccatatttttcgaaattgaccttctacgcatcctttttcttcctctgattactagtttattggcttaagttttttaaggttctagtaaaacatggtaggggatggatgacttaagtatgcagggatccttactgaactaaatagttatgactagacaagacttgccttttgaaatctttcccttccatataaagaaacctgtcactcatgaactttatgataatatcacaattttggagtttgggctcctttacttcaaattatttgcatagtgggagcatgagaatattgactttctatgaatatgttatttcaacttcttgatctagacaagcttctttaaaaaaaaattgtgtatctatattgctatcggctattacttgtatttggtcttcagtaacttgaaaacctggtatgatcaaaacatcaaagcaggtgcttcattatttttctttatatagtttatttgcctcaggctcatgcatcctactttcatctaaatatgatatcatgcagatttgggttccatcaaatcctaggggagctgaaag

SEQ ID NO: 63774 - DNA, 756 bp, Cucumis sativus
  Intron number 1 from transcript Cucsa.146880.2 (locus Cucs a.146880) derived from phytozome v7.0 (chr-ID scaffold0110 0; pos 238452 to 239207 reverse strand)
ggtcactccctccgcccttacggatttagccgtcggtacgtactttccactcaaatttcatctctttttttttttttttttttgtgaacatggaagattaaacttttgacttcttaagctatatgatactatgttgtattctatttttagattgagctgttagttttatagtcaaataaacagatgtgtaaaatgttatttaagaaagtatagaggagtgttaaatgatatgatactaaatttggcttatctcaaatgttcttcaatttgtttacttgattgtttgtggttcgtggttgttggatttaggtgatgcttgaattgtaattcatcaacggtaatttaaaaaagtgaacctcatttgagtacttttcgaaattgtataatccgcacaatcatcacacaatctaattgaaaaactaaagatgctcaattcagttgtggttgaaaattacgtgagactcactaactttaccattataaatatcgttattacagcaatatgaaaagcatgaatatgtcacattttccttattatctttatcgttgtgattcatagtttgtaaacagtaatggcaatgacaatttcatagttctaagtaaacgagattcaaaaagcgatctaatttatgttttcgatccaggttcagtattgttgatcgtcgataaaatcttatctcaacttttattactaactggttaacaagcccttaatttgcagggagcgttctgagcggcggagataacccacctttc

SEQ ID NO: 63775 - DNA, 749 bp, Cucumis sativus
  Intron number 1 from transcript Cucsa.303940.4 (locus Cucs a.303940) derived from phytozome v7.0 (chr-ID scaffold0295 1; pos 1730811 to 1731559 reverse strand)
aggatctctgatcgttctagcaattgttttcttcggtaatgtttttccccttgccttagatctggtttgttcttgtttagtttgctttagggaaagtgtttagatcttctaggtggtgtgagattcggttttctagcggtttatttcaggagattgtagtatgattgtttttactgtaacggatgtttgctagtttcgtggtggtatttgttatggagttttagttatagatcgaggagtatttttattggcatttgctgattttttttcgttttagacgggataatggtagctcaatggatcttgatactgttattatggtgatgtctttgagattcgtggcgatctacgcgacattctttggatttttgtttgctttctatgtttatgcattgtaatcctttatgtttctctatcttttaaatttggtttatgattagggtattgagttggtgtgttttatctgaaattttgttatagttgagttgataatggtagtggtgtttcattagatgtcactacatgtcggcatttctttttagtattgtatcgctcgtaggcgtaatgtttgagtgtagtagtccatggatgttcgttgaattgttgatttgatttttttttagtttaaatgaaggaaaatgttgggatgcatttgtttttttttttcaaatgtatgagtttattggtattaacctggtgaaagctgcattgcaggaggtttgtttgcaatttccattgcgaaagaggaa

SEQ ID NO: 63776 - DNA, 756 bp, Cucumis sativus
  Intron number 1 from transcript Cucsa.283740.9 (locus Cucs a.283740) derived from phytozome v7.0 (chr-ID scaffold0265 3; pos 755511 to 756266)
tcttgaagctcgaccagccaagggcattgatctaggtgagtctgctttcactttttcactttcctctgccatttttcttttcatttccaattctccattctttgttctggatttcacttctttacttcgtcgttgatcagaagataatagtgagatcgaattctatgtgtcgcataccttcagtttcaaggaacaagacaataattcaaccgcactgtccacgttatgtatagagggttttgattcttacctttatagctgcataacaccgttcttagggttcggacctttgaatctgcgatatttctcacactgttttggacgtttttaccgttttcctaatgttatttagccttatcttatcttgtcttcagatcttcgattgcggatctgatttgtccatttctacttgttactttttcttggaagtcgaggattataaatcaacaacaaagcattcaaaatctctagtgcaactagtgttttccatctagttattggagatcgtttgtagctttgattttgtccactttcttattttgaacgtctggaagacgttttattatatgggtaaagttgcgtttgagcactgttcttcacctctgggtttccgttcttatgctatgtttcatgttgttgtttcccccatcgtccagtatctgattcttatttggaagccgtcttcttgtagctgcgaatcggttttctttttctccctcatcaagtctttaattttacaggaaagcgctgaataag

SEQ ID NO: 63777 - DNA, 383 bp, Cucumis sativus
  Intron number 1 from transcript Cucsa.163570.1 (locus Cucs a.163570) derived from phytozome v7.0 (chr-ID scaffold0114 6; pos 35733 to 36115)
ctccaatttgcagcattcttctcgttctctttgaggttttcactcagacacttttgcaaattgctttctgtttatagcaaaatcataagtttcttttaacatttaacgacaaacttattggaatcatagtttttttataatttcattgcaatgaccattttttgttaattcgatattaggtaggtttcatgactctgaactttgtttttcatctttgtacttcttgtaagtaaactggaagagaaattaggatcctactgttctatttgtagtgtttttctttctttgtcaattgtttttgagtttgaactctatgttatctcatagaagggaaaagctaggattttgatatttattactattattatttgcaggcccaaaat

SEQ ID NO: 63778 - DNA, 706 bp, Cucumis sativus
  Intron number 3 from transcript Cucsa.163570.1 (locus Cucs a.163570) derived from phytozome v7.0 (chr-ID scaffold0114 6; pos 36672 to 37377)
tataggtgtgtttctgtgtactttaaagtttaagatacctaaatagtttgtgcaatttttgttgaaatacaacatctagcttgcagatttaaactgtatggagcctgccatctgttgtcgtgcgtgtatttatgcttgtggagtagtcgagtttgaggaggatggatcacaaaagaaagaaggaaaatattttagttacttttttcttactcaggcgtgtcactgcagtgatagatggagctctatatatctggaaaattgatgaaaacttaaagatctacaatagagattttgttcatacaacatatttagttgtggagatgagaaatacgtttcctgccttgatctattttcagggtcaagcaccactacccgctgtctgccctgttgttcagggtgataataaatttgctttttgatatgatcgaatcctgcattttctaggagaaaatgaacgagagatttattaactgatggatcacgggaagtcttcccacccctttttctagatgttagaattattcaccagtgacaatggtgtgctaagttgcttagatgcagcagcatccttttgtgtcatttttatttcttcttgtaattaaggaagtattttcttcattaactctgaaatgtttggttgtttaaagaaccatcatatcttggtgaactgtagttattaacattactgttgtaggtgttggcataa

SEQ ID NO: 63779 - DNA, 696 bp, Cucumis sativus
  Intron number 1 from transcript Cucsa.277790.1 (locus Cucs a.277790) derived from phytozome v7.0 (chr-ID scaffold0260 4; pos 388246 to 388941)
ccctggtgagcatttcaatgcttctcatatgattctggaggaatacttagaagagtgtacggagcgtgtggattttgatcttttcgatttctattttgaacatcttgaatcgtgttttagtcatagtgtatttctttgatcttatatcggcatgtcatggccaaattaacgagctctgtctttgatggggtgaaagttttagtatagtgttgcattttcttaatgccagttgagctgctatgctcactctggcatttccaactccatattatgtgttctcaattgttgttagctttgttatcattagttagtttgatcaatcttttggtaatcagttattgcagactttcttttgtcatgtaagttggccgagtaattttctgttactttcctcaagctcatctatataagagagtttctattaccgccttgtattgtcatggataacaataaaatattcatcccattacattgttgtactccgcgtgtatacttgagttagatgcacaaaaatttaatgttctcgatgtctaacagtttgatctttttggggtgaggaaagattgtggacggtggtttctagtaagactgacagcttcgattttggttttcttggaaatattaaaattttaatttagttcgctgatcctttcaatttcaggtgggcagttattgcttcatcaactttagctctca

SEQ ID NO: 63780 - DNA, 458 bp, Cucumis sativus
  Intron number 3 from transcript Cucsa.172100.3 (locus Cucs a.172100) derived from phytozome v7.0 (chr-ID scaffold0119 6; pos 20940 to 21397)
gagcattcttcttcccagaagaaaacgaagggaaggtatgtattatcatttgaagagccttacaaatgttggtttgcttcttggtagcttaaatatctaaaatggtcgttttttaggggctgtaaaagcgttgtaaataggagtactgtgtctatgaaagttagtcttctatataaaaaaaagctcgttatctgggaattatatattaactgttattttatcgaaggaaattgtgtcatttgggcatgaatcatgatcacatttcctgttttgttttctccaaagcacattttacattttgattttgattgtaattcgtttggaataagcacttattgttattcaggttgtccatgtaaccattgggtgatctttcactttttttgagagctatccagagacttattatgagcatgtttagtaacagctattgctttggtaataattcaggggtcgcc

SEQ ID NO: 63781 - DNA, 751 bp, Cucumis sativus
  Intron number 1 from transcript Cucsa.302470.1 (locus Cucs a.302470) derived from phytozome v7.0 (chr-ID scaffold0295 1; pos 630248 to 630998)
cttagtaagtcgttttattcaactcattatgccattcgtgtttttcttaaatgtgttaattaaaatattataaagatgacctcctttataatttatttatttttgtctaatggtctaacatggttttataataaaatacgaaatatatatcatacaacagtcaaaacactaaaacacactataaaacaagaagaaaaataagtttttcgccataataagtatatataggtagaaaatttgataataagtatatttaggtacatataggctgcaaaaagatggtgcaatgcactcaagatgacattcgatttttcataaacagataggttttaaattgttatatttatagacttaaaataaaaattagatagcaaaaactaaaacataattattatatttcatatttttagatatttgtttagtatacacatatttaagaatataattggattctaatttttatgcagtgatatttaatacactatttaattatcaaccataaaagtatttgcagttataataaagtattattaattaacacataaacattttttactaaattttcaattgtaatattatataacgtaattcacatttttattggaaatatatatagagttcgcaatatttggataaggggaaatatagagttttgcaatattatataattcataatatataacataattttgttgatcttttgttattgggatcagttttcaattacccacccggagaccacaacgtgttc

SEQ ID NO: 63782 - DNA, 971 bp, Cucumis sativus
  Intron number 2 from transcript Cucsa.181910.2 (locus Cucs a.181910) derived from phytozome v7.0 (chr-ID scaffold0125 1; pos 120286 to 121256)
cgcctcttccactccaccgtcatctcctttttccggtaagtttcccaaccaccgttccatgatatgccactctaagttaagtatatgtgtggcttttgattacgtctttttgtggggtttgtgagctgtgcccttctcattgggcattccattaatcctaagttctaataataattttaattcaatatgtattgattattgttattatgaaatgactattctacccctcctttgtacctacaaataataatgcattattcccaaattgcccatactctctttttttgatgtgaaacaaaatatttctttcaatttcactcctactatgtttagctatgtatatatatacaaactttattcatcaaattaaaacttgccctaacatggattattttcttttttcttttttgttaacttcaataattatagtctatagtgtgaaccattaatttttgaggtggtaattattaggggaaaaaaattaaactattgaaatacaaattgtttaaattagtatgttataggaaatatgagtgtattatctaaaagaaagagggagatattgtgttttctttaagcattttatttttgtatgcatttgtcttgtaattttaatatgtagggataggggttgagatttgattcttgatatatatttgtttgatcggtcatgaaggtaattatttttaataagttgaattgcatcttagtggatcttgataagggtggtttcttctttttcaatgtggggacgaatctattttgtatttaatgaatcttttaattatgcccacaaggctacttgatgttgatttttctagacatagattcatctactgtaattatttgatgaaagtaataaatgtgatttaaaaaacgattatgcaacaagtcaatattaacatggttggttcggttgtgttattacttacggaggtagagaatcatttagatttcgaagaagatcgaca

SEQ ID NO: 63783 - DNA, 951 bp, Cucumis sativus
  Intron number 3 from transcript Cucsa.201510.3 (locus Cucs a.201510) derived from phytozome v7.0 (chr-ID scaffold0137 4; pos 409774 to 410724 reverse strand)
ataccaaacgaattgataaggtacgatcaaaacattgtacttccaataatttaactttaaaataaatttctacgttttcaatatttgaatatttgaatttcactgttaaattttaaacataaataaataaaataggtaacttaataaatactctataaagtttataaactttgattaaacttttaacatacccttttaatctaaaatatatgagcataggttttgaaaatgatattttagttgaagatataagttaacaaccatgaggtatatatatagtttaaatttcttactcgaattgttctgaaaaagaaataattcaacttattataatttatagatagagaaaaaaaaaagaaaatgaaagggataaccattgtttgactttttaaaattaagtattgaaacgactttttatttatatcttcaaaattcgtcatacaaagtttcagtgactacttgtttagtaattatttaatttttttttatttttaaaagtttctctgaatttttaactagttaaaagaaaaacatatttttcaatttaggtttaattttagaaaacctgagataacaaaataattagatttaagtatgaaatttgtgtttatagacttcattctaaaaaattaaaaaccaaaaatatcctggacataaaaattagtttttacaattttttattttttagaaaagaaagaagcacattttttaagtatatatatatatataaaataaatcattaccaaaaaaagaattgcataaataataaaatggttttttaagaaaaaaatattgagagatttcaaatttgtgggaaaataccgaacaaaactgataagtgaaattttgaagtttttttttttcttccctccatgaggaaggagaacaaatatactgaaaactccatcaattgcagattcaaagaaggctggcacaaaatcgggaagcagc

SEQ ID NO: 63784 - DNA, 758 bp, Cucumis sativus
  Intron number 3 from transcript Cucsa.303190.1 (locus Cucs a.303190) derived from phytozome v7.0 (chr-ID scaffold0295 1; pos 1172205 to 1172962 reverse strand)
gacttcctggctttgaaccttctgccttggagcaggtaagtactttagtttgatgcaatttagtccaactgtgacatataataccttcattttctgtgatacagatgatgtaaattgtgggaatacttgtagttgtcttttatctcattctcagttgagtgagttaattttaacttgtggggctgtttgggccactgacttatctcaaagccaacattaaaacaactccaactaagctaaaacaatgcctatcatagtcacaaaaaccagccaacaaaagtagttttgtccagccataagaattttgtgcagttcgtcacatatatttttaactattagaaggtattaaatcatcattcaaaattttaaagttaaatttgattggtaaaagttgggggggcttgaccttcaattgtaaatggatcatttgaatttgatgtcatatgacttttatctagaagaaaaatctggttttgtgtgataaacttgtgatcctttgcagcattcttgtgtaatctgactaggttcttataatcatacatccattcctataaaaactgaaaacatataattatgggggttcatcatttatcacaattgcagctgacttgccaacaaaacaagaccttagttgggttttgtatttatgtcgaatgaatcagtttcatggcttaaatattgaaagcttttatagaatgaaatctgatcaggtattatatgcagggatctattgcaccagttttgcactgtctgagcac

SEQ ID NO: 63785 - DNA, 757 bp, Cucumis sativus
  Intron number 1 from transcript Cucsa.273720.1 (locus Cucs a.273720) derived from phytozome v7.0 (chr-ID scaffold0251 1; pos 772255 to 773011 reverse strand)
cataaatcctcacaagttcaagctttttgttagtaactactttaattttcttatacacacacacacacacatatatatatagcatgtaattaaattggagagagagaaaggaaaaaaacaaacactgaataactggcagttacatgcacatattcaaagtaaaaaggctttttcaactaaccagcaaacttaaaagagatgggaccatgggtattcatagaaatacaagtttcacttttcagaaaaacaattttgaacaaagtcaagtgggtgacataagtcgatgataaaatttttatccaagttcatttttcctacaaaaagtgctttgaagatcattttatcattcatatagaacaaggtccacaaacctgttgataatgatgggtggatgctggatattgaatcccattttaaaataacctgtatcaaagagtttcttttggatattcatgaacgtttagcctagtttgtacatgcaattgcctggcctcaactcaacattgtaacaatttctaaatcatgtctgctaaaacatgtcatttttgtcatatatgtacctatttagtattgataacaagaagagtttgatgcatgtatgacaaatgttgattctgttttcaagtattcaatacgtgtctgtcatggacacgctggtcaaactaaaattgtctgtatgtgtggttgtttgatataaactgagctttgtgtctgacatacaggaagagaagggctttcaggagaagaaacactgaga

SEQ ID NO: 63786 - DNA, 265 bp, Cucumis sativus
  Intron number 5 from transcript Cucsa.197510.1 (locus Cucs a.197510) derived from phytozome v7.0 (chr-ID scaffold0135 7; pos 888496 to 888760)
tcaaatattggaaacctttcataccttaccatactgtgagagtctcagtctttttcccctcttcatttttggatgattaagacttcttgatatcttagctaatatctatttatgaagtcaattaaaagaggcatttatatcgtaaattttgcaattagaataccattattttgtttgttttctgggtttttgtatctgttgttgttttgttcttcacccttgctacctaattttgattactggtatttaattgtagtgatttatc

SEQ ID NO: 63787 - DNA, 952 bp, Cucumis sativus
  Intron number 4 from transcript Cucsa.183420.3 (locus Cucs a.183420) derived from phytozome v7.0 (chr-ID scaffold0126 1; pos 344800 to 345751 reverse strand)
tttttgggttcacatttgagctgaagctatcaacggtatgtagttcaatattatttggagcatgttactttcatcgctgtcttggtgtaaattgtttaaattcttccattcatataatattgattctcttttgaccaattggagtatcttttccaacttctttggcttggggcttccttcccccttcccatttgcaattttatatatcaatgggaaattggtgacaacgcatatatttaataattaaaataattttaattacgttcatttttactctcatttgacttgaattccagcagtgttgatacatttttttttgttagataggatgccttccacttttcctcgggagtgaaaatattagaaacatcgacttcttttgtttcttgtttgaaacaatactgtctataatgcccatgctgactttgtgggtattgaaaacatgaaacctttaggcttgatgattataacccatcatttctgcacttgagtgacagatattttcatgcactatcatatgatcttccttatatatcctaaatcttaaaaagaaaacatgtaatctttgtcaactaaggtgattagtgaaaaaaaatggctctctctctctctaaactcaatgatcccaacttcttgtttatctttggtcaccccatcctctcaactctgatcacgaaccatcaatttccaaagattaagaacagacacgatatcctaaactcttttgttcgagatttagatcaagactcttgcatgcagttttgacacagaaagaactaagagtttgcggaatcagagagacatcgttactctctgctcaactctcaatctatgtgcttttttattctttacttgtaagagtgtgctttgagtatcatctctccattttgttataaatatttattattatgctgcagaggccagagaaataccttggagatttggaaacgtg

SEQ ID NO: 63788 - DNA, 272 bp, Cucumis sativus
  Intron number 1 from transcript Cucsa.149810.1 (locus Cucs a.149810) derived from phytozome v7.0 (chr-ID scaffold0111 0; pos 710121 to 710392 reverse strand)
accagtgtattcgctcttcgcccttgcctctctctgtaagtttagttcgctgattttgtttagtttgttgaaagtttttttcttagttatatcttggaatgccggggaaatgcttggaaggtagggaaaccgtttgattttgagctgatgagaagaattatttaggaaaaattgacacagtgaagcctctttcctgttattacgatgttgttcgcaacacttgatataaaacgatgttcgattacattgaattaaggttgttcaagtgcggc

SEQ ID NO: 63789 - DNA, 945 bp, Cucumis sativus
  Intron number 2 from transcript Cucsa.217820.1 (locus Cucs a.217820) derived from phytozome v7.0 (chr-ID scaffold0165 8; pos 70476 to 71420)
aggtctcaacactcaagaccttgtcactctcgtgggtaagatatataatcataaacttatttatcttattcattagattaatccctatctaaatttatatcacatgtttgacttctaaattttttaaatagtttgataacttcctaaattataatagattctatttgtattctaaaaaaattataactagtttacctaatatctataaatttgaattttatgtcaaattaatacacaaaattttaaattatgtatcatagggtttagggttcagaagagaaacactatcaaacataaattttcaagatgctatataaaacactttataaaactcatgaaccaagccatcgaccttaaagtgttacgaaatcgacgagattgtgaaaaagtgttaacttatacctacaagatagatcaagagggacaattctacgaaagaattttatgaaatacaaaataaccgtgcatctacaacttagagagtttacataaacgaatttctctaaacctaggaattaatgatagacataaattacataaaaatggacaaatatatatgtaagtcatttaggttttggggtcattgtctccaaaaccctgctaaaatgtgtacatcctcatacctaatcgtttaaaatgtcatttcaacaaatttaagatatttcaacgtaacggaacttactaaaaaatattagattgttttcttgtttttcgttcttttcatatcgtccaattcagtgacccagtataatcacaacttgcaacatatggtcatagttcttttatagaatattttgatatattttccccggcccatctccttgccctcacattgtaatgcaaaatatgatgagtactattgctaaaaacgacgtgaactatatataataagaaaataatattgatggatgttggagcaggtggacacacaataggcacaacaca

SEQ ID NO: 63790 - DNA, 793 bp, Cucumis sativus
  Intron number 3 from transcript Cucsa.160700.3 (locus Cucs a.160700) derived from phytozome v7.0 (chr-ID scaffold0114 4; pos 837938 to 838730)
gggtcccgtgcctttggtcccatcaaaaggtatggttataaagtgtattataggtagtctgagctattttctatctgtacttttctgcaagccacacggaacaattccagcatggttagataatatacacttcaagctgttgcttcttggtatgaacaattccggcaagtagattttgcaacaatatagcaccattcaggaaatagtctctgttacttcactctgtagaatgtttctaaccagtgaaatgcgataccatcgaagactttaccataaggagtagagctaaagtcctatcgtttgataacagatgcacagaaacgtataagaaatttccttcttagaaaaaaactcttaaagcccaaaatgccatcacgttgccacacaagaaatgtgagttcttccatggccattgttaataattatgttagaatgggcaaggaaggaatttcaacagttaccacggaatcctaaatatctgttctattacacaattaaggaccgtagccacttcaataaggcatccatctacactaactaaactaactaatcattgtctccctttttcccactgaccctcctggcgaatatgcagcacaccagcggtctcatgctgctatcataaccatcttgtttcacgttttttacttatcattatagtttgttttgttatcatattcaggacctctatagtagatataattacatgtattttgttggaaattaacttcgaccatctggtgaagtgaagggactcttgacatgccttcgttattttactgcttcatgcagg

SEQ ID NO: 63791 - DNA, 624 bp, Cucumis sativus
  Intron number 1 from transcript Cucsa.205170.2 (locus Cucs a.205170) derived from phytozome v7.0 (chr-ID scaffold0141 6; pos 293249 to 293872)
gataaaggagctctcgttgaattttacgctccgtaattcgtcttcttgtgatttgaaattgtaaagtttgtgaaatcttttgattctaagttgtgcttttctgtgtgttttacgtgcgattgcttggttttagatctgtatgtttttgttagaaatttgtagtcaagctatctacttgccttaagtggaagagaatacaaaatggaatcgtgaatgatcgataccggaaatgttcttgtcttatttaggggatatttttaaatgtctatgcaagggtttttcatatgtcgcgtcggtcatttgtatcttagctattcactgttcactctgtctgagtatgtagttttagttatcatggactagggatagatctgtatgctgtgagaagtctggggatttatccgccaattttattaatttacttttgctgtagtttttattaaaagagataagttttgattggaacgatcgtgttggtaaaaaaatttccttcatggggaatatctgtagtcatcgggggatatttccaattgtttgctgtttatttccccgatcattagaatactgaatctttaccctgtaatgacaataggtgtgggcactgtaagaagcttgcgccagagt

SEQ ID NO: 63792 - DNA, 749 bp, Cucumis sativus
  Intron number 3 from transcript Cucsa.149570.3 (locus Cucs a.149570) derived from phytozome v7.0 (chr-ID scaffold0111 0; pos 422882 to 423630 reverse strand)
gacaatttgtgaaggtctctggggtaagtgtgtttcacgatattagttaaatgcacacgttttgcgttcttctcccaattttgatatttacacaacagttatcgtagaacatactgtttttcatgacataactacatttatgtggaactaaaagtctgttaagactacaaaaaaaaatgttttttagaaaactcttttggtagaaaaaaaatgtttaaaatacactccaaaatttatattaatggttgccaaacaccttaattttttttaaatgacttattttttaaattgaacacttgagaatgtattccaaacacaccctaagtttggtaaaaattcttatttccatttcaaaaaaagaaaagaaaaaatcactagaattggtttacgtaagaatttccaaagttcacttatagaatagatatattgatgtttttaaagaaatttctgtccgactgtagtgtgcacatagagaactttttggctatttacatcttctgatagttctgatgcatttaattgttatagatgccttatctgtgcccattttctaatatgagaccgatcactgatgtatgttcgttgactattcttttaccttgagaagtgaaatgttgtcgttcctcaattgggaaacaaattcagcttttattatgatgttatcattatactggtttacttggttattgttaatttgttttgatcatgttctaggtggttacctgtggtaacgtgccccttgagtcatc

SEQ ID NO: 63793 - DNA, 794 bp, Cucumis sativus
  Intron number 1 from transcript Cucsa.165900.1 (locus Cucs a.165900) derived from phytozome v7.0 (chr-ID scaffold0115 3; pos 1202018 to 1202811 reverse strand)
ggagctttcctcctctggtcctcttgcttctctaggtttttttttttttttttttttttgagaattttgtgaagtgttctgttcaatttgatctgagttttggctgttttaaagtggatgtgtgcgtttagtttcgtaatttgaaaatcactgagagatcgaattgactgtgattttatgagatgaaacccgtttttcattagagaatttttctttgaaatagtgattcgtttattgagttgacaattgtgatcatgaacgatgttgtatcgagcatttcatttggttatcttgcttttggaaaccaaaggaattcacgagggttgcgaagaattgggattcttctttctcttgggtactttctgattcactatctgattcagagtggaccaaaccaaacgaacttttcaagcgatcacgtacaggaattacactgaagtgatcttttgatatttcttgtaaattcatgacgcacttctatgcatgtaagaatcttttcgcctacgttggcttctgtttgtacatgcgtgaatctggatttggagtatcatttctgtatgattagttcaatgctatataactcctatgttttggaaaatccacatcttaactaattagaatgattaaacgaagttctttagaagtgaatttcttcagaaagactatgataagtttgaaggagaaaatgtattaccttcgctatgtagcaatatgttcttggttgccttttccttgaacccttttattcatacctcaaagtttcgcagcttgcagagattgttagtcaaggaaaa

SEQ ID NO: 63794 - DNA, 897 bp, Cucumis sativus
  Intron number 1 from transcript Cucsa.283110.3 (locus Cucs a.283110) derived from phytozome v7.0 (chr-ID scaffold0265 3; pos 338458 to 339354)
tcttgctctcaagatcctcgattccattcctccaggtggattctgctttcatttctcttacgaagttcattccatcttcgaatttgcttacagcaatagctcgtcttgggattttatcattctttttttggtattgaagaaaaatgttcggaaaagagtaatagctgatatgagactcgggactgcgtttggtttgatgtttgatttctaatatgttggaattcttgctgattctttgtgtataataggttttcattagctattgaagatttgaagctattacgctgttgctttgtgtctggtatatggacttatttttggtaataatgtgagtgcgtctttaactagcctgaagttgtattgctgttgatggtaactgtaacatacatagttatcattgatgcaaaatggtgtcattttttaaaggttctaatatggaatgtgaaagtgaacaagggtattatgagatctggcctttgtgattgtcttgatttctttaccattctgaaatagctagaattgtgattgatgatggatatggaggcagacaggtattttttatactggttcctattgaactgcattccatgaaatttaggtggtttatttctgtaacgttgaagttgtgaattcattggatagaaacatggacttgttattttcttttcccacaatggtgcaacaccttaagctgcggagggcataaaaaacttccttacgtgtttgtttatcctgtagcacatgtgctttgaattgtgagaccagttattttgttttctgtttttttttaccaggattttgttttatgttatcttggatctagctagaagttatggttccttatcagtaaactttcttgttggggcagaacaaaggagatcacctttgcagcgtgct

SEQ ID NO: 63795 - DNA, 897 bp, Cucumis sativus
  Intron number 2 from transcript Cucsa.300650.3 (locus Cucs a.300650) derived from phytozome v7.0 (chr-ID scaffold0293 1; pos 189205 to 190101)
gcctccgctggcagcttcttcacttcgcccacaaggtacttatcgtttccccttctatattgctttctttcgcttttctcttctccctttttctttccttcttctgatttcctctccatcatgttttgcccgaatatttgtcgctctcagtatcaattcctcactaactaactcttctcttcccccctccgttttggatctttattagtctttctatctctccccgacaaacctttcttttcgtttcagcgttgttctttgtacgttttcgattttgcttcaattggaagttcattattcgtactacttgactgtatgtgttgataattgatgctgctacattgtgtctttgtcttgattttttttttgtttttctgattcaagtgtgcaatgttttattccggcgacgttgtttgccgaactttctttttcgtcttctgatggccttagtggagttgtggagttggaagtgtgagttgcgagtggaaatgaaaacatttcccaagtaattattcttagggattaactggtaccttatatctgaacctgaattttagaattaggatatgagtaactggatgatgggacatccaatgggtttttcttctcctgctttatttacttctctccggaaatggtactgttagctttttatgcaatctaatacaactgagggttatgaatgtcacttccttgattatggcacgtatttacatcaaacgtttggttcctccccgtatagtgctagctgtttatttttattttgtctttttccaattcaaggtgtttttagtctggaatgggcatttctctttttctgtgataaatcttttcattgattagtggtgggtcgtggtgataaaatgcaggagctcaattgaatttgctctttttgtg

SEQ ID NO: 63796 - DNA, 553 bp, Cucumis sativus
  Intron number 3 from transcript Cucsa.178470.6 (locus Cucs a.178470) derived from phytozome v7.0 (chr-ID scaffold0122 7; pos 698513 to 699065)
attattataggtgggtttcaattaattcataaacttattatgaaatctacttctatggctttgttttaggttttctttagagggtgaggatactagactcaaatttgaaactgtgaataagttctttatttatggaaatataatagtttatttgataaaaataaaataaggatcgaggttcaagccttctagggcacctttttgtttgggtttttttttatatacaacgcaagtgtccagactagcttacgtgcacctcgattaatctcacaagacaacccgtcgaccctacaaaatttggataacatagaaacttctagtcctagataggtggtcaccatggattgaactcatgacttcttagccttttgtcaagggaacacccttatttatcattagattagctcaacttagatggttaatgtatctttcaaaaaattgcaagagcattcatcatatgtcatattggcaatcagtaactttcttgactagaaatacttacatatatagttggatgagatgaacaatcttcgtacgattttgtcttcaggtg

SEQ ID NO: 63797 - DNA, 484 bp, Cucumis sativus
  Intron number 1 from transcript Cucsa.154550.1 (locus Cucs a.154550) derived from phytozome v7.0 (chr-ID scaffold0113 2; pos 84924 to 85407 reverse strand)
ctccctcggtttcatcgctcggtcgatatagcaaggtactttctattcttctttctcagatcagcatatctgttttgcattttgttcttgtcgtggcgcttgcttttctgcttctgagggagtctgtattctcctgattttgttttgatcataagaagagagtttaattttgtgttgatgatgatttcgttgacatcagcgtttgaatttgattgttttctttttattttgaaatgaactgagaatgagaattgaaggaaaatattgtagacatagctttgagttcatgtttaatgctttctttgccactttcccttaaacccattttcacattttgtagataatgatgttttgttcttcacatgattgaaactgttctgttcagattacgaatttgtagtctgtgtttgtaggcgtgaaattatccagttgtaaaatttggttgagcatttgttcttacctgcgatcatttattattttcaga

SEQ ID NO: 63798 - DNA, 652 bp, Cucumis sativus
  Intron number 1 from transcript Cucsa.219430.1 (locus Cucs a.219430) derived from phytozome v7.0 (chr-ID scaffold0165 8; pos 1213707 to 1214358)
tatctacaataccttcgtcgaattgtcaaggttcgctcactctctcagattatctctattttcattctctagcagatccgtttcttttcttaatcggactcctacttttcgtatccaatttgttaaactattcatcttcaggcggtatgaggttatctgatttcgtgttattgttgtttgaggatgttttatgccttcaatgtaaacattggagtagtgttgtcatagttcttattgaatttttgttcttattttgtattttagtcgcgatttatttttacctgcttctttttggttagatcatttgttgttctgttattcgtgatttctgtttgattctttgatgtattcggcgtggtgccacgtggagtcttcgatcttgtgaattcaagcagtattagttggatagttcgagcttggttgtgatgagaacaagtttcagttgttttctggatttgttacataatttattgcttcctcaacatgctttggatagttctgtccttgaaattttgtcatattcttggttacaaaataaatttttgggaattggcctcgaaatgaaacgaattttctttcaattatcttctcatctgatgtagcttgaatttaacaagttatccctttatctggctgcttgtagtggcaacaa

SEQ ID NO: 63799 - DNA, 926 bp, Cucumis sativus
  Intron number 3 from transcript Cucsa.146850.3 (locus Cucs a.146850) derived from phytozome v7.0 (chr-ID scaffold0110 0; pos 215370 to 216295 reverse strand)
cgaccaacgactggattccggccagtaacgatctggtaaaatttccacgattcactttcaactgattgtgttggcttgaatgaattcgtttaactggaagaacctcttttttcaacaactacattttattctaatcatcattctacttctacttttacagcttgaattcaggttgcatatattaggtttactaaactctgaaaagatataaacttttccaccattacttgagtttgtcgcacagaaaattacaaatttacttctgaattttaaaatttgtgtcatttaattcaacctttttaaaaaaaaaaaaaatttgtttaataagcccttgctaaatctaatattttctaaaaaaatcaatccacctattaaatataaaaacttaaaatattttgattttaataaaatatggatgaattactatttgtgtttaattatgttatttagttatacttgtaaatattttcaatagttctgtcatttaaataatgtcttaaaaaattaattttatgtttagtaggtaggtggattaagaaaatccgaagtacaatgaaagttgatggaccaaagaaaattttatagtttagaaattaaatacatcattaaaaaattaaggtaaagttacaaaattaactctagagtatactagtagtagttacgattatatcctcaaactttttaaattttttttatacatttggtatctagtttctccaactattacaacaattatataagtttacgggatcaattttagaacttctatttgtaactttgaaagttaatagttcaatttttacaattaaaagataaaggaagtatcgacctatttggagtagtttttgcaaattttcaaaactaaaggtattgaaatgaacttattttcagggacattttactttgggcttagggaagccaaacag

SEQ ID NO: 63800 - DNA, 584 bp, Cucumis sativus
  Intron number 1 from transcript Cucsa.175530.1 (locus Cucs a.175530) derived from phytozome v7.0 (chr-ID scaffold0122 5; pos 192012 to 192595)
ttgcatttgcaaaaaccagacattatactttcaatgtatctttcttttttcttttctttttttaattgacaggaaaaagaaatctttggttttctttaatttgattcctcattggtggtttatacccacattttggtttctgcttttgcattctttctttctttttaagaatttattttggttagtaatgcgttattattatctgttcttgctttactgatgtctttaataacaagttgtttggattgacattttaatctcttataaaatcaatccaaacatgcatgcatgcatataaaggcttagaattacaaatgaggaagggatgaaagcgtaatttaaaattaagagttattatattgatcattattgtaatataaacattaagtgttattatatatatatgtgattcacaatataacactattatgtctatactcttattaaaaggcaatgaggagacttcattaaaattttctttttagtgctacttaaatatgttgtactttagtttatgtaacttattggaattatacaataacttctaaatggttgggtttttatgttatagataagataccaga

SEQ ID NO: 63801 - DNA, 382 bp, Cucumis sativus
  Intron number 2 from transcript Cucsa.260020.1 (locus Cucs a.260020) derived from phytozome v7.0 (chr-ID scaffold0222 9; pos 6332605 to 6332986)
ttctccagctctcctcattccttttcttttcctaggtatatctcctccccctttctgctttgaaaattaggtagacaaccgtggctacttttaagggtttgttttctgttattatctgcctttatcgactgattgtaaaatcacaccatttgcgagacctaacaaatcgttttctcactgttttccccccctgttgttcaactggttttcttgtgagaagctagtatggcacattcatttaatttattttatagaatgcctggaataatgaataaaaatacattgattagtaggtttgtttttttagatctcaccagttgaagataggattaactgaatcaaatttcatttccgcagaattttttcccttggaaatttctct

SEQ ID NO: 63802 - DNA, 799 bp, Cucumis sativus
  Intron number 3 from transcript Cucsa.275730.1 (locus Cucs a.275730) derived from phytozome v7.0 (chr-ID scaffold0258 1; pos 648326 to 649124)
gtttgaaaaggtaagaagttggataatcatcccattatattagagagtatgaaagactaactgaactttttttcccacttaaaagtatctaattgttaatcttttaatatatggttcaaaaaatgctggcaacagtaatttaaagccatgaactttaaaatattatctacttatttgtcacttcatggttttcctttgtatatacttattcgtcaaattcttgtgagaagatgatatttggctttgtagtgctattgtccaactttcttaaataactttgaaagggaacgagtatcatgtcgctatgtattttcgtataattctacatttaaaattgaaatttatatgaataaaaaatttgatttacaaactaagcattatctgttgttgtttacgtcgaatgtgtcttcgatctgtgtcaacaacattgagtcatatggtttactaaatgaataatatgctatatatttttcaaggtttgatcacacattaagcttaaatcttgaacaaaattattctaaacgaatataaataatgtatagttttataaaacaattcatattaaaattcttaccgtacaataataataagcgttatcagatgtgataaattattttgtaattgatgtgtactaagggaaacagtcatttgatacagtgggctcgtgtgttgctcctccttgtacacaaagttcatttcgcaaatgccacattgcgatatactttgtattgatcctacaccaatcttgatcgtttttctcttaaatcaatttggtgcagtgtaaggtttgtatagcaca

SEQ ID NO: 63803 - DNA, 641 bp, Cucumis sativus
  Intron number 3 from transcript Cucsa.147560.2 (locus Cucs a.147560) derived from phytozome v7.0 (chr-ID scaffold0110 7; pos 15389 to 16029)
aggtgggcattcttttcttccccttcattttcatatggatcaagtgcttctagccttctgctctttgtcttgctgtattattttctatttattgatctgtccgtggtctctgtttctaaattgtgttgattgtttgtgttgtctcttctattatactgaaaaagtgttttttctctctcttttttttttgcttttacatgtttgggtcacttctggtttatcatgtaagtatatgcatgctcatttttggagattacgactatgtacgttcttcagcaggagtctggatgataattgagataattacatgcattgatttgcttaagaggaaactggcattcaaatttgcttttgcttgtgctacctacacttttctgattatagaagcaaattcaccaacatatcttctcttttcccgggaaaaacttgttcaaaataaggtttacaggatgttatttgccagaaggcttttaattggattacttggaagttggaatgataggcctaaaattttgattgagaagctctattgaactatataactctcttctatcgatacatttcctggcctttacatttattttgctttcatctggtctgttacaggctgcaaccagctcagccgaatctgagttaccccc

SEQ ID NO: 63804 - DNA, 412 bp, Cucumis sativus
  Intron number 1 from transcript Cucsa.232220.2 (locus Cucs a.232220) derived from phytozome v7.0 (chr-ID scaffold0198 9; pos 280677 to 281088)
aattcacatcgccgtattctcttcatctctctcaggtgatttcaactctctccatctcttggaattccacctcggaatcgaacctaatgtttgtttcctcttttttctgtattcgtcgtatatctttacatattccaatcctcttttcttctttcttctttcttctttttctttttccgaataagaatctttccctatctatgctacatcaatgtcttcatttctctactgctttttcatcttcaaaatttttctgaacaagtttggttttctgaatgttatgctctttttttttgggtcgttttggtatttgattgttctgtatgttgtcaaatcttgtgagaactttcaactgaaggaaaacaaatcttgactttcaattaataatttttgcaggtgatttctgattgaa

SEQ ID NO: 63805 - DNA, 935 bp, Cucumis sativus
  Intron number 1 from transcript Cucsa.276250.4 (locus Cucs a.276250) derived from phytozome v7.0 (chr-ID scaffold0258 8; pos 11216 to 12150)
cgcccatccaaccaatacccacttccattgatttggtatatttttttgttttaattgttaacctttgatttatcatacttttgcctagctttatgaagttgtatgggtttctatgtctacctttctgaagtttccttcgtcatttttcgatgctagatcaaatatctgaaggaagattgtttttttttttcatgtatggtttagctttacatcccatgtactttgaatggagaattaactatgtcattttgaggttgatggtggaaaacagacaacatagggcacccatttctccgtttaacgactgaaagaaaacctcttcatgttgtggattgtgaagacattattagtcagtttaatgggagtactagaggtggcactttgtctatatctaagtttaattttctaagaaaaggtggaattgatgaattttccaactgtttagtgcaatattggatatcagtagttgaaagtatttgagtccttatgatttataatcttgatcatgataataagttgcaaggactgttcaaattgtgatagttaacattttgttacttcattgatagtgaagcttaaaaaactagaaatcaacagtgttgtagttaacattttattaattcttattatgtgtatagatcctttcatcagatctttcaagctttatagtttgtgggtgagatctctcttcttgtgcgtgccttttagatgcttcttttgttatcgttagttcatgcatcatcttttgccatattggtaagtgttcttgagatacagcatatatgctctcttctctatctgaaataatgaaattctctttgttgggtagtttgaattataaaaaaatgtggtacaaacaggtattgagtcttggaattctggaggctgcttaaatctgaaatttgttttttggccaggtgcacaattcaaaaacc

SEQ ID NO: 63806 - DNA, 1044 bp, Cucumis sativus
  Intron number 1 from transcript Cucsa.136100.2 (locus Cucs a.136100) derived from phytozome v7.0 (chr-ID scaffold0104 4; pos 830712 to 831755)
gagtggagtatagagctttgaagtttggtaaagggaaaattctctcaatttatttcttcaacttgtttcttttcttgctcttgcatcgttctttgtactactatcttgcttttgcttctgttatttgatgcagcttcttttgcatttatttttatcaaattactgtttctttcccttcttttgatgttagggttcgattttatgaattatgctctcgtttatatatatcaaatttccctccttttgtttttctgatgtacaccttctggttctggcacattggttttctttttcttttttcgttcttttgtttttcgttttttttttcaaagaacaaaaattaattaggaaaagtatttgatttctttcccttctttcttgatttaaggatcgtttatgtagactcatttggttttctttctgttggagactgatcttttttcacaatttcaaccgtaggtaagacaaagaagaaactcataggtggaagtaattcttggatctcaattttcaaaagtaaagaaccaaaaactctaaggtacgtttaagaaccattttgtttttggttttgttcttttgaaaattatgttcgtttccatacagttttttggtatatgtttcccaccttccttggacacacatttgaattttaagcaaaatttcaattacaaagtctttaagttttcaaattttacttattatttgtctttaaaatttgactgggttttttattacatgattttaaaagtaggtaataaatcaagaaaactagaggcagagaagtaatgatgataagctttggttatcaaataaagcttaaggttttgggtgtccgttttgaggttaatatttaaacagtttagagtatcaaacaccgaactttgtatgtgtatggtttggactgctttccttgattgtgtttgatctgataaacttgaaatggttcaaaacaaatggagtcttgcattcttgcttgaaacgttgcctagttctgataaatttatgtttatttatttgatccagtatattcacacctggtgagca

SEQ ID NO: 63807 - DNA, 873 bp, Cucumis sativus
  Intron number 1 from transcript Cucsa.240550.2 (locus Cucs a.240550) derived from phytozome v7.0 (chr-ID scaffold0204 7; pos 588622 to 589494)
ggaaatcccttctcgctcttcgtgctcgtcagcttgtaaggattcttccttcttttgccctaatctttcttctccgaccttcacatccttttacccgcgatggatttataccatccaattgcttcaatatggacgttgctgaccttttattctgttttgggatttctagcttttgtaattaaattgaagttttctaggcgctcattttttctttttagttttgatattcgagttgtagaacacacggggtattagtttcctttttgtttttactgaatcatacaattatggtcggtgggagttgctgtgtgtaatttatttgctccgttgggttaacattttttatatggaaatgggattgtgtgtcatttcctttccctgacatggaaggatttgttatttttaattgtcctatttggtgggagagtttagaacgaggaacttgaaatactggatacttgcagactatgaagttgatggttaggctgtttatacaatgcagtataaagatttgtaggcagatgttcaagactgtgaattatgttctttccttgaatttgggcaaagaacaattagcattatggtgttgtgggttggggcgggagggttctgttcatattcagccttttagtcttgttttctttgatctgaatatttcactttgatatttgatgaaaagtattatcccccattctttagttatcgtggaggtatttacaatattgattgtaaacttgatgggaatcatgccacagatatcattttcctcaattctggtagttgtaattgctttttgttaccctttactttatttatccgtataatctactgttgttaggctgtctccgggcaagcactgcaaggttctccttt

SEQ ID NO: 63808 - DNA, 782 bp, Cucumis sativus
  Intron number 1 from transcript Cucsa.252810.1 (locus Cucs a.252810) derived from phytozome v7.0 (chr-ID scaffold0222 9; pos 1676239 to 1677020 reverse strand)
tgtcgacaataatattcccaaacaactctctcaaggtacactactctgattctgaactcccctcccctccccctccttaattactttctaaaatccatttttcatttaattgattattcaacctctaacttgtagtgaaactattgtagaagaactcaaaaagttgaacttattaattttaaggatgcataaactttgtaggaattaacttaattaacaaataaaatatgtatgtgtgtgtgtgtgtgtgtgtgtgtgtctgtatatcttcaatactgtttagctaaattttgttataatgaaaatttatagaaggtctcgcaggcataaatcaataacaattggaaaagaaatgactttaggagtttgagccatcttttactatgttaaatcaatgacaagcccaaaactatatatcatctggttgacaaatcaatagtttaatgaaaaaagtgactctttcacatcaattgagttttaaaaaatgagaaaaaatttaagattctattttgttttttttctagaattaagcttataattctctcaattttttacaacaagatttgtatattaaaatgaaagcgttataaccaaatttcagaaaacaaaaataagcttttgagaaactgaggtgaatggattgtttaattgcaagcttaaagaaaaagtaaacttagtagttcgtgtgttttgttttgtgatgagaaatgatagtaaactagtagtaattgggtattgttaatgttaaatgtttttagtgaaaaaagagaaagtagaaggga

SEQ ID NO: 63809 - DNA, 755 bp, Cucumis sativus
  Intron number 1 from transcript Cucsa.160760.1 (locus Cucs a.160760) derived from phytozome v7.0 (chr-ID scaffold0114 4; pos 879113 to 879867 reverse strand)
taaatttgcagacgatatcatcagcggtaaggtgagttttcatggcatttgttccccttcagccttttttggatgtttcctttcttgttgagctatgatttatggttcttcaactaaacctacaatgcactatattaataggttggtattgggagataccaagatttgcgagtaatgtaaatgggaagttgctaaaaagtcgttcgagtagcaacaccttttagataacgtaactagagttggagatcaaactctttaaatgttaaatgaacagctctagtgttcttaaactaatatttgtaattactagttggattgaagaagtgtgcattgccagtttgattgagccgaagggtagaagggattcagagaaacaggatgatttgatttgagatatctagccatatatatgttaaattctttgcttctagaatatgagtttgtttggattgactatagaaaaaagtgtttaaaaaagtcatttctatttgaacttttttgccacaaaatgctcgaaataaactttgaaagtgtttcaaaacctattttaagtggttgccaaactgttcaattttcccccctgaactaacttattttcgaaatcaaacatttgaaaaattaaccaaacacaccctaaataacatttaaagtattgtctgtcttgtttagtgtgtttccccttgccggatatattgatcctcttcacaatgcacaatgcagattaagcccccatcttctcccgagggccgttttac

SEQ ID NO: 63810 - DNA, 615 bp, Cucumis sativus
  Intron number 1 from transcript Cucsa.239890.7 (locus Cucs a.239890) derived from phytozome v7.0 (chr-ID scaffold0204 6; pos 784787 to 785401 reverse strand)
atttgatacaaaaagctgcaactattgaaggtgagagtcctccgatataataattatttttgtgttaattcaaaccgttttgcatttgcccatgaaagttgacctcaaactgatttgatacaaaaaactgcaactattgaaggtaagagcctatttgagcattttaagaaaaaaatgagaataccagagtgaagaagaaatgggtcagagggagagtgtacgaaaatatttataacatggaaagccacttgagcgcatgtttgattgctaaacaattaataacccaaaaaaaaattcttaatatgtcagagaaaagggtgaggatggttggcttgtatgcattggattagagataaatatttcacatttttacgagtgtcatggttcatcattttagtggtgcccctttccctttttttttcatcaataggaaaaatagggagtagaactgataatcaaatcttttagtgcttctgaactcatgttgtagccttctttcatttcaaggtaagaagcatagataatgaattctggcttgtctattatttacattgatttagttattttattgatcatgcagtgaaaaggttgctcatcaggccttgaaggctagcg

SEQ ID NO: 63811 - DNA, 756 bp, Cucumis sativus
  Intron number 3 from transcript Cucsa.162070.4 (locus Cucs a.162070) derived from phytozome v7.0 (chr-ID scaffold0114 4; pos 1800986 to 1801741 reverse strand)
ttgctgcatcttatattgaggtttgttgcatagccttgcattcttttgatacaattgaactcggaaatgtaccttctgcatttgagtttcctgtttaaagctattaatatttcgtcctaatttcacattgaagaaataatttctttcttgttaacattttggagttggatatgccgttgttgacttaagtctgtattggtcaaacttactaccttcttcatattcttgattgaaattggaacccacaacttcagtttccctttctgtgcatatgacgttggggctaacttaaatagacagatttggcaataggtcaactgtggagtattgttttattaaatatttaaattgtctgtattatacctgccattattgttttgaccactgatggcctcgtctgcacaagggattattgaagcaattcccaagtgcatgcaaattattgttttctcatgacatgccctttattccttaatcctatcctatatgtataaagaatgcagttttagaatgtgtaggttctctttcacatattttgtttatggatttttttttctagggaaaatgttgtagattggacgaggaaacaccattcttaaaataaacttgagtcactttttctgtgcaaatttattatttgataccagaaataccattaaaatgttccctcatgacatgaaattcctctgcaaaagatacttacagtaaatgaactttctagacacaattaataaaagcaagagagcaacagcaaca

SEQ ID NO: 63812 - DNA, 458 bp, Cucumis sativus
  Intron number 2 from transcript Cucsa.184250.1 (locus Cucs a.184250) derived from phytozome v7.0 (chr-ID scaffold0127 4; pos 2992 to 3449)
gggtaagaatgttgtctggctatatgaccctacttataagctcctgtatttgaagttatgtttttatataagattgtgtgcaagcttgggagtggtttaatatgtgaaattatgcgccattaattggcattataagtcaaggttgagagctgaattatttcagagaaattttagcaggatttgatgcctggcttctgataggtgggattgaggcccattgacagtggaaaaaagaatcttatatgagcattcaaacaatcatttgattgaatttttgtttaataatgtttatccttcaatgattctgagaatatttgatttttgtcacgtaggactgagatgatttaacaaactaattgagaaactatggttttcattgtgttgtgaccttattcctttctttcttttcttttctttttgctgtttgatgccaggttcctctacttgcaggtcaatta

SEQ ID NO: 63813 - DNA, 339 bp, Cucumis sativus
  Intron number 1 from transcript Cucsa.232420.2 (locus Cucs a.232420) derived from phytozome v7.0 (chr-ID scaffold0198 9; pos 392027 to 392365)
caggattggttagcttcttcttctttaatcactaggtttgtttcattttttcgattatttcttgtatttcttttattcttttgtttcccttgatttcgattcttttgtctcggtttctgtttgggaattttggaaccctaggatttgagattcgtttgtattgttttgcttgtggatccatggatttggtggttgattctctttatgtttttcctttggttctgttggtagaaggaaaattttccgatctcggagaattttttctttgaattttgtggatttcttttctttatctcaattttgtggtgtaatgtcattcaataggtgggttgtgtagat

SEQ ID NO: 63814 - DNA, 331 bp, Cucumis sativus
  Intron number 1 from transcript Cucsa.240700.1 (locus Cucs a.240700) derived from phytozome v7.0 (chr-ID scaffold0204 7; pos 840059 to 840389 reverse strand)
aagacattttcaatcaacatctttacaaaactaaggttcatctcttattcccttcttctccacacttttcaagttgtataaaacgccttataaattgttaccccaaaataaaagaagaagaaagatagaagaagaagaagaagcaacagtcgttgaagctatatgttgtttttaagaaaacacacatatttcaattctcaaagctactataccatttaatttagtcttttttttgttttgttttgttttgggtaatggcatttccttttgtagttaataacatgttttttccttttcatattattttattacagattgaaaagattccaca

SEQ ID NO: 63815 - DNA, 863 bp, Cucumis sativus
  Intron number 4 from transcript Cucsa.167570.1 (locus Cucs a.167570) derived from phytozome v7.0 (chr-ID scaffold0115 4; pos 956721 to 957583 reverse strand)
tgcttttcctcattttgttgggtaagtgtatctccttttgttaaggagagcgaagatctctagctctcaccttcagcatttctttcataaatatattttgttgaatgaaattgcttgtcaaaacaaattgtcgtccttaaccactccctataagtatcttattcctaaaatccgtatgttcaatcatcttttgaatgtcgctattagaaaaaatatggccaatagtttgttgatagctgaaaatgacagctaagtctgtctatctgctgttatcttaataagtagctttaagatccatagatatggatactagcatggattcaacacagagatggaggtggcagcatgccattttttaaaaacctttaacacagacacggcaaggagacatcgattagaatacatattctgttttacaaaatatatcatttttattccagaagaaaatccaaagtcaattcatttatgcatctatgtgcttaaaacatgagtttgatgtattttacttttaaaattaatttaaagtcaggtgctcgatatacgtataacaaatgttggacctgagttaactttgtagaactcttgtcgaatacatctattgttttaactagtgttcaatatgtgtccaacaagtattggagtgttcgattgtttgacacatgtcggacacagacacactagcttaactaaagtgtttcttccaagtctttagtcttaacttcttagtggctaagaaatgttttatttttcacttttttgctgtagattatcctagttatatgcctaatgtgtatggaagatttaaattttattattctcttctcaaaagtcattccaggctttttgttgtgattttttgcagc

SEQ ID NO: 63816 - DNA, 1018 bp, Cucumis sativus
  Intron number 1 from transcript Cucsa.308040.4 (locus Cucs a.308040) derived from phytozome v7.0 (chr-ID scaffold0297 8; pos 291485 to 292502 reverse strand)
cttttgaagttttcttgtaagttgtaactataattcatcatattacttttggacgctcctccccttacgttccatgttggtctgtgtacttttaatatcctgattcctgcctgtactttgattcttcttaaagtaagccactcttttataaccagctgtttatctaaattggtgaaaacacccttctctagaaatatttgtggttttgacgtgtccctttagagaagtgtatggatatgctagggtcttcacctcatactgaaagcccctagagctttaccagaacctgtcgtaatataaacactcttctcgagaaggatttctggattttgacatgtctctcgagagaagtgtcattctaaaagccagatttgctttagatgacaggctatccgaatgtgaaagattttttatggtcaagattggttcttgtgaaatacccttttgtagaaagattatatactgggttttccttgggatttatatactggtttttgacaatagcagcctagttagtttctgtagagatgtttggagtaatgactggtttttgtaaatggaagggaatttgacagagggaggtgggaaagttggtttagtatcttggatatcctaaccctaagaaagaacttctggcaagggaatccttgtttctatgcactctagtgtcactgtaatatctaatctccaccacgagaatccaggggtttcttttgccccatcagttttccctatgctatctaaagaatcgaggatgtggagcatttgctttttgtgttttgtggttaaattatccgttttgtcttccctggtgtttttctagggtattgaaattctagaaagctctccaagtacactgcttttttattttgacaaacgagagagctttcgtctaattttatttcctttttaaaaggtcctacttacttaattctcacttacgttattaatacttgcaagttctttttcatactttttctaactcgggtttatgcatgtaggcattctattcataaaa

SEQ ID NO: 63817 - DNA, 272 bp, Cucumis sativus
  Intron number 6 from transcript Cucsa.242760.12 (locus Cuc sa.242760) derived from phytozome v7.0 (chr-ID scaffold020 47; pos 2433883 to 2434154 reverse strand)
atcctgttaaggtacgtctgagtctcaaaaaattgcctcaagtgttgttttgaacttatttttgtttgtttttttaacatgtatgtttcgatgtttcaaattcacattattactttgcctctatctcgaattttataattatctggttagttttcaaatgcacaaatgcctatggtagcagctgccgattggctctttgggataatattttcttgtgtgctgactgttagttattttctttgcttcataccgtaatttttttcagggccagc

SEQ ID NO: 63818 - DNA, 871 bp, Cucumis sativus
  Intron number 2 from transcript Cucsa.242760.12 (locus Cuc sa.242760) derived from phytozome v7.0 (chr-ID scaffold020 47; pos 2435067 to 2435937 reverse strand)
aagcctccgacagtagcggtaagttggaatgatttggattttgttctatgggaatgtgtagttctttcgaatgcaatttggggcctttttcttctttgagcgtgttgggccttttatatctgcaattgggtgttctttcattgttctgttgagtagaagtgattgatttggtggttacttcgacgagggcttcgaaataggttttcgtttttttttttcgttttggtgtattaacggaaattggggtttcgtcacttggggcgtccatggaatgaaggtttaattgagttttttcctttttttttggtttttttttctttaagtactgggtttatcttttccgttatttaggttttaatttttgtaattcttcgcgaaaatttccatgcgagaagaagggagattttagactattgtgcttgatcacggtgtgtggcctttgtcgcttgattgacaagctaaggaattttctctttggttccgatttctcaaggacataatgaggcaggtatgaacctgaacaaaaacgaaaagttgaaccctcaagcagaggagttattcaatttaggactatggagattcaggtttttctggattatgagttctctcaatatcctgtttcgattgaattgttcctagcataaagcatacaggatagatagggatattgttgttatagccagtttataggaacccggaggatgctatcagaatatcaccatgttattggggaaatcatgagttattctaggtgtaatatcctttaaaatcatgtatcctgcatatgaaataactgcaggtactgatgatgatcttccaccatcacgtcataacagagtttctagaggaggtcgtgtttctggaaagggga

SEQ ID NO: 63819 - DNA, 1009 bp, Cucumis sativus
  Intron number 2 from transcript Cucsa.184700.4 (locus Cucs a.184700) derived from phytozome v7.0 (chr-ID scaffold0127 4; pos 340705 to 341713)
gaccggagccgttcaccgtattcatcctacagcaggtgatcccgtttatgtttttagttttatttacttttgagttaatctgttgaataatctccaacgaaattatgagaagattgacgacactgtatcttttcccgcggtttctacttcattgacatcggagtttctgcatgaattttgccccttttgctgtaaatttcccccttttttttcttctaatatgaaggacgtgttctttgtcgaattaagaggacttccatttcatggaatgttcatttacaatttattcttattattttgacaaaaaccaaatcgggtatctatgttgctgcggtagtaaattttgttgggttttcgtgtttgttttattgttcaactacaaaaaatttatcattataacttagggttgcttgtacttctctttcattgagttatatcttccggatctttttgacctcttttattgtttatgtgctgatgagacttcacgacctcttttattgtatatgtgctgatgattttttatcttgttttgtacatgtgctttactattttgaatttcacataaaatttctgatttttgtggcataattgtcaagtacctcctaatggtatttaatcatttgttgagaatggtgagtgggggagaaaattttagaagtcttcagggaaaaaactctaaaatgtggtagaagcaaacagaatagacatgatcttgctaagaaaattgtgaaataagtcagttattcctattacatgggaagcgaccaggttatgggtgctgatgggtgttccgtcattgctcgattgtgacttttcttcttcatgtgatgtgataaaagatggagctcacaaaggtttattcttaacaatgtatgaggtaactgtacggtgcaaagtggtaggctagcttgatacatagctatgtctagaagtctttatctcttgctcaattgtttctattcattatacagaagaaaaagtcgctcaatttccccaagacgtaata

SEQ ID NO: 63820 - DNA, 707 bp, Cucumis sativus
  Intron number 3 from transcript Cucsa.241190.1 (locus Cucs a.241190) derived from phytozome v7.0 (chr-ID scaffold0204 7; pos 1302511 to 1303217)
cattctcctgcagaacaccgcctcaacggagagcagtatgtccacttctctctctcggctgggcctataatgggataagcccactacagccccagcccatttaattatcgggctgcccagcctttaggacatttcagggtagccataacagaagaaagatatctgttatggctactaattccctatatctcaatatcttctaaattgtttctttttctaattttactcttgatttcgttccaaagcttcaatcaaattcttccagcaaaaaggatcgtttctccttgattggtatgtccaagtgacatgctcttatgtccaaatatgttattgacatgaaggactgatttaacagttctttcacgtttaagattacctatttagagaattgtgcggtctatgcagcctaaattttattagaacagtatatttccaaacctgtctcaagaatatgaaatttgaagagaaaagaagatttcagaaaattttgactcaaattctctctgaaacagtctgattttattttaattactgataattcatgaaacgcctcattcctagacagtctaaaataccagatggactaagaatactgattcgaatttcatcttaaaaatcaatctaaatctgctcaagttcatctgttatataaaatgtgagaaggttttaatttgaagatacctccttattttccgatttgaacagat

SEQ ID NO: 63821 - DNA, 513 bp, Cucumis sativus
  Intron number 1 from transcript Cucsa.299650.1 (locus Cucs a.299650) derived from phytozome v7.0 (chr-ID scaffold0292 0; pos 166379 to 166891)
gggcacattcgctcttgtttgcaagactctcaaatgtaagttctgaacaaaggttttttttttcgcgcaatagatgttggaagtgtcttccaaacggattctcgtgtggatgtcaatgggaatattggttttcttagttgaacattttcctttgcgtttggatattagacgtttaatattgttatgcaacagtttttatatcttcaccttcgggctaaatggataacataacatttaatatgaatgattctttgacaagctaggttattactacttagctttcctttgtcctccggtaatatttcaacttcgggctaaatggataacataacatttaatatgaatgattctttgacaagctaggttattactgcttagctttcctttgtcctccggttaaatttgcagtgatgtagcataattattaaggttcattttgtagctttttgaattctttttgtttttgttgtgttgttagacctccctgtgatcaaggacgtagttgaggctgct

SEQ ID NO: 63822 - DNA, 938 bp, Cucumis sativus
  Intron number 2 from transcript Cucsa.213410.2 (locus Cucs a.213410) derived from phytozome v7.0 (chr-ID scaffold0154 3; pos 1181452 to 1182389 reverse strand)
ctactttgatttccaatattgttagtggatgcctttgtgtttttcctgttgttggagctgttcttgctgattctttctttggatctttctttgtcattctcatttctacttctatttctcttttggtaatttattcttcttactacttctctttgatttcaatgtttaaattatttcatttgatcaaatttttctttatcattatttctttatttacactattattttttaaaataattatttggttttgtacaaacttaattaaaacttatccctttcaccattaatttacactaacttgtactcaatcaatttgtgtctaatcttctccttttgtggaccaaaatagtatattttcaataatgttgtttgtttcaacgtgattataataataaatattattcttgtctttttagaatatacagatggaaagaatcgaacctctagtcgttttcattcaactatatgcttattttttatatattattaatattattagaattatctaaaatatttattatatttgaagtgtggtgaaataatattgttatggttattgatcattcaaacatgtatacatatcaaattttaattgaaaaaaatatttggatgcatctcgagctgtaaccatctttatgtaactcatttaaggggttcaattcattagataaataaacaaagatttttaaaccaatagatagatgagaaagtataataactcatatatcttacaaaaatataataatgtttctccattttagatctcaacatatactctcaaggtggtctcacttttttttctcttgaatatcttcttgttcttctcttttcttgctttgctcttcctttgtctatacaccaagtttctttactcatttttacaacactgctttttaataggtaaaaaataataatgcatatgattcattttgtaggcc

SEQ ID NO: 63823 - DNA, 468 bp, Cucumis sativus
  Intron number 3 from transcript Cucsa.135980.1 (locus Cucs a.135980) derived from phytozome v7.0 (chr-ID scaffold0104 4; pos 753691 to 754158 reverse strand)
atcccagtgtaatcaccttacgaaaccctcttcttaagttattttatcatttttcttcatcatgagatgtggttaatttctcatgttcgtgattatttgtggtaaggagaacatgggcctgctttgattggttttttgactgcttaaaaacatatatttaagtaattagaaattcaatccaaacattccatagattgtgcaattcacttaccagagcaaatgttgcatgtaatctttaaattttcatctttggcaacttttgaaatgtatcaaattgagttatgctttattattgtcattatcgaaacaaggtttttgtttctactctacctgatgtgagaattcatagacactatcgacatatctgttagtgttcttagctgaaaagtggtatttggaatgtcattcttatgataattactcttctatgcagacactaaagaatttagaaactgctataatatcatc

SEQ ID NO: 63824 - DNA, 789 bp, Cucumis sativus
  Intron number 1 from transcript Cucsa.259680.1 (locus Cucs a.259680) derived from phytozome v7.0 (chr-ID scaffold0222 9; pos 6064243 to 6065031 reverse strand)
atttgggccttgaaagtgttcgattgtcgtaacaagttaagtttttgtagtgctgttctgctttccccgaatttggtagttttaatgctccagaaatttgtattgaggtttagttttggcgatagattctttttaagttctctctttgaccttatttgctatgttttttattggagtgtaatggaagttgtcctttcttacttccctctttcttgttagttaaatgctttcctttgcccattatttttcttttcgatttttttcctggaggctttttgagtcttgtgctacagttcactaatggggctctttaatttttggcgatagaatccgtgcgtttattgtgttttcaatctatttccctttgctttccgagaaggaagattgactgtgaggtcaagactactttccttcgtcgtctttttttaatggaagtggtgaggttactcttttctttctgttgctctcatggatttcaaacaagtaataacgaattcttacagaagaagaaaggaattctaactattttggtcaacaaatgaattctttagtgaactttttctttcttattttcaacatacatatacacaacgtgttcgcgtggaacaggaaacatatataggctattgagaatgaattcttggacctccaatttaagttctcttttatgctattctcatttggaaagcttgaaatattcttggacctcaaatattttggttacttgtgataagctctgaataaatgttgggtacgcgtattggatactgacgttgttcacttgttcag

SEQ ID NO: 63825 - DNA, 289 bp, Cucumis sativus
  Intron number 3 from transcript Cucsa.237650.1 (locus Cucs a.237650) derived from phytozome v7.0 (chr-ID scaffold0202 3; pos 453892 to 454180 reverse strand)
ttaaaattgatattgggcctgtatacagtgtggatgtaagtgtgattcttcccagtttctctcatcagtttaacactatcctttcagttttctcatgatttctgatgatttaattattaacttttgcataatttggtttcaagtaatcagatttatttcagtaagtcaaggcaacaagcattttgcatggttgttttgagtattatttgtttgaaagagttgttttctgcgagattcatctgtctttctcatacacttcgaacttttctatttcagcctgcaaagagac

SEQ ID NO: 63826 - DNA, 364 bp, Cucumis sativus
  Intron number 1 from transcript Cucsa.307870.1 (locus Cucs a.307870) derived from phytozome v7.0 (chr-ID scaffold0297 8; pos 147057 to 147420)
catctccctgtttgttcaatcaactttaaaataaggtatatttggaattatgttcatttttatttgaatttcttcttaattcgaagcaattgaatgggttgttccgactttgattgagtctaatagctacggattttttcttttacattgttattttctgtttgggtctagatcgggatctgggttttcattcaaagtcagtttaggagttaattatcgtttgtgtagtggctgtactaggggagtaattagacaggttagggtttttatcttcactcttctatttctctttactgggtgttagggaactggacttaaactgtttattggagtgcattatttattgaccttatttcttctgcag

SEQ ID NO: 63827 - DNA, 656 bp, Cucumis sativus
  Intron number 2 from transcript Cucsa.307870.1 (locus Cucs a.307870) derived from phytozome v7.0 (chr-ID scaffold0297 8; pos 147538 to 148193)
caaagccattcgctcgaggtattttacttcattatctgcttcttgttatattagtttccctcatactcacagtgatgctatcagagaaaatgttctttctttcttgtctacattattagtttaatgctaatgaatccaccagcatacttgtcatcctacgcgttcaaggttgatatattttaagtgcaacatactatgtacctatagtcaaactttactgtttgatatttgattttaggcatccgtttttacatgtgttatgccaattatcattcattatgaattactttaatgtttcttccagtcaattgattttcttttttcttgcattgaagtttataagttttgcaggaacggatccttaaatataataaattaatgtgaaagatcctggatatctcagcgtgaagcattggatcccacattaagaactccaaaatgcatgaggctggattttgtcgttgcttgactggatcagtatcaggttgggagaccacctgagaagctccatcaagtgggcctcagtcacgctactgtagtttgaggtttgaagtctagtaattgaatgtgttgggagaggctttccgtcaataatctcaaggttaaccaattttattgcattactttaatgcagaggccatatatttgttccgtag

SEQ ID NO: 63828 - DNA, 355 bp, Cucumis sativus
  Intron number 1 from transcript Cucsa.250440.1 (locus Cucs a.250440) derived from phytozome v7.0 (chr-ID scaffold0221 9; pos 593099 to 593453)
ttgttggatcttttcgattcttcattcgaattgaggtatcgtgttccttttgaattaatggcggctgttcttttacttttaaactgatttttttgggatttttatactttccccccttctgtttgactgaaaatctgtgatggggtttggcaattctttattctcttagatcttgtaaccttgattgctccactagaagttctgatttttagattcgagcttgttcttgtattatctgaaacagagagtagtgaaaaagtgaagattttactttttgttttttcctgtgtttctgaagacccaactggagaaacttgttgattttgtttgttttagtcaaaattatagtctggaa

SEQ ID NO: 63829 - DNA, 1036 bp, Cucumis sativus
  Intron number 4 from transcript Cucsa.197080.1 (locus Cucs a.197080) derived from phytozome v7.0 (chr-ID scaffold0135 7; pos 599551 to 600586)
tggagtcccggtggtgttggttggcaccaaattgggtaggccatctatttctgattgttgttgactcaagatatattagttgcatttgtttctttttttattttttccattctttctttaatataagcagttaagatgaagtacattatagatataaccaaagcaaatagtatctccctaatcctttttttattattattcttccttttgaatttgttgaaaagaaggtgggatttggaaggaaagagattttctaaagtaggaatgcttgcaaacagggaagtccataactagagaaaccactgttgtttttgtttgtactgtttccaaagggcgggaccttgtcgttatagatctgagtttggattgaggccctgaattgctacttaattagagaagaaacttcatggtctataggcgctcgtgttaggatgtacgaagtcctttcgttcgctcgttcactcgtgagatagggcagataccaatatatatttatgaaaaggtgcttttattgtttgaattattgagaggaccagcactatgtacttgcagaagagttaaaggttttgcaggaagccaaataataatacaactagacactaataggtgcagcaaagcatgagaagagaggtactcggatttttggaaaattgctcttttacgagccactgatgagaattgaagcagggcctgttttttacttgattggttgattccttttgagaccagactcattctccaaatgaaccccaaatagtcagcttgaccaggttgcctaactccccagctcaatgtttggacaatgtgtttcttctcttttgacattcccttcctccatagccgaaataatcgctttccacgcgaaacccaactcggttctaaagcaactttactacaatttgacgcaaacatccatttttctgttatgatctaaatgatttactgttcctatactgtagatgctatgatttatttaacttatgattattctcgtttcctagatcttcgagaggacaaattctatttggctgatcat

SEQ ID NO: 63830 - DNA, 768 bp, Cucumis sativus
  Intron number 1 from transcript Cucsa.307270.1 (locus Cucs a.307270) derived from phytozome v7.0 (chr-ID scaffold0297 7; pos 498161 to 498928)
accagggttgctgccattagaccaaagacagtgaggtttaaggtaaggataatcctggtccatcatccgggtgatttattcctgtgatattttacttctacagttctcatttttgtttaaaaaaatctcacttcatgatgtgacattcaacattttcagggaaaaatatcagaaacgatccctggaacgaactctcatagttcatctgatactctcgctgtatcagagatcaaaaccactgttttattcaaacctttggcgaagcatgtatcaaaaaggactgtctctcagctgtcactcatggcaagtggcttcataattagaactgtttatacatgtacttctattccgttgtacgtactctgtcaaagatgctaggatattgagtttggttcagattatctgtttgattgtctctaatggtatttaatgaaagaatagaaggtttgagcacttgaaagtctactgactttgctggattatcttttaaccaggggaacaccaatttgcaaaactgtttaccacctccaccagttgaggtctgtattcaatgtccgaatcaagatgatggcaatttccaatctgcactgacctcaaatctctgtattcaatgtccaaatcaagataatgacaactttcaatctgcgccgacatcagatcttcctcaaaacatcacatccactgttgaaaacagtcaatctattggaagctcaagggtgactttaagttatagcaaaaaagatccaacattgcttcgtcctcaaatta

SEQ ID NO: 63831 - DNA, 690 bp, Cucumis sativus
  Intron number 4 from transcript Cucsa.299530.2 (locus Cucs a.299530) derived from phytozome v7.0 (chr-ID scaffold0292 0; pos 97861 to 98550 reverse strand)
atctgcaggtagaagaaagaaaagttgttttggaggtaagtggtcaattattgtcattcagttcaatgttgccctattattcttgttgtaaaatgaaaagcacatggctgttatctttctttggtgctagttagtatttcaaattattcacaataatatctttggtctcataagcttgatcatgattggatgatgggcggaggcattaactacatattttttttactttgatttatcttcattgaaaagaggaaattgcgatgtggtgatgggataggttatataatgccacatactttattagtatattctttagaagttgtttcagtgattgtttcattctttcaatttctgagtgcttagaccacttttttctttttgggttcagattggctgtggagcaggaaacactgtttttcccttgattgctacataccctaatgttttcattcatgcatgtgatttctcacctcgagcagtgaatttagtcaaggtttgatggcatttatgtcttatttgtacgatagtaatttttgcgaaagtaacattttcatcattggtctgtttcactgcctccatattctaaagtcctaactagtatttcatctccttttggaatttgataacaataaatgtgccttaagttgaaaaaacggactggtttgcttatgcagacacataaagacttca

SEQ ID NO: 63832 - DNA, 602 bp, Cucumis sativus
  Intron number 1 from transcript Cucsa.166990.1 (locus Cucs a.166990) derived from phytozome v7.0 (chr-ID scaffold0115 4; pos 361051 to 361652 reverse strand)
ttaaggctaaacaagttcaggtttgtcaaattttgaattcgttgttcattggtactctattcttgtattggcgagtctgttctctttttgtgttttgaagtttctggttcttgaatagaatattgttggctctgttttatgatctgtttcttctttctctgtggtggtttatctgaacaatgttggtctttaagatggaattagtgagaaacagagaggaatgaattgttcgattgttagtttaataaagtggatcatgtagggtttgtttgaaatgattaaaagtctaaacaaattaaagctgtatttttctttcaacaagtttgtaaataattagtgattataatgtattatgagtactgagctttcagtcatttttgggcttaaaaaagatattggggcggggggtgttaagtttggtttttgaaaatcaagtaaatttcctccatttttgtaagcgaaagagttgaacacttggccaaattccaaatccaaaaacacgtttttaagaactatttttgtttagttttcagaacttagcgtatttggccatttttgcttctgcagttgatagaaaaagatccgagtagggctgtttctct

SEQ ID NO: 63833 - DNA, 685 bp, Cucumis sativus
  Intron number 2 from transcript Cucsa.205150.2 (locus Cucs a.205150) derived from phytozome v7.0 (chr-ID scaffold0141 6; pos 284279 to 284963)
accctaatgtaagtgaaattatcatatattacttttgttttaacttgtatagaaaggattcttatgtatgtttccatggaaattcaaacgtgaaattttgttttttatgcttttttgggtttttctgatcttcctcttccatggctttgtatgttttgtcgagagagctttgaaagtgactgttgtttagtagatgaaattttgattgtttagcttttctttgaagatatttggaatgatcagttgctcataaactcgtcataggaacagatatcttcacgatttctgatagctcaaattttaatgtaagctgtcaccccatcccttaagtaaaatgttgcctgcctgaagaaaattggaaagaagtaatcaatattccttgtattttctaaaattgagctcaagtttcccatcccgtgaatggcagaatagaataatggttttgaaatcctgaagctttgtatagtggctgggttttacgagtcttaatgttaagtaagagccatgctaagaatttaattggctgcctctctctttactcatatgttcttagcagatcagaagtacaatgcaaccgtggaaaagttctagtctttgtgttcttgttctcatttagaaataagaaatatctattcatgagtttttgtttgctgcactgcagccccttccagagtccgtagcactt

SEQ ID NO: 63834 - DNA, 654 bp, Cucumis sativus
  Intron number 2 from transcript Cucsa.185160.1 (locus Cucs a.185160) derived from phytozome v7.0 (chr-ID scaffold0127 4; pos 737815 to 738468 reverse strand)
cttttatcaaatcatcaccaacccatacttatttggtaacaaatcttataaccctcttttttttttaatctattatttattatatttatcatataaattttctgctcatacccgaattcataattacctagatttggtactacctttgatattaatttctgtcacagacaagccatggacaggttagcattttagagtgtagggttgttatatatattgtaggttaattatttcgatatatatattatcttttgtctgtactagtactattaagccagccatttacattgtggctttggaaggaaaatatgtgaagaagttagtttggtataattaggagaatagaaagcagaatttatataacagataacattgtatgcatttgaaaaaaattaggtgatactcattcaatcacttctcaacagatctggcagccaaatttagtgattcatttatgctttcttgtgggatttggtaggcacaatctttaagacactgccaacccttctttctttctttctttctttctctctttaaaccattgatgccaaatttaatttataatgccctagaggctaagctaaggccactactacatttaatttactcagtttctatatattaatttttgtgaaatgtgggtttaattagggt

SEQ ID NO: 63835 - DNA, 561 bp, Cucumis sativus
  Intron number 1 from transcript Cucsa.200330.1 (locus Cucs a.200330) derived from phytozome v7.0 (chr-ID scaffold0136 5; pos 807349 to 807909 reverse strand)
atcagtccggagcttcgcttctcggctaaagtcaggtaaaaccatttgactatatgtttgtttgtttttttttttaattcaaaatttgtattctttttagttctacaacttaaaatcaaatttttaaaaatcttaaatttagtatctcaaacctaatttctaccgaatttgattaaataccaataatagtttccactcatgaaagtgtgaatttgtacactttcaaaatttataataaaaatgttaatatataacaaaaagataaaatttaaatcaacaataaactaagtgacacaagagagttcaaatgaacaactttactttccctcaaatttgaagtaataccttgtttctatttttaagtactaacaagatgaccattatttttttgctttatttttagattttgataattaagcttgtgtatattacttttacaatatacatcaattttgttatttataaatgttttcatatgctatttaagttattttttagttttttaacatatagttttggtgtaaattaaacattttttttggtgttcttatcagttacatt

SEQ ID NO: 63836 - DNA, 522 bp, Cucumis sativus
  Intron number 1 from transcript Cucsa.199860.1 (locus Cucs a.199860) derived from phytozome v7.0 (chr-ID scaffold0136 5; pos 178119 to 178640)
cacatagctgtttctcaagtatgaccctcttactattcttctctcttttttatgaatgtcttttcctaacaaattttgatgtttaaaggctcacataactaaagttattgagaagttcataagtctattagacctcatttacaaaagttttgaaactttatgatacttaaatcacaaactttgcattgatgttgccgattagctaaaaacagaaatgtattaaataatgtgctgatgttgtcatgtgtggacctcaaaacataagttgtatacatattgatgctatttacattatttatgattttggtcctatacatatattaatgcaactaaatatgtcttatttgatattttcttttctaataacaaattattctcttactcgattggtagacgtagttagttaacacgttgttagtgaatggatgtgtcaattttcatactttttatgttttatgttatttttttgttggttgatttcataaccattacattgataataatgaatgatctcaggaattt

SEQ ID NO: 63837 - DNA, 870 bp, Cucumis sativus
  Intron number 1 from transcript Cucsa.239730.1 (locus Cucs a.239730) derived from phytozome v7.0 (chr-ID scaffold0204 6; pos 608663 to 609532 reverse strand)
ccgctgatcctctcatttctatttttcgcgttaacgtgagtatctatgtttctttcaacttccactgcaatacatttgtttagtattctgcttctaacttcctaatcatgtgaggaacaagtttaagtttctggcctccaattcttgaagcctgagtgttattcgattgatttttcttccaattggagaattccagattgtatgacctaataattttggtgtttcctgttcgtttgaactttaggttattcactttgtttatagacttcttcttccatagcttttatcccttatgtgctttctagttgtttgtgattttacgactgttattgttgggtcttgtcaagtgttgtatgacagaaatgaaatcgacaagcaaaaagtgtgaacattaaggacacaaagagattcgtggtttactattttgtttactacattcttggatagaggaagagagcaattttattattgggagggaaaatggattatacatatatagatgtgccaatgggacggcatgattgattcgatactcatcgaaaccttgagtggatagcgagctccgtttctggtctttttgagcattcaagacatttcaaagttgaaattaccttgcatttggttaatagcactatgaatgactctctctaacctttttaggcttctaaaaccaaaaaaaaagtgtgaattttactcctgaaattgttgcaaataagttttctgataggatttctatgaagctgggtagcttataaactatgagatgcacttctgattcttgtgttagactttctttttgttgtttctctgaaacaatgtgaagaaatttgtattggtctcagaaagaatcttgggaaggattcaaagggg

SEQ ID NO: 63838 - DNA, 400 bp, Cucumis sativus
  Intron number 3 from transcript Cucsa.139160.1 (locus Cucs a.139160) derived from phytozome v7.0 (chr-ID scaffold0106 6; pos 361784 to 362183)
gcaggtactgtgactcttaaagtattagggagtgttcggagtaagtagtgaagttgtttagtcagaagagttgtttagacacagtactctttgggctaaagaagaggtggggtttctccaattatgttccttgggccaaatattcccttaataaagtaagaaagagcaacattgttttttttgtaacaagtgatactgaatttggaacgaagttagaattcactgttcttaagtgaaaccaattgcttcttccatagatgctccaaaatctccttttgagtatataatcaaatgtggataattaagactgcaatttgttttccccaaatctttggttggttctgagtttttcctgacttgagactaactggtttggagaaggtgcctgagacattgtccg

SEQ ID NO: 63839 - DNA, 336 bp, Cucumis sativus
  Intron number 2 from transcript Cucsa.175290.1 (locus Cucs a.175290) derived from phytozome v7.0 (chr-ID scaffold0122 5; pos 28545 to 28880 reverse strand)
gaaacaggtaaggggctgtgaatttgctctctttgcatccttaatgatttcttgattgttttgattcagtttgagtttctggggttggccgattactttagtggccttcttattcttgtgttcgttttattttccttatcttctctacataagttttctcagaatgtcaaattttataatctaaagaacatttaattttgtacaaatgttctttggaagcgatcgataaagtataggtattgtcagattttcaacttattataagttgtcgtgtatcctcagttttttttactttttataagttcaaaccaaaagtaaacttgtttttgtagattg

SEQ ID NO: 63840 - DNA, 490 bp, Cucumis sativus
  Intron number 1 from transcript Cucsa.275220.3 (locus Cucs a.275220) derived from phytozome v7.0 (chr-ID scaffold0258 1; pos 63886 to 64375 reverse strand)
gtagagttaccattacacttggccgtagcggacaggttggctgtcactttgttcgactgttcttcggttattttttggttggtcgtgttcatagttgacatatgttgtttcagtttttgctgggaatggtttctcttaatggaacatgaacgtgattctcgtttattgctttataagagtaatctgtataagcttcattgcatactgttgttaccaagaagtcgggcgcagaatggaaagaacattttctttgtttttctaattgttcctttctgtgctgagaaaagctcatctcaagtggcatcagtatgtgttgaggaccaagagttccatagttcaaatgcgtcatctcttttgtaccaattactcttttcttgctgattgaatctggtaacgttgttgaaagtcgtttttctggtcatattttgtttctataaataccctttatctatcacattgcaggtagtaaaaaaggccggcccagggactg

SEQ ID NO: 63841 - DNA, 750 bp, Cucumis sativus
  Intron number 1 from transcript Cucsa.184960.1 (locus Cucs a.184960) derived from phytozome v7.0 (chr-ID scaffold0127 4; pos 583393 to 584142 reverse strand)
cttctcatcctgctcgaccttcgttgccgaaattggtttgttttctattttccggtggatgtttttgtctatggaaaatgtttgattcaattcttcgaagaaactgctattttgtttgcttgatgttgaacttgcacggggttatgaatttgatcagttattgtgattagatcatttcatagaaacagtaatcacctttttgaaatcttccgtgttaatgtatttcttgaccatagtttcacattgattggataaagggatcataatgggtataaaatgatgataactatctcccttggtatgcggccaacattacttttgctcttgggattgaaaacaaaagcaaagctataagagtttatgccgtggacagtatcataccgtggcgggagatatgtggagggttcactgtcactaacaatttcaatcatttattcggagaattgttctttccatctcttcttgcttttgagttatggtatgttggagtgaaaatacgcagttcaattgttaattttacacttttaaatatatttttcatactactaaaatttattttggaatgatcttgagcatttttaagtgattttgaaaattactccgaaacatgccattagttgttcagatgaagtttttgattttaaatagtatacttttttttcatggagaagaatgaaaaaatattttattaagttgtcttttaatcgtttgtcaggtctctccaaaggaaattccggctcctaaaaactc

SEQ ID NO: 63842 - DNA, 845 bp, Cucumis sativus
  Intron number 1 from transcript Cucsa.162460.2 (locus Cucs a.162460) derived from phytozome v7.0 (chr-ID scaffold0114 4; pos 2086674 to 2087518)
gctaagatctttggttttactcgtaagatttccttttaactctgattccttttgttttttttttttgggttgtttgatttttgtgggtttaaatgattggttgaagatagggtgtagatttgtaatttatacttggtgttttagttctcctgactttttttggattatttgtgggtttttttttttgttgggtagactatggtctttaactattgtgctttatctgatcgttcctatgggttcttttgattttttgtagtttggatcttaattttggagaggtctgtggtgatatgatttaactataacttctttttttttgttaaatatttgggttatgaaattatgtgttcctatgttgtaaggtgtaaatcttggagctgtacggttttagatcaattatctcaagacttgaaaagtttaatttggtgaattttaatgtttatggcaaagacttgtggttgtgtggtattttttctggttctttttgggatttcctagcaaggttaattcgagaacgttagctgtggctttgatggtaatcttattttagatttctgggtacggatgaagttggtagtgttatattctgatatgttgctcagacagaaactgtggttttattaggtagaaaaattatgatctggtttgtgttttaatagattttccttgcggatgtaacggtactcgcatattttcattgaagtatgagttttgtgctctgtggtgtgatttattgggaatacagtctctctaggtgtgaacttggtaggatgtatcagctaatttattgttctcttgatcttgcagtcacagaaagtgaggatttttttcctggggcacca

SEQ ID NO: 63843 - DNA, 323 bp, Cucumis sativus
  Intron number 3 from transcript Cucsa.228720.2 (locus Cucs a.228720) derived from phytozome v7.0 (chr-ID scaffold0193 6; pos 18950 to 19272)
gctctgggatcaataattggttgattcaactcgaggtttgttctttctcttacacatgaagtaatgaagccctctgtagaagtaaaatgaactgaattaattgccatattggaagaagcaggagaaactttgtgcaagtttttcgtaaaacaaaacatttgaatgaagttataataagcttttaactttgaattctttggcaagtgtagttgaaacaggtttcgacaaattcggttcaagaatatagtaaatactaatcgactgattgtttgttatgctaattttaacttcatatcattcatagggaggaggctggtgcaaca

SEQ ID NO: 63844 - DNA, 1031 bp, Cucumis sativus
  Intron number 1 from transcript Cucsa.185590.2 (locus Cucs a.185590) derived from phytozome v7.0 (chr-ID scaffold0127 4; pos 1091145 to 1092175 reverse strand)
ccaacaagatcacggacaacatctcttctctttcggtataaaatttgatttaattgcgtttttttttcttccttccatgtttttctttatttttttgactggatttgattctgtgtttacgagagctcgttgatgatctgttttcttccatgattttatgatttagacaagatcttgttccatgatatgacgctttgcatcctgttcattgcctgatgcatgcacttgtatgttcttagcgtccaattttgtgtaaggattacgactgaatattcgtcgtcaattgtcgtaaacttgagatcttcatgaagcctgaaataatatgtatgcgatgggggggactcttaagcgcgcacggcggagcgaaggagggttgcctctctctgttcgttgtaggattatctactttgtcctttgaaagttgaaagattatgtatgtaaaaatgtttaatggaaattattttttagaaaaagtaaatgtttgattgtcttctctaacaaaatatccttgtttattttgttcctgatcttttatcttctctaacaaaattgagcgactgtccactcttttttttttagagctgttggctgcatcataattatgttttttttaccttcccccacgagttttgaagaaaaaattgtggtatggagattaaacccaaaagaaagagtacagattttgaattgcgatgctcatttgttatgcaacctttatttatagatattagttttgaagtcttgagttctcctctctatttcttctatactagcctcttgtgctgttgaaagttacaattaaatgattgtcaacttaataggtaagtttactttacattttggtgtttaagaatgttttgaattctttattaattaatcaatgaaacccgttccactctagaacaaacatacaacttgatagtatacagaatttgaatgatttgagttttcctgttttcgtgaaacttgctattgttcctgacctttttttgtgtgtgtcatggggtgggttattgttctgctcaggaaga

SEQ ID NO: 63845 - DNA, 781 bp, Cucumis sativus
  Intron number 1 from transcript Cucsa.148400.1 (locus Cucs a.148400) derived from phytozome v7.0 (chr-ID scaffold0110 7; pos 498128 to 498908)
tctcttcttcttcggattcacacctttttctcctggtaaaaattcttgttcatccttctatttttcattttcattcatccataatttatttcctttttcttttcttttctttttcaacctatttctttcttcatacttttcattttttgggttagggtttcttttctttttttctttttttctttttttgttgttgcttgtattcattcctcttttctgtttctgggatcgaaccacaagatccgtttgctttctgggggtgtaagtgttttcatgttttcggattgatgacttgataccttgtttgattgatattctgttcgattgcgtggtttctgtcctttatgcgccttgtgattttaagaaacaaacggtttagacatatgatttaggttgaacacatgattggttgtctggtttttttggaaaggagcagatatatgggttttttttttactctagttgttcgatccctttgtagatcgtttagttttcttcgatttggagataatagtaaaagagactcaactttggtttttttttttttttaattgttgaggctgtgctcttttgatctttgtttaagaagggagtctatggtgggatgtggggatccagtggatcaaagatttaaaatagggcgtgggtggattatgttctttttattgattttggacgagtttaggcgtttttttgtatccatgtgctttcaacactcaactctgtgggcctgttatgttttgcagtttagagcagctgaatttaagagctcaaagctttt

SEQ ID NO: 63846 - DNA, 703 bp, Cucumis sativus
  Intron number 1 from transcript Cucsa.280970.2 (locus Cucs a.280970) derived from phytozome v7.0 (chr-ID scaffold0263 3; pos 902211 to 902913 reverse strand)
tctatcatttctggctgttcttcattgaaagagttgttagtgtagttttacttggctcttcttttaattagaaaattgtaaaagcacatgggtttcattttttcttttcgttttgatacctagaatctatgctctgaagggatgctttttcatctcaactttgcatctttttctctttctacttattccaaatcttacctcgcaatgaaatgtaagctgcttgtaaaatggttttactatttgagcagtagaagaaggcagagcataaggaggtagtcgggttttggcttttgcctgttgttgtcttaggttcataaaagttgaaatcatattgtagagatttgagttttatggtttggaccgtataagccgttcttgtcaactggaaagatgataattgggtttttctttgctcgtttgtttagtattgaaatcgtagactctcttctaccctgtagatttctggattcatccttgtttggtatatgctgtccttttcagatttcatcatcaggagatgaaattctcatttgaaatgattcgcccattcaattctatcttttgctttcttttgaaaattgatacatttgctctttttactatggattttcagttttttttcatgcaggcagtcattctctggctaactctgttctttttattcattgataggttggcttcacctgaatctagcttttgagct

SEQ ID NO: 63847 - DNA, 430 bp, Cucumis sativus
  Intron number 2 from transcript Cucsa.250500.9 (locus Cucs a.250500) derived from phytozome v7.0 (chr-ID scaffold0221 9; pos 628768 to 629197)
aggcgggtttctctgtttggcaggttttattcctactacttgtcttttgaagcaatttttgtaatgctttaagtatggtaattcttgaatttatgaagcaatgatccatggatatatttatgaatctttctacttgagtgagcttttccttgtgttccccatcaatcatttcacatctgattaaatggaatttaatgtaaagaagctgacacttactgggtttcatagtcgtagcaatttcttcttttgtagtgttggattttaaggatggtgaggaggaaaatggaaagaatttttacttatatatatttgttttgtttgtaggataggaagaagatttggaaattttggaatttgatagtttttttaaaaaatttactgatgcgactatgcaggttcttcctcttgtccctccaggaaggaaagccaa

SEQ ID NO: 63848 - DNA, 633 bp, Cucumis sativus
  Intron number 1 from transcript Cucsa.149280.1 (locus Cucs a.149280) derived from phytozome v7.0 (chr-ID scaffold0111 0; pos 137910 to 138542)
ctctactcctaattccgcctgctcttccactcgcggtaatggcatatttacagtttttaagcaatttcttttgtggttattcttgtgtttcaagtttgaggatagccctgttgaataatgagcaaatttcatgtatatgttggttgattttcttgcttgcttattcttttatgattgttcttgtttaattttctaaatctttgatcatttccttcacggtacggtagtcttgagtgatcctattataaaaaggtgagaagttcttcaatttacgtttctttatctttatcaaccctcttttaatcactttcgaagcatatactatattttccttttgcagctttaattcttattttggaaagtaagaactgtttgtaggtttcttctttatgattttctatgtattaattttttgaagtggctttgttcttttattttggctttgttttttcggttgttagatatattcccagcttgtataacatggtggcgttctaatcatgcatagttaactacaagtattctttgtatctatatctgatcaaaatatttaggcttcttcttggtattgatttcattccatttatgatttaaccattaaaggatcaagtgctacaaaatctgtggagttca

SEQ ID NO: 63849 - DNA, 740 bp, Cucumis sativus
  Intron number 3 from transcript Cucsa.156280.3 (locus Cucs a.156280) derived from phytozome v7.0 (chr-ID scaffold0113 9; pos 629274 to 630013 reverse strand)
tttctcaggtcaattgccctattctcatcattcatgtaagtatgggtcttcaacctatttcctcttcatggctttgtacatttttatttatcatgagggttatggatatgattatgttgcatcagtgggtttaatatgttaagtattttggttttctatcttctttagtgtcattagaagtttggcaataggaggtacttgcctttttggctgttaatttgtttgatgcagtgcaaaaagattaaatattgtctttctttcctgcatctttgtgtagaagaagaggaagtatcatctcttgaattagttggttcagtttttagaatcacataccatgaaaacatcagtgaaattaacttgtacagaaagagtagaagggacccaaagttcaaactgagacagatgtgacaaaccaagtctatcgacaagtatttttctgtttgtccagggcacgaactgtattaccaaatgattgacttttgcctacactttgttggatactgtctttatgatgacacaatctgggcattgccaaaaatgacggatattaccaaattaggaacatggcagaccttagttttgatttggaacattgagaagagtccaaacttctcctaaaagtttctgtgtaatctatctaatgttcgaaagctacctattttgttcacaagttctgtgcaagtatcctggataatattaaagattaagagatcttaacatcattttgcagggaacttcag

SEQ ID NO: 63850 - DNA, 623 bp, Cucumis sativus
  Intron number 1 from transcript Cucsa.156280.3 (locus Cucs a.156280) derived from phytozome v7.0 (chr-ID scaffold0113 9; pos 630484 to 631106 reverse strand)
gggtacttcttttttttcctccccgtttagtaagcatttgaatttcgcacttctttgtttctgttctctctgttttgatatcttgttctatcagtttaggccttttgatcttctctcatcttcgcattcagttttaggagattttgattttgattgcttgcacttgtttagcatcaacatcgaaagcttaagttctgattcaactttttgtgagttatattttgatagatcttccaattatgtgggcgtcattttctttatgttcgtatcagtttatcaacgttatcatcatcctcttaatcaaagttccagagctttatttttggctaatttagaattctggataagttgataaatcaatgcagttatgcaggacagagaaatggtaccctttgccttgaggaattagttaatttgtaggttatttcaagcacactccgagggtaggaaatgctgtgaatccattccccatctcttgattttctgaatcttaaaagctcgtgaagcttgtcttataaatatggaaattcgttcttctagtctgctgctgtgcaatctataattagactgaaacaatgaaaagcaactgttcctaatactgctaccttttccttcttgcaggt

SEQ ID NO: 63851 - DNA, 1052 bp, Cucumis sativus
  Intron number 2 from transcript Cucsa.151980.1 (locus Cucs a.151980) derived from phytozome v7.0 (chr-ID scaffold0111 9; pos 292862 to 293913 reverse strand)
gcgtttaacgcggagctttgtgacttgtattgtcggtaagacccgcgtgaactgcaactgcttaatgaactactggaaaaacgggttttcgatgctcaagctcaatatattagtgttgtaaatttctactcgcctctatatttccctagaaatttgagagctgctacttattacttttgtggacacctattttaaaggtagatagatgtaaggtaagattatgtggctcttcgccataagacccttctacgggaatcgagttggtaagaagtataagaacctctgaaagagaggaatttatggatggctgggttcttcagtttttctgctatgtagttttattcgcatgcccttttatgatttttgccaattggacaggcattcctttgactttgtcggtcttttccttgtaaattcctctcatccgtgaaatttagtctcctatttttaagaatggaattgagatattttcccatccactgtgaggtttggacttttaaaacatcactccttgctttcgaactccttaaatcttctcatcgtttgccttcaaaattttgcatcagaaattttgtgtaggaagaaataaaacagattataaggagttgagagggacaaatacgattttgggaaaatgatactttgtcaatcctatttggagtttcccagcaaaaacttttgcaactattaccccttctgattcatgctaattgaagtatgtttctcagagtttctttattttcacctttctggttacaatgcctcaaatatctttcaaataaaaaggtctgtacaactttttgttttctattatgctttctggaatgttaggatctttaagatgatcagttaggatctttgacacctaaatgtagtagagtcaaatgagttgtctcgtgaaattgtccaaacacttaccgatatcaaaaaaagaaaataaaaatcttgctcccactagtttttatatctaatttctttatacaacatgttgcttctcattaaaaaaaaattgttcagatttgtgtcttctgttcttccctcgggaagtcaag

SEQ ID NO: 63852 - DNA, 893 bp, Cucumis sativus
  Intron number 2 from transcript Cucsa.258030.3 (locus Cucs a.258030) derived from phytozome v7.0 (chr-ID scaffold0222 9; pos 5142402 to 5143294)
tcttctatttctaaagcaaatcagatcagttcaaggtatacttcaagctggacccatttgaaaaaaagaaaaaaaaacaacttttttcatccaaaacaactcaagattcctacaaattttttcattaaagaaagtaaaaagcccaaacattgtcttatcttctaagtgaagtctctctttcaagccaaaattagctcatatgatataaaatgggaaagaaaaatgggaaatacagctaagatagactcctccaactcatttctttctttctatgtaatttgaggcattaactatggatggggaccaagttgcaaaaaataacttgccaatcaggacatctttctagtcgaaaaatgaagctgtgcctcagatctagacaacctgaacggtcctgttgttgtttttctaatctgcttattcaagtcctttgtttttctaatgtttaagggttgtgtcttaaatgctgacttctttattggacggctctggttagccaaattgctttccctttcattcacctaccatctttatttctagtaaaacttttatatggatagatagaagattagattacccatgtggcaactatacattactctagttttgtgttttttgcttgtctgttcattgtttccagcatagttttgtgttttctttgatcatacaatattctcgaagttcttaacatgtgcctatttgaattttcttattggcatttctttaaacctcaactacaggttttgtgtttgtattgtaactgttccaatgcctttcaatgcgaatatcatggtgttttgcctttccgtcctttgggtcattgcttaaactggactgatttgtctgaatttttcatgatagtttagctttgtactactcgaatcatttccaattgg

SEQ ID NO: 63853 - DNA, 735 bp, Cucumis sativus
  Intron number 1 from transcript Cucsa.198260.4 (locus Cucs a.198260) derived from phytozome v7.0 (chr-ID scaffold0135 7; pos 1352813 to 1353547 reverse strand)
cgagcaagttgacgaagaacaagagcaagaacaaggtttgatctatactcacttcatcatttttgtatgttttattttcttgatcgttatcttgttgtttgtttatgcttttccggttgtatttcttgtataatcgttgaaaaattttcgcactagaacactcgatggatgtgttcttgctgttcttcaagtttttcccactgggtttcagggtttgggaactggatgaaatgatagaagcgaataggcgatgagtctttttctatctcaccttttacgtattcgaactcttcgtcacgggctgttttttcatttcttgtgtttgggtcttgttttggaatattgggtttcgtttcttacgatatataagtttgtcttggtggtgtggaatacggatcaccttgttgtgattgaaatgttcttattaaccaccaaaacagagcttatgcacgttggcgtttatagggataggtgtggacgttcttacgtacacatgtaccgtatttcattcattttcagtgtttgttttcttagactctcttgtttagtcggatttggtacgttgttgcaatgagtttgttaggaaatgtgttgcgacagtgtttatgtgtgtattttaatttgttgaaatagaagttgaatgtaatttaatttgaggctgactggaaactttcatttttgcctttgaattgttggttaattattcgccacttatttctttcaggttgcttcaaa

SEQ ID NO: 63854 - DNA, 849 bp, Cucumis sativus
  Intron number 3 from transcript Cucsa.161890.2 (locus Cucs a.161890) derived from phytozome v7.0 (chr-ID scaffold0114 4; pos 1667074 to 1667922)
aggtgatttttgcttttctttgattagatttacttttcaatctggtcctgtagctcgaaatatcggtactcgaacatctttgacttagacgttgatagatatcccgcttatgatctttcttatttaatgtcccattggaaatttccttgatttaatgatgaatatcacataggtaaatattgttcattgcatggactcattatgtgtatgtatgtgtttgtttgttgttgttgtgataagaccgtctacttggaaaataatggtgcttattcgagtgtagaactaccttagtttgcgtaagttagttgttggtgaactttgatatcaagcaattattcatttacgaatgaccatcaattgaaggtttggcggaagcgaaggggcgcaacaaataagagtttaataaggttttaggaaattttgggaactaatggaaaacttggagttctgaaactgctgatctttttactaaaaaatctggtttttctccagttttcttaattaagacattgatgagtcgtttccaatccatcgtgatatttactcaaataactggataagtttatgtgttttctttccaatatagctgctcactgcttatttctttagagttttacattcattgagtgccgtgacatatgattgttgatgtactgttattcctagttgtgatttggataagaaaataaaaaaattggatgactgatggaatctcttaataatttttttttattattatttaatcacccattgtttgctatcaaataaatgattttacatgccttaatgattacgaagtacgatattgtgaacatctattaaatgtctaaaatgatgcagggaaagcat

SEQ ID NO: 63855 - DNA, 757 bp, Cucumis sativus
  Intron number 1 from transcript Cucsa.242740.1 (locus Cucs a.242740) derived from phytozome v7.0 (chr-ID scaffold0204 7; pos 2409358 to 2410114 reverse strand)
gcggcttgaagaaaaataagcaaggtttcttcctccttcccttccttcttttacttctcaatttcactacttttttaaacttcttgagctctactgtatgtattactttgtcctgtttctgtccagatttttgtatcaacaataggttcgtagttcaatgttaagcaatcgatggcggtcattctatttcgtttacttttgttatttttggtggtgggttttttttttttttttggggggggggggggttgcggtttctgaattctgatttagaattacagatttgtgggtttgagtttgctgaaactttgcttgtgaacttcctacgtgggaaagatttaagaagctataaagggtttaaactattttgtgatgccagctaaagaataaaaaactttgtgaaaggtcaaagatactgttctaacaaacaggataatttgttaaagaaactaatgagtattgattgataattgatcataatatgactttttgaacaatttcaaacatttaggtgcataaattgttggttttcccataaatttgttaactgcaggaggtactataactgtgaaagccaccccacctaattgagaccacctgaatatacatacagagacattaaaatcttatacgggcatattaaatcttaagttatttgttggttagcagttcataaactctcaggcattttagagtaattacattaaactctaggaaaattgactaagaaaacaataataaattttttgtaacagac

SEQ ID NO: 63856 - DNA, 162 bp, Cucumis sativus
  Intron number 1 from transcript Cucsa.256670.1 (locus Cucs a.256670) derived from phytozome v7.0 (chr-ID scaffold0222 9; pos 4222771 to 4222932)
cgctgatcgttggccctaacggtgctgggaaaactgtaatttcttcttggcccccattttcttattgatatttagtctttgatttacactgctcaaacatatgggaatatttgtttcgtcttaatggcggtgactcattctttttttgaagaccataattga

SEQ ID NO: 63857 - DNA, 1050 bp, Cucumis sativus
  Intron number 3 from transcript Cucsa.256670.1 (locus Cucs a.256670) derived from phytozome v7.0 (chr-ID scaffold0222 9; pos 4223301 to 4224350)
gtgtgttccagacgataaatccacataccggagaggtgctggcatattattattagtattatttacatttcttacgttagtggttttttactcatcactcacacggattaagaaggtttggagggtgttcaaacaattacatgtgattctatgttggaacttaaaaagaaattgagtaacatgggtctaaggaggaaagaggcaaacaaacaaagagagtggggaaaggaaatctggagtaagatggctgaacttgatttttcaaattatgtgagggagaaaataagtggttgatcaaattgaaggaagtgcaagacttcaacaacattagttggggaaaagatttgttgattttgactcgatgccaaaatggattttttttttttttttgcaaaggtattgtaataaatgccgatggtaggggtttgaacctgagacctcttgtccacagaaacatacaggtgtcacttgagctaagctcatgttggcagaaaaatggatttattaaaagaaagtacataataaatgtggtactgttcacctctgggtttcttaactgacattgagagggtgtccttgatttttttagaattgttatataatcttctggtgtcaacatttcattttaaagtggtcagtagtttaggcaaagggaatccgtcattcctgacggctgactttcaagtaaccaattcttggtaattgtcatttccccctttcttgcaaatagactgcatgcttccttacaaaactttcatgttttgttgttatggaattgtggcatccttttcctgatgagttgacgtgtaaaattctcagattgtatatgttgtcagtaattttgtttgcttttaaatgaggtaagtaaataaaaatgatgcagtgactgttgtttgtacggttgaccatgcatacttgttgacggagtagtggcaaggggatattggtgatttgagcctgttgctattggtttaaatttttgacatcattaattccagttatcgttgtttgtactgttgtaaaattgcagaaagtttgtctcagctatag

SEQ ID NO: 63858 - DNA, 552 bp, Cucumis sativus
  Intron number 2 from transcript Cucsa.161260.2 (locus Cucs a.161260) derived from phytozome v7.0 (chr-ID scaffold0114 4; pos 1157626 to 1158177)
tgctgctggttcttatcatagcctcgctcttactggttagtgtgcttgtttttcttttcggatatcaaatgttgaattcgatagagctttctttgcactaacaattgccaaattgttcgggtaaatggagacgatagtattaattctttgcagtatctaaattctaaatctaatacacgagcatcctatgattcattctcttgaaatatccgatgatttttttgttcctcgacgaagaagctcgaaaagtttgattcgcgttcatttttaatggcttagagatatttgttcaactggttgagaacgtgagcaatgttatttaaagaagaaactgagataaaactttgaagtagatcttttatgaaatggagtgttgaactcaacgtaccattcaagaaactaatggcataaaccagaatgaatcttataagtatgaccgaagtataatttaaactaaaatttcaacacttagccatgaagacagaacactgaaaagtattcccaggtgctactttactgatttgcaaattctcaccctcaatttattcgcag

SEQ ID NO: 63859 - DNA, 1014 bp, Cucumis sativus
  Intron number 3 from transcript Cucsa.284130.2 (locus Cucs a.284130) derived from phytozome v7.0 (chr-ID scaffold0265 3; pos 1010917 to 1011930 reverse strand)
tcccacacttgctttcaattgtttcatccccagaggtataaatgcatttttctgaaaaatgagcattgctttttgatgattacctttttctgccgagacagaaagttcaactgtctttttaattgttttttatttgaattctgggttaatactgtttcatacttagtctttgtgctaaacaaagaaattaatgaaattgtgtttggatcaatagaaatttttggcaaattcttagtggcagaggggtctataatacaaattggtgtatatttggacatatttttctatcgaacttgttgataagaaaggaacttattacattctaactacagcttttgaatgaattctttgtttaaaattggctcggttcttacattagaacagttatccttggaaagtgaaatagtaagaaagaaaattcaccgatgaacttactaaagagtgttatacatacttctaacaaatgtgggtttgttcgatcagcaagaatactttctgtgagtaacacgcccatgttgaacttatatttgattttctaaccctcttacacttgttacacatgtattacacacttgtgttgggtatacctgaactggaatgttggtaattttttctttaaatcttaaaattcatgaacacagaaagaatcaaagcatgagcattaaaaataatgaagtttcaatttaattgtatgaacgttcaggacaaaataaaagtattgaacttttcccttttatgtatataattgcatgaacatgtttgattttatatattatttcttagaagatgtcgtgacatttggaattatgattttttaatttgcattttcttctaatccatagataaaggcatcgtactgttgagaatgtgaatttgatttcttcaaccctttttgtttattgcatacttctgtgctccattggcattgttttaaaaaagtaaaatatcacaacttaaagttttcttttaatgtggaattcattcaaatggcccgaaaatggacttcttgtgcag

SEQ ID NO: 63860 - DNA, 778 bp, Cucumis sativus
  Intron number 2 from transcript Cucsa.219790.4 (locus Cucs a.219790) derived from phytozome v7.0 (chr-ID scaffold0165 8; pos 1416575 to 1417352 reverse strand)
aagttttcgaccttgtagccttgcctgtaagtactttcatttataagtagaattggcccaagttttagatggctttgaaattgagaatcctttgaggaagcatatgtcagaaacataaaatagctaggaagcggcaaaattaatatattggtttaaatcttattttagttattggactttcacgtttgttcaacattctggtttagtctctaaactttttgacttcctgttttggtttctgaactttgtataaaccatctttgtaatcgccattattttctcttttttctaattatttaacagatacttgacttagacgtttttttgtttctgacctaatgagctagagatatgcaacacattagttggtccaaaatcaaattttgaaacagattttagcttttctctaaatgatgaataactgagtccatcggtagctaaaatagttcattagacacgtttaggtaccaaaacaaagcatttaatagtttaggggatagaatctaattcttggaagtttaagaactaaaatgaactcgtaggtaagactaggatttacacctaataaatgagtggtcttgtggcctgtgggcatgactatgatatattctgtaatagaactggcataatttaattatatctttagccgtgtaacattttaggacttgaattgtgactgtcatttgcctccttaagcatctctggtgctgtaaatggcatgtcaaagattcttgtcacttatggttacaatagtattgtggtttattgttagggaggg

SEQ ID NO: 63861 - DNA, 667 bp, Cucumis sativus
  Intron number 4 from transcript Cucsa.136790.1 (locus Cucs a.136790) derived from phytozome v7.0 (chr-ID scaffold0104 4; pos 1386784 to 1387450 reverse strand)
tcaaccaggtgacctatataagtgctcaagcaaaggtaaattttcttattttagggttgtatctatcttttttatgatttttttttttatcacggaagtaaaaaagaattcaaaaatattttttaaaaaaaaatgagatagaaaatttgcctatttaattacatagctttagtgtttcaaaactagccatgcatacaaattttcaaactgtgtaagtctaaatatagtttagtagataaaagattgactattattttaaaattggagcatttgatatattctcaagtgattattaaactgaaaaacttaccccatataaacattcgagcattttctcagtgtacaattaattacaaatttttaccatccttacaaataaagttcagtgccaaataacaagataaacctccataaaaatttataaaaaaaagtaaaaagtaaaaccttcttaaaaggaggataaaattggaggtataatcttttaaaatttaaaatctaaacttaaaaatgtttgagtattattttctcacctcttaattatagcaattattatcataatattttgcaaaagaatttgagtcggaagattgatgctgaaataacatttttacgtttgtgtactgattatgcagatacgataatcgtgcccatagattccggcgagacc

SEQ ID NO: 63862 - DNA, 456 bp, Cucumis sativus
  Intron number 2 from transcript Cucsa.191640.1 (locus Cucs a.191640) derived from phytozome v7.0 (chr-ID scaffold0133 0; pos 18678 to 19133 reverse strand)
aggggctgacatttactcaagaagtaaatccggtatgtttataccttttgttttgatggaatgttttgagatgttgagactcccacgttggaaaaaccaaggggactcacactccttataagatagatggattactcttctcattaccaattgattttgaaatggaactccatactattaaatagaatgctattttaatcgccaatgatcgtgtttttcttgatatggattgtccatttggttagattagaggtgttaatactcatcattctactgaacagtgtagatcgatagagttttctcatttaaatttgttaaacaactttgttttttgtacgagtaccttcactttttatacttgaacactatctaagcatggcatttctatattgcatcatccatctctatattgctactgcaggtatcagatttcgttttgtttcttacaatatttta

SEQ ID NO: 63863 - DNA, 584 bp, Cucumis sativus
  Intron number 1 from transcript Cucsa.191640.1 (locus Cucs a.191640) derived from phytozome v7.0 (chr-ID scaffold0133 0; pos 19184 to 19767 reverse strand)
tctctccatcagtttcccattcgctctctaaccaggtaaaattgcctctctctattttgaagcttcaatttagtttcggattatcttgtgccaatggattgtttctagtattattctcgaacccttcttccacaatgtccgcttccgggtaatgagcttgttggaagcttaatttgggatattgttagtatttgtgatttttggttgaatgacgccgtgggagtgaaagtgaagtcatatgagtgtggttattgcttctgatttttgaatggttaaaatcgcctttttcatgttcgaaatcacttcaaaacatgcatttaatcatttaaattggttttgattttacatttttaaacaataatttcatgccattaaaaaattgattttgaatgatgataactgtgattctgaccaattttgaacattaaagtattgatgctaacaattttaaaatcacccattaacatgtaagcaagagtaaatatctggatgcttttagactaatctttatgagttacgttattcccctgggctctcttttcttcttttaacgctctattactggcagaaatattgtacggaac

SEQ ID NO: 63864 - DNA, 738 bp, Cucumis sativus
  Intron number 2 from transcript Cucsa.218690.1 (locus Cucs a.218690) derived from phytozome v7.0 (chr-ID scaffold0165 8; pos 691261 to 691998 reverse strand)
gaaaatcaacttcctttcttcattctccaacgcttgtttgagctaatgccaaaagaaaacaaccccaaatctctaattccgagagaatgaattttccaccatctcctttctagaacttatatatgagtttcttcgtcgtcttgggtggatagaaaattatgtacaacttggtaaaagaattgtctgatctaagtttgacctcaaacacttggtggatttcttaaggctattctacatctcgagttcagatgacgaatgtcgtgacgacaagaagattaatattttaagcttcttcgatgtgtgtattaaaaggtattgagtgtcgtcgattttgtaacaagactaattataaggaaacaagtgagaagaagatggtccatgcggaaagcaaagaaaaacaaagaactctttcaatcttcaaacgaacctactcgccggaatattgtacaaaggagaagaataatttgttgagcagaacagactcatgtttttatcggaagaagaagaagcatgagcaaaatgaccctgaggaaaagatatggattcctccatccataacggagctctttgaggctggtgtcaccgtaaagaaggcaaaaaagtctccatttataaccaacataacctacaaaaatggggttatggaaatcccacctatagttattgacgattacttcgaaaccattactctgaaacttgatagcatatgagcatctggccgcaaaaagttatcaagaa

SEQ ID NO: 63865 - DNA, 729 bp, Cucumis sativus
  Intron number 1 from transcript Cucsa.238510.1 (locus Cucs a.238510) derived from phytozome v7.0 (chr-ID scaffold0202 3; pos 1067444 to 1068172)
cttctcttctccctccactttactcttctctcaaggtacttccctctttccaactattctctatgttcctgtggaccccctttcgatgatcgccccatttttttgttctttattgggtttctgattcttttcatgatttatgcgtatttcttgtccgatcgtctttttgttgagttttttctcatggggttgtcgtataatttgaatagtttgttttgtttttattgttctgtatggttgtattccttattcttcaatgggtacattggatgagtcgtgtatgttctcgacgatgatgatcagcttggtttggtattcatgttttgatggtatctcgttccctcatcatttaaggaaagaatccttgttttcagaggtgacccagaaaaagaaaaggtcaatttggtgagatggatgggttattttgaccaaagactggcatttgattaattttttgctgtttcaataattttttctttcattgttgtgattcttgtggttttggattgctgccgacaaattattgtacctttaaataatagtggttgttggcttaatatatgatttagtaagaactgtcatttgacttgtgttctaggtgatgacattagcattcatcacagttggtctgaggataattccttcggatcctcatttcattaaccttactgaatagaggctgctaattttacaggtgaaaatcactgtttaaaagatccagtttattca

SEQ ID NO: 63866 - DNA, 619 bp, Cucumis sativus
  Intron number 2 from transcript Cucsa.238510.1 (locus Cucs a.238510) derived from phytozome v7.0 (chr-ID scaffold0202 3; pos 1068491 to 1069109)
ctgtaagctctattttcgttgcaatcatgttatttttccatatgtcactatcaaggaggaaagtagaagtatttatgaatacatacattggtgaaaattcaaagaaaaaaattgaaaggtagaaacaaaagatattttgagtactatactctcatactttgtcatcacaaagttgaagaaaaaaaaattctattattggttttactttacgaggatttgacatttacatagtattagagtttacagttaagaaaatttatttttcatgaaaaattgatgataaaaaatttgcaattacagatattaagagggaaatgtcttgaatcttaatgctacttgtatatatcatattattcggctgtttgttttaatttgtctttccatgttttctagcgatatttttttttttgcttttatagtgcacattagcatgggttaatatatatataacctgctattgattgtaatacatttatggaaaaacatgtgtaatttgtttcaaacgttagaagcgtttagctgtagtttgtgactttattttcaagatatctatattaatctatttttccacttacttcctctagtacacattgatttttcgaagaggagaagtacattc

SEQ ID NO: 63867 - DNA, 674 bp, Cucumis sativus
  Intron number 1 from transcript Cucsa.251520.1 (locus Cucs a.251520) derived from phytozome v7.0 (chr-ID scaffold0222 9; pos 578448 to 579121)
cttcacctgattacaaccctgccaataaacttcaggcacttaacttttctttcctctcctatctttatttctttttcctcgtttgcttcttcactcttcttattcaaaagaaaatttaaaaaggatacctttttttaattagttatattccctaaaccttaacttacctacaactttaaggatccttactcaccgtattgtagttataaacataagcaaaatataatggcagtgaaaacaactctttaactgtaatgaaaatatacgcacttaatgttagtagaacttgatcatactaaaattgttacaaatttagatgttttggagtattaaacgatatttgtttaaaagaaaattgttgtagatgacataactacaaaatctatgatattttatcattaaaatttgactatattttgtaatattttgtcacatcctagagctagactaaaccaccaattattaacaaatatggtatgaaaaacgattttaattttcttttttccttgtaaagaccgttcaaaacttcaaataagaattaaaaaaactgtgtagaaaacaaaacataaatatacaaaatttgattacgaaacaaaaaaatccatgaaacatgtcaaaaatgaaaaaacttgagtgcaggggaaggtggcgctagtgacgggcggggactcagg

SEQ ID NO: 63868 - DNA, 579 bp, Cucumis sativus
  Intron number 2 from transcript Cucsa.306880.1 (locus Cucs a.306880) derived from phytozome v7.0 (chr-ID scaffold0297 7; pos 278664 to 279242)
accaggattccgccattgaacttggcaaagaattggtaaaaaaaagaaagataaacttcttctgttctttttttacactattttcgatccatttcctttttctctgttcaaatgattattgggggtgttttgtttttcatgttgctagagattgttctgcatttctttttaaatgttttggtgaactttatgtgtatattgtttgtttggaattaataagtcctttgttttctttgttttccattgacgttcaattgggatgtgttgtgattgtgtccacaacgtgtttgtgattatgcttgatcatgaccctttacttatcttcttcaactttgatatttcctctcccatttcccatcagaaacttaaattgcaaagaaaatgcatgaatatctcagttgggtgacagtttgtttcttttgaaattttatccacataggcttctcatacatacattcaaagtaaaaggaaagaatcccatttcataaatgaaactctcgagtcatttgagatgatgagtttggtttttgatgttgtttttaaggtttcaaggaacattgatctggtctacggtggggg

SEQ ID NO: 63869 - DNA, 566 bp, Cucumis sativus
  Intron number 1 from transcript Cucsa.232380.1 (locus Cucs a.232380) derived from phytozome v7.0 (chr-ID scaffold0198 9; pos 373525 to 374090)
tgtaagcaaggaaggtaaggtaaggtagggactaatatttgtatttaaatttgttatgggtttgaattttttttgatagggaaaaagaaatgtatttttgtttagtgtaaaaaaaaactgatgatccccacccacccccactcaatcccttggatatttcttatttttgctttgttaagcgctttccccttcacagtcactgttttttccttcttctctttcctcattttcttctctgaaagagctcccaggtgcttgtgtacaccgaatttgtgcttttgggttgcttatccctacgttgacgagctccagatttgaatcagtctacaaatttcaactgggtcggagaaatcgaggacccccacttccccatttcattactacctttgaatcatttcatcttttactccaaaacgctccttcttagctccccatttcgttatacttttaactagtttataatgcagaagagtctttggtttaactgggttttgaacccaatcggaaaatcaccggcgatttgatgggattgattgtgttagtgtttcagtcttcttcgactctta

SEQ ID NO: 63870 - DNA, 817 bp, Cucumis sativus
  Intron number 2 from transcript Cucsa.232380.1 (locus Cucs a.232380) derived from phytozome v7.0 (chr-ID scaffold0198 9; pos 374140 to 374956)
ctaagatccgcttcaccgttgttgtatttgaggtgagctgtttgcggtgactgatgtttggtttttttagtaaagtttggtgggttaatcattttggctatgtggggggaggtggagatttaggtttagggtttctctagactggacttcttcttctctaaatagcaaaaattttctttaagctctatttgggtttgcaattgttggattggcattgccagtgcacttttaaagctgttttggctgtgcgttttctcctatacaatttcaagaaaactgaacggctgttaagttttattttatttatttttgcttattttctggggaagtttggattttaggaataattcgtaatttgcccaccccttctcttctaaatctttcctttctctcttccgggagtttgtttgttaaacttttgaagtcaaggaaaatggaagttaatgcttggaagttttgttctatttccttggttttctctgttgagctgatttttgcttcttgagttcgaaggagatttctctcacaatgttaggtgaaagaaccaatggtttcctctaagttcaatagagtttaaagtgggttttcttctttgatctaatttctgtaagatctcattattccatataggaaatagataggtatgtattccaatcttcatagaaatctggagtttaagcttcacctcttgcctgtgtaaactaattgtttttgttttgggttttttgactacaaattatatgtatggatttttctgtgatttataatatttggtttgtttgtgtcgtcgttcagattttgcttcttctggctttgg

SEQ ID NO: 63871 - DNA, 340 bp, Cucumis sativus
  Intron number 3 from transcript Cucsa.303430.1 (locus Cucs a.303430) derived from phytozome v7.0 (chr-ID scaffold0295 1; pos 1370394 to 1370733 reverse strand)
cgaccatttggtggcccatctggagaccgcccacggtaaatcttctgctcttcttatgatgatttcctcccctttgcttattggtttttgctgggttttacttttagcttgttgagtttactctgtattaatgctttcttgttgtataattgtcagttctaaacgtaggttataactgctatgattagattggattcataaatttatccttttacattgatatcaccgtactactgattctacactgtactggtctttgagttggtttgtagtttgattctgactgttcatcaatccttatcctattgtattgctctttttagtggtccttcaagatttg

SEQ ID NO: 63872 - DNA, 566 bp, Cucumis sativus
  Intron number 3 from transcript Cucsa.306840.2 (locus Cucs a.306840) derived from phytozome v7.0 (chr-ID scaffold0297 7; pos 244086 to 244651)
tcttctgcaccccgaagctgaggaaaagcttgggcgtatgtatttttttttagtttcacatttgactttaacttaagtgtttgagtttaatgaactttataggatggttgtctctcttctgcagttgtgtcatgattgaatggcctatcatcatgaccgtattttagtctataacctgagtccctgactgcattgatattcaaaccccatattttatctattgaattttcccataaaaggctgtgtcatgcataattactacttttttttttcaatttcccctcaatagtgcaatttaccttctatcttaactatataagttatctcaatatttacttttaaataatattctaatttatacttttccatagtcattcttctctatatcattgctttcaccagtgtggaagagggaactgattactgaatccttgtgtttagacctttctgccgttaatgagttgttcatgatttcatcattatgctgtgcctattttatgtctgctctgaaatggcaagcttacaaatgacctcattattttgtttttttggtccaattgcagtga

SEQ ID NO: 63873 - DNA, 659 bp, Cucumis sativus
  Intron number 1 from transcript Cucsa.258930.4 (locus Cucs a.258930) derived from phytozome v7.0 (chr-ID scaffold0222 9; pos 5657296 to 5657954 reverse strand)
gagattggaaagaaaaaaaaggagtaccgagaaaggtatgtttctcgcaattccatgtcctagatctctgcaagtgaataaaatttgcagcttttttttttttccaaccatttttcatgtacatttgattgaatctacattccatgttcttgatgggttgtgtcaatttctgggttttaggaactgaaaatcatctggggttgtttcaaatttctgtcattggaatcatttcttgctggaatggaatttgaataaattttgatctctgtatgtcttgttgtctcttggaaaagggaaatgtttatctgggctgtctgtatgttggcctttttcgaaggcctttcaatgggaattcagttttcttctttaaacggtggatttggcgaatattcagaaaaaggtttcgaaatagaccataataaatgcagataaaatctacccttttttcctcttccctagtttgacggtatttcttaaaaatatttatatataaatggatttgaaacggtcttgattattcggttttgaattttctgtttccataaacgcgttacctctaatttccgtcttctgcgtcgcttcatttgcgccttttttctgttgggtttagttcttcttttccagttttgtagatctaagccactaatcgacgaacccca

SEQ ID NO: 63874 - DNA, 1014 bp, Cucumis sativus
  Intron number 1 from transcript Cucsa.272300.2 (locus Cucs a.272300) derived from phytozome v7.0 (chr-ID scaffold0250 0; pos 924407 to 925420 reverse strand)
gttaacgaaaagccctcaactccagttaacgcgtaattcttactctctaatcttttcagcgtttgatcttatctttgatttttgtttttcctttttactgttcaacctctacgtttattatcgattcaattttagctggttttcattcttttttttttttttctttctaatctgcccatcttatctaacattccttccgttaaatttcgggggtgatcgtttatgctggagatttaggactcctgctctcgatttctttaaattgcctcatttccattaagagctattgggtttccttccaatttgaatcttgaattacacccagtttcaaatggtagctacctgctacttttgagttttgccaatttcttagctcataaattagtattgggttataacttatatgcagagatggcgttgttctgtgagcaatttgtgaggggaatgtggattttagtcactgttttgcagcttatggtgggatgtttgttcttttttgatagctgtcaaaaggcttagttttgattacgttgtcactattattattattactactatacttttttcttttacatgagagcgttggctgtgcatctcgactaatcttaggggataacatgtgtttcaagaaattcataggatattaattctctctaagttctttatttaagcccatggttcttgttggcttctaggcgaaaatggctattacattgttatgatgttttgattatgttgtcatgatgatttacttttaatagaaacaactgctttcattaacaaaaaatggaaggcatacactttgtcatgatgatttgattttcaaatcaattaaaaatttgcaattcttggaagattgaatatgactactacatggttgctctcattttttaactttgcaactgttagagagtgtacaaatgtacaaaccctttagttttattagtgtaaaactcactctcgcaaattatccttccaggatcaaatctgaaaactgttgatagacgtttgggg

SEQ ID NO: 63875 - DNA, 772 bp, Cucumis sativus
  Intron number 1 from transcript Cucsa.281820.2 (locus Cucs a.281820) derived from phytozome v7.0 (chr-ID scaffold0264 1; pos 2810 to 3581)
ttcagccatcaaccaaggggagacacacaaaagaggttatggatttttcatcttccttttcttctttttctttttgtttaaatgcatttctatttttttgttgatcctcttttcttcttctttcttccctttttttaaaatttattgatctgcttttctcttgattttctgacgcatctggaactatgaacttccatttccctccataggctttcttatatcaccttttcttcttcccaggttttgttgttgtttttcttctttttcagtgtttaaattttgatagatcccctatggtttcgatcaatttttgttttacatttatgtgtctgatttgttcgaatttggattttggttaatcttgaaattctgggggttttacttcacgatttctttttgtttttatttctgccagtaatttctttcatttctgagcttacttggctgacattttgatgaatctgcatcgtcatgtcatcagaatgttgagttttatttccatattccctttgttttggctggcatcgaatttcattcgtattcttcttaattgctctatttggattgatgtttactcaccggaagatatgtaagtttacgtgtgtggttactaatttgattttccttttgggttttgttgattgctatgttaatttggttttgctgaaaaggaaatttatatgcagtatctcccttgttaggattagttgttgatgaagttgttttgttgttgacaggttgcagtttttgtgtctcctccttggaaaaagaa

SEQ ID NO: 63876 - DNA, 634 bp, Cucumis sativus
  Intron number 1 from transcript Cucsa.304160.2 (locus Cucs a.304160) derived from phytozome v7.0 (chr-ID scaffold0295 1; pos 1883273 to 1883906)
ttgtcgagaaggatccatctggacgatatatacgggtatttcttttaattcttttcttgggtttaccttttgatgttttcattacttgtttcttcttagcttaattcattgccttacccactgagatttgatttgatggaggaattatttttcatattgttccctttactgttttaggttggtgtttggttcctcaattttagaatgtgagttatcttaatttagggattcactagtgctgattatgagttgaattggtttttttttctttttttctttttttgcttttgtaagggaagaatttggaatttggtagttttcttcttctttttttttttttttgccaatggttcggtcatcgattacttatgttttagatttgttctttctcttttgccttatggttttgatgttttaatctattttgacttgatccttatttggacctttcccccttttttttcagtatgatgagatattgggtaaaggggcattcaagacagtgtatgcttcaatctttgttcttttatttatctccttttcttttctagtttgttcatgaatctgttgagattttggggtgtattatttgatttgaggtctatttttgctgtcatcagttacaaagcattcg

SEQ ID NO: 63877 - DNA, 504 bp, Cucumis sativus
  Intron number 1 from transcript Cucsa.194360.1 (locus Cucs a.194360) derived from phytozome v7.0 (chr-ID scaffold0133 7; pos 787195 to 787698 reverse strand)
atttttgagaggtactttttattttgtttttctatggttttttgagtttttttttttttattgatgttaatgtatttttggtggtagctgcagtttattctctagatattgacaaaaaaaattaatgggtcctgatgaataagacacttgatgtttgtttgtttgtttcttgggaatctatatttggattctttttcattctctaagacatacaaactgggggattctctgtttgttcttttttctttaagttccattctcttattggattttaacttggtttgaagggctttctaattctctgggtcacatacagattttagtttttttctgtttttatgctgtctttgaatttatttgtcctttttcatcaaattccattctctttctagaatctagtgttatttgaagaactttgatttggatgctttcctttgtcgacattgtactattgtttcttatcttaatcctttgcaggtagtgaactgttggtattatccaatc

SEQ ID NO: 63878 - DNA, 509 bp, Cucumis sativus
  Intron number 1 from transcript Cucsa.148110.1 (locus Cucs a.148110) derived from phytozome v7.0 (chr-ID scaffold0110 7; pos 342726 to 343234)
acgccgacgcccacggcggcaggagcctccttacggtatgttgtcatctttgattctgttttttaatttcctcttctttcccgtttaatttctatttcgttgtaccaaaactaggaaataattacagttttcattttgggcgtttcatttcgagatatttcgtttttttttttttttgtttgttatttattgattgttgacgcttcgttagttactaataacagagaatgtattggcatcctatgattttgactcttttcttctcggttttttgtttgaatttagaacaaatgtttggactatatatctgggggggaatctagtttagatgattatgtcaattattttaatttttcagttgttaaatgaataacttcaagtattgggttactcttcatgctgcagcctctgttggtttccatgtaaattttaatagaaatttggctatggttttgttgcgtaacttctagttgatcttgattcaggtacagtggtgtgtttttgaaaag

SEQ ID NO: 63879 - DNA, 675 bp, Cucumis sativus
  Intron number 1 from transcript Cucsa.300070.8 (locus Cucs a.300070) derived from phytozome v7.0 (chr-ID scaffold0292 5; pos 85745 to 86419)
cccttcgctaattctgttgtcgctcgctgttccaagtatttctcctctccttttctcatgatcttcatttttttttttgttttcctcgaatgctttcttcttcttttatcatgtatatttttggttgcatacgaattgccatttcttcttcttcttctttttttttacttcaaactttgatgcgtatttgtgatttaaagtgggatgattagctgttgattctgtgtaaatcactgagtctctagtactgcagaagaacttatgtatccacaatcaatcacttcacctcatgctccatcttcatttactgtggcattattgcacagaatctagtttctttgccttttgaaatttatattgcagtcggttatatgctttgtttattttgtttgttttttgtgtggctaatgatgatttatgccttaaataattaggttaatctgctttgttttagagcaacaaaaaagagtttatctttccttcataaatagaggatttcacaaattttagtgtctgtaacgatatgttgcatatgtcatatggaagacataattttgatttggcatttgtaatgcaatccttagaactgaacgtttgcttcggtttttatgttattgttatttcatgcatcttaaggttaaggcagacacatttttattatgcaggattcttcaa

SEQ ID NO: 63880 - DNA, 709 bp, Cucumis sativus
  Intron number 1 from transcript Cucsa.271620.2 (locus Cucs a.271620) derived from phytozome v7.0 (chr-ID scaffold0250 0; pos 447267 to 447975)
cttctcgttactctgctacggcttcttcttctcaggtttgattttgctcattttctgaattttttcttttttggttttggggtttgattgagggtggagtaaagaagatgaccagttgattgatttatcgtctatatttgttagcggtgtctatttattcgaagtttgttttagcttttttggtggtggaagtattgaagagggttggaattgactgaaattttctatacattgatttaatgatggcgtggtcttgtagattgatggaaaaagtaattgtcaatgtttaatgagtgggtttttggagagattacacccttttgggtcagcatttgagaaccattagcttgtttccaatttgtttacaataattaactaagatcaaacatctagcttaataagatgaaaatcattctaaaatattattagaaaataaattcaattttcaaaacccaaatggtaatcaaacaaggctttaacaattcaaaattacggcgtttctgtttattttcagcatccataaatggtatcgattgaatttcactctttgctgagaaaacccgtcctccagtggtaattgaaatctagtaggggatttttttcaatccatttctatgattgatcggaaaatatcaatgtctgttgtatgctaagtataggttgatcagcaattctttttaagcagataaatcagacagacttcactgag

SEQ ID NO: 63881 - DNA, 547 bp, Cucumis sativus
  Intron number 4 from transcript Cucsa.271620.2 (locus Cucs a.271620) derived from phytozome v7.0 (chr-ID scaffold0250 0; pos 448968 to 449514)
ttccagaaccattgctgaatagaaaggttattacttaattaaccaatgacgcttttgtgagactattattgaaactgaaattttcatttgttgatcataagcatgttcctgtcattgttgtaacaaagagtcctctataatatcaaaataaaggtaaaaggagtttactttaaatctaaaacaaatctgaggaattgctttggacctcttactattatattctactgtttgtgtgtgcgtgtgtggaaaggttatcattataaattttctataaactttcgctgctttgtcttgcaatattcgctcaaagtcccctctatgccttgttcttggatattagaataacggataaatataaaatgtggctttgctatttgcttttcttaggttctgttgttattcgtcattcgatatgttttggcatcttcatttagccattgtattgtaccgtttcttagtccttgttttctttgatttttctaaacttgtttattaccccaaactaatatatttcttttggttgcatttgcagttaatatctctggac

SEQ ID NO: 63882 - DNA, 475 bp, Cucumis sativus
  Intron number 1 from transcript Cucsa.156400.1 (locus Cucs a.156400) derived from phytozome v7.0 (chr-ID scaffold0113 9; pos 733122 to 733596 reverse strand)
gcctagttctactgagtctgattgcaatcaaggtgagttgaattcggtgtggcttttgaaaaaactactaggtggaattattttttctgtaagcacttctagaggaattgctaatgtagaacatgtttagaataacatttaaggaaactcgatattgaaactcctttagaagaagaaacacttgcgttttcatcaaccaaaatgtgactttaaattattaattaatcacttcctaccaaaaaaagaaaaaaaatcaaaatacgcccgcacacacaattgagattggccaaatcgcttttgaatgtagtgcaaccaaagttactgaaagctcttttaaacataatgtgaataatgcattattttgaaaagtatggcatgcatgacatactctaagagtgataacttttacttttcagttaattctttgataaaaaatgtaggtaactacactgcatctgagaagccggtctcccct

SEQ ID NO: 63883 - DNA, 738 bp, Cucumis sativus
  Intron number 2 from transcript Cucsa.266090.3 (locus Cucs a.266090) derived from phytozome v7.0 (chr-ID scaffold0235 2; pos 539630 to 540367 reverse strand)
ataacctgtaagttttatgagttttcctatagctattaaattataaaggctcctttctatcatcacttagttttttatgtttgtgctggttttctcatcatttctttaccatgtttttcatttttcttaagagaacatttgaattcttaggttaaaattttctttttttcaaacatatcgaattttgaaaacattttgaaaaagtagattatataataataataatgataaatcataggcaggagttgtggttatcaactttaactcttaaaaaccaaaaacaaaaaattaaatggttattaaatgataccttaatagttctatctattctttttccttgaataccgaattttgttcttatcattcatggttgtccaattaagccagttctattgtcatggtccacatttggttgcaacggaaattggaactcatgatactcatcatattttcctagtttagttgaactttgtgctacttggaaaagtattttgtcatcttctaaccttaactcgtatcaatttattacttgtttacatataaggagtggtatctaaatatattgccctaccaaatctacaatatcctactttgcgttaatacaatcacaccatgaaggcttgaacatcagtcaagtcttattcttctattcatttctcttcaatgaagttctttttctttccattttgtatgttctttatagtgattgttggggagactgctaacttcgttgcgtac

SEQ ID NO: 63884 - DNA, 432 bp, Cucumis sativus
  Intron number 2 from transcript Cucsa.207480.1 (locus Cucs a.207480) derived from phytozome v7.0 (chr-ID scaffold0144 3; pos 309657 to 310088)
caaagtttcaagtcgtttggataagtttctgcggggtaagaatggtctaaatttccttttgaacttgtttaaggtcctttatttggacacttttcacccttttggattagatttagatggtgtaaattagtctataactcttggtatgcttaatttgtggtttaaggttagagatttttgaggtggataatcgaagaatcatgaaactagtctgtctaattttatctgttgacttctcatgattgatatttcaattctataaagttggtggagaaaagattttaacttcttggatccgttgattatgtagaatttcggcattttttttatgttatcaaatttttggtttattttctttgatattctcaatttatttaccttcattgctaatcaagatggtattttgtttggttttctattttttaaatagca

SEQ ID NO: 63885 - DNA, 892 bp, Cucumis sativus
  Intron number 2 from transcript Cucsa.180730.1 (locus Cucs a.180730) derived from phytozome v7.0 (chr-ID scaffold0123 6; pos 316154 to 317045 reverse strand)
tgaaggtagaaaacatacagaattcacttgactaatgcaaaaattccttagtgcctctgaaattttggtaaaagagcttcgtttctcataaatctctgctccatttctttgtatcttttaagaactaagaagaacgttgatgggtccggaatatagagaacagttcttccgttcatcatgtcttctatgttatgaatggagcaggagaacggatttttcttctttgactgttttgttgtaattgttcaaattagtgctcttgtttttcgtctctacctttttaattcagctggatgacggtggaagataattattcaagatgcaaggtctcagtcacatttattttggattgatatcatatatatattttgatgaaataacaactgtcattggattgctctcatgcatatttcactattttttgtcctagactaaaattattgtcgataatattttcataatactcaaaggctctaaccacttattattaaagaaaatatatattaaatgtaacccttgctggattaacttagtattttgtggaatcaaaatttaaataatgccgtccagctgcaagtatgctactatgtcagtgtactagcttaagaacttatgatggttctgctgtcttctggaagcttatatcagtacttggtaatttagaatattactaactccggtagttgttatgtataaatcattctggtttggtggtctttatggtagtttttgagttcagtattgatataatggttttctttccagaaacaattgtatacattgtgcatgtacacatgtacatctccagtatcttctttttcacccggctcctttccttctgtggcttgattttccaggaaagaaaacgtgaacgacaatctatccagtctac

SEQ ID NO: 63886 - DNA, 911 bp, Cucumis sativus
  Intron number 2 from transcript Cucsa.180670.1 (locus Cucs a.180670) derived from phytozome v7.0 (chr-ID scaffold0123 6; pos 226034 to 226944 reverse strand)
gcagaacttactaccaagttgaggtaacatgcttctacacttatcctttcctgcttcaattctgtccatttttctcattcacttgttctttatctgcacatttggttatcatattcaaaatgtttagcccaaaatgtttagattttaaaactacaaatcataaatcaaatggttgccaagtgagaccgtaagtttctcaaccatggataaattattagatttatattcataagcttaatagatatcttttaaagtgttcagctcaacgagaacaaaagatctcaggttcaaatctcacccccaagttgtattacaataccttttaaagtttgatgatccggaagacaaatacacaaacaaaatgaaacttgtaatctctccttttaaaaacctcttctaattgtcaaaacaaaagttctctttggtcaagtgtaatagtttcactcgaacaaacgtttccagtgttttcaacagcagaaatcactggccgtgaagcttagtaataagcaacagaaaaccagaatgttgtaagagtagcacttcaaagattgttgtgagctgtggcattctagttttcgttatatatgtatgtgatgaagtttgaaatttcatagttcaatgcttaacatttaacattaataatgtaatgtccagatttggtttatttatttatttatgcttttttttacccttgaaaagttacatttattttgaaacttattcgagacaagaaatgacatttaaacttgaagggcttagtgcaactttgaatggaactaacccataggttataagtttaagttaatccttaatatgttgatctctatttcttcaaatataaagtcatatgctaacaacaataatccatatatatcttacaattatatgatatcaggtaaacataaagtcat

SEQ ID NO: 63887 - DNA, 694 bp, Cucumis sativus
  Intron number 2 from transcript Cucsa.237680.1 (locus Cucs a.237680) derived from phytozome v7.0 (chr-ID scaffold0202 3; pos 466511 to 467204)
gatagcggaaggcttcgaagagaaattgcatcaaggtcttgttttctattggtttatttttcattggaattttgtattcatatttttgttgatttaaattgtgtttattgtccttgttttcccaaaattcacggcacttcatctctctccctcacacatactggctgacacaaatttttttctcatgtagtttaggtatttatttattccactgatacgcggatgctaagttaaaagcaatctgcttatatgacattaccatttcctttaatgatttcttttttcttattcaaactccacgtccattcacttgattacaacaaaatgttttttttttaacaagctcatataatttttcaagtaactttctttaagtactaggaaatatgtatgtgggatgtcaagcactttcttgtgctatttcttcaagaagagaggtagaggttcaagtgttatcctcattatatgtgtctagttttcacttgtgtgttcatttcacccactgtaattttataacaaagtttggagagcacgttcctttgatatgcttgtttctttaatcccctgtatgtgaggtaaaactaggagaggcaaaggaaaaaggtgaaaaactaagttttttttatgtgtgtatggtggcattaaagtgttaacaattatacaactttcagggttcagaagccagtagctagag

SEQ ID NO: 63888 - DNA, 409 bp, Cucumis sativus
  Intron number 2 from transcript Cucsa.207360.1 (locus Cucs a.207360) derived from phytozome v7.0 (chr-ID scaffold0144 3; pos 195589 to 195997 reverse strand)
caaaaaacagcttcgggaatatgtatgccgatatatgccttttctttttaattcttttggaaggtgtattatatgctgatttgcctaaatccattttgattaagcaagtacggaattgaatttgaagtggtactcatctttttggtttttttgcttgaataaagatatttacaaatggtcattgcatgtaactgttctgctcttgtcttctactaccttcaatatcatttgctgtcattattatttcattcgtattttttagtattagaagaggaggatgccataaattcagacttctttttgaaacttgttgctgtttccattctatttcaccatgttttcaaagcttttctgaataaaattttgcttttcagctacactgctgttggtgtctttgttttgggaagga

SEQ ID NO: 63889 - DNA, 650 bp, Cucumis sativus
  Intron number 1 from transcript Cucsa.207360.1 (locus Cucs a.207360) derived from phytozome v7.0 (chr-ID scaffold0144 3; pos 196029 to 196678 reverse strand)
gtatcaaaaggcttggctacgttggaggtatggagaattacctgaaacttttgtcaagaatactgtaatgcttatgatgcttaatattccatttatgatggagttactatgtattatttaatgccattcactcttcattatggattttaaactttcaatgatagcattttagtttcgaagtagaagtatattgaacaatttggaagtcgactcaatttgggtgttcttttggtaactactcattttttgaatttttatgcttctacggcaaaagtgggtccatactactacctttcttggacaagatttgttacaaccgtgtcctgagttctaaaaaagtacttgtgagtctaatatatggttttcttctaggtttggaaggatcacgtttcctatttcatgataaattcatatctttctgtgaaaaatttcatagatcatgtaacaaactagtaggtaaaatagcttttgtagcataaactgttccccccaccccacctcaccccagttcttcctggcttctggttattgtctctaatggtaaaagtatattgattgcattataaattcaataagttgttatgaggttattaggttattcaacttgaaaatttctacaggtttcactaaaacactcagggtcattgttt

SEQ ID NO: 63890 - DNA, 739 bp, Cucumis sativus
  Intron number 1 from transcript Cucsa.176860.3 (locus Cucs a.176860) derived from phytozome v7.0 (chr-ID scaffold0122 5; pos 921918 to 922656)
cgattccatcaattctaatcattggtacatcaaccaattcatcttccctttgacttttttgtttattgaatttacgctcgatcaattttttttttatgcctgaaacttcttttgattacttcctttttcatttcatctataccatgttggacgaggggacatatatcctgtttttccgttttttcatgacatataataataataataataacaataataatcaatttttatcctctttcctgtttttatttttttttggtcaggtatttttgttggaaatattcttttacatgtgaatattggttttcaggattcctgttgttattagtattatcatttatttttgtttttaagatgcctctaatcgcaacagcgttcgcttgatttctctggggctggtattagtaggcgttatatttgaggtggatgtaattttttttcccttcccctttctgaaagtgacgttcagagcaacttcttggcgaaggaagttttgtttgacatcaagttaacgttaggctgatggtttatgaattcgattcttaattggttaatgttcttaattattttattggttggtgggtaagaggggaagatggcgtactaggctttatctagaagcgtctgaaaccatatttctcttttaccgttatttccatgtttttagcttcctcattcttttgctgaaatctagaactcgttgtttagccaactttgtgtgtggtcaggcaggcgaaag

SEQ ID NO: 63891 - DNA, 836 bp, Cucumis sativus
  Intron number 2 from transcript Cucsa.271650.18 (locus Cuc sa.271650) derived from phytozome v7.0 (chr-ID scaffold025 00; pos 469298 to 470133)
gataatatatcttctctaagatccggtggtctttggtaattcctcttttttgttttctctctctttcccgcgacattaataccacgagtgtgttgctttagttctttccgcagctggttttatgaactgggggtggattttttgtatctcttttgtaaatgtcgttgatggggttgtgtaaaattgatgaattttgttatggggtgtgttaggttttctggctggtgatgaaatgcttgatttatttattaatttctgttgagaattcatcgtcgttaccgcagtggcatttggtggccatgcgttcgttttctttgcgtttgtttgagagatttcacatgcttggctgcatttcttttcagctcacgtggaagtctttgttttgttaggtatatattcttttcacgtatgggttttattgtcgaacggtacgtgtatatgtatgtgtgcaagaaactgttcatcgtgttgcctgttggaaatataattctgtcgtggtgtgtactgtagagctcttccatgcgttcatatctctttttatggtaatgtatttgcatctttgttactttggaggtaggattttattccaaggttccttccttcttaggcgtttcacatggttcagtagcgaaccctagaattgagaacttttttaccatatgtatattttgagcttaagatttttcttccgcaacttttcatactgtattgaagctatcttaatatcacagatgctataacctcgccaagagggatttttcctttattttttcattctacaaagtaatgttgtgctcctgcttactgacaaacataatgatttgttggtgcagaat

SEQ ID NO: 63892 - DNA, 752 bp, Cucumis sativus
  Intron number 1 from transcript Cucsa.254370.1 (locus Cucs a.254370) derived from phytozome v7.0 (chr-ID scaffold0222 9; pos 2699955 to 2700706)
tcgttactactgattgataatttgggtaaattttactttgttggtttttcgcggaaaatttgtttgagactttcaatttactagctttcttaagttgaagagttgtaaactaagaagcataaatacagatacgacaagacacacaatagtttagaaatttaggacaccataagacaaggacaggtaataaaatatacattttttaaaatatattttatttttatacgaaaagaaaatttagagtaaattgttcagtacattaaaaaaatttgtcagaaactattttatactcaaaagttattattagtcatatatatatatattatcttagtctactcaactcaactagtattctatgcatgtctaacgtatttattgattaacaagtgcttgatacatgtcgaacatttgttgaagtatcaaacaccaatacaatagctaaactaaagggcatgtgcttcttaggttgtaaatctggtatgaactattctaatgataatatttttctagtttaaatccacgtttaaaggaaaaattactgcgaaacttatatttggtccttgccttacatataaaggtattgcttaagtggttgttatgatctcgcctttcaactctttgaagaaatgaagagaacaagcttggaactagatgaaatgattctttctaccgttctttctgtgtgcgctcgtgctgaaactttggattttggaacaaaaatacactgagtcattgctaagaagaattttgtc

SEQ ID NO: 63893 - DNA, 1047 bp, Cucumis sativus
  Intron number 3 from transcript Cucsa.149720.6 (locus Cucs a.149720) derived from phytozome v7.0 (chr-ID scaffold0111 0; pos 579856 to 580902)
ttcttgaagctgcagacagacttcctttctttcaggttctaatgtctccgacttttcaatcgctggaaatgtacattttatttttttaagaatctatgccatttaaaaaaaaaataaagaattgaactcaagaaagaatgaaagaatataattcaaggacatccaaataaaatagtccacgcaaagaaggaaggtggactccaatcaagcacaatgaaacgtagtgtgtaattgcaaacaattttatcaatgtccaaagagaaacatagaacaaagcgagggatgaaacatcaagaggacttctctacaagcttctaaaaattctattgtttcttcctctcgaagatcccataaaatagcacaaacctcagcctaccaaataagcctccatttatcacaaaagggagggttacaaaggaaattgttgatcgtcttcttgtaatctctgttgtcaagcaaactggacacaaagcactgcaaaaaggtcattgcaaaccgtctgagcaaactcacagctccacaagttatgatttcggtgttcctcaaccaaccttaagcttgtttggtagtgattttgaaattattgaaatctcttttgaagaagttcaaagtcactctaaaacatgcttttagtcattcaatatcgattttgatcttatgaaacttgaccttggcaaaagttgattttgaccctttgaaaattattccaaaacatatcttaaatcacttcctctcagtttctttgtaataatcgtttaagtagtctgttaggagaggtttgctgagctactatctctagttggtctagagattcgtgtttagtgtaatcttgttttgctttcttttacctgaaaattagtgatcccaaggcatgaatgttgatattctttcacgtaactttttcaagaaaaaaaatgttgatatttttgttacagttttcatttcctattgttaagagggtaaataacattgttatatttaatatttttattgtgtttctgtttatttgctgcactggtagattgggcaaatctttcagaaattcga

SEQ ID NO: 63894 - DNA, 805 bp, Cucumis sativus
  Intron number 2 from transcript Cucsa.242760.4 (locus Cucs a.242760) derived from phytozome v7.0 (chr-ID scaffold0204 7; pos 2435133 to 2435937 reverse strand)
aagcctccgacagtagcggtaagttggaatgatttggattttgttctatgggaatgtgtagttctttcgaatgcaatttggggcctttttcttctttgagcgtgttgggccttttatatctgcaattgggtgttctttcattgttctgttgagtagaagtgattgatttggtggttacttcgacgagggcttcgaaataggttttcgtttttttttttcgttttggtgtattaacggaaattggggtttcgtcacttggggcgtccatggaatgaaggtttaattgagttttttcctttttttttggtttttttttctttaagtactgggtttatcttttccgttatttaggttttaatttttgtaattcttcgcgaaaatttccatgcgagaagaagggagattttagactattgtgcttgatcacggtgtgtggcctttgtcgcttgattgacaagctaaggaattttctctttggttccgatttctcaaggacataatgaggcaggtatgaacctgaacaaaaacgaaaagttgaaccctcaagcagaggagttattcaatttaggactatggagattcaggtttttctggattatgagttctctcaatatcctgtttcgattgaattgttcctagcataaagcatacaggatagatagggatattgttgttatagccagtttataggaacccggaggatgctatcagaatatcaccatgttattggggaaatcatgagttattctaggtgtaatatcctttaaaatcatgtatcctgcatatgaaataactgcaggtactg

SEQ ID NO: 63895 - DNA, 511 bp, Cucumis sativus
  Intron number 1 from transcript Cucsa.143220.1 (locus Cucs a.143220) derived from phytozome v7.0 (chr-ID scaffold0107 9; pos 1540631 to 1541141)
ttcgttcgtaacttggtgattcaggtcgatatttggtaagattttgaacttccccacctcccctttgagttaatttcgtttgtttttctgtttctctcctcgatatttagagaacttgctggattttttttatctgtgtttcgttgatttagttgtaatttgattgaattcttaaacagttgattcttgggttttcaaagtttcttgtttggggatcttttccccctctttgtaatagttttagtggttgcctaaattagtttctgattgatggatatttgactttgccaaattgatttgttcttgtttggctttgaggaaattgagaagagtggatagagattgaagttttgttgtttcgaattgaatgaaaactgggtgggagtttaatttcgttgaggagagtgcctactgaatcaatataagttatagaaccaataaaattctgaattcctttgtgttctctctttgttatcttttactagaaggcaaacagatattatcatcttaa

SEQ ID NO: 63896 - DNA, 565 bp, Cucumis sativus
  Intron number 1 from transcript Cucsa.139660.1 (locus Cucs a.139660) derived from phytozome v7.0 (chr-ID scaffold0106 6; pos 936926 to 937490)
acctccagcccttgctccagtagcatcgcatttaggtacttgatctgttcattctattcgtttctttaacctcatttcttgaatttcactttgattcctcagaaaaaaaaagcgaagaaatatcctctgttatttgataaatagtctgctttgatactaactttatggtgatcgaaagtttttggttaacaattccttgtctgttatgttcaatcggatactgttggataattgaatattaaattaaaccaattattcgacatgtttgaagtagcttcgtgtcgcaggcatgtcggcgacagaaacagaacacaacacgttgtgaaatagaatgcaagagcagcttttatccgtctaagcaattcagttactttaattgtattgtattcaactttgtatcctggattgaattgttctctttatacatagtttttctttagataacgtcaatgctatcgagtacaatgggggtagccgtagaagtagaatcgtgttaccattattgaagtgaattcatgtttgtgatgatgctaggtacctgttgtttctgtagctgaggaatacc

SEQ ID NO: 63897 - DNA, 965 bp, Cucumis sativus
  Intron number 2 from transcript Cucsa.153170.2 (locus Cucs a.153170) derived from phytozome v7.0 (chr-ID scaffold0112 4; pos 385855 to 386819 reverse strand)
gcagtggacgagctaaaatccgcagttgcataccagtacgttgatcatttttctttctcttatcctcagattaacggaaaagacatttcttcttagttttcgtatctaaaaatcacattttggttacttgttaattaccttaactatcccgtagaagaaactgctgtaggacgaagagtttgagagatatgtgctatcaagttgtttcttttcgcggacccacttggtgctgtggagtcgtgtaacttactatctagtatgcgtgcttactctaactagtttaagggttctaattttgcacacgttcatgctctcaagaaatcaagcaaaatcactatctagattgcctgaaagttgtcgtttttaaaaacaaataatgaagtatccgtaagatccatcgaagctgatggtgtcgtttcatttctcaaacttgaaatgtgcaccaaggtgggaattgagaaatcattcctaatcgttgctggaatcacaattataggaggaatgaactgaattgtgaaaaggatatcaagtattgtcttaaaaaatttcttaaaagagctactgttgttttttttgggggaatgaaacattttattgattgaatgaaataggggccaaggcccgggcacccaaaggtgatcatatgtcaataggttttctcctccaaacccaaatattgtcccataagctgtcaaagatttggattagaaaagattggttttgaaaaatcattgatgtattttaaaatggacagacttgggcaccgttttctgcattttgttttaggtgagagggacatggtttgaccctatggtgaacaataaggcagtaagttacaaacatttctttaacttcatttatagtttttaaatgagccattctccaccgtatttgattggtatattgaacaattgatataattggtgtaaaggtcttgctgtttctattgtaggggaaaaggtgca

SEQ ID NO: 63898 - DNA, 1018 bp, Cucumis sativus
  Intron number 1 from transcript Cucsa.249640.1 (locus Cucs a.249640) derived from phytozome v7.0 (chr-ID scaffold0221 2; pos 36458 to 37475)
tctcctcacttcccctcaccttattcacagagtatatcttcagttttttggtttcttaattgcttttgtaattctgttttcgttcaaggaaaaaaaaatatatataatgttgatcttagtataatcagaattgctttctcaatttttaatttttattctctaattcttctcaccatctatgttgttttgaaaagtcaattataacactaatctttaggatttcgctttcacttaattataatgattgatctctagttttttaggtgggtggagcttttttctgctcatatttcacccctttcatgaaaatagctttagtttgtaaccaatttaattctgttttcagtgttttgtttgttgaatttacaaatttgtattcacccattgggtttggctcacttttaggtttgtttgagagtgctgaaaagttcttttagtttttagtaaatcactttgttgtttcgttctgttgctcttaaaagcatttcatggtcgctttgacttgatgaattttagtggaaagagttacaaaaaggctttttaacatggttaacagcatgttcaaacgtagattttactgccttcattgttgtatgggggcaaaagtaggaacaaagtaacaagacagatgacacaactccttctatatggtgccttttcagctttttcttcattttcatacttcatataaatatatttagcattttttatgatgtcatttgtcaataagaacctttctcgttttggcttttttttttttgggggggggggggtgtcactttgctttcttttaaagtattgataattttctatgatgttattttatttgtcaacaagaacctttagaagtgggatataaagctcttatggactgaaactaattataaagtatgaaatgataaaaaacaatgcagtcaagtaaaatggtggtcaataataacaatagcacgtataaattatagtttgaatttcaattgaattttacgcatcattatcgcattgtgtggtacaggtacac

SEQ ID NO: 63899 - DNA, 447 bp, Cucumis sativus
  Intron number 1 from transcript Cucsa.271100.1 (locus Cucs a.271100) derived from phytozome v7.0 (chr-ID scaffold0250 0; pos 45710 to 46156 reverse strand)
aaaccctagcccatttacctctggatctcgctagggttagctacgtttcttccattctccacattttcagtttttcaacttttctttctgcattttgtacctttacgccgttgcatgtgatcttacggctatgctttattctttttgttccgattgttgtgattaacgcctggtatcgtatatatctatattttttctttttaatttttggaaagaatctgtatcgttttggtgggtttttttgtttttaattgcatatgtgctgttctgttgaactttcatcattgaattgtttgctttatttgattgagacagtcttttaagcgtgtttcatcattcatggtttgagtattgatatctattgaatctccctggcgttggttctcagtatttatattttgtttttttgcaggtttcttgtacctttcatcggtcccactgccattc

SEQ ID NO: 63900 - DNA, 477 bp, Cucumis sativus
  Intron number 2 from transcript Cucsa.250110.1 (locus Cucs a.250110) derived from phytozome v7.0 (chr-ID scaffold0221 9; pos 217867 to 218343 reverse strand)
ctctctttatttgggtatcttcattcttttccctcttctatctactcataaagtaagcttaattataagttggtttaattctatttgggtttgtttatcttctaatagtgacttttggtagaagggtgttggttgatggaaaggtttactctaatcgagttgatcaacttcttaattacaatttctgaattcttttagacgaagtgtcagataaattctaaagtaaaaattagaaacacaaactcatattgaatattttgtaggactggtattcttaagtttagaacattatccttgagttttccatctttctcaacgaattccaaaccaaaatccaaaatctaaaataactttctaaacttgacatggtttttcaaaacaaagaaactgttattaatatttttaaacttaatttaagtaacaattaccaaacgagggcctaaaatttaaaatgatttgaatttgcaggatagccct

SEQ ID NO: 63901 - DNA, 581 bp, Cucumis sativus
  Intron number 2 from transcript Cucsa.180100.2 (locus Cucs a.180100) derived from phytozome v7.0 (chr-ID scaffold0123 3; pos 445534 to 446114 reverse strand)
tatctcaaatacaatcttagagctccggttgtgaggtaaacgtttctatttttgttctttgtagatttttacttctttttttagttgttttcatgagtttaactgggtcgaggtttatgtaagcctgtgttctctgttcttttcactgttttttctagaaaccaatcatgggtttgggatttcggctgccttttcatctctgttttttgagttttagcttttgggtctctttgcggatgtttctttgttcaaatgatgttgcaatagagataattattggtctgaacttgaaattctcataccatgtattatcttaactttctcctgaatttacctctggaaatagtgtgcgactaatatcattccttttttaactttcaatcttcttcctttagtgtagctagcgaatgaaattcttgcaggtttcatgttaactctaggagccagaaatggatcttgattcatccaaatttgatatagtttttgctgttttgtttgggggtgttagatgaagggggaaggatgtggttaagttgtggaacttgttgtttatggggcaatcgtgtgaaatgtttgtgtag

SEQ ID NO: 63902 - DNA, 936 bp, Cucumis sativus
  Intron number 1 from transcript Cucsa.160300.1 (locus Cucs a.160300) derived from phytozome v7.0 (chr-ID scaffold0114 4; pos 528679 to 529614)
attttcaggttctaatctcagcttatctccatattactctctcattttctccttcatttatcacatacatcgaaaactattaaaactaaaaagatttaagaatttaaacccaaaaaaatatcttctaggctttaattctaaaacaaaacaaaataaatatatagacatatagttaacaatttgtttagtcaacttaatattttttttttcaaactcaataattgagaagacaaaggacggtgttagtcaaactcgaagtatttttaataaagaagcaattggattacccatcaaatggggtaagttaagttgtatagtacatatgagttgaaattaggtttagaaagttgttttgaatcttcaaaataaattaggtttagtcaaaataaatgtgttttggatcttcaacccctaccaagtactaaccatatcttttctttttaaaagttgggagatttcatcagtattagtttacataaattgttatgtgttggggcccctactcccctactcttagttattacaattatggtttggcacaaacctgtagtgtgccaaaatcatatcccacctcataatttatagcccatactttccctagagatgtcaatcttttattgggatctgtctttaactagtcggtgttaaggccttacctatattccatttgacacgtggtattaatgtttgttcataagaaacttgaaatcaacatccatcaatagataaggaacaacttacttatcatacatactcacctagagttaaaagaagaaaaaaaacatgcctaaaagatccaattaaagattcaatatgtaaagtgaagttggtaatggttattataagatatgtgttttgttgcgaaaggaattaagtaatgattatatgaaaattgaaacaggcaatagcaagagaaggaagagaatttggacttgg

SEQ ID NO: 63903 - DNA, 671 bp, Cucumis sativus
  Intron number 1 from transcript Cucsa.147820.1 (locus Cucs a.147820) derived from phytozome v7.0 (chr-ID scaffold0110 7; pos 174522 to 175192)
aaggtgatttttaattgatctcttctgctttctccctttgctctctttgaggcttttccctttgccaacatcatacttttttcagtccttttctgctttcctgtttctttctttattaccctttccctttctctcaagttggaattgaaggtttacaagttttcattcctttctcttctccaaaatggtttgaaaacggtggaaaattgaacttgtaagtattctgatatagatttaagccattttttttagcttgaaaccaagtaaaaatctcaactttttgtttcattctcatttgtttatggatcttttgaaaaatggagagggagggggggtgaacaagggttttcttaaagtctttgagatttctgaaatgattttaaaaggaaacaatgtcttcacacagtgcacttagttttttccaacgtgagtctgacgatggacaagtcaccgctcacaagatcatctggacattttttttattattttctgtttctgcctcacatggctgcttatttaaatgacctgttatttgcctttttttttcttttcttcatgaagttgatgtgcatcattttcttgattcgctaaaaactatggcttaaaaccatttatttaatgagccatttcttgttttgttcagctggtatccgtcatccactcatcctcca

SEQ ID NO: 63904 - DNA, 726 bp, Cucumis sativus
  Intron number 1 from transcript Cucsa.280780.4 (locus Cucs a.280780) derived from phytozome v7.0 (chr-ID scaffold0263 3; pos 691202 to 691927)
gaaatcaagtctgcttataggaagcttgctcttaagtaattctcttgctctgcgcttcgtattactgaaacttgatctgttttagttcacatcaattcataattcctgtccaccgtcaataacgaatagaatatgctgtgtactagtgcagaacttgatatgtaagaagattattagtctaatctggtttaattttaaagagtggactggattttaaggatgtcacttgatggattcttttcttcttcctcttcttttcaccatgtttggaagtttagttagtgattgatattcagtcctgttcacttggaagcaaaagtttggaactgggtttgatttatcgtttgatctttgctcttttgaccttattggacttcttacatcgtctgctcattggacttctgttggtgttggtcgtaccttgtgtgctaattgctatctagttttggtttcatttctgggattgatattcagtcctgtttcaattcagctagcctgtggatgcattaacgttcgttagtgaaccgctgtggatggttacagcatgagagttcagctaggctctaggtgcattgcatttagttgcacatttctattgcctccattccgattttaattatttattacagaaagccaaaggaataagattgtttttgatcatttgaaccatctgtttgaaaagtgattcttagcctaatcaatttggcagatatcacccagataaga

SEQ ID NO: 63905 - DNA, 732 bp, Cucumis sativus
  Intron number 3 from transcript Cucsa.197950.1 (locus Cucs a.197950) derived from phytozome v7.0 (chr-ID scaffold0135 7; pos 1150808 to 1151539)
ggccgttgctcaagcctaccaacaagccattcgaagtaagtacatttttttatttcatcaatatcatggttcttggtgtaacattttttggctggcttgatggaaacttgacgtatagaacaaaagaaaccacctcgtttttgaactattagaagctatattgtcaacttgacatattgaacaaaagaaaccacctttgaaactttacgtattgaacaaaagaaaccaccaagctttttgccatcaagaacagttgcacaaagtgttagaaaattaatgtatttgagggatgttaacatcttgaatttcttcttttacatccttcctcatctttgaatgcctgaataatgtcttcttagaccttcagtaagtggtcaaaagaatttgttgtttttctaggctgtaacatgagcaaccgtttttgcaaataaaagctaagttttatattgcacatattttatagttattattctttttgttgacgaatagcctatttgagtgttcatggcctggatgatagcgtactgcagtgccaacatttggtcacccttgaaaggctgaataataccttccttgatctttgtagaaaatgcttctattgaatatattatttattagtttggtcaaatttggttgtttatacaaagttcttacttcttaatgtgggagagtttgacacagtttagttgtagacgattatgcttagtatcaaatctcttttatgtgttgaag

SEQ ID NO: 63906 - DNA, 712 bp, Cucumis sativus
  Intron number 1 from transcript Cucsa.144160.3 (locus Cucs a.144160) derived from phytozome v7.0 (chr-ID scaffold0108 0; pos 583229 to 583940)
cagcgattctcttttcgtcgtcgacaagtctcaaggtactgcttgcttcctcgcacacatacacactccattaccatgagatgcctgatttttttctcttgggttttgctttcttactcgatttttatgttttttctccttcttttttgctttgcttctgttgggttttgcgtacttttacttaaaagtatccacaaaagtgattaaaaggtctctgaacttttgtttgacgctgaactgaattgaagttcaatcttattttcacccagatgttataaaagaatacttataagtgagatttttaaactttgattgcgcaactgaaattaagcgacatatatttgggcatgaataattacattgttttagaaatgctaaatactattttgatttgcacgtgggattttaaagaacagtctctatctcctttccttctgatacaataactgatgattggatggtatcctccctcattgaggttttatgataaacataggcagaggttctaatgtatttgttgttgccttgacttgggaactccttgagcctagattaaacgtatatttgtttccttaagagtataagctaatttccttaaacagaacattgaatttttataattgtattattgtcattgtttgcactaattatttttatttctttgttcttctttatagatctttcagtgaagcggaaaatagaaaagaaacgg

SEQ ID NO: 63907 - DNA, 692 bp, Cucumis sativus
  Intron number 1 from transcript Cucsa.304220.2 (locus Cucs a.304220) derived from phytozome v7.0 (chr-ID scaffold0295 1; pos 1919365 to 1920056)
aagtttgtcccttcatagcttcaaattaagctttacttttttaaatatatgtcaatgagctacacaattgctgtctaaatttgtaaggttttgtaattctaagtatgtatggttacattctagagccgttgtgttgttctttatagtttggttggtggctattgtgtacctcgtcatttaaattttatatatatagtagtgtagtttgagatcaccaacatctttatcgatagggtcaatttttaagataaaatgttctaattttctttaatctcgacataaaattttctttcttagctaatagaatatttttgtatgtcaccttatttgttaaattcaagaaaaataaaactgataaaatacaacacatcaaaaactaatcaaaatgctaaccaatgtgtgtatgcagatttttttcttcccttctcattttgtttttattataaactatatattggtcaaattaattaggttaacattcttacctaaataattaaaaaacacaccactttgtttagttgaacaaactcatgaaccagaaataaaaaaagaaaccattttagcttatcaacctccacccacccaacctcacactttcattagacacaatatttaaccccaaaagaacaaaaaacctatcatcatacaaatacaaagaaaaacaaagcaaaagagaaaatttaaaaagggca

SEQ ID NO: 63908 - DNA, 555 bp, Cucumis sativus
  Intron number 1 from transcript Cucsa.249000.3 (locus Cucs a.249000) derived from phytozome v7.0 (chr-ID scaffold0220 8; pos 169789 to 170343)
gaaggcgcctgaagaagtataagcaggtataattagtgcatacttcgtgaagattaaatattttttcttactttgtttggttgcaatcaggtaattttttagatctgtacactgatttggtaaatttatttatctggttcgagtttgggaaatgactcgaatgttatgtttaagaaggaaatggttagcgatgtaccaagtgtttagtaggctttgaactgatcgggtgacaggttcataatgctgtgaacgtttttgtttttcctttcaagtttctcttctatttgtgcttcaagaactgtaaagaatatattttttgcaaattctgtttgctgttatcttctatgtttgattcacgctctttcgctgagcctcatttgaaaaattactctttccatgtcatttcactatctcatgaatgtaactttctgttcccatataagattttttatattcattgaggttagctttcttttcgtatgacaatctaatatgttcttttagccagagctggaaactaactaatgtgtttattttgcatatggaaggtattca

SEQ ID NO: 63909 - DNA, 730 bp, Cucumis sativus
  Intron number 2 from transcript Cucsa.174440.1 (locus Cucs a.174440) derived from phytozome v7.0 (chr-ID scaffold0122 1; pos 84803 to 85532)
cttactagaaacattctcatcaatcccgacgttaggtactctctatttttattctattattttacttctaatcattattaggattgttttttatttacaaaattgtcaaagagatcaaaattacattttatatatttttataaagcttaaatagttcgttttctatatatatattatatatgtttgagaaaattctaaaatatttaccatatttataaaggtatcacaataacaatatagagtttgcttgataatccatttgttttctgttttttggtttttaaaattgatttttaaaaattacgttttgtttggtaacttattcatatttttgttttctagacaagaaacttgtttttaagattatgaaagaatattgaaaatgaaaaaaaaatacattttgtttttttaaaagaaaaaaacatcgttttactaaacatatatgatttttgtttttaataaacaaaagtttagaaatagaatttaagaaacacaagaaacaaaaacaaaaacttgaaatgagaagttgtttttgtttttgaaattgaactaaaacttcaacattgtgtttgaatagaaaataaatttaatgttagaaaacaaaaaatggaatgggtgggaattcataaagtaaactatgggtattttgtataaagaacaataaatttgttgtaatataaaaaagaaatgtaattttgtgtattgcagagtgaagaaatcgcatcgtaga

SEQ ID NO: 63910 - DNA, 564 bp, Cucumis sativus
  Intron number 1 from transcript Cucsa.258440.5 (locus Cucs a.258440) derived from phytozome v7.0 (chr-ID scaffold0222 9; pos 5403548 to 5404111 reverse strand)
tcctggcaatttccggtcgcgtattatcttttctggtacgtttcttctttcaacccttgattgattcttttctgtgtgtcttgttccgttcagaacttgtgttggggattcttaatttttacctatttcatggacgatccgctctttttagttgtttagatcggtggcgatctttgttgttgcttattggtacggtgtgttagatccgtttcttgtttgatctcgaattattgaatggatgattgtacgacctagaaatgattgcgtgtatgtatgtgctgggtcggtaatttgtatctttgtaggtctagcttctattgattagattgaattgtgttttctcgttgtaaatttgagtgataatcgggatgtgttcattacttgtcgagatgtggcgggagggagttgtcttgttgatcgcacgatttattgctcagtttcatattgttgaacttgcatctgggttttttttttccaatcttctctcttatttctaatcgagctgttaagatatgttttccttccccagagttcggtgaggttggaatacacaaggattctcct

SEQ ID NO: 63911 - DNA, 864 bp, Cucumis sativus
  Intron number 1 from transcript Cucsa.296090.1 (locus Cucs a.296090) derived from phytozome v7.0 (chr-ID scaffold0285 6; pos 98050 to 98913)
attttgatagtcatagtaaatcttatcttcaggtagatatctgtgcctattttttggtgttggtttcagtgttcaccttttttttttttcttttgctttgttacgggtattaattaaagaaaacagagccaaatcacatgaattgtaatgggctaacccccattttgctttgcactgaaatctcaatggaagattagagcataataaacaactgtcttctggcttgatgcaattagagatgcattagttaccatttaacaaagtttctatgttctgaaatattcagttttacttaaaaaattgggggtaggggtggatgatacaacacaaggagagtaattgggcctgcactcgatggtctagtattacataagagctgtatattgtatatcataaagaaaaccatttgttttgttaaacatacgaaacataaattgacacccaaaagattacagaagatgaagggaagatgagttattctttcacgaacaaaaagttagctcaaaagagtttagagaaagacattccaattgctcatgatcaaaagaagtccttgatgagtctatctttatattgtagggaaaccctttaattaagttatctacttgtggactgtactttgcaactttcactacttctatccttatattttgaatttgtacaaagattttaaacaaaatcagagaattatactatttacagattttcatttatcaccaaagctaattgatattactattttctatggcacttctgattttaatcccgataaagttacttttggccttttcttggtcactttcaaacttttttgtgctggtttttacaggacgtattacaattgtacaaaagggaattacccac

SEQ ID NO: 63912 - DNA, 927 bp, Cucumis sativus
  Intron number 2 from transcript Cucsa.220340.3 (locus Cucs a.220340) derived from phytozome v7.0 (chr-ID scaffold0165 8; pos 1803597 to 1804523)
ggataaggtaaacttggttatggagtgtctctatacgagcaatgtacatctgtttccttttgtaaacttgttgtccacacctcttcatgtctttggcaaatattcgattggttgtcttatgatagacaaggttcttttctttcattgaatatatgttatatactatacaatgttcctctttcaaaatcggacatgagagtttcttttcatccggctcaagtagttgcatcaaataaaggagttcccactttcaaattcgataaaacccccctttacccaagttctcaattaagaccattcattgattcttttgctttttgatttcagttttcttttttctttattcaatatatcacaatggttgagaggaatgagggaacttttagagggtttgagagttagcgggagtatttgccggcctgtgttatgtttaacgcctttccttttgcttcgaggctgtgttgagtttaacctcattttaaaaaaaatatgcttttttttaaaattttttatgggagcccttctttgtcctcctttcttggctgcacattttaaagttctttttggattctttcagaatttcaaaaagaaagtttgttttttttaatttttatccttttcttttttgttcttcaaatgtaagaaacgatcattttataattattcatttacttctgttttctacttttatccttcttttcttttttgttgtttttcttcaaattgaggaaacgatcattttgtaatcattcatttacttcgaatgttggatactcttctagcaaatcccataatcattattttttcagtaagaagcaagttctatatttgaacttggtgcatatgggctttcctaccaactgaattattttataaaaattggagcatggtttatatatattcttttgtagattggtgaagttgttg

SEQ ID NO: 63913 - DNA, 607 bp, Cucumis sativus
  Intron number 1 from transcript Cucsa.196230.1 (locus Cucs a.196230) derived from phytozome v7.0 (chr-ID scaffold0135 7; pos 22849 to 23455 reverse strand)
cgtgcaattcgtgcaaggttggttgcaagcttaacttgtaacttctaagattttgtattatgttcttttttgagtttctaattttttgcttggagtattcttcatatcttttttactatgttattggatgtattacatatcaatgtggaggaaagaacgattgtagaggagagtatttgagaattttggatgagaattttaccaatttataaggatatgggccaagtattgttctttttggccaagagattagtaaatttccaaattcacatttaaaggaatactttcaaaaccaatgggggtgaagaaaatgaacgcaagtaactggaaactgcctgtcctgggaaattaacataacgggagtggcaaccttccatgtaaacaaaattacccaggcttttaataagagtcttatggtttagaagatttgttatcctcggcagtatgtttggttgactaaatataagaattatctttagagtttttactacaattattgttgcctttgttctatttttcagttcttaatgatatggagctgctttgcatacgttttgatatctttttcatctgtactgcttccgccttgattgtagatacaacccat

SEQ ID NO: 63914 - DNA, 649 bp, Cucumis sativus
  Intron number 1 from transcript Cucsa.197530.2 (locus Cucs a.197530) derived from phytozome v7.0 (chr-ID scaffold0135 7; pos 901347 to 901995)
cagtggggtttgtgaaggttaacacaaactgaaaggtacaaacttctttctttctccctttctttgggtgacatttctttctgggtttgtttctttttctctctttctttgattgtttggtgcatttggttctgtttgtggcatgccctccctgatcctttttcttttttggatcatctgaagtgtttatggtggcattctttaggtttttctttctagtattagagctttgtattgaggggtttacgtattgtttaaggatggttcactatgcatttcattctttccagaagggaaaaagatgtacctcgagtttcttattggttttccagctttgcacgttgaagctgaaaccgttgaattgtaatgtatttactttatatttcttatctgcattaattggggaagggatatggtttaaggtttaattctttggaaagtttgactaagaccgaaggcaatgagtatattaatgtattgattcgaagtcattgtttgctgctctattactaatcttcataagttgacaaatttctgcttctcttggctgctgcccacgtaaaaaacttcacaaaggttttgtgactggaatttctttgtgaatccaaaattttttattcttttttgcttttttgtgaaggttcaagat

SEQ ID NO: 63915 - DNA, 506 bp, Cucumis sativus
  Intron number 2 from transcript Cucsa.197530.2 (locus Cucs a.197530) derived from phytozome v7.0 (chr-ID scaffold0135 7; pos 902169 to 902674)
cgagaccaagacaaaggtttggcactctttctctatattttgatggtaccatttctgtctcatctttcagtttctacaaaataatcctctaaaacattaatattttgatgcactggaatcactgctcattagcacactgaaagaagaacaaattcgtctgtcctaaaagggaatatagatatgaaaattaagtaaggaagcagaactataagagaaggtttccaaactcctacttctaaaaagctccttgttctctccatgtgatttgctgaggcaagaacatatcaaagtggcttgtaataaagttacttaactgcttctctgtgttcatgcttagctgataatgaatacaccgtgatgctcttatttctttgctgtaatttctatagagagagtttagaagatgggatactacaagaacctgctcttttaattgctaagtctttggaatgaattattccgtgtgctttgttcctaaaatcagaagtgattttttcttcaggata

SEQ ID NO: 63916 - DNA, 898 bp, Cucumis sativus
  Intron number 1 from transcript Cucsa.136660.1 (locus Cucs a.136660) derived from phytozome v7.0 (chr-ID scaffold0104 4; pos 1238526 to 1239423)
gccccattaaaactcaggtttcctttctttccccttcctctgttgcttcctttgtttttacctatatgttgcaataatttgttctggatagtgcctttgtggggggaaaaaaaatgaatataagaatcagttcttatccatttctcgttcttttctttgtacagttagcagcgtaatcagatttgaagggtaaattaaaagtttagtgcctaagttttgtaggttgtaaaaagtttgtagcaggtaactcattcatggttatatcatcttgcttagcttctattcttttggtttttaaataggtttttttttaacttttcatattgtgtctggtcatgtggcgagctaatttgagtgttataccttttagaaacttttcaaattacaatgtaagtaaataactctgaatattcatcaccatatttataatttagccttttggctataaactaatgcaacgaactctgtgataggaatgttactaagataatattagtaattaatgaaggagtttattatgctattgggttataagtggaggaggaaaggaagggatttttcagatgattttaggattgagttagtttacagagatgtgaggttccaaatacattgaatgcttgggttatcttctaacttctatcttttgtttttcatttttatcttttagttctgtttggatcataccactctataactatgatagaattttaaagaactttatcatgtcaagttactcggagagtataacaagatgataaatgcggttagacaattggttgaagatgattagattgtcaattcaataggttgcttattgcaacaatccaattgcaatgaacatcatttgcatacagtcagtaatgcttgtaataacaatacttttcacaggtacatc

SEQ ID NO: 63917 - DNA, 213 bp, Cucumis sativus
  Intron number 2 from transcript Cucsa.143260.1 (locus Cucs a.143260) derived from phytozome v7.0 (chr-ID scaffold0107 9; pos 1582027 to 1582239 reverse strand)
gagtgagtctgagtgagttttttcttggttagagtttgagatgatttgcacgtgaatcactctccgaattttctgctgtattctgtttcttcttcttcttcttttgttttttttcttcattggatttgagtttaatctaggtctgtttgttttattgtttttgaatctcgtggtgcagttgaagttgtgattctgtacgcgttattgctgagg

SEQ ID NO: 63918 - DNA, 482 bp, Cucumis sativus
  Intron number 1 from transcript Cucsa.188650.1 (locus Cucs a.188650) derived from phytozome v7.0 (chr-ID scaffold0129 8; pos 48526 to 49007)
gaatcgactttcctcaggtacagatatatttttaaaatggttatttactgcatgcggggtgaattgaaaatgtggctcctttttgtttatttatttttgtgacaatttctctgttctgttagcatcatatgagaagagtcgttctccaggaaacttatttctgcactatgtttgattctttgacatagccactaagaagactgagattaagaaagatcattaaaaaatgatgaagtttagaaattattactattttgcacatggttttccatttattaaaagtaagtcagagattggggttactgttattctttttgcaaaatgtttttggccacaagtttactgatgataaattaaaataaatagatggaactagaatttgataattactttcatgatgtcctttaaatcgcttactatccattgaattgagtgatttatgaatattttcttacgtgcaaggtgcctgaaattggctgcca

SEQ ID NO: 63919 - DNA, 726 bp, Cucumis sativus
  Intron number 1 from transcript Cucsa.285500.1 (locus Cucs a.285500) derived from phytozome v7.0 (chr-ID scaffold0265 3; pos 1853781 to 1854506 reverse strand)
aatttgggtattggtttctggctcttcttttacctttattttgttttcgttgaaacgttaaatgcttataattcttatttcttttgattgcatataatggtatctttgagttatcatgggtcaccggttatactgtttgatgctgttatgcttaatgggtggaattgcaaaggataatattgcatggaatatattatttcttttttctggttgagatgctttggattatcaggatattgttacctctttacatgacaaataattctttttgttctatctaccatcgaatagacgaaagactacattataaacaattatgaaccaatggtataggtcaaattcgtgtttgcctgacgtgaaaaagcctacttgtatagctaattggattgcagaaagactgttggtagatttatggtcttatgaatattatgctgtgacataaagtttgtgaattatgatctggaaaggatttggtgcttccactttgttcaatcaccttaactaaaacagctataatgatattttattgtacttaggaataataagcatgcttttgttgttgaaaattagaaaagaccatcattgatttgaactaattgaacataagctctctttctcgttggaatctcattgaaatcaacctcacatttgaattttcttctcttttttgtcctcgatttagacttattcaagggacttgtttttgtaggaaaccaaaaactgttg

SEQ ID NO: 63920 - DNA, 886 bp, Cucumis sativus
  Intron number 2 from transcript Cucsa.166380.1 (locus Cucs a.166380) derived from phytozome v7.0 (chr-ID scaffold0115 3; pos 1592679 to 1593564 reverse strand)
tgtttgcttagtcacaagttcttggcgtcagtttggtaaccactcactatctcttcaatgctcagtacatcagattttctttgctcattttggcaaccggggagttatgttgaacaatatgttgtatttaggcatctgtttttctttcatttatattctcttaatcgttcggcagaggttgtaaagtgtttcttggaggaagtttttttttttaaaattatttgataagttgatcacatggttacagggtattatatgttgggagataatgttggtttggaaattttttatggttttaagggataatatctttatggtttctgcaatcacaagactgtattctctaattttaggtaattaaagcctggtttagaaaccaattcctttttttgtttttgaaaatcaagcctattttcttcagatttcttacaatgatttgcatatattttaagtacaagagttgaatgctcagccaaattccaaaaacaaaaacggatttttttagttttgaaacttttgcttggattatgaaaaccttggcaaaaagtagataaaaagtgaaaaaaattagaggtggaaggagtttttaagcttaattttgaaaaaattatagctaaaaacaaagaaccaaatggttaccaaacagggtgtaactcaacctttatgaggatatgtaagcatgtcattggactctccttcatgcatttatgaacctaatctaactatctaataattgcaacgtgtaattgtggtcctagaacccatagcatctagttcgccacatttaagatttgtttgatttcaaaatgttttctttcttgtctctgaatgttctgttaaattttttgcagttattgagaatagtctcagcaagcagctctgcttg

SEQ ID NO: 63921 - DNA, 414 bp, Cucumis sativus
  Intron number 1 from transcript Cucsa.166380.1 (locus Cucs a.166380) derived from phytozome v7.0 (chr-ID scaffold0115 3; pos 1593658 to 1594071 reverse strand)
ccattcccatctcttgctttacttctcatcaaaaggtatgtttctttttctcttcctccatttcctcatttaacccatcaaccaaattttctccgttgtaagataggcctttacaccttaatttgttgtttctcttcaatatcattgcattttcttccaaaagatgtcattttgttgtgtggggttctctttgattgcataattgatggggaacgggtgtgggggtgtttttgtgggtaggggagattttttctgtttgcgattagtttatgcataataggataaacattttgattttgcgtatttattttggtattgtgttgatgtattaggatttattcccactatttgttcctgattgagtttgcaatttttaatgatttaagggttcggtgttcttagacaccggtgaaa

SEQ ID NO: 63922 - DNA, 664 bp, Cucumis sativus
  Intron number 1 from transcript Cucsa.142730.1 (locus Cucs a.142730) derived from phytozome v7.0 (chr-ID scaffold0107 9; pos 935260 to 935923 reverse strand)
gaccgaattagatcttagccttaacgagcttcaaggtattcacatactacgttgcctatatgctctttctggattatttaaattgtaattgatacttgattgttaataccgaaatttcaagtttgattttcttaagaaattccacgttgtttttcataaatatttgtgttgccatagtaaaactagagataccttcaaggaacaaaatggtaataccatagaacttctgtagatcctatgttaattaagttaaaattcacgttgtccgtgtattgagcgacagttacttagacaatgaattaaagatgatttcctcttcttcttacatttcggaattatgagggaagaaatgataaattaagaaaacaactgttttctaatccttacaacttatcaatggccctgtttcttttgccttctaatgtgattctttagccatttagaattattctatcaaatgaaactcttagccgttccctgtttgctttttgaaccaaatcgtactgtttaataatagcagatgcctatgatttgcctgaacattttccatggaagcatctcaattcttggtttctttatctcccattatcgaccatttttcaacttctaacaaattaattccatgtcaggtcctgttgggagtattacatcaacaactctgaag

SEQ ID NO: 63923 - DNA, 975 bp, Cucumis sativus
  Intron number 2 from transcript Cucsa.271960.3 (locus Cucs a.271960) derived from phytozome v7.0 (chr-ID scaffold0250 0; pos 716806 to 717780 reverse strand)
attcacatatctacagttttcacgtgaataaagatgtaagaagtgaacttttttctagaaagaaaattactctttttttcttttgtttgaaatgttacttaaattacttggggtttggtaggcaatctagagacagaattttgaaaagagattcaaagaaaatagagatttatttcatgtgttaagatatatgtttggtagcagattcattaattaaattccaatttaatcaaattttcaaaatgtgtttgaaagtatatctatacactaaatactatgttgaaaataaactattactaattagtatatgaacttattatatgttgaaaattttatattattattaataagttgaaaattttatattattattattttgtagcgtcgtataatataatatataatatatttgatattttgtttgatgaaaattaattgagcttctaacatgaaatgctatatatgttattgcttttatcattttgaacctaatgttttattttaaaattttgaattcaagatctggatacactgaaaacatgacaaagttgtttttcagaatttgtttggtttggatcacaaagtccggaaatagttttcgaagaccaaccaaactcatttttgcttaactcagtcaatctgaaaacatagaacataatttgagtttcctgccaaacatacccttattttttcttataagaatcttgaatgtatcaacaaaagagaattatcaatgaaattgttatttatctattagaacaaaaaaaactttttgtagccatgattatatgcattttacttgggaaattcattgttcttaaagagagaaaaatgattaaaaagaaaaaaaacatcaattttagtgttaaaaaatataccagaaagggaaacgagtagcccttcccccttcttaatattcaagtctgctgttcatgcacattcctcacgcattctctttgtttttcaatgtattag

SEQ ID NO: 63924 - DNA, 682 bp, Cucumis sativus
  Intron number 2 from transcript Cucsa.280710.5 (locus Cucs a.280710) derived from phytozome v7.0 (chr-ID scaffold0263 3; pos 632861 to 633542)
aagaggagatactttctggtcatcttttgcttaaggtatgcccaaggatccaaatggtattgttaacgtaaagtatctgaacagctcatatactcatctattatcgtagccgaagtattgttcacaagaacatttaactataaattgatgaagagagaagaaaaaaagatgatggaaaaacgagttgggcgatgtagctagtaggttagatagtcgcctcgctgtgtaggaaacaatgagagagcatcgaaatctgaaggggataggaggtaggaggaggtaaacctcatatataaatataagttgattattaatatcactaaacgttctgtcaggcaggctgtaattgatggcgaaatctaatcataacaggaaattctaatcaattggccctataaacttgggaataccctagtcattagggtgctttgaagcaactccaaattcaaattactgtaatttcccgactgatgcctgatgctgtgctgtatcagatatacttcatccaatatctcatatagatttctcggatggcaaatttatgccaacatggatatttatttttctaaaatttgaagtttggtttggtttggtttcttggtactatcattaacatcttagacagcttttctattttatggtcttaggcaattgcaaaggcttgtaaagttcctggaacctt

SEQ ID NO: 63925 - DNA, 448 bp, Cucumis sativus
  Intron number 2 from transcript Cucsa.218710.1 (locus Cucs a.218710) derived from phytozome v7.0 (chr-ID scaffold0165 8; pos 702013 to 702460)
ggctcttgaattgctcaagacttcttcagttaatagtgagtgtttgaattttagatccgtttagatgatgcgtggttgaatttactgctcatttgcttaaaatgtcttctgccgataatctagaattgctcagattctctcttgcaatgaaatcatagtttgattactggtaatttcagatgtttgttaatctcgatagcaactctttgtttgttgtttcttttgatcatggaaacacttcatcgacattcctgagttttctgagccttttgtgctttaggaataatgactttcttttttcttttctttccaataatggtttgaattcacagtagaagcaattttggtcatgagaagctctgaaagatgtagagggagctaattgttgttacccatttttttcatttgaacaggatatacaaaagaaaggatcagtattgtggtgatt

SEQ ID NO: 63926 - DNA, 686 bp, Cucumis sativus
  Intron number 2 from transcript Cucsa.295090.1 (locus Cucs a.295090) derived from phytozome v7.0 (chr-ID scaffold0285 2; pos 74993 to 75678 reverse strand)
acgtctctggagaagaaccaccccccaatgtaaagttagctcttttttgtttttgtttttgtttttgttttgagtatccactatcctggtattgctttggtaatagacacatgaacaatcgatgcttgaaagtgcttactggggttttattattaaatgagatcgatgtcaatagaaatagtcaaagggcaagggttacctactcttaacagtcgcttctcattggtcagcgttctttgattggtgtgttgtctagaaggttatagctattttgaccttgtgagtgcgctcatgcttttctgctggtggaagttattgatcttccgttaaactatggcattcactttgatgttgatgtttgttatctgcaagaaatctgatagtttactagttaaaattttatttacctggtgtattttttttttctcttgtgtctctttcctttgtagcaatattcttgtattgattctgatgtcttggagttacaaagtcacattgcttatccattccttgtggctaacacccaagggaatgatttcctatgtcctgtttttgttttcatttaattcaattttacagtttattcatttgaaaaattatatgcaggtagtaatgtgattcacagtatacattttggttaatttcttgcagcaaggtcagtctaccttagttggattacctggtcc

SEQ ID NO: 63927 - DNA, 613 bp, Cucumis sativus
  Intron number 1 from transcript Cucsa.143400.3 (locus Cucs a.143400) derived from phytozome v7.0 (chr-ID scaffold0107 9; pos 1746723 to 1747335 reverse strand)
tggagagctgtaggtctagatttctctctttgcaggtttgcttactattctgattgcatcaacttatttattatgaaaccaacttattagttttgatcataacatttatcgattacttgtatttaacttgtgcagttttcctagtcaagagattagtcatgtttttcactaagtcaacatgactaggtacctaaattgacatctaaagttgcttgcttgtctatttgaatctttctcaatggctctatttctgacctaagttgctactgattcttgctataaagatttgtttttctgtttgacaaaggtgtcctgttatctgtttctcaaaggaaaaaagttaaattatacctgctggtctattccaattcaataaaagaaaaaaaaaagaaaaacattaaaaaaaaaaggaaaagaaaaaagaaggaagaagtagcacgtggaaatatattaattgtagtgggtactcaaaattttctttctttattctacattttgataatttaactaagctgctgactgatggaggttagtcaatctgaaattcgtttcaatttaacttgttctaaggtttatggactttgtttattttcttataatcttgacctaggta

SEQ ID NO: 63928 - DNA, 535 bp, Cucumis sativus
  Intron number 3 from transcript Cucsa.305160.2 (locus Cucs a.305160) derived from phytozome v7.0 (chr-ID scaffold0296 2; pos 27439 to 27973)
gaagagcaaatcaaattggaggaaggtcttgtcatgtaggttctttctttttattttctaacttatgttcttatcggattttgttggctttaggattactgaaatttatgcgaagagttatcttggaaagaaattttcagtgttatagaactctggacgtctttgttttatatcaggtcttttatgttataaattgaacttgaaataatctaaacaatgatacctacagacagcaagacggtggaatttatatcagaattggaatccaataattgttttatattatccccttacatgtggtttattttccctttgaagttcttttatgtttagtcagtcattctttctggactgcttgatacattaaagttcttctcttgtgtaatctattttaatttcttgttatatcgataaaactatagagacatcaaaggtcatactttctatcttccgttctctctgtcttaattgcaatgatcaactttctttttcagtattttctatattgtttgcttgccatttgataggtttgctg

SEQ ID NO: 63929 - DNA, 1031 bp, Cucumis sativus
  Intron number 1 from transcript Cucsa.202180.1 (locus Cucs a.202180) derived from phytozome v7.0 (chr-ID scaffold0137 6; pos 304357 to 305387 reverse strand)
aacccttttcttcttttccacggtaatcttctccctcttatgtcctttttcttcttcattttccatctaaactttctatttagaatcttttgatcgcctttgctctgccaagtttatttacttgctcacttcatcttctgggtagactttcgatttttaggtttaaatttgcaactgggtgttgctcctcatctgggaatacgtctgaattttgccatctttctttcttttttttttttgaattctctcttcttgttatctggggttgtttacaatcgaagcaaattatgtagaattccctccgtgttgtactgatcgtttcgaaatggtactggataccaattttcagaactatctgtttcttgattgatatccttttgctgggattaatcatacccatttttttcttccaattcttataaatatgcggttaaagctataaagcaaatcagcttcctcagccttagcccttttcgaggttcatgaagtgaaagaccgtattttggaccattgaggtttgattttttagctcatttctttcaaatattccaaacaatgccaggaatgaactgaaattgtttttttttctccacaacacactcgtccaataagttagctgcttatacgtgtgatcatatcgtattcatctgttcataaggttctctttagctagaatttgctttcggaactattacactacggacatgaggaaaatgttgtgcaaaaggatggtcttaaatttttgaaaggggtaaaaagaatcagttcagaaccatttagagttttcccatctttttgttcaagtgcttgctatggagctctggatgtggacatttcattacatgagctagaaagcctagttttggctatctgtctgaaccaagctttggtattgatttctaaattaatacatgattattgcttttactttctgtttttagctgattattgcttttgctggggtattgaatttaatgtctaactactagttgtctttcatctgtagactaacagtcgtggatatttgagta

SEQ ID NO: 63930 - DNA, 724 bp, Cucumis sativus
  Intron number 1 from transcript Cucsa.196910.2 (locus Cucs a.196910) derived from phytozome v7.0 (chr-ID scaffold0135 7; pos 479172 to 479895 reverse strand)
atcctctcgctccagacacttcaccaaacttcaaggttttttttcacttttcgtctttcttctctctctctgtttttccttgcttcacgattttctgtttgctgttgttgttgtcttttgatgtgctgaacaatttgaggaaaacagatagatgtattttttttttttccttttgagaatcagtttcatgtactggagttctggactggttagctgctgcattgctacctatatcgacagatcgccagtagtttattcttgattttttaggttttatcttggtaacaacagggattattttcggtttgagtttaattattttgaattttttggaagtgttttagaattttgattatctgagtttttttctttctgtttttgtctcctaaaatttgactgactgattcatcagaatactctgttgaaattcgtgaataagaaattgtagttgagtttgattcgttatttaagattggaatatgttcggagtgtgacgcaatcgtttattattttagttgttttattgtttcgtgaaaagattcaggagtggttgaataaatttgaacctggagaatgggctcttagggccgtcgatctctaggttgattccaacacctttaaatatgcagatggactgttgttttattcaatttaaacagcgtttgaatcttaaacttttttattctcaggtggatcctccattaaggagtgtagaactatagtt

SEQ ID NO: 63931 - DNA, 884 bp, Cucumis sativus
  Intron number 2 from transcript Cucsa.143490.1 (locus Cucs a.143490) derived from phytozome v7.0 (chr-ID scaffold0107 9; pos 1864732 to 1865615 reverse strand)
gaagtgtgggtagaaaagcaacttgataggtatgcatcattattcatatctgcccaaaagagatttcttgcaagacgaggggttcacttatttcatctttatgtgaattggtttaaattcttcacgaaagaaaggtggttttagaattccaggacatagttgtgcaacctatggtcctatgtaacaaatcttgtttgagcaaggtcatagaaacaaagatgttctgttaacaactttactttaattttctggtccatagtcattttcttcccacctgcatcgttgaaacagctttggccatggttgaagcagcttcctggctctgtttttcaaattgtagtcattaacaggcacagtgctcgagtctcacagccacttgttcatcacttgcccccttttgtggccaatttttggtaggaagtcactaaagtttttcaattttccctggttgaccccaatgactcttgaatggatcatatcatttatactgatcatcctttcaaggacgacaaagaacggttagtatcatctggctattttgtggaagatttgggaggagagaaattctaggatttttcaaggcatccttaaatcttctaaggaggttttagagttagtgctttcttttgtcccctcttgccgccacccccatacacacagcatgcgcgctcaaaattaagaagaagaaagaacagtgcatataagaagctcctctagttcttgtgaagtgattttctttggtttagggtgatggatgagaactaaaattgttattgacaagcagtttggcttatttttacccatgacgtttttttcaagttgttgctgattcttcttctattgctgcagggaatcacttgtggaattatataagccacttcaag

SEQ ID NO: 63932 - DNA, 784 bp, Cucumis sativus
  Intron number 1 from transcript Cucsa.143490.1 (locus Cucs a.143490) derived from phytozome v7.0 (chr-ID scaffold0107 9; pos 1865657 to 1866440 reverse strand)
cttgaggtatatatcatctttagctcttgtgtatcttcacaaagttcacgtactgtcaaggttgtgaacatgaaagaatacatagattatttttccatgtttgtgtgtattttgggaaataaatgttaactgatatatttgccttttggtaccaaaattagcactagtcaatcttgcacttacgcatacaaaggaggagatcgtgcatgaaactgaaaccatgcttgattataaactgacggagaggagttaaagattaacctgtggaaaatttgaaatggctgacttctaattgaaagattttacatagacgagggatctgtttggattgactacggtgagaaatgttttaaaaaaaacgattgtatttagaactcattttatagagacagtttaaaataaacttttaaattgtttcaaaattaagcacttgaaaaattaaaccaaatatatctaaaatatagtggtaaattgtatgtacaactgtcagcaaatatgtggtaaattgaaaattagattgcatgtgcatgtatatggacatgggatcaagatgttctttttgataatgaaatagtgcagcatggttgtgttttctcaagcgttgctcattgtttcatcgcctaatcaaacatgagccattatcatgtaacaaattgtcactgaagactttgttgagcatgtatttttcatcttcatgtggggcaacttttgactcagagtgaatttttatgtttcattaaccaattaaaattttgattcgcacaggtactagacaatcttcctc

SEQ ID NO: 63933 - DNA, 470 bp, Cucumis sativus
  Intron number 2 from transcript Cucsa.273800.2 (locus Cucs a.273800) derived from phytozome v7.0 (chr-ID scaffold0251 1; pos 829534 to 830003)
gtgcagatactgttttcgatctcatcgcacttcctgtactcatttttctccttcgtttttgtatttctatgctttggctatgtattgcatttgtgatttccaggctagtttgttttcaagaactttatgatcggaagtccgattccttacattttgaatctcccagtaatgatattattaggcgtttgatcttattggaagttatctcagtatactgggactattcttaccactgcatttctatccatcacgttaggtcataaatatttcttatcagttttctacattgctgtattggttggattatggatgatttatctgctttgaaattttaagcctaatgatgctaccattatgaattactctggttcttcagattctcttttaccactttttcacagagtttggttcattcactgtctgttttactgaagcatgaaatttctgctattttcgtgctctagggaggt

SEQ ID NO: 63934 - DNA, 516 bp, Cucumis sativus
  Intron number 2 from transcript Cucsa.250230.2 (locus Cucs a.250230) derived from phytozome v7.0 (chr-ID scaffold0221 9; pos 348704 to 349219 reverse strand)
gccttctcaattacaaaggtttcttagcctgccaggtgagaaattgcacgtttcaatttccttttgaatttggtgaaaatgacgtttttctgtaagttgaactatttgggattatctactttgccttaaaacagaggttcttagggttcattttgatgattttgaaagttgaggtgttcttagatttgatcagtctgttcattgttctatttattcttcaaagattgtgattttgtgagttgactggagactacttttccacatttaaagcagaaggcagaattaaaataacgatatatcaaataaagaataatggcttccttttcacatgatgattctttgttggatatatattcatgtcttgggaaaagttactaaatgtcaaaaacaccttttatgtttaaatgatttatgaagttcaaagtcagctttgtgtttcgtttgtcactatccttaatacagcaagtcatttctcttttaggctcatcgtgtggctcacaagctgtggaatcaatc

SEQ ID NO: 63935 - DNA, 756 bp, Cucumis sativus
  Intron number 1 from transcript Cucsa.153220.3 (locus Cucs a.153220) derived from phytozome v7.0 (chr-ID scaffold0112 4; pos 420932 to 421687 reverse strand)
cagtgcaagcccttgaacgagcaggaggtacccccctttttttttgttccttcttcttcttcttctttttttttttgtaatcttttgttttcgttttacatcgtagtatctagagattgtttgcttatactaagggggttttcgaatggtttaaaagcaatgtgatggatccagcctgatctgttggggtttcagaacttggattgaggtagtcgcgtgtttctgagtttttgggcttgtgggtgcgatgcgtgggtttggctatcttggaagcatttccagggtagatctagcggttggatttttagaaatatggttattcgggaaagatttgctctaacgtgaaatagatcctttactgtggtgccactgcagtcggcgttttagatttaacttccaacattatttaagaatgttttaccggttggtgctgtttggctgataatataagttaagaacgcgcgtctttttcctgacaattaagaattctgacactccccattgatcacaaccgtgtgtgtttttgtggcatttgatcttggtatcaagtgacatcgataccacgacctctaactatgtaaattgactattgatgttgcacgtatgcatctccgcaggttttattgcaagtatagtttgtagcagtcaatttaatctttcctgtttagaaatgggagtgagcatttaggtaaaattgaccagagtttcatttttaatgtagtgaattttcttgatatcatctgagagccgtttgaa

SEQ ID NO: 63936 - DNA, 520 bp, Cucumis sativus
  Intron number 3 from transcript Cucsa.271110.2 (locus Cucs a.271110) derived from phytozome v7.0 (chr-ID scaffold0250 0; pos 51670 to 52189 reverse strand)
ggctgaaaaacatatacaaaaacttcttctgcttggtaagtgtattttggccttttactacctttttttttcacttataatggaggaggaatcaacttgtctgtacttgaatgttgaaaacagtatttcaaactttagagggcaagtacgtcacttttatgtcctaggaccttctttctccgagttaaatttgttaatttagtgtttggtttatgagtttataatttgcagtagttagtatgttgtataatatatgactttcataattgtagttatcattccaaacccacattccaagttttcttgtatgcttgatttcccttcattagttaacactcaatcatttcctttccacggctgatgtgggaagtattagagattctgtatgtgtgctacactgctacttagtgatgatgacctttggtttttgtcttctattttttctttgactatgcgaataagctgagattttgccaattgtttaggtgctggagagtctgggaaatctacaatttttaag

SEQ ID NO: 63937 - DNA, 449 bp, Cucumis sativus
  Intron number 3 from transcript Cucsa.242530.1 (locus Cucs a.242530) derived from phytozome v7.0 (chr-ID scaffold0204 7; pos 2266009 to 2266457 reverse strand)
ctccagagtaagcccttttgtgtgtcttacctacttctatattttcttggtcttgaaaatgaattcaagcccaaagtggctacaaaactcgcgtttaaattccatttttgttcccaaaagtttaagtacgtctcattttgactttcaaactataaaaaagtaatcatacttcggtccttagcaaatttagctagctaaaatattaaggtcagcacgttaatacacttactccaaaaactaaaacgattattttgtaaaagtttggtgactaccattgaaattttgaaataggagaccaaaatggaatgggttttgacttaaacggatgtcttgaggatttaagactagagtggagtgatcctaattcaaagacaaacaagatatcaacttataacttcttagcatatatcttggtatgctgcctatgttcacggttcctctttttaggt

SEQ ID NO: 63938 - DNA, 661 bp, Cucumis sativus
  Intron number 1 from transcript Cucsa.275820.9 (locus Cucs a.275820) derived from phytozome v7.0 (chr-ID scaffold0258 1; pos 743026 to 743686)
ctctcgagaagaaaggcgtcctcgctaagatccgtgtaatttatttttatttttttatttttttaaaatttgaatttcatgttgttttttccttcaaattttgtttcttatgccttttacagatctctcattctcattctctctactgtatttcttcgattttttggggttcttgtgctgctggttggtgacactaaatgtggttggttaaagctagggtttggtttctacttttagatttacaaggacgtaggatggaggacactgaatctttgtctatctcttattattattattatttgagttttaagatatcggtaattaaaatacacttacttggaaacactgagtcatcctccccttggatcttggtttggttgagaagcatttactgcttgttttgtatcttccatcgtcttattcttaagatatctttggcatcgatctgatgttaggggtctttagtgtttgatacttttgaaggaatatttgataatgttcacccacctctaaattttgtgttctttcttcaattctcactgacatttcctcctcaattggcctttccataggacattgttctcccctttcttttcttatttcttgttcgtttggttatataccaggctgaacttagagctagtgtattcgaggcaattga

SEQ ID NO: 63939 - DNA, 1037 bp, Cucumis sativus
  Intron number 1 from transcript Cucsa.277190.1 (locus Cucs a.277190) derived from phytozome v7.0 (chr-ID scaffold0260 1; pos 143610 to 144646 reverse strand)
tccgcccaatctacattaaccattcaaatcacaaggtaatcttcatttcacattctatgtactttctagaaactagggtttctcgttttattttcttttttctttttttggtcgcttaaaatattgcttaaattaattgattcaacgttcattgttgttgtaattgaagtgatgattgagtcttggttactagacttgctaaatccatttttcattgcacattatcattgtgtctggataatgaaagtcggttattttctcttggacaatattcgtaagttacattggctaagaaaggaatgaataaacaaaatcaaatgacgatgatttgaaatgccatcacagaccgtgccttgaccgtgtgggatgtctcggatgaagttagacaaatttaaggcgtgtatagaagtgtttattaaatagttaaagtttctcttaaacatgatttttattcttcgaaattaattttcataatagaaatattgcatttaaaagtttaaaattaaatattaaattaattttaaggatgaaccatggtttcaaatgaataactcttcaaagaccaccggtagtgtgaacttagcaccttgatcaggtcagtgtaatactctgatgggaaatggcactggacctggaagaaaatgtaagccatttgaatttttgtttgtgttctaaccggtgcacgtttgcttgattgttactggagacactcgtgttgttaacttctagtttgtttcttttgttccatgcttagttaaatgcttggtcgttttcattttttgtttttttttgttttaatgagtcagattgttttgtttctttcttatgcatttatctttttcttttcctatttgaaatgtatccgagtcaagtttttaaattttttatcccacctgctacatagttctctagttttatttgttttttcaattcttttgaatgagtactgtgattttgtaaaaatattcaaaggaatacttcttcatcccaaattaaatgcagggtttagctaagtttgttgagtagagtcaagggtg

SEQ ID NO: 63940 - DNA, 567 bp, Cucumis sativus
  Intron number 1 from transcript Cucsa.198780.1 (locus Cucs a.198780) derived from phytozome v7.0 (chr-ID scaffold0135 7; pos 1713008 to 1713574 reverse strand)
gataccactaatcagcaagaagtttattccaccacgtaagttaaacaaaaaagaattgacaaacattggctttctaactggcttttgctttgaaatttgatgttaatttgcgtgttcttccgccttgagcataaagatgaagtttactttcaaattccacattcttatttcagatattgtccctgttcttgcttttcaataaatctttgaccttcgagaaatgtttcaactgtgctcgaagtctcaattatgtctgcatcatgttttctcatttagaagtagcaagcgtacatacataaccatttcaatttcgtctatgatcatggtttgtgaggcattaaagaaaggaagtaaattctaatacaaaagctctgagacttcaaattagtttgtttcccagttccatcaaaaaaaaaaaaaattctttggtcaacagacatatatttctacattatctcattcaattcttagttcttttgcattttaaaccttattatcttcccttcaaatgtctaccaatttgaatgtgcaggacagcagagcttgtagaagcagttctgcagggaa

SEQ ID NO: 63941 - DNA, 803 bp, Cucumis sativus
  Intron number 5 from transcript Cucsa.256350.3 (locus Cucs a.256350) derived from phytozome v7.0 (chr-ID scaffold0222 9; pos 3981384 to 3982186)
tggattttgattggaagaaacttctacaaaagaaggtatgttacttaaatataatgttttgcatgtgatctctatcagtctaaaaaataatccatacgtgagtttgttttttcaatgaagtacataattcattaattcattttgattgagatttcttgggtatatttgcgtaaagagctggtgggtatctaggtctaagtggttttgaagggtaagtgttttgaattgaagtttaagttctttccatgatttaatcgataatacaccatcaacacaagtctgatacgttgaaaggtagttaatcctctccagttcaagaaaagttatctttctctagcttctaccccttttgttatttctctttttggaattcctttttgaaatctagttgttgattaattgaaaaaagttgttaatcctgttgtgcaaaactgagagtcgtgcatttgattatatttttttcctcctcttttataagaaacaaatttaatcaatgtatgaaattacaaaagaaaggcctgtgctctgaaccaaatttatggagcttttagttgttttagattcgattcctggttatgtccaaattatcattttttatggcactacctttctcatcttattggctaagattaagagtatctgttcttttcatttcttctagcacacattgttgctctcccaagtaatacttctgggaatttgtaggtcattgtaattgtgcccttttattttattaattcatatatcggtttttcttgtctaatatggagtcatacttctgttaaattttgaactgtagacag

SEQ ID NO: 63942 - DNA, 539 bp, Cucumis sativus
  Intron number 1 from transcript Cucsa.161430.1 (locus Cucs a.161430) derived from phytozome v7.0 (chr-ID scaffold0114 4; pos 1332694 to 1333232 reverse strand)
catcttcagcctgttcatctgcatttcgcttttttgtaagtgaagtaggcgaatcgttcttttttctactgaatttttaagttcgatgtgtttctggttttgaaatctgtttaatcggattttctttttatcgaagttctgtatctacttcttttcgttctggttgaattaattctgatttggattttgatttctggagtatttctttaggttagtctttaggttagctctaggtcgtgtccgatagagctttattaataatttggttccttctgattttgaatttgtaagagtagcttcagtcgagtttggtttgtactatatataagcggaaatgcgtttttgaaacctaagccacggtttcttgtggtttcttcttcatctttggaatttgaaactctagatctctaattgcaatggtttgagacaatgattccgttataaagattttatactatcttctgttactacaactgaggatttgtgtctgacgaattctctcctgtatgtcgtgtttctgcagtccatcggattttcgg

SEQ ID NO: 63943 - DNA, 658 bp, Cucumis sativus
  Intron number 3 from transcript Cucsa.172150.4 (locus Cucs a.172150) derived from phytozome v7.0 (chr-ID scaffold0119 6; pos 67947 to 68604 reverse strand)
aggctatttacagcttaacccctggatatcaccaggtcagattgtggtggttgaataggaccttttaaattgttcatgctatttttcacgggcaccacagatatgtgatgaaactatggtgctctttagctgtatgcagcataattttgctataatcttagatgttagtttagcaagcattgaatagtagttgtgctgcttgggtgaagctgatgtttgtcaaggaaaacatgggtttctggaagaattatattaaacagaatcacaactatattggattctccgacaattttatgttaatgatgaccttgggtcaaggttagaatgtgtaggaatggcttttcaaaaaattagtttttccggttattgcttgcgcgatcatagaatttttgctatactaagtaatattgtcaatcgttttatctttattcaaatcatctgtgcagttattatgagtagcaatgacatttttcttgttatttccaactgacttcactatgttcttcaatattgagcaattgtcatgcttagctattaaattagaattatacaactaaattttattgaagatacttaaattggttgattttcatttgtttttgaaatttactaatgtgcgcacaaaggttgtcttgtatgcagtataaattttttgttg

SEQ ID NO: 63944 - DNA, 631 bp, Cucumis sativus
  Intron number 1 from transcript Cucsa.247080.1 (locus Cucs a.247080) derived from phytozome v7.0 (chr-ID scaffold0218 8; pos 120712 to 121342 reverse strand)
tttgtgataacttgtttagacgtttccaaggttcgtttctttttctttttcatctttctttttcctttcctgttgttttcaacgccctcgtgttttgtttcccccccctttttttggtttgatttcttgcgttttattaatcattgtctctactgttactcatctttagatctgttttatttttctttgttatttgaactgcgggtttttgctttttgctatttttctccgtcggaaactgattactgtttgtgattgattactgtctttgagtttagtgtagattatatagcttatgaagttgaaggagattggggtagctaaatggaatttaattgtgtattgggttttgtttgaagacagtggatacacgtttcctctgattggctgatgattctatacatagtttaaataattttacgcgtatgttttcaaatgacactcgtcgttgtgttccttgattactcacgacttatcaaaagctaaaatatttttgaatgccagaaattttctttttgatcgtttccttcttaaatagagtggaggggatggttaggttgacattctcgttaacttctttgatgctttaatttcagaagaacatcagggagttgtgactcgtgaaaccatt

SEQ ID NO: 63945 - DNA, 363 bp, Cucumis sativus
  Intron number 2 from transcript Cucsa.218750.1 (locus Cucs a.218750) derived from phytozome v7.0 (chr-ID scaffold0165 8; pos 733964 to 734326)
ccgccaagacgacaaccgggtttcttggaggggtatgccaaaaagcttcttctttttgttgataattaaactctctctttaattgttctggttttgcttgcatatatcaaaactgaaggtttgaattgagagtgttaggatgatctaaagaaaatttatatctgtactaccgtgataaaagatagaacttgaacatgctgcctttgatttagtttcttgacatctttctttctcgggtgctaaacatatcgaagtgacgagatcgtctatgaagtttgaactacatcttaggtttggattctatgttttctttagtgtggcttaacagagggtttcactttgtgtttgcagccttgcagctct

SEQ ID NO: 63946 - DNA, 925 bp, Cucumis sativus
  Intron number 1 from transcript Cucsa.242930.4 (locus Cucs a.242930) derived from phytozome v7.0 (chr-ID scaffold0204 7; pos 2542942 to 2543866)
ttgcctcaaaattaatctcaaagttatcctttcaggtattctttcctttaaccccatttcttgaatcttatgccatgttttcggtttccttcttcctcttctttctttctttctttctttctttctttctttctttcacgtgcttttcggtttttcttcctattttttaaatctccttcctttgtttctcccttctttgatttgatcgtattctttgcttctgttcatctttcgccctttgatttcgtttttttttcgaataaaataaaataatcgggttttgtgattcgatttgtttatcgagtttgttcttagttctttcataaactttgtgttcagagtttgctgattcttggttttgccatttttctttagtctgtggtaatggggtctcttactatctcttttattgttgtttctctttttcctcctttcattccttgttaattttcttttgggtttgtgcatttatacccgcttgctggaactttggtttgtatttcgtaaattgtaacattatgcaaatacgtaatgccaaaaatgttttttttttttttttgaataattggagctgaactttaattcttagtcattggatatttgaggttttatgagctgtggtaggttgaaaattgaagtcatattctatagggttgtttattataattttgattttcatggataataaaattgtttagtatgttgatcaaatcattattaaatgtaatgcttgaaccaattacagtgttattttcaagattgaaaattgaaggggagacaatgactgatatggaacacattgtgtattagttttttttagtgaaacaagtaatttgcctgttaaagacttctaagaaaaggcttatacctgctaagaatgtattctacagatactaataactgtaaggcgaattgggttgtgcta

SEQ ID NO: 63947 - DNA, 885 bp, Cucumis sativus
  Intron number 2 from transcript Cucsa.242930.4 (locus Cucs a.242930) derived from phytozome v7.0 (chr-ID scaffold0204 7; pos 2543939 to 2544823)
aagtaggttgtcatttttttttctttttcctgaacaacactactgttaaacggctttctgtttttggaaattttctcaatttaggcctcgattgttaaccatttggatggttgtactttgttttttgttttcggattttggaaatcacgcttataagttataaactctacttctatctataagttctcatactagtagggtaagagaaccaagtagcctaggtagagccttcctcttcctatttttcggtctatcattagcttcttccgacttctgtatacttgtaaatgcttctctacttattagattacctcgttgagttgagaccaagtaagaacttgaatatctgctcctctgctattttagaacttaagtaaataccttactttgatagctaacaatttcctcatgtatctcattcattagatttattttcccattcgaggagagaaattgaaatccatacagcttagaatatttaaaggatttctatataactcctcttgttattatatataatgtaaatatgcaattagtatacatcctataacaagatgataatgaaatgtattgaacactactcgaaatggtttgcttttagtacataaccatacattttttttaaccaacggaaccgttcttcaaaaagaaaaatgtagctgaatgaatatgaatgttggatgatataagatggttgaattagttatttgttgtggaagatcacttttgcatggtctgcatggatggtcatctgttttgttcttttctttgtcaccctttctgtttaattttaattggtccagttcaattaaattgtttgtaattgtaccaatgtaatgctttcaattgttgatttgttctgttaattcctcaggctgctccacc

SEQ ID NO: 63948 - DNA, 958 bp, Cucumis sativus
  Intron number 1 from transcript Cucsa.302060.1 (locus Cucs a.302060) derived from phytozome v7.0 (chr-ID scaffold0295 1; pos 286219 to 287176)
tctggagcttccccttctgaatctcgtgtgcccaggtaaattactatatcttctttttcatcttcagtttctatctggtttggttgtttcattggtttcttctggattgaaatggttcttgagagcggcatagtttcctgctcatttgagggggttgagattgctagcattgtttacgagttgttactggaacttaatttgaatgaatgaatttcgtggattagtgcaagaaaatctatagttgaatcatcatgtacctagaatttagcacaaactcctgagatgataatttatttgaaccttctcggcgggtagaacagtggcggtagttggtgtggttttggatttggatttgtgattatagagagtgtagctgtctggactttttacagtatctggatacttgggagacaacttacaatagtcatgcattttagaggatagctcggagcagattttatcttgtttatctagatttgtgaaagatggtccacatttttgtttcaattttctggaagaatattttcgtgcaaactgactgcagtgagattgtgagaatggttcaaatgtgtgaaagctggtccagacttttacggatatgaaggaaagaaaattctggaagaacaatttgacatttaactagtttggtgccttcatgttttccccattacgtccttttgcaactggcgtttaacttgggataaaaattagagtgataagctcaggccttcatcttatgataaagacatttgctacatcaataaaaggttatcaataaaaggataaaaatagtacttttagttaggagataaccctctatatgatctctttttttggacaaaattcttttcgagagaacctctgtatgttcttttgctgattaagatggtcatgctaaaaaggaaaaaaatttacttttacaggatcctcaccagaggctgcaagctagttgggtgtg

SEQ ID NO: 63949 - DNA, 590 bp, Cucumis sativus
  Intron number 3 from transcript Cucsa.272570.3 (locus Cucs a.272570) derived from phytozome v7.0 (chr-ID scaffold0250 0; pos 1050950 to 1051539)
ccttctgggctttccggaggttgggatatttgcaggttctcaacttttcgctgctgtctttctgttatcattctattttttcggtcatctcggtagtgtcgatcatcattcatcaccgccattttgagattccattaatgattttcaaatttttgaccagaaaatttgtaacgaatgtaaaatgatgatcaattactgatccaccttatgccttcaatggtgaattattgacccactttagatgttaagttaggattgaccttaccttgtaatattcgattttttgtttcttttttttgatagaagaaatctttgatttattttcaacaatgcatacccattgtgtgtgcaattttatgatcaatgaatcatgtgatgtttgtaatacacaccatataagcatgtttccctcacccttctcccctccccacctgctctaattgctgatgatgttgatggtgtctgtatcatgaagatcatttgaaaaatttacatttggaagactgaaagtaaaataaaccttcactttgcaatcagttttctcctagctctattgttctactggccaactggcaggtttatcaaaataa

SEQ ID NO: 63950 - DNA, 593 bp, Cucumis sativus
  Intron number 3 from transcript Cucsa.256060.4 (locus Cucs a.256060) derived from phytozome v7.0 (chr-ID scaffold0222 9; pos 3779815 to 3780407 reverse strand)
atttggtatgtgaagcgtctttgaaacctttctatgtagtgtgttttaacagattgcgtgggtgactttgaacagagccacactgtactttattataatgattaggatattaattttctgcttagaatgtttcaagttaaactaaggaaagaaaaaaaaaattagtttgaccatttttataaaatgcaagcagggtgtatgatgtttaatgcttgtaatgaatgttctatgtttgcagttttccttccctacatcttgcttagaaaagatcattgcaaaagcaccttcatatttatcattgtcattgactaacatgtagagagagggggaagaagtctcccaggtttctcgtgtagtctcaaatctcaatgactaacacagaaactagtacctcatccttgacctccagcagcttcaacgatatttttagcttttttatcatctgtaactaaggatgttttgtgtgtgttttcttttgttatttgactagaaaaaagacaggtcttcttcttgttgtttgaatgtttacctcttccatttatttgtattgtgcttcaggtagatacccacatacaacagcttgaccagtattt

SEQ ID NO: 63951 - DNA, 435 bp, Cucumis sativus
  Intron number 1 from transcript Cucsa.256060.4 (locus Cucs a.256060) derived from phytozome v7.0 (chr-ID scaffold0222 9; pos 3780871 to 3781305 reverse strand)
tctttcctcgaagaatttcaagccagtacgtatcatcttctcccccttcttttcctttgcggcaatttctcttgattcataactgtttcaaaaccctatctccttagttaattactctactactttctttgtttttatccgattaatttgtactatatgtttctgttatttcgttatgtgccctgttctcgatttatagtaatttctttctgctctggttctaggattgtaatccttttgtgggtgaaaatttattccctttttttgcgttttgaatgtttgggttagataaagtttagtataatattagaaagaaaggtaaatgaagttttgataatttgggtttgataaagttaacaacaatgagattttacattttcttattttaccttttatacagacctggaatcactacccaacattcttcaaaagaag

SEQ ID NO: 63952 - DNA, 718 bp, Cucumis sativus
  Intron number 1 from transcript Cucsa.305400.1 (locus Cucs a.305400) derived from phytozome v7.0 (chr-ID scaffold0296 4; pos 40752 to 41469)
aaggtaaattttgttaatgttgatttgattgagtgttggaattattctgattcagttcaaaattgtagtgcggtatggttgctacctatgtatggtgcgagataagttgttgttctgaacttgaaattgaacgctttattatagaaatttgatttgtgtagttgatgtattatatctagagatgtagggaggaaaatgtttaaaaattttggatttatgttgccggttcgaggacatccgattaaattggaatgatacaaagaagattatcatgatccttatgcaaggatgacaaacacaaatcaagaaatggtcaaaaaatggtccaaatgtttaaagaaagtttggatttatgttgttatttgaatatgcatagtttgagaattgggtttcaatagccttactttgtatacctgattggactagtaaatctattggcgttaggaagctcacgtaattaacagacaaatacagccatggtgtctgaactgaacctcaaccaactgataggttgtgattttatttttgtttttatgcaattcaaaagatggattatttagttctgagttgttaattccttggtttggtctatgttctctttatgatcttatgatggtcttctattctttttcatgtgcacaatgataaggaaagagttccgtaagtaacttgagttgatattaatggtgaaagtgatcttcaggattgaacgacagag

SEQ ID NO: 63953 - DNA, 366 bp, Cucumis sativus
  Intron number 1 from transcript Cucsa.201880.1 (locus Cucs a.201880) derived from phytozome v7.0 (chr-ID scaffold0137 6; pos 111959 to 112324 reverse strand)
tgtttgtttgaagctcgaactgttcaagctttgaggtacctttgttgttgttgaatcactatatatcgttgctgtaaattgtgttctgtattgggcatatttgagttgggttttttgacagctacttttgattctttagcagaaaaagatattgcatagtgatggtctaattaatgtacacttctattgtaatggaaattgcctttattcttgaaattacttgctttttttttcttccgtaccgagtttcacaatactgattctttaccttgtgtttataacttcacttctgttactccgggtctcaaatcaaggtctatgagccaagtttttgttttgtgttattttacagattgaacggtggca

SEQ ID NO: 63954 - DNA, 778 bp, Cucumis sativus
  Intron number 1 from transcript Cucsa.248310.1 (locus Cucs a.248310) derived from phytozome v7.0 (chr-ID scaffold0220 7; pos 67290 to 68067)
ctcttgagctagacctctacaagttgaagtgtaaggtgaattaacccccctattagtttccgacataagtttgtatgctctagattttgataggtatcatatgtattatatcagcaaattgttaggaaaataaatggtttgttcatgcactaactcttttatattcatgatatctttctattaggaaaaccatctattttagttgccgtgaattttgctttctgtctttatgttagttcatgttttgatgtgtgagatttgtaaggtgtgaggtgcaatttgtgcagtgtgaaaatcattgagttttatcattatgttatttcttcgaagatgggagcaaaccatgatatctcctatagttttcaaccactgattattggctatggtttctttgatctcaatgataatttttattttcctgctgagctgtctgttgaggaggtgataatatatacatacatacacacatatataactatattgttattattcttagtaccaaagctaattataattagtttgtcacatttttgtgttaatattattagtggagaaaaatgatggtcttgattatcataataaaaataagaaagaaaataataaacttttgatgattttgttgaagacatatgtttttcttattaaactttgttagtttgattggttttggaacctgatgagagaaagttccattataatttggactctttttcttattaaacttgtgaggttcatagtggattttggaggtcaggaataaaattattaagaagagaat

SEQ ID NO: 63955 - DNA, 540 bp, Cucumis sativus
  Intron number 1 from transcript Cucsa.176040.1 (locus Cucs a.176040) derived from phytozome v7.0 (chr-ID scaffold0122 5; pos 435194 to 435733 reverse strand)
ccgtcgtccccaaacgccgtctcgaaaaaatctctgtgagtaattttattttatttcaaaaacttttttacctcattcatccactggaaaatattccatcgcctgatagaattaaatgatatctaatcttagtcaaaggggaagatggcgtgatgtgtggaccttgtcgaggaattgaacttttattaatattttttttctactttttttttccttttatggaatgaaaattcctcttgtttttctattttattttgcatctcattcattctggaactgtttctggaattgtatgttggtgatatcgttgggttcttttaattttccggtaaagtttttgactccaataaatagtaatggggttggcaataaatgcatcctatttcgttttcttgtactttgaacaacccaaattcattaaatgtaattaatgaaattctaaattatatgtttaagttatagttggcaatttgtgagattcattactgattatgttgaggttgtttgatattatgtttttagcagacgcctgaaatttgg

SEQ ID NO: 63956 - DNA, 575 bp, Cucumis sativus
  Intron number 1 from transcript Cucsa.180050.1 (locus Cucs a.180050) derived from phytozome v7.0 (chr-ID scaffold0123 3; pos 407067 to 407641 reverse strand)
ttattgtttttattgaagacaataacatttttataaacgtaaatagttcaatattttttttgtcatttattttttcaactgttacgatagaaattgtgtctactctaagaaaaatgtaaatagtttattgttggtgtgactattgacattcaaaaaattgatctgaatgaattgatacttgacggtcgatttaaggaagagatttttaaaaaatcgaaccaactcaacaaatggtcctaccctctctatggcacgatataaatatgcataagaaaaacaattttttttaatcaatcaaacctatgtttttctcttaaaaaaatttctcatgttaattggttcccacaaaccttctgaccagtggtgttcagttttagtagattcaaagtgtcaaactaagttttctttcttaatctataattagaaagtatgcttaaccacaaacaagacttgatatttgggcattataaccacaaagaagacttttcggattttgattctttcatatcttcgtacaaaaaatggaatcatagcattaagaagtttgagacattttagtatatacacatatccgt

SEQ ID NO: 63957 - DNA, 776 bp, Cucumis sativus
  Intron number 1 from transcript Cucsa.273130.3 (locus Cucs a.273130) derived from phytozome v7.0 (chr-ID scaffold0251 1; pos 125676 to 126451 reverse strand)
tttcccagtctctctctcggctcgattttctcgaggtaaaaaaccttactttttcatcttccacttctttctttcttccttctttttcattttgtattagggtttcgatttggactgggtttccttattcttacgattgtttttgttcataggtttgactctctcccttttcctctttttctcttgttggatggtgagatctagggttaacgtggagggcgacctaaagtttgttgccttttttcgcttttctgtttctgggatttctcaattaattgatcctgatttgcttgtatgtgggtctgttttttattgcacttgttgttttagttttgtttcagctgactagaaagcttgaggcaaaacagaacttggattctctcttttttctttttccttttttttttttgcgtggttttgttcaaattgtatttttgaatcctttgtgatttaatttggaatctttgactgattctgttcccttagatatgattgggtgggtaaatgtttggttttagtgttgtatggaagattgatgaatttaaagtgtacagttatcactcagtttctggtctttttgggcatatttattaatgtttggatcctattgaaatggatatcataagaatttgggtgactgggacttgtaacaagtaaatgggtaaatgaatccaggaattatacaaacttgaattgtagtgtatgcgatctaatttggctccttttttttctctgtgatgtggaaagcagagaattattagtttattacattgaag

SEQ ID NO: 63958 - DNA, 214 bp, Cucumis sativus
  Intron number 1 from transcript Cucsa.255450.3 (locus Cucs a.255450) derived from phytozome v7.0 (chr-ID scaffold0222 9; pos 3443232 to 3443445)
cggaactcttatcggttaagaaattggaatccgtcgtaagcatctcttgtttttctcttttgatttttgggcaaaaactgcgatttgtttttcataattattcttcggccccacgtattggatcgatttaacctgaaatgctccattgacttggttccaccgttcttgtgctttttcagggctgggagtttgagggtgctcccattattgcaga

SEQ ID NO: 63959 - DNA, 879 bp, Cucumis sativus
  Intron number 1 from transcript Cucsa.201760.1 (locus Cucs a.201760) derived from phytozome v7.0 (chr-ID scaffold0137 6; pos 26566 to 27444)
aacttctcatccgccctcgtctctcaccgtcgcaggtttctacctctcgtattcttggggttatataatttgtttggttttcgattcatactggggattgttggttttgggttcatgatttctgcaagttttctttttctggggtgctatgtttttcatttgataatcgttgattgcttgactggagtattgttgttatcgtctgcattccagtttgatttggtatgaaggcgaattcatgccttattggctgaaaagtaacgcgggtagacttttgtttttcctcttaaatttgatccttttcaattttttgctgtactctgtttctgtgactttcttcctgttgatttgtgacgtgtagtttgtttttgctgaataatttgtctcgaatttctgcgcttttgaaaggatttctggtggattgggtaattagaagagctagcttttgaagggttcttttttttaaagtcttttttcaaatcgcaattgagtattgtttcttgggaggaatactattcacctcatcctttctgcaagttgatgttttggggcgttccattttcattttacaatacattttggtagacttctatattctgaggttatacgtgtgtgtactaccttattatgagacctttaaaaggtcaaggtataatcttctcactggggattttattataattttacttcgtttgctttttcctttttttttttttttcttaggagggtgggggtggagatttatgccttctattgtgctgcctttcgtgttgatggctttctaatccatctaatctttcactcggatattgctcacatattgttgtctaatgggagctatttggttgtttgcagggtggaactcagcaaaatttcata

SEQ ID NO: 63960 - DNA, 390 bp, Cucumis sativus
  Intron number 2 from transcript Cucsa.199800.1 (locus Cucs a.199800) derived from phytozome v7.0 (chr-ID scaffold0136 5; pos 68039 to 68428)
aacccaaatctccaagtaaaaaacaaaattttcttcttttcttcttctcttttttttctttttgaaaatttactgatgagagagagagagaggaaggggaattaaagttgctatttttaaagggaaaatgatttgaaaagagggtatagagttgaattgcatgaggctacaaacagagtaaaaattctgaccctattctgtttcatctctctactaactccataactgctcaaaagttggattaggttcatacacaaataaattctttttctttttctttttcttttcttttaactacacaaaaaaaactttattaattattatttggttttgattttcttgattttgattgcagattttgttacaggaaggcctgcagctactcttgaa

SEQ ID NO: 63961 - DNA, 721 bp, Cucumis sativus
  Intron number 8 from transcript Cucsa.181840.1 (locus Cucs a.181840) derived from phytozome v7.0 (chr-ID scaffold0125 1; pos 84187 to 84907 reverse strand)
tgtctgcttctctgaggttttccgtgatcgtggtggtatgccttattaacttatttctctttctatttgctcttacatctgtctctgtgcaagtgtcatttaaacacatgttttttttttcaatatatttgaaatgtatgtgcatgtttggactttggacagcttcattgcagattgatattagtattgcagtattaacctccgtattatttttttctatgaaaaaaatatccttgtttttagattaccttcttgccactatttagattaccttcttgccacattctatttcataaagaatgtgaattaatgaacacagtaggctggttgaaaaggttctttaagacatgttagagatgaggttgataggtctgaaatccccaacttgaacaagtacctggggtaagacaaatagattcttcatgtcttggtcaacaagacctttcatagagctctctgaatacataactctagtcccaaatctccatggtgaagtccaaattggccattgcaccaagttgtttatgccctgtcatgttttttctttatttattttttagttctaccttgtggttgatattgtatacatttgagtgttttcagtctcacgcttgtttcagttttgtgtatattttcttcatttcttgtattctataaatcatgcttagtggtgctgaaaaccattttttaaagaataatttttatgtaaatctgtgcaggg

SEQ ID NO: 63962 - DNA, 357 bp, Cucumis sativus
  Intron number 1 from transcript Cucsa.304120.2 (locus Cucs a.304120) derived from phytozome v7.0 (chr-ID scaffold0295 1; pos 1847648 to 1848004 reverse strand)
ggtttgacccgagtttttggggtgacccaggtgagaaaatcgctttatcttctcaatcaatgatcactcatttcagttttattctttaatttcccttatttttctttaatttatctgattttgattctggggttacttttttcttcttcgatcttcttcaagttactgattttctagcttctgtttcgctggagagtcgtgattgtgtttactgtggttgttttggggttggtcaattttgtggactgatccaatgttcctgttttgattatattgatgggtttgtgagcgtggatctaacggttttctttttgttgttttttgaattcttgaaaacgatgaccagagttggagtct

SEQ ID NO: 63963 - DNA, 680 bp, Cucumis sativus
  Intron number 1 from transcript Cucsa.204630.5 (locus Cucs a.204630) derived from phytozome v7.0 (chr-ID scaffold0141 0; pos 6190 to 6869)
atctttctctctctatctccgttcccgcggaactggtgagtcttttggattctttttccgcttcttgttttatattctgcgtggaagaatcttattgtttggttatttttgttgtttgaaattcatggtatcttgttaagaacgcagtctgtgtgttttttcctgaatttctgctggtttcttgaatattggagtttcttttttgcctctcgatttgtgtttgatttgttgagtttggaaatgggttggagtttgtaatcggattagtgtttggagtgactctgttcgttgactaatgatttatggttcgagtagtgtttggtttgtaactttgaacgatctgttttggaataagcccagcggtgcgtctttgattttgatcttagtgggtttggtttgactttctcaacccagtttttttttccttggaaagttggggaaatgggatattattattattttattttagccaggaacagggtggattggaaacacgtggtttttagcttctatgatctgtaattatatgatgaaatacttgggattattctatgtttctttttttctttctttttattttttattttttgaattttcttctaaatcaaatttaatttgtttttcccgattataagaaaataacgtttctgtgtgcagagtaattgtttcccaggctttga

SEQ ID NO: 63964 - DNA, 837 bp, Cucumis sativus
  Intron number 1 from transcript Cucsa.242720.2 (locus Cucs a.242720) derived from phytozome v7.0 (chr-ID scaffold0204 7; pos 2399606 to 2400442 reverse strand)
ctctctcaaacttcggtcctcttcttctctttcaggtatccttctctatcccttcctattctgtttccgcttttctctttcttcgccatcatgctcgttctcttcttttgttctctcactcaatgtgattgactttatgttgtttttctgttttattttcccattaacgtttgttgtaatgtgtagatctatgataagatttgaattagtgctcattaatgtgttgcatgcttttgatttcgttttaagcagagattactttgtctatattcattaaatcattggattttaggttctttcagagtttgtaaacagtgatgttaaggaatgctgagatttatgactgatgagagttcgtgtttgtctattagcttgttggtttcctctttgatatcgcatggattcgatctgtatgtctgggtttgactcttgctgaaatggcttcactatagcatatttgagtttgtgttgttgaagatttgttgatttcttggaaaattgggagttcgttttgtttttcctctttttacaggtttattgattggcgatatctcgttttcaacttccgaaatgctatttttcataagaagaaactgtggatgtatttttctactcgattagagatccttgaaactatgccaaaaggaattgtttttttcaccaaattgttttttgtcgtttgtgatattaatgcattttcttattcttaataaagtttaagtgttcctttattattttttaatggtggttgttggaatggttatttcccttttactaaaagctttttccatgtgattcaaaggtgtatttggggtttcccggtctttgttccaagtc

SEQ ID NO: 63965 - DNA, 993 bp, Cucumis sativus
  Intron number 1 from transcript Cucsa.175420.1 (locus Cucs a.175420) derived from phytozome v7.0 (chr-ID scaffold0122 5; pos 118518 to 119510 reverse strand)
gcggtattttctaattccgtttagttatgcctttagttttcgttttcacatgatgcattccctgcgaaaacctagcctctgtttgaacaaatctcaattgaacaggaaactctggtatagcccgagaacaaaagttagatacttatagaattcattgctatcaggaacatgtgttttgcgttagaatatacattgtgggaatcaaggattagctcccaaatcgtgggaaatacaattcagatcaagtcaaggtcattatctcaattaatttataatgttgagcgacagttttattgctgtagatttttcgagttttagttaaaagacaatagaaaatgttttgctctctcatttgtctcagagactacgttaaaccttttaaagtatcgcatgttaccatgtctcaacaattcagatcagatttctgtgaaatatttctaagtcatcattagctattttgagtgaaaaaaatagaaaaacgtactgtgaggactgaaaaagaacctaagcaaaccaaatcatggtttaattaatgctaaaatccaatttgatttttgctaagccaacatgaaaatgcattttttcctttcttttttttcataccacttttaaggtagctacccgaatggcatactgttaatatctcttatatttccattctaatactctagcagctacatttgcttctatgaatagttttactcttaataatcatacttgtacatgcattatgggattgatttaagttctgtggtcatgttactatcttccttttttcgtattggctagtaaattaagcaatctggcatgggttttttagctctcattatcacacgctgaaggcacacgtttttttatgtttatatattttgattggtactttcctttctgaaatcttgtaaattgatttatttctctgtttccaaatattatttaaatcctatattctttggcaatcccaatatacagattttagagaaatcagactttacc

SEQ ID NO: 63966 - DNA, 589 bp, Cucumis sativus
  Intron number 1 from transcript Cucsa.142200.5 (locus Cucs a.142200) derived from phytozome v7.0 (chr-ID scaffold0107 9; pos 497471 to 498059 reverse strand)
gctactgttgcttcacctccttctactgatcgtatccttactattttatttcatatgggttattgtctgtttcctttcgttttgtgtctacccttttttgatttgaattggatcttgggtttttgttctttttggttttgatttatagatctgtattgggttcctcttcttttgttgattgtggatgtggttggatgggtttggattttgtttaggttattgaggattttattatttcagttctgtttgatctgttgtagaggagttgaaagcttgaaagtatgacatgagttcgtatgacaattgatttaatctttgtttatgtttgtgtttttaaggttttaggtttttgtgtgatgggatctggtttctttttgcatctatttgaaagatttctctgtgttgtgtgatagtattgggtttagaattggatttgaactgaaaaataatgtttttttacgtctttttgggtgtttaacgtgctctggagtttttgtactgttgtgattttgtggataccgggtttgtatttcctttacttctgattcttacagaagctgcagatttgcttcagaagttgtcattggat

SEQ ID NO: 63967 - DNA, 601 bp, Cucumis sativus
  Intron number 1 from transcript Cucsa.164990.1 (locus Cucs a.164990) derived from phytozome v7.0 (chr-ID scaffold0115 3; pos 371687 to 372287 reverse strand)
gtctggcgagctccggctagatcatcggtgaacttctgttttttttctcccctttctttagttagatcttctttggttagcttatcattgagatattcaacttttgtaatgaagtttgatatgttagcagacaaagtatatgatgtaacaggctatgttagttgacttttctttttcctttttttttcccacttttttgagtggttttggataatagattgtttgctctttatgtatatagcttactggaagtacttgaaatccccctttttccttttttccttttggaaagaagaattaaagttattgtagtttatggcaatcatgatgttttatttggtttgtaccgacttgaacagaaaacaagttgattattaattaatcaatggtttgttttgttcattcatttttaaaggactttgtacttgaacaacctttgaagtttgatgttccttctttgattgtatttttattagccaagggagcatgtttaaggaaaaacccatcatggtgtaaaacaggctaataaagtaaacctgtttcatttgaataatgttggttgaatgagtacagttctttattgaattgttatttgaacagg

SEQ ID NO: 63968 - DNA, 667 bp, Cucumis sativus
  Intron number 3 from transcript Cucsa.264780.1 (locus Cucs a.264780) derived from phytozome v7.0 (chr-ID scaffold0233 7; pos 57415 to 58081)
gatttggtatcaacaattcatattgcagacaaagagtatgcctactcattttataatcttctgtttttcctgtttgtctgctcgtaaattgttggctgtaaattcatgtctaggaaatatagtttttatggaattttatttttctttggagttgtttagatgttgagaaggaaaggggccagatatatgtttatgtcacaacaagggatccgcaacaatatgagaaactgtttcattaggaaataggaaagagctacattttgtagaaactgttctgtatctgcaattaaattcaaagggataagataaaattagctttggaagatggcaggcagagtcctctattgaataaagacagcagatttctagcattacaaatttataaactgtcattttatgtgttctgggcactgacatgaactctcttttcatgagcctgtactattttccttgctatgtgggtagtctgagttttaaattaactgatgcagggcttgaattgggtgtaactacaggtttcaaggcaattttcctttcataatgattgctaactctgattttgcatattagttggtttactgcatggcttttccattgatattatctgttgcatccattttgattttgcataggtattttaaggccctacagaaagaactcgagtcct

SEQ ID NO: 63969 - DNA, 888 bp, Cucumis sativus
  Intron number 2 from transcript Cucsa.302600.1 (locus Cucs a.302600) derived from phytozome v7.0 (chr-ID scaffold0295 1; pos 710233 to 711120)
tggaaggctggaattgtccctgttcagtaccgcaggtgagttgaatttgattcgttttgttgtttaattttagaaagatattacatataccctaaaccttatttttaaaatttttggctgaatgggtctagttacataaattcttgtgagataactagcaactagattaagatattatatccatgacatagacgatagaagtttaaaattttgtctcagataggttcttcaactaaaattataaacaaaacaaaaataaggcaacgtttgaaagtttggtcagctcccgacttcaaatgtattaggagaaaggattataataatttaggcctacttgaattaaaagcattttcatttgggtaattgcaatttttgagctaacaagttgtaaagtaacatttttaaataattacaaatataacaaaatctattaataataagttttattatttattgatacactatcttattgatagactctcattagtaatatagtctatgactaataaatttttatgttaacgaattgtctatctctaggattgaataatttagattttgctataactatatttagaaaaagaaacaaataaattaaaggttgtgggataagaacacatatgaaaatcacaactagcgaggttgacacataccccatagcgccttcatctcacccttgttcaaaagcgataatttattaatgaccaatatgctataactttaatttattttgcattgagttccatctctactaattctttgcatctgattgctatacttgcaactgcctattttatttaaactcttaaatccacgttcaatggatattaggaaacaactagtacgatattaattaaacgtgaatgctattgtataatgtagggttcc

SEQ ID NO: 63970 - DNA, 332 bp, Cucumis sativus
  Intron number 1 from transcript Cucsa.152840.1 (locus Cucs a.152840) derived from phytozome v7.0 (chr-ID scaffold0112 4; pos 172712 to 173043)
acttcgtgtgagaatccgctccgatcctcttcgctttggtgttctatcctctgcgcacattgatctctccattgtttctcgtttttaatctgatttgttcatcggattactattcctctaattcttacagtaatccggtctttttttcctttttttatttcctcttttatctttttttttgtaccgcgtcagtgacgtaaagagcgtttggcaaatcggatgttttttttgtacctgtttgttcgtatttgatttatgcgtaatttgtctcttggttgaatcgattcggtgtttttaattgttttggcatcgattgataggtgttgttcggg

SEQ ID NO: 63971 - DNA, 778 bp, Cucumis sativus
  Intron number 2 from transcript Cucsa.161980.5 (locus Cucs a.161980) derived from phytozome v7.0 (chr-ID scaffold0114 4; pos 1734000 to 1734777 reverse strand)
tcaaagggctgctgcaacatcaatttaagttatctgtaagtgatatatttacacatgagatttttttcttcttctttttccttttttggtctaatgttttatgtctctacttaacgtgttttgcagtggttgggtgaaatgctttgttcaattcctttgttgtttacgttataaatatattatgtgttgtttcattcttttgttgtttacgttataaatatactatgttttgtttcattcttttgttgtttttccccatggaaggtttaaataatgtttgagctaaattcagcaaacttatgtccctgtttggtggatgctatggttttcccttgcttaaaattgtaaaaaaatgttatgcttgataataaatttcaacatttttctgtttcttgcgagcatatgtaattggtctgtctgaatttattgttgtaattattttcttttttagcagattgaactttgttacttttccgtcactttgtggtgtccgccaaattggttttctgcttacactttggactggcctggtatatcaaattggtgttgaatttgtgagtagttgcaaatcagaagtggcatgtagtgggacaaacacggcagccttgttttagagttctatgctttctttttccttcattgtgttgctgaacttagatggacgttccctcagtggaactaaattgtgatagtgaaggagactcttaccctttattaatggcacgacctgaacattctaacagcagtgagcatatcattgacataactggtgctggtg

SEQ ID NO: 63972 - DNA, 1004 bp, Cucumis sativus
  Intron number 1 from transcript Cucsa.161980.5 (locus Cucs a.161980) derived from phytozome v7.0 (chr-ID scaffold0114 4; pos 1734774 to 1735777 reverse strand)
tccctcccacctctcatcggcgttggctcagtccggtgaggttctctgtcttcgacgagaattcgctttttgtttctcttcttttcctttttcaattcgcgaaatgctttgtgtgtttctgtatctttcaatgtagaactctacttagaaacggttttttgttttctttgtcgtgggtttagggtttgaattgatggttattttggttggatcattttaatttacaacaggatcagtcaacgttgtgtagtgaggggttttgatccgtgttctttgggaaattcaactcgtaattttttaattccgtttgaaagaatgattggagctgtgcatttagtctttgtttgattccgtatgattctgagaaacttaagggaaattctgatactacgggacataggaaacctcatttctttaactatcttatctttcttttttctgaaaatcgtgttaaacctcttaattctggttgaaaaagaactttgcaggtttttcattaacgactcgagtaatgcatatatcttgagaaagaaaggggtcctttatatcggttatgtgatttttttccttcattccttcgttccttcgttccttcattcctccttttctttctttctttctttctttttttgttgtggtggtcatggtgtggaggaggttatataggtggaaaaccaaagctgtatttgcatgatatcgtggagtgaagctgttattaacttatcgcatgaagtctttatttgatcttccatttgttgtaggtgtcttaaactttatttggatgtttcgatagtagttgtgtatgaatctatgatatgcctaaagagcttagataccagttaaattaaatgcaagatttactacttgtaccagtatggtatttcatatttgtgttaaaactatggctaaacttctggagttcatttactacttctttaatatgattattgatatatatatttttttcagattggcagctttgtggattgacagagttgcatcaa

SEQ ID NO: 63973 - DNA, 876 bp, Cucumis sativus
  Intron number 1 from transcript Cucsa.140410.1 (locus Cucs a.140410) derived from phytozome v7.0 (chr-ID scaffold0107 1; pos 295183 to 296058 reverse strand)
cacaataaggtatagggcttttggtttctatttgaagattttgaatttctcttgttaacttctttgtgcttgattttttgttggagtagattttatttcctcggtgtgttaaactgtatgattctgaaagttaagcttgggtagtttgtgttggaattttagggatttttttcttgattgggtgggaacacaatggggcaatttcttagctttgtcttttgagtagaagaaagagggaatgacttaaattgttgatggtatctcaagtttagtaatcggggttcagttcatataatgtttcattacgtgtttgtggaacctaaaatgctggtttatctcggaggtacctctcttttgttaaaaacgagtgtattgagactggaaaatggaacatctcagtactaaaattgtccagagaacttgacattgttgagctcttttatgaactataagtctcgtgttttaactttgaatggcatgtgttgggagtgattttgaaatggttaaaatcacttgtcagttttaaaatactccaaacatgttgtcgatctatatgagcttgaattgtaaactctaaattgcagttttgattttatgaaataatttagaagtgttaagatcaaacataaaaatgattttgaaggattaaggacatgcttgaaattgattttgaatttgatagaattgcaaacatgcccaaagagtcatagttgggtatctgtgatggaaaccacatagctagctgatgctttttatggcattctgcaagtcttttagtttgtcttttttggagtatcatcaagaccctggttgatcaatttgcttactatcaacggtttgtttaataggtactttccgttgttggacttctccaag

SEQ ID NO: 63974 - DNA, 787 bp, Cucumis sativus
  Intron number 2 from transcript Cucsa.139250.2 (locus Cucs a.139250) derived from phytozome v7.0 (chr-ID scaffold0106 6; pos 435973 to 436759 reverse strand)
tggaaattgacggaaaggctgctggtatgattgattttgttttgtgactaaagtttaaattgaaatagtgtgaatcggaataagaatagagtgctgcagcaattagcgtatgtacagcatgcttgattgtcatggtttatcgattattaggtttcttcaatgacaaaacgtaaattaactaactcattttgtatgacattctttgttctcgttattatgatgtcatacttatcgattaagccttttttaataaatatagttttccttcaatcattttgttcatcagtataaaaattatacgtgctctgtggtggcacaatgctgcaacgcaatacccgatgtacattcttaatgaaccaacgagcagtagtttattgtgatataatgtttagacatcctttcatgaattgtatattgtttactgttcaaccgttgattggctatgcttcagacatcagatgttctactattcaatagaatgcatgtcactggaatcatgtttatcgcataatgtagtaaaggacagtcgaatgcccattcttgcttgaacaacatgcagtgcttagttatctggcgagattgggtgtatttgatatgttagatattgtttactacttcagattgcgtgttatttgaatggtgaatgatacttattccattatcacatattgatgtgaagtaaaattccatgcccgtttacacttaaggaaattagacacggagatttcgcattccagagtttgactaagttaatttgaataataactgttgttcaggtcgtattgag

SEQ ID NO: 63975 - DNA, 686 bp, Cucumis sativus
  Intron number 2 from transcript Cucsa.188400.2 (locus Cucs a.188400) derived from phytozome v7.0 (chr-ID scaffold0129 7; pos 23035 to 23720 reverse strand)
tcgagcaggtgcgttgtttcttctttcttctagttctgcaaattagtatcaggatgatattttttttggggttttgaggaaataatccatgacattggaaaagtatcaatagtgcgaaagaaagaggatgtcgttgagacattttcttttagctcttcagctgttgaaaactaacgctttatttggtggcattttttttttttattgcctgtctttttcttgattactgttgctacaggatgaatctcgatgtttaatgttgatagaaaagttattgattgtaagggtttttatttcttccgtattctaccaacttgtaagtgtgtaagagattatgaattatttttattttgtgacaatgtctggggaaatcaagaaccatttttctctagatttatcaagtggattgctgaagtgcgttattgcctacaaatagtgattgggggtattaggtattagtgtacttttctaatcaaatcttatgtcacaagtaaaattcatggtcgttattatcaagactggcacggtggtaggtaactggaccatttgttaaacacatgataaactcatgtttcttattctgggaatttttaaaaaatatagttcatgttcgtactatagtccatcttctgcatgctaatatttacacttttacttgtctttgtactgcaggcatttttccaaag

SEQ ID NO: 63976 - DNA, 1036 bp, Cucumis sativus
  Intron number 2 from transcript Cucsa.218340.2 (locus Cucs a.218340) derived from phytozome v7.0 (chr-ID scaffold0165 8; pos 468260 to 469295 reverse strand)
ctcatttaaaattggtcaaggcgcagttataaaaggtacttgtcctgtatatttctcttagcagttgcttcaaaaaatagaacacttttgcattcgaacacttattttagtttttgatctatttcttttccttcttcaactatgaaagttcatattttttggggtcattttctttccttccaaattcatctttggaaacatcagggacaaagttaaaaagttatatatacgtttgggacaaaactatctttagcagtgtttatttaatcaaaattaagattgacctgagtggccgattgttggaagaactaaatttataaattgtagatgctcggtaactcttagtcttatctgcaaaaagcatataggtgatttgtgtggacactttaaaacctacaccaccatcactggatgtaagttatctacctttccaatagtgaggtgacaaacttagaactgagaactaaatcaagcattttaaatattgagcatggactaataaagtaataatttttcagggccaatatgagagttgatcaataatgagaaaggataaagtgctttatgtgttcagttttaggccttttatttcattggtgtaacaataaacttcaactttcctttcaagtatagtctttctccattgacgtatcagcagttcatcatttgtttactttgttctttttcttaattaagagtgtatttacttgcagctttgtatggctcagcaggtcactctgcaaaagttggcttacctgtttttatcttttatccaacatatgatttaggtttcatgatacaaattttagagttaagacaacctatagacttctgccaaacctcattgtatctacttttatacaaggctgttttgataactgtgttaaaatttactactgcttgaaaatgttattagatcactaaaacacttcataaattggatgtttcttggttaataggactttgttgactattttaatgtttgttttgaatattgatttgatttgaatctttgattgaaattcggtaggttggg

SEQ ID NO: 63977 - DNA, 302 bp, Cucumis sativus
  Intron number 3 from transcript Cucsa.257310.1 (locus Cucs a.257310) derived from phytozome v7.0 (chr-ID scaffold0222 9; pos 4670106 to 4670407 reverse strand)
acaaatcaaccggcagcttcagctggagataccaggtctttctccgtgaatctccttttcgtttacgtaacgtagctggtataattcatataattccaagtactttaaaatcagaaaaatggtctacaaagtcgattttaggtccttattcttttcgattgtttcattatatattaactggcttgcacaagagtttaaattcactagttcattaatcaaaagaaaaaaggtcgaaaaagtctgccacaaacaggtaactttttaaatcactgttggttatagtgaaactggaggggaggcag

SEQ ID NO: 63978 - DNA, 377 bp, Cucumis sativus
  Intron number 1 from transcript Cucsa.142120.1 (locus Cucs a.142120) derived from phytozome v7.0 (chr-ID scaffold0107 9; pos 437950 to 438326 reverse strand)
ggggaatcaaaggtgaagactggttttatattccggtaaggggcaaagaattataatcaccaaaacccgtcaaggaatcctaccaagaccgatgaaatcgagagcccattgagtaaagttgattcttggaacacacaaggccttcagttccagcacagtacttctttgaggtcaatgcttagaatcaaagaaagttgattacgtacaaccttgaatggttccgtttcttgtggccctttaatggtctgcatggccttttctgcatctacaagtctttgacctctaagtaaataatcccgtctgagagttatttgtttctgtttttcttgggaaatcttaatttttgacgatgatattttctttgtttccagagaact

SEQ ID NO: 63979 - DNA, 903 bp, Cucumis sativus
  Intron number 2 from transcript Cucsa.250250.1 (locus Cucs a.250250) derived from phytozome v7.0 (chr-ID scaffold0221 9; pos 365857 to 366759 reverse strand)
aatttggggtatgtattgatgcattatttttctccttttgatcatttcaatattattcttatgtaaaaataaaaatataataataattataaaaaaaacatcgaaacccatagaaacaaaaaaagtttttaaagaattatttaagacttatttgaattgattagagaagaaattttttcaaaaggtcatcttttgtataaactctttatatttatttcttttaaattcagattggcttttagacttttagtttggcctcttctcttctcttcttttattttctaatttaaattaccttataatattttttttcaaatacagtaaaaattattaaaaatatttataaaatataatcatcttttagattctatccctcatccacctatgatgataaaaggtataaaatttataaaatgtataaaatttatgttcatagaattagaatttaaaattttattatattttataactatttttataatttgcacctggaataatttttcattattttttttcataatttaaccaataatatgtattgagaatttgttgtttaagtagtcccaaagtatcttttaaacttctagtatataatatgttttcatttttttattttctaatttaaaattactttaaaacactttaaaacaattagtagaagtgtttctttcacttacaatctacaatgctttttaattagtgctgttcttaaaattttcaaaacccattttccacattgcaatccaaccttaacattaaaactttaaagagactcaaattaattaattaaacccacttgtaactactataagagcaatgcccaaatatattgatctcaatacaatatggtcttttatgttaatgttagggaaaaacatatagaaaacggttcaaccaactcaa

SEQ ID NO: 63980 - DNA, 423 bp, Cucumis sativus
  Intron number 1 from transcript Cucsa.250250.1 (locus Cucs a.250250) derived from phytozome v7.0 (chr-ID scaffold0221 9; pos 366886 to 367308 reverse strand)
caaaccatcaacctctttttgcagtaattaatactatcgattgtttgtattaataacatcaaatttatttattatttgaattcttttactattattatttaccctttagatagtttcttaatcccgtaaaagattaattcaaataagtcattagagtatgatattttagtaacaatgtgatactaaaagatgagttatgtaggatagtagtttttaaagagtctaagaacaagtattataagtggatagtaacaattttttcattaatacaagtggtttttatttatcttcttaccacgatcctagtctaattttttttctcacaactattatagaaagaagaatgtttgatccccttcttatgataatttctaacatataatttaaacaacttgtgacataaaaattttcagttgaaatcta

SEQ ID NO: 63981 - DNA, 1007 bp, Cucumis sativus
  Intron number 1 from transcript Cucsa.273160.1 (locus Cucs a.273160) derived from phytozome v7.0 (chr-ID scaffold0251 1; pos 198204 to 199210)
cttcttttgtggactccccactttctggggctgaggtatgtgactgccttcattccacattcttgttataaccttcactgacttcatgtttttaccgtctctggactctatatgtgctcaacgtaatttttaactttgtaatattttttttaattctctctggatagattctgttggaaggttttggtataaaaccatgttggttgagtgtaggaaagtaattgatggatttggaaacattttaagttccaatttttgggcctacaagaggtctcttcggtacgagtttctaatttctttttgtcatagttatttttattcgtgccactttactgttcaatcagaatcatagcctagagaaagaaagctgatgaattaaagaatgatgagaaagagcgaagataagagaaagtgatggtgtgtattggaaggcttagtacaggattattcactgtttttgggctgtcttgtggaagagcagattggttcttctgtagcttcctacacccagtttcatttcatgttctcaatgaaaatcgtttgttgtcccaaaaggaaggttctgttttaggtattaaattatggtgtttaattcagtcggcagcatatccagcttctctgttttggtgtattcaagggatttaaatggatctcttttagctggagatcctatcggtcatcatttgtagttcgtagtgacgaacaggaaactgaaagaaaatttgtgtgcctaacggttgatgttttaaacaagttcggtgtagaggacattttgaagctgaatgatggggcaatactgatgactttgttgtcatcatcataagttgttcacagatgtgtttcttgctaatttgtttttgaactacaacttatatgagaagaattgtgtgttaatggagcctgtaaattgtgagatgtttatgcttctaattacattttgatcttagtatgttattcttttgtgcttttcagtggccgaacaagaaaaagtctactggtttggttat

SEQ ID NO: 63982 - DNA, 787 bp, Cucumis sativus
  Intron number 2 from transcript Cucsa.140360.1 (locus Cucs a.140360) derived from phytozome v7.0 (chr-ID scaffold0107 1; pos 213188 to 213974)
ccctaccggtctgtttcacttacaactacacatattctctctgtttctttctttttcgttttctgctttgatcttcatccagtttcaatatgagaatgaaaatgaggatggtgtaacattctattctatttgtttattcaatccattattaacaaaccaaggtttaatttctggcatttgagtctgttcgatcgtatacaaaaatgtcaatgttgagatttcgattttaaatatacttcacgtactgcgcttgctaaactgctcgatcaccttacgaacaagcattttttcacacttgccataaactcaatatctacgcctaaagcataatttaggccgttggatatattcagaaagtgcaatttcgagatcggatcacgaaaatctgggcccttcattcattttcccttattaattactttcattgactcttttttttcttctaatcaccaatttacccttcagcattccatttcaactctcgcctaattttggaccttttggtcaatggccattttctcctccacgtccacaacttttctaattttttcacatttctcaattaaattacttatgttaactttttcttttcttattacaattaaataaaatatttcattaatgagcaaaatttgagaaataccaaaatattaaaaacctatagaacagccttccaccgaccaagagcttattattattttatgttgagatattttgattatgtatttaaatgttaatagtttttaacaatattttgttttaactgaaaatttcagatatatcgaga

SEQ ID NO: 63983 - DNA, 168 bp, Cucumis sativus
  Intron number 1 from transcript Cucsa.172430.2 (locus Cucs a.172430) derived from phytozome v7.0 (chr-ID scaffold0119 6; pos 278339 to 278506)
ggcagatcgaggtttgttgttgtctttttctttcttctttgatttgggtttcgttttctttcgtttacctgttttggtttattgattggggattttgagttttgggtttttttcttttttttttcattattagatcctctctttacttttggaacgatctgttaatcc

SEQ ID NO: 63984 - DNA, 585 bp, Cucumis sativus
  Intron number 1 from transcript Cucsa.195180.1 (locus Cucs a.195180) derived from phytozome v7.0 (chr-ID scaffold0134 9; pos 129638 to 130222)
cttattgttcatttgcattctcttattggcaacaggtcctctctctctctctctctctccttaactccttttcttgataccaaattgagagtttcaaatgagttttttttttgatgaagaatcatttcattccctacattcatgaacctgatctcaaacttgttatcatatgtgttgaccttaaaagtcatgggtttaatatgatatgattatttgctttatatgttttaaacagggacatagcatggatctatgtcatattacatagaacatacatttcatttttaggaatgttgtaaagaagatattgaacatctagttgtattttgtaatgtacatcaaaatgaagcattacttgttatgctgttaaacaattccttattcaaatggagtaaagattaagcatatacatatatacattataaaatgaaagacatgtttgaggggacatcccttatttttaaaatgagttatatatcatttgcattaattctttatttgaatttggaaaccaaacaacctaatctcctttggaaacaataatcaataggtggtctcaaatcgcatctcgtttgcccggacgaa

SEQ ID NO: 63985 - DNA, 613 bp, Cucumis sativus
  Intron number 3 from transcript Cucsa.199080.5 (locus Cucs a.199080) derived from phytozome v7.0 (chr-ID scaffold0135 7; pos 1894886 to 1895498 reverse strand)
aaacaggtcacctttcctttcttttctttctttcattttactctctctatattcatcttttttgactcatttctttgtttatttccttccaccttaagttaacaaaaagattctatctctattaatcatatataataaaatttaagtttttttttttttagaaaaactctttttattttgaaaacatatattgagatattgtattattgaaattataatcattatttaccaatttagacaagtaataattttgaaaattagatttaagattcaattcaaactcaaatgactaaaataatattttaacaaaaaatatatatatactgtccacatatcatacaactttatatgaattgacacataaatttaactctttctttaagaaaaaaagttcaacaatcaacaacatactctaccaatataaacattactttttctgaatcttttctctgagaattaaagttagtaaatgaatcaactttttatattcaaatccccttagtgcgatttacttttttgtttttatttttttccaactttataataacataataaattgtgcattttattttgattggaattattatatacagagtcattgaggtcaattaag

SEQ ID NO: 63986 - DNA, 392 bp, Cucumis sativus
  Intron number 2 from transcript Cucsa.260400.1 (locus Cucs a.260400) derived from phytozome v7.0 (chr-ID scaffold0222 9; pos 6759996 to 6760387 reverse strand)
agaccgaacgatatcaaaaggtttttccagcaatgaccttacttttgatttcactttgaaaattctggagttgggttagtctaatcattaatttccaagagagaatttatgaatctcgcgtttgttttgtagtcgtacacatacccttataactgatcagtctctgacagtactttttttttgggtttgtttaaatgttttgtcatgaattgcgtgatttgctttaaattctcccccccaagttttcagaggaagagagagaagataaagaaaaacctgctcagattttgcttctcaagttatgttcgtctgtggtggttttattgaataattttctttttcaattttgatgttcaggcggagatttcgttgtgtcgggtatacaaaagagc

SEQ ID NO: 63987 - DNA, 1030 bp, Cucumis sativus
  Intron number 3 from transcript Cucsa.286010.3 (locus Cucs a.286010) derived from phytozome v7.0 (chr-ID scaffold0265 3; pos 2198696 to 2199725 reverse strand)
gacaagaactaggggtatgatgggatttgctacaatttgagcagatatcctgttttgttttattaacattcaattcttcataaatctattacaaaagtttctggttttgtttgtattagcgttttccatgttgccatactctttattgtctacatgtggcttgggctctcaattgctgatctttggtcaataaatattaatgtatattttaacttttcctgtattagaatgttcatcttctagtgaatccttaccctttttaaaaattattctataacacattggtatacattcgctctataaatttaagttcaattgaaaatttgtttagtcttcacattcattcttaataggggacgttgtatttttctgttgttgttgtttatttatttatttattcatttataaatatttaggggacatcgcagttgcgtattttggtttttttggttctatttcttcttcattttgacatctcagatgaaagcttcatgggttatttatcaattatgggcttcattgttgtaatgtggttctctcatgtttttcttcagtcattcctttttcttttccttctagaggcaattgtatggtttagattagaatcataaatttttagttgcaaaatagctctccaaatggagatcaaataggaaaagatgtaatgagtagaaggatgcttattcttgcaccttgaaaagacagtaaaaggacgtgtattttgttttatttttggatttatatttgatacatcttgttgtgatcttactttaagtgctgaaaattttgacctctgtgttcttcttttgcttcctgcctatctagcttctgttgacaatgaattttcccctcttttcacttggatggcatgtattttctttcgataagctagtttgttcttcttctttcttatggcggtacatcatgcatcaagttttgttttctacattcaacttactttaatataaatgtatcattatgttttaaacaaacagctaaagggtactcaagcaacaagagattatctgaa

SEQ ID NO: 63988 - DNA, 679 bp, Cucumis sativus
  Intron number 1 from transcript Cucsa.138770.5 (locus Cucs a.138770) derived from phytozome v7.0 (chr-ID scaffold0106 6; pos 59649 to 60327)
ctttgggggtctatttgtgttttggaattccgagggtttgtatttttcaattcagccactgcaaaaacatttcatttatcctttgtaatttaattaataccgaggacttagaactctacaataagtggtttttgaaatgatacgagtatctgatcatgtgatttactgttttgacttttgaggttaatatacgtgcacaaaagtatactacttgttattaccttcagcaaggatgaatattgtgtgttacatttaattccttggagctgatcatgttttgtagaatggtgttacctatacaattgttctcacaccaatggtcccctcgagcctgttgtattaatcaattacattgatatgtctgtgtgtttagaccttgttcgttgatctagtagaaccagagtgattttattagtaaagcttgaaaagatttggattagattttgatgtttctgcacggtgagttggtcactgacctatggctcttcctaatagttcagactggttttaatggatatcaggtgctaccagatcagcttgagtgcatatctttctctgtttcattgcatccgtgttttttatggttcttttctccactcttactatattttcttttatggttcttgtttcttctatgggtatagaccaagggtactactagaaggagagttgacgacaa

SEQ ID NO: 63989 - DNA, 774 bp, Cucumis sativus
  Intron number 4 from transcript Cucsa.178410.1 (locus Cucs a.178410) derived from phytozome v7.0 (chr-ID scaffold0122 7; pos 624088 to 624861 reverse strand)
ccattgtttagaaggcgaattcaaggatccacaaggcaagcctattaaacaaaataatttatttgataaaaaagataaattttggtgcgtgcgttttcttttttgaataagaaacatgtcaattttcattaaaaagtcaggaaaaagcattgaaaattacgttttggagaatcttgtcggtccactgtggaggaagtggtatttcatcaccatctttttctggctgggggaagctattcgacaagggcttattgttatttatttatttaataaaattattattgcaattttacaaaacattttgcttgagaattttaggagtggttatagtgatgtggatacttgaagacttgtttttgtccttggttaggtttaacgttttcatttgagttttggtaacataggagttaggtttttagtacttttcctttgtcaggagctcattttgttatagctagttggttcttgtttttttccactgaatctcattttcctgggcttccattttctgtattgatattctgtactcctatttaattatatggaagctagtttttcattgatgtttggctggcagccctagtctcccttctctttttcccactccttggggagtttgtatcattgaacataattgtttctttttcattaatcataaagtttgtatgttcatacaggaaagatatatgcattaggttgcccttctttcttatggttattattttctggattattctaggcatcagaagcttaactatagaataactccaggtg

SEQ ID NO: 63990 - DNA, 388 bp, Cucumis sativus
  Intron number 3 from transcript Cucsa.178410.1 (locus Cucs a.178410) derived from phytozome v7.0 (chr-ID scaffold0122 7; pos 624875 to 625262 reverse strand)
tatcaaactgtaagtcttcctgccttcttccttatgcaaaatattgtacactcgttcacttaaatttttgaagtcaatggttgatttgggtcgttgtcagtaatcatgaaagtggttacttttttggtgcatcatgcattccactaatgtgaaagtatattgtatttttgtcgttagtatgaagcgacattattttatctacctcaagtacaacagttaactcagtcctttgagttgagccttgagttacctcactcctttgggtttctataatctatatatcttttcatttcaaaggtaattgaacacctgtaatccatgattgctaatttgggttattggctatcaatcttcaggttggacatcaaattattgttagctacgcaga

SEQ ID NO: 63991 - DNA, 536 bp, Cucumis sativus
  Intron number 1 from transcript Cucsa.178410.1 (locus Cucs a.178410) derived from phytozome v7.0 (chr-ID scaffold0122 7; pos 625691 to 626226 reverse strand)
ccgccgcgcctcaatctcgctgcagcctcgccaccgtcagttccaaagctctctgcctttcatatacttttttgtctttttgtttcccctctctctttctgaaacctcctttagttttaatttaaatacttaggtagctagttaagtaatatgtcatcttcatcctcaagccaaagtcaagtctcaaatcattccatataaattaaacttcctccattgttgaagatgattcaaaacccttttggcgaatcgttcttaaacaaagtgtattttatgctttggtggaatacagttatgtttatattaaatttatatatacaagaaaatgtataaaaaatgaataaaaaatgacgtatcctcgatatattcttattttagttcttaatcgttgtgtctgatcgtatttgtatagcatatgtttatccatgtacgtgcttcttaagatataggtatggaataatttttgttttattcattttttttgtccgaccacgaatacagattttctctttgggtggaaagccccctgaaaaagc

SEQ ID NO: 63992 - DNA, 1036 bp, Cucumis sativus
  Intron number 1 from transcript Cucsa.197930.2 (locus Cucs a.197930) derived from phytozome v7.0 (chr-ID scaffold0135 7; pos 1134808 to 1135843 reverse strand)
ggatcggcttcttgagatctccgagagagtctgtacgcttccctttttcttttttctttattttttctatcaatttcgtgttgggttcttgttgtttttccattcttctcccttttatgcagcttcgcgaaatgctaagctcttattgtgtaatttgtttttgtgggtagttaggggattgtttatttgctttctagctttattctagctcaattttggatgtttgatggcaattgggacaatgccgtagtaaacccttgaagtctaggtttagctgcttcgtaacgcaatagttctgatgcagactgtctcgtgtacttaattccttctggattttgtttttgtcccctacttatatgctctttgacccgagtagttgtggattggaatggaaacaacttcctgttctcgttgacacgctttctctctcgtttcgtttgcattcatagcttttaatgcattgcctgcgtgagtgtgattcttatggaatgtgagtttgattgccgctggagctgccaatatatcaaatactctatttgagcaagaattgacaataatttatacttaaaaagggaagatgctagacttcaactaaatgattcatggtgctagagaaacgtacagtaatactaatttaataataatatttttgggatatgagttgatagagaaactaaatacataatataattagtgaaaatcagctagagatgctgaatgaatgaaagtacaaagcttaacaaacgaaggagaggcccactttttcaggtggccaaccttttgccattgcagatatgaataatgacaaatacataatattctatctattatgttgttcctatgttcgtagcttcgtttaacttaggaggttttgagttgggccaagggtgattgaaattttcttttagctacctgccaatgtggatattttgaaagcaacttgagagatggtttttagtggtggttcatggcaacttattctgcttattatttattttcagtgtttgattgttgcttctccacggaagtgttggaa

SEQ ID NO: 63993 - DNA, 969 bp, Cucumis sativus
  Intron number 1 from transcript Cucsa.242350.1 (locus Cucs a.242350) derived from phytozome v7.0 (chr-ID scaffold0204 7; pos 2112065 to 2113033)
tgactaaatcgtggaaacgacgaacttctattcaggtgtgtttggttttcttagtgattgctgcttctatttgtgaattgtagcttgtgattttcgtgtttctgttgttatgcttgatgaataactagtctgtgaatgattggaatccgattgttgcacttacattgtgttatgaacgtggatgaaatgttttaatagagttgagagctaactttggggttcagaggtgaaaacttcctcactgcaagtctgcagacgaagtcttggttaaatggagatgattcctttgtttgatcgaagttcaaatttaaattcaataaaaatctaattataatttataagtccgattagttaggaccctacgaacgcttactgtacagtgtacaccaaatagtttgatgaaaatttggatttactgaactagtgaatcagtgagatgaaattattcatctcgaaaatgttaatacacttactgaacaacgtgtactccaaatgcaagtttatcatcaaccaatttgaacattccctaactttgagaggctaaattgaaaaatattaatgcatagaataccaaacaaaaacttcttgaacagtagggatcaaattacaaaaatacccgaacattagagaccaaaacatatatttaacctcttttgttttagttttcaattgcaaccaactttttgtatattggtctaattggtaagacttaagaggcaatctatgaatttacgtaatttgttggatagatagagcaaataaataaaaacaggggaaaaagaggctggtgtttgtgctaaaatctttaccttttattgctgttctcttcataacgacatatttcaatcctcaactttgtcctacttagtaattcaaaattatactcagactatatctgtccatgccattgatgttatatagtgggtgctgccaggcctgcactcaagttggagctgcaggacctgatcc

SEQ ID NO: 63994 - DNA, 828 bp, Cucumis sativus
  Intron number 1 from transcript Cucsa.140230.1 (locus Cucs a.140230) derived from phytozome v7.0 (chr-ID scaffold0107 1; pos 15451 to 16278 reverse strand)
gcggattatcaggcgggtgagtctttgtaagaatgtgaatgattttgattttcatatctgttttgagctcaaaatttattgtttttcatctgaattccttaacttgattgcttaattctatgatttatgaacttaatttgcattattcaggggcactaaatcttgcatgtctgtaaaactatcttctaaacttgaaaagcttcttccatcaatactattagacataactggttaagttctcaagaatactaattttttcatgtgtgcaatatgccctgcagggcttggctttaactcctgttccttgaactaaatttagttctgatctgaatggtttgaattttgggttgggcaacaagcttcttggatgatatatgtttctttgaaagcttaccatccttagttattgagtttttacccacattagttatgatgattccgatcaaggaaagatgagtcaattctctcattaccaattaatttttaaaagaagcctcatgctatctaatatgtatcggatccataaaactaaaatgaatattctactcattaaaaaaaataaattttgattcaagaacagtgaacccaaaagggtactatctgaaaaagggttatgcggagaatttcacactaaaaaatctaacggcctcgtaatgtttataaggtaaatgaactaattctctcgttactaaatgattttgaaaaggaatctcatgttatcttataatttgttgtcatttaatcaacaaaagcacatatttactaccactgtctcactttagctttcttccaggttcgagatcttgatttttctataaacgttgtggg

SEQ ID NO: 63995 - DNA, 739 bp, Cucumis sativus
  Intron number 2 from transcript Cucsa.193980.1 (locus Cucs a.193980) derived from phytozome v7.0 (chr-ID scaffold0133 7; pos 116947 to 117685 reverse strand)
ggactgctttatctaaagctaggaagcgattgcaggtaactatctgcagtatgattagaagtcacatcagaaatttcgttaatatgagcaagaactatgttgagcagatttgtgatcgtatcaacgaattagtagagatggaaataatcatgacacacacgcatatacattcattaaccatacttttgtagagatgcccaacttgtttttttttaaatggagacaagcttctttattgataataaactcaaagaacttgttattagcataaaaaatggataatgactctggcttaacgtctctggtattttgaaagtcaaacagatcaattttaacatatgttatccttcaccacatttgtcacaatttttgtagtgttgttctgtaagttaggttgcaaagctatcatactgattgtttgttgaaaatccttaagatggttcatactaaatgggatgtgatgcctcaggttgctaacaaggcctcaacaattgcctgatgaatgtaaatttgtgaattccatgtcctaggcaacattgctgattgaaaatatttacaatttttcttttgttcttcatttcttctgttggtattcaagtcacaggctctccacccagaatagtaaataaagttagagaaatctttactaggcattctactaactaggtaactggcatgctgttatgattccctatctttgacaggaatcgaatagattactttctggggaggaaggcta

SEQ ID NO: 63996 - DNA, 605 bp, Cucumis sativus
  Intron number 1 from transcript Cucsa.193980.1 (locus Cucs a.193980) derived from phytozome v7.0 (chr-ID scaffold0133 7; pos 117830 to 118434 reverse strand)
aatctcttaaacaaaagcttgactccttaattcaggttccttttcgttgattttaattttgtggttttttatcttctgcttggggattttgggcagcctgcatttttcatatactgtgtgaattgggtttttttttccttggaacgtctggggattattgggaatgggatctatttagtttcttagtgatgttggagaagtgtagtgcgagaattgtttagtttatgcggcagaggagtttatgttatactcaacgaggctgagggttttagacccttttttttctcatttcgatttcggatcatggcatttgtttttaaaactacaagttgagtgtaggtctaatttctcgtcatttacatcttaggatatatattttgacgattgggcatttccgtgttgcacttgaaggctaatgactgaaatttcattaagagagcacttcttgatttagtttggtgccttcccttttgggggattgaaaggttttgattgattttctttagggattttatgtgagtgatttcaagccatgtggattaagtctatggacttttggttgttatttgttggacaggttgattccgagtcagttagtcggtcaa

SEQ ID NO: 63997 - DNA, 831 bp, Cucumis sativus
  Intron number 1 from transcript Cucsa.143120.2 (locus Cucs a.143120) derived from phytozome v7.0 (chr-ID scaffold0107 9; pos 1407943 to 1408773)
gttttgtttttggcacagcatcatctgcatatcaggtgacaacaaaaagaaaaagatttctatttcatttttttaaaacaaaacttcgaaattaatgcattctgttttaggaggatgtgtttttgttgatgattttgtatctcatttcaagaaattgaaaacaaatttgtaataggtaaaaaaagaaaaaaacaatagatttgaacttagaatactgtttattttattactaaatttgagaaactgtgttcatatcatcctatgttattttttgttgtatgaaaattgttgttactatttttagccaattttgaattaagtttgatagattaaattatatttaaaatctattaaaagtcatggactaaaattaatataaagtacatgaacaaattttctaagtatagaaatcaaaataagatatgatagcaccatgaagttgaatcaagcttttaatttaaaaaagggaaaagaattgaaaacagatataagataaaaggtgaacccaagaatagcaatactgagggaacatgccaatgattttacgttgaaaaagtatagagttctcatatgttaattattaattaccaataaatttttagataaatctatgcttatttgtttgatttatcttctacatataaaatgcttggtggacaatataataattttcatcaagagaaccaatatttgctattagtttgtaagtaggagctttggttatgtgtatttgtgagtgtgtgtatatatattatatcatatgactgctttttaattttaaattcctttcataattgattaattcatagtttgaaggtggtgcttttgaag

SEQ ID NO: 63998 - DNA, 959 bp, Cucumis sativus
  Intron number 3 from transcript Cucsa.251910.1 (locus Cucs a.251910) derived from phytozome v7.0 (chr-ID scaffold0222 9; pos 981161 to 982119)
gttcccaggttagtttttttctctcttaatctgcagctttggcctatatgcacagcaaatattgctacacaagaaaacttgaatgctataaaaattattgtgcttgtgatgtataggattctagtccagtttgctagtagtatgactcatctggttgtatgttgtctctttttaataccctatgcagtcctatcttaaaatgcacttacaacatgactatgcgtagctcgaatatttttctacagttcttacataaatatgctttgaagttttgtaaaggaaagtccaaggccttttcagttttttttgtttgattgctgttattttattttattttaattttttacaataaacttgtttagttttaccatctctctcttttttatggagatgttttcatagatagaaaaaatgccaaactttttacagaaatagaaaaaaaaaaacactgatagactcctattggtttctattcttctatcagcatctatcaataatagacttctatctatttctatcaatgatagatactaataggcttttatcagcatctatcaacaatagacttctatcgggatgcagaaaattatactataatttgtaaacagtttgacccatttttctgtatttaaaaaaacaacattaaccaaaacttatgaagtgatagtttcttttatgatttttttaattatataaactggctatagctatagatacttgtgacatgtgaaacataacgaaagaaattcatgggtttgggtgcaatggatttttcatctgttcttaaagaattgctggtagatgtttgttttttatttgataaatgcatatgattgtgaatatgaatgaatgatatccttacctatcatccatgtgaagctaaatgttcacatctttattttattacctcgattttctgagcaggctagattcttattggcaaagttgaatccatcagc

SEQ ID NO: 63999 - DNA, 425 bp, Cucumis sativus
  Intron number 2 from transcript Cucsa.156410.5 (locus Cucs a.156410) derived from phytozome v7.0 (chr-ID scaffold0113 9; pos 749329 to 749753 reverse strand)
agaccgtcggtatgatttcttctgtcacaaaacattttagtgatgctgctgcttagttcttcagattaatgaggaagtttaaaagtcgctactggagactaacaagtgaaataaattctgttttctgatcgtggttggtttgtagcttggaagtggaatgtttatagtcttcatgtggattcaaccatgctattgtttttttttttttttttttactgtatatcaaacgtttttgctctcgttttaagacttgctttattggctcaaattattagtgttccatttgccagtcaaccccataataaactaagttttacagtgaatttggaagctggaaggcaatcttgatttaataactttggctgtaatggctgtttggatttcttgcagccgaattgttaactaccaataagttgtcagagttg

SEQ ID NO: 64000 - DNA, 674 bp, Cucumis sativus
  Intron number 2 from transcript Cucsa.228410.1 (locus Cucs a.228410) derived from phytozome v7.0 (chr-ID scaffold0193 3; pos 326066 to 326739)
gctgtggaaaatccaccctcttgaaggttttaccaaaattcactcacctttgctcttcttggacctaatggctgtggtttagttactttgttttgttcaaaggagttgtatgttgtttagattgagtccgtacttgtttgattactatttttgaaaaacagcacaaaagtagtgatttcactatgcataatacactaaccattttgaatttaacagtttcgaaaacgaatttgaaaactgttctaatatgaaagcgtttcgtcaaacaagtacttgtattctgcctaatatggcgaaaggtgaagtaactaaacaagtgtgccatgacacgacactaatctctgtggaggctccgcctattctaatgtcagcttcgggaaataataaggatgttaggttttatgtttataacctacggtcttgaaccttcaactttagagtgtagctttcttacatttcaagctcgtactcgaactactcttcaggtattgccaatgccatttatgattagtatttcttcatatcccaaaagaggacacaatttaacacgattttcaaatgggccctaatgtgtcactgtacttttgtagctcatctagatgatgtatttacaagtacttgatgtgttcacttatgtaggtcttggctggtcttttgaatacaacatctggtgc

SEQ ID NO: 64001 - DNA, 1029 bp, Cucumis sativus
  Intron number 1 from transcript Cucsa.254480.7 (locus Cucs a.254480) derived from phytozome v7.0 (chr-ID scaffold0222 9; pos 2767963 to 2768991)
gcttttctctccggggggtttctctgctcttcccggtttgattctcaccgcctttttctgttgtttctttcttgtgttcttttatttgtttgcttcctttgctgtgttgtcaaggggagtatctttagtcctttctgttaatgtttgttagttttttagatatttgaaggcttgatagctcacccccaattgacgatggaattgatttttggatgtcatttgagagaatagctatcgaaaggcattttgtgtttaatttcttgatgtttgaagggttattctggttttacatttggagggcgtaattcagtatttgtactaaggaatgttttcttcatgagttttctatcccaaaaaagaaaaaagaaggtggtgtggtgtggtggttttttttttttcatcttatctgtaatggtttgtatgagactgttgaaatggtaccgagttgggatttttttttttttggatcctgtggttagaattagatgactttgttggtgttttgaaatcgacaatgaagtgagactcggtgcttggagtacttggttgtttgtaacccaacataacgaattcaagtcattccaacatggacattttgttggtacatattggaaggaattggagcaacaaatgtttccaaaatagtattggcgtttagtaggttgtcagataagttataatgtatgtgacgattatattatgattggttggtagtgctatggctttctctatccactttgctcgttttgcacccaacaaagtaatctattttgtttggcagggtccgccggattttgtttttgtaagaaactaaaagttaactcatgctttgtgggaaagtaagagtgatttcctttttgttcattgaactggtatatcgggttgtaagactgaaaccattaaacatgtaaaataatacattccagtactataacatagtaagtttgatacccttttttgtgttgcatcacgtttctaatttttgcttcttcaggttttgtgggagcactaaaccgagatttccagttg

SEQ ID NO: 64002 - DNA, 866 bp, Cucumis sativus
  Intron number 1 from transcript Cucsa.284790.2 (locus Cucs a.284790) derived from phytozome v7.0 (chr-ID scaffold0265 3; pos 1411088 to 1411953)
cccaagatcgctggaagaacactgtaagttttatctacttgttctatatggaaatgatcgtttataggaactttttcctctggttatatggtagctcgattactatcttacgtttcgttcgttttacattcgctctttttgtatttagtttcaattcgagtttcttgagcggtatgtttggtgtttcaagtcaatatgataattcaagcatgtgtatagagttgtttagcttaggccagtgggcaatccgcggttatcagcttacatcctatgagcaaaaaagaacccgggaaagaagtccaattcaatcctatgtaacatcatgctctacgtttcccccaccccaattatttcttattttatatgaagctcttggagttcgaaaatctctatcttctttggatttgtgtgcacgactcacgagattaaatttatcaatcaaaacgagtagatgcctgcagctcgagggctttatgattgtactactctgagaatgactttccatacccaattttgtttccggttggttcattgctgtatggttgctctttttccttaagcggagttaagcggctctgtacattttgccactctataagaatgtagttttcccaactctatcggaatataaagtgatcaaaataagcttgctctcatatttactagtcatctactctgttttgtcattgttgttttgtgtgaacgtttaaagtactatttttgagtgtaacatttgtgtagaccagttagcaccactgtcctattcaacacaatctagcttttttttctttttattttgttcaatacccaaacatttctggttgaattttcaaggatcttgtctcatctttgacagccgctagctg

SEQ ID NO: 64003 - DNA, 648 bp, Cucumis sativus
  Intron number 2 from transcript Cucsa.242160.3 (locus Cucs a.242160) derived from phytozome v7.0 (chr-ID scaffold0204 7; pos 1948889 to 1949536 reverse strand)
gccttgaggatttttgtgaaagtgatccttctacggtacaatgattaagccatttatctttattgattggtattgtaccttcttttttcttgatccaaaaaggaggggaaaaagaaagaaaatacccacttatgtccacagtgagaagattaattatgaaaattacattagtacaatggaatgatatttcttataattcttatgatgttttctcatgtaggttactgcttgcaagcatgagtttcacctccaatgcatccttgagtggtataatatgattgtttttcaatttttgagatgttgctttcttttaaatttgactgtttattgcatacactacacttgactagcaactcatcttacgtttagttgtgctgtttaatacagcatttttatttttctaggggttagaaatcttgtttcatgaattgaattgttgcagtcagattgtatttataaaatgtgttgtaagttaatgtgtgatgcacctggaactttgctacttatgagtgtctagaaaatgacaatctaattattgcgctgttgattacctgttattgttgataatattgcctattgggactgcgaaaaactgcacttgtgaaattgaattgctctttcaatatgcaggtgccagagaagctccca

SEQ ID NO: 64004 - DNA, 997 bp, Cucumis sativus
  Intron number 1 from transcript Cucsa.251980.1 (locus Cucs a.251980) derived from phytozome v7.0 (chr-ID scaffold0222 9; pos 1017125 to 1018121 reverse strand)
agttggttcgattatcttttggaactacgttcgtttgtttatctatgttgtttaattattcgatccattattatattttctcgatttcgtgcactttttatattttattagatagaattatgagttcactcttcgttcaactttgaaattgatgtattttggttcatctctatagacttttaaaagtgttagtaaggttttaaaatttttatttatgacatttgaaatatattaggtttttagatttcaatatttggtaagctcaaaaatcagaaaaaaaaataagaaaattgtatataacgtatatctttcaaattatccgtttggtaatcattttattttttgttcttggaatttgaattggtgttggttctcttaaactttttaaccatggcatgacttatattatcggaactaacctacttgaattctttattaattaattttcaacgatatatcttttttaaattaaaaactttagaacttaattagggtttgggtttttgaaaatactcataaaaaaataatagacaacaaaaaaaagactaaacaaggaaaccaatatgttgaagtagtgcttaaaaatttttaattaaaaaacttaacgttaccaaacgagactcgctcaaactttcaattttgtttctactggattatacgatgaatgaattttgtaattttttttaatcaaataggtcaataacttattagacttagataaaacaaaaaattcaagtaaaaactacccgacgcaactaaaaaataagttcacaaaggtctattgtatagcatatacaaaattaaaattgttaaaaaacacaaacctaaacattcaaagacgactaaacgtataatttaacgatttatttgtatttaaatcaacattattttgcatattgatgttatatttatttaattaatataacggccgtgttttgacgaataaaaacacactcgtatagacgggaaggcttgcgtggcgaaggacgtaatagaa

SEQ ID NO: 64005 - DNA, 702 bp, Cucumis sativus
  Intron number 2 from transcript Cucsa.178380.1 (locus Cucs a.178380) derived from phytozome v7.0 (chr-ID scaffold0122 7; pos 563232 to 563933 reverse strand)
gacgtgtgtttggttgacctaaataacgattctctgtaagatcttttactggtgtattgattttttgtggttctctgtttagtttcgatgccgcttttcagtttgatcgttctttgtacttgtgtgtttttctagtttagtttcaaattgggtttgaagtttgataactcgtgcgaacacgagtggtcttgttgttcttcgagtgttcctgaagttgaagaagtgattttaaattctgccattggaaatctgaggaattatattaagttttctatcttgcaagagattgcaaacgagtgaaggttaaattaaaggaaactaaaagtttgctctgtgcttttgaaactttgatttatcaatagtgaattaagttttgatgcggttaaattataaaatctatactcttgcttttaattttttacttatctattgaaatttatgatgtgatgttgttaaataagtagtttatttcaaaattctataaattctgctaatcatatcttgcacatgagctacaaaacccatcaatttcaaatacgagtttcacctcaaccatccttgagaactcgagtattcttagatttcagtttttggagtgtggttctaatgtaaactctagctgattactggatttcttttggttaaattttctgtttttaatgcacagggagaaacttgaagagcggattaagttgtgtgaca

SEQ ID NO: 64006 - DNA, 981 bp, Cucumis sativus
  Intron number 1 from transcript Cucsa.160840.1 (locus Cucs a.160840) derived from phytozome v7.0 (chr-ID scaffold0114 4; pos 912754 to 913734 reverse strand)
gtcgagcaggtctgtgtccgtcctctgtcttttcttctctacactaattgttctaagaaatggaaatatgttcgttcttgatcttaccggagatttagagtgaaatagtttgattttcttctatgtaatttgctttatatgactgcatcattgctgcgcggcaaaagattttgattactcaagctttcaattgaattgaggatgttgaaattaactttgtgtatagttcaaatgtttcagagttagccatcaaaacaatgttagctgtgattacatgcttcaatgatgtctatatttgaattacatggtgtatggtatcattgtgaatgtatatgttatggattgagctaaaagattctggtgaggttcatttgtaatcattcttgggcttctctatctacagtcgattgaagaatgaaaaaaccttgtttatttctcacctactctctttcactcactatgttgaagaagaggaaacggagcttttgatgtcttaaacttcgaatgaaaggaaatcatatgtgcctgctttatactgtttgattaaagctgcaaatattatcggatgggcaatcttactgttattgctacgaactgtatcttccgtaccgtttctcttgaatagtgcaaataattggtaggtgatgaaggagtttaaagaacaaactcacacacggattctttaaaaaataatataattggcaggttgtttcatggatagttgattttctatcataagctgctgaaaatgtttgcgtttcaagttttcctatcctaaaaatggttgtttggtggcatgatgttctttatactcctctttgcatgctcgatctgcaaacttctactgattagctcattagttcttgtaatctaactggagtgcactctgaagctttttcagtatttgatcctttaaattgtctggcgtttcatccaacaactcttactaatattctgtagataaagaaggagatttcaatc

SEQ ID NO: 64007 - DNA, 798 bp, Cucumis sativus
  Intron number 1 from transcript Cucsa.302830.1 (locus Cucs a.302830) derived from phytozome v7.0 (chr-ID scaffold0295 1; pos 906310 to 907107 reverse strand)
agggagaaccccctcttggggccttcttcaaatacgtatgtctcttcttttgctctgtttttctctttatttcaattactgttttgtattttgtgttttgtgtgttgctttgagtgtgcttctctatgggtttcattctgtatgcttcagaattttcaatacgtgaattttttatggagagtgtttcttcaatctccatgggtttgatcctgctctgtttcatcatagttttgtgtttggatttgagagcgattctctgtggtttgattctttatactccaaatttaagatttttgtctttccttttaatcagtggtctagaattagtgattatctagaacataagacatgaatttctggatttaagagtctttcatcaatctccatcggtttgattgattctgcctgttttttttttctttagtccatcttaactttgcgtttggttttttaatttagagtatttctatatgggtttgattctatatgctccatggttttcgagttttgttttgcccgtgtggtatgaaatttagtgatatctcgaacataagacatatgcatgaacttaatttcttaatctttctcccctttgcatattgttttaatttgtagatccataggaattgatgctaattgttatattactatctcaaacaaatactcaaaacgtctttcgatttgaatatgacaaattctatggattggatcctatacccttcaattgaactcgtttgcctaaagaaacttttttactctgcagattggtgaaattgggagctcttaagtggaacaagg

SEQ ID NO: 64008 - DNA, 898 bp, Cucumis sativus
  Intron number 2 from transcript Cucsa.258030.2 (locus Cucs a.258030) derived from phytozome v7.0 (chr-ID scaffold0222 9; pos 5142402 to 5143299)
tcttctatttctaaagcaaatcagatcagttcaaggtatacttcaagctggacccatttgaaaaaaagaaaaaaaaacaacttttttcatccaaaacaactcaagattcctacaaattttttcattaaagaaagtaaaaagcccaaacattgtcttatcttctaagtgaagtctctctttcaagccaaaattagctcatatgatataaaatgggaaagaaaaatgggaaatacagctaagatagactcctccaactcatttctttctttctatgtaatttgaggcattaactatggatggggaccaagttgcaaaaaataacttgccaatcaggacatctttctagtcgaaaaatgaagctgtgcctcagatctagacaacctgaacggtcctgttgttgtttttctaatctgcttattcaagtcctttgtttttctaatgtttaagggttgtgtcttaaatgctgacttctttattggacggctctggttagccaaattgctttccctttcattcacctaccatctttatttctagtaaaacttttatatggatagatagaagattagattacccatgtggcaactatacattactctagttttgtgttttttgcttgtctgttcattgtttccagcatagttttgtgttttctttgatcatacaatattctcgaagttcttaacatgtgcctatttgaattttcttattggcatttctttaaacctcaactacaggttttgtgtttgtattgtaactgttccaatgcctttcaatgcgaatatcatggtgttttgcctttccgtcctttgggtcattgcttaaactggactgatttgtctgaatttttcatgatagtttagctttgtactactcgaatcatttccaattggagagt

SEQ ID NO: 64009 - DNA, 1035 bp, Cucumis sativus
  Intron number 1 from transcript Cucsa.259160.2 (locus Cucs a.259160) derived from phytozome v7.0 (chr-ID scaffold0222 9; pos 5783089 to 5784123)
agtcttttgaaccactgttggaatcttgtttgcaggtaatattgcttaggttgttttcggtttgtttctttgtttgtttgtatctgtttgaagaagtgaaaattgaagttgtaatctaatatctctgctggtttctttttatactgtaacgaaggtgtaattcttcgcaatgtcttcttaactgagttgagatccaatttagttttgagaaaatatttttttgttttttgatgctatgaacgaagttccattgtgtcaacgttttgctttatgagtccataattatgtaacatgagctattcttgaattggcttcgttcattgaaatgattgattctttcatttgaattttagaggatggatgtttaaactgcgagtgttgcggatgttgtttattgatgagcgtttacaggatgagaaatatattcatttttttttctaaagattttttaagtacaagcatgagttgggatttgaacctgtgacttttttgttttcaatttcaaatcagttgagttaagctagtgattgacaataaatatagtttttgtctgacgctacagatacaactcattttgtaaatatattcttttctttaaataaaagaaacagtcgtatggtaggtggattctagcagggtatatcggactatcggaggattgctatgattatgaatgagtgtttttaatttttttagaaatattggcggtggaagttatgtactgaactaatttttaaaaattcagaaagaaagacatgggatggtggtgtaattctctacgttctactaaagggaatgcctgaagcacatttactacgttattatttttagtttttttttcttccctatttagcattcctctttttgcaaaggatttagccattttattagtaatcttactggttgtgtggacttttaatgtgtgttgtatatttttttttatacttcatcatgtctgtctatttttgaactaggtgattgaataattaatgttctgatttcaggtgaataatcaagcttacaagagctatacct

SEQ ID NO: 64010 - DNA, 445 bp, Cucumis sativus
  Intron number 1 from transcript Cucsa.254280.5 (locus Cucs a.254280) derived from phytozome v7.0 (chr-ID scaffold0222 9; pos 2659862 to 2660306 reverse strand)
ttcaagtctgtgctcctgattcgtacgcctcttctctcttttcctcttttcgatttcttctctttccaatttccgagtatctgtgtgataggaatagttggtgaaattttgttcgctcgtcttttgtgtttggtgctaatttcttttgattgttagtgcatttctggttcttgtttttctattttgcaagtggttgttctaacttctttcgaatgttgatggccgttggatcgtgtgaattgagatataaggaactgttttttcggctgttcttacttttcaatcaatatgataggattgggttatagatcataagatattagctaaaccaactagcttcggtttgttttgtttaattatacatgaatttctatatatttgatagtggaggttgagtttgcatcatacagggaaaagtcagctgttagccagtctattacttggc

SEQ ID NO: 64011 - DNA, 841 bp, Cucumis sativus
  Intron number 1 from transcript Cucsa.252790.1 (locus Cucs a.252790) derived from phytozome v7.0 (chr-ID scaffold0222 9; pos 1654936 to 1655776 reverse strand)
ctgctagtaagtacgtttctttttatctgggttttttttcttcttcttcttttctcattctatatactactactactcgattcttttgttctacgaatctttcaaccccatatgctattttctgttgatttctgaacaaacccttttcgtttttctttttttttttgtttattgtgtgtgtgtgtgtgttgttttttttttttgtgggttcttactcttgtttttcaatgtcttccagcatcatcagtttacctcgggttctttctttttgctctgttatctatgtttttctttacagatggtccagaaaccctttttgacttttcgtgatttgtattctcccttctcttccgctattaccctttttccccttctctctctctctttctctcctctccttgaacatttccttgatgttgattttctggcaggtttcaatttctagatttgatatccttctgcattttgttactttcacgttattgatttctctaattgttgattctatctctctttgatctgcttttcttcttgtgggattagtttcatattcatgtaggtgttttgatttgcaagtggttatgtcaatcactttatttttttcatttattctcgaacttgaatctgcaattgtggggatttgcaaagtttttgtttttcaatgtagttatggttctaggtgtatttggcttcctttctttgttgtctatctcttgtagttggttgatttaatcaattcacggtgttgcccctaagtttctttcttttggttttttttttttttttctttttttttttttttttctgtaggtggcattgcttttgtttctacaattgagca

SEQ ID NO: 64012 - DNA, 837 bp, Cucumis sativus
  Intron number 4 from transcript Cucsa.164320.1 (locus Cucs a.164320) derived from phytozome v7.0 (chr-ID scaffold0114 8; pos 169778 to 170614 reverse strand)
gcaaaaacaaattcttttcttaaggttggttctcttgacgtatttgtttatattgagtattctcctaaatggtttgttttttagatcttctatattgtattttggttgtcaatacgtatacagaaatcatgtgggtgaaagtaggttattagttgttaaaaaaattaatgtttgaattttcatatttatttcaatgttttcttttccttaaaaaaaattaaataaaaggaaccgagccattcattgatgtaaatcctagagatcaaacctagagatcagtacaatggtaagaaacagcaaataaatcctagagatcaataagtgcagccagactagacatatcaattaagttcacacctcttttgcactctcatcgtatccaaagcaaactaaggcaatacacggcctacaatgtttcaccaccacaaaatacaaccacgctcagatacacagcaaaaacagtttgacaccaaaaaggaacaaactaaacatataagtcgcaccatcagaatatacaaagtagataagggaaagcttaagttggaaaaataaaagcccgctaatttaaacataaatcttgggtggagaagtcttcaaatggcttggataaagtgcaccaagaggagacattcatccttgccgcttcaaatcattccatctatccaagttccttaccatgaaactgttggagaagttgagagtcccacattggaaaaaccaagatgactcatactctatataagatagatggaccactcctctcattctcaattggttttgttctcaattggttttgagatagaaccccatactatcaaatttaaccgaaacaacctt

SEQ ID NO: 64013 - DNA, 127 bp, Cucumis sativus
  Intron number 3 from transcript Cucsa.164320.1 (locus Cucs a.164320) derived from phytozome v7.0 (chr-ID scaffold0114 8; pos 170695 to 170821 reverse strand)
ttacatttttctttttggaccatactgtggctcaggtagaagaaaaatcaccttctcaaccgtgtataaaaacaaattgtatcaaccatcattatatatcaaaatattgtctcattttctgtgcaga

SEQ ID NO: 64014 - DNA, 252 bp, Cucumis sativus
  Intron number 2 from transcript Cucsa.164320.1 (locus Cucs a.164320) derived from phytozome v7.0 (chr-ID scaffold0114 8; pos 170913 to 171164 reverse strand)
tacttgtttagcatttgtactcttttacatctttggtacatccattctcttctaattattcattttccagacttttgattattataagtttttattattccagtaagtttgttacatgattttgcatctctttctcacgcttgctttttcttcaaaattgatgtcagttacttcaattaacttttgtggagggctttgggatcttatatttattcttctcacattttcttatttgaaaaaatgtgttcaggt

SEQ ID NO: 64015 - DNA, 924 bp, Cucumis sativus
  Intron number 1 from transcript Cucsa.228290.1 (locus Cucs a.228290) derived from phytozome v7.0 (chr-ID scaffold0193 3; pos 230066 to 230989)
cactgattttggcctctctgtcttctacaagccaggttctctttcccttttcttctgcaaatctcattctctttctttgccttttggatgtttctcaatgttctttgttgctgttttggttgccatcttgggctttggaaactgatccttttggtgcttgatatatgagattagtattctaggttcatgtcattaatctgtcctaaattgcccaactaaaagaaatcagtagccattgccaagatagaggtctcttgtttctgccattgtcttatttatcatgcacaggctgatattctctgcttacaacttggtttatgcctgaagaatcctaattcctttatgaaagaaagatttgcatcaagctgaagaagtataaagtttgcatcaaactgaagaagtaccttatttcatccaagttctcttattgttcagcaatcagcattatgctggatcggtctttaacattaaatatgctgtctggatacaatcaaatagaatcaacccagcaaagtaaaaggtctttagaaattataattgaaccaagggaaaactaaatggattgtatcttgaatttatgctagatgctgcctacacaccatgtaattagaacatgcttgtgctaagctactactcaatctattgtggatagaagacttctaaaatttgaatcttaatgtcctttcttcatttattttcagacgattacatattctgtggttcctttccatgtaacaagaaagatagtcactaaagtaacaatcaagagattcaagactacccagtgaattgagttctcacctcgttgattaattagtgttgagttagttatagtctcctttatatttttaagaacttcttataatcttagattttaaaatgttaacaggggagactttttctgacgttgtcggtagtccgtac

SEQ ID NO: 64016 - DNA, 728 bp, Cucumis sativus
  Intron number 2 from transcript Cucsa.163680.1 (locus Cucs a.163680) derived from phytozome v7.0 (chr-ID scaffold0114 6; pos 114340 to 115067)
atcatcttcatccagaccccaacctcgctcaactggtgatttccctcactcttttgtgtgctctaaatgctttttctttcatatgcttgtactctaatttcgtttattttgggaatttgaatatgttctttcatgacgtctctaatgtagttttgatcaagaatttcaatttcatggatatttttattagtaccctttacatgttagactaaatatacgatatttggagatagccatagatattttatgtcaatttcgaactcttcaatttatgaatttatggatattttcatccttggattttttattagtatactttgaatcttcatgtgtactaaagtttgaaatatgcagcacctgacctgaactttacaatttgcactatatgttgtcggtctattttctttaggatgtttagggtatttggtttaactttgcaagggtttaagtttgaaaattaatcaatttgggaatatgtttagtgtttgtcatcactcaaaatagtttttgaaacactttcaacgtgtattttaatctgtttttctcaaaagagttcaaataaaaataactttgttgaaataaaaataactttgttgaaataaaaataactttgttgaaataattttttttttctagacaatttaaacatgtcattagtttaatactccttgtgttgtcttcttgttcttgcagaagtcgtttgtgatttgtgtcctaaagagaaagtt

SEQ ID NO: 64017 - DNA, 834 bp, Cucumis sativus
  Intron number 1 from transcript Cucsa.142220.2 (locus Cucs a.142220) derived from phytozome v7.0 (chr-ID scaffold0107 9; pos 515469 to 516302)
accctaaaacccctcggcgcctccgccgttttcttgtaagattccctctctcttttcattctcttggacttccttatccttttacttttctgggtcatgcttaaatttctatttgggttttgtttttgcttgctgattcactcttctgtattgtgttttgagcttttttacggttttggctttctgggtttcagttgttggtgtagacttttgtattaattgattcgtttgttttgtgtcctttcatttctaggttttgatttatttaatattttctacatgggttttggattttgggtcttctgcttgtttgcatctctgtagcttgctgattcatttgtatctcgtgtttatctatttgtttgagtttctgacatgtggatttttgttgttgtttgagaattatgtgtcaaatgtcaattgtcgattcctatgttgttgaatttggttatgtcatttcgttttcggattttctctattttaatcttcctacatggattttggattttcttacttgttgtgtgtagttttagctgattttcgtttatgcttactgatttgattctgcattttcgatgattttcttacctggttttctgtgtcgtttgagaattgtgtgtcaattcctttgttgttgattttgtttgtcatttctggtttgacaatccatcaaatcctctcttaagtatactttattttcaattcatgaatttccatcacatgcattgtcggccccctgctctttttggttaaaattcttgttgtgaagttgtcacagtttgaactaattgatggtgtggtgattactttatgtaccagtttgaaagagggtaa

SEQ ID NO: 64018 - DNA, 807 bp, Cucumis sativus
  Intron number 2 from transcript Cucsa.185930.3 (locus Cucs a.185930) derived from phytozome v7.0 (chr-ID scaffold0127 4; pos 1339865 to 1340671 reverse strand)
tggaactccatcatcagctggaagtgctggaatccgtatgttaattttgctaactatactcttcagttgttgaatttattttcggagagtggttatggggtgtgcgttacatcgtgaaagcttccatttcttcttggtgctgatggcgttggtgggagttactgcctctttttaatgttcggttaaaaccctagtttcacttgacccaatcagatataatgtattaatgtatccataggagtttatcgtttgcaacactcttctacttgaattgctttcttctgaaacctgaatgatgtgtttcttgccaagttgctattataccagtcaattgggaagttaaaccctactgttttattgaggacgtagggttgctgattatatttgaatttcagatccgtttttcctgcaatttcgttgttgatgtacaaaacagtttgtattgctctgaagttgtttcttttcatctatggcctacgttttgttgtatatgtctgtgatagatactttaatctagtggaactagaggtgcaagttttctaattctgcttgcaaagtattcaaaaattgtggcagagtacaactcaagatgtttaaactctttttttggtatcataaattatgtcagcaaagcagacaactttaatatcacttcagttttgtgagctgcagtttgatctcatgggagctaatagaacaactctgcatatggtttttgatccagaagtttgtatttttatttttaatgctgtaaactatgcttattttgtagttcctttgttgcagggcttgcaggtgccactgctg

SEQ ID NO: 64019 - DNA, 484 bp, Cucumis sativus
  Intron number 2 from transcript Cucsa.142100.2 (locus Cucs a.142100) derived from phytozome v7.0 (chr-ID scaffold0107 9; pos 412264 to 412747)
ggataggatacgattgattttactcatttggtaatgtgagctgtgtttgtgtttgtttgtatttttctttctcctctttttgtacgttttttttatttttcgaggataaagtggagtaggagacgaatcgtttattaagttttcaggagttttgtttttcgtttgcttaattgtgggaaaaagtggtccggttgctatgcatgtatatgtgtttgaaggggggagtgcatgtggaagatagcgtgttgaatgttgtgcatacttttgaatcggaatgaaaatgacttttggtaaagtattgcaaagtaaatttaaacgtgcaatggcattaattgtaagagaatcttgataaagaagatgaaaaggaatttatgaggtttttgataagctgctatttttgagctttacttggtagcagttcattagtattggtggaatgtatatgaaagtgatgattgttgtttgattatgcctactgtagttg

SEQ ID NO: 64020 - DNA, 466 bp, Cucumis sativus
  Intron number 5 from transcript Cucsa.142100.2 (locus Cucs a.142100) derived from phytozome v7.0 (chr-ID scaffold0107 9; pos 413471 to 413936)
gattaggacagagtatgcttcatttctggaatacttttttaacgtttgatttgtgatattttcctgtctagtcaattcaattgaaatatacttaggggtgaagaggggagggggtttgtgattttgagtaggccgagccaataaatttaacttaattcatatatctaggctttgttatcagtgaaatttgtcttatagaaaccacaagaatctatctatgcttcaaattctcttcaataatttgattctgtattagagtggtcatcaaccaaaactcaatttgtttctgcattttatgtcttcttcttgcccacttcaaatcttttaaattgagtttgattttttcccttttacatgcaaaacatggagacagttgaatgctctgttataataaataatgataatatcccaaaaaatggttatctgtgcaggatatttgagccttggaatttccactcctttcctg

SEQ ID NO: 64021 - DNA, 970 bp, Cucumis sativus
  Intron number 2 from transcript Cucsa.193080.1 (locus Cucs a.193080) derived from phytozome v7.0 (chr-ID scaffold0133 5; pos 90156 to 91125 reverse strand)
gcggtagtcaaaccagaggtacattgctttatgaatggcttaaatactatttctaacaattatactttaagctttgattcattttggttcttgttctttgaaagtgtctattttggttcttgtacttttaaaaagtgtttttttttttccaattgaaattctagcacgcggctccattccctaaattttttaaaatgtagccttaaatttgtattgttaagaatagggtttctattttgtgtaaaatttagggatcaaaatggtactttttagaagtacaaagtccaaattagacattttgaaagtataagaccaaaaagaacaaaagttaaaacatgttgatagtatgagattccatcttaaaactaatcggcaatgagaggagtggtcatctatcttaaaaggagtgtgagtccccttggttttttcaatgtgggattctcaacgtctctacatggcctcctcgagatggtgcctctttgggttcaccaatcttgatcaaatctcattttcattttattggactgaatacccatttgagctcatgggctctgatatcatgtgaaagttagagcaaaatatgagagaactcccttatttcattctatacaatagagttcaatatatgcaggcataaatactataacaaaaattacaggcactgaatgaacgaaaaacaaagtacatggactaaagtaggattttaatctttataaatttataccaagttcaaagaactatcttttggctttaggccaaggcgcaaaattttccctggacttttttttttacctcacccacaccctttgcatgatatatctaatggatttagaagatcattttatgagttttatgattagggtacagttgggaatagttataggaaaattcaacacttctcgaagttgctgcatcaaaaccacttcattatttgttgcttgattctcttgtggaatgttgattttgccag

SEQ ID NO: 64022 - DNA, 847 bp, Cucumis sativus
  Intron number 2 from transcript Cucsa.175960.1 (locus Cucs a.175960) derived from phytozome v7.0 (chr-ID scaffold0122 5; pos 398135 to 398981)
attggaaataccttcttggtggacttgtttttcaggtatttctttcaatctctatttctttgaatcatctttgcattaaagcatttttacttttttctatctatttctcccttcttttaaaaaatgttggtcggcttgtttgtgggcccttctccactcatcttcttcctaatggaaacattattctctaatgttaatcttaaaagaatttcgaggaaaatcagatcctttatattgttacgaatttttgaacaggtagcctttgtttacccaccacccactctctttttaaatttgaattggttttggtactttgatgaatctatatgatttgttttcttatgcaaccaaacatttggaaccggtaaagtttgaacacgtaatttgtcccaccttttttaaattgaataaagtttcatatctaatatttgcatccagtaaatccaaagtagaggtgacgactgaacttttattttctcttggaaatggaacttttttttatgaatggctgaagtatgatatataattctacattttttttggactcttgaaaattttatggtacttagcatctttaattttctgtcgggaggttaaattatgtttttatacattgtccagaaatttaggaaatgtccattcagccatgtttggtctagctaactggtttatgcagtttcttggttttatcttctccttcttatgacttgagaaatacattattctaattctaggaacttaaatacctaacatgattctaagtcttctatcctagtcttttgtcattttgtcttcttttatatgcctaagcctaatgtatagcttttttcttctcctcagtacatac

SEQ ID NO: 64023 - DNA, 1012 bp, Cucumis sativus
  Intron number 2 from transcript Cucsa.308780.1 (locus Cucs a.308780) derived from phytozome v7.0 (chr-ID scaffold0297 8; pos 762721 to 763732 reverse strand)
atttaaaagctgtaagttcttcaattctcatgggggatttctttgttgtattgaaaaattgtttttggacttctctcaataaccagttgtagtgtatgattcttttatttaatctctcattacttttagtgtttgattccatttgtttgttcattttgagatatgatctaattatccaactactggcactgccattaagttaatgctcattataaaaatacaaatgtgtaaagttgtgtcgtgattgtttgaattcatgaatagttgtttcgaaagtaatgtgtttctgggaaaatgacaatatgtgcgtttagtacgggagttttcgaaacatcccttttttgtctccaagtttttaaaataggttcattttgttccctaagttttagatttaaatgtccatgcagtaaccttttttacttttaaattagaaaaacaattcctcaacattttctaaccattgttcattaagtttaaattttaatgtatttattggggttatgtgagattttaaggtacataagttctactttctaattctaagatatgctccttataaattttaccctgctttaacttcctctggaattttaataacaggaaatagctaattggttgaagtatggtttttggcatctcgtgtcgaaaagatgaagaaaccccacagtcttaacaaaaattgattcttagagctgaatttttatatatccctctacctttggtaccccagcaaaagttacacccatgatttttggagtgattaaacttttctttctttctttcatatttggttgattttcaaatgattttttctcattagagataaagatagagattacacctaattttttcatacaattgagatcatatatcaaccttgaagaaatatatttcattcatgtgtattgtcatttaatcacaattcttttgcagctggatttgtcagtttggacaaaacttttctttggccctgacatattttgtactcatcacaggaggaagagacaacatc

SEQ ID NO: 64024 - DNA, 391 bp, Cucumis sativus
  Intron number 2 from transcript Cucsa.138700.1 (locus Cucs a.138700) derived from phytozome v7.0 (chr-ID scaffold0106 6; pos 18168 to 18558)
ataatacaggtattacaaggcttactttcttgctaatgagacagtatggtggaagtttttgggttttttcttcttttttttgtcatttcccaattatttttagatttcttatttatttactgaagttctgctttcagcaagttagtttcaagtctgaagaaggggtggaggaatgccctttataaacctgccttttgatatcgatcttacaatgtgcacgagttctttcttttatgaatttccagaattattatctttgattgaacggaactacggaagtagtctcgcctctgatttaaacgtaaactattgaggcttttgagtcaagtgaatggccattagttcattacagggcgtgtatttgtttgtgcaggggtgaagaattcaaaag

SEQ ID NO: 64025 - DNA, 722 bp, Cucumis sativus
  Intron number 1 from transcript Cucsa.148560.1 (locus Cucs a.148560) derived from phytozome v7.0 (chr-ID scaffold0110 7; pos 628137 to 628858 reverse strand)
cccttttgcccaccatctaccaacccaaagggagagtccacctttttttttcttcttcttcttctttttctccttcttgttgctgacctggatcttacagattttgtcagtttgtaaataagtgttaataacaacagagagaagattctttcagtaacttttcatggaaaaaaacacagattggatttcacactgcataccagatactgtttatctaagtttttaccttgaaaagacatatgataattactaacacaacagagtacactgttcatgggtaccattcattttcgtgtatagtttaacaatttcgtccttatatttgaattgggtttgttttttgaattcttatatttcaaatctaaccatacatgttttagttttctctcgcaaagttacaaaaaccacctttgatatggctaagttgtcacaatcacaatttcttcccctcttgtttatttaatacttagaaatttttacgtcaattgagctacattcattcataaaaatcttaacctgcttatcagaattttctatcaaaacatttaaatattaaataggacaaagttcagaaattatattttagaaaattgtaacattcaaaagtctccacaaaatgattgtttctgttttttcttttttttaatattaccattaaataattgttccaagttcattaacccaatttttcattttggttcaggcacttcaagacaaattga

SEQ ID NO: 64026 - DNA, 391 bp, Cucumis sativus
  Intron number 1 from transcript Cucsa.255380.2 (locus Cucs a.255380) derived from phytozome v7.0 (chr-ID scaffold0222 9; pos 3398658 to 3399048 reverse strand)
cgtttccagaagaatttccgcggaacaagtcctcagtgagtatatagctatttcccttcaattatctctaaatatttcccttttcgccgtcttttatcaatcttccactgaacaccattcttcttcatctcgaaaaatcaaaccctcttcaaaaaaaaaaaaaaacaacgaaacccctaatttgtgccctgaaacagaattaattcctttaaaccaccccaaatctttgagatcttatcaatgtattcgattcaaatacactacgcaaacaaatccaagccttaatttagtttgatttgatatatatatatatataatattatgtagcattatattattttcttccgcttagtaattcttccgttttttgtttggcggaatcaggacatcc

SEQ ID NO: 64027 - DNA, 879 bp, Cucumis sativus
  Intron number 3 from transcript Cucsa.182090.2 (locus Cucs a.182090) derived from phytozome v7.0 (chr-ID scaffold0125 1; pos 215834 to 216712)
ctggtatttaagatttttctttcgttttttagctcaacattatttttaatctaatctacttagatatgagaaggtgattctactggtaaatctctttaggtgtttttgtgatcaagtcaaaaattagattttatcttcctaaggtagacctaggttgagaggcactaaaactttcatctcttgccctatttgatgagagaacagatgaatggatggttgtacaaattagttagcagggaccttggtggtctgaccacgcaaaatttagttatgtacatcaagaatatagttccttattacttacagataacagaccaactcttctcccttgtaccaataagaatttttagataacaaacttcccactatattaatggtttcatcttttgggatttgttcaaccattgacttctttataatggtatgcttttctagtttttgtctcattaagcatgatggttacttagttcagaagttcatgttcttattcgtagtactaataggtgttaaggagacagtctcaataactaactaagagatcatgggttcaatcccatggtggccgcctacctagaattaatttcctatgagttaccttactcaaatgttgtaagggtagaaaagttgtctcgtgagattagtcaaggtgtacataagctagcccagacactcacggatataaaaataaagtactaatctttcttccatttaagacatcttattcatttcaaagaaaattagacaaaaactataatttcctcctaatattttaagaaatcttatcttgtcttcgacaatattgtcaaaaagctttaagtttgagctaatgggtaaatctatctgatgcagatacattttcaaaacctatctctagctctg

SEQ ID NO: 64028 - DNA, 937 bp, Cucumis sativus
  Intron number 3 from transcript Cucsa.256110.1 (locus Cucs a.256110) derived from phytozome v7.0 (chr-ID scaffold0222 9; pos 3794219 to 3795155)
ccttccaattgtttacaggtaggccttcccgacgatttcttgcatcttcagtgtaatgattatttatggaaattcaataacttctggataatggctttaacttggaatggtgcaatattgctaacagtagagttttagaagatggggattctgggttcattccaagaaggctataaagtccattggtattatttgtatatgctggatctgcacttctagttttgtaaatggtggggactctgatgttgggaagctgtctagatgtagtacatataactctattaatctttgccaaattgaaaactctgacttgttaaagtataggtccaaccatgaggttaagggttcaaatctcccacatcacgtttcacccctacctgttgaacttatcgttcttcaatcgacagattgagctagctcaactactcaagatatatgttctcaactaagagcttataggttcaaatttcccacccattgaactcaatttgaaattgtttgtcattcctaacttaaaaatgttgattaacttgacgtggaaatggcatccttgtatgtttctctttccattttgatgctgtgtctcaatatctcaattagtattatatgtctttcgattagaatgtggatgagagagagatgaacttgtggtgatagtctatattttcatttgatagccaaaggagttttttgggcaattgtctatgttctcatatcatgttatccaattctaagataatgaatccaacacgaatgttgatgttcagttaagcatgttggtttgaactataatgctccctaaaattaaacccttctatctcatgatcttgatcgtattcaacaaaacaaatatttgaactgacactggagatctcccccaccaccatttttttttcctgcaggttcatctctttctattctgagtcgaaacgtcgtc

SEQ ID NO: 64029 - DNA, 893 bp, Cucumis sativus
  Intron number 1 from transcript Cucsa.136810.1 (locus Cucs a.136810) derived from phytozome v7.0 (chr-ID scaffold0104 4; pos 1404663 to 1405555)
gagtcctccgcttcgcttcgatcctttcactgtaagtctttttctctcttatcactcgccttctatccaattttccattcatttcatttctcttgttgcgttgagcaatggcgtaaaaattgtagcctttcctgaccgtcgcgttgttgttgttttttttcccctcgttttctgtagtgttaatttgatagccgatgttatccttgatgttgattgaagaattctttgaattgtgagtttaatttcgtaatgttgaatgatgagtgagctgagcttcacctactgtgaattttcgtttcggaaaatggaatttagtgtagcatttccggatctattgtgtgatttagttatatgttgagctacgataatcgacggcgtaggattttgttcactcgatgtgtgtgattaattcttcgtgttctgaaacaattttttaaagaggttttcgtttgttgaattcattttagtttaggtagcctcggtatggtagcagcctagcaggcagcttaccttatttagcaaattagttttgtggacttaaagataatgtttactctcggccttggataattgagaatgaaagatttgaaagaaaaggttctctatcatgttttaatgaggttcttgaaattctaaacattttcgtggttcttgataaaatgtttttaagaaagaaacggacgatgattgctgctttcattttagttgtcaccaccatttgttgccgggatatatgacctaaagacaagatgcaccgtttctttgaaattacatcagacctttattctctcttcattagaaattagttgaaggaattgctcactacaagaacctaaagtttgtatattattctgtgattccagattttgcaggtggttcacgtctgcagttaa

SEQ ID NO: 64030 - DNA, 915 bp, Cucumis sativus
  Intron number 1 from transcript Cucsa.192640.1 (locus Cucs a.192640) derived from phytozome v7.0 (chr-ID scaffold0133 3; pos 509100 to 510014 reverse strand)
ttatcaattattctaagcttcgtatttgggaggtttgtttccttttcttttttatatttctctttttgtatgcgtttcatttttttttttatcttcttgtttttacccaaaataatagtcatgtttataatcttaaatttacaagatttaattaatttttaataagattagaattttaattttgtttcatttaattttagtgcatgcttgatcgtacgggaatgtgtcaaaatcttaatttttctgtgcaatatgtgaaaattttaaaagttcatctgtgacaaaaggaaatttaggatattaagagtttagtaatattattttcaagaattctaaatgttaaaaaatggtgataaacttcaatgatatagtctatttaatttactcttacaggttgatctaaattttggtatatttatatttatgaattcatatatttgtaaagctccaaatttttatatggtgaaattagtctttagaataaaggtggagggatttatgaaccactccaaatttaaatagaggggcctatcacaatattttcttataattaagcagtttttcttgtatgtttgagtgtttagattcactcacgagcactcttgattaacatttggatttggatgtcaaagtcaggtcaatctgtctcttgatttaagttttattttaaataaagattattttaattacacaagctcttaaaagttagaagaatcttcaaataattataaagccagattcttcaaataattataaagccaaagaaacgaagtttgaaaaagtgtttccctaggaatcaaaaagcacttaatatcctttacttgtttttgcatcatgtatattatatagtttgtcgttttgtcttaaactaaacgcggtcgttttaatccaaaacagttcgtggaatacaataaa

SEQ ID NO: 64031 - DNA, 739 bp, Cucumis sativus
  Intron number 2 from transcript Cucsa.158290.2 (locus Cucs a.158290) derived from phytozome v7.0 (chr-ID scaffold0114 2; pos 410243 to 410981 reverse strand)
tgtttctccccatagctttggttggctttcagaaggtattttcagtccttattcttatagagtgaattttactttttcctatcttctttttatcctgccactacgaattctgatttcttttgttcaacattggatagatgcattcttggtcctacaatcgaattagtagtttctacagtgaattttaccttcttttttttttttctttctttctttctttctttctttctttctttattcaatgttcttgttctgctgacactatgaagtttctgatttctttcgttcaagaatttggatagctccattcttaatcttactaccgtgagttttaacttcttcaatgttcttgttagctggcactatgaaactttctaatttcttttgttcatgattgaatttgaactttttcaatgttcttgttacttaccgcgcttctataatataaatgctctttttgcttgattgaacaagcatcttatccgtccttttttttttcgtttttttcgtatcaatggattgcaattttgagttcatcttcctaagataaatattaaatgctgcattctgtactagggtctaacttttaagctaaagaagtaacgaaaccctcccctccaactctaacttgtaatttagttctttataagtgatgcttgtatgttcaaatcacgactatttcatccacataattgatataaacgcgaggatactaattgtgatgtttaatcagtgttca

SEQ ID NO: 64032 - DNA, 908 bp, Cucumis sativus
  Intron number 4 from transcript Cucsa.170390.1 (locus Cucs a.170390) derived from phytozome v7.0 (chr-ID scaffold0117 6; pos 27677 to 28584 reverse strand)
gttgctactttggtcgacggaaggtaagtcttggtactaccaatatattaatctaaagttgtcaatccttctaacagaaattattccaatatataccttgtggatgttattgatcttgctggatctgtgcaataccctggccttaagttctgcagagaaggttaaaccagatccatgctattacttgcaaccttagctgttcctaaacagcagcgtagattcatttgaagaagatttattaacaaggagaatatttaaatactaatgacttgaagggagaagatttccttggctgaataaactttaaatattgaaaatggaaagggggtgggtggaatggagctatttcaagaatcatgccacaggaatgaaatgaaaagtacagagtaataggaagaatagatcaaaaagaacattcccattgtattagtatgatttaggctgaaccatgctcattctttcagtaaaagtgatttttgatccatccagtatatgagtcaacttattgtgcaacaatccatttcctgttttgttaatttatgtattattttttaatttgtttatacttttttcattgcaattgtcttgtaaatcaaaatatttcatagaacaggaactgcctcttgcatgcttttaattctttagtttataactacattaactgagattggcatcacactaactggacatcaaatgataaggttctagagacaatacgaggggccccttaatatagggttgcttcctttcgtgggatttatttatttttatggataccctcgtatttttctcattgaaatttggacttttaccaaaaggttctagagatgatagttgctctatattattttgttttttacttttcaatcgcacaatgcagttgagcccgaaagaaatcaaagagatat

SEQ ID NO: 64033 - DNA, 679 bp, Cucumis sativus
  Intron number 2 from transcript Cucsa.161920.1 (locus Cucs a.161920) derived from phytozome v7.0 (chr-ID scaffold0114 4; pos 1696927 to 1697605 reverse strand)
gatcctctgccattgttcttgctgataagaggtatggtgttcattcgttcgttttgtgggtttgatacacaaaagcttgatgagattgaataataaattgctgaagtcattgagatttcctttttattctattattataatcagaaattctcaaataccattcttttggtatttagttttttgataattgcttgtatgctaaatttttttgcatattgctgctcttttcctttttttttttaattggaaggcactgctcgtctttcataaatgatatgtaagatgatgtaatttatttcttgagaaataataatgactgtaccacgtaagaatggagtgtgaatgtgaagcacagcatttctattcgcttaatggaaaatgtggaactgggaaggagactggagcaaaaccatatttgggtagtgacaagaaagtggccttttagcatctagtttcatggatctgtgtcttcttccttcatggtttaatgcaaatttattttccttgtgaggtcaaactaattttagtacttgctatatttctgttgactctgatcttttatcatatttatagtttatgaccagtgctgcgttcttattctgtgcacgaagtgattgtctaaatggtgtcccttgattgaacagggtatcagatacacagactcaccaaattgctgcaa

SEQ ID NO: 64034 - DNA, 888 bp, Cucumis sativus
  Intron number 1 from transcript Cucsa.258980.3 (locus Cucs a.258980) derived from phytozome v7.0 (chr-ID scaffold0222 9; pos 5693112 to 5693999 reverse strand)
tctccatccatcaacccattcttcatctgacaaaggtaaaggtaattctttccttttcatcattctgtattctgtctctgtctcttttttctccgcttcatttattgcctgtttgcttttcttttcttttttttctttttttgttgttgttgttgtagaattcaactgcttaaatttctcaaatggggtttgcttgatttacatttttgttttttctttcacatgcttcttgtttggggtaatctgggtttctcagacccttaatgaatctgggttgtttttttttttttacttctgtttgtaattttaccttggggtcctataactctgtaacgcttccgagtacatcagagcagtttgggggcagcaatgaagaggcccccagagcttttctggctatgatggcccacattttgagaaaataaccttgcataagatgacccagaatttctgatgcttataataaaatagttggagataagataatctcagcttttgaaagatagctggttaaatctgagtaaggcttcttttaggccacaagtacttgtaaatatcgtaaaggacaaaagagctaaactgagatagatgccatgggagaaggcaaaatcattaacctgatgttttgttatgtgattttagtgtttgaggttgtgatcctatctgggttatatgcaaaatagaaaatgactatcgttttttaccctgtatttgtatatgaatttacctttgtcctctagtatggcttttgtgacgattctggagtgcgaaggatttgtcactaactctgacatttgacattggttctttttttcttttttcttttttcttttttttttttggctgattctagttataatcaagctgcgaattcaacgattacaggat

SEQ ID NO: 64035 - DNA, 880 bp, Cucumis sativus
  Intron number 2 from transcript Cucsa.250310.1 (locus Cucs a.250310) derived from phytozome v7.0 (chr-ID scaffold0221 9; pos 467164 to 468043 reverse strand)
ggacagaaagtggtaaaaaacacacaacatcccaggtaaatatatgtttttcttttacaatttattgtttttttttcaatcaatctttggatttggatttggattggatttcagtacaaaaatttctctctctctctctgtctctctctcacgcgtaaatatatttgagatttgattctttttttttttctctttctataagattcaaaattttgatgttttggtcatcattatttctgagatggggggcagaaagaagtaattataggctttcaaatacatcaaaaagagaaaggagatcatatatcaaaactaaacaagtaatcatgaacctcattcatctttaattttcttttccttaacatatattcatatatatgaatatcaatgtgaaatcttcatatgaagaaaaagagagaaaatgtagatatatgtagcacaaaagatggacatacacaaatttataatacaatgtgtaaataacttctataaatagagaaagaaatcaatttattaggaacgcacccctctcaacctaaaactaaattctctctttttttagtacaataattgggtggggattgatctctaacttttgaggatgatgttcatgggaataggataaagtcaaactcactttaacaattctaaagcaaaaaatttataacaaacatacatgtgtatgcagcctagttggaatagattgaaagcgcaccttgtgtcatttagtatgctagataacggattcacaacattcctagttataataaacataatgcatatatgtaattacttataataacaacgcaagtttatttatttatgtattttcttcatgaatgcagaagttattatcgttgtacacaagatcattgtaggg

SEQ ID NO: 64036 - DNA, 912 bp, Cucumis sativus
  Intron number 1 from transcript Cucsa.157960.2 (locus Cucs a.157960) derived from phytozome v7.0 (chr-ID scaffold0114 2; pos 149517 to 150428)
gtttgtgttttttgagctttgaggtgaatttacgggggaaaattaattaaatttagaagtaaagtataaatcttgcaatgtttttaggtaatgggtaatgtgtatttttgttagaaagtttgaattgtggcgttttctacttcctcggagctgtttaaaatacgcgtaaatattacgattgggtaatcgattttaatttttgggaatatcaagaaatcaacttttaagaaatggagtcattgaccccagatttagaagactttgaaaactccggaggagcctcgtctctgagttcttctttgatctcttcaactggtttttgtattattattattcatagagcttttgttttttcttcactttcaacctctgaatcaaggtttgtgggaaaaaagacaagtacccagatcaatttttcagccgagttcatagcggttaaggttaatcaatttctatggggtgttttcttttcttttgtttttattttagttttgaggatcgatttctttttgcgattctgaaactacccatatcttgaaatcaggaagtgttttagccgagcctgagtcgttgctctttagctttaacagtgttcgtaattctttttcttttcttgcttgttgtgtcttagaaatagaaaggaattctttgagtgaatttgtttgttggaatatatctagtcttttggaagacgcaactgattgattgcttttgtcgctatttttctcttccttctagatataagattgaaatctaaagttcgttttgtttttcgatatgcagctgcttcatacttctgattgttgcatcttcttttatgatttacaacttacaatgaaattgacttttgttttctgggtttctctcttttttgcagaatctcccttgtgagagtctgaggggaaaaaaatt

SEQ ID NO: 64037 - DNA, 771 bp, Cucumis sativus
  Intron number 4 from transcript Cucsa.257530.1 (locus Cucs a.257530) derived from phytozome v7.0 (chr-ID scaffold0222 9; pos 4791804 to 4792574)
gcactgctcatttctggtaaaaatttgtattcttattttccttcccctgcattcttccttcatcttcattacatagatacaagttgtgtttacgtttcctgtgtctagatgtgtcaaaaatagaaaggatacagagtgattttttaaactacttgattgtttccaacttttagtttcaaaattttagagacttttataattttatacatctccaaatccaattatgaaatgcttgcaagaggttatcttttcatagttgttaagattagttctcttttttgatagcattaaatttaaatggtcgagctctgtcattaccatctcagcacattatttgaactattttcacaattctttagcaacagagcctacggttctgattgttgatttttctatctgggttgaacttcaacttttcatgaatagaacttgtgctgtaattttcaatgattcatggatgggacgcttgaaaaagacgacaaactcatactttatttttaatcagccacgatggagagaaaaaggaaaactggatctttttcatggctttagggttaaactttgtccgtgtcatcatatcagtttattctattagctattcattgagaagttaattattgggtcctcttgaacgtgttattaggatgactcaaaatggtttcggttgcttgcattcgagcttttgagttttgacaaagattttaaagaatgaaaaattaaatgtcatacattctagggggacacaatttacttgttctcgcacaagatctt

SEQ ID NO: 64038 - DNA, 595 bp, Cucumis sativus
  Intron number 1 from transcript Cucsa.299610.2 (locus Cucs a.299610) derived from phytozome v7.0 (chr-ID scaffold0292 0; pos 146218 to 146812 reverse strand)
cttctgtctccttcaccaatcaggaatcctccaaggtattgaatctctctttctttgttcacttgaggatccggttttggagcgtttggaagattttaagtgaggaaactgacatggattcttcgatgcatgttttcgattttgctcctcatttgtttctataagattattgtccattttcagctcttgtgatggaattggattgtcacggtgttaaatttcggagtgaatgattgagtctgaacttctgctgtgttttagtttttgaaatttcacggtgactgatgatggttcttgtttcctttgagcatttcgaaaattaatatctggaatgtttcctttcctggttaatggctgatataaaacctttccagctgtcctgacgactgaaagttatgtgaacagaagttcaacatgttttctaatgacaagtgattagcagtcgtgtatttcctatgaaactttgtaattttgtttatgcattttcgattttatctgaaattgtttggaaatagttttaatgcctctttgacgaacaattgctggcgcaggttatccagccttcaagcattcaagcgtgtgaagtgagccagat

SEQ ID NO: 64039 - DNA, 947 bp, Cucumis sativus
  Intron number 3 from transcript Cucsa.137040.4 (locus Cucs a.137040) derived from phytozome v7.0 (chr-ID scaffold0104 5; pos 31118 to 32064 reverse strand)
gtcgtccaagtgtaagtttcgcccctgtctctataaaattatgcagtaatgtgttgctctttgaatttctttagaatcaagtatcaatattgttttggtagccacaactgtgttcattgaatcaatatttccttttggtggattctactttatctgtattcagtactgaatctttgctttagaagttggatagtgctagaaaaaactattataaggaacttttgactagagtacatgtaacaactttgagttaatgataaattatatctattgcatgtttttatttaatctctctaatggtttaatattctatttcatgaagaaaattacactccaagtctccaatgtaattaattgattattagtaacatgtggtgcaaaagactcctataaagtatcaatggattagaatagacgtaatcttatttcgagtgaaaaaatatgttgtattttttagttaactaacttatgccagctaggctcaacaggtttcatttttaataagttcgaatgtaactaatttaatacgttcagttcattttagtctagatatctcaaaacttgttactccaatccaatctattaaggttttcaaggttgagttttttttatccttttttaaggactcaacctatttgcaaaccaatatataagcttgtgatttcacttttgtatgtggtggtatagtctcattctttggtgccaatggttccttgaccatgtattccctaattctcgctcgtcttcattgcctttgcttatcattgttattcatatttggcttctttaagttagcatgagatttgtacgaaaatatgatagttatcgcatttctattttagatatgtatataaaggttagctcccttatcaagctttagttggctgataaacttcctattatttattgaagggctcagctgaggtggtatatactcggcgaagtga

SEQ ID NO: 64040 - DNA, 651 bp, Cucumis sativus
  Intron number 2 from transcript Cucsa.241980.1 (locus Cucs a.241980) derived from phytozome v7.0 (chr-ID scaffold0204 7; pos 1827548 to 1828198 reverse strand)
caaactgaacacagctccattttctatctatcctggtaactttttgtttgattgattcattttcatcccccaaagaaatctttggaagttagatggtttcttcttcttcttcttcttattattattatggtggatataggatttttttgaagttaattagagggggcaaaggaatcattcattcacaaaatcaatagcttctcgaaaaattaataacataaggggattgatgagggagttggatgtttctttcctgaccactggaaataaatgtctataagaagaaacatgttcggggagtaggggcctaaattgttaggtgattgaatcgacttgtagcttagtagctgagttggcttaggctgggggggcagggaaacatctgaatatctccaagattacatcctcaatgcgaaaataactaatattgagttcaatcctagagtaaagattttcctccttcaatattagctagaatatcatcaaggatttagcatcatagagcaataaagctcagatgttaatgattataaaacaagggaaagagaatgaaattcaagatagacctgttttcccctgtttttgagccttagttaaaatgtcgatgataatggtgagttttctatccatgcaggtgactataagatttcg

SEQ ID NO: 64041 - DNA, 383 bp, Cucumis sativus
  Intron number 1 from transcript Cucsa.241980.1 (locus Cucs a.241980) derived from phytozome v7.0 (chr-ID scaffold0204 7; pos 1828421 to 1828803 reverse strand)
tttgcagcttcagtcctccattttttccatctgaggttgttttttgggacttcttttcatctgggctcgtttcatccttcttttgtttgcttctatttgatattctttttgttctatctattgtctatggcctgttgtttggggaaagttttgcttattgttattgtttcactgttctgtgattgaaggaagtccatgtgggtgtttttcccctcttgttttttgccctttttaaagtggctattcatcttttttctttttggttaatcctttcagtttgtttgacttgtgcttcccatttttggattaaacgtctcataggctttttgttccaacgctgaattgtaggaattggtgtgaagggattagtaaaaacatctgtt

SEQ ID NO: 64042 - DNA, 648 bp, Cucumis sativus
  Intron number 1 from transcript Cucsa.239780.1 (locus Cucs a.239780) derived from phytozome v7.0 (chr-ID scaffold0204 6; pos 669499 to 670146 reverse strand)
aattttttttcattgagtttttcctagtaagattttaacgagacatatttcatacatgtaatcgacatctaaaagggagtattataaatactatagatatatagatgcccattatctaactatgtcatgtgtcttattattgtaaacatatttcatacatgtaatcgaaatctattttagattgtatttgttttttttaaaaaaagcatatttttattaaacacaaaatgatttaagagtattttgaaagtgaagggagtaaatggtaatttagaagattattgttatggttttcaaaattggtgaagagcagagtgttagagtataatgggaaatgggtatggcgggagtttccctctctccatttattactttaacaaagttttgatcaattgataaacagagtgaaagagttgagattgttttgagtttgaatctgcaaaacccaacaaaaaagatgttgaatggttgggttgtttcagtcctcttcatcactctcctcgtttctctctgtaatccaagaggcgtttccgacattaaaactcttcatttctctgaaactcacactaacacccacacccacaccctcttctctttcctttcaactcttcagtacgatttctatcgaaaatcctgccccaacgccga

SEQ ID NO: 64043 - DNA, 651 bp, Cucumis sativus
  Intron number 3 from transcript Cucsa.255480.2 (locus Cucs a.255480) derived from phytozome v7.0 (chr-ID scaffold0222 9; pos 3462002 to 3462652)
tacagacaggagaggaagtggctgtgaagctggtatgttgatcattcaattgtttttccatttctatttactggggaatttggagattctgtttttctcctttgtgctgatgtcgcgatctagacaacgatttaattgaaaattttcctttaacgaagatcgttctctaacatcccgagttttgattttgatttttggcttaatttttttttctctgaacgccaagttgggcaatatggccgattgccggaaactttagcaatcacattagcatcccgggtgttgtggtctccagaattggatgaaagacattgtttttggctgcttattcaatttcttctctatttgacgtttgtatttagatgttttagatatataggtgtatgtatgtatgtatgtatgtatgcatgtaagtatatttatcttacctttcattgccaagagtggagaagagggaaaaaaagactttaaaaacctgcattctctctaaatgaaaccaagagtgttaagtcgttcgttgtgataaaggataactgtatccaccatttgattaacgttctacattgataaaggtttagattttggcgattcatttatgacattctggtttcctcaggaatctgcaaagaccaagcaccctcagcttcacta

SEQ ID NO: 64044 - DNA, 856 bp, Cucumis sativus
  Intron number 1 from transcript Cucsa.193320.1 (locus Cucs a.193320) derived from phytozome v7.0 (chr-ID scaffold0133 5; pos 283343 to 284198)
ccaaagccaaagcctttgtccttgcaggtaattgttttattgtagtttcatgtacgtacttatctgtgtttggtagtgaatgttatcggtctagagtatgatgagggtgttgtaaatgtgttgttctaattgagatgttcggggtactttttgatccctttatgatttaatttcttggtaaccaaaatgtatcttcacctttttaggataaagattgataaagttttttttttttttcccttctttttgttcctcaaaactgaaaagaataggaaaaagtttatctttttatatgatggggttttgagaattttttatcttttacatgtttcctggcttttttctgtcaaattttcatgtgggtgttcttttaacttttgaaaaatatcaatttaaagttttgaagtttgaattcgacatgggttttaaaccatgtttgcaattacaagggtatgaatgcacgactttttgtttatggtaccatagcaaaccaactcatcaattaaaaagtttaggttaatagagaacagaaaatttaattatactaatatagttcaacatgtttaaagaacaaaagatgaaaagaaaaaaaaagtttttagtgaagccccttgataaatgggtgtgagaatcttgaagacatgaaaaagtaactacaatttgctagaacatgactttttttcttaattcccttggccttcttcattaaccccttatgtgaaagttttttatttatcagatcagcaaaaggaacaaaggtataataataatatcatgagagaatctatatcctatatattcctatcaattactgattttgtatttgcttttacagactgttgagcttaaagtcagg

SEQ ID NO: 64045 - DNA, 928 bp, Cucumis sativus
  Intron number 1 from transcript Cucsa.301700.1 (locus Cucs a.301700) derived from phytozome v7.0 (chr-ID scaffold0295 1; pos 9507 to 10434)
ggtatgataccgatctcttcttcttccttcttccgtttaatttttcagcgagtagggagtttttacacccaaatttttaaagacactatcatgcggtttgttcgttcttgtcatcttcataatcttccaattttgtttgtttatggagaagcttagattagattttctaatgttcttctttgatgaaatcgaaatattttcttttatcattctgattttttagctttcctttggcatctggaaaaaatggggtaaaatttaacgcattgaatggttctagtattttgaactgtttttatttatttatattacttgtattttaatactctctcaagttagattgattacataatagcttgaattagattattatttgttgctgtttgataactttggaaattttcttttatttttctgattgtttatgttcttgcttgatataatcgattaaagttgtcaaggatgttttttttttagtgttttaagatctacttctgttttcttaagtaggcttaggctacttggtcatttttgttttctttttcttttagtttaaatttagttcttatagtgcaaaaatttacaatttagtcctggaaaagttcacatgattccctagctactttaattttttttttaaattgagtgtattctttggtgttgtgaattttttagcccatcgaaccatttttgttttttcatatcattgcattgaatttataaggagatttttgttgaaatttttaaatcaatgtgtttgcttaccttttactatttttaaaatctttcagtttagattgtttatagtggagcctaggttagattgttgcatgtttatggttcgtgaaatggaaaaaaaaaacccctaatgttctctattcgcttagttgacaatatttgtaacttgaaaaaataggggcttacaagt

SEQ ID NO: 64046 - DNA, 895 bp, Cucumis sativus
  Intron number 1 from transcript Cucsa.308230.1 (locus Cucs a.308230) derived from phytozome v7.0 (chr-ID scaffold0297 8; pos 406386 to 407280 reverse strand)
tgcgcctatctgtatcaagttaaacttgcattcaggtaatgattatttttattcattgtaagatttttcttcctttttttgggaaaatggaatagaatagaggccgggatttgatttcgttgttgttggtattgttgttgttgttgttgttgttgttcatgattgagattgaagaagatgatgaggaagaggatgaggatgaggatgatgatgctattttgatttgatgttctgtaaataatatttgatcggaattcgtaggccccatgtttcccctgctaccgccaaaatcaaaagactcgttaattttccaaccctactgttgaattttggtggttttaattttctctcaagatccggtccaccgtctccctcttccctctatttttctatagacgtgttctaatcctttttttcgggaggtaatatttgtggcctttaagagaaattttcgcttggaaacttcatgcataggtattgaaatgatagcttgtttcttgtggattgtctttatatgttctgctcttgaatctgctgtggcgggaatgctataatcgtttcactagaaaatttcggtacatgattatccttctttggttgatgttttccagttttgtgatattgggtgtggcataaatttcgttattgatctttcttcagctagatttcctaaatcttttgtttttatcggtgaattgttttttctttttccttttaggtagtaatttgatgaagtattgctatgaataatttagttgaaagtcaattagacataccataatttatattgtttttctttagcagtggaggtctattatatgaagttttcttaatttcattttggtttgaaaattcttcagttcttctctcccggtgaccagataaagagaaagaa

SEQ ID NO: 64047 - DNA, 572 bp, Cucumis sativus
  Intron number 2 from transcript Cucsa.255040.10 (locus Cuc sa.255040) derived from phytozome v7.0 (chr-ID scaffold022 29; pos 3172158 to 3172729 reverse strand)
cttttgaggttgggggctacaagtacgtggatgggtatatctgtgaaataaattctgtcccttctaatatgttctaacatttttttatctgcttgtttttatgcctcatgaatttttccatgaaattccaagccaatatctttgagtctttctgcttacatgatgggttttatcctttctggaattatcttttactctggaatgatgtattgatatttatcttcaattatggatttatgttctgtcttagtttctctttctggtgttcaatctgactactttgatagcagtagtggaaatcgttcctgaaaactaagaactgttttggtaggggttattgatgaggaaatgttgatgttcaggtttttcattttcttttttatttttttctacatgctcatttcttccacatgataatggttggggattgatccattagtattttcaaaattgcctatgcattttttcttatttcttgtaggaattaggatcatgaattattttgaaacgtaggttttgataagctgaagaatcttgttgcaggtacattttaatttatcctcaggggtgtg

SEQ ID NO: 64048 - DNA, 972 bp, Cucumis sativus
  Intron number 1 from transcript Cucsa.167500.1 (locus Cucs a.167500) derived from phytozome v7.0 (chr-ID scaffold0115 4; pos 863470 to 864441)
atctcttctccgcgaaattccgccaataaaagaaggtaaaatcaaatcttggacttctgaaatgataataataactcagtatatattatgttaatgggtgcttttgatcattctgagttataacttgttggggttcaaatgaaatttaaattttgtcttacctttgagtttcgaaagcttcatgatagttgattaattaggtacttaaaaaaaattatgggttttagaaaaatatgtataggctttctcctatagggattattttaggatattgctgggttcaaactctctagtccaacaaatggaaaataggagcataaagctatgacttttaagacataattctcttatgactgaatgaactttgtctttactatatttatagaaggttcaaagggtggagaaaacatttttttcccttaaatataccttggagaaatgtaaactctcgtagtcttcgatcacatttcaatgtctactttaatgaaaaaataaaactaaaaggaaaacaaatcaaatttagactatgttctaaataaaataacagtcactagctatttcaagaccatatacatatctatgtacagactctatctcatttttagagtttaagttaataaactatattaagattgctgtagataaattagcattaaaattttaaatatttggtagctctaattaaccacaagtttaattagagtggaataactaagaaaaattctaccgcctctcccatagttaactaaaactccatctgatcataacaatttaactttccttttgtttttattaaaaaaaaaagaagaagaagaaataaagaagagaaaaacaagagaattgaactccaaattacaaaattgttgcttcaaacaaaaacgttactaaaatgaattcctacatgaatgaattaactaatgtagttggttgttctcaggaagagccaagtgaagaaggtggtgtgtattccgg

SEQ ID NO: 64049 - DNA, 895 bp, Cucumis sativus
  Intron number 4 from transcript Cucsa.219610.1 (locus Cucs a.219610) derived from phytozome v7.0 (chr-ID scaffold0165 8; pos 1328050 to 1328944 reverse strand)
gtcacttcaaactaaaactggcaggtattgtatgatacaactaagaatttgtttgataaaattttcccttttataaccatgttagaagctttgacatgcatgcaacttgtggctcaaagttttgcttttgtttattgaatgttatgtttataaaatagttttgaatggcttatttctaaaacagttgaacttttatcttctcgcaaagaacaccttaatttgaacattggttacaatacgaatcactagaccatagtttggaggaatttttttgtaatataagcagataattgttttgaaaataatccatctatggtcccttgatttcttgcaattaagtctatcactggtcataatcacaatgagtatggttgttgtagtttttctccacctttctcaataagaaaaggcgtatgttctgatagcaatgctttgtaaacattttgtgggcattgcgtgtcatggatcttctatgctttaaggttaggttaatcttattgtaaacctatcgagtttggcacagccatctgataggccttagcctcaattcatttatcaacaaacaaagtgagaatacgagcagtctccttttccattaccctgcctatcttatggtgaaattgctcgcatgaacgcaaatagaatcatgtcttcatttgacaagaaaccccaagaagtttgatttttttttttgttaggttttgaatgataacaactcttctgcttgagattcactttgttatctgtgatttgtctggatcatgtgggaatttcgatgttctgttttcgttatcattatgatatgatactttgacaagcatcatcaaataacatcatttcctattagtccaaaatctgaaaattttaattgtcactttcatcttgttgtgtagac

SEQ ID NO: 64050 - DNA, 528 bp, Cucumis sativus
  Intron number 2 from transcript Cucsa.153100.1 (locus Cucs a.153100) derived from phytozome v7.0 (chr-ID scaffold0112 4; pos 319276 to 319803 reverse strand)
gaaggtttactttcttcacatttgatctgtgcaattatctctcctaactaatcgaatgcttttgtcttgcctattgatctaattgaattatttcggtgtttgagatcatttcttggctgtacggtttactcaaagaatctggaaatgtttagcacaagcaatttcgctactgtcgaacttgtttgtttttcttttcgccaggatatcttgttgctttctttctttctttcttttttccccttaagagttactactacatatgatagacgaaggtattcattggcatatcaactgctacttttgggaatttacttgctcggacaaattagtttgttgtttccctgtcggaattaaattggaggtggttgtgctctttttgattttttcctgttttaaataagtctgaaaatgcgttcacagttcaagtgttgtataaggagattttaaagaagtttttcgtttcttgttcctctccccctctgcaaaccatcagttgttccacaatcggaaacaggaaacacagtagag

SEQ ID NO: 64051 - DNA, 762 bp, Cucumis sativus
  Intron number 1 from transcript Cucsa.207700.1 (locus Cucs a.207700) derived from phytozome v7.0 (chr-ID scaffold0144 3; pos 514661 to 515422)
gaatcaagttatgtaaagaacactgaggatttcgtgtttttcagttctgtttttatgtttaatccggtttttgctttaatcaataatccattccttttccttttctctcttctgcttttctctgcttttctcattgtttggaaattgaatgtcaagtatttgcatttctaatgaggggtcttaagctcagaatgttctttttcttcaacttaatgtgtttttggcctgtatgttgttattagttcaggcggtggattaaagtttctttttttttttttttgctggggttggtggattttcaacttaacttcactccacttttttctgcaaatcaatattttattttcttcaggaatatctaaatcttgatctctcaatgtctacaatttgcatattcattttttcgttgacactatacatatggacttgttcttctactgcgtaaggaagtttgagctggattgaagtttcagattttttatggcttttgaatatcgtgaatttttttgtagcctattgagataaagatattatccataatgcaagtgcgttctgttattcactgaatatatattttttcaactcaaacagtttagggctctgtattcaggtgaacaaattattagctcacgttgttcactaattgttcaatcagaaatgctaattgttcactaagaaatggcattgtcaatattaacttgtattctattgctgatcatgaaactgatgtagcctgtaccactttacagtttcttgaaaaga

SEQ ID NO: 64052 - DNA, 1003 bp, Cucumis sativus
  Intron number 2 from transcript Cucsa.302700.1 (locus Cucs a.302700) derived from phytozome v7.0 (chr-ID scaffold0295 1; pos 801063 to 802065 reverse strand)
tcaatccgagtttccagatttttagctttattacggtaaggtgctttgtttgattttgattttcatttatctcgttcgtgtttgtggaatttttttattggcgagaggtgaaaacgaatttttctgtatatgttgattttaccttcttttcgtctgtttcagtactctgttattgttgttatgaataaacctgcttctcctagtatttaagcaaacaaagtagaggttatgattggagtgaataggtaaacttaagattcatgattaattcattcagctatggcgttgtgtgtttaagctttgatttaactatatcttcttatattatcttgtttcgcacaagtttttgttcgttgttgcctggcgtacgtgtgaggttgtttatggaggtgttaatctaatcttgaaattgtgagatactgcgatataaggaaatgacgatttctataacctttgtcattattctttattttggcatatgtttctttctcaaaattgtattgaggtatggaattggattgcttgctattgattgaaatggattggaatttccttttggagctctttgtatgcatgtgaactagggtagtaagtgtatgtatttaatgtgacgtttgatgctcacatgtttataaacttttttatttttagaattatacaatggagtattgggtgtatcttaagaatttagtagttatgctcctatttctataagagatgtccattgtttctcaaattgtatattaatttctgtgagtgaattaaactatattaatttgtctgctctatatattcaatgttttcccacaaggatttagcctcatctatttttgggacaatgaaagctcacctaactatttggctcacttcattgttatgaaatgctgtgaagaattcaagaaactggtcctagtaaaataggcatttcactgtgtgatggtatcaataacttcttgatctccttgcagactgcatctctgtgtattcttggcctggttttgag

SEQ ID NO: 64053 - DNA, 586 bp, Cucumis sativus
  Intron number 1 from transcript Cucsa.299610.3 (locus Cucs a.299610) derived from phytozome v7.0 (chr-ID scaffold0292 0; pos 146227 to 146812 reverse strand)
cttctgtctccttcaccaatcaggaatcctccaaggtattgaatctctctttctttgttcacttgaggatccggttttggagcgtttggaagattttaagtgaggaaactgacatggattcttcgatgcatgttttcgattttgctcctcatttgtttctataagattattgtccattttcagctcttgtgatggaattggattgtcacggtgttaaatttcggagtgaatgattgagtctgaacttctgctgtgttttagtttttgaaatttcacggtgactgatgatggttcttgtttcctttgagcatttcgaaaattaatatctggaatgtttcctttcctggttaatggctgatataaaacctttccagctgtcctgacgactgaaagttatgtgaacagaagttcaacatgttttctaatgacaagtgattagcagtcgtgtatttcctatgaaactttgtaattttgtttatgcattttcgattttatctgaaattgtttggaaatagttttaatgcctctttgacgaacaattgctggcgcaggttatccagccttcaagcattcaagcgtgtgaagt

SEQ ID NO: 64054 - DNA, 648 bp, Cucumis sativus
  Intron number 2 from transcript Cucsa.181690.3 (locus Cucs a.181690) derived from phytozome v7.0 (chr-ID scaffold0125 1; pos 8383 to 9030)
ggtttggttctgtcacacactgaatccggttaggcttgacttctatttgtttcttgagtgaatatcacagcctttggattggttttgatggatgcaatctaatatttgggagtgattttgtaattgtcaaaaaaaaaaaagaaaaaaacacttctttcaggttcagaagtattttattcaaaattaattttgattatacgaaaattgtatttgaaagtgtaaaatcaaactaaaaaagacgagtttgagtttcctggtgattttgaatatgaaaaagtatttaaactatttcaaaactcttctgtttttgggaatgtaattattacttataagaatttgggtagaaagtgatttatgtcaagttttgaggtttgattttagattttttaaagtgctttttttttatggtacgaagtgttttctcatgaaggaactatttaagtgcttttctcttgagaattttgatttggtgttttagttgctttgatgtttggttttagacttttgatagtgggaactttcattgggttttttctttttctttctttcccccattttttgtactctctctggtcaagccaagtatgtaaggttaataatatacttctttcaggttggttacaaacattactgtgagacaagattctc

SEQ ID NO: 64055 - DNA, 995 bp, Cucumis sativus
  Intron number 3 from transcript Cucsa.176310.1 (locus Cucs a.176310) derived from phytozome v7.0 (chr-ID scaffold0122 5; pos 617763 to 618757 reverse strand)
tataaattttctcccggtgacgttattgtttaccggtaagtttttttctatcgatgctgatagtcatctgtattgatttgttgtggaggtttttttttttctgtaatgcggtaatggcttgatttaatttctcttttatgggatgatgtagtgcattgtatatggatagtcttgctcgattggtcaaggcttggaatcttaaaacgtgcaggctagataattcaagattttgatcagctcttcttgatttacttttcatctgcaaggccataagataatcattgcctacgatgtgaagaaatcacgtttggactccaatttttaacttatcaaaaccactcatacaatgaatatagataaataaagaactgaaaatcatggttagattaattccatgacgtgcaatatgtatagaccagttgtttactcttaggcattcccattttcattataagggttggatttcgagtatggaggtgcagacatagcaagtttcctgagtttaaataaaagctggggtcttcttggtgacttttatctaaagtttggacgatgttccatttcatggagggtggcttaaaacttggagcgtcctcttatgtttccttggtttccttttgttctttgaatgtcatccatgaaagctctgtttctcatttttctgaaaaattattttaattgatccatctcaaatcatacgtaaattgcttatatttttttgaatttgaagcaaggttgaggtaaaaaaatattttcgtttcatgtaggtcatgtgtttaactggagaaaggcagaacctcattttgcatcctcttttcttatatgaaatatgcaaaatgtttttgttccactcttagtgaacatgctgtgatcgcacttcccaatttatcacaaatttacattcagagacttgcacaatttgtataaaatttccctcccaaaattgttgacctattgcagctccccttgtaattacaaggagaaacaagtgaaaa

SEQ ID NO: 64056 - DNA, 494 bp, Cucumis sativus
  Intron number 1 from transcript Cucsa.142020.2 (locus Cucs a.142020) derived from phytozome v7.0 (chr-ID scaffold0107 9; pos 348181 to 348674 reverse strand)
ttattcttgggttcgtcattgattcgcgtcctaaggtgatttctaacaccagtcttttttttttttaatgaaatgtttgtacttcaaataccatatggtgcttcgggtgctaagttaagttctttagtctgagtattggagttagaaaaattgtatttgggttgcatatttgttagaagtctgtgtttccagtgttgagttggattttatcgataaatgtgcaaaggggtggaagatagagtttctttggtaagtgggcaaaagaggggtagatggagtttattgataattcacaaacttctataacgaacatggggtggagttgagttatttaatatcgaatttagaagttctgacctattttaattttaggccatgtatgaatttggatattcaatgtataagaatgggattttgaatgttttctctatgaacgaactattaattgcgtgtagttgaacaggttagaaggcaatcacacatttgtcttcggg

SEQ ID NO: 64057 - DNA, 968 bp, Cucumis sativus
  Intron number 3 from transcript Cucsa.162420.4 (locus Cucs a.162420) derived from phytozome v7.0 (chr-ID scaffold0114 4; pos 2062466 to 2063433 reverse strand)
tattgtagactctggatttgagcatccatctgaaggcaaatttctaacttttattcgaaacccttgaatcttaacttaatttgaccatttaattgaaattggcacataacggataagaaagacttaatttagaagcaagaggaaaactgaaagtgctaattcaatatttcagtaacttacgaaattgaataagcagttttcagaacctcctcaagaaagaagttgaaaaaaaattttatgaaaacgaataagcagtcgataactgataaaactctacttctctctcttgattttaaagaaacaacttaaagtttgtataggtgctgtagctcactaacctgcactaaatgcctattaagtttgatttcttttttttggagttccttggccgtgattgagttttgtatgggaattatcaatttatggcgtcataaacgggataaagtgatttgaatgttgctctggcatgttttgcgaagggttttgtagttcatcaaggagacctactatgtcatcagttgttactttgcacagtttttcacgtaacaatggtttactggttccttgagaacacatgatgctataaatttatgaccttgtttctaatagagagaaacttattgacacatctcttgagctgattataatttgcatggatgaacgcacagcttggagaacttttctttcttgaataacattgattatgctatttccatatgctctcataactttcatggacaattacttcttcaatccctaagtacttgctcttcataaccagtccatcttagatgtttatatcagttgtttaatggtttgcaggtaataaattaatatcataatcttgatttcggagcaatatatatggtttgataagcctttcacataaaaggatcggagacgttataatttacttaccaacggttcatttggttcgatccttttctttggttcttcatcagtacaac

SEQ ID NO: 64058 - DNA, 368 bp, Cucumis sativus
  Intron number 2 from transcript Cucsa.162420.4 (locus Cucs a.162420) derived from phytozome v7.0 (chr-ID scaffold0114 4; pos 2063495 to 2063862 reverse strand)
gagctaaagtcaacggtgaagctggaaagaagtaagtggtcttcttatgcaccatctttagcttttttcttttcagatttgcttatggataaattatcgcaccatggtttcttgaactcgtattgtgagagaatttgagatttggtagtaatcgtatccatctggtttagtttggatctaaggcagttggattaagtagttgtttgagcttggggtgaacttaaattcgattttttattctccacaatgcacatctcttacaaaatatgaaatttctcttcattttcttttttgcattttttcttggaatgtcgcatttcttgtttctgagattcttatcttctttcaccgtctctctttcaggggtt

SEQ ID NO: 64059 - DNA, 1013 bp, Cucumis sativus
  Intron number 1 from transcript Cucsa.228500.2 (locus Cucs a.228500) derived from phytozome v7.0 (chr-ID scaffold0193 3; pos 395616 to 396628 reverse strand)
ttccgataactttgaagatctctcaccgacgatcggttagttttgctatacggatcagatttgaagtattagtttggaatttccttttttgcttttgtgggatcttgcgcattctttttgaaaatgagcttagacaaatcggttttgttgtttgctgcggaatattggttcatcattttaaagaaacatgtggaaagacaatgatatacttttgctgaatattggttcatcattttcactttcaccttcaccttctgcatgggattgagatgagattgagggcaaaaaattaaatgaaagggaaagttgagaggaccaagattgagagaggcaattaatcttaaccgtatttcatcaagagaagaatgaagctcttagataatcaggtcaggtgtcatttttttaggacagtgtaaggaacttagctataatcgtatctgagaaactaaaatgagaagtcatgaaagaggtaatttgtgcattaatttctaatggaaaatactatatttcaatgtaaatatgtattgtatactttcaggtatacaatgaaaagttcattttctttgtaatattatatatatatacacacactgtatactttctacccgctctattatcactggtcatctatacttttgcattctgttcagtacttactgaccctgtgtaaatctaggcatatgctcatcgtcctactgtggggctattagtagaatagatttccttttacctgtgtaagtttggttgaatttcaaaccgcatagctgaaattttggatgttctctttcttattaaaacattattaacaaaattgagaatttaaaatgattttgattataaatcctacgtctgcatgtttaattgtgctggtttgcttgtttaaaatggaaaacggcacaagccttgctaacttcttaatttgccttgcaatggcatgtaaccatcaatagactagaaatgacttttaattaattggttgtttttgtgcgcaggtgtggattttaaggtaaagt

SEQ ID NO: 64060 - DNA, 732 bp, Cucumis sativus
  Intron number 4 from transcript Cucsa.301870.1 (locus Cucs a.301870) derived from phytozome v7.0 (chr-ID scaffold0295 1; pos 112567 to 113298 reverse strand)
aaagtaagcttctttgacattgttttgctagtttagtttctttacttgatcctacgtgtatatgattactggggtttgttagtggcaccaacaaatttcaactatgtgatattgtctcctaatttttcaaggaagttgtagctttgatttgagctacatggcatataattcattcttgttattgatgatttttggtggtgaaacttctatctcacgtctaaaataatatctatcatagaggctggatcttttttatgtttcataaaacttttgactcattgattggtacacatcctcatgaaagattgtcctttactatatcatattcttcaaaggattggcgaatgtgaatgtgaatcctaaatttgagtacccacaattctttattttattattatgaccatatgatagcagtagctaatacttgtgacttgttagatagtgttttttgtttgagctcttatacttattattttctgatatagtggatcactcttatttgaaagaaagaaagacaaagaactgggtctgctattaaatattgctttccaatttttgctctgcgcttaatgtaatatgtttttatggaaaaatattctgtttccaaatttcagagggttgactttctaacctgtttggatataaagtgttcgataaccaacttacctgacatttatattgatttattgtttcggggtttattctcatttcattttacatgttcattaggtg

SEQ ID NO: 64061 - DNA, 1030 bp, Cucumis sativus
  Intron number 1 from transcript Cucsa.240230.2 (locus Cucs a.240230) derived from phytozome v7.0 (chr-ID scaffold0204 7; pos 185285 to 186314)
gagttgataatcttacttagcactagcatgtgagatattttctcctcttgtttggttgctcacctgcctttatatttgtttgtctctaccaaatttctatgaagtatatgtgattgtggtattctattcgattctgttactatttgttaggctaatttgtacttttctagtttatgctttcccttcttgtactcttctttgtgcataatcctatttgtaacgacaacatatatttcaataatatacacaaaattaacagattcattagttttgtcccatagaaatgttgccatagcagtgtttttgccagtattttgaatatagtttttctttttctgtaaagttgaacccccattttattaaaccaataaccatgtatgtaaaaagtttctttagtttttgaagtttgtaaggaactttagtacagtaacagtaacctacaacatatggagtaaagaaacgttgaaaaccaaattattttacctggagaaatatcaaagagtgaataaggtaatcttctgtgttttttactctttcctatgggaagattctcgtttcccaccaaaagtgaattgagaggaatataataaagaaaaaggagtaataacctttcctttgaggttggtgggatcaacaatggcacttcgtgctttatcattattcattatgctgtagctccttgattgatgcagcatttacaacgttctttttgtaaagttctgttatgtatgtttccaattattgatcttttgtaatttcttagatgcactttccattctactgtaattgtttagtttcataacagagcatttaagaggaaattctttacagctaatctgtgttaggatcataccactatcacaattatttacatcagaactgcgctagttagaccctaccttgctgaaaagcaagaatttcatttcatattattaatttagtcaatgagatataccatcatgtcttaatcattctgttgttgctttcttaaccaggaaccccattcatctctggcgtagggatacatatt

SEQ ID NO: 64062 - DNA, 809 bp, Cucumis sativus
  Intron number 1 from transcript Cucsa.286990.1 (locus Cucs a.286990) derived from phytozome v7.0 (chr-ID scaffold0265 8; pos 11014 to 11822 reverse strand)
ctctgttcctctcccatttctgagtttctcacaaggtgggtttctctaattttttttttttatatatattctccccctcttttcatttcaccctttcctcaaatgggtctctgtttttcttgtttctttttcctcgtataggatgtaaaaacgctaaatttaccgtaactcatccacttgaacgcttttattttcaattttaagtaaacgtcatcatgtttatcgtgatgtccactatcctcctcaacttgctttgagtttccttatgctttaactcgtaactttagaggtcctatttttaaattgcggtaaacatcatctggttagccgtaatccatcaactcatttatttatctctttattttttgaactcttttcaacttaatcttttgaaatcgacagtaatttcaacacaaacccataagtgatgtcatgttgaaatcatcaataaatatcattagtttgccgaaatatccatgtgctcaaactttttcttatttccgtatgctttaaattcagcaatataattgggtaaatgtcacatgactactaaaacccatcggcttcaaggacaattatatttaacatggtaacatgtatgattttttgtttctaaaacccatcaaccaaacaatacttacaatacaaatccagaagaagaggggtgtcagttatagcgaaactgctaaaagagattatgtattcaaagaaaatagttttaaatgaaaggttttgagtttatggatgatactaaatttatggaatggttcatgtccagctcggggacatcaggaggagagagaaagcta

SEQ ID NO: 64063 - DNA, 862 bp, Cucumis sativus
  Intron number 2 from transcript Cucsa.267170.1 (locus Cucs a.267170) derived from phytozome v7.0 (chr-ID scaffold0236 4; pos 267579 to 268440 reverse strand)
gccatctagaatcaggctcgaagaagcggtatgaacctatattgtttctttttaatctattctgtatggataaaattatccttttacttcctcccacccaacctgttgttgaactcgaacaaagatcagccttttgcctcttaaataatatgtcagatttgaatgtctttccatacgaacagatattagccatggggctgtattattgtcacaagtaaagcagcatggtgtgaataaatcacaagacttcaggactttttaatggactttcgggaagcatttaattaagcatcacttgtatttttgagttcctttaatttaaaattgcctgaaattttcattagttttatgttttgatgggcttaaaattttgtacaggccagttactatgataattagtggtttttggggtaatataggtagatattgctttggtttacgtgactaacagaatttgagtatctttttgctgagatgcaaggcatttgccccgtgcacagcacatggtatagatgtttccttatttgctatgagttaactgtagagtggagagcacttggttttgtggcttagatggggagttagcgacagccacgattcttcatagtttgtccaattgagcttcaacccatttatttttatttacattttatgagaatttttataattatgctgtggatccatttgtgtttgctttcatgtatgttctctgtgtgaaatttggttatacatgttaaagatattgaggtggttaaagtaaacctagatagagaataataacagattagaaattagaaaggaaaattccatatggcattgaataaagtacacttgttttctgttgcagggtcagatctgattc

SEQ ID NO: 64064 - DNA, 669 bp, Cucumis sativus
  Intron number 1 from transcript Cucsa.267170.1 (locus Cucs a.267170) derived from phytozome v7.0 (chr-ID scaffold0236 4; pos 268465 to 269133 reverse strand)
attccgggtaatctcagatttctctcaattcttcttttaagttttctttttccttcttattatcgaatctatattggggaagacataatactttccggattttcttgtgcatcccgaattgtgggagctgggcctttctatcgctgcccagattaattttcgagaggatttcttttaagcaagttctcaacctggttttgaacatttttggattgagttagttattggttcagacgtccgacttatgaatgaaagtttaagagattttgggtgggaaatagggtgtacagatactatacttctgattatgtttggtgaagtatcatgccgttgaccgaattaatttagtatccacggggatgatgggtgtagttaaccagagtttctttcttttttttttttttagggcgaaaactatttgttattgtattttagaaactttaagattataaggatgatgagcagagaatgtcataccattgtgcatcttggtttcgatgtttatgtgaatttgtaagttgaccgtttggaaagaattctgatgttatttttaatccttttgatatacgaaataatacgtttactagtttgctttcatggacatgttgatatgaaatttgtgtgtacttatttcttttgtccgtacatgttactgcagtgtagaaattg

SEQ ID NO: 64065 - DNA, 373 bp, Cucumis sativus
  Intron number 1 from transcript Cucsa.308320.1 (locus Cucs a.308320) derived from phytozome v7.0 (chr-ID scaffold0297 8; pos 468390 to 468762)
ctactcccctctcctctgccgctctccccttccaggtttgactctctacttcttccccatttgaatctggtttatgcccaatctttttttttttcttttgcatctgtctttctgcttattttgatacttgttttacttctcaatatgattgtttgggtttggtcactgtgattaattagatttggtcgaatattctataactgaaatgttgttaataactgcattggttttgagctgccgattcgaaatgaatcactagaattggattttctatacagatcttctctgaatagttttgagatcgagtgtttacttcagtagtttagctgattgagtttttttgtttttttttttgtttttaatgcagagttgg

SEQ ID NO: 64066 - DNA, 995 bp, Cucumis sativus
  Intron number 2 from transcript Cucsa.308320.1 (locus Cucs a.308320) derived from phytozome v7.0 (chr-ID scaffold0297 8; pos 469167 to 470161)
gatgtaggtttttcctatctccgtatctgctcttgtttaagctttgcatgtcatctgagttctcttgtatatgatttttgtttgcggttcatgcatagcatatcaattttgctttacactcttctttattagggtgagctattgcgtcattttcttgatttgtgtgccgtcgtctctttaccaacttacgatgatttttcgttgtctctatacttgtttatgctcgtgagtatgcactactcagcttgttttgactgaaagtggtcttcctatagtacatgttcaatctcaaacaaaacatcaaggtatgaataaatccccaggtcatgaaccatttgaaaaactaaaaaacacaatgtttctcctagcaggagtaatattcgtagctatctgactttacaggtttgggcagatcatcccttcacctaatgaattactgtggaggctcacagttaagagcttttatttttatcatcaactttttgacacacttccgaacaataatttacttctgtttgggctaggcttattactttatagtgtgtgtagtccacaaaacatgacaacttaggcaatttttttcttgaaaatgatcaaatgagtttttatatattattatcaatctcttaattcatctcgacagttaaagatgcagcatctggcccaattattctatgatgacccatttcagcatttctgttgttcatagatttgcctgttttcgtttatggcaaacctttactacacaatgtatgaacgtgtatgttaattgatgttaaccatagagtaaactaaatttattgcattatggaagtaaaagggattaggacctacagaccaaataaaacaactgaacacttaattattcttcagtaaaggtaggtgatggtgaagtttactgctattgaagtagatgcggttgaagaatgaaactgctcttgcgattctcttatacttctttggttttgtgccagtgcctcctgtggtaatacgaa

SEQ ID NO: 64067 - DNA, 914 bp, Cucumis sativus
  Intron number 4 from transcript Cucsa.201180.4 (locus Cucs a.201180) derived from phytozome v7.0 (chr-ID scaffold0137 4; pos 126020 to 126933)
tgtcaaaattcaaatctgaagttcaaagttcacaggtaccaatttctatcgcttgtctaactagtgtacttcttatacaccaatagcttgcatgatggtcaaataaagagtaatatttgaatttctcatctttctgtattttgcagacttgttctatgactctatcctagtttaatttcatcgtctgattagatgacttagatgatagtatctatttataatactccataatttttttggtttaacaacaaaatagagggagaatccttacattgaaaatgtctgacaatatatactcgagaatgttgtagttcttgaacagaatagaaatattccagactgacgtgatgatataccactcctaatttcctatttcttccaatacgtgaaataattaacggtgtgtattttgaataatgggaatggagtggttgggtgggggggtaaagcttcttggggcatgggaattttttacagccagtttatgtcatgttaaagaggctatctggctgaattttttataactgaacttgctagtgaaagtaagatagttattgccctgaaactttacctgccttgtagcctacaaaatttgtatttggccattgtttactctcagtggtttttttcaagataccatggtgtttgccgtgtaggaacttaatatttttgtcaccatggacgtgaaactcccatatgctactggtaggagttttacttgatttgacttttgaggagttttagaaaaaaacaagtacaaaggaatcctatttcgtctttcattttgcttactgcttcttctgctagtttactttgcaacaagtttctttacaatgttggattgttgtttatgttcattgaccattggattgaacacacgggcatgtaggggcaccatttttctttattgggac

SEQ ID NO: 64068 - DNA, 641 bp, Cucumis sativus
  Intron number 1 from transcript Cucsa.284450.2 (locus Cucs a.284450) derived from phytozome v7.0 (chr-ID scaffold0265 3; pos 1227742 to 1228382 reverse strand)
aagtcaaagaacaaaatcctcctcagtgtacggatgcgttttttttctcatccctgtgcaatccgtcaattttctcttatttccaggcttcaatcgagattacttttcgggatatgatttatgaatgggttttgtagttgtctgattagtgattcattttcgattgactttttatactgtagatggtggtatgttgttttgtggaatatctgactaaaggcggtgtatgattcagtcattttcagttgttttgattgttggactgcttctcttgtttattatgtttcattgagatttttgttcctttatttatccatgcaggtctaatgtttgaaaggctttatgatttcaataatatttgactaattgcttcaactgtcgattactggttatcgttgtagtgttatttataaatcttttgaacgtaaagtagatggtctactgtagattttatgtggaaggttccctttgcttcagtgtacaaagttttcttcaatctaatgataatatcggtgtgcccattacaatttgtacatttgtcggtattttttactctcttacaggaattttctaatttaaaatttgtttaagccatgtataaagcttgggtctcaattttgtaaatctcttaacttttgtag

SEQ ID NO: 64069 - DNA, 823 bp, Cucumis sativus
  Intron number 1 from transcript Cucsa.136300.3 (locus Cucs a.136300) derived from phytozome v7.0 (chr-ID scaffold0104 4; pos 952036 to 952858 reverse strand)
tttgctcgagctcgaagcccctgttaaaatttgtggtatgctcttttctatttttctttccttttctttttttcttttttttgtcttttcattttttgttctttttgtttcatcgttaactgctgatgggattaggttggaagtttgtatctttctacgctttccgctgttcttcgttgtcttggttcatgcatttgatgttctgatttgtttttagttttgttgttgttgttatttgggtaactacatttctgagcttgtgctgattttggtttgtagagaaatgtgaaatggaaaattctctcattctaggttttagaaagagagcatgaatatggtcttttattattttcagatggaactttatggaatggtttaactttaaacagatttatcaggccgtaagaaaatatatattatcctgcttttattaatcttatcgttctccttaataaatttactctgattttctttgttctcgttgtaatgttctttcaattagctggaagtggtgttttgaaatggcatggtcatctagtatttttaaaacctgaattcaattgatatcacagtgttttaccttttaattcaaaatgttatttccacctccctttttgtctctgtaagagaatatttaagtatttaacagaagggggtttctgataagagttcaatataagtttggcaattgactttggactagggctttgagtgtatatatatatatatatatatacgagtttcatattaattgatgatcttagttagtgttttggagttgtcttctaatcttgtgtactgtttcaatattcaggtgacattc

SEQ ID NO: 64070 - DNA, 927 bp, Cucumis sativus
  Intron number 1 from transcript Cucsa.149680.11 (locus Cuc sa.149680) derived from phytozome v7.0 (chr-ID scaffold011 10; pos 538769 to 539695 reverse strand)
aagactgctgttctttacaactcactcagaataatgtatgctctgttctttacaaatcatagtttgaatgcaagattaaatattattaattattcagatctgtacgagttcactttatatatttcattgaatcatatcttcaatgcgatggtggttttttttatacataggcacgcttcataatagtttatggaatacatttatttccagttcatttaagatcccttgttaaagattgtgatttgttgctttgaagctgttcatttttcggcaagacatttggatccttgaagtttagatcatgaatcctctctggccttgttcgatcattccttcagtagtttttggagatgaaattttgttttaatgtattgttttgtgttttgattgctattcctgtggttgtatttgttagtggttgtctgcttgttagtttcattttcaattttctattttagtttccagttcagattcgggttagtcgcttttgtatccatattctggcatctttgggttgggtttttgttgtcttgttgtctcctaatcgctattccatttcaatgtatcaatgaaaatctcataatcgctattccattccacatgttatgaatcttactgaagaaaattatacagtcatgaaaattactcaatggttcttgtaaaattttcagtctaacttagaaatcatatctcaaaaaatatgtatttgataagaactgccgctaatatagtgcatctttgactaactgaatcatgcctcattatttttcttaatcaatgtactaggaagtttgcataatctctggtcatgtttaaactgcagtattttggaataaaaagtatttttgtgttcatttcctttaagtttcacttaatctttccatactctttggtgtgttgcagaaagttatcattctgtaccttgga

SEQ ID NO: 64071 - DNA, 691 bp, Cucumis sativus
  Intron number 2 from transcript Cucsa.248560.1 (locus Cucs a.248560) derived from phytozome v7.0 (chr-ID scaffold0220 7; pos 409596 to 410286 reverse strand)
ccggagcctctttaccaccaggaatttccgcccgggtcattctctttcttctttattcgttgtttctattggttatcttatttgtcctttgaaatcctgaccactttaaagctgccatttttgttactgctcatgctaacgagcttatactggggtcaacttcggttgtctacttgcttaaggctgcaagatagatttgaactttttgctgtaggtgtatgatggtcaacactgggcagcaaaattgaacgataaagataatcggaggcttctatttcctagttaagaaattgggtctgtgaaaggtcgcttggaaggtggtttagtataaagcattgtagttatatgccatagcttggttgtttattgttttttatcaagaatcaagcttttcatttgaactacaatgttcaaaagatgcaaactccaaaagaggaagttcttgaagtgtacatgcatctcaatttatacaaatatccttgaagaaataatcaataatgaatctagagatagattaacgtcgaaactccagtaaaattatgctgtatattgcaatctcattctacaaatacactttgaagtatgtgagatattgttagtatctactgatggaactgttaatgtaaacaaaagttcatacgaattatcatgtttattgtttcaggagaagaaataattagccaagaacctt

SEQ ID NO: 64072 - DNA, 821 bp, Cucumis sativus
  Intron number 3 from transcript Cucsa.241550.2 (locus Cucs a.241550) derived from phytozome v7.0 (chr-ID scaffold0204 7; pos 1512606 to 1513426 reverse strand)
agaaacttacttacgaagacctcgttatagctaaagtaagctattggggcttccctattctttaaattcaatgtgcattctgaatattatgtcgatatccatattgtggttcttgtttgtatattatcatttttgttaaatcaacaccgaacccaaaaagagctgctggttaaggcaaatttaaccttttcttaccaatatcttaacaatccctagtgtacttgaggagaaacccaataactaaaaaatgttaattgaggaggacacattcatgtttaatcactattgaacccaaaaacttaagttgatggttacggtaatttgtcaattctatagaaagtttcaatcaaaagtctgctggcgaaggtaaatttagccttttcttatcaataccttaacaatccctagtgtacttaaaaagagacccaataactagaaaatgttaattgtgataggaatgtcatttgaactatctaagctcgtggcccatggccttgcaagtgaggtgaccatatttacattacaaatgaggggttcgatctacaattgatgagaggcgatgctaatatcttatcgttgaacaacttgaacttgcgcctgaggttaggtgtttgctttgtttaaaactaaattcaaatgtttggaaggcctagaaaggatcatgtaagacatgaggaagtagaaaccttttatggtactgttggcaaatgctttaagcacctggtttttggtcaatcattatgatttatttttgtaacctttctaatgaccctagttgatggttgttgttattttgtcgtcattttcgttttagggtacct

SEQ ID NO: 64073 - DNA, 1019 bp, Cucumis sativus
  Intron number 2 from transcript Cucsa.212310.3 (locus Cucs a.212310) derived from phytozome v7.0 (chr-ID scaffold0154 3; pos 108790 to 109808 reverse strand)
aatcaagagattcacgtggttggactcgtcaaaaagtgagtactgcagtgcatctctgtagttgaaatatgaaatcattttttatagatgcttccactattatctcttagtttcagttacatttgttgactttactggtagtttagggatcacggctctttgttattcatttgggcagccaattccatagtttctgtttctagttatctttccagtatatgggagctagagtgtgatccgtgacataatgttatcactaacaccctatcttagaaaataaatttatatctcttaccttttgtgtttaagaattgcttgttgggaaacctcattggatacttggatataatctccaagcttcaaagtcttagatctaaattcccatgttgaattttttttaacctaaaatgcttgttttctcctagagtttcccttaggggagcacaaccttattgaggatccactgccttggttacccgcatgattttttttttgttgaaccagaagcaagtgggttgtacttaatgagggtatatccttcttatctgcaaggataccggcttatattgggatctgtgtaaagtagaatagtgtagatatgaaataggtatgacagatgtatgactcttcaacttcctgcttcacttgtgttccaccggatttcttctggttcatgctatagaacacactaaagtctgtactcgggttgtgaaattgagtatgaggctatcatcgattgtgcttcttctagctattgatcatggtgggatcaaagaggaaagtggcaaaggcaacttttctaaggattagaaaaaatggtcgtaatgcatgccaatgcaacattctccaagatgtttaatgatgtgcgcagttgtgacttctgtttctttgacattgtatgcaaagacatatacttattgatattgaagtataaatttattagtcgtatgtggattttggtctcatactacttgcaaactgcaggtgtttcatctattgattggttcttctaacttggg

SEQ ID NO: 64074 - DNA, 712 bp, Cucumis sativus
  Intron number 1 from transcript Cucsa.212310.3 (locus Cucs a.212310) derived from phytozome v7.0 (chr-ID scaffold0154 3; pos 109787 to 110498 reverse strand)
ccattattgcagttcttgcattttatcaggtttctaaccaccatttccattgattttgcttttctattctccatttttagaaactatggaatgtgggtttgcaatgtattgttctattgttgtaatttcagattggaatttttgttttctttgcataggaatgtgggtttgtaatttgaggttgccattttctgattgtttgaagattttggacaattggggtttttgttactggtcacttagtgattgatacatcttgttgatcggttcgttattgagtttgttaactgtttgattttctgtagatgactaaaatggggtttcaaattggtctttggactttccttcactgagatttgttctttacccacttcattactgttgcttttactagccttccttttttttttttttttttctctttttaatttgttagctaaacttggttagttggcagcatctgagaatagatggctttgcttttgtgctcaccacttgtttgatattcaatagtattgctttaagcagtcctggggactttccaagtcttagttgtattacaatttcactatcaacacaccactctctcctttattattatttccttgttttattgcaatatggattatttttgtgtaagaaaaataatggctatttataaacattttctattccagttagcgaggattcaatcaagagattcacgtggttg

SEQ ID NO: 64075 - DNA, 350 bp, Cucumis sativus
  Intron number 1 from transcript Cucsa.157810.1 (locus Cucs a.157810) derived from phytozome v7.0 (chr-ID scaffold0114 2; pos 51535 to 51884 reverse strand)
cctctgaacttgcttgggccgacgccggtcccgaggttcctaattttagtttccttttactgatttctctgcttccacatccattctggatgccttatttgatcactacgcatttctgctaattgggtggcacgggaagatgttgagaaaccctggttattgagtactcagaggatattagttcgttagtctaatttacataatctaattaatcttgctatctcaaaatgggttgcgattagagtttatgtgtagttatgcttgttagtcccgtggcttattatttgacgtttttttttcttcaaatttttttagactgctgagccacaagttaatagactctgcgttga

SEQ ID NO: 64076 - DNA, 320 bp, Cucumis sativus
  Intron number 1 from transcript Cucsa.267280.1 (locus Cucs a.267280) derived from phytozome v7.0 (chr-ID scaffold0236 4; pos 404043 to 404362)
ctggttagatacccatccttaccgatatttaagatataagctaagtttatggttttggttttctcttcatgttttgttattcaatgatgcgaaacggtagattttagacatttgactttcttcgttaatcttcatgagtttatcatcttcactaggtttgttatatattactatggttaatgttttgttgcttcatcaaaatggctactttttgtttgagtcgaggccttcatggagttccttctttctttttgtcagcagctgactatgttctttttttcatagttaccgagcttgtggaaggcgattcatcaagaaaa

SEQ ID NO: 64077 - DNA, 742 bp, Cucumis sativus
  Intron number 1 from transcript Cucsa.161130.1 (locus Cucs a.161130) derived from phytozome v7.0 (chr-ID scaffold0114 4; pos 1099623 to 1100364)
ctatgtaacgtttacatcctcgatttcatttctcgcttttactcatagggtttttccgcattactttgatttgaaaaagtagccgttagttatttgatcttcgaatttcaatttgaagaatgctttagattgtttttaggatttacgtttcaagtctccaaatactagcgtcggttcactacatggcctaactcgatgataatttattataaccaagtcaaaggaaaatgtctctcgctcggtaattggttgttttacatgatacggatgtttttgaagaagttgaaacctatgtagagatttgagaatagttcgttcttttaattatatgttttgtttcactctatgtgaaggtatcaggaaacttacaataggcaagtgggaatcgattagattattttctttcattaagttaagaagggatatctatttaaggccttctatagacggactggcataattgttagattccatgcctcttttagtttttcttcaactgaaactacaaggttattctaatcttttgcgagatttagtaatccgctcagcaaaaggtgattttattaatgaattgaaataagtaaataaataaaataatccgttcgatataatttctttaatgtcacaaattcacacgttccttcttacgtcttcctttgccattttctgctgctgttgttcttattattattttgagtggttctgacaaatcctgtttttttccggcttcatcaaagtagta

SEQ ID NO: 64078 - DNA, 708 bp, Cucumis sativus
  Intron number 3 from transcript Cucsa.282730.1 (locus Cucs a.282730) derived from phytozome v7.0 (chr-ID scaffold0265 3; pos 105151 to 105858)
aaacaggagtcaaatccgcagacattattgctgaagtactatttcattgatgtattcggttgtctttgcttgattatgtatattcttctcttaagtgttcatgaatcaagtgcttttcgcactcgttaaaaatgaagaaagtctattttaggagtatagatgactagattttgctgttcaaatgaattagatctcgacagcatccagtttctattgcagttaatatgatggtgcaaaagaaagttcacaactgatcaccactgtatcgaccgaggtctttgagttagtttagggtgtatttgatgcttttcttgttctcaactttaccatcaaatttctaatcatctatttttaaagagagatgagtttgaagcatgactctaatttctgtgacaacccgtcataacccatgtggtcataattttctttagcctctggatatggaggaagaatattctgaactttaccagtgatctccccagcccattgacttggtatttaaaattcttctaccaatatcgcatgtttcttttatgaccctctgcagtatgattgggtatgttactgaaattgtgaattcgtcttatattttgcttctttcatttgggagtttctcctgagtaaaagcctgtgtttaccttatttggacacatcaatgaaatatcttgaatattggtttcttaaagtaggtaccttattgggtgactt

SEQ ID NO: 64079 - DNA, 1004 bp, Cucumis sativus
  Intron number 1 from transcript Cucsa.285910.1 (locus Cucs a.285910) derived from phytozome v7.0 (chr-ID scaffold0265 3; pos 2134602 to 2135605 reverse strand)
aatcccttctcctcaggcacgcgtctcaggtctgctttctactttttctatttcttcttctatttgcaccatttcccgctttcttcttgttttctttcagaattgaattctcctgtaattacgcatttcctgaacatggagtttgagtttgtaaccgatttctgtgttttgacttggaattctgctgctcaagtttcattttctcttgttaggaattggtaatgagtgtttaggttgtgttttccaacagcagtgttatggttcttgggttcaatttgtggcctcagttaatggatttaggcgtgtgtactgagtcagttatttgaatacggaggtagtaatgcataagcagtgaagcgtgttctttgaatcatcactctcactgtggttatgtatctagcagaatttcggtctatttgttctcgtcctccatctattaatgaatatatgttaccctcataatgaaatgccacgcttttgtagcctttttaaagctctttctcccagtttgcaatatcagagtataaaatacattcacaattagcaatgtcagttctttcatataaaagagcaacgaggtttccttctgatcaatgtctcggaaagggatgaaaaattttaagtatttgatctggcctgatgtgcagatttcatgagaaattttctggattagcagtcctttaagcttttttgggtcttcatgttgcactccaatgttttaactgtgcacttgctatacactatgcgaataccactactttgagttcttaattataaacatgttttcttttatacttttagtttctttatgttcttatcatgcgccacctattggtctgtaattagttaatgatgtaaagtttggtttcttataaacacgagaaaaaagatagtaaattaagtaaatggttgacatatctgtttcattgttatcttttataagcatctttagccaaaggctgactttatcgtatgatcataactcgatgttttaatacagggat

SEQ ID NO: 64080 - DNA, 772 bp, Cucumis sativus
  Intron number 1 from transcript Cucsa.254260.1 (locus Cucs a.254260) derived from phytozome v7.0 (chr-ID scaffold0222 9; pos 2629167 to 2629938)
tttttctttcttcaattggttgattacggaactgggtatgtcttgttcttagattttcttggcaatagttagcaattttcaatctgtttgtgcttttctagactgggcttgatgtattttgcttttttttccttcgtattattaaagtgaccgagtctttgctgaattggcgaattttttaatgcaaattctttttcttgctttctactgtttacgtagagaaatgatgtttggaattgcctggaaggtgtttgttaatgaagtgcttattaatttcaacgtgtatgctgatgtttgaaatgttataattggattagagaggtagattacagttgatcttgtttatgaaattcctgtcatagtatagtgaacctgcctatgtgaaagaaattttgattaacaaacgtgtgttcatatttagaattcaatgttaaacagtattttctatgatgtgtaaaaaaaaatatcctgagtagtttacataatgatatggtctgtgtttataacaccttccgaagtgatacagtcaatctttatttgtccaacgtgtgtatctcctctttctctgttataagtaaaacgagtatagacattttgctcttgtgtattccttttgaagtgttcgagagatgattgagtggactttaaatcccattttaaaggatagaattgttgattatctttttcatgtcctctagcgcaatctatgattagtgatggcaatgagttaccaactgaaaactagacctatatattgatcaaaatgcagatt

SEQ ID NO: 64081 - DNA, 819 bp, Cucumis sativus
  Intron number 2 from transcript Cucsa.263200.1 (locus Cucs a.263200) derived from phytozome v7.0 (chr-ID scaffold0230 8; pos 46165 to 46983)
gcttcccctctaatattgtatggtattgatattgaacctatatggtgttagctttttgtttgatgatttttaattatatgggttagctctggttcaagagagtgccttatttctataattatttgaattatgttgacattggaattaagttggagtttaagaagtaaataacgggatttgtttgatttttagagagtgatttcatgtgctaattactaattaggttgtactgttaggactaaccctagctagatcctaatgtctcttttagaattatttgaaaactaagttgaattcaattcagcaaagtgttcgtggacttgtcaacaactccaaaaattaaggagaaattacattttgttggtttttttgaaacaatttactaaaaattgtgtatgaattactctttttctaatgcactttttttttaccaatctcacatacgtcaattcacatacagtataataaagaaacatgcggttctaattcttccactctattgtactaaaaaaaaaatacattttctttttggtgtttttttttatataaaaaaacagtaaataatgtgatttcattatatatataattaaatttgatcaatgtttgtaaagagaatcttataataacactaattttcaaacaagcatatcattgtgtaaaaaagaaaaaaaaaaaagttagcttacactcacaatttcttttcaaaaagcatcataattggattaattcgtatgtgcataaatgttgttattttgaagaaaaatccaaagttttgataataaacgttaaaattaattagtgtgatgggtaataatgcag

SEQ ID NO: 64082 - DNA, 454 bp, Cucumis sativus
  Intron number 1 from transcript Cucsa.148750.1 (locus Cucs a.148750) derived from phytozome v7.0 (chr-ID scaffold0110 7; pos 762145 to 762598 reverse strand)
cagtccaggaaatttggtctttattccaggaagaggtaagtttctttcctttgtaatgaggttcttgctgggttttgatttcatcggtccaagatcttttgctttgttgaaccttgtagtttaagaccaggtttggtaagttgtgtgatagttcttttttcgtttgcagatcaaagtggcaactatccacctctgaatataaggtagtttcattttgatttattttaattgtgatatttgcaacgtttctagtttctcaacagcctttttttgtttgaaattttcttctctgcagcacaggtgttgtggctttcttagatgaacttgaaataatatagaggaagaaaccatgtctgagttaatacaattggaatgtataactccttcaagcttattctgctcggtttgtgtatgaccaggacttgcaggtggagccattgcaggcataattatc

SEQ ID NO: 64083 - DNA, 870 bp, Cucumis sativus
  Intron number 3 from transcript Cucsa.162560.4 (locus Cucs a.162560) derived from phytozome v7.0 (chr-ID scaffold0114 4; pos 2155108 to 2155977)
ccaaaaggttagtcaaagtttagatactgtttgattgggggtgatagagcttcatttaaagcaaaaatttattgtcttgttctaatagtctgtaggagtgattggtatattatacttaaatctaggaaatctagcatgcccatggtatcaatgattggtaactggttttggtggtattgtcatttttccttggaaatgaaagacttcctcctattgtcgggccctgtaataggtacgcagaaagaacgatagttccttgcaattcaacatggtttattattaaacaggattaggggagaaaaaaagaggggaagagccatgcttcacataaaataatgatagactccctatctaccagtacagcaggagagagagaaagaagtaacatgtgcatatgaatgacacgtgggaattggcaaagggaagggttagtagttagtataaataaaagcagtatgagggcgggaaagttagttatgtttttgagtttggagagatctttctgttcttccttgaaagggaggatagcaggagagaattattcgatattgtaacaaggaattcattcctatagtatcatcaataataataggaattacaactacattcgacttccatcaaatagatcttgaaagtgatgtttgcattagactgaaactgatgcttggatatattcttgcgatggagaaatgtattattttaagaaattataggggaatgaattctctgctagaatatttgaatcttatagaattacttgtaaatgtttcaatatttgaagaaacattgaccggtttaatttcatggtgggatgtgtgtgaacatgtatttgatgatatatgataatagttcttttgggatttataggtg

SEQ ID NO: 64084 - DNA, 707 bp, Cucumis sativus
  Intron number 2 from transcript Cucsa.217930.2 (locus Cucs a.217930) derived from phytozome v7.0 (chr-ID scaffold0165 8; pos 136128 to 136834 reverse strand)
gttgtgcgagtgtcaagaggattcttgaaagtcaggtggttatatacacttttgctttcttcttgtctgttttacttgtcattatctaaggaagatagatgagctatttgacgattggttttgagaagaatccatgttatccaatagtatcaaaacccataaagcccagatggacccaaatgcaccttatgttgagattccacattagacgaatcaaaaaacctcacaatgtaaatagatggctactcctaccattggtacttggttttgagaagaacccatattatctaatcgactaatccctattttttggttgctggttgaatttacaatgtagaaactgcatagtgtaggacttgattgatttttcttatcctaaaaacaatctcttcttgttttattgatatctaattatctaattgcattttcagtattgaaatgacttgttttacatttctagctctcctctactggtgttaaagaatatatatatatggaagattaaatttatcataatcaaccagcttagattttttatttgaccacggtttaatatggtattaaagctggacttgcggcttgatagttccattttcttttcaattagtattggtttcaaactgacagtaagactacaaactttctctgccctccaagtaattcttcattgttattctttttgtattatgaacagccacaagtgtcac

SEQ ID NO: 64085 - DNA, 704 bp, Cucumis sativus
  Intron number 1 from transcript Cucsa.150250.3 (locus Cucs a.150250) derived from phytozome v7.0 (chr-ID scaffold0111 0; pos 1189946 to 1190649 reverse strand)
ctcgccaagtctgtgcgccaccgctgcaacgagtttgtttgtttgtttttttgtttgttatctttgatcatctttttggctagctcttgagtgcatcttagtttagcttttgtgcatttgtgtgtacttgctaactttggttgttggttatatcttaatacatagttgtaatgctgccattttgtactctctgccgttctagcccttctgggtctctgaaattttgttattgggggtgcttattatttggtctagattgctttttgttctgattatcccttgaattttgagcttggtgtagttcttttggattggagtccttatctgaagttttttttatggccttgtatattctctcacttctctcaatgaaagcatggtttcatatcaaaataaattgaacgttctgattagtcaacatgtgctgatcttcgcttaagttggagctttttcttggaagcaagttctgtccggtttaggatttgtttacggttcatcaattgatgcctcatctggctctggcttctgagtgtttcgagatgatctatacgcagctttgattgactgtcatctcaagccttaatttattggttaaatgtttactttattgaaattattgattattttaaccacaaaatgttctgtaccttttgttttctgtgctgtatgctaaatattagtggaatctgtacaggtgcaatttg

SEQ ID NO: 64086 - DNA, 790 bp, Cucumis sativus
  Intron number 1 from transcript Cucsa.223440.2 (locus Cucs a.223440) derived from phytozome v7.0 (chr-ID scaffold0177 4; pos 47310 to 48099)
gttcccatagctactccaaaaactcccactatcaggttcttctcttttatcatacatctgttccaagttaaatcctatatttgaacctttaaatacgtgtcataaatgacttagaacagcgtgcacaccaccatttctatttagaattataattgaaacagtgtggtaatggttggattcttctgtttttattatcatcatattgttctaagtattttttttacaactaattgtgaattattggtgaaataacttaaaacggcgcacactacacacatcacgttctttcattagaatttttagggtggtggagcgtgtggattgtctcttttttcaattatcacccaagtcaaaattttgattcaatgaatgaagggccaagaacggtggacaccaacacgacatgacgatacctattctttatgtaatcatttcaaacggtgtaaggcacgtaaatttgtttgtggaataatctagaaccgatagtttttattaggagtttagaatagcactggtgttaaagtgtttagattgttctgtttttagtcactactaccacacctcttgaaatgtcgaaatttgaataaccatctaaaataaaatgttattttatatcaaggattaaaaattagacgtggagataactattactatagacaaagttcagttgtatttctgttgtaattcatttcagccatttaacgtgagcaacacaacaataagatgatcatttcttttccagaaatcatttgtagacatagtaaggatcaaagtcgaagaagaaatcaaa

SEQ ID NO: 64087 - DNA, 625 bp, Cucumis sativus
  Intron number 1 from transcript Cucsa.302300.1 (locus Cucs a.302300) derived from phytozome v7.0 (chr-ID scaffold0295 1; pos 462130 to 462754 reverse strand)
ccgctttcctagtcttgctcttgtttcattctttggtaagtctattttttgccccctctttcagcttcgattgcatttgtatactactagcccaacttaatttgacttccacaatttaccttcttgtggaccttggcagttcctgatttttctttttctcgtcttggttataccaatttccacttttctttaacatgagctgcttaggaaatttaaacttgtagaaaatttaacatcctaatgcagaaagtaattgcttcttgcatgttgtttcatattagttttggggattatggggctaaagtttcagctgagtcttcaaatttttctatcttctagatacgttaattgctctaggtgaccaccgtttgcttttttatttctttgtttgctcgtagaagagctttacgcagagaataaaatttctatgggattcttctttttggtttgttttggaaaatggcggtactttgggtcagaataagtaaaaagcgaataaacactatgccttattctgaagttggaaagatgtgttgatgttgtgggttcatctttagaatagcaaatgtttatttcatatagtttgaaacctttgatttaccaatctctgtttatgtagttggtg

SEQ ID NO: 64088 - DNA, 530 bp, Cucumis sativus
  Intron number 1 from transcript Cucsa.156930.2 (locus Cucs a.156930) derived from phytozome v7.0 (chr-ID scaffold0114 1; pos 63950 to 64479)
cttccatttccaccgaacgccttatcagtatcaaggtttttctctctcctctccctgtgcgctgtctttcttttttcttttaatttttaacctttaccctttcccctcactatttcctttatctcgattacgctgtttttcgcttcttccccattgaattcacttctttttagctgtttatggcaaccgggtttccccctgcttgcgtccatcctgtttccgttcatagattcataagatcatatacccatccctatattttatcataacaacctttagaagccctaattcataaaactctactcacttttatagcctttaagattctgttcttgtccactcattatctacagtttctttaatgttttggttcccttaaatgtcaaaatcgagtattttatatatatacatatatatatttttaatttcaaatttaatggattacgttctggttaccagcactagcaacacctcctttgagatcttccattaacatctttttctttaaacgctgacaggctgtggatatc

SEQ ID NO: 64089 - DNA, 507 bp, Cucumis sativus
  Intron number 1 from transcript Cucsa.273000.3 (locus Cucs a.273000) derived from phytozome v7.0 (chr-ID scaffold0251 1; pos 8095 to 8601 reverse strand)
cgaagactgcgaacagcttcgcaaagctttccaaggtttcctattcacatccttttcccttccatttttattttgttccttcttttatggtttctcattcgactcaatgctctgaggatccatgttttgttgcatcttcattaatcattgtcgtgagccttccttaaggtctgatctaattttgtgttcaagtgatcccgtaaacgttagtcgaaatgaagctacgcctacgtcggttccattttctgatcggctggggatcctgatttcgttctttcggtttttctaactctcagcttgatcgtgtttctgttttcttgatctatgtttggtcgatttatgtattagatggttcaatgtacaatggttactacaaaacagaatttagatgaaaatttttaagcagttcaatgacactctgatattcgtttgattatcgagcagcttctgattatcattccgtttcataactgctgtgttgtgacttttggtcgatcaacgtgcagg

SEQ ID NO: 64090 - DNA, 1007 bp, Cucumis sativus
  Intron number 1 from transcript Cucsa.167550.1 (locus Cucs a.167550) derived from phytozome v7.0 (chr-ID scaffold0115 4; pos 934001 to 935007 reverse strand)
gcggttctccccttcttcaagcagccaagcatacggtatgctttgcaagtaacgagcattttgttttgaaatcaatgtctcgttccatagtgcatgatgagctctgtgttttaggaatcttcttggtgtaattataatgcgactgtgaggcttagatagtctaaatattaccttgcctgttgaactgatgaattagttagagcatggcaatgattggaatgggagaagcagtgattgcagttctcaatatatcggcaaacaaataaaaggcatggattgagagtgaagtgtcagtgttcaactattgataatttgatataatatcaaatttatcttaagcgttttagtcagtccagttaacatggtattcgagctaggagtccagaagtttctgtattcaaactcgcaatgatatttcctcactaattaatatgtttttttatttttattcgttcttcaacaaatttcaaacccacaaaggaaggaaatgttaaaatattgatatgatattaaatttttcttagctcctcagtttaaagttaaacttttgggtctattgggtcaattagtgatttcacaattaaccttagaaactcctcaatgaacaaggctcaaagaatattgaggccagtccaaatccattgatttttgtcgaaatgttctatcttccccatagccaaaaccgcctggatgaatgaaaattaggaacatttactttgtatgagttgacagaaaagttgtcactactgttcatgcaccttagtgaaatctggctgaaagagggccttctggtttgagaaaggatcaaaacactggattgaaaaatcttaaaagggtattagtggaatgatggacagatagtagaggattcaatagtttttgttttgtgattatttgatctatatatgtataactgattttggtgatctttttgttaattagagggtaggttatggtggtaattggtaaatgattgtcgcgcgtctttgtaatttaggtggacacat

SEQ ID NO: 64091 - DNA, 680 bp, Cucumis sativus
  Intron number 3 from transcript Cucsa.304180.1 (locus Cucs a.304180) derived from phytozome v7.0 (chr-ID scaffold0295 1; pos 1898922 to 1899601 reverse strand)
caatcgtgtatctggctccttacttaaggtcattttctattcttggattcttcttgtttttgttccattgaattgtgtaattgtgaattattttctagctgtgtcgttgaactagttgtttacatttctagaactcaaagtagaggaagaacgagtaatcagctatgggaataggagaatacagattatagaagttttatgtgattttttaagaagttacaagatgaggttcagtagtgtgccttatcaaaattaaatggacaagaggttatgaacaacatttcatttcttattaatggggcttttctctaagaatttgttttatgtcaatgggagcatagctggttcgattcattaggcattgattaccatcccaaacgtggatagtttagtcctcactttgcaatcgttgaacttgaagaacgtttgtttatgaagttcttggggtgggtggtactgtggttgctaggttggttcaactcttagttgtgtcaatatgtttgagccaaagtcttagattattatgtgtgtttgagactttagccatggctaacaatgaacataaagcggattttgttcatgtgtatgtagtatgcacaaacatcagtatattcttcttaccatgattatgcattgcgctattaggtcaaacttatcgttgtcgcccgaagagagttggc

SEQ ID NO: 64092 - DNA, 460 bp, Cucumis sativus
  Intron number 1 from transcript Cucsa.299440.2 (locus Cucs a.299440) derived from phytozome v7.0 (chr-ID scaffold0292 0; pos 29801 to 30260 reverse strand)
gcttggaggcatctcataacccgggtgggttaatttttcgcttaacagtttgatcagatccttaatctttcctgattgcaatcatattgggcgccggcgacatgggtttttttttaaagcaatcctttgattttgggaaccctagttttcttcaattttgggattttcagctttatcgatgattattgattggatgttgcgatttttttacgtgtatggaggtgttgttattttttgtgttttgctaaaaagatgtgtgttttaagctctttgttcgtgtggggtcgttgggcggcagcttcctttcatttcctcgtttgctagcttctaggattaacaaaagggtttgcgtggtcaaacacttctagtttctcgatatgttattgtctgtttcagtgactcaagatgtgttttctacgctacaggtttcaaggaataatttggagtttgggcagctaaa

SEQ ID NO: 64093 - DNA, 961 bp, Cucumis sativus
  Intron number 2 from transcript Cucsa.149130.2 (locus Cucs a.149130) derived from phytozome v7.0 (chr-ID scaffold0111 0; pos 2117 to 3077)
gagctacggatccaggaggtcagcacctgtactttttttttttttaatcttttttatcttgtttgtctgcttagttttcctcccatttgaagttccttctcttacattagctttcattcttcttcatccatcctcagttcctcaacgtccgacattgtatactggaaagcaacctggatgtttcttgcatacattttttcattcatactttagtttatttatcagaagacccccttaagaggaaaaatgactcctacaacttctcacagatacagggttctagttcaaagaatgttgcttccgttactattagggatctcatcacatgaagaactttcttcctttggagctatgagattctttaagaacggtgttttttttagagtaagcaaaatgactacttgccatgccacaacttgcagcttatagaaatgtgatagtacttggtgacgccttagttggattttgattagaaaactatctcaataaaccttgttattgcagaaaaacaatgaatattgagcaagaacaccaccttaagtaatcgtatatgtactttatcctgctctggagctgcagaaacttttgctaaaatatatggatgaataaacctgtaccatctaccctctctttctgagaagactgaccttgtatctatttcttggctgtaaggctgtaacctgaacaatgttacttttctattcgatgttaaagagatcattttgcattgttgcttcaaagggatattttgacacatatatatgttagcaagtgcgttcaacctaaagcggggaatgtaagatttcatagcatcttaaattattgtatgaactcaattgcaacttatcctataatcacgggagatataccatttggaaagttattattattttgacgcacttagttactaatacacatggatatcttactacttatattatttatgcagtatcggctctaa

SEQ ID NO: 64094 - DNA, 231 bp, Cucumis sativus
  Intron number 1 from transcript Cucsa.292590.8 (locus Cucs a.292590) derived from phytozome v7.0 (chr-ID scaffold0277 9; pos 79957 to 80187)
gtggccaccattttatcccgtctctctattttggggtttgcatcaaagtcttcttttaaaaaccaattattgatctcctccaatagtagtagaatcgaggttcaaaacagctggtttttttcttttttttgttgctggttttcttttacaatgggcctatctaccctttttgattgagtttttagaattcgttttttcttgcagagattgaatcgattgagacccttttcc

SEQ ID NO: 64095 - DNA, 746 bp, Cucumis sativus
  Intron number 2 from transcript Cucsa.178860.3 (locus Cucs a.178860) derived from phytozome v7.0 (chr-ID scaffold0122 7; pos 1238853 to 1239598 reverse strand)
agttggagctggttgaagttgttgctgatcaggtattcatcatcttgttggccttgcttttctttaatcaaactcctccatgtaatcttataagtgcaacatatttgtctagaatttccatctattaccgcttgtcacggttaattttaaactaaaaggagttagtttgtttaaccctgctgcaatgggaagctgaatccttgcatattagaaaggtggacgatcctttatgaatttattgcatggtgatctttctagatgttgcatgggccagggtttttctcctgcagtataccatttcaacaaatgtataaaacaaaattttttatttattttctaaaatattaaagctggatccttgcatgttcgactggcagaccaccccaagaaatgaataaaacaaaagttgcatttgttttttctttaggaaacaacaaatatgtaaatatccagttcttgggatagtacaccatgggagtaaaaccccttagtaacctcaagggaagaattaaactagaattacacatcattttctgtctgtgttctaaagtagttttgtagttatgtgaatcagaaaatcatatctatattacttgccaaactgtacactgtttaaataagtagaaacgtggtgtttgtaggagtgaagtttgtttatttgaacgattgttggtggcctgataaatctcttctgaccattaatccatgtatgcacatttcaaatcaggtagcagtagctctttctc

SEQ ID NO: 64096 - DNA, 909 bp, Cucumis sativus
  Intron number 1 from transcript Cucsa.259680.2 (locus Cucs a.259680) derived from phytozome v7.0 (chr-ID scaffold0222 9; pos 6064243 to 6065151 reverse strand)
agaatcgcgcataacgaatcgaccctctatcccaggttggttcttctcaattctgatgaaacccagatggggtttttcataactcgtttacgtttgtgaactgggaggaaaaggggttttatttgggccttgaaagtgttcgattgtcgtaacaagttaagtttttgtagtgctgttctgctttccccgaatttggtagttttaatgctccagaaatttgtattgaggtttagttttggcgatagattctttttaagttctctctttgaccttatttgctatgttttttattggagtgtaatggaagttgtcctttcttacttccctctttcttgttagttaaatgctttcctttgcccattatttttcttttcgatttttttcctggaggctttttgagtcttgtgctacagttcactaatggggctctttaatttttggcgatagaatccgtgcgtttattgtgttttcaatctatttccctttgctttccgagaaggaagattgactgtgaggtcaagactactttccttcgtcgtctttttttaatggaagtggtgaggttactcttttctttctgttgctctcatggatttcaaacaagtaataacgaattcttacagaagaagaaaggaattctaactattttggtcaacaaatgaattctttagtgaactttttctttcttattttcaacatacatatacacaacgtgttcgcgtggaacaggaaacatatataggctattgagaatgaattcttggacctccaatttaagttctcttttatgctattctcatttggaaagcttgaaatattcttggacctcaaatattttggttacttgtgataagctctgaataaatgttgggtacgcgtattggatactgacgttgttcacttgttcag

SEQ ID NO: 64097 - DNA, 505 bp, Cucumis sativus
  Intron number 2 from transcript Cucsa.254980.1 (locus Cucs a.254980) derived from phytozome v7.0 (chr-ID scaffold0222 9; pos 3149128 to 3149632 reverse strand)
tattggcacgaaggtatggactctgtgaaatgtctatttagctaattttgtatctgacccatttttacatttattgtagagagaacatttccgctaggtgaactctatttggtatacttttgtccattgtttctcaaatgtagaagcttggtgtatatgttgattaatggtgtctatttttaaagatgatgcatgtatgtgtgcttgttagctaattggaagatcacatttcatgcattacggctaatattgaatttccatcacaaatcccagaatctcatgttattcttaccttgatctttggtgaacctattttgcatttctcatatccagcatgtaactgcactaatgaacaggattcaaagttctctctccaaatatattcaagattgatgggaatgtgctgtgtacactcatttgagaaaaatgcaacggtgatgggtttgttttattgtatgctttgcccttactggcttagtctccttgcaggtttgtcaaaagctta

SEQ ID NO: 64098 - DNA, 796 bp, Cucumis sativus
  Intron number 2 from transcript Cucsa.167000.1 (locus Cucs a.167000) derived from phytozome v7.0 (chr-ID scaffold0115 4; pos 366908 to 367703)
ctctaaaacgagccgaaggtaatgaacataatgttatcttttggatttgccataaattgagttctatttgtgagtacgccatgattttttgggtactttgttttagttgtatgttaggttcttttgatgaattcatgtactgtaagttctcataattcaatgaacgttttcaatttattgtttgtttggaagttggttcagtatacatgttttgatgaacattgagaatatatacattattggtgtgttgatgtctgtagatttagtgatttgactcttcgaagtttcccttgaagtgttcacctcatggtagttttcattttactttaaatgaaatttaggtggtaagggtttttctttgggtggctcgtaacgtgttaattttatagttggatagcatattcatgtcttgaattttacgttatcacctcttattttattattgaaaacatataatttggttcttctatcctttgtaaaggcttctgaactctatttattttcttatttcttctcgtaatataatgtgtacaccataatttatttataaggtgtagttggaagacatgttagaagaacattggaatacctttttctaattccgggggtattcagtttgccgttgttgtgacttgtgtttcttgtaactggagtaccaagtttgtgtttgtggttcacactgttgatgtatttaccctattttgaaaatttatgatgtctattgttttctttttgtgtgaaatgaagaatagcatttcttcaatttattctccttgtatgttttcagagctgataa

SEQ ID NO: 64099 - DNA, 788 bp, Cucumis sativus
  Intron number 1 from transcript Cucsa.271150.2 (locus Cucs a.271150) derived from phytozome v7.0 (chr-ID scaffold0250 0; pos 88922 to 89709)
gatcccttcgatttgtttcgtaaaggtatacatcagtatattctttttatagcttgtctttctaatccatcgatttaattttaggtcgtcgatgtgtacagtagcaatataattctgtacctaatttgggtatttctgtaatcgatttcttgcattgaatttactgagatctctttaatttgggtgtgtagttacgagattctgattcttgttaagcttatctgggtttggttatctcagttatataaagtttggtaatttatgtttatggtcaggttcagattatcaggtccacaggtagttttcttctttctcttgttgttattctccttttgaactttttttggttgtacaaatgttgccttttcatttacattaattgtaataaatgtttttggtttatgttcatgtagctagtacttagctcacttgaagtgtttctgataacatgacgtgtaaggaaaattcatgagccgaatggttattttatctgatttctactagataagactataaatttatagtttaaatgatatgggttagttttattatgaagtgtccactgtccttgttgcagtgggatgatttttagtggataattcatacagtttctacatggaggtttattgaataactggagttctttttctttttagattaggagtaaagaaatttaatgtcttttaagatggatggaaattaatttattttggtttatttgatttactaacttgcccgaatcatactttgcaggttttggttgaggctacaaaagcacgagctttttt

SEQ ID NO: 64100 - DNA, 576 bp, Cucumis sativus
  Intron number 2 from transcript Cucsa.271150.2 (locus Cucs a.271150) derived from phytozome v7.0 (chr-ID scaffold0250 0; pos 90542 to 91117)
ctcactcaattagaggtaagttgacttttgaaaaatgtgtaaattaagtaacattttaaatcaatttgagttaagttgatttttcaaggcatcaggtggaagtagcacttcatctccgttatcttcaaaacattttaacatcttggtttctctcttccttttaacatatacatatgttttgacatcgaacaactcattttccactcaatagtttggaggggaagttaatttcagtctcacaacttccgatggttatttcttgttattaaaaaaaatatcatataagaaggtctgcaaatgactgttatagtgatataactttgtgatagagttgaacctatcaagttgcttcacagaataggagtgatcatttttctgatgactcgtacattgtttgaactgtttgatctgtatggtatgcttttgctttattaagaaccttgtcttccttgtcgtatgaagaatttgccagccagttttcgtgatcaacattatgctctctttatcttttgtgtcgctgcatttacaactcaatagttatcatactgtacttttttaaactgtagcttcaagttg

SEQ ID NO: 64101 - DNA, 788 bp, Cucumis sativus
  Intron number 1 from transcript Cucsa.155980.1 (locus Cucs a.155980) derived from phytozome v7.0 (chr-ID scaffold0113 9; pos 220598 to 221385 reverse strand)
aggtatatctcttgctaactgttctgattaatctagacttacgtgtttttgctgctctatgggtagggtagggaaatgagttggtagggcttgacgttaaactgagaagttggtatttcgaatttaagctatctacatagcgtttgagatttgatcctatgtcgtgtggtaaggctacacgttcttatagggcttatggttgggaaggaaccagaagatatacggagaataggctactgttttctctactttgtttgccttatttacaacacaaatatttcatctgatgctaaaaaacacatacgctaacgagagatttgacccattctattgattattttgctttcataattttgatgtcttttctattttactccaatatttgtattgtattttgtaccattgtcattaatttgaccttttatgattttcacatttagtatattttacgtttaatttacctatatccttaaaaaaatcatatattcaaacatatcattatctattctttttaaaaattgatgtatccgtatctgtctcggcttcatagtttacaactaaatgcatggtagtggtgccatagctacaataaaatctattgtaattaaccccttgatccttgtgtgattatactggatatcgtttggtgcattttggaatatggtgtatcatttgacatttaagctgtcgtgtattagtctatgtcctcaatttgatttgtagggttgcctcctgaaatgtataatggattgatgtgtgactgaaaaaaattctgcaggaagaggaag

SEQ ID NO: 64102 - DNA, 590 bp, Cucumis sativus
  Intron number 1 from transcript Cucsa.239600.3 (locus Cucs a.239600) derived from phytozome v7.0 (chr-ID scaffold0204 6; pos 392104 to 392693 reverse strand)
gaagatcaagggggttaggctagatctgttgaaaggtggatgaatgctttctaatttgaaccactttcctctattttctttaatttattcacatttctcttttatgtcttttacttgaatcataagtgatgccttctacaaattttgtgcctttttgttcaatagatttacaccttttgatttcactattggtggttcattactatgggttttcttctatagtggggcattggatttatcttgctttcttagtcatcatgacttgtacataagagtatcagatgggttttgtttggaaagaacagaatccagttgaatgcccaatgaagatgtaaagtatcttccttaaccgtcttattttcccttcttctttgttttattaactggatttttgcaacatagtttaaggatttgtgaaggaaattgcaatctttcatggatttttcttgttttgtaatttttgttttcaatgactgtctaactgtgaagaaacttgagtaatctgtgttactgatactaagttctctcaggaatctcttacctataatttgaaactgcatgatgcttttttatctaattatcaggttaaa

SEQ ID NO: 64103 - DNA, 955 bp, Cucumis sativus
  Intron number 2 from transcript Cucsa.178560.1 (locus Cucs a.178560) derived from phytozome v7.0 (chr-ID scaffold0122 7; pos 846720 to 847674 reverse strand)
gacctaaagatctcggtcgacgtagcaaggtcagtacgattccttgtcattcttcttatgctttctatatagcggtttctgtggtgtatgtggaattacgtgtcggccatggccggaggttggtttggggttatattgagattgagatctttgtgctttttgacttaatcgttttccttcttgtacattgttaatagaactaactattgtctattgagatatactcttgagctttcaataccttttactacctgcttgtgcgtgaaaatgaaaaaaaccaattgtaattccggggggactgtgaggaagatggtaatgattttacaaggtggtgctggttttgtttttggagaacttgaagaaggccaactgacttgggtttaggattatttaggagtttgttgggagtgtttccagaatgtgacttttgagtgttgtgttcaatttcaaaaggtgtttgaaacataatattcgtgagtttttcacttttctcaacaatttatattaactagaagaaatgtaatttgcttaaattacttcatactttagaagcaattagtaattgaaagtggagtattattttcagaactacggacaaaacatttgaaattatgttttctgatattatttctttgacatagtatgtaaaaggcatgctttgttagccagcaattggggaattttagtaaagcttccaatcagtttaaggaactagcaacataaactaattattagagtttttttttttccttttttcctttttttttttgtacattggctgttattttgtgaaatgactcttttcttgtatggagcttcttgtttggccattctgaaagctaaaagacttcgggatcaaaacacgagccccaattgatcatttccttttccttttcttctttaaattctaatttcagttctttcataatgttgttttcatatttcccttcattag

SEQ ID NO: 64104 - DNA, 157 bp, Cucumis sativus
  Intron number 1 from transcript Cucsa.178560.1 (locus Cucs a.178560) derived from phytozome v7.0 (chr-ID scaffold0122 7; pos 847687 to 847843 reverse strand)
tccttctttttctctctctctttgcctcccatcaggtattcatcttacatttctcttcccttgtgtttctttttttttcttatggcgttcttaatggggtttgatttttattgcttctttggtgtttttcaggtgtattctgcggaagtggagaaag

SEQ ID NO: 64105 - DNA, 379 bp, Cucumis sativus
  Intron number 1 from transcript Cucsa.266060.1 (locus Cucs a.266060) derived from phytozome v7.0 (chr-ID scaffold0235 2; pos 487442 to 487820 reverse strand)
caataacgttcctcacctcggaaacatcattggctgtaagaaccttctttctcacttgtgtatttttatgtttcactctgtttcattgattgattgaggactcttatgtttcttctcatttctgcgtgtttttctttgaattggttgatgttcggttactgagaattgaataatggagaattgagtaatttttccgccctctcaattttacttccagtgtgcctcatctctgtgacgctgattgttgttatgattattgaaggcggaatgaaacgttttgtttatatttgatttctaaatcctgttacactttcaccatacggctgcattgatttttattttttttaattttttgtgtatgcaggtgtgttgagtgctg

SEQ ID NO: 64106 - DNA, 619 bp, Cucumis sativus
  Intron number 3 from transcript Cucsa.272490.6 (locus Cucs a.272490) derived from phytozome v7.0 (chr-ID scaffold0250 0; pos 1004703 to 1005321 reverse strand)
acatttttaatcttggtatttcaaggtgagtttcgagttaaaccttggcatttcctattgaattggaccccctaaccaatagcaagttagcgtttgttttgctgattgagaaaaatgtgttgtaaattctgggttcgctgcttcttattgcaagtacgaactggaagtgaagcaaaaagtgggtttttatgcgttggtcttgatactgggtttgccaaccatttattttcatttgattcacacttttgtgtggttaatttatgtggaagaagagaaatttttatcattctatggtggtcggtagattttcttgtttggtttgatcacaacataatatataaacaagatagaagttagttgttttcccctcatgcttcagcaatggatatttccttccttctttcctttccccttccaatgatgcaatgatggatttgattccaaaaaatcaatattgatgaattgctctacttttgttttgaggtatatgtctttagcttatatttcttacatcatacaaattgtaaactctttataatttatttttaaaattccattgccatgcattttttggtacagttgtaatttaactcttttgatgtgtaggaacgctcagcca

SEQ ID NO: 64107 - DNA, 820 bp, Cucumis sativus
  Intron number 1 from transcript Cucsa.176460.1 (locus Cucs a.176460) derived from phytozome v7.0 (chr-ID scaffold0122 5; pos 720129 to 720948 reverse strand)
tgattgacactcctggtacgaaagtatttattccatgtataactttaataaaatatatgatataaaagaattatttcaaatgacaaaatataacaaacgttcttattctattaataataaatactagtagacattgatagtttcgttataaaatcgtttattgttttttatataataaattgaatgactttaaattttggactaaatatgagcaaataaatttttgtgcctcaacaccaacaaatcagtcgtctatctaaagaaaaagaccaatagtgaaataaaaggtagaagctgcacttagtccactataaatgctctaaaagatataaagtcttgttggatgaaaattattttgtgtttataattttctagtaaatagaatttatattgtgttttccattttatcttcagtatttttttttttcatatttcttttttaaaaacaacgttttaaattctaagtctaatttaaaaaataaagagaattttttttaaatatgtatattggacaaaatatttatatttcatagaaaaatcaaatctaataaattttattggttttgttgtatgaagtgtataatttgtcaatttttctatatttagaaaaaccccattacattttattataaacataaaaaaatatgaaaaagcaaacacatttttttaaaatctaaaaaaaccgaaaaacaaaaatctttataaatcatgagacctaaacaaatccaaaaacaatcaaataatgaaatcttattaactataagttctctatctaatgcattccgtgaaaaaatttgtgcaggtctatttgatttatccc

SEQ ID NO: 64108 - DNA, 609 bp, Cucumis sativus
  Intron number 1 from transcript Cucsa.283220.1 (locus Cucs a.283220) derived from phytozome v7.0 (chr-ID scaffold0265 3; pos 441006 to 441614 reverse strand)
gaagtcgttcacatatagctgcagctgaaaacaaggttggatcattaactcatgaaacttattttagggaaagtttcatgtaaattttatggttttcgctttaaatggcaattgcctcttaacagttatctcactttttgttcttcattactttatcaaacatgtttcaaaagcactaggcttctagaacaatggctcactttattttgcacctacaaatagaataacacatcttgcttccaaattggttgacaatttttttccctttggttttctgattactcagaaagatataaagtactgctaagaagttaaggcgcaatcctctgaaaacaatatttttcaaagttgttgaatataaccaggtaagttgccttttgaggacaccgagtcaaggactagatatatcctttcagtctgtaatcggtcgtagtttttaaaatcgtacagaaattttatgatttattagcttagatctgtcatgattgtgaactgctgacctttgtttcttttatgaatattcttctgtcttttactcatgaaggaggggcttagtttctgctttctaatgcaggtgcgctacaaaggtcaagaaaagggcacttcatt

SEQ ID NO: 64109 - DNA, 716 bp, Cucumis sativus
  Intron number 1 from transcript Cucsa.236170.1 (locus Cucs a.236170) derived from phytozome v7.0 (chr-ID scaffold0201 4; pos 143431 to 144146)
ggaccctgaggagttgcctggtatctgtctctttgctttttcgattctgtttcatattggtggtgtatttccgactgattgtttttctgtttgtctgagtggtagacttcaattttggtttttttttttttttttctatttgggtaatttgtctcttgcatttctagggcttccttgcgaatttattcgattggtcggtctatggttatgtgcaagcgacggtttctttctgtttaatacgtttggacatgatgttttaaatctctgatttctagtgtttgatttttttctgtttagcttggagatgaaagtgatattgtgttcgtatttgtttgtttaaatcttcttacgtgtctccttgatttcattaaatgggacctaatgatattgcttgagatgttcacaatttccgaattttgttagtgttgatggaaagtctttgttgggatggtaattacatccggtttatcgtttctggaactgatttcagttagctacaagtgataattggttggattatgtttatagtttgagcttattttttatttggtggtggttatactcataatgaaggtggaaaatatgtcctatttcatttttttttgttgttgtttatttcagcgttttcaaacaaagttaaatgcttatttttccatataggttctaataattgtatgcaatgcagggctttctaagctaaaaactggtgatagaca

SEQ ID NO: 64110 - DNA, 471 bp, Cucumis sativus
  Intron number 1 from transcript Cucsa.231850.1 (locus Cucs a.231850) derived from phytozome v7.0 (chr-ID scaffold0198 9; pos 50867 to 51337)
ctctattggctaaagctaaggaatctggaaaattggtataatttcttttgatctttcacttcattttctacattatcgtctcaattgattcccgtagaattttcgaattttacgtcctgttcttcctttttcctcttaggtgattgttttcattgtcttggtatataagtcgtgatggattcgctaggatttctgatctcttatgctagtttatatattcgatttatctagattgaatggtcttgtgttgaaattgatgagtcttttgatcgatttgtattccttatgatttctcaatccttctctgttacgctttttgttaattaactcgaaccttgattgtgctattttgcgttaagcgaactctcagtgattctgtattactgtttctgttcatttctttgttcttgatgtttctagagttttttcttgataggttgtggtggattttactgcttcctggtgcggccc

SEQ ID NO: 64111 - DNA, 595 bp, Cucumis sativus
  Intron number 1 from transcript Cucsa.253630.3 (locus Cucs a.253630) derived from phytozome v7.0 (chr-ID scaffold0222 9; pos 2175798 to 2176392)
atcagctcccaattttttcgtggatctcgtatcaggtgttgtgtgccgtttcttcttcagtggtgtacgataattttgactctctgaaatttattttacaactcggaagtcactgcccatttgatacaaaacatttttcttcttcttgctgtttcacgactattttttgtcagaatttctgcgttttttgagcttattatgtattttatatgcttcaattggttagacaaaggtggttggtttgtaatttagttgtagttatagtattatgggtgctgttattggaaatgttttatgaaattatctaccatggtttttttggaggataattatgagtaacatttgctttccctatccatttttgtctcccaagccgatttcttttcgattatcattagttattttggttccatcgaaggaaaaaatgagaataactaaacaccatttgatgtgcattttcgtttttttttttcagtgtgtttataataggatcactctttcctttgtagcgtctatttgttttagttaagttggtatttttatatgttgctgtgcttatcgaaatttcagattgtaggttgctatcttagacaag

SEQ ID NO: 64112 - DNA, 355 bp, Cucumis sativus
  Intron number 2 from transcript Cucsa.217850.2 (locus Cucs a.217850) derived from phytozome v7.0 (chr-ID scaffold0165 8; pos 85424 to 85778)
ccaggtgttgaaatcagtactatattctctaacgggtgagtttaggtttatttatattccctgttataataatggattttgcaactttttatattatttgatgttctgcacattttacaccccttatgattccactccatttctctttgtcccatcaattcaatctccttacaaacagtaatgaaaaatggtaaatttgactgtttactgtcagagataatggttgtgaatatcatgttcacttgttgataaatatgaaacttttttttttttcgttttcatttcttcttatcttctgatatctagtaacttatttgcagtggagactcagaatccgaagaaccagtccacatcc

SEQ ID NO: 64113 - DNA, 665 bp, Cucumis sativus
  Intron number 1 from transcript Cucsa.142210.2 (locus Cucs a.142210) derived from phytozome v7.0 (chr-ID scaffold0107 9; pos 510137 to 510801)
caaaatcaggtaaaactcttatacgatcatatgaactaatggattttgatactaatttggttatgttctttgctctttctttctatgatgattatgaagaagaatctctgttttcttcttctgtctgtcttgtttatcatctatggttctgtctttgtgttttcatgtctatttcatggcttctcttagttatttttggaccttgtttgtttaatctgttattcttttagtatgaaaggcatcttttagcataatatgaagaggtatgtgaagaaatctggtagttgatttattttgatctggaaaaaattatgtaatgagatgaaatctctgtttatccacttaggaagtggatataatgtttctttatcttcaaatgtgcaacagtgggaatggatgatagtgggttggttcttatctttgcttctagacccttattggcaaatagtgtattagtcaaatttcactttatatattgggatttttattctattgtattagtattcctacacatgtttattggcttttgctttgttattccccttcttgttatccatattagccttattggtgttactttgtgagaaatgatacaagtggaaatgtatattcttctatgatgtttcccagaatctccaaaagttgagagtacatcgccttataca

SEQ ID NO: 64114 - DNA, 469 bp, Cucumis sativus
  Intron number 1 from transcript Cucsa.303250.1 (locus Cucs a.303250) derived from phytozome v7.0 (chr-ID scaffold0295 1; pos 1218923 to 1219391)
cttcgccctcgtctactgcaccgccggcatctccggtaaaaccctgaaacctaaaccactgtcttgttccgttttgttcttagatctgtatggtgtttggaagtattgtatagggtttggatgaaactcttaactttgttcattttagttacttaatctttagtttgtttatttaaaggattatttcgttttctttagtgtgtgttctgcaacaaaatatttatttatttattttgaagatcttgagaccataattaagctttcccgaagatataattaagggaaatattatgttaaatgattatttaagcttaaagtttgaacatgaagagctataataattaaatgaacttatatgcgatgtattattacgagttagtttgataattattgtggtaaatccttattttggtttgggtatgttttcttctcaggtgggcacattaatccggcagtgaccttcgggctt

SEQ ID NO: 64115 - DNA, 1017 bp, Cucumis sativus
  Intron number 3 from transcript Cucsa.170780.2 (locus Cucs a.170780) derived from phytozome v7.0 (chr-ID scaffold0117 9; pos 107142 to 108158 reverse strand)
aaaaggacgtcaacggctctgatagctttattcccgtaagcttttctcttgttctttagattatcgttatcttttcccattcccttttctctctttttttgacgattttaggagacatttggatttgatgtttgatgggacgggttgtgatgatcaatttttatttgttttctagactttatttattaatttattttgatggtctgtggtctgtggtctgtgtaatttaaatatacaaaaaagaaagaaaggatagtaactgaagggaaaaggagaatagacttgaaacgggagagtgttgaaaagaaggcacggttgcagtggttaagaattttggaattttggaagtaaacccattttagattccacatgttaatgaaatatgcaagctcgatatgagctgtgtggagattatattttatgtaagttgggttggggagagtcataagaaagaaggaaacaattcattttcagcaacttaaaggaagtccacacgttttggcatgactggaagttgaaaattttaattgcagatttctattttcacgtcatgatttgcttggattgtttgctttcatttttaaatcaaaaccagattctcaacccaaactagaatgtttggtggcatcctttccagaaaaaaagtaacaatcttctttttttttcttttttgaaaagtagtgaaaagttgattgataatggtagtagatgttatagtattaaaattaccttcactcgtcagctcaagtttctaaattgatagatgattcaatattactatcaagacttcgacttattgtgtcttcaacatattttcaatctcatcaactaatgcttttgagtaaatcagcgtttcagttgtcaatgatgtacattaagtgataatacattgagtgataatgtagatcgtagtctggatttggagacacttggagtagaggactatataaagtttgatgattttgtttgtttatatttgtaggaaacaagacacgtctcaaagtcatcagttttctt

SEQ ID NO: 64116 - DNA, 550 bp, Cucumis sativus
  Intron number 1 from transcript Cucsa.193950.1 (locus Cucs a.193950) derived from phytozome v7.0 (chr-ID scaffold0133 7; pos 87054 to 87603)
cgccggctccgccaccatcgcccagagtgacccaagtccgtcccctctctttaccttccttctctgttcttcttcttggtgtgcttcagacagttagctttaaactctttttttcatttttgctcctaattttagccttataaggtatttccaaataaattaattttttaaaatataaaataataatcataataattgtactaagactgcattaaaaatgcattcatctcaaattttttaaaatgaaaaatcgattcattgttgaaccatatttttctgtatttgtaaaatttgtgctcatgttaaactaagtcctttttctacctttatctttaacattgaaacatactaaaatccatttgattttaattcaaaaaatgtttgttacaatcaaagttggtacaactcattatatatattagtgtggaagattgttagtaaaatgttgtttattaaatcaatttagagagttacaagtgttaaagaatagtagtaaatgggtaaagttttggttttgattatatttcacattgttgtgtctgtgcaggtt

SEQ ID NO: 64117 - DNA, 657 bp, Cucumis sativus
  Intron number 2 from transcript Cucsa.271700.3 (locus Cucs a.271700) derived from phytozome v7.0 (chr-ID scaffold0250 0; pos 517773 to 518429)
gcttggtcttggggtttaccattccggtgtgcaaggttagcaaattgtggcgttttttttttccttctgtgtttctgtttttccctttttgggttttgttagaggagatgaggaggatttgggtcttttataaatgaatttttccactcgaaagggtttgtttttttttgaagaatttttcttgattatccgttggggtttcctacagatctgaggttgaattcgttttatttttgagtgaaatttgcggtacttgagaaactagaggaacataagggggctttatggttgtgttgtgaagttttctggttttggttgtggatttatgtctgtgaaatatgattctgtaatgtgtagcttgatttggctgtgattttgatgactgatgtgttgaaaaattttgagttcctgcatttttctttgattctaattgtttatatgattttctattgaccttaatctataacgttttgtgtttgaccttttcaagagattttggattgatgacttaagcagtccatatttttctttgattaaagtccaaaagaaatctcccgtgtatccagtttgtttaatttatattatcaagtagtgcagggtgttccaaattcaaatatcttaataaaagaatcttttttgcagttcacggagttgaat

SEQ ID NO: 64118 - DNA, 462 bp, Cucumis sativus
  Intron number 2 from transcript Cucsa.184510.1 (locus Cucs a.184510) derived from phytozome v7.0 (chr-ID scaffold0127 4; pos 206165 to 206626 reverse strand)
ctcagctttccaacaatttggataacgccttgcaggtaaccacgtctcacacttcttcttctattttttgtgttttttcttgaatacgtgcatttttagattcaaaattagcgataaaatgccttaaatctgctatatttcatgtttgaatgggtggcttgaggcgactaccctattggggtcaggaggcaacattctgaaacttaagttgtattcgttatgattagtttatttatgatttggatgacacggtttatggaagtgcgctatataaacgctacggcttgaattgttaatgaaccatgtctattctcttttactttacgccttttgtccatttttaattgtcaattcttattgacaagaatgttattaaatgttgctctttaaatgaaaccaaagatttgattttgaggactgaattcagggtgctagggatttggtcaaagcaccaactttgac

SEQ ID NO: 64119 - DNA, 678 bp, Cucumis sativus
  Intron number 1 from transcript Cucsa.228740.2 (locus Cucs a.228740) derived from phytozome v7.0 (chr-ID scaffold0193 6; pos 31416 to 32093)
acgataatgtacgtgatttccctctttttctttgagataggtagctgtttttttttttttttttgatttcatggggctgggtaatgatttttgaggtttgaattacagcatctttgtgggtttttgttttgttttagctgttggtttatttgactagtggcttgcatgagattttgtgatcatgagtgctgaatcataaagagacagaactttgcttcattgtacttcgtattagtgaagcatcttcataagctttctgaattagtttgaagtatttttcaatgaagaagtcaacagcttcatttttactgtttgtgattctaaggtactgaaaggggacttcctatttgcagaaagatttgaaatttctcttatattgtccagattataaatttacattcgagtttgagtttgagtccgtggtatttcaactttgcattgtatgttgtgttttgattcatgttaattttattgtttatatatcgaaagaaataatgttttaccatttaaattatcgattactgaggactaaaaagtgttcgtccgtattttgcttttttattttctgatgtgcagtcttcatctgtacgaccaacattgtgggctgatacactatgtaattcagttttccttgtttttgggttattctgcaggattctgaaagtgagaacaaaaaga

SEQ ID NO: 64120 - DNA, 832 bp, Cucumis sativus
  Intron number 2 from transcript Cucsa.184650.1 (locus Cucs a.184650) derived from phytozome v7.0 (chr-ID scaffold0127 4; pos 304718 to 305549 reverse strand)
acatgtaagatcattttccttttagatggattgattgtggtactgggcttttatggccggaagttttgtggtttttggattttgatctgggttttaatcgccattttactttttgggtcatttcggttggttggtttcactctcctaaatgaactctttggaactacatttgaaattttttgtttccttgtaaagaaaagaaaaacaacatatgttggggcaccggaccaggaggagagtgtgttttggtaatgttttcgttgattatcgactcaagtctcaatgggtttttgagggttttaaatggttcttagttttccttgtgagggatttttctggctcagaattctttgtctatttgaaaagaaagttgttatatatggttgaaattgccttgctgatgttcctaaaaaatatactttagttcttcacttgctgttagggctctatagtgttacgttggagttatttgtttcgaaatacattgggtttcattatttggccatcagctctcttctataatattttaatttatcttctacatctatctcattttgggttgccatggcaaaatccttgtgtaaattattgtgcattatcttgaactcgctgttcaatttctgttttggatttgttttgtttcttccttttccctcattttttcttccactcaattttttggttaaatgttttcatatttcggtaattcctatgataactcttggttgaagttgagtttccttacctagatttgtggattatcagctggcttttaactgtttagtggtttcttgcagcaatagtgctcgatttctctggaaatcaatacctt

SEQ ID NO: 64121 - DNA, 693 bp, Cucumis sativus
  Intron number 1 from transcript Cucsa.179720.1 (locus Cucs a.179720) derived from phytozome v7.0 (chr-ID scaffold0123 3; pos 98284 to 98976)
aggccagattttgggttgatttcatcgataagaaggtaacgtttattttaacattttatacaacgattcaaatttcaaatatataagctgacttctacacttgtagatataaatattatagaacgtccaaattttgactgtttaaattttctaaattaggaagtttgctaagaaagtgttgtttattttattgttttcttttaacaagacatgggctattctaaaatccaacttgtttgttcttattaacctttttcaacatggttcatttttttcttctaagtgaagtggggtatctatgtgttcaaatatgtttaatgtgccttaattgaattttagcaatttcttctttaagaactttcaaactgaacatgatcgttgaccaatatacattaaaggcaaaattgaaaaatggactaaaagattgggggctactgattaatgattatatttagtatgtgagcttagaactaggaaaaagttgaaatacacaactctcaattcttattaccacaaaattatagttactaaaaattcaaatcacacgtgtaatttcatataagtactttggaaattcctcgtgtttacattgtcgttgattgggaatttaacatttttatccaccattataattttttctaaaaaaaatgaattgcagctttttgattgtgggaggaaaatttgggctagcaa

SEQ ID NO: 64122 - DNA, 683 bp, Cucumis sativus
  Intron number 1 from transcript Cucsa.151180.2 (locus Cucs a.151180) derived from phytozome v7.0 (chr-ID scaffold0111 6; pos 31739 to 32421)
atctccgggagaacgctcttcttgaactgtcgaaggtaagattcctttaacggaggaggaggaggagagtagttggggtttggtgttggcgttggttttcttttttcttttttcttcttcttgtattggtgtgatggtggtgataaatagggattgctgaggaaacgaatactgttggtgttggagaatttgtagcttttgtttggaacgtgagaaatttataacttggctgcggccgaaagaagaagaaaaattcttgcccgtattagtgctacttttgtaaattattctgtatggagttagctgatatgtagcgtaatgaaacttaacccaaccggttaaaagaaagaaatagaaactccgattatttgatttcaagataacggactagtcttcttctttctcttttggctttaattcttgctgcaaattttgttggtatcgaagtactaacaacggttggatgggaaatgaaactacaaactaaacagtatgctgtgtgtctagcgaaaaaaaaagttttggctgaccctttgttagtgtttggggaaggtttagcccatcatgtgggatagtttttttttttattatatgtgcggttaaacaagtatagttgatgctctaatttgtttctgtttttattttcagaagagggagttgtttcaagatttggctccattgtt

SEQ ID NO: 64123 - DNA, 881 bp, Cucumis sativus
  Intron number 2 from transcript Cucsa.253300.2 (locus Cucs a.253300) derived from phytozome v7.0 (chr-ID scaffold0222 9; pos 1961241 to 1962121 reverse strand)
ccagcaaaagcaagcagaaggtgtgtgtgtttgtggtggaagatgaatttcccaagatttgctcagtctgtcgactttccatttgcttcaatataaaaatattatatttcgttgtttcaatttagaatttggattgctattttggtcctgttgcaggctatcttgaagtaaattggacagtgttagtttatctattatcattgtttttcacctgttaaaagttaaatgtctaaagcacaatcactttagtttgactagtgtgtccttctcccttgtctgacaatgtactggacacttagacactccaacacttgttgacatttgttagagcaatagatgtgctaatcgctagttgtacaaagtcaaaataggaccaacatctggtagacatgcattaaacacttattacataattaagttgacacatatgagaaaaataataaaatttcagagcgaaatacatcaaactaattttttaagaatttaaatgaataaattttttgactttgagttgccttcgtgtttaaaaatgatatatatttctaaaatgtatgtttctaaaatccatgcttcttagaccatgattgtgttcatattaccaatcctatctttgttaatgtaatttaaactcccttttccttttatttcttttgggctttggttttcattttttcttttgaaatttcatcagtatatcatacatactttgagatttaatatgaagtcaatgccaccatcgattagtgttgtcattgaattctcactgtgaaaggaccataacagcaataggtttggttctaacatggagtcagtcaatactcaatgctaccattttctgattctttgcagaagaggaaatttgctgacctgttaggacctca

SEQ ID NO: 64124 - DNA, 680 bp, Cucumis sativus
  Intron number 1 from transcript Cucsa.253300.2 (locus Cucs a.253300) derived from phytozome v7.0 (chr-ID scaffold0222 9; pos 1962207 to 1962886 reverse strand)
acgcgctttgacggggaccagccatttgaaaatcggtaataatctcatcttcacatctgctagggctgttttttgatgaccaacatttctattttccttaattctgtctggatttttcttttcgacggaattgatggagacttttagttttcttcttgatgtcgcatctctaactcggttcaaaattggagatcacttcgttaattcggttctatccaagttttatcgttcctctttgattcttcttcttattcgactactgggttttcatggggtgttatcgcaatttaaacattgatttattcgttttattccgttttgttagttatgagctaacatgcattgggttactttcgatgaaatgatgtttcgtcgcttcttcagttgtaatggttttcttttgagtttatcccatgcgacgggaagtcgagcaagggaaaaagggcgattttgttttttgaattttgattcgtttcttttgagagtgttttttctatttggagtttttgtatgctgaactaaggaaagcattggtgttttttcttttcttttttatttagaagtacaatttctatgaagatttttttgggtggatgtaagtgttggactgggaattcagcggatatttaagtcagtgtgctaaaacatgtttatatatgtgttacagattgctgaagctc

SEQ ID NO: 64125 - DNA, 434 bp, Cucumis sativus
  Intron number 2 from transcript Cucsa.136570.3 (locus Cucs a.136570) derived from phytozome v7.0 (chr-ID scaffold0104 4; pos 1175874 to 1176307)
aggacatcgtttccaaggttttgatatacaataactgctcgtttctgatttttgatctgatttcttctatggattgttcattgatgactttatacactttgctgctgtgttgataatattgattgaccctttaatatgataaaaacaatatgatgtttgactgttttgatttgtggttgttatcggatggatcacccccaatccccaagtttcttcttgggggttgagaagtacttgatgatttataattttagttagaaatttgattgagtatggatattggttctgttatgttaatgctctttgttggctctaccctttgaatattcattttcagatttaatgattataggaatgtcgttggactattggaggaaagtgttctgacctaatgttttcttgtgtttctatgattcagtctttccaaagcagac

SEQ ID NO: 64126 - DNA, 798 bp, Cucumis sativus
  Intron number 1 from transcript Cucsa.198030.1 (locus Cucs a.198030) derived from phytozome v7.0 (chr-ID scaffold0135 7; pos 1212744 to 1213541 reverse strand)
gttcgaagtgaaaaaggtgccaactctatcatcggccaagttattttttttcttcttccttttctgacgttgggaagtgggtcgaggggagacgaacgtttcttactattattgttgggaacgctgaaaatgaatgaacaattattggcatcccaataaggttcccaaaggccaccgatttattctatttgaaactttgagctacttttcatttttcttccgcataggtgcgagagtttcttctcttctaaattgtgtttgccagtgtggaaaatattggtagctactttctttgtttcagtgattagtcatgaatttgaggtcatcagactcggattcttggaaatgggttcttttattgcatctaaagattatgttctgttattagatgaaagcttgagcgacatagttatttgtttgtaatgtaggtgctttagaaattttaccggcatacgagtccaaatagactttgatatgtgttgggccttctttccttcttgaggtgctgtaaatgttatgcaaagcatttctttgttcacttttgtagaaatctgagttacatgcactgcatcatatgatataacgttaataccattcttgtcagccaattctttttcataaatgttcagtttcctccaactctaactattgggttagttcttatctattttacattacgaggttcctcgtaatactcgaatcatatcatatgtttgtggcagcgaagctaacattttattaatttgtctactttgtttcccagaagcacaggagcagttctaagttttccctacagag

SEQ ID NO: 64127 - DNA, 856 bp, Cucumis sativus
  Intron number 2 from transcript Cucsa.306900.4 (locus Cucs a.306900) derived from phytozome v7.0 (chr-ID scaffold0297 7; pos 287563 to 288418 reverse strand)
taaaagtgaactaaaccaggtcagtactttagggttaagttgccaagaaaattgatgaattcaatagagtttctttctcattgcattgattcagcggaatggttttattaaaattgatgcaattacttctctgaaaccggttgtttaatgggcgcatgcttgaattttgttcatcttgttgctgctcctatgatttacggctttccaatcaaacgattcataacgtcttgcattgtcaaccggaaaaaaaaaaacttgtttgacgctgaatatgagaaatgcttgtgtattgaacaagagcccagttcttggcagcatgaactttgaaatatttctcacatagttgatctcttatcagtagtaagatgctgttttgaaagtaactggtttaattttagcttaagcttttgggtttgagataatctaacatgatattagatcatttagtattcaaacatggcaatgtgatttccttttcagttactattgacatcacttgtttgatcaacataatcttgaaatctacaagtgagaggaatattaggaagacataaagcttcgtgcggtaactatttaattttggattttagtctttgaaaattaagtgtataaacattcattccacctatgaaaatttttgaagactaaagtaaagaactatggtaggaaattgagaggaaataagattgatttccaaaaactaaacaaaaagccaaattcaaatggttattaaaggggtcaaaacacttgaatttaacaccatgaggctgtaagttgcttgtacatttttgtatttgaccaatgattgtgtacaattctacttagcagcttaaggtatcgtttgagaaggtggggg

SEQ ID NO: 64128 - DNA, 794 bp, Cucumis sativus
  Intron number 1 from transcript Cucsa.146940.1 (locus Cucs a.146940) derived from phytozome v7.0 (chr-ID scaffold0110 0; pos 274880 to 275673)
cagataagattcaactcgcaagcattcgtcgctaggttcttccaaacaaaaccctacatcttttccatttccatttccatttcccctccttaattctcttatttctctatcttaatccattctaaaactacatttcatgcactcccttgtgtattctgttccattttctgttattgttatttcgttttctttgatcagatcgctttgttgttgcatgaactgctgagttcgtttgatgactttgtttgcgctttagttttcatcgtttgccgtcgagatcgtttgataggcgagtcaagtgaaaattctgtatgatttatggattttattggagcgtttcgtgtaaaatctgtcttgttctttctattatctgtattgtagtgtattttttttttttttgtgttgaagattttttatgatgtaaagatattgtccattttaaaggattttctccactggttactagaggtcctagattgagctttcattcggctgtattttgatgatgccttttgtgtgttttttctttttctttttagccttttcgggcacatggagtctggttttgaacgacatactaagatgtttaagctgcttatttgctttttttctatttttggtatgacagagtggagtctgattttgaacgacataaatagtatgatatttatgaagctagttgtgcttgattctgaaaattgcttttgatgctcaagaaaccttttttgtttttcttcaatggtaggattttaaccattattattgttatttttttaaaaaattctagatcaaag

SEQ ID NO: 64129 - DNA, 573 bp, Cucumis sativus
  Intron number 3 from transcript Cucsa.146940.1 (locus Cucs a.146940) derived from phytozome v7.0 (chr-ID scaffold0110 0; pos 276182 to 276754)
caccagtggtcctcaaaacatcaacccccgtattggtaagatgagcagcttttggctgtgttccaagactcatttttgctatatttgtgttgtagcagtggcacatattggttttgtttgttagttcttaattgttcatgaattttatttctactcaaaataatttatgtgaaaactatttggagtccagttgttgttgctgtaaactgagttcttctatttggacatacatgtctgttattttaagtctgcagcataagagggctactttccccccttaaacttaggttccaactagtgtcaaactgaaatcttgtagatgtgggcctatatgactacgtagagaaaaataaattgcggcaagtacaattgctttctatgaaggaaactaagtccctttgatattttattacactttttgtaattcaacatctgtatatgatgctttctgacttccctgatacaacactgcaaactagcatacttgttacctgtctttcaagttacattgtttctgacaatcaacaatgttgcacaggattgcccaaacttcggaaggactgggttgatagg

SEQ ID NO: 64130 - DNA, 552 bp, Cucumis sativus
  Intron number 1 from transcript Cucsa.143930.2 (locus Cucs a.143930) derived from phytozome v7.0 (chr-ID scaffold0108 0; pos 305833 to 306384 reverse strand)
acttgtttttctccacacccagatcgaaaaccaaggtttgttctttgttaattaactagttctatagtgttgaagagttttttttttttggttcggtctttcgtttacacttgtttgaattagtttcccctgttttagactttaggtgagaagaggagtagtagtagtaattttgaagaacagtgtgggtctgatcttaagaggataaagttgccagattctggatccatgtgtggttctcaaggtaggaactttgaattttgaatcttgattttgggggtttgttttctttaaatcttcaaattctgtgaacgaaatattcgcttctgtacattgatggtttagtgatttgcttggactggactggctatggtgctgtcctaatatctttctacttcgttttttagtgcctttttcttgctgggagttcacgttcaatggcttttatagccttttgaattgttctcttatgtttcacatcaagattgtatctcttattctcaaattggtgtggcagcaataaatatctgtcaggagagttgtttgaaaact

SEQ ID NO: 64131 - DNA, 622 bp, Cucumis sativus
  Intron number 1 from transcript Cucsa.300890.5 (locus Cucs a.300890) derived from phytozome v7.0 (chr-ID scaffold0293 1; pos 517132 to 517753 reverse strand)
tctcttataacactttctctctcagtgcaaaagtgagtttacgatcttctttcatttccaattcgctttcccccttctactgaaccttagatctgacttaaatctgcttcgcttttactgtttcttgctctgttgtttgtttacttcctagtttcttctcttaaatttcaacttgctttgctttctattcataatttggaatccaattactcgcttacggtttggtaattggcttggaattttgctctgttatgccttcgtgtgaaatcattacttgaattgctgcctgtgatctgatgattgagttgttacagttaagagtgtgttatcatgaattaggtggaataccgagttgaaatataggtcctgtaccttcttttgccgatatggagatgggtaggtagtggattagttggatttggaccttcttgtctgagatacacgatcattgtttatgattttctttattagtgcttattcctattcctcccttttttgagatttttagactctaaattgaaaattacactatatctacatatgaaaattaattggttttttattttctttttcttatgtgaccacagcctctcagactcgcaatcaaggtacactttacaaa

SEQ ID NO: 64132 - DNA, 392 bp, Cucumis sativus
  Intron number 1 from transcript Cucsa.205080.1 (locus Cucs a.205080) derived from phytozome v7.0 (chr-ID scaffold0141 6; pos 197302 to 197693)
aggtttctcttctctcactctcatcattctttctgtgaattgttattttttgcgccttatttactggaaaattcttatgttttaatctgaaaattgttgactgatcggtgagatgaggacagagattgaagagttatgtttgattgttggtaagtctggagataatactataggttgaatctcttagttgatgtggtataactattcgattacacgaggtgaaagttgttcatggctttcttctggtgctcggtttagacgcacaaatcttatttattatttgcgattttttttctcttttttttttcccaccctgaattggtctgctgtgatgacgtcgtttcttatatgcttcagaggttagtacaacatcaaccaacacagtatcctac

SEQ ID NO: 64133 - DNA, 995 bp, Cucumis sativus
  Intron number 2 from transcript Cucsa.254590.2 (locus Cucs a.254590) derived from phytozome v7.0 (chr-ID scaffold0222 9; pos 2857308 to 2858302)
tttctccctccgaaatcgccgagctggacgctaaggttctgttctgtttccctttctcactctctccccaaccacaaatttacgcattttccatatcttacgactatttccaatctacatcacaaacccattttcataacaaaagaaacttgcatgcatatgaactatagtccactaaaaaatgctgtcacgttattttcttaaaatttcatatttaattacaccattgtagaaatgtgagtgagggccgtagttttagttttagtttagtttatcagttgtatctaaacattctattaaaatttagaatcaaacctaaaaagtattctcacacttagttttacatattaattttcattcaagattataatatttttttaattcattttgaaaatttagtaagaaaaaggtaaagttttaaacaaatgatacattttttttttgtctcaaagtgacataattaaaactggtgtcagcttcaaattttatgttattttctttcacattttcctttttctcgtctctattactaaatttaacctttctacggatcaataatcattttgaattagaagtaattagtattgaaaaaaaaagaattagttaaaacacattaagaagtatatttataactaaaaataagaaagaaaaaaaggggttaggaaatgggtaaatcgaagattaaaagagtgtgtatagagaaaaacagttgacattttgaggaccaaaattggttaaaacgttatcaaccatggaaactgtgaaagagacctattcttaaggattttatgttcaccggtggatctcctaaaaacaggggttttccgtcaaagcaatttcattcagttttcctttaccaaccaataatggcaatcctgaatctcaattcttgttccattaaacaaatacccatctcccctaatcttctctaaaataatgaatcgacaacattccgtgcagctttaccgctccaattattctttcagttcccattt

SEQ ID NO: 64134 - DNA, 745 bp, Cucumis sativus
  Intron number 1 from transcript Cucsa.259130.2 (locus Cucs a.259130) derived from phytozome v7.0 (chr-ID scaffold0222 9; pos 5767271 to 5768015 reverse strand)
tcaagactgatatcagctatcaagaaatcctagctgtaagtataattcgaatttctgaatgctaattcctcttttttttttttcacccacttcggaagtattagaaactgatttggttactagggtttaggaattttgttaactttctgagctctgggtatgcctagtctcattatatcttcaatgtagggagtaatctgaaagaggatagcgttgtttattaaatttgcatcttcaagtaggtaattctgttgcttagggtcttctttttgatgcaggagcactcaaatgtcgcgggaaatatctctcgcaattatgattatcctgtacttgcttatattactccatggtattcgcttagaaactcactttgtgccacttttaagctttttgtaattttgggtttagagaaatgtatttgataaaaggggctgagtttattgctagtttgggggttcctagtaaaagaatttcacttccattggagttgcatgaagctccctgcatttgatacttctgagtcgaatggttttactatttgtgggcttttaaattattttgttatatgttgttgtcttgtcaatgcacttttttctctttctctctctcacttcttttcctttcttttctttgttctgactttgaactttggggcattttctgatcttcgtggcggtctgtatatctctcaacttaacacttcaacgctgtttacatgttaaattgcgcaggaactccaggggct

SEQ ID NO: 64135 - DNA, 1059 bp, Cucumis sativus
  Intron number 2 from transcript Cucsa.300610.4 (locus Cucs a.300610) derived from phytozome v7.0 (chr-ID scaffold0293 1; pos 163680 to 164738)
ccacaacaacaacaacaacacagccccactaaacagttagtaatttctgttttcattcgttcattcttcttcttcttcttttcatttaatttaaaaaaagaaaacttttgttttcataattgttttgatcagatccatcctgaaaatggggttttttttaaaatgtaaatggatttattaatttaatataagaaaaaaggaaacttgtggaagttatgtaccaagccaagccatttgtctttacttttaaaaaaaaaagaaaaaaaaaagaaagaaagaaattagaaattaataagaaaaatgataaaattagagtagtgctaattaaattttgtgaatagattgaaagggataaaaaagaggaaggagaaggagaaggagaagaaagcaagattcgcattcatgacaaagagtgaagttgatcatctagaagatggttatcgatggagaaagtacggccaaaaagctgtcaaaaacagcccttttcctaggtatttcttttcttttcttttctttcccttttacccttctctcctctttctttttctcttcttcttttcctttttcttttttcaccacccaccttacctccctcctaactgccatctccattccctcctcatcgttcttctactcaaaatcccatttaactacttcttatctttctcatcaccatatctgtatattatctactcactttgtaaggattattaagtcacaaatgggttaaacaagaaattaggaacttaagtgcatttaggacaaactactctcatctataattaactaccgatattaatatttcaaattctacccccctttcatactcatcctgtctctctgactaatttgctcccaataagtattaattattataacctatggaataaaccaaattaatgctccacatattgaatgatagtagaacgactctccacctttagttttaaacttgtgtgcaataatgcttgagtttgattgaaaagttggagatattttttttaatttgtgctgtttttatcttctctatagaagttattaccgttgcacgagtgcagc

SEQ ID NO: 64136 - DNA, 708 bp, Cucumis sativus
  Intron number 2 from transcript Cucsa.217840.1 (locus Cucs a.217840) derived from phytozome v7.0 (chr-ID scaffold0165 8; pos 78098 to 78805)
atccagaagttaggatcagatattcccttgagaaggttcgatactatctataatttttagttattcctttagcttataattgagtgtagtctactctccctttatagaaaaagtgtgtggccattgtcttgtaagaggagtatttgatttcagtgcctgctgaaaagctttttatccacatataatatgtttgtgtagctgattgagttgattgaattttgattagcatttctttgagtagccgtgtctatgtgcatgtgataaggtggccagtaaccactgtttctctgacttctgctttacacatttgtaaaactgtgaaagtttatcctttggtttagttcgtgtactgactttgcgtgactaatgatttatacatacaagtgattgtcatcaaagtttagcttacagtttcatgtaaaccttttcttttttatacgaatcatttgtatgaacataaagaaatatttcatagaaaattttcaaatgaagagtcaagaataatttacttagtgtttataccttcaactcaaggtaagtgcatactaatggttcagttgaattttgaattaatatgtggactaatcgaattgttctaatacttcttaatgatcatttgttcttatgaactatgaagttatttgatctttgaagaaataagtattgtatgtaggccaaaagaaaagaagcgtggctaattgagaagtt

SEQ ID NO: 64137 - DNA, 816 bp, Cucumis sativus
  Intron number 2 from transcript Cucsa.192670.2 (locus Cucs a.192670) derived from phytozome v7.0 (chr-ID scaffold0133 3; pos 532933 to 533748)
gcaggtggaacttgctgcgcttctccacgatataggtattcttttgttgtttttctctacactatgaatgagtagaacacacttaaacaaggtcgttgccagtttgcttaatcctggacctgagttcttaggttttatctaatctacaattgttcatttcaattattttatatcttgttgtagctatgtcaggtctttgcattagtaagaatctaaaaagggaaaacaaatggaaagtagaaggagataagaagtgtctttgtttgacacattattcaaagaagagttgatacttctgaatcttgagaattttgccttccttggtagggcccctttgttgcattctttgatggaggtggaagacccaaattatttactttgaacttgcaactttgcactgtttgtagtgagatgatcaaggagttcattctctgttcattattttgagagtagtagttcttgtggctagctgaggtgcgtgttttatggggtgttaggggtgaggaacaatagaatctttagaggaatagagtgggatgctagtgatgtttggtcctttgaaaggttctgtgttactctttgggcgttgatggaaaattctttagtaattattcgttatgttttttcctgcttgattatgattggagctctctttaaggaatttcccttatttgaacatagtttttgggatgcccttgtattgtttcacttattctaaagtatggttcatcattcaataaaaaaaatcattattgattagtcattgcttgccatcttccaggtgattacaagtatttgaggtttgttcatctctct

SEQ ID NO: 64138 - DNA, 850 bp, Cucumis sativus
  Intron number 1 from transcript Cucsa.258760.2 (locus Cucs a.258760) derived from phytozome v7.0 (chr-ID scaffold0222 9; pos 5570132 to 5570981)
aaggccagttcatcacgtccttggtggtggcaaacgtactcaatcttaactctctgatacaagttcttgagaattgttttgttttgcttttcttctttttgaatttgtctttctatattactgttctgtgttgctatactgcttctatggcttcagttggagctcgatggttattgatgcttattaggcgtttttgtgctctttagttattgttttagcttgcttcgttattctttgcttggatgtagaatatatagatctggtggttttatcttactctggaaacgttgattgttcggatcgaccgtacgacgtacttgagcgattcataagctttctgcacagagtgtttattataaattttcttttcctgagcttgctatattggtacatctgttcgggttttgatgtttataatttatgttccctacgtcgcttgttttttttattgcatgtttgaattccttctgaggatgatcggtgtctttcttatgggttaaattgtaagtctagtcggttgtgtctgtttgttttttaaactttcatagtacaaaattagcccctcaataaattaaacgcaaagtttggagttactgtgaacataaaattcaaacatagatcaattaatgaatttgtagcaacttattagacgcaaaactggaagttcaaagttgagagtaataaaaattgaaaggcctacctaagatttttccgaaattaaattccactaagttcaaactctaaacttagtataaccttaaaaaaaattagagtctggtgatgttgaccgtttcttaaaattcaaaaatatgcagctgccgatttattcttgtggaggaataagaagatc

SEQ ID NO: 64139 - DNA, 784 bp, Cucumis sativus
  Intron number 1 from transcript Cucsa.300660.1 (locus Cucs a.300660) derived from phytozome v7.0 (chr-ID scaffold0293 1; pos 196685 to 197468)
gcttcttcttattgatttactgcttgtcggtgagttattctttctctcgttaagggtaaaacaaccatgaaagtcgaaaaaactagtcgattccccaacccttttcttgttactgcaggtgtatcttcattttaatgagtttggtgttttcattgtatgctctgttgtttggagtaaatgaaagcagatgaagaggaaagccttcactctttatttgattcaatttctgcttttcatttgccatttttgcaagaaaactgaaaaggggttgttcttgttgttgggggcggggcgggggcggggggtgactcttcatttgattcaatttgtgcacataaccatgcatcatacgaaactttaaaaaatgatgaaaagcttaaatattaagaaggttaaattacagatttagtccatgaagtaataccatgtcctctaatcttctcctttttaacgccagattatgcttctatttaggcattgtggttaatactattaatggaaaattgatgtgactgcttattacatagattttaattaagtttgtgtgatggggtgagttattgatggataatgagcatgtcatagcaacattcttcaatgttgttcgtatggcgtgggacttgggaggacaatgatgttattgaaattctgaagtttaggaaataaatggaatgaacaaaatgctcaagtttatgggtacaatttgagctgtgtaaaaaactgatggaaagttgttttggctttatttatttattctatacaaggattctccagtgttaagaag

SEQ ID NO: 64140 - DNA, 1039 bp, Cucumis sativus
  Intron number 1 from transcript Cucsa.285600.1 (locus Cucs a.285600) derived from phytozome v7.0 (chr-ID scaffold0265 3; pos 1931168 to 1932206)
ggcgattacgttggtgagtttttagcttttttttcttctttgtgtctgttttatcctgcacacacacatatatttgagaataatttgattccttcgtttaacgccactgttctctgttcttttgttgtgttttttgaaaattctcaacttctaaaagtgattcattattcggattgttttcaacccgtatagccgcatacttcaaggggctgatgtattgtaatttgtagtacaatttttctggattaatctgagtattatttctagtaggccttagctgtacttcgttgcatttttagagcaatttatctattagatagatcatttagaatcaccagatgactcgggtattgcaaaaaactgcttaagttgaaagctgaaaacagtacgttgggttggtaaatattgatgcttggttgattcttagggagtcttctcatttcgtcattgtattgcgttaaagttgtagttcataaaaaaactgggagttgtatagatgggttgcttttgaacttagctgtaaattatgaagtaggaggcttttaggatttatatcctctgaaggaaatagatgaaagtagctacttatcatgatagaaatttataggattgaagaaatttgtagttgtttgctcatgacccttacagaaggtgacaagtagtttttgtatagcttttaataaatagacaaaggaaaggaaatagttcttcaactgaattacatgagagaaggaaacatggatcgatactccagttttgcatagagatagtgcaacgagcattgtccctccagaagtcatttactccttgattttgccctctggtagctgctaggaggagagggggaagggaaggaaataaacccggtgcaaaaatggtttggttaattgattccttcatccttcatccttcatccttcatccttgattccttcatcgttgttataagctatggagttttgagtctattattctggcattttctcacattgtgaactaatgcagatcgtgggtactactcggtggagacagttactctt

SEQ ID NO: 64141 - DNA, 915 bp, Cucumis sativus
  Intron number 1 from transcript Cucsa.143960.1 (locus Cucs a.143960) derived from phytozome v7.0 (chr-ID scaffold0108 0; pos 336375 to 337289)
ggtatgtttgtttatatacacactttgaaactatgttagactataatggttgtcaccatgttcgtccagctttctctaagttttgaattttgttttttattattattatgcattttggttagtgctttgttgagtataatttaaagcagaaattaagcacaaattattccctcccaaattttaagaaagtgtccattttcttcttcttctcctccttttccctctctcaatagcttaatcctttgtcaaaaaaagaaattcaacttcctaaggtaagaagaaatttataattttcttgctgcctaccgttaataaataatgttgtttgataggtaggaaacagaggaagagagagaagataaactttttcaaattttaaattcctaatattggtcaaccattatcaactatagactccataaaaaaaatttcaacttcaagaaagctagtacatgtaaatcactgttagaactatactcatttttttacatgcaatagatagtaaatttaagttttgaacatctttgaagtgagatagctaaaatcaatttttgtttgttgtagtcaaaattacttttattttttctaaaagaatttatgtttggttaatattgaaattcatttttaaaaaattgaaaatcactttcaatcgatttttaaacaattagttgaacagttgtgtttattcggtgattgatcgataattacaaaatttgttccattttttctttcgttttttgtcaagtaacgaatttaaaagtttaagttaattggttatgataaatttaatcatattaacccttacaaaatttacaaataaaagttttcatgttttttttagtaattttgtattctagaaccatatttaaaagaatgattgtaaaaaattcaattgtgtaggtggagcttgtgggt

SEQ ID NO: 64142 - DNA, 656 bp, Cucumis sativus
  Intron number 2 from transcript Cucsa.157370.1 (locus Cucs a.157370) derived from phytozome v7.0 (chr-ID scaffold0114 1; pos 328997 to 329652 reverse strand)
agtttgctggaattgctgtttggattcttcatcaggtttgaattttgccaatgaagcttcctatttttagtcatggattcaattttatgattgaaagttagttttttttttttaataaatgtgaatgttatatgttcgattcttcatgttaacatgttgttgcatcatgtcaattctccgaagcattgggattaagtcaatccgttttgaggatatagtgaaaagagattctttgtttttgatcattacgcttcaaccgggttattctattccacctcttagaaagaaaagaacttaaatcaaaatatgtgtttaattcaaactgttgtaagtgtattgttaaaatcatgttcgacggcagtttagttttctgttttttaaagaaacacttcaattcaatccatagttaaattctatgaacaaaatgcttttgaatagttttcatttctgttctttgaatttattagttgaaatggtagcaaaataaagaaacttataggtagagtagtgtttatgagtttagttttcaaaagccataaacccaaaataaatggttatcagaaggggcataagttttcttgtcatttcagtgagatctcagactggtgatttgtcttgcagtcggaacctccatctccgaggagtcgtagcggtgg

SEQ ID NO: 64143 - DNA, 587 bp, Cucumis sativus
  Intron number 1 from transcript Cucsa.142200.2 (locus Cucs a.142200) derived from phytozome v7.0 (chr-ID scaffold0107 9; pos 497473 to 498059 reverse strand)
gctactgttgcttcacctccttctactgatcgtatccttactattttatttcatatgggttattgtctgtttcctttcgttttgtgtctacccttttttgatttgaattggatcttgggtttttgttctttttggttttgatttatagatctgtattgggttcctcttcttttgttgattgtggatgtggttggatgggtttggattttgtttaggttattgaggattttattatttcagttctgtttgatctgttgtagaggagttgaaagcttgaaagtatgacatgagttcgtatgacaattgatttaatctttgtttatgtttgtgtttttaaggttttaggtttttgtgtgatgggatctggtttctttttgcatctatttgaaagatttctctgtgttgtgtgatagtattgggtttagaattggatttgaactgaaaaataatgtttttttacgtctttttgggtgtttaacgtgctctggagtttttgtactgttgtgattttgtggataccgggtttgtatttcctttacttctgattcttacagaagctgcagatttgcttcagaagttgtcattgg

SEQ ID NO: 64144 - DNA, 705 bp, Cucumis sativus
  Intron number 1 from transcript Cucsa.135960.3 (locus Cucs a.135960) derived from phytozome v7.0 (chr-ID scaffold0104 4; pos 736327 to 737031 reverse strand)
agaaaaaaggtggctgttgttggcgctggtgttaggtatgttgttatctctctgatattctagcttctgcttatatggtgttgttgttattttaagtggcggggcatataaatgaagtatatgtactaaattttgagttgtggtaataatatttcgataatttagttgcattcgcgtttatgatgatttagtttaattttttcagtttataatgttttctacttgtctttgcttggtctttctagattagtaattttcacctataattcataatacgggctttgaatttcaaattttatctcctttcctctggccagtacttttattggtgtaaagaaaaactgatcggcacactagaaacaatgcatgaattgagagaagtaatgcgccattggagattgtgcaactagagttttcctatgacatatctagattgaaacaaaccaaagaacttttagggatagattgggcttgggaggactgaggagaaaaggctatcagcccttctacaaatttccaaaagctcttatgtgacttcatttccttgttctttgctaatattactgtcttttctcttatgaaaaatatctgtgattttataatttctttgacctgtgtaaactcagtatcctccagtgaggctgactttggttttgtttgtattatggttaagtgggcttgctgcagcctacaaattgaaatcac

SEQ ID NO: 64145 - DNA, 672 bp, Cucumis sativus
  Intron number 2 from transcript Cucsa.308240.2 (locus Cucs a.308240) derived from phytozome v7.0 (chr-ID scaffold0297 8; pos 414185 to 414856 reverse strand)
aactccatcctcttttgcttgtagttcatcatcaggtaaactttttccaaaaaaagaaatagacgggatattttagtgtcttgaagttctttttggttgtaattagtttaatctttgtgatagtcatgacacaatcgtgtgcttaacctattcctacagcatttcattaatttcttacattgttctaggctcaagttggtttagtcaattttaagatttaagaatgagaaagggatggtagtctactttgaattttttgcatggctcgtgtgtgatgtaggctgtacgcactatggcatgtgctgtaaattgcaaccaaactgctttagttgaatctagaccaagcaagctttattgagtataaactttgaattgaaggataagcagtttgaattagctgatggagattgggttctatgcatttgttttctgataaaatttcatgcattaagctttcattgttttctctaatcttggacttcttatttctattccttcaactcatgactctcactattaaactatgaagaattggtttctagtaagattaaggggtagcatctttctgattgacatgtagcctattttttttttctgtgttttaatttctttttcttttttgaattgaatgcaataggattggaagataaaccgtttagtaagggagcaggt

SEQ ID NO: 64146 - DNA, 873 bp, Cucumis sativus
  Intron number 1 from transcript Cucsa.144000.1 (locus Cucs a.144000) derived from phytozome v7.0 (chr-ID scaffold0108 0; pos 383603 to 384475 reverse strand)
gcttctcttccggcggacatcggccttctcagtgagtgcagaatcttactcttttagttatttgctttaactggttcattaaaatcttgatatgaaatatcttatcattgtaatattttgtatctatgcatagaggtgctgagggattgataatgtttataattaaatttaacaataactcaatagtttaagctcttgggtctttgagtgattagatatggtatagagttgatgtgtttaaactctgtaatgtactaatgtcatctccttcccacttaatattgtttttcacttttgttgggaattttatataaattttcaagagataactgtggtggagtgctattgttataattaaatttatcacaaattatcagcttaaactttttgggtcaattatttaataaaaaagattagatatagttattttagttttgatttttagtagttgaatttggtgttagctctcaattaatagtgttagttacttggtgagtctttgtttctaggactaagcaattagacttggaactgacggattggttaaacaaaaactttaaactgacttttcagcggaatgttttaaaaaactgaactgaactgaactagctaaattgacaaaaccagcttaaattgaataagggttgctaaaaataacaaactttctccaaatcattctgatcgtttctggttttgacttgcatccttacttgtaccaagttttaagcctaaaagtgaaatggttgctaagtatatgaatataggtggataattatatgaagatgtggtaattaaaattcttttttctcctttttcttgtttctctctttttctttccatttctctctagatctttagctgcatacggagcat

SEQ ID NO: 64147 - DNA, 589 bp, Cucumis sativus
  Intron number 1 from transcript Cucsa.248930.1 (locus Cucs a.248930) derived from phytozome v7.0 (chr-ID scaffold0220 8; pos 110361 to 110949 reverse strand)
caatccgctgaatcttcaattgagagggtgattcttctttttcctttcctttttcaattgggtttttcttttcttttcttttttatgttgcttagtttccctgttgaagctcaatgttcgtacttcctgtgaatttattcagtaaacatactgtttctattacttgacagtactgcaattgagcacacgaagttttgaatgatttgctttttcaagttccaatgtgttaaggaatcgacgaataaagaaaacaatagagaacgacacagaattacagagtagtttatattgtgcaattctcaaaatctagtatcaaaatcgtaaataacaaatatggaaaatacaattcagccggactctgtacttagtcatttgctagataacagattcaaagcattctaaccgacgttgatagttcttatatattccaattaaacttaagcagttagaaaattggattttctatccgacgttgatttcttctttttctagtctattctttcacttctttaatgacctaatgattgttacctgtctcgtctgttgttaagcaggttatttttgacttccgcttcttggccctgtttgc

SEQ ID NO: 64148 - DNA, 587 bp, Cucumis sativus
  Intron number 1 from transcript Cucsa.142750.4 (locus Cucs a.142750) derived from phytozome v7.0 (chr-ID scaffold0107 9; pos 961347 to 961933 reverse strand)
acccaattcttatctctatctctcttgttcttcaggttgccttctttctttttagtatttatctccttgattgattattccttttcctccccttttcttttctttgatttattttaagtggggttttggtttttttttttaatgattttgatgctttgtgatggtttattcttcttatgagttggttttgtgaggtgggttttgtttgtagatctgaatttgtttcatttttgtattgaattttgattctggggttttttgaggatgatcgactgtgatggattctgatgttctgttttccttttttttggagaggatttcttcaggttggagatgagatctgattgttggttttgtgatagatttgtttggaagtgtttgatttagatgtgatgtttaatgctctgtttcgtttgtgttttgattctgaatttaattttattacttagtcttgttgttgaacttgatctgtgtaaaacagattaagaagtgtttgaagaaattgtcgttttcccctgtttgatctactttgtttgattgaacttttgcatgtaataagattattttagaaaggaagaggaattctc

SEQ ID NO: 64149 - DNA, 696 bp, Cucumis sativus
  Intron number 2 from transcript Cucsa.254670.1 (locus Cucs a.254670) derived from phytozome v7.0 (chr-ID scaffold0222 9; pos 2901336 to 2902031)
tattccgtcgaaaaacagaaccctatcctcccaaggtattaccattaccctttcatcttcttctgccaatgttttctggaaaactctaatattcacacgctttttgttttttaatttttattatttttgtttctttctttttctatattctttctggatctgatcactgatcttgtttacttattgtctccccgaggtttcttctattggggttttcattttggttggatgagaatctgtttaaactgagaagcatcgagttttctttgtttattgatccctattttgttcttagctatgaaatcacgtcgtatgtttttgtgatggttgtgtatttggtgaggaaatggttgcactctttcaggccattattttgtccttttctgttttgcttgagtttttccattttgattcgatcgaaataatggagggtcaaatctttcgagatttgaaatgatttttgttcttgtttttcatcctcaaccaaaactatgggattcttggattggcttattcttttggactttatcaataatcttaattgccatgggatttgtgttgaatcgttggtaagagagttgcgggttgttggcaagtatgaacatttgttaagtttccctgctgttggcaaatttgatgaaatttatttctgtaaccttagattatttgcggttgtggacgacattttctgcttgt

SEQ ID NO: 64150 - DNA, 564 bp, Cucumis sativus
  Intron number 1 from transcript Cucsa.260390.1 (locus Cucs a.260390) derived from phytozome v7.0 (chr-ID scaffold0222 9; pos 6749035 to 6749598 reverse strand)
gacggacctggagtactgcatatcccgcaaggttcttttttccttccttttggttgttttcatgtttggcaacttccaattggttgatggactgtaaccacttgttcttaaacatcccattttgaaaattacaagtcatgacttggaaaggggaggctcacaaaataagcctcgaaaaaggctttggggctttttcattttattttttaaaatagttatagtaaaaagggttattaactagaagagtcaagtttattgaatctaaatgcgaaaattcttatgtttgagatccttttttcccatatgtagtgcgcctcacaaggcgtatgtttttgtgcctttggcattgaaaaacaacggtttgtattatccgtgcttaggctcccattaatcaataactggttttctattagtgtaggttaatgttttacatccatattggcagagaattatttatttagacaatccatgttcatgttttgtccttttacttccatcaactcctgaagtaaaatgcccttgttttaatattgttctgttttttctttgaatatttttgcagaa

SEQ ID NO: 64151 - DNA, 553 bp, Cucumis sativus
  Intron number 1 from transcript Cucsa.256470.1 (locus Cucs a.256470) derived from phytozome v7.0 (chr-ID scaffold0222 9; pos 4090072 to 4090624)
ggttcttttctgttgattctggaggtgataaaatttaatttgtattatttttccttctttccctcttagataaatttaaaatgtcataatcatatatgcgacttgaattgccttttttgtgccagttatgagcttataggaaaacagatggctgacaaccatgtctcctgaatttcattttcattgtagtgtattatttttgcttaggagttaggacccttaacagttaggtgattgattggaaaattgggtatttagaagttattgggttgtacttggtggaaacaagattatattttgaatatgaatttggggtcgtgagttcttacattttgatacttgggatgtatttaatattcaagtggagttttgaataattcagtcaaattttacttatttggtcatgctcaattactctattccttattttaccttaccattattttctaacagaagttttgagtttccttgtaagggaaaagtttgcattttcttcataatttatatggtgataaccgatagctgtaatctgggtgttctacttcaattgtag

SEQ ID NO: 64152 - DNA, 707 bp, Cucumis sativus
  Intron number 1 from transcript Cucsa.162440.1 (locus Cucs a.162440) derived from phytozome v7.0 (chr-ID scaffold0114 4; pos 2071918 to 2072624)
ggcttcaaactggatttcctgttttctgcgggaaggtatgcttcaacaagttccgttgattttgattctatatctcatttttgtagaatgtaattaaaatatatttctcttgtcttgaaccaaacttaacaaacagcatattcgattggtaatgaaattgttttagatgatgagtgttgtcctctaagaaacacttataatggagaaaacatagattatcatgttgactttatacatgctgaaaataaccttggttaaataaacatttccatgtctttggaagagaaaaggagtttaagtgaaaaggactggtttataagaaacaaaagcagtttagtacccaaatctctatgtttcaagatgaattgaattccttttcaattctattgcaaattaaaagagtttggatgtcattatggcgttggtatgttatttatggtgatggcttcatagtgtgttctaactctaagcttgttataatgagttcgctgaatttattagctgacatttcttagcgtcttgagtttgttataaaatttggtgtaaaagatttgatacgatttcttttatctgcatttttgtgcattgaagttcatcaataatcttaattctacaaaattgtatttactacattatttgcagtctctaactgagctgaatttttcattgcaggacaaaagggtaagagtctttctttgtgagattac

SEQ ID NO: 64153 - DNA, 779 bp, Cucumis sativus
  Intron number 2 from transcript Cucsa.162440.1 (locus Cucs a.162440) derived from phytozome v7.0 (chr-ID scaffold0114 4; pos 2072564 to 2073342)
taactgagctgaatttttcattgcaggacaaaagggtaagagtctttctttgtgagattacttgaaaaagtcaggttttcatccaatccatcaatgctctagttaattttagattcatttatcatatttttcctcatggatatccaagaattctgtctgttctcaaactcctatgacgtaaatttatcttataacttagcattggcctgtgtccttttatctctaaaatgtgtggcttgatatactgtgcaaggttgataattagaaatataaattacctctttcccagttgtggtcctgctatgctacaaaactagaagaaaaaattagtgcaaaaataaataaataaacatgtcaaaaaatggcacaggaagctgttccattcctgatatttgaagttttttatatttgttcattgtaacaattgattaatataatcattaggagtaagttccgtgatatgatttctatggcctgttggttctctgagtttcttatttagataaaatttgaatccagcaaaagtatcatttccacataaattggaactaaaactcttatgttcaaaaaccattaagctggtgacttttgggaagaataaccaacaataaaagcatctttactggccttacatcttcctatagaagctagttattcttttaggacctcctcataattggaacttaagatcctctcttgataacttttacttatcctcacattttcatcttcttttcatgtgaaaagtcgaccaaaaagtttcttgctggagtgaagag

SEQ ID NO: 64154 - DNA, 858 bp, Cucumis sativus
  Intron number 1 from transcript Cucsa.179670.1 (locus Cucs a.179670) derived from phytozome v7.0 (chr-ID scaffold0123 3; pos 51976 to 52833)
ttactctctccagtggccagatcttcttcaacaaggtaattctcttcttcccttttccttttgtttattgtttgtttgttttctttctcgtctttccctgcagtttctgtttttggattacttctcctcaaatgcgtcctagatctagtttttatttttatcatcgattatgctcttgttgtgtcggttttttgaatcttgacttcggctctatcgactgttgagttttgggtttaggccctagggtgtatgattctgggttctggtttgaatttcgtggcaatggtttcattttgtttctctccggtcagtctcgtacaatggtgattagaacgagggcagcgattggaaaagaaaagtttaagcttggggcatttaggactcgttttttaatatttatgtcttaacaaatacttttagaaggcgtattgcgtaggtttcattatgttagggcatttcttcttcttctgggagctgttcagcaacctcgtgtgagttaagtagctctccggttaagatagtcaaacaaaaaatttgagggaacggcctacattaatctttttgtcacctgtgaaagagaataaacaaatttagtagtacacttttttatcatttctattcatttcatatcttacataatacaatgatcacctgattaatgtatacatcctcttatcaacaagtcagaggtttgaatcttcttactctatgttgttgaactctcaaataaatggaatgataattttttctttacaacaacatgaacatatattttggaagttactttgacaaactttttgaattctcttatatgttgatgcagtgggtcttgtcctcaaaggagatcaactttcctta

SEQ ID NO: 64155 - DNA, 807 bp, Cucumis sativus
  Intron number 4 from transcript Cucsa.219860.1 (locus Cucs a.219860) derived from phytozome v7.0 (chr-ID scaffold0165 8; pos 1458267 to 1459073)
gttgctgatgtaagattattatctctctctctctctcttttctttgctaatttttgttttttttctctctcactaacttagattaaacattcaaaaaagtttaagaaattatttgaacaatcatagttgaattttaatttttgatttaaaattaattattttgtttaactctaatatgataattaaaaattagaatatgacaattttagtttaaaatcctataaaatcctcccaaattcagattaagtaattttttttaattattttttttaaatcattcgaatttaaattcattattatttttgtgtgtattatccaacaacgaacatcatttgaaatttattttaagcttcacgtgatttcatggtttcaaagttatttgaattttttttattctcgaaatctcattttctaagttttttttcttaaaaaaattaaccgaattttatgaaaaattgttaggtgtaataattgaaaccaaaatttcctaaattcatttaatttgaagtcaattacttaccctttgggcttttccaaagcttaggtttaagatctctaaatcattacccaaaatgctatctttttgttttgagcactcccccaaattcaatgtatatttgtctgattaagaattttttaaaagaaaaaaaaagtaaaatgattaataaataaattactgttaaaagattgtttgagtaacttgttggaaaaagaatgtgtatgatgtaaaaaaagatagcactaaataaaacaatagaagtaaaatataatgactaagaatgtgtggtaaaatgcagaagaagaatc

SEQ ID NO: 64156 - DNA, 281 bp, Cucumis sativus
  Intron number 1 from transcript Cucsa.142090.2 (locus Cucs a.142090) derived from phytozome v7.0 (chr-ID scaffold0107 9; pos 403635 to 403915 reverse strand)
ttcagcacggcccttttcccgttgagcagcttcaggtacccattatgctactgcatcacgaaaattagggtttattttcttttctttttgttgtattcatcggttcccaaatgttcaatgaattttgaattcaagatttcgtttctaattgtaggattaagttatttgtcctcgaatttagttacatgggtcgtgttttgatttgggatttatcatttcccagtaacgattttagagttttaagcattttttatgtattaaaggcatcgggaattgctgca

SEQ ID NO: 64157 - DNA, 826 bp, Cucumis sativus
  Intron number 1 from transcript Cucsa.260320.2 (locus Cucs a.260320) derived from phytozome v7.0 (chr-ID scaffold0222 9; pos 6690351 to 6691176)
atcctccacaacttcttttaactcttccataactggtgggtatctgtaatttgttgctcaccttctttttatttattttttcttttccagtactactcgatcatatctccaaaccctagtttttcgtcttcttctcttgattccccttacccccttttctttgatttctattgtcttttgatctgtgacgcttaattttacttttttttttccgactttactaatttgtaattaccctgctgcttctcaccaagctaagagaatttcttggaggggacgcttttgggttgtttcatggctgtgttcacttttgcatgtcatcttcctcttttgtgttgtctttatgggagtaaatagtttgaagtatatttctttcttccagctccttcatctttatgttgcttcaaaatcttgggacgttgatttgttgagtgacatgcatgcttgagaacttgattctacctgttgagcataaaagtttcagtgaccacttttattctttctggattacttctgtttgtagtcaaatgagctttgccttacaaaataatagcttcaaattccgccatatttgtttataatatcattgggaatagttttttctttttttgaatcgataattcaaacgtttgtaccacagtcatggctgctatgtgtatgtttgattacgtggtaggatgaaatattagagaaattttgtgatgaaagtcgtcaatttagagatggtttactactacgttaaatctgctgatgctcctgtataccctgaattattattttaaaaattgctgcttatgctgtcttaggctccaggttgttgatcaac

SEQ ID NO: 64158 - DNA, 478 bp, Cucumis sativus
  Intron number 2 from transcript Cucsa.228000.1 (locus Cucs a.228000) derived from phytozome v7.0 (chr-ID scaffold0193 3; pos 3587 to 4064 reverse strand)
attatcatcaatctccataccctacttggcaataagtaagtatcaatttctaattccctactaaagtatacttgggtgggtgatcccatctccacatcacacttttacataaaacaaataattataacatttcattaaaaaaacaaaatgaatttgcaaactttgattagacttggaacaaacgaagataggtgatatgtttaatcatgatgtattacgaattttatatatgtaagaccaagtctttttctctaaaaaaaaactattaaacacatcttgaaccattgtttaaattagaatctagtttctaattactttctaaatttgctataaaaaacacatacatatgaaacataaatatgatctattttcatcccgtcccttgttttcatattgtctacctgctaaactaatgtgatgagaatttataatatgactaacaggtggtctttaattgccgcacgattacctggaagga

SEQ ID NO: 64159 - DNA, 209 bp, Cucumis sativus
  Intron number 3 from transcript Cucsa.165940.1 (locus Cucs a.165940) derived from phytozome v7.0 (chr-ID scaffold0115 3; pos 1249934 to 1250142)
ttttttcagggattgtgggaaacaagtttatttgggtaagaataaaagaaactaaaaaaaaaaaagaacaagaaaagtccaatttttgttaataattcaaacttttttttctttcccttcttcaattattaatttttttcctattttgtacattcaatctaacttagagctcttattttgaatttccccaggtgggtttgacacagcac

SEQ ID NO: 64160 - DNA, 302 bp, Cucumis sativus
  Intron number 1 from transcript Cucsa.259030.1 (locus Cucs a.259030) derived from phytozome v7.0 (chr-ID scaffold0222 9; pos 5725311 to 5725612)
tggtaccgttctacgaggtatatatatatatatatttttaattttatgttgattacttgttttctttactgtgattcgacctgaatttttgtttaacgttttttatcttctatgttgtgggttactgtaattatttcgaactggggtttttatttggggagttttaaccgttggaatcgaatttggtgttgtttctttgatgtaatggattgcgtgtatttctggaatttgaaatggaatgcctttttttgtggtttgttttcacagcgaaagttagaaataaggaagaagactctttatct

SEQ ID NO: 64161 - DNA, 626 bp, Cucumis sativus
  Intron number 1 from transcript Cucsa.291820.1 (locus Cucs a.291820) derived from phytozome v7.0 (chr-ID scaffold0276 6; pos 424794 to 425419)
gttaataaaagttgcagatgatgctaagaaatgcatagtctatgaagctgttgaaggagatatgctaaactattacaaaatgcttagagcaagggttgaagctgttaatggaagatcaaacgaaataggagaaagctttgcagaatggactgttgagtttgaaaaggctgatgaaaatgtgcctttacctcaaacccacttggatttgtttgtcgaaatgtccaaagccgtcgatgcttattgtttttcctgttcaaaatgaaacatgcaatatgtgagaattgacttatgaggctttagaacaaattaaaagaggtgagttaaaatgttaaattgtgtttaatttgtggtatgagttaagctcgtgaaatgttgtaatctaaatcatccaaatgtgaagtagaatacacatcaagaaagttatgggtcttccaataaatttgttttatttcctcgctctcaaatattctatttggtgattatttatttggggtgtttatcatcactcgcttctaacaaagtggtattagagcttgagttttgagttttaaaaatttgtttttacaaatggaaaattaaaaaataatttagtttcattccaagttcctcgacttacgaaagaaaat

SEQ ID NO: 64162 - DNA, 723 bp, Cucumis sativus
  Intron number 1 from transcript Cucsa.192490.1 (locus Cucs a.192490) derived from phytozome v7.0 (chr-ID scaffold0133 3; pos 361360 to 362082 reverse strand)
acctgtaccggtgtctagggttttgttattaccctgttctgataccatattgaatcaataaaccaacaaaaactccaaattacgtgaaaacccgagtactggaagaaaaacctcaatatttattttcttattattttttgataattacaaaaggtacaagagagggaataaatagaataataaaaggagataaaaaaggaaagatatttaggacaaatcccctatgggcatagattctaatcctaaagtatggttcctgcggggacaccacccattaaaattggcacgacatagattcctgaagtttgaatagttttttttcttcccattaactacttgacttaaagcatagctgatgtatcgtttgggttttagctgcccatccaataagtagcaaaaaaccagaacactttattttccttttgcttctcaagcaacatgttagttttagctaaatagtaaatggtcagccaaatggcttgcttgcactattcacatttctcatgtttggatccaaactacatttttttaaatataaatagcatcccaatacttataaaatgaatttaggatctttcagttgaagggggagtttatggctactataaagggggaaaacctataagtcagcgttgcataatctttttgttaaatgtttatacctcaagtctctttttcattttctaataaagttcatttcagggggagaaactctgcttggga

SEQ ID NO: 64163 - DNA, 668 bp, Cucumis sativus
  Intron number 3 from transcript Cucsa.308530.1 (locus Cucs a.308530) derived from phytozome v7.0 (chr-ID scaffold0297 8; pos 606689 to 607356 reverse strand)
gtgcaagaaggaagagttttgctgatattgttcaggtagatttaactattcaacattgtatctattctagcatggtctctttgatcatcgtcatatatttcccccaaattttaagtgcgcctgcttgtggttttcctaattgcacaatagttccatgtgctattgaatgtaataggaagttcaaattttcattttatttttgctggttgtgagaacaaactatgttttgaacggttgtcaagtcaaaatgacatgaaatttattctttagtttctttcttctaagttgatgagatccaataattttttttattatgctattttggttcattatctcaaaggcaccttggtttggccggtgatttttcaaaattataccgtcttctcattttttaaaaatatggtctctacttcattcttgttcagtactgacattctatttcttttgatgatactggtctattccgtgtttgtagtcagtggttcttttagcttttcctctttcagcttatgtttgatttggttgtataggtggatacatgtcatcccaaccgtcggtttgataatatatcaactttctccttgtttagtaggcaaatatttcttcatttaaggcactaaatattaatggattatattctgcaggaaggacttggtgaatctgcttcc

SEQ ID NO: 64164 - DNA, 389 bp, Cucumis sativus
  Intron number 2 from transcript Cucsa.151900.3 (locus Cucs a.151900) derived from phytozome v7.0 (chr-ID scaffold0111 9; pos 236521 to 236909 reverse strand)
tggaagcgtgtgccattaacgcctggcctgagctggtaagactttctcatgggactatgactctttaaaactaccgagtactgtatataactcccttttctttgtgtcattttacttgggtaactgatagttgatattagtttcttcaaattttcttattaatattgttttgccatcgactgttctaatgttgttggttcgggtgaacggaggtctccgtgtgtgtttctgtttgacatcttgggattgaaatgttgaaactcaaaatcattgccaccttttttatcaacataggttacctccaactccatatgaagttttatcattagttactaagttagagaattggattttggaggataaatttcttcactgatgtgtgatgcagg

SEQ ID NO: 64165 - DNA, 290 bp, Cucumis sativus
  Intron number 1 from transcript Cucsa.151900.3 (locus Cucs a.151900) derived from phytozome v7.0 (chr-ID scaffold0111 9; pos 236940 to 237229 reverse strand)
attccatcacttgtcaggtcctcctctgtttcattaacttacatttctgctttgattacttgcttgatgaatttactgttttgtttcttctctgtgcaatttcattttggggttttctttgtcggattcaatttgaaatttttatatatttagatgggtaatttcatattcccaatttcttcataatgtttatcagcttaaactgcttgaagttgattgatcttcactgtactatttcttgatggatctaaagatacagttttattaacttgttgtactttaatttcagc

SEQ ID NO: 64166 - DNA, 790 bp, Cucumis sativus
  Intron number 1 from transcript Cucsa.228330.2 (locus Cucs a.228330) derived from phytozome v7.0 (chr-ID scaffold0193 3; pos 278304 to 279093)
ccgcaaacgcaatttcacttctcctattgtttgaggtaaactttctccccttttagttctcatcctaattcttcttcctttgcttccatttaattcattcattgagttcttgaacttttctccttgattttattaccgaagttagacaaatagatgtcatctttattcaacagctatttgataaatcccttaaaacttcgaaagggcgattgttgtgcattaggttttaaccgaccttatgacctgaccgaatgcataaggtagaaggacataccttctcacctgatctgattaggttggtttgattaaaaaaactgtaaataaaacactcgatttagggttcggttcttggttggtccataatcgaaccgaaccaaaccaaagcaaaccgtgcacacccactaaaaagcattacttgatcccaaagaaacaggaatttcaagtggccaacttggatttccttctgccgtcacacccacgcattttgatattatattaaaaataggttttttttgttaataaataatcataaaatgggaagataatttttttttaaaaaaataaagatggaaattgtaaacggtcacgatctcttaaaattatttgtagttcattgacaatattaacctaaaatttaaaacaaattacatataaattcttaaattacagcagcaataattatttctatatttgattaagattggttatagattttgcctataaatgtggggtttacagtttattttgtaaattaggtttcaattgggatctttttgacatagcggttgtg

SEQ ID NO: 64167 - DNA, 704 bp, Cucumis sativus
  Intron number 2 from transcript Cucsa.163030.4 (locus Cucs a.163030) derived from phytozome v7.0 (chr-ID scaffold0114 4; pos 2486737 to 2487440)
ggaaagagtggatttcagtgtcccgacgttcgattgtaggtacctttttgtttggtttttatatatttttgttcatcaaaaccctaggtccaaaaacgcgggttttcgaccgatagatgagatgggtatatctttctcttaatgtttttagtggttctgctttcttttcacaatttgatcgtacttggagagtttttcattcaattggttggttcttgacggttgaaatcgatcgaagtgaagcttaattaaggaatttcttattttgtgttttttttcttttaaagagaccatgttcgtcatagttgctgattttttttttttgttgagaagttgcctgtacattgctcaatctctatgaaccgaggatgagactgaaggagcattttttttaaaaaaataaaaataaataaatcactgttcttctctaacgattcttcttctcttttctaccacttcattttctactttttccacccgaattttgaaaaacggagaagatattagtcatttgatatgattattgtggtttaaggcaaagtgatacccagtttttattagctttaaatgctttcacgatgatatgtgtgtttgtaattagatactggaatttctgttttttttgtgaaaatcagtttacattgttcttatagggcttcatttttgtaggatcaggcttgtcgctgttgccacacagaagttcg

SEQ ID NO: 64168 - DNA, 571 bp, Cucumis sativus
  Intron number 4 from transcript Cucsa.136110.1 (locus Cucs a.136110) derived from phytozome v7.0 (chr-ID scaffold0104 4; pos 834742 to 835312 reverse strand)
acttgctctgctagatcgggaatttgacgatctaggtatggttcaaatttaataagtgcaagttcgtagcttcaaattttgtcaaatatggccaccgttcttttacattctcagtggcacaaactctcgtgtgtgtgcatatgtggggggaaactttatcaattggatttctttgacaagattctgaaattaatcattttgatgtgggtttctgaaaaagcaagaaattcacttattcgggcaattttttttttgttgataagacttctttggcattgttctgacatgataagctagcggtaaatgcatgaagtcaaataggatagaagtagtgatttttatggaactttaaacttgctgaagtagtcgtcaagtgttgaaaagaaagtgtcctgaacttgcttctgatagtatggttgggatggacagtaccttcatgaaacttcaaatttgttgggtatctttttctgatttctaactttttttaaaccctgtcattatatgttttaaattttatatctacatatatggttgattatgctatgttaaacatatcatttgtcttcagatt

SEQ ID NO: 64169 - DNA, 943 bp, Cucumis sativus
  Intron number 1 from transcript Cucsa.144380.1 (locus Cucs a.144380) derived from phytozome v7.0 (chr-ID scaffold0108 0; pos 818010 to 818952)
gttggacaaatacagctcataggcacggtgttaaggtacctcatcagttcattcattggttttactggtgcatacttttttgtttccttactatcatgattagttgaaaagttggattgtgtctgaattagcctgctgtgatttataatttcttttatgatattatgaaaatagttttctactcatttgatgtgggcctgtggccatacattttaaataatgatgcttatatatatatatatatcttggagtgatttcaaattagataagataacatgtttcatattccacgtttactcccaaatttaactttttgattttacactttcaaacatgttttttttcaatcaaaaatgattttgaatgactaaaacatgtttttgaaatgattttagtcatttcaaaatcaatcccaaacatgctccacatcttcttaaagtagtgcccattggttttctatatcttccgtttcccaaggaatttattaaatcaacgttgaacaatcattgtacatcattttcgatgtgaatcgtgattagataaaacattgactaaaatttgaaaatgattaaattagtatagagatgtccattgtttttcctttactgtagtaattgtgtgttaattaaaatatggtaaataataatgtaattaaaaatatatattttgaattcgggatgttttccagattttcttagaaagcttcatcgcttgatgttattgcgagaaatcaacttagaccaaacaaaaaactggttatcttgcatcatatccagtttgtaatatgtagatatgcatatagctatttctgaacaagggtgagttcctaagttaggccacaacagtatcatgactaaaactagtgcttttttagtatttacaaattaatagtggtatctactctataggtgctagggacattcattgtggaaggagggggaac

SEQ ID NO: 64170 - DNA, 404 bp, Cucumis sativus
  Intron number 1 from transcript Cucsa.161670.1 (locus Cucs a.161670) derived from phytozome v7.0 (chr-ID scaffold0114 4; pos 1513710 to 1514113)
gcttcccctagtaagtactgtataacgttggacaaaactacttgttgtttagcatacccgtttatttatctcaacttgcattttcatttctagataaatctctaacaaatcctataaaagagggaggttgtgatcgtgtatttttggaagttggaacatatatgggtagaagaggggaaatgtatgatgatttgaggggatgaagaaaatggagtcatgttagaatatttgtgggtggatgtggaaaaaggtattgggttgaactttaggttgtaagaatcattatttgattgagttgaattggggaaattagtacttttttgttttttgatttttatgccatgttcttcaaatttagaatcttagttatcttctattaaatgtgttttttgggtgcagaggtg

SEQ ID NO: 64171 - DNA, 489 bp, Cucumis sativus
  Intron number 3 from transcript Cucsa.306830.1 (locus Cucs a.306830) derived from phytozome v7.0 (chr-ID scaffold0297 7; pos 239265 to 239753 reverse strand)
aactctggagattcaatcaagtgatccctgttcctgtacgtttgaatatataaagcactgcttgtacctttacctatttctgtgcaatcatatttaattttgtgtgcgtgtgtgtgtttttcccttcacatgttcttggaggtcatcaagatgtctgtttgttttttgccactagtttccatgatttcttgacttttgtataacctccgtacgtattttgttatggttataccgtaggatgcaagataatgatttgttctaaagaatggcactggacatttctttttctttcttatctgtggatcttaagtgtttaccatatgaactctgcgtacagtaaaagaaacttttgtgtgtaatttctacagcttgtactgcttgtggctgtacttctttgtgaattcttagttgtgatgatttaattgtttttatttgtatgttttctgagggttcgattttgggactaacctgttatgttaattgagcagc

SEQ ID NO: 64172 - DNA, 444 bp, Cucumis sativus
  Intron number 1 from transcript Cucsa.307480.2 (locus Cucs a.307480) derived from phytozome v7.0 (chr-ID scaffold0297 7; pos 588384 to 588827)
tctcagaaaagattgaagaatgtatgttgttttagcttttagcggtcgaaattggcggcaaatttttttttcttctttctctgcttcttctggttatcgcatgatcgggattgggtttgttttgattttcttttcatttgataatgcatttatgtccagtgatgattcgtttcaagattttgagttctatgtcaaattaatagaagaatggtttgttcatggagaaaggatttgatttttggattttagttgtatggttcattctgttgtttgtgattagattgaaaatgatggatggaaagtttttctttttggttcaacagtttcaatataaagaattggttgcttttttagggcttgaattgactctattccttttgcctttgtaattgttatttttctcttattgttcttgaatttaaatgtagtaaattttcttggtag

SEQ ID NO: 64173 - DNA, 624 bp, Cucumis sativus
  Intron number 1 from transcript Cucsa.266220.1 (locus Cucs a.266220) derived from phytozome v7.0 (chr-ID scaffold0235 2; pos 716745 to 717368)
gccttaaggtcttctttttatccctttttcagatcctttaccccgtttctatctttacttctctaatttatctccttttattttaaatttgttcgatcaatgttctgtctctgattctgatcggtcttaccaggcacttctttctcatttcttgcatttttcttgcctttttctatcttgatcttacttgcatccctgaattacttaacatctatatcatcctacagatctttgtttttcccccccacttgagttgaggtgctcccagattaagaaatgggatattgtagttcttttcttttatgcatcacctgtgaagcaatatcatgccagtgatttttatatatttttttttgcgaagtatcgaattgcttatgagagaaggaaattggtcggggctgttagtggaaatcaattagtctttggtctgctacatcttttcctttatcattgagagggtttacacgtttgactttttttattttttcttggctgttaactggagttatgggattcttttgactttcgacacataccatactgactgccggtctttgtttgctatttgaaatggttagaagctttttcactgacctcctttttttcatgttttaggttctgcac

SEQ ID NO: 64174 - DNA, 589 bp, Cucumis sativus
  Intron number 4 from transcript Cucsa.144140.1 (locus Cucs a.144140) derived from phytozome v7.0 (chr-ID scaffold0108 0; pos 570283 to 570871 reverse strand)
gcaatcttcgtctactggccactcctccaaggtaacatgacaatctggtaaatgattttgttgttattattttctaaagctctacaacaaatgaggatagagattccaacttttaaccataatcagttgagctatgttgatgtcaacttgtgatatcaatttctccattgctacttatttaggttcttcagtgaaactagctcaaactaataggttggcagcatgcgaattgttagaattgggtagagaagaaatgatatttccaggattcaacaccagacactattcatgttctatagaaatgaattcaccattctttcagttcaatccatggtggtgactggccttgcatttatatcctcccagtttttttggtacttaaatgtttgtccaatcaagcttgttgtcatgtgagattagttgaggtgcacgtaagccggcctgaatactcacaaatatatattataatctaaacctaataatttaagcaaaaaggttccgataaatttgatcgtgtatgtatattcttaatattctactttcttttttgaactctgttttggtttttcaattttaggggtttttggcc

SEQ ID NO: 64175 - DNA, 824 bp, Cucumis sativus
  Intron number 1 from transcript Cucsa.280840.2 (locus Cucs a.280840) derived from phytozome v7.0 (chr-ID scaffold0263 3; pos 790663 to 791486)
caacaccgaagagtctagtattggactaagaaacggtattttttctttttcttttcacatttccttttttcaagattcgtgattatattatacatgcctcacttattttttgttttcttttttgtttcttgttttgttaatgcatgggcatttccttttgttaaaactttgatgaactttttgttataacgagggtttgagttggaaatttgaggttgagatttatgcgttcaactgaggtttgacgaacgatagtggttaaagggctctaattttccttttcaggcattgttctaaaaaagatgtttgtgttttatttatgcgttgatttatcatctataatgctagtgattccatttcattcgctttctgatatcggttgcctttgtagaggacttggaaatttggaatgggccctgattgtcaattttaaatgaagttatgtgtacttcagttatttgttcccggattccagtgcatgatctttttcctgtctttttttgcgggcaatattttgttgtttttgtcagaattgagtgcaagttattgaacggagtagcttgttactgatatgggtctttaattgttccttttgagaaccatgtaccacctgaatggaattttctgggatcttaaaggttttcttttcgcatatatacatcatgttaccaactaatcttattgtttatggtttgtatgtgctataattttgatgtttgttatctaatgtagtcattttcaaacttgtatacgattcactatttatttatttaattttttttggggcagtgagatcgtttggaacagaaggaagaaagaaggat

SEQ ID NO: 64176 - DNA, 959 bp, Cucumis sativus
  Intron number 1 from transcript Cucsa.158940.1 (locus Cucs a.158940) derived from phytozome v7.0 (chr-ID scaffold0114 2; pos 968052 to 969010 reverse strand)
atctttcttccttttctcctcttttccggattcaggttcctcctcctcttcttcaacttcctcttcctcttcctcctcccatctctttttgaaccataaaggtttttgtaatctcttcattttggggttttttccttttgtttaatttcatatcgaaattgttcttttttaaaaaaaatgattgaaaattactgccttaattatttggtaattattttgattttgaaaattacaattgtaaatactattattccacttaattagtttccaaaacctaacatggtattttaaaatatttataaaaagtttaaacaaatcatcaaaacttataaattgtgttcatatatatttatacactcaatcttttaaaatataaaaatccaaaaacttatcatcaaacccatacctaatcatattagtttttcccattaaaactttggattcattttcaaatatagcaaacaaaaattaaaactatttacaaaatataataaactctcaaataccttttttttttctctacaggtgaaaagtagtttcaattatttttatttatgacactttgttaattaactcttgcagagataaacaggtcgcacctctgtctttctatatgatccttggcttctctctccttggccttaatgggtaacaatagtgctatgtttttgtcctcttcctctatatcattgtttttcccccttttcttctgcaacagttataatttctactattatggtagtttcagccttcaaacttatatcaatcataaaattggatcttcaaactacaaaaactaaacttcatgaacttatacacaatcgatcattataatttctactattatgtaggtccaactttagctgttatataagtttgaggtcaccctaattttttattttattttgagctctaactaaaagttatttaattttgttgtgaataggagtgtggggcag

SEQ ID NO: 64177 - DNA, 1011 bp, Cucumis sativus
  Intron number 2 from transcript Cucsa.252030.1 (locus Cucs a.252030) derived from phytozome v7.0 (chr-ID scaffold0222 9; pos 1050843 to 1051853 reverse strand)
gaagctctccaggtgagatatctttgatgctattttttttaaaaaaaaattgtttgttatgtttaattcacttctagatttatttgatcatcttattatgtttttgcctttttccatatctccaaaaattgttggtctctcgtgatcgcttggctgtgttttcctattggttgtcttgtttctgggtgcttgccttcacttaccctggtcattccatgatcatacgaagctctagaaagttaatatcccttaagaatgttgagtttttcgcattgaaaatgtagcacctgactttttcaagagatctgcgactatggttaggcccatattgagttttttgaaagctgattatggaggatttggagcttattgtttgaagacgtcccttttgcctctatttattggatatatatctggaatatggagtttgtcttgctttggatcggattatttgccgttcttttatggagaaggcccttctttgctgtcgtcatgaggggcagatgaaagactttgtaccaagcatgtcctttttactattattttcaatcttcagtcattggaaaatggagctcattggaaagtgcagcaattgtaaggggtgaaagattccttgatcggagaaatagagctttcaacatgccaacacctctttgtgggcttctagttctacttcaatctttttccctaactactttgagtctttttttcctcaatgatcgaagcccttgtttgtaactttttggttctaggccatctttttttttaccaaccttcttttaacttcatgcatcaaaatggaagtcggtcttttcattaagaaaaaagagaatctttcaaatctgatgttcttcctattattttattcacttatttaggctacaaccttctatgctttcatcgctaaatattagtgtaatatctttttcttgtcatgggataaaagatttattgtacctcatttgtcctttccattaatattggcgccatccttttgcatgtattgcaggt

SEQ ID NO: 64178 - DNA, 378 bp, Cucumis sativus
  Intron number 1 from transcript Cucsa.252030.1 (locus Cucs a.252030) derived from phytozome v7.0 (chr-ID scaffold0222 9; pos 1051916 to 1052293 reverse strand)
ggatctccacattgaccgtttcctccctgtaaacaatctctacttccctcttttttttcttcttttctcctcttcttgttatcgatattcaaaaactgtgaatttattgctggagttattcgtagcgtagtataagctttgcagttaatcagctgcagaaatgggcgtttttttgtttgttttgttttgttctgttttgatgatagagttgggtcagttggtttaaaaccattttaccactttccagttcaggaggattcttctctcctcggtttttcttgcagtttttaatgggtttagggtgggcagttttatttacatttgttttgctcttccttgccagtttttgactgagaatacggagttcaaggtggtggg

SEQ ID NO: 64179 - DNA, 268 bp, Cucumis sativus
  Intron number 2 from transcript Cucsa.213020.1 (locus Cucs a.213020) derived from phytozome v7.0 (chr-ID scaffold0154 3; pos 777793 to 778060 reverse strand)
atgtgagaaaaaatgttccttactctcttcctatttcttcattttcaagtttgtttttgctatttttatttttccgttcctacgtgaagactttggaatattctgagttttaatatcatcagtgacagattctccggctgctacatagagacaaaagaaaataagctcaaaccttttcatctcaagatgcttttctgcttgtttttttaatgaggtttgaaactatgatacagggtgataaagtgagggttgtacagactctactttt

SEQ ID NO: 64180 - DNA, 962 bp, Cucumis sativus
  Intron number 3 from transcript Cucsa.238000.1 (locus Cucs a.238000) derived from phytozome v7.0 (chr-ID scaffold0202 3; pos 656922 to 657883)
ttcagacaccaagcgacggatttaagacggaagaggtaatatctgaaaattgaatgcttcttctttttcttgtttaatttgtttatcattttgcacaatttgcgaaatctgaacttgtctagatgattgaagtattgattttcatggagagaaaatcggaagaaaacaagggcatacaaaaaatcaagcataaaaaacaaggaatccctatagagatagagactcaaactgtacagaatagagggtattgaatagagaaattattttaaatgacaaaacttctgaaaatatttacaaatataacaaaatatcaccatctatctagatcaagataaactactatttgtgtcttggtctattacggttcatcgtatataaacggcgatatcttgctatattttggatcattttgctatatttgaaaatagccccataagcccgagtggaaatgtagaatccaacaaaggaccaaacatcgcgagaatccctcttcatctctctaagcttaaaccctctggctattccattcttccctaatcacccacaatatagcatccaccctagcaagtcataaaaactgttctttcttttgaaggggtggagggaggaggaactctcgtgtcagattgaaggttgaaaatgaaagtcaggtgtatctgaattagatacgttcttgagtagttaaaagatttcgaaatcttaattgttgtgtcttttggggtgttcttccaaatatataaatagatagttgtaatgcgattcatttggctgtggaagagaagtcaactgcaataccaagaattatgtgctttgctaagatactaaactctttttcaaagctgctctgttaaacgagttatgaatttgagagttttaacacccttctgtacttctttggaagtctatgcaatcttgttttgatgttttcaacctaagacgatcaatctttttggaacagacat

SEQ ID NO: 64181 - DNA, 470 bp, Cucumis sativus
  Intron number 1 from transcript Cucsa.253040.1 (locus Cucs a.253040) derived from phytozome v7.0 (chr-ID scaffold0222 9; pos 1810863 to 1811332 reverse strand)
catcgcttaattttatcgcgcagctcttacttcaggtctggattgtttcaattggacaaagattaagtttttttatgtgggttttcgtttttattttttttttgttctgttcacgcttgggtgtgacttttggaagatgatgcttctgtgatactgtttggataaacctattctattgattttgtttcttttatgatggagttagtgttttggtttaatttgatttgccttgagaaatgggatttttttgctcgtttagtatatgtgttttcttgatttgatgccattgcttaatttccaggcgttttattggttatcttgtagttttgttatttttcaaatttacttgatgattacttgatccatggttacaatgcaattaatggttggtttattttattagtcagttatatatgctgttatgggtttgcttctggaacccggtagcttacattatgaattgcaggaat

SEQ ID NO: 64182 - DNA, 970 bp, Cucumis sativus
  Intron number 1 from transcript Cucsa.300790.1 (locus Cucs a.300790) derived from phytozome v7.0 (chr-ID scaffold0293 1; pos 390538 to 391507)
aaaaaaggaagtgtcaatttgaaactagaagttgagagttaaaattgtgttagataagtgtagcattgaaagtattaaaggcattgacgaagggaccatatgtatttttacttcatgtggtcctccatttatgtgaaaagaagatagaaaaaaggttagttttgtaatatgaaaactattttaggtttaaaaaatagttttaggttaaaaaatagcattgtttaattaataataaatatcaaatagcaaagactaaaaatcagtattattgactatcaaataacaaaaactttgcgccgtatggcgcttcggatcgagtcgaaggtcaccaccccaaggatagggattctcttcagaggcaagccactggctcgactctttctttctccctttcagttatttaagagctaaaaaagctctttcccaaccaaaaaaggcataatgaactactagaatacgacccaagcaagccaacctattgtccacgaatgcagttctttcatctctttcggaatgaaaataaggaagaggaatttagttactcgatgcccgtcattcaaggcgaggccaatgcttgtcccatctgtagcttttgaagacacataagttttgtagtttaagcaaaagcttagttcattcactcattaatctcaaaaataataaaagattctccattctcaattcaataaggaataaaaagaagaaaagacgataaaggagctaggtaataaaaagaagagaagacgagtcaagaggttttgatgattgtaaagactattacaaagacctgcagaaacctaaaaagtaccaatgctaagagaaagaagagtatagaatgaacgagtcaattcaatatgaacctagaaaagtaggcgtttaagatgaaccgaaaatcttcaacaatatccatggagggcatatctgtggagaggtaagacggagggtagaggtggtgcttaagttgcctggg

SEQ ID NO: 64183 - DNA, 828 bp, Cucumis sativus
  Intron number 1 from transcript Cucsa.242040.1 (locus Cucs a.242040) derived from phytozome v7.0 (chr-ID scaffold0204 7; pos 1865485 to 1866312 reverse strand)
ggagatcgttttctctgccttcaatgtgagtttgattttggattttttttgttgtgttttgttcctcgattgaatctttggctactttttgtggtttacgacactgggttttcctggattttgactgttcatcctcgatgtttggattgaagcaggaacatcttttagcttttcctatgagtctgtttttttttctattctttttttcttgtgattataatattcagtttttgggtattttcttccttaagatttgtactggaatagaaataataatggatgatatttctccatttcagataatctgtgagttgttgtcatattgttttgttttgtttttcctaattttttgaatctgggtctctcagttctattgtgatgaattctaatctttactatggcatttgaagaaactgtagctgagagtatgagataaagatttggccctttctcaaggggagttgaattcattaaagggagttgacttttgtagcttttgattttgtgggtttcctgagttttggtatttgtattcttttgaatgttttatgctgaaaatcttgtcaaagcaaatagtgtgtttctaacagatttgttagcatcttatagatgccaatttttctttgttattggattatatgcttttacgttaactgttgtttgattatgttcttgacatcagatttgtatggatgaacttgatgtatttccattctttatctttactgcgagaaattatccgtaatgatccatagtgaacctaaagttttattttctttccttctctatccagggcttaaatcaagggtcgaaaaacaaagttcaggt

SEQ ID NO: 64184 - DNA, 895 bp, Cucumis sativus
  Intron number 1 from transcript Cucsa.280980.1 (locus Cucs a.280980) derived from phytozome v7.0 (chr-ID scaffold0263 3; pos 905426 to 906320)
aaccccccagttgggttctttctgccggtaaatcttcctcttctttctaatcacttgtcaatttgatttcactttgattttaagagcccctgctgattaatgtgttcttgtttggtgaatttgtgttttagtatcttttgtactttagactattctatctgatatgacacgtttgtttcccaatggcatttatgatttctttttgtttaatacaagtgggtagtggcaagtgggtggggacaaacacctttgaatttatcgagggtatatggtttaataagctggaccttgcggaggttgtaatattaacttattaatgctttactttaccagtctttgaagcaggaagttacctttttagctaagacaaatatggttaatgtttttgtatatggttctatgacataatttatgaattctccaataggttcctaaaacagtttttggctcataaagcttcaacctaagtttgtgtcattggtggtttatgtgtttaatatggttggtttttggtttttcttttttgagatagtgtaataaaatttgttgaatttctgggttgatgagttatcttgtgtttttatgtgggttcatgactttttgtattaagaaagtacataccctgtatttgatttctgagtttacgaagcctaaaactttaccatatgatatgaagataggattcataagcttgaattttcgttacttcgattatgttaactttaagaatataactctttcatagtctaaaacaagcaatccatagttttacataggcttgctttgataaacacccttaaattgcttcttcttctcatagaagatttttaaagattccaacggtgttgtttatgttacacattctgctttttaatttccaactgtttatcaggta

SEQ ID NO: 64185 - DNA, 754 bp, Cucumis sativus
  Intron number 2 from transcript Cucsa.182220.1 (locus Cucs a.182220) derived from phytozome v7.0 (chr-ID scaffold0125 1; pos 294909 to 295662)
aactcgttcccgatatcattggtaattttaggttttctttttgggtctacttaattaattagttttcatttagtacttaagtttcaaaagattaatccttacgtgatggtggagctgaagttatacgtctttttatctttatatgtgtctctctaatcacacaaaaggaaaattaacgtcttttttaagaaaatatttgtacgtgagagtgcgtatctcaaaaaaagaagtttactaggagccttaagcacttgtgtgacggacatcttgtacaaagatgagtgtggctaaagatgaacccaatatatttttttgttttgagttgttacgttggtagtttttattcagttttaagcactgaacaaagagagaaacaaagaatgaatagtagatagtaaaaactaaccggtgtaaataataaagaaggagaagtaataatatattgtagttaattacaggtatatggtcataacggtagaaaacatcaagtatttataattaggacttcaaacgttaagtgagttacaatagcctatctcattctatccactcgaagttacattgaagacccaaacaaaactccttaaaaactaaattgaaactaaacacaaaacttataaacctagctagaatcggaaaggtataattctttcttttcgttttcatgcaaatcttgttgttgttattattattatctctttcaaaaaatgaaaagagtaaaattgtgtgtggttttggtggttcgtagtgaata

SEQ ID NO: 64186 - DNA, 632 bp, Cucumis sativus
  Intron number 3 from transcript Cucsa.237180.3 (locus Cucs a.237180) derived from phytozome v7.0 (chr-ID scaffold0202 3; pos 171049 to 171680 reverse strand)
gaggaggctattctgggtatgtaatatttatccgttactcttgtaatttttcttccttataaaattgtctaggttatatgttcatggacagacgtatttgtaagtgctacaggcccacagctttgacttaatctaactgctacttctcaaagtaggtggttagctaacaactgatcattacataatggagttatgatcgacatcttatttatcagatattccaaatgaagcaatgactccatctaagaaaaaagtttcttcactttattttattttagctattaaatgatgttgactaacatgagacttcaagttaagacaaaagtactttgggttttgacatacgattactttggtcatcccttttaagtgggtattctaagttttccaaatctacttctgtgtttcgatgtttccatatttccagtaaaatgcatcatgtatgtattgtacagtaacttaagtcgatatttaatttattttgccttttgttttcagtattcctttatatgatttctggcgtttttgtaatataattctcacttacctggctaattgtcaaaaattatttcactaggctttcttttgctctatcagctggtattataaaggaaaaggctagagtagttgca

SEQ ID NO: 64187 - DNA, 570 bp, Cucumis sativus
  Intron number 2 from transcript Cucsa.301880.2 (locus Cucs a.301880) derived from phytozome v7.0 (chr-ID scaffold0295 1; pos 119520 to 120089)
caaggattagggagaaatatcccgatagaattcctgtaagaaatgaatttattttgttaccgtgatttgattggctattggttattatcaactttaaattcagaatctcagaatttgttttgccaaagcgttgatgttattgttctttttaacttcctctgattgatgaatgagtcgaattttttctgaatttccttatcatccattgccagtatcctttttctttcgtattcatttggtaaggaagcaatcagttattattattattttttagttcaacgacatatggttgacaagaaactatcagttattgataatgttgtctttgatttctttctggacaacagacggtgatgattatgttgttactgatttgatttagcaagggggttgtgtataagcagtagagaggaagtgtgttttaagaataaaatgtctcaaaatgaaggcatctgttgtatttttgtttgcgcacatgtttcagcatttcatcagttactgcttggttatataatcatgttcttattgtttcaaggttattgtggagaaggcagagagaagtgacatccc

SEQ ID NO: 64188 - DNA, 555 bp, Cucumis sativus
  Intron number 3 from transcript Cucsa.301880.2 (locus Cucs a.301880) derived from phytozome v7.0 (chr-ID scaffold0295 1; pos 120073 to 120627)
gagagaagtgacatccctagcattgataagaagaagtaagtacaccgacattcattttgtagttattcgttgtagttatcttttcttttatgtagatgtatatcaattaaagtcggaggaaactttgaagaaatattatttagggaagtattctgtgttcaactctttttcatctaaggaaacatagctactggtagctgagaattgaattttctttcttctatgttagaatttatgttcaatgatagactgtttttcgttatcttttctctttttgtcttttgattgatgttcgatgagctgaacacgcaagcagtcttactggaagctctttttcatctctttgaaagtggcgtttatttaacttttaaaattatgttcctgttttcttctcatagttctgttgtctatttgctttatatatacaattcatttcaaaaccacaaggggaaaatgaccaattgacaatccttcacctctttctctttctatacctaagattttgatgtaatgactgcagatacctagttcctgcagaccttactgtgggacagt

SEQ ID NO: 64189 - DNA, 831 bp, Cucumis sativus
  Intron number 3 from transcript Cucsa.248500.1 (locus Cucs a.248500) derived from phytozome v7.0 (chr-ID scaffold0220 7; pos 348336 to 349166 reverse strand)
cgttacgttagatcatcccttaaaagattgacaaagtttaaaacttgtgtggagcaagagaaaattgattgaaaagctcttgtttgtttagatgttccaacaagatggaattctacttatcttatgcttgagcatgcacttaaatttgaaaaaagcttttcaaatattagaggaataagagttggattatcaagactatttttcagaatatgaacatgggaagaagaggaatgagccaccaactaattctgattggaaaaatgttgaagtgtttgtcatgtttttgaagatgttctacaatgtcactataagattaatgtcactaataagattagtggttctatatatatgactgccaattctttttttcatgagatgtgggggattaatgatcttttaattggttagagcagtgaatataattatattttacataatatgactataaatatgaagtcaaagtatgacaagtattgtggttcaattgagaaaattaacaagcttgtatttctagttgtggtgcttgatcctcgatataaattggactacgttaacttttgatttgaaagtatacatgatgatgttatggttaaagctcttgtaagattgaagcttatttgatgcgattgtacaatttttacaaatcacaagttgatgactctgtctttcgcaatgatttgcgtggtcaagatgttgtttgtgaacaagtagaatcaagtgataatttgagactattgagttcgagagctacagtggaaactgacgcgtgttgtagagtattatcacgctacaagagaaaaagacaagtacaaaatactttagaattgagga

SEQ ID NO: 64190 - DNA, 693 bp, Cucumis sativus
  Intron number 5 from transcript Cucsa.256590.1 (locus Cucs a.256590) derived from phytozome v7.0 (chr-ID scaffold0222 9; pos 4175325 to 4176017)
tattgaaactgtcgttagatcgttttccttcacaggttggtttctattgcaaacaaatttttactataccaacagttacttaattaggttgaggtgatggagaccatgctttgatgcatatttttcttaaaagttgcaatgctaatgttgaaaaaagacatcaagtaattccaactatggaaggtggttatggcttgtattcgtttcaataattaggcgaatgaggaataaggacaaaaaccagatggaggaagttctaggaaatctaacaccttaatttttttcaccgaagctgtactatttagtaggtttgctccttcagttatttaactggtttgatttgtcagtatgtaaaaaaaaaaagaaaatagattctttaacatatcggataagatattttgcaaacgtttctctaggcattactgccaatgctttgttttggtctacatgtctctctctctctctctctctctctgtcttttttccccctccttccaacgattaccttattttcaatttgattctgtggtttgattttgtcaattttgtttggcctaacgtatgattagcttaacttgtttatacgcctaatcaaaaggttcttctccaaatgagactgtctgccaccatgttatcattacaatttacgatcttgtaggatcctgaagaggccacatttaattgcagctctat

SEQ ID NO: 64191 - DNA, 903 bp, Cucumis sativus
  Intron number 1 from transcript Cucsa.185700.1 (locus Cucs a.185700) derived from phytozome v7.0 (chr-ID scaffold0127 4; pos 1172088 to 1172990)
gaaccagaagtgcctcgcagggctccaagtgctaggtacattcctttttttccgactgcttacagaatttggtcgtgagtattgattgtttggccttatgcttctttctttatacactgattctttatgtctttttgttggttttggttgtgtgattcttgaagttaagtagctaatgtcttaattatacttctattttttgcaattctgaagtttgggaagtcgttctagttggttgaggttcaaccctccaaagcttttgttgctgtctatttatccatctgaatagctatctctttcgtctgttgtgactatctggtgccttctttctaaatttcctttgagattaaggatttgttgaggaatgtttctgttcctggatttgaggcatcatgaacatggacactcgtcacgtttctccttaatttattatatatctaatttatgtgtcttgaagtaagaaagaagaatcgatgagttctgtagcttcagtttctaccagaaatggaaatgaaagagaagagaagtatggactttgattttccaatgaaatgtaacctataaactcatatcaaatttaggaaaatttattgccacatggtgtctctccccttccccaaaccctctttggtccctggatcttttgcatccttatggtataaaagtgccaaccacatcattctaggctcatcaaattgtttctccaaatgtagagcccttttctattttggtcttctgcatcacaccttatgtgattccataatcttgctgcatattggtgctgttcccttgccttgatacttgatttctatatagtgtttttttgttgcttgcctattttaggacttatttccttgaaattacatttgtagtaccacggtgtttggggtttcaactgaatcc

SEQ ID NO: 64192 - DNA, 463 bp, Cucumis sativus
  Intron number 2 from transcript Cucsa.197320.1 (locus Cucs a.197320) derived from phytozome v7.0 (chr-ID scaffold0135 7; pos 763638 to 764100)
gtagatctagtcttttcgatatcacgacggacacggtaactcactaatactttttctaatcaattactatatgctatttgtttgattgttgaatctgattacggaatagggatcttaatccctaacttttcaacaatcaagtttaacttggttgtcaattaggactcaactaattaggtttgtgattgacaaaatccatgatgaattactctctatgatgatggatctaagtttctatttcagtcttacattttcttaggcagacgttgacctttaaaagaccaaattgcttaaatgatttcatatttctagcttctgctctttaattgaccaataaaagacttgacttatgcatctcaaaatttctatcatgtcgctcaccaacccccaaaagtttgaatttcaagatgaactctgatttttatttctttttctttgcttttgttaggtcacggctgctcca

SEQ ID NO: 64193 - DNA, 926 bp, Cucumis sativus
  Intron number 2 from transcript Cucsa.271960.5 (locus Cucs a.271960) derived from phytozome v7.0 (chr-ID scaffold0250 0; pos 715779 to 716704 reverse strand)
ttctctttctgaatattgtatccttccattttctgcattgaatttatttctcttgaacatttgttttacatttcgccttttcttttcccaccatgtgtcctattttcttagttgcaaacctttttgccacatttttcgtgtagggtgcacttgcttcctaacctgcatgtttgatctcaaatgaattgggtaataatctgttatatgatacttgattgatttgcacgttgatggtcaagaccagctatttcaataatatggtgaagttgatttcaaaagccaatagcatatgtgttgacattgcgcatgggaatttcttcttaagtattatttagattaaagtatgacattttgtaactatttgtaatctttttatttatttattgatagaaaacacaactttgattggaaaaaaatgaaaaaaatacaagggcatacagaaaacgagatccacagaaccaccaaagaaatggggttcaactagctaaaatgttaacaaagttgtgattcttatattatttagttagttttaatgacaggacagccttaacttttagtaaagtactgtctatgcatatgctaattgtctatatttgcggccttggaaaatttgttgcttagttttgctgtttgatacttctttttgtgcaattgagtgaactgtttacgcatttggatttttggactatagtttcttaacgctttaagatttggaaaatggacatacattgcatttagttgaaaggcaaccaactcagcagcatgcaccatctgaaagtagctccggtgacagaccagggaatggtatgctagatagagttctaggtttgagaatttgtgaacaccgtgagttagttaattttcttaagttttcttttatttgcttcttagtaccttcatcgaccggtaacgaagctggagttggt

SEQ ID NO: 64194 - DNA, 687 bp, Cucumis sativus
  Intron number 1 from transcript Cucsa.289160.5 (locus Cucs a.289160) derived from phytozome v7.0 (chr-ID scaffold0269 8; pos 647615 to 648301 reverse strand)
gccttctctttcttctgtccaaggggtgttctgaggtcagctctctctttcccatcattttttttgcctttcatatcccttgtttttcttcaatttgatctgggtttagctgttttagctccttctaattaattatgtttttctcgaaattttacatgtattcagcttaaattattggttacatgcttcccgatgatgtgattccgccttctattagtgggattttgtactgttaattgcgcatcatgactgtgttggttgtttttgttcattattccatgtcgttgactgattttagattgtattgaacttgtgggtactcttaataatcggtctaattttatacccaccttacagaattttgagcttggtcttgttttttcgtttttttctttgaagtgatgtgctttttttgttgagcttgttttcttgtgtgttctcttgtatatattctttcatttctgtcaatgaaagagggtttttttttgtaaaaatacattgctcgactaattattttggtcctttctgcacatgagttgaagttatgaattgccaaaatgatgtttcgtgtgaaggatatcgtaattgggtggtgtcgtattcttaattcattggtttcttttgttgatctcatgtttttgttggttttattctaattatgttgaagtgtgttagatcacaggaaag

SEQ ID NO: 64195 - DNA, 449 bp, Cucumis sativus
  Intron number 2 from transcript Cucsa.258340.2 (locus Cucs a.258340) derived from phytozome v7.0 (chr-ID scaffold0222 9; pos 5330055 to 5330503 reverse strand)
ggcaattgctgaagtgattgttgttaagcgctacggtaacttctgttttccacaatttgttcacgacttttggtccattataatatgtgatttgatgatggaatcaattaattcttctgctcttacacttgaccctgtgagtatgtagtgaatgatgtgtgatttagtgttgtagtgtttgtttttccttttctatctgatgagaattgttggaatcgattgagctgacagcagtgttgatagtatatttaatgttaaaattattgtttaactgaaaacttgaagggtgttttttgagcttatagcgattacattggacaagaattggtgccgaggctattgtgacttaagatttagtagctaaagtaatagttgttaacatgacaattttaatttgactttttttttttccagagagcggagactacgttcttcgtgagggtgaaaca

SEQ ID NO: 64196 - DNA, 1034 bp, Cucumis sativus
  Intron number 1 from transcript Cucsa.241030.2 (locus Cucs a.241030) derived from phytozome v7.0 (chr-ID scaffold0204 7; pos 1210772 to 1211805)
acttctctctctgcccaacaaaccctcttaaaaaggtgatcttttttgaaaagataaagaaaaatcaacacaatacccactttctctttcctccatttctctctctctttctctctttctctctttctctctgtctatatatatatatatatgatttatattattgttgttttttttgggtctttttgttttgttcttaaggttctcttcttgcttccctttcaccaagaaaggtagacatacccttatgttgtggggtacttcctttgttttgttcctttttttgtgtgtaagttttggtttttgttcttctaaattctaagtttcttcttcttcttcttcttcttcttctcttgtgtttttgtattgaattcttcaatttgatgtctttttccccccctcaaaacaatttatttcctctgtttttggtgcaaattacagaggcttagtttacaaggaaacttaagaggttcagaatttttaagtttcttatggtcttatatgtggttgaatataactttaattatccttttctttcatatttgggcaaccgaaagaacaacccatttcttcttttttttccccccctttttttcttttcacaatgagtgtacattttgtcatccatttatccttattctctcttttatttatttttttcactcaaaaatcttttgtttaaattttttttaattaaaaaaattccctgtttcgaagctgtttttgcctcctcttttttcccatttgtttctgtctctttctcttctaactctcattattacatatggctaagaccaaagcttcttcttcttcttcttcttcatcttcctcgttactgttggatttatcaatctctataaattaacctctcactattttttccatttcctaatcctaaaacccatctcaacatttctatcttgtgtgcttctaattcctcttctctgcttcttctcctattattcctttttttttcctaaataaattctttgttttccttttcagggtttttttatttatttggaatttggttg

SEQ ID NO: 64197 - DNA, 882 bp, Cucumis sativus
  Intron number 2 from transcript Cucsa.161010.1 (locus Cucs a.161010) derived from phytozome v7.0 (chr-ID scaffold0114 4; pos 1072999 to 1073880)
tgttgccagtgcagtacctacggtattttttgtctgttttgatgtctgttctttctgtattgtggtttaaagttacatacatttgaccatattagtaggttgtcgttaataagttataagatgtatgaagataaataattagtatgcaagattctgttctattgttcatcaggtcatgggtaaggcgtaaagctttccttcaatttcattgcattggattgtgtaatgtcttcgtagtgtaggtattctatattggcacattccatgtaattacttgagtgcgcttgtcaaatttatggatacttgtattttaacttctcccaaatacgatgccttcccactctaggtctgcagttatgtgaaaataaagttataggcagacgtagaatatgaattggtctccatatagttgatgtagtaagaaatgccctattagtttggtgctggtgggttgccgaaaggctatttggttttattttctttaggaaatcttctcaggacatcacatttgaaattgcttggggcttgaatatatttttataaaaacttgtttccccaatgtttagttgaacaaaaaattataagctctgtggattgcagagtattaaaccacattgcagcatatttatacttttggcgctttttttggttatatctgaaatattgcagaatttaaataggagaaattttagacaccttttcgtggtcggcaaagtgatcagttttgaaaagaattctaatagcaagtgaagagtaaagtcttagtcccactgtatttttttgtgtttgtgtgtttgtgaatttttgttttaagtttgacacacttcttctcctgctttatcatcagttggttgctgttcgagtagttccttgggccaaagc

SEQ ID NO: 64198 - DNA, 760 bp, Cucumis sativus
  Intron number 1 from transcript Cucsa.295060.1 (locus Cucs a.295060) derived from phytozome v7.0 (chr-ID scaffold0285 2; pos 37454 to 38213 reverse strand)
gattcccttattatttgttttctctagtcctcctggtatttgcttttctttccttctctttctgtttcttcttcagcttgttttagattgggattatgttatggtcttctttgtattgactggtggagcttatgacttaacaatagatatgtctgaaatatggatagagtaaatttatcttactctactagtttttgttacttgcttgtgagacctgtctttccagaatgctcaattatgtgaaaagtgatttttaggaaatgaattgttacatcaaagatgttaggatttgtcttcaatggttcttgagtaattgatattattcattaaaaacttcttcttgtgatcctacttagtattcttagttcgttccctttggtgttgatgcttaagttttcattgtagatcaagtggtgttccatgtggatagggtgagaaagttctctagctgaggattgaagtgaattccacatttccatgttcattagaatttttgtgtgaattttatattctcttggccaatttgatacaatcctgcattctctgaactcttgctgattaaagagtgatacttgttaacccaactcaattcctttttggttggctgcacaatatttctgtggattttcaatttaatcttgcattttgaagttacttatcgtctatcgtcttgacctatcatagaacagagtgattaatggaaattatctccacctttactgcagctttgttaacagtagaagcattcactgggacttat

SEQ ID NO: 64199 - DNA, 392 bp, Cucumis sativus
  Intron number 1 from transcript Cucsa.199920.2 (locus Cucs a.199920) derived from phytozome v7.0 (chr-ID scaffold0136 5; pos 287811 to 288202)
caggcttatctcgataccatcccctctgctaacatgtatttctttctgtctttatttctctctaggttcagagctctccaatatttgtcttctcaacttcttctgttaattatagggcattttgattgctgatatgcaaagtaatggaaaattttggtattgggatactttagttagctaaatttggatcaaaattgatatggggttctgggtttttgaagttacattagggttttttatgcttactgtgatgggtattatccgcgtgaaatatgtagtcgactttattggattggaagggtgttaaattttgaactgggaatgctatatattgtcagggaaattggatgctagatgatgatcaatctgttcttatttttcctctaacaggt

SEQ ID NO: 64200 - DNA, 820 bp, Cucumis sativus
  Intron number 3 from transcript Cucsa.161970.1 (locus Cucs a.161970) derived from phytozome v7.0 (chr-ID scaffold0114 4; pos 1728558 to 1729377 reverse strand)
ctggagttgtcatctactaattttgcctttaagtagagattttttgtttaaactgtttcctcaggctatggctcatccttacaacaaatatttgatgaacatacaaagtgaaatggtagattattgttctgaacgttctatttgactctgcaagaatctatatcttggcaatatgacctgaatcttagattccataatcaaaagtttggaaatcttttaaggaaaaaaggtcgctgtttgatggttaaaggcttaaagcatcgattgactcttcggtaattttgttttctagaaaacgatatttcaggcagtcaaaaacaggtttctgaaaggtttttcacttgaaatgaggcttagaagcacaagcctaaaccaaccataaatcctattagaaattattttccaagtgcttgagaaaatgttattttagtgcaagaaagatgtctgtaatcactcgaaagtcactacaaacagctcagtcttcttcaattctgaacatgtgatgtaaatttgaaaggttagcattgcatttggtgtgttattatctatgaagtatgaagtttaagttcactaccaatatgataccattttgattactgatgaaaactctaactttagttggaaaataatttcgatctttttgattgttgagtgcttttggcctttcgctttcacttttcttgtaccattcaactcttttgacatttgcttacgttttttttcttctccccatcattgtttcatgtcttaaatcatatgtaccctaactctttcatcttttcaagggtggagtcaagaaaaccagaacgttattcgtcgg

SEQ ID NO: 64201 - DNA, 767 bp, Cucumis sativus
  Intron number 1 from transcript Cucsa.302200.1 (locus Cucs a.302200) derived from phytozome v7.0 (chr-ID scaffold0295 1; pos 410287 to 411053)
ctctcacagtggttcaactcaaagccttgctagtatgtattttcaccttccatcatctagaaatttttaacttttttttttgtatatatatattatagtattccatcatctacatttactttaaccacgaaaaatattcaacagccgattggattgttcttattttgtttaatattatattgttaacgaaaattgtaatatgaaaataagctatgcctaatcattaattaaacaaccttctttacttgatataatatatgaataattagtgtttgtcttcgaaaaaaaatcagtaactattgattgaatcaattattttatgaaaaaaagtccaaattatagatgtgatggagaagttagcaattactttggccggttagtatctttattgttatggtccatctatatttattgttacggtccatatatattttcttatatcaacttctactttgtccatcctttcataatcatttgctttttaagttttaattttagaaaattaaatttcacccatcttgttcctttttaatctttttaagtgtatatatttcgtaaatgttctctttattacaatttctattcttagaaaacaaaataaatttaattttggaaagcaaaaacaagaagatgaaaaaaacgaaaagatttctgaaaaacattcaacttttcaaaatggttgattcatagtagaggagaactgccacattcttgtaaacatatttgaatcgactctaaagaaggggacaatgtttttggagcaggat

SEQ ID NO: 64202 - DNA, 410 bp, Cucumis sativus
  Intron number 1 from transcript Cucsa.167560.2 (locus Cucs a.167560) derived from phytozome v7.0 (chr-ID scaffold0115 4; pos 944127 to 944536)
atcaaagccgataaattgttagttttcttcatttcttcattttctcatctgacttctttcaacttcgttttgtttcttattaacttcatgaacggtgccgagcttctgaggttcttatgggatttggttttttttttttttcttttagttttgattatggattttgtaagggctagtttgaagtacctttcagaaatgggaaggaaaatgaaaaatgtaatcaatgagcctaggacaatgtgggttttaagccatgcttaatgttgatgtgtaattctagtgttagtttcgaggtggatcggatgggtagttcatttttcaggatccatctttgaacttatccattaagttttctttgatttatattcattttctttatttcctgtaaaatctatagaacaaaactcagt

SEQ ID NO: 64203 - DNA, 829 bp, Cucumis sativus
  Intron number 2 from transcript Cucsa.182640.1 (locus Cucs a.182640) derived from phytozome v7.0 (chr-ID scaffold0125 6; pos 13683 to 14511 reverse strand)
ggattccgttgagttcttcagggacgttgtcactggtgagctgctgattttgtttatttttttaaaatctgtgcttgaaacttgaaagttagaaattgctgccagatttctgccgtgccggccgccggtgttccggtggttttgttgaagtaaatttgttttggagtaatacaatattagcatatgaatcttattaataaaaatccttaaaaataacttttaaaacgaaatctcagataaaaatataaatcttaaatttaggaatcttattgcaaccaaattcaaatatcaatataacattttaacattttaaaagtacattttaaaattaaaagcttaaatgaaaaatgtttttttttcttcacatgaatttaattcaagtaatttgtctacaagtaaaaagttatttaatagctatgcactttttgaagtagtgcattcttaaacttttgggaattcaaaattgaatgtttaaaatcttattaaacaaagttcaattgaattaacgtattgacatagttttaatcaattgataatattaaatatcaccaagctctctatttagtcactaaattgacaaaattggaggctgaggcatcttttgaaaacatatggaagtttattcttcaaatcttgagtaggacatgataagataattgacatgaacaacctaattgcaaatctttgtaaatccaaagaatgatgttaagaattttaataacaaaattgatttctgatttgtgactttatgtacactgtagttatgaggtgcaaaattgattgaataatatatttgattatatttcagggggtttcgagaagtttacaa

SEQ ID NO: 64204 - DNA, 515 bp, Cucumis sativus
  Intron number 2 from transcript Cucsa.204910.1 (locus Cucs a.204910) derived from phytozome v7.0 (chr-ID scaffold0141 6; pos 73947 to 74461 reverse strand)
tttgtcggtctgagtaagtaaaggtttggatttgggtatgtttgtactaaatccttgctattgggtttctgggttattcgatttggctcattttaggttattttccattttatgtttgtgtttaatgggtttctttttaatttctgtttgcttcgatcctttgtttagttttttcattatcatgtctagattgatgagttttgggggattttagtggtggtggtgtttgtgtgttcttgtttttatcatttttttggagtgtttttttaagtttgttttggcattaccaaagttgttgtttggttattggtacctaaatattggtgtcgacccatttcctgtgttgttctttttctttttcaactattgcttttatggttgcttttccttcaccaatgctatgatatgttagttatgttaactttttatatgtttgggaatttgtatttcttcttcttcttcttcttgttttgattcttgttttcttgcttattttgtgttaatttaggtaactc

SEQ ID NO: 64205 - DNA, 443 bp, Cucumis sativus
  Intron number 1 from transcript Cucsa.178120.1 (locus Cucs a.178120) derived from phytozome v7.0 (chr-ID scaffold0122 7; pos 106481 to 106923)
aaccaccgctacctcctccaatcttacactcgtcagtatgaaattcctcaatttaaaaaaaattccctactttttgagaaatcaaaagaacttggagtttctagaactttcctacaatcaaattataagaaaaattcccaagtggttttttgaattggatggtttgagagacctggatctatcttataatttattgtcctcaggaatagaggtgctcctcgctatgcccaatctgaagagagttggtcttgatcacaacttgtttaagcagctacctgttcccatgttgttgccatcaataatggaaacattcagtgtttcaaacaacaaggttagtggaaatgtccatccttcaatatgccaagccaccaaccttacataccttgatttgtctaataacagcttgagtgggtgaactaccatcttgtctttcaaacctcact

SEQ ID NO: 64206 - DNA, 1024 bp, Cucumis sativus
  Intron number 2 from transcript Cucsa.223430.1 (locus Cucs a.223430) derived from phytozome v7.0 (chr-ID scaffold0177 4; pos 15477 to 16500 reverse strand)
tacaggtatagttatttaatattccttcgaatacttttacataggcctcttaaagccaagctggaagtggaaagacaaaaacagaaacagaagtaattagatgaagatctgggtagtgggtgcctgtttattctgattgacaaagatctattttattatttttttaataactgataatcattttcatattgtaccattgtggatcttgtccatgaacaaaggaaattaaagaattttctttgatttatattttgttctggtatacttttcctttgatggtgtttgtgaaccatttctcgatctttgttataagaattttatttgatttaaatttggaagcttacagctgtggtgtcatgacttgaactctgttgtatactgcatttgtttgttgcatataattatcttgacattatcttggccttcctttggttggaatccttgaagccaaagcctttgggggccttgttattgagtttacatttctttctcctttgctaaccatcaggtttgggctctctcactctctctctctttaatttaaacaacttttattgagaaaaaatgaaaaaaaaaaaaaaatacaaaagcatacagaaatacaagccctccaaaacacccctactaaaggaaggccttccaactaaaggtttccttattaattgggttgttaagtttccgttgttgctctgatgtgggaattgtttcagaattctacaagctctacagtctgttatggagtgaagattccttttcttggatattgttttcttttgctttcctaactttagttttagagtcttatgaaacttatgtctttctactctcaacttgggttttgatcatatgtatgttgcttttcaatgtattcttttgataagagcttttaagttaattaccaaagacactaaagtaaggaagtcgccactcaaaattaatggattttgctgtcactctttattcataaatgtccttggatgtaactaaggatatttttctcagtgcagctgacgttaaggattgc

SEQ ID NO: 64207 - DNA, 899 bp, Cucumis sativus
  Intron number 2 from transcript Cucsa.201940.1 (locus Cucs a.201940) derived from phytozome v7.0 (chr-ID scaffold0137 6; pos 136155 to 137053)
tctgcagagggatcctcctacgtcttgcagtgctggtattttctttctcttctttatcatccttgttctttcctgtctcctctgctgcttcggatcggatgatcttttagtttttatcttcctcagaatattttgtttggtttgtgttgaaaataatgtgctcgcaataattgcacgatcgattgaattaggatgctcgttgttgtttttttttaaggagtttttctttgagatatggttgagatttaatactactaatggaaacttatgaattctgttcaaacatacacatttttctttgaaattataattaatagttacatgagcgtagcttctaggaaagtcttaactggaaatgtaattttgcttctgaaacgtcatagtcttttcagtgaatgttcatgtgagttggtgttattcttcgcccgtcccgattattgttgtggttcgttttgtcggggtgtattatttttttttcttttaaattttgtttatatgggttaaatcttttctgttggcgaaatgtggaccgatgggtaaaatctttctttgttttgggagagggggagtgaaggttgataaaagaggaaagtttctaattcctcctctaaatttggaaggagtatgtagatatcattaaccaattttgacattcactaatgggagagtacaaataaggattttaaaacataagagactaagttgaagctttttaaataattggggctaaattgtgccaacgttctaacattatgaactaaaacatatacttaccatttcaattatatatttttcacgaatgtaaaagtttacaaagatgtaactttttttttacgggagttgctagttttcctttcttgatatgttctgcaattgtcccaggtcctgtagctgaagac

SEQ ID NO: 64208 - DNA, 748 bp, Cucumis sativus
  Intron number 1 from transcript Cucsa.306980.1 (locus Cucs a.306980) derived from phytozome v7.0 (chr-ID scaffold0297 7; pos 326533 to 327280)
aaggggccataagtgaacctcccatcccaattgtatgtacgccatcacttttaagatttagtactgtttattgactactggatactgcggcaacatcgtgtattatagatatggttatcttttatagcactattttcacctgcattcaatcttattgatgggatgttttgaataatctattatctagtcctacgaatgaccaagcacaaagtctttcttggctcagggtatatagggctatcatttataaaccatgtattcgcgttgacacttctgtatctgtattttgacctctaataataaatctggtctctccctcttctgatgtacatagctacacactgttactgaaccacgtaaatctgtgtggtcctttttttggtctttattctttgcttgtccatttgtttctgccttaatgcttacactttgcagcgactttagagaaaagctctcatgtgtcagaagatagtgaaggcagggtttcatgttttgaattaaagttttgtattctttttgtcttccgatcgttaccattgacattttccggacaggacttagtttttctggttgagttgacatcaatgtaaccttttatttgcaatgcattctgaagctactctcttaagatcattgcaatttgatggtttacctccttttgctcaacgttttttttttcttccaactgtttttctatttggttcttacagaattcctcacattacagagagaattggctcaaaggtca

SEQ ID NO: 64209 - DNA, 849 bp, Cucumis sativus
  Intron number 2 from transcript Cucsa.308830.1 (locus Cucs a.308830) derived from phytozome v7.0 (chr-ID scaffold0297 8; pos 801118 to 801966 reverse strand)
ccttaaaggttttcaaagtcagtttttttcatttcattttttctttcatatttgacgaatctattgtatgaacatttcaaaactacatgtattattggagtagaaatagttagaatgttgaatgaaaagtgaaattatagtttactacatagtgtgatgactctctgtttcactcaattgtgtaaacaaacaaaccctctctcatttatttagaatttatagagtttttcttccacttcccaacaacacattctctctcccacttccaaagtcacattctctttctttttccaatatttcttcaacctccactaaacctaatttctatcattattaaccataccttttcaagttggtttttgtcaaatcctccaatgttctgatttttaaatggaaaaggtcccaaaatctctctcttttcccttgtttcttcaacatatatatactctctatccaatttttcacattcctcaactttgactctctattctccctttcttgtcttttacattcaacgtcgatctccatatgattcgttaagaaacgttcaaagctgtaaatcattccattcgtcatatttatttgcaaggaagttagagtactttaatattatatgtttataacagtttacaattacgatgcatgtaaaagttcattttggcctccttcagtctcaacagtatttaaggatgtttacgatgttatatcggcaatgggtttgattaatttcccatgttttctccattctgatctcttcaagcattatagcataataattaagttgaaatgtatgtgtgtttggaaaagataatataaactaacagaaaacaaatgaattaaaatgaagac

SEQ ID NO: 64210 - DNA, 985 bp, Cucumis sativus
  Intron number 1 from transcript Cucsa.177380.2 (locus Cucs a.177380) derived from phytozome v7.0 (chr-ID scaffold0122 5; pos 1402351 to 1403335)
aatttccattctccattaccttttccatcaactctgtaagattcactctctttacctctaattttcttcttctctttcagatctgcatttctttttccctcttttcttttttcctttccttccctttcctcttggatcttgattttcttcctacttccacctcattcttgcgatatttaatcttcaaatcgattagatcggactttctttttctttttccttctctttcttgcctccttttgacgcctgttgtttatttctctcttcctatttgccttgcgttttttcaatttgtttagaatgttgtagatttattccgtgtttaattttcttattgaatgttggctatggcgcaatgtttatggatttggagatgggttgagctgatgcctgataatttccttttcgattgtttgttttgaggttccataaattatattttaggtgtcgttggatctctatggtttaatggtgcatttctgagtttaggttaatttatattgattacttcctgctttttgctaatggattaccgatctttgatgattttgcggttatagccatcttcaatgttgacttgaaaaatatagggcaagttttttaatatcaagttaaaagttctttattgcctctgactattgcgacatatattcatgccatctataaaatcacgaggatatcttctctgtcttgccttccgctttatatatctagcagttttaatatgtgattcaagttttgcattttatctttccttaaattcgacaaatctacaagttttaatccatttcaaaatgctttgcttacctgctgcagattacatcgtcatattaccactttaaattcttatatgtttgaatgaaatctgaatttattgaaacacacttgctgaagaaaagggggctgcttgttgttatctgtctaatcttgggcccctcttgtttttgtagaagattttgtgtttggtgctaaatttcagaggaca

SEQ ID NO: 64211 - DNA, 512 bp, Cucumis sativus
  Intron number 1 from transcript Cucsa.282000.1 (locus Cucs a.282000) derived from phytozome v7.0 (chr-ID scaffold0264 1; pos 137413 to 137924)
tttcccatcttgatctctctaacaacaatctccaggtaatattctaaataaataaatgaataaactctcttttatcttactgaattatatgttcgaataataatttcgatgttcttttttattgataaggacaagctccgttgaatcctcgctgctcttcttctaataatgtttgtttgttttcgtctgttgtatctttcctttgatagccacaccctcaaccttcatctcttcattagtcaacatttgcatttatttccatctctctctctctctctctctcaccttataattttcttgacttgggcgctcatgtcgatgtcttatctcttacttaatgaaacgatttttgattttcgtaaccattgaaattgtgtggttaaattgttatactgtcatgactatcgtatatagttctcgatcgattgattaagatgtataacggttgataaataatttgggttttcgattttgaaggtgataccggagtcgttaacggctagattgttaaa

SEQ ID NO: 64212 - DNA, 917 bp, Cucumis sativus
  Intron number 1 from transcript Cucsa.179990.1 (locus Cucs a.179990) derived from phytozome v7.0 (chr-ID scaffold0123 3; pos 348762 to 349678)
aggaagagacgaaggggtttacaaaactgagaagggttcgtaaagaatttaaaaacgataggaaactttttgtaatttggctgactagaagtagtaccttgtaattatctagtcactcaaggatgtgtctttcccatgtcagcagttatcaataacgcattcaattttatatttgattaaacttcaaaattaggttaatcttaagcctctatttctaacctccaattttttaaattaaaaattttgctacccaaaatgctcatatttcgctattcatatttaaattttgttcaactttgatgtatcatcatatacatttactatgtaattacaattactttattttgtttcttttatttaccattcagagttatattagttagttcgatcagaagaaaattgtgtttaaactatctattttagttctcccccacaaagttcacatttcttttaactaaaccaaataaaatgcacacattatagacttatttatggtctcttttattgattttaaaattttcctaataataatctttttgagacggagtgtaagcccatgggcccataaaagagacattgagtaaggctcggcccaaataaaaacattgggtgtacaatcaactgccctccattcgttctatttctcttcgtctccgtcgtcgttcaagcctcggattagggtttagcttcaccctataagacatggacgtcaccaagaagcggaggatggacgaaaacggtgtaagctattgattaaaagatacagtgccgtcggcccagttgattaacaaaagcccatttaaattatggcccaaattgacttgaaaagccctaaaaccctatttttagggaaaacctaaatcaacgtttcaactgttggaggcttggaggcttggaggcagagagcaaggagacgg

SEQ ID NO: 64213 - DNA, 960 bp, Cucumis sativus
  Intron number 2 from transcript Cucsa.164980.6 (locus Cucs a.164980) derived from phytozome v7.0 (chr-ID scaffold0115 3; pos 361403 to 362362)
ccgcgccacttgcccgccttaccattctatttcaggttcgttttctttggtttccgttgagtattcttgttgccatcaacttatgtgtcttattgctatcccattagtgttttgattttagggctggtttggtctgttctcattcttctgaggttactttcggtttgaagttaggtttttggtgtatggaaattttgggtaatcactgttcttctttatccatttccagtttttccctctttcgcaaaacattttcctgaagcctatataagcttcggaatacagtttttgggttctgtactggagtcatattgacgccttttgcattataaccaagtgaggtgagaaatatgctctggtaatacaggtggaaggtttcagttttttcaagtaattgtgctttgtgatgagaaccagaatgtatgattacaatgtgaatgcatttgttgaactcttgtgcatatgagttatagaacatttactatctgattttttaattcttttatattattggtgctttggtttatgcctattctttcgtttttctatggcaccattctaaaatttgacccttttcttgagatgtatttgctaagctgtagtattttaagttgattccttccaagaggtccaggatcgttgtttttatctaggcgctcttgaagtcgaatggcacacgttttattcatttgtattctctttcaacaaatttaagacctgtaaagaaattatttgtttagaaaaggaatttagcgtattttaaatgtagatatcataatttaaaataaaataagcacgtccttaactgtgccttaaaactgaattggcatgtcaatttagtgttatgtttcatggctcttttggtattttcgactgcagacttgctgtgtagtgtatttgcatttgatattcatggatgtataattgccttggtacttgttatcatctcaggtgcaaggg

SEQ ID NO: 64214 - DNA, 524 bp, Cucumis sativus
  Intron number 1 from transcript Cucsa.256770.1 (locus Cucs a.256770) derived from phytozome v7.0 (chr-ID scaffold0222 9; pos 4290166 to 4290689 reverse strand)
agaggtgcccttgttccgtcaaagcctcaacagtactcatgctttctcccgtcttcgctgttcatatttacttcaatttgttttttcttttctcattcaagttttgaaggcgagaaaagttgtctgtagtttgtaggatttaatttgcgagagattaatgaactaaaattggaaacacgaacctcattattacgtcactagttttctatatggtagtggattatcgattatattccatgggtctttcgtgttctagctcaattagatgtataaaactggtttaagcaattcacgttcttcatgttccattatttttccgaacttgaacattgttttagattcagcaatcatcgtgtgaaaaaagtagattagaatctggaaaatcattttgagctagggtttaggatatctttactttactatacgtattatgtgaagattattagatttatctaacgtgttttgttgcgatttcctgtataatcgcagacgaaaagaaccaagaaggctgggattgtcggcaa

SEQ ID NO: 64215 - DNA, 811 bp, Cucumis sativus
  Intron number 1 from transcript Cucsa.166960.1 (locus Cucs a.166960) derived from phytozome v7.0 (chr-ID scaffold0115 4; pos 339877 to 340687 reverse strand)
gtctgcttcttttcaaactccttattttcccggaggtatggttctgcatttctgtctctgcgtgaatatggtgaagtctttacttcacgaggtctattgcaaatgctgtataagttatgtcatgcatttgattgaacaataaattacaaatggcttccgaggacgctggtttgttaaatttcagatattacctagatttggatcgtgggatgaggataccatggtcatcattctactattttcttagaagactaggtagccggtagcccttttttttttgctaggaaacatagacatttcgttgataatcatgacattacaaaaaggtaaaactatctgatggattaccgaaaggttttctaataggtcttgagatttgtttagctataattacaaagaaggtgaactcaatttacccggttaggtgactacaacaagaatacaatggatgttaaaaaatattgagggcctcgttccttttcatagaaaaaccaagagttgtactctagcaaaacacaatatcttcttccacaaaaaagccctaataaaattcagccaaagaatcttcttatttttcttgaaaggacacccaatgaacaataaaggcaagatgttttgagcgtcacatggaaaagtagtctgccaaccaaaagcttcaagactttagtttctggcgtccaaattctgattgtagtttaatgtacttggcagaaattttgttcttcatatgttcctgcctgcaactttttattgtttactgtgtggtattttgtttctatcaggaattttgggtaaaggcataaagtgttca

SEQ ID NO: 64216 - DNA, 212 bp, Cucumis sativus
  Intron number 3 from transcript Cucsa.196930.1 (locus Cucs a.196930) derived from phytozome v7.0 (chr-ID scaffold0135 7; pos 492484 to 492695 reverse strand)
caaacaaatattgggttgaaagctcacagaaaagggtaggtaaatgacattgttcaaattggcattgaggatccttatattgtttgttctttcagctatcttttgaattatgatcttcaacgctagtttcgggggttttctttaatcgaattgctagcattatcatcctgacgtttactttttatataaattgctgttttccagtacgtgcc

SEQ ID NO: 64217 - DNA, 808 bp, Cucumis sativus
  Intron number 1 from transcript Cucsa.219960.1 (locus Cucs a.219960) derived from phytozome v7.0 (chr-ID scaffold0165 8; pos 1539265 to 1540072)
gcggacgatcctgcttcattgaccaaggtattcaataaaaaaacacattatacccctgttaacatccttctattgttgcctctttcttgggttattaacccatgttttagtttagtttagttttttttttttaaaaaaaatatttctctaatctttctatcatgtgataaactgtgtgatctgtttgttcattaacctatcttctatccctgaaattccgggttttgattttgtcatttacattcgagctcaaactgaatccaactgggtggatttgggtttgagatcattgcttctgattgttctcaagatttttgttttttgttattatattcttgtgttccctttatgcatccgttccttattgaacatcgaaacccattatttttttaaaaggtttagcatgtggggatgttcaatcctaggatcttttcttgagtaatttctgcgttgaccctattggctattattgttaatttttattcagtcttgtacatcttgagtctgggagctgaatctgttacgctttaataactgcatctcagtgcttttcataatgccaagaaatccccatgttttttttggtgcatttatccctttctgaatactggagcccaatttttagggtctagcatgtggatgaccaaggctagaatctttatggattttaaattcaaagtcttacatctgaagttgggaggcgaatttgtttggctccaatctctgaataataggctgtaccttttgcatcacattgattttcataatggcaggaaacttttatttcaaaggtccccaagaaatcccc

SEQ ID NO: 64218 - DNA, 939 bp, Cucumis sativus
  Intron number 1 from transcript Cucsa.289240.1 (locus Cucs a.289240) derived from phytozome v7.0 (chr-ID scaffold0269 8; pos 681041 to 681979 reverse strand)
tttggaaattcatcctcgggaattgaagttcatttgtaagtcaacagaatgaattattttctcttctggacttttgttttgttgtttattttttcaacgagctgttcattgattatctgtggaaacattaggagattggttgcttatctcgtttcttcctatgaaccgtttgatcttttgtgacaaaagcaaagtgatttacttgtttgggttttgctttaatacttttttttgggttttgaaatttatgttttaattctttcatttgtactttgtatgctaattgatcacatatgaagtgtaaaaaagtgcctttgaataactaaaaacatttttcaaatttttgttggtaatttggctgtatagataggacaacatggtttttataattttgaaaaatacttaaatggtagtagtattcggtggagcgctttgatttaggtttgaaatgtgttttggacctaatgctttcaggtgaaacacatttttgtaagcacttttgataaacaaacttatcagtattttaaaaaaattttgaagcacttttggcttgatcagtcgccaaaaggatttttaatcagttaaaagtactttttactcttctaaaaacgatattaaactcaacatttgtgcttttcctggaagtgcttattaaaataatgtttctttgaacttaaagttaaccccagctgaaggtttgatgtatgatacttttcttattgctaggggttttatttgctaacgtacctcaaatgaagtgtcgttatgcttttctgaatgtatttttttcatttgctcttaggagattatttactttggatttattttccacttcaatttatcattcactcccgtttccaaattagaactaatactgttcatagttttcttgtatggccgccagttgaactaaataaagatagcttgtgctcaattcag

SEQ ID NO: 64219 - DNA, 921 bp, Cucumis sativus
  Intron number 3 from transcript Cucsa.213320.1 (locus Cucs a.213320) derived from phytozome v7.0 (chr-ID scaffold0154 3; pos 1069142 to 1070062)
tggaggacaaaaaccttagcaggtctcttttgcttctcatcttttaagtaatcatctagtctcatgttaattttcactgacatgcattgttttgaaaccgacagacaaagaaattagaaaacgtaaagagtagagaaattaacttagagattttacctggtacattaatagtatgttcgaggcgggaccaataaaaacttcatgcataatttttttttctttgaaagtgaaggttgatgacaatgccattagccttgggggtgggatcatctactgtccttgaatgtagaggcaaacattagatttgaacatactaggtaattcattttagggtatgttatcgttttagtttatggtttttgtttgaaagggtattggaagtattcattacttgtctcgtcgtcttggtaaaatctctcaaattgtccatcattactagaaattacaattttggcacgtgcttttggatgtggtagtgagacaatgagctctaatattcagtacttagtataccatgtccaagtaaattattaacaaccgcgttacacgagacttaaccaaactataggggccaaatttaaaaactttgcacgaaccacctgttctgcagttgtataaccttcattttgttactaacattttgccactatcatctagtaaggtcacaagttgaatttgagcttaaagataggtgtttcataacacaaggatgtggtttgttcttagcaatagatttgtagatatagaccgtttaacaagagatggatattgggtattttagtgttatttaggagaataactcatatttgaagatagttaacaaagaatgtgaccattctatactttgatctatatgttctttcttttttggtttctggtttggattgcagccttttatcagagtacctaggaacagagacc

SEQ ID NO: 64220 - DNA, 585 bp, Cucumis sativus
  Intron number 1 from transcript Cucsa.161460.2 (locus Cucs a.161460) derived from phytozome v7.0 (chr-ID scaffold0114 4; pos 1391026 to 1391610 reverse strand)
tggcgtccggttctcctccttcccgcatcgaccaggttttcttccacctcagtttttatagaagatgccctttagatcaacactaattaccaacttgtattcaattttactatttcttaatgtttctcccaaagcatgttgaattttcgtggcaaaaatggctgttcgtgttcttcttgccgatttggatgggattcttttaggttttcgattcctccttccatgtctttgttgttttatgggattttgctgggaaaagggcatggggaagaagaagaagattgtatcgtgttatgtttgtgctttggatattatgcatgggggaaatatctacttgggttctgagaaagttaattagagggcaaagaaattcaatttactctttgtttttttagaaaacttagattaattcgaggtttattacaatctttttgtcaattattgatgggatgggatgggatgatatttgtgtttctgagatattagtttggtaatttgggcatgttattcgttcctatttgaattgatgggtggacattttagcggctcttacacgcgtgggtttcctataatgtgtacagttct

SEQ ID NO: 64221 - DNA, 912 bp, Cucumis sativus
  Intron number 1 from transcript Cucsa.304230.2 (locus Cucs a.304230) derived from phytozome v7.0 (chr-ID scaffold0295 1; pos 1922495 to 1923406)
gtttgcctcttgattctcctgttcttattcttctggtctgtgctcaatgattattggttttttgaagaatttatgaattagatagaaatggcaaagatattcctataccaaaattatttgaatcgatttgggcatccttgaaaagaaacgcttttacatacccaatttgttaatccatttaatcctaattgtatttgtaattactctacggtctatagctcccgtgtcgctcttttttccattttttttcccccttctcccattgaggggctttaatttttcccatctttagtaaggaagtgcaagttctttgcctggaaacctttacatggtagaatgtggcattctcctttaattctatgctcaaagtgtgccctgtttgccacctacctagtatttaatatcctatggatttcttgacaccgtttcttgacaccccattgttgtagagacaattatcttgtgaggttagtctaggtgcacatctaacttgaacacatggttaaaaaaaagaaaagaaggcagtgtgtcctctgtgtcctctatagttgggaggactctacaaactctccctttcctggtaaggaagtgtaggaggttgtgaggtttaatcgtctttatgagtgtgtggatagatcattgtgtaattctcagcttgtagtaattattttggaggttaggtgcggtttatggagagatgagaatcagtctacagtactgattctgggagagaaatatttctcttgaaaggctattgatactgtaattttacctttgatattgcgatatagttttactgtcgacttcctgtaattgggatcattatagttcctcgattcatatcaaaagatttaatttttttttttcttgaacttctgcagcctggtttaacaggagggagtcaggattcat

SEQ ID NO: 64222 - DNA, 559 bp, Cucumis sativus
  Intron number 3 from transcript Cucsa.220380.2 (locus Cucs a.220380) derived from phytozome v7.0 (chr-ID scaffold0165 8; pos 1839820 to 1840378 reverse strand)
aaaggtgagctcgtggtcttcatcaaaatatgcattcggttctgtctttcttctcatattctttgtagtgggggatgctttttcttgtgtttggcttgattgtcagtcccggtgggatgtgcacttctttctatcaattctcattggttgaaatcaaatatgaaccgcaagtctagactagaagaacattattctgcattcatatatgtaagtgtaactagatcttatataatgtagtagaattaccttggacatgaacggatggttgtgccgttgtgcagatgaaactacattttgcaagcgctttagctttgtagctatagaacaatgttttttaacgttcaacaatatgtatggtggaagatttgatcgaagatacatgtttttatgtcactggagttatgcttaggttaactagctatagaacatttgtggtttagatgcaatggttgatccttgtttcaacttctttacattaaaaactgagtgctttttctcaccttattcattttctctctaatcacctctattgtcagaaataaaggtgctagaagctgac

SEQ ID NO: 64223 - DNA, 654 bp, Cucumis sativus
  Intron number 1 from transcript Cucsa.136100.8 (locus Cucs a.136100) derived from phytozome v7.0 (chr-ID scaffold0104 4; pos 830552 to 831205)
caatcgccccgatttttccccatttccccttctgggttcgtgcttttcaatctttttctccgctcagaactccatcttttcaatctacatttctgggtggttgcaagttttttttttttttttttgtatatataaagtagtaagattatcgaaatgaatggagtggagtatagagctttgaagtttggtaaagggaaaattctctcaatttatttcttcaacttgtttcttttcttgctcttgcatcgttctttgtactactatcttgcttttgcttctgttatttgatgcagcttcttttgcatttatttttatcaaattactgtttctttcccttcttttgatgttagggttcgattttatgaattatgctctcgtttatatatatcaaatttccctccttttgtttttctgatgtacaccttctggttctggcacattggttttctttttcttttttcgttcttttgtttttcgttttttttttcaaagaacaaaaattaattaggaaaagtatttgatttctttcccttctttcttgatttaaggatcgtttatgtagactcatttggttttctttctgttggagactgatcttttttcacaatttcaaccgtaggtaagacaaagaagaaactcataggtggaagtaat

SEQ ID NO: 64224 - DNA, 677 bp, Cucumis sativus
  Intron number 3 from transcript Cucsa.257310.4 (locus Cucs a.257310) derived from phytozome v7.0 (chr-ID scaffold0222 9; pos 4669731 to 4670407 reverse strand)
acaaatcaaccggcagcttcagctggagataccaggtctttctccgtgaatctccttttcgtttacgtaacgtagctggtataattcatataattccaagtactttaaaatcagaaaaatggtctacaaagtcgattttaggtccttattcttttcgattgtttcattatatattaactggcttgcacaagagtttaaattcactagttcattaatcaaaagaaaaaaggtcgaaaaagtctgccacaaacaggtaactttttaaatcactgttggttatagtgaaactggaggggaggcagatgagtctcagacagcacaatctgcacaggaggttgagaataatggcaagaaagctgctccgcgggagcatatatcaattgtgttagcaaatgctggccatgtcttgcatggagatgatgcagagcttgttttgagtccacttcgcctcgcatttgacacaaagcatttgaaagtcctagaacttgctttggattgtctccatgtgcgtcttttaattgtctatgaaactttaacctttgattgatgattgttttttatttttaaaaagcaatattttctaatgatctttttagagacacgaataggtgatttttagatctttcgttgtataattgacagaaactcattgcttacgatcacttagaaggtgatcc

SEQ ID NO: 64225 - DNA, 966 bp, Cucumis sativus
  Intron number 1 from transcript Cucsa.177690.1 (locus Cucs a.177690) derived from phytozome v7.0 (chr-ID scaffold0122 5; pos 1643228 to 1644193)
caaagatccttctacctctcgcagctggtgtcctggtatgctccatttctttgttttttccccccgcttttccttttacttctgaagaaattttgtggattcgtgattacccatctcgtgaggaaaattaaaatcgtaaatcttacgttattgctgtttctttttttttttgcatttttttgttctaattctgattttgtcatttatcctcgattgtgattgctcacgttttccctttcttcatatgcgagtttcccttttaatataaagtaattaattgtaaaatttgtttgaaatcttcaaatgttcccaattgattggagggagataatgttgtatatgcatatacgcacacaccatatgctaaacgagagataagttgtgaccatatgctcaatggtctatctatgaaattatattttttttaccatgcaatgaaaaacatttgaagaaattatttagagaaatgagttctgtgtttgacttgtgagaattttttgtcatgggcctgatactgagaatcaaaacttgaaggtctctagtgattctgcattcgtcagtaagctaggaagatctttttcaactttgcttacatttaggtttaaggatagagtatccaagatattaaatttttgtagtttgggatttcttagaacatttgtagttcccactttgagctttacatgtatgatgcaatgtctagatggaaacatcataataggatttggtacattgcgagtttggatttaagaatgcttattctgtacacttggtattaagtggcatgtacaaactaactgtcctacttttctgcttcgtcaagaaaaagggagcttcagttctatccttcgaaccagaaaaagcatggtccattcaacgttgtttcgagcttctacttgccttctatttctcgcagtgttctttgcttcagtctactgtacttctgaccctgaagaccatcgtctt

SEQ ID NO: 64226 - DNA, 525 bp, Cucumis sativus
  Intron number 1 from transcript Cucsa.258370.2 (locus Cucs a.258370) derived from phytozome v7.0 (chr-ID scaffold0222 9; pos 5354689 to 5355213 reverse strand)
agccgacaagaagcatccgagtaggcaaactgttggtaagaatgttattttttatacagatttctcatagatctatagatttttgttctctctttgagtttaatttcattacgtttgacctgcaagttcttgatgacaaaatttctttggagaatcatcatatcttgagtttctgttattggacaattttagtttctctttctcctgtctttttccctgcaccctgtgtagaatctttgaatgtgcgaaattgcacaatacactcatgaacaactaacccctggacttgtgaatttgttgcaattaaacgctatcgttataatttttgttattggttgagtttaattgaaataatcttaagaattccagggtgatttagggtttagggtttaataattgtaacaacttatctgattagacaatgtgcatggtatttttttggaaatgcattatcagttggttatgaaggttcttatctcttcttctgcagttacaggaaattcaagaaacaagtttgagattttg

SEQ ID NO: 64227 - DNA, 405 bp, Cucumis sativus
  Intron number 2 from transcript Cucsa.153480.1 (locus Cucs a.153480) derived from phytozome v7.0 (chr-ID scaffold0112 4; pos 569937 to 570341 reverse strand)
ggggaggacgataagcaggtacaattttgagtttctatgctgataaacaaatttatgtttctaaattgttttaagaattatagttgaatgacttgaaatttgaaaatttaaaatcaccatctacaacttgatttaaaataaatcctggatctttgaagggaaaccaattttacaacaatacaaaattgaaaaagaaaacaaagaaaacaaactttaaaaataattgaaacataattttataaaaagggccttctttttgtatctccttggattatttcatgtcaatgtaataatttcttatccaaaaaaaaagaaagaaattgaagcataattttcttagtggaagctattcttctaaacaatttcctaactgccttttcatttcttttacaggatagacaaaag

SEQ ID NO: 64228 - DNA, 473 bp, Cucumis sativus
  Intron number 1 from transcript Cucsa.142580.3 (locus Cucs a.142580) derived from phytozome v7.0 (chr-ID scaffold0107 9; pos 826148 to 826620 reverse strand)
ttagatccgatctattcatctcctcactgccacaggtgcctacttctaatcggtttcttcccaaattcttcttcttttttcctcttccttcatgggtttttcttctttttcatgttattggttttttcttctaagaatctcccctgctttactgctgcaaaacatttgggtttttgtgtttatagttgtttgtattgatttttggtgtttcttgatgaattgggaaatcaagaggctggcttggttttgtagagtcgtataggatgatcaatgatatacaatattgaattgtgtgaatttatgtttgatttcgaggaaattgaaatcttacgttcattgttgtgaatggatcttcgtttttttacatcttaagactaaagggtgggtgtttaaattagttttaatttgaattctgaaatatatgctgtttatctttaggacctttgggcttgtgctgctggtagtagaggttg

SEQ ID NO: 64229 - DNA, 958 bp, Cucumis sativus
  Intron number 2 from transcript Cucsa.307950.1 (locus Cucs a.307950) derived from phytozome v7.0 (chr-ID scaffold0297 8; pos 245168 to 246125)
ccactttcgctgtctttgtggttatttacgttcaggtatcgatttttgttttttgttttttgttttttgttttttgaaatttgtttttattatttttgtctttcttttattttatttgtttaatttaataatctaactgaaattcaaacctctttcttatcacaaatcaatgtcaaagaaaagctggtcgtttttcattacaaaaccatacatcactacactatatctacatatatttcttacaattaaatataggatgcaacattcaataatcaatttttaaaggtatctttcaattttatatattttcaaaataaataactcaaattaataatgtttgtgtccttttggttttttattttatttttctaaaaaaattaagtcttttaataattttatttagttcctttagtgtgaaggtgatgtgacataaattaattcagagattatgtttccatttttttctaataataatatgtattgaattacttagctacccacatataattcttccttaacaagtctagtggggtatgactaaagttgaatttgtagtagaaagaaatctcctattcacatcatttttattttctataagagaaataaaataatttggagagcctatttgaattgatttttttattttttaaaaatggtacttcaccaataattaaaatggaacttaagtatttctaaccctaagaaaaagaaaaaaaacgatgaaaatatttttttaggacattgtactatatatttatgaatgttttttaaaagagtgagatttaaaaaaatatattttattaggtgattatcaaaaagttgcatacatttatatacaaataatattatattagtttctcttatcttctattataattaaaatataaatcaactccaatttaacaaatatataataaactcagtttttttccttctaaattacataggataatatcgg

SEQ ID NO: 64230 - DNA, 418 bp, Cucumis sativus
  Intron number 2 from transcript Cucsa.197120.1 (locus Cucs a.197120) derived from phytozome v7.0 (chr-ID scaffold0135 7; pos 625035 to 625452)
aaagcttttttcccacttgattttgcttctgaaaggtttgttaaaaggcacttttactcatcttgtttttgggaaattactagaactgatgtgggtttttttcctcgttttattttatccttctcatgtctactttctgttgtttttgtgctatttattttattgtgtggagtcccatctatagtttttccacctagtattcttgtgtggtggtgcatgtgagtgttttactcttctgggtcctcatgtttttgactgttttctctcttctgctcatactttagtgtctatcgtttaagattactgcattttcatcatttggggtttttgttttggatgatttaggagatgggttgtgcttagatttgagttttgttgtacaggttgtgaaaattttttgtttcttgggtagaggaaa

SEQ ID NO: 64231 - DNA, 589 bp, Cucumis sativus
  Intron number 3 from transcript Cucsa.197120.1 (locus Cucs a.197120) derived from phytozome v7.0 (chr-ID scaffold0135 7; pos 625593 to 626181)
gcgtgagtgttgctttttgcttattttttcttcctccttccaaattgagttccattttcagaacattagttcgattcttctgaatcttgtaagttttgcgctgcttagctgtttttagttcttagaatttcttgattcatcaccactgtgtattgattgctgccagaaacttttattttatttccattctcccggttttcctctttattttgttagaatctgctgtttggaaagttaatttgtattactttgtggacgaatctgaccgatcttctgatcgcattatcttctaattttgtcatgggaataaagcaaccaaccattcctttgttcacctcttttacgcaaatagtaatgttgggcttgttgctttccttctttttcacacagaattggaatccggtttaggcacatcaatctagtagtttattgcactttacagattaattagtttcaatcttttcttcttccacttttccgtggattcttgttgtattattttatttttatttagcatccatttgatttttaatcttttcattgatgtaatgcagctgaagctatacttcttggtttccaacattatctg

SEQ ID NO: 64232 - DNA, 695 bp, Cucumis sativus
  Intron number 1 from transcript Cucsa.213160.6 (locus Cucs a.213160) derived from phytozome v7.0 (chr-ID scaffold0154 3; pos 939531 to 940225 reverse strand)
ctgttcttcctcttctccctgttcttcctcttctggtacttctcaccctctttttatttgctattcctgtttttatttttgctgttttgtcgatttcatttttggattcgagaatttgagtccttggtgttgatgggtcggaatggaaaaggaataagggtattgggttttgttttgtttttccttcctgaattggcctaatcttcaatcgtttttttggatatcgtaatcttccaaattacatacactgtataaatttgtgaactcttcgttctggattatcaatcttttgcgtttaatcgtggattctaattagaaaactatactttgcacgggtaggtttcttgatagtaaggagatgtaatgcaaacctaattttggtggatgaggagaaatgcatctatccttccacttgaatgcatgtggttgtatggatatgcaattaataattaataactcgaaagtaaccggtgtggttttcgacaatttctggtgtttgtgttccttcatgcttaaactcgtgttttcttccctcccttttacatttcgtattcatggatgggtaagtgaatatatatattttttatcaagaatataaatgcgctgctgtgattatatttgtgtacttgttgatagttcatttgccttattttattctagtgggaagcacatttcaattcaaggttacaccacac

SEQ ID NO: 64233 - DNA, 511 bp, Cucumis sativus
  Intron number 2 from transcript Cucsa.236060.1 (locus Cucs a.236060) derived from phytozome v7.0 (chr-ID scaffold0201 4; pos 18753 to 19263)
ctccaacccctagaccctgtatttggtttgatccggtgagattccaattcatgggctatataacacttttgctttcaatttgattatgatgactgctgcttgattagaagctcttgttatgtattagtgagttattttggttgtttctatcggttatttggagctgagattgttttggattatccgttttcgtttctctgttggtttacttgaatgtgctgtgtttgatttacttagcaaccgcttagaattaattggcctttgcatgtagttttgtttttttttttgcttttctttcaactatggtttgacgatgttcttgttcctctacttagcatttcccagttcctcctttgcaattacaccctctatgtaatgaatgaaagcactctcatgctctttgttcttctgttttttctcactggtttgtttgattcttttcttaattttggggtagcttaattttgtttttgcagcatcctgatccaattggaagtggatctgcacttgt

SEQ ID NO: 64234 - DNA, 834 bp, Cucumis sativus
  Intron number 1 from transcript Cucsa.219410.1 (locus Cucs a.219410) derived from phytozome v7.0 (chr-ID scaffold0165 8; pos 1202425 to 1203258 reverse strand)
gggacttggctttgccttctctcccaatcattcaggttagtcttattattactaataataattgaagtatatagtaatgtatttttaaaattaaccaaataaatcaaaatatttataaactaataaattaaaatatttatacaccaataaatttttatcattatctatgaacgttactataaaagtatatcatttatcattttattggtgtctattaaaagggttattttttactattccaatcttttaaagtatagtatttttttttgtctttcgtatttattttcttgtaaattttcagaacttttttaatgtttatttacaggagataatggtcaccctcatataggttatcttcctacaagttcaaaatttctcatttcttaattagaatcacttttaggataacgtgtatttaaagcacgattcttttatatgcttacaatttttaattgatatttagttttcaactttatactttattctatattttgggttgatcgtagtttttccaattataaaatataaatgtcacaacaaataaaattataatctaagtatgatcaatatcacattgtatgcatgaattcataaaatgtatttgtaagtacactctaaaaaaatgctacatatgtttaatcaagttgctcagtttttccaactttaccatataaaaatgacttaattctgaaattggttagaccctaaacctaaatcctaagctgtagaagtatatgttaattaagaaaatgatatcatggatatagaattatgagattctgtgtgaaaatgggaacaggttgcattggcatcaggattgaagtacactgacaa

SEQ ID NO: 64235 - DNA, 834 bp, Cucumis sativus
  Intron number 3 from transcript Cucsa.138800.1 (locus Cucs a.138800) derived from phytozome v7.0 (chr-ID scaffold0106 6; pos 82802 to 83635 reverse strand)
agcaaaaatccgaatctaaaggttcaattttttcctcgttttagctgcaatcaaggctttgtttttgcattccattctctctcttctttttattctagactgtcaacataggtttcgcgagatcctattaatgctagctagagtaagatgaatcaaagtggactgctttgtctatttccgatgcattagtttggagattacttaagtatatgattctgattgatttacttgtttttccgcctgtcttggtatctctacgatgttctggatcataatctcgcattatagaacttggacgtctccatgttagcgtgctattggaagagttatattcgtacttaagcatgctttattttttgttctcttttatgcctgcatctgtcttactagtttctctttattagttattccatcttgttttattttgtttgtcagagcgatattcttttcttggtttcagtttgtgcatatgtttacatttttgtttgagtgggcaactgttgcgagacaaggatgaatattcgtataagtataaacggcttttggtgattggtatttgcttcaatgaaaactgtcctgagttgattgtcttttttattcctttttttttatggagaatgccaaaaaagtagaaatattgtcatgttcactctcatgcagtgctcactataaacatagaaaatttatattaggttagactaccagtggggcagatctgaatgcatcacttaccaccattcatgcaatgtttggctcagaagttattccacatttttatttttttgcttcttgttcgcaggtgactcaaatacagaagatcaagggagttttcag

SEQ ID NO: 64236 - DNA, 292 bp, Cucumis sativus
  Intron number 1 from transcript Cucsa.266090.2 (locus Cucs a.266090) derived from phytozome v7.0 (chr-ID scaffold0235 2; pos 540383 to 540674 reverse strand)
tctcatcaaatcaggggctgctggaaccagagcaggtttggtttgatcgtcctttgtttttttttcttttagttatttgagagagctatgaacaaaagccatgaacaaaagtctgaaaggatgaacatgaaataagaaatcattgaacattgcaaaacatgtttcgaatatttgattttgaagaaagcttttcagtttgtatatcttgttatttggtattattgttgttgttgttgtgtttgcttcaatgtattcagcatctggaggcttttcgtacttgtgtgaaccttgg

SEQ ID NO: 64237 - DNA, 863 bp, Cucumis sativus
  Intron number 1 from transcript Cucsa.275500.1 (locus Cucs a.275500) derived from phytozome v7.0 (chr-ID scaffold0258 1; pos 436629 to 437491 reverse strand)
ttaattatttgcagagggacatcactcccattcaggtttttcttcttcttccaattcttaaacctaattagttttagttatgttgcagatttggtctctatgtagtcccttatttaacatttacttcttcttcttcttcttcttcattcatccgcttaaatatgatttaatgatttaattttcgaggttcaatcaaacctctctaaggtttaagttttaggttgatccattattgaccttattcaaaaaagcatgaagggttgatccatcacttaaccatgtctcttaaatttctttctaaaaaaaaaaagaaaaagaaactgtttcttaatcagtggttgattcttttaaacgaagactagtccatgttgatgaacagtttaatcttctaaaagaagatcagtacaggttaaacataaagaagaagaaaaagaaatggcgattagttctatttgtctccttgttactttgacccacctaacgttacaaatatacagtttaattgtaggaatttgagtaaccattttagttcgacattcaacagatctcaacttttcacctcttattctagaatacttgtctaaactagttcaacttttaacattttagttctataagcttggattgatagtttagtctatatctaatatcgtctgacatataaaagactaataataataaagctgacatatctataagttccaaaattgaaattttgtgtttgataagattttaactgttaaattttgaatatgtccaaaacctataagatgaaaaattgaaagttgtaagcagaaacacagaaaaactgatgtagagaacaaattttggttgcagtcggggtgctgcaagccaccaagtac

SEQ ID NO: 64238 - DNA, 286 bp, Cucumis sativus
  Intron number 2 from transcript Cucsa.230790.1 (locus Cucs a.230790) derived from phytozome v7.0 (chr-ID scaffold0197 0; pos 138546 to 138831)
attgaaattttggtgtgtgtgtttttttctttttttttcttttgcttctttcactttctgggagaagaaaaaggaagaagtaaaacattttatgtttcactaaaattgctttttaacaagagtattacataaatgtaacaagagtaatttagtgggaaaaaatttttgtatggaatgtgtctgtgaaaatgcatgagagagaaaaacagcgttttttagggatgtggactgtagctctagtttatacaattttttctctaagcatattttgactgtggaagtggaa

SEQ ID NO: 64239 - DNA, 834 bp, Cucumis sativus
  Intron number 2 from transcript Cucsa.234150.1 (locus Cucs a.234150) derived from phytozome v7.0 (chr-ID scaffold0199 9; pos 130605 to 131438)
taaggctgactttgtgaggcttgtatctggtaagtgggataatcaatattgaacttcttttaatatcatagtttgagatacctaagttgtgatgccttttcatgttcttaagattgataccacgttgacagtgatgcatctagggggttagaatagctctctcctctctgataaaatgggaagagttcattaaattctcatatttggagaagaaactcgtgtttactactatttgataagcattttggttttttttcatgtatttcatgtacaattacacactatatggatgaaatttgctagaaagcaactattgcatctatgaattgcaatgaacgatgggtatgctaacttgtttatggagaagtagtagcatgaatatagtggaagtatgagtaagaaaattatcgtatgttttttaagagaaggaagatgtataatttagacaaggaatgtgtcctccttatgggggacaggaggtacacaacattgtccatttgactagaatgtcaaacacaggttagtatggaaaaattcttttaggagacgccattaacaaacctaaaaagagactctattaaataactaaattaaaagaactgtatcaaaaaagttctttaaagttcatactgcttcgttaaaccagtagccaagcaagaatcaattcacccaccatcatacatctccaaaatctctaacagaatggattttctcaggtagagaaggtgtgtaacattgtgttgggctttcattatgcatgtcgattatgtttattaatttattgttgatgtgttgcatgtatttatgcaggacatacaattctttcgctacgtg

SEQ ID NO: 64240 - DNA, 756 bp, Cucumis sativus
  Intron number 3 from transcript Cucsa.172130.2 (locus Cucs a.172130) derived from phytozome v7.0 (chr-ID scaffold0119 6; pos 51612 to 52367 reverse strand)
cttttgatcacttcgattctaatcgctggctgccagtaagtgttagaactagaagatatagcaactatctcccaatgtccatcttttaccattagctttaattgtgaaatgaagaagctctttctcatttgcttaattagatagctttttcctttttattttatttttgagtcatacatcaggttgtggggatttaaacctctgacctcaagagataaggtagatacccttgctattgaattatgttcacattggcttaatcaaatagttttgatctttgtagactgttaagctgcatgtgcatgtgactttagaagcaaacttccacctaacaaaaagaacggagtttccaattattactatccttgttagccagatgagaataggttagctggatttggtataacatgcttctcaactcaaaagttgatcctatgcttgtaattttaccagtccttttgaaaaaatgtaatggataagtacagcctagtatttgatcacaggcaatccaaatcagaaattggcttttgaaatagttgtctggcaaatatttgtgtttgctttgattttgcaagtacaacaaattgtgcaatctgcagcagatcatgggcaaagaatcagtttaaaacttttacatttatttttcactcctgctaactttttgaagttcatattgctttctaaattatttatttattgatattagtatttaaaagaaataagtgctaattagtttgtttaattttctgcagcgct

SEQ ID NO: 64241 - DNA, 557 bp, Cucumis sativus
  Intron number 2 from transcript Cucsa.168310.2 (locus Cucs a.168310) derived from phytozome v7.0 (chr-ID scaffold0116 0; pos 75648 to 76204 reverse strand)
atcagaagattttgaagctgacgatagcgttaacggtgtggaattcatcttttcgatagatcttttttgttaattgaaatggggtttgcttaagatccattgaacagaaactccttttccaatgaatcttctcatcttgttgatatttgaaaatgagggttgatgaatgaacagtaatggagttcttaaaaaaaactttattgtattccttttcaggtggacatgaaaactgggagagcagctatgcagaggagtcatgcgccgtcaagaaaagccaaaccggtttagaatcaaaacctcatccatcattatttcaaataaagtttactttttttcccttccctttttaatttatgtgataaatttccagagggatcaagcaagaggaattataattttgaatttgactctccgcagaccaatgatgtgaacaattaccggtatgtatgctctattttgttgtttccaggcaatgaattctttggactatgtctttaattccttctttgtctctcttctttctgtttaaatgaatagaatctttgtagctacttgga

SEQ ID NO: 64242 - DNA, 558 bp, Cucumis sativus
  Intron number 1 from transcript Cucsa.165410.2 (locus Cucs a.165410) derived from phytozome v7.0 (chr-ID scaffold0115 3; pos 762507 to 763064)
ttcgcattttcttctcttcattctcttaccttcaggtaattatgaacttccgatacctggattcactatttcgtttacggatgtttatctagatgattctcggtcgaaccctaaacccatagttgtttaccgctactttctttgtttcgatcgttccgaattagtgtttaccttcactcttattttgaattatctttgtgtgtcccttttaggtcaagaaatggggaaaagaggtgatgagaggagcctttttgtcgaaccctctcgattcccttttaatataaacggatgtatcttgtgtgtgtttataatcttcaacatttttaacatgtatcttagcaggcaattgagagtttcagtgggacctgagcctatgaagtgtagcttagggttttaacattcagaaccccctttttcagtttaggatcataagtgggtgtcattggattaactactattctatttaggtagtaattagtttgaattggtaggaagttttgaaaaatatgcatcttaattactgacctcacctgatcattgttgtggacaggttgaagc

SEQ ID NO: 64243 - DNA, 601 bp, Cucumis sativus
  Intron number 1 from transcript Cucsa.149230.1 (locus Cucs a.149230) derived from phytozome v7.0 (chr-ID scaffold0111 0; pos 92032 to 92632)
cccacccgctttctatcgccaccattaacgataaggtattctttccgattggggtttccgtttcccttttttttttttttttgtttcgctgattgatgctttaaagggttatttctatttggggtttggattttatatcatattttgtatcctttttttcattttgtcgtgcttgcagaacaaaacttctttctttttttaatctcccttcccgggatcccaataatatatcattggccatctcttccctgttttatttttcttttatgtcattgtcactgtaggttttctacttggttttttgcgtgttggtctgtttgattgggttagttaaattagttgatgttgggagtttgtggatgtattgttgctatcacatgatacaactcggatcgtacctggaacagttgctttgctttcatttactattactagtcggatttgaaagtccctttttgtcttgatggatttttattggtgttataccaaagccctttcagattcagaccctcaattcaattgatgattcatttaatttgttctaagcttctgtgctaaagcttggctatatttactctgatgttcttttccaggtgcttaa

SEQ ID NO: 64244 - DNA, 181 bp, Cucumis sativus
  Intron number 1 from transcript Cucsa.277120.1 (locus Cucs a.277120) derived from phytozome v7.0 (chr-ID scaffold0260 1; pos 1657 to 1837)
accccattcttcaattaggttcgtctctatttctgtctcatcttcttaaacattattatttgattctattgcatttttctttttaccctgtcatcggcttctcataatcttggtccgaatgtttaaaattccatgttttttttcttttccttttgttttagggctatatcctttccgcttc

SEQ ID NO: 64245 - DNA, 658 bp, Cucumis sativus
  Intron number 4 from transcript Cucsa.143480.2 (locus Cucs a.143480) derived from phytozome v7.0 (chr-ID scaffold0107 9; pos 1859114 to 1859771 reverse strand)
ataccatcaaggtgagaattttattttctttgaaattagtgaactatttttattgtattgttttgaattcatgtaagtattgatgtttggttgagtataactgcaattggtatcttttgatttatttatggatgaaatcttgtcagtccagtttggacaaatactcataatgcttgttgggtgtttatatgttctcacccttttgaatgtttagcattttgtttatgtgcatgtcttactgtatggtgaactccgatcttgtgtttgaagttaacaatattaattgttcaattgcatatttcttttcatatttccccttagactgaaatacttttgcacttgtgtatgaaattatataccacttatacatgcaaatgttaaagtgggaaatctttggaaatatgaataatggcttggcctgccttttcaccctgttcccgttagttctgatttgttatgagtaattatcattatggtattgttcttacttccataaataagccttgtaaactaccttctagctctaatataccatttaaacactttctcttcttgtttggattgccctgctacctgtttggcctttctttcttacaaacatgtcttgttccaatacaatgcaggaacttgagaggaagagaaaggaaagatcccaggc

SEQ ID NO: 64246 - DNA, 749 bp, Cucumis sativus
  Intron number 1 from transcript Cucsa.143480.2 (locus Cucs a.143480) derived from phytozome v7.0 (chr-ID scaffold0107 9; pos 1860432 to 1861180 reverse strand)
tgctcgacgatagtggcagcggcagcggcgtcctggtatctctcttacaaccttcttttcagctttatacattcaattgaacgcccactttttccactcgagaacaagttagccttatacattctaaattttactttggaaataaaggtttaacgatctcagactttcattcatgtttgttactgttgtccacaactctaactgcgtttcatgcttgtaattgttctccatagatgctgcattgttgaatatttgtcattgttttgtttcgggatcatttcaaaatagtttaatttcggtggaatttattcttagctccattttgtattggatagagttaacaaataatttggtagactttgcgtttcacgattcggccttcaaggggagatttatgcagatttttggtgggagattcagagggttgagaaaagattcatgcatcacctttgctatttacaaagtgaaattagattagatcaaacaatacactaaggtttgatgataacttttgccgatggtatggggtttggcaagtttgtgcttctgtaggagttaaaactggtatttagagatcgctggcagtttttggaaataaatatcaagctttctgtatcgtgtatgtgaaagaattctattgctttacactgatggttggagaaacgattttgttatacccaagaaatgttcttgattctgttgtgttttccttagtacgtttatttttgtccaaaaacagaaacaagaag

SEQ ID NO: 64247 - DNA, 684 bp, Cucumis sativus
  Intron number 1 from transcript Cucsa.142860.1 (locus Cucs a.142860) derived from phytozome v7.0 (chr-ID scaffold0107 9; pos 1093699 to 1094382)
tatccgtgtaagtatcctttctaattaattgataatgagttttataatgtctgtttgttaagttatcttggttgagaagtaatgcatttctctaattgtttgtgtttctgatttattggtcaaatttctcttttgagttttccttttgtgatgcagatttcttgtgcttttatacaagacagaatcgagttgttttgtaattattctcttttagatattggtaaaagttggagtatttttatgtaagctcttaggcaattttgaggagaactcatctgctcttttatgcttcattttctgatggagtaggtccttttacccttctttttactaggagatttctttggaaagttgggctcttgattattttgtagtatatttggtcagagagaaatagaagagttaaggtccttaatcaaagtggctttatttaaaagaaaaaaaaaatttagatagacaaaatttcacatttattagaagaaaagtacaagagacggtggacaaaagcttcatttaggaaggaacttaagaaaaagcagtcctgtattgtttaactatgataaacaaaaaggaagttgaagatgtaatgttctaactttgtttcatggtcagcaatgtagcattaataatagtttattatttattccagaagggactgcaggttctcatttctggagccctaaa

SEQ ID NO: 64248 - DNA, 570 bp, Cucumis sativus
  Intron number 3 from transcript Cucsa.142740.2 (locus Cucs a.142740) derived from phytozome v7.0 (chr-ID scaffold0107 9; pos 947268 to 947837 reverse strand)
tggagagcctttgcagtttttaatccaggtatttgttcggtctcaaaattttcaagtgttttcttttgctttctccttacatctttttctgtctgaattctccgaacaattagatgttttgcccaagaagttaaaacatccatcctatgacttattaactccttacactatgggtttcacgactaaacaaatttttaaacttcacaattcaattccttgaactagacactcgcatagcaactaaagtaggaagaaagcctttgtaaactactctcaagatttcacaactccgtctttggtccaaatgtcccccttagtaactaaaatgggaagagagattttgtcaactgatagttcaatgactcttatgtgggaaagaacataataatattaatttatccaattggcaacatgttgagaagttaggaaataccatctgtatattttttaagatcgaactctattttttattgataccgtatagtttcttttcattgctactattattgatattccagatggacatatagcttatgatggtttgttcctgttcattaaattcttagattt

SEQ ID NO: 64249 - DNA, 446 bp, Cucumis sativus
  Intron number 2 from transcript Cucsa.237540.1 (locus Cucs a.237540) derived from phytozome v7.0 (chr-ID scaffold0202 3; pos 389681 to 390126 reverse strand)
ggcaatcacactggagttgtcatcactaagaacaggtaaatttcacacgactatttgttttttcttaaaaactattatctcttttgattgttttgatttggtctcttgtcaattttgaatctgctccctattctcctatgtatgtgtgaagataagttgaatatttgtattcggttggcttattcggatatgagttagatatttgttggttgttccaagagactcatattagcacgatcaatttaggattagagagaaagttataaaattatgagatgactaaatgttaaagaaatttcagctatcatttgtattaaaatcataatatcatatatgcattgatcaacttctgaaaattggatatactatttacagcattcacttaacattaagtttaattatattttgcagttctgaggtagatatagtaaataaaattgcaagtc

SEQ ID NO: 64250 - DNA, 308 bp, Cucumis sativus
  Intron number 1 from transcript Cucsa.151230.1 (locus Cucs a.151230) derived from phytozome v7.0 (chr-ID scaffold0111 6; pos 94278 to 94585 reverse strand)
gggtgagtataaaaaattatcttcaaaagagcaaaagatgaaaatcctctaatattgataccacactttagaatagtaatgttgaaaaaaaaccaacagaatggacttggttttttatgaattctgaaattccatctttccacctaatctaaaacttttcctcaaagtttcacaatctattattgaatcatgttttcctttgacctttaatagaactatcctaagcaaacacttcgtagttttgtgatgttctcttttgaacaaaatataatctttaatttttcttatgacaggctcttgtccatatc

SEQ ID NO: 64251 - DNA, 188 bp, Cucumis sativus
  Intron number 1 from transcript Cucsa.205570.5 (locus Cucs a.205570) derived from phytozome v7.0 (chr-ID scaffold0141 6; pos 624025 to 624212)
cctcttcgttccgtcaccaacagatcggattcgaggtaaccttcaatcaaacgctgaatcttcattaatttattggattacacaatgctcttcctgtttaattttatttgagggttaaatttcgccgtttctgatttgtttttcttcgttaattatgaggtataatcggttttatattttcagggaaa

SEQ ID NO: 64252 - DNA, 923 bp, Cucumis sativus
  Intron number 2 from transcript Cucsa.205570.5 (locus Cucs a.205570) derived from phytozome v7.0 (chr-ID scaffold0141 6; pos 624265 to 625187)
tccgtgaaaaagaagtggaagatttgttttacaaggtaattcatcgtaatttttgtattcgcgcgatgttttggcgcatttgtggatatttttatctttatggtttgagtttgtaggtagacggcagtttttttagagtatctcacaacatctttatcatgggcatatagactgtaaatgggctcttatgtagtaggagggcacgcataggatgctcaatgttttggtttcgataattgtgaaaaccttgtaacttatgtggctgtggtagtgattctcacctttaaattagaggtttttcttttataccccttcacccttgaaggagcctgccttctcctccctttggaaggttgaaattcctatgaaagtgaaatgatttactataagttttgcattggaaggtgaataataagaaccatctcctcagacgctcttttttggtgtcgcctctgcaatggtttgatgttcatgaccttcgaggttctaacgatatgattaagtaggtactcatgaaccttcctttttatgggaaaattagttcatggggcatttagcttgaaagaaatgtcagaatctctaaaggggtggtgatgtccgatgagctttgggtagcaattagatctaactcttctctgtgggtgcatgtttagtcaagatttttgtaattatcaatttgcataattttttttactatgatactttattgaaattagtcgttttttttgtccaatgccctgtatgttaattgggatttctctcaatgaaagctcggttgtttattttaagaatagtttatgtatcttatggattttcttttttaaaggttcaagataatctgagacaggttaaaatagttttggacttaattttatgaaagtaattaatttaaatctgttatcatttgaaatttttatggtagt

SEQ ID NO: 64253 - DNA, 644 bp, Cucumis sativus
  Intron number 1 from transcript Cucsa.275710.1 (locus Cucs a.275710) derived from phytozome v7.0 (chr-ID scaffold0258 1; pos 640980 to 641623)
tatacggagccggcaacgtcatcaagttcttgcaggtaaacacctacgtctaaaatcaatttagaatacaattttatttattcatgttttttctctcttgaacttagaggaatgttgcaacgtcttcgatattttctatttatcttttttaagttagtgttagaatcaacaataaacaaacaaagaaagaaaaatattgcaacactacatgatacaagttgatgaagaattttttttttgggcatctctcaacgacccatattttaaatgttagttcatagtttttgtgatcaagcaataaattctctatatttttcttaaatttttctaaaaatgtctttctactatgatgtagttagagtactgttataatatatgagtgcaacgtaagatgttatcaagtattacaataattaaaacactgtcataattaatatacgagaaagaaaacatttacaaacttggaaaaatctactatgtaacgtatttttgtaaaagaaaatttgattttttttctcatgttaaaaacaacatcgtcattgctctacaaaataaaaaagaatagcatactaattatgtaaaaaagtaatactacgaataattatataggaattgccagagagtcagagagcggacgctgcaag

SEQ ID NO: 64254 - DNA, 817 bp, Cucumis sativus
  Intron number 1 from transcript Cucsa.205540.2 (locus Cucs a.205540) derived from phytozome v7.0 (chr-ID scaffold0141 6; pos 607976 to 608792)
tttgcttctgctttgctctaacttcctgcaaagatgtattgaacaatcggcgctgaatttagggttttgagtttgtgttttaaagcacgaaggagatttgttttcttttaagcagaaataactcatttcacttcgaatttgtaaaaatatcctcttccttcattgaccctttttaactttaaattgtataactaattcttccaaaaatttggacctttctaaacaaactaattatgtacccaaaaaaaagtttaacaataaatcaatgatctttggcgtgagaaaatgtcgtagaaaatttacgttcaagtaaataactcattaactcaattgcgtctacaactttttcacttgaaagattcatacaaatacaaaaattaacgaattcaacaatatacaaagttacattgtgagttacaaatacaataacaatatgaagacaagactcaacctaattctaatactaaatataaagcacataatgatggatgctcactagttttgtataacatatatgcgctataatttcaaaacaaaagtaaacaactttttaaacaatatttatgatcaaaacatgggatagcagtcgcaattatagatgaaattgagagtttgtaaatttgtagagaaaaaaaaagaaatgcaacttaataagttatgaacttttgggttaagagatgcattgattattattgatgcattttcttctttttttgcaaaaggaaggaaagggaataaaattgccaacacgcacctgcatattcacatgtacgttattgtagataaaaggttccgggttcaaccgaacaatactctc

SEQ ID NO: 64255 - DNA, 843 bp, Cucumis sativus
  Intron number 1 from transcript Cucsa.277290.1 (locus Cucs a.277290) derived from phytozome v7.0 (chr-ID scaffold0260 1; pos 506351 to 507193)
gtttctataaaaacaaggttctgtttttcttttttatcttctgattttttgatgaatactcatcatactttattttctgggtttttctcttgacttccttgcaatttctttatactgttcttataatcttatagttgatactggacctagaccaactgaaaatctaaactaattttgtattatatctataaaaagtcatgcaggaagaatgttgttaattatctttttgttatcgaactctaaaaatagatgtttccctcttctaggaagcacattataattcaaataaaagattcaaaagcttgcttttttggaggattacttcttgaggttacctaggctacatcaaaatgttgcatcttttttttttttaaatgtttactaattactatccatctctattttccgtactatatacaattaattgactagaagtttcgctgtaatattgtaaaaacttgggtggcgataaaaattagattatgggatatggccttaaaattagtttatttgagatcataaaactaagtttatggttacataactaaaatactactattttatgagtttcttgacttcaagtgttgtagatttgaatagtggttttatgggatgaattaaagtattaacaagttggcatgaacacttaattttctctacttcactttacttgtatgattcatacgatgctatatgatctagaagtagatttttctttcctgtatagttttttatttccttctgctgaaacaagtcaagtagcccatcctgataggtgcttgttcttattttgagttcgaaatttcaggtgcaacatattccagattcgtttgaatcagtgca

SEQ ID NO: 64256 - DNA, 1061 bp, Cucumis sativus
  Intron number 2 from transcript Cucsa.272170.3 (locus Cucs a.272170) derived from phytozome v7.0 (chr-ID scaffold0250 0; pos 848974 to 850034)
gcaaaatattttcagtgtggtcgtatagattgaaggttggtttgatctgtaacccctctggtgatcatcttcactaaattcattcttcctactatgtacatctgctttatactttcggttgctgattttcaaatattttgacttttgtgtgcatttttgcaattttttctgcgattttatctgattgaactcaatcgtagagggaaacttagataagtctgttagtgtaggcaatttagtatagacaatttcaagtggatgcttttctgctgagtgagagattttgtgtgtggttgaatgcaaccacagcttgaggcactatgctccactgcgttggttttggttgccaagggaccttattagattgctcaaagttatactgatcacctctgtatggccattggtctttggatgaccagtggtactaaattgtaacccttcctttatccaccacaccttatgtggggaagggtgtgcgtctggttttaagtttggtgttgtaaataggggtttatcaacttttctttttcattattaaccactatgagtgggctttgtggtcaagaaggatcatgtaagtgtttttaggatcaattaattctaatgcagaagctcacaaggtggcctagacactcatagatatatatgtactgttaagtttgtcatgcgtccttgttggccacagcaaaaacacttcccagagtgttggtttggcataggaatattcctttgggattcttgagttttctgtaggcttaaatttgttttcttttgttttgctaaaaggatatgtggaagtaccacctatttcaaatgttctttggggtttcaaaatttccttctttgagatttatcgtgatactccagctggatcattctattgcattcggggttttgtgaatctctttctattgtggctgtccaatccactgattccaccttgggctgggatggtgttttttggtggttcttgaataatttacaggtttgaattttgtctgaaatgtcttttttctttatgtgcaggtatattaaatccttggggtcactttgaaggcgtt

SEQ ID NO: 64257 - DNA, 482 bp, Cucumis sativus
  Intron number 2 from transcript Cucsa.148910.1 (locus Cucs a.148910) derived from phytozome v7.0 (chr-ID scaffold0110 7; pos 878545 to 879026 reverse strand)
cggcagatcttctcggggagctctttgtattcacggtaaaatgatttcatctctctctctctccccgtccctttttcttttagaagaattgtctcagggtttgtttttactgtgtctttattctgctttgtaaagaaggatttttgttattcttcctactgggatattttgattagtaaaattatatctcattcacatcgaaatatacagataacaattgatttacaatgtttaccaattctcatttggttacaatgggatgaaaacaagttttttgttgaacatgtgaactggccttttggagaagtatattacttccaccaagttatccaatgtgccaaaagaaaaaacaactttagacattagggatccgtatacttattatcataattcttcactagaagtgcgtatttcccaattttaatatcagctgtactatccccataggttgctggaactgctattatttttgaggtgcaaag

SEQ ID NO: 64258 - DNA, 500 bp, Cucumis sativus
  Intron number 1 from transcript Cucsa.148910.1 (locus Cucs a.148910) derived from phytozome v7.0 (chr-ID scaffold0110 7; pos 879105 to 879604 reverse strand)
cgaagtttaggcagtgtattatcaacttcgcacaggtttcatttcttttcatgtaattacacggttttcttgcttgttgtttacacttgcaattatgatccatttggcaccaatgggttggattttcttggaataatgacatgcttaaacttatatgttccatgagtagtagctcttaggagaaagtttaaatgtaaactctactgctataaaattctgcagtctaagactcggtaacttgatgtgtatgttaatatttcgaagtttgtggaatcagttgtttcacatttgatgcaacccaatgatttgtttactcttctcctagagatatgttccgtcatataaataagttaggtgttcatggaatgctgataggtttattgctcattaacctcatagtttgctttgttaacatgaattcttctttgtggaatggattataagatgttgtcatattgtacttcttatacggaaccaggcaaatcatcggttttcgacaa

SEQ ID NO: 64259 - DNA, 779 bp, Cucumis sativus
  Intron number 1 from transcript Cucsa.151850.1 (locus Cucs a.151850) derived from phytozome v7.0 (chr-ID scaffold0111 9; pos 217871 to 218649)
acaaacccacttcggcttttttgtttcctggtcaggtcagttcgtactggttttgggggtttcccttgtttttgttgctttggtgtttacttacactatgcactcgattggattttgttttgaattgaaagcgaaaattttcagttgtaaaatgtggttgtggataaggatttgcctaaataatttcttgctttttgatgggaaaagtagattcgtgtttgtttgtttgttttttttttgtttttttcttttttctttttgtgggttggcgtgtgcaaagcttgtcattcatctttcataaaaggagcatgtcacggcggtgttaaagacagtcctttttatgcatcaatggaaattccacaaaaatggtgatcttcaattttcatgagagttgaaggctaaggaaagaggatatgaaagttcagttctttggaagcagtagctaacgagttcatcattgtcctgaattgtacaactattggcccaatgcccatagcaagagaaacaagtattctaccttctatagtgactctgctggtcatgttttatgaaggtttcttttgttaagtgatgcccaggtggcatgcatataatggcttatacattgatcaaggattagaaccagtatattgtcttaagatttacctcttactgttcaaaatttcataattatctcgcatatatcatgaagctggatgttgggcagtagttatgattttcttattcttttatgaagccttttcttttcttcactgagtcagggtgcacaagctgtgggc

SEQ ID NO: 64260 - DNA, 615 bp, Cucumis sativus
  Intron number 1 from transcript Cucsa.219040.3 (locus Cucs a.219040) derived from phytozome v7.0 (chr-ID scaffold0165 8; pos 915357 to 915971)
ctcgcttcttctcccaagttctaccttcttataaggcaatccctctttttgttttgtttgttttttttttttcaattactaagtttttatacgattgaaaattgtgtatgagatggggttgtgttagttttggatggggctgtcgatttgaatggattgttattaattttttcctttttggtttaagtggagtgttggtgactctgaattttggaagacagagtgttgtcattatgagtggggtttgatttaatccattaaatgttagttatggagctttgtgttcttgggaaaacttggaatgctttcgatattttgtcgtggggagttggtatctatgaactgaacctatgagatggataatggcatttactatgatgaaattggatgggatgggatgggatggatgattattttcctagtggcatttctattgatctcttcaagtaagtcttaggaatttttcatgtaatgatagtagagggaagtttaactacattgtgtaatgtcatgctgtagtaagcttaatgctttacttgatttgatagttttgtaaagttagattgtggaaatggaactgctctcatatcatatgcttcatcattatccagggtg

SEQ ID NO: 64261 - DNA, 1000 bp, Cucumis sativus
  Intron number 1 from transcript Cucsa.195770.1 (locus Cucs a.195770) derived from phytozome v7.0 (chr-ID scaffold0135 2; pos 110932 to 111931 reverse strand)
gctggaggtatgagtttttattattacttcgaagaatcaaatcgtttaatttattattggttacgaattttagctatagagaattgaaggtcgtgctagttagcaatggttattgagaagtgtcagctaaatctgatgagattgaggtttatcgacattcatgtttttgtttgaacattggtgactttcgctgtttattactgtatcgttaccattggaattcaaattttaggaaataatcggtccactataaacatactcacagtgaaccaagaaatctgtgtttagttgaagttttgtctaaacgtagcatatgtcaccgacgatttgaagctgtttttatgcttggagctctctgatcttttgcttgttgtttactgctttcggatcatctttttaacctgaacttccctaagtttgttggtggcaaagatgttgaaacttagacaagtttttccacagggattatctgaccatcaaagcattgaagagttttgtgataagaatcatccatttagatgcatgccatctgtctagagactctggactctggattctagtcatcttgtatcttcacttctatccatataagttttctctgatttggtgtctcatgtgtgctgcttctcgccaacacaattcgttctgacagcgagttcccttaccataagtcatagctgttttctccagatatttcttatagaccgggcgatgtctaaatgataaccatacaatagctgagttttaggtatacatcatactcatagtttcgatgttgtagatgtaacttaaaatttccgttggctcctactttaatcgtttactggttcattctgctttctataattttaacttttatctgagtcagaatgaatccatagtcttaccggaatgcgaaaaatcaacaccatgtacttctggttcacgtcattagctaaacaatcagatttttcttccctcttcagtttttgcagcatccgtttgtttcagttggagcttg

SEQ ID NO: 64262 - DNA, 694 bp, Cucumis sativus
  Intron number 1 from transcript Cucsa.161940.3 (locus Cucs a.161940) derived from phytozome v7.0 (chr-ID scaffold0114 4; pos 1708472 to 1709165)
tttcagagctctttcagcagatttcacaaacccaggtaaagattttctcctttcttgtttattgtcattccctttttcgtgttcttcaatctgtcgatgattctttgggttttcctctttttgattttcaaatatttatggaatgtcctcgagaaaacgagggtttctgtttgtttttacactgtttggggtcacccctcttggtagtttaatctctccatcgtatttgattgtcttttctactcaatcgttgggatttctcatctggggatttcccatttttaatcgtttattgattgaaactactgtcgttttctattgggggatttttttcttaatggaaattgggaaatgatactgcatatttgagttttggcgttgttgttgacagttttcacagggttgtttcttgtgccattggatctgattttgcgttctcactttgttctaaatgcgtgaaatgtcagtttctgctacttctgaattgattctgtggactgtgttcttcttttggggagtttcttatcaatgatcagatcttaatgatgtttgtatttttcactgcacaatgctgctgggtttctgccgattctgatggattcctgaaactattttgtatttgtgaatgagcccaaataacattgatgtagaaaagaagctatggttttgtaggggggagtggcgaatcgaaaca

SEQ ID NO: 64263 - DNA, 890 bp, Cucumis sativus
  Intron number 3 from transcript Cucsa.192220.1 (locus Cucs a.192220) derived from phytozome v7.0 (chr-ID scaffold0133 3; pos 123071 to 123960 reverse strand)
tagaaaagagggacaaacaaggaagggaaggcaaggtaattaccacctcactctacatttttctttttccactttttacaacagtaataatcaatattttatttttattctctaatcttctctattttacgactaaaataaatttattggggagtaaattttcctttttactacctaaaagaaaattgacattgttttattcccatgcttatactaagaaattttgtgtatttttctaatatatattaaacaaaatatgactttttctataagaaagaaaaataaaatgtgtatatgatatgtttcatctccctaaattcaatttttgtatttattttggtttttaacattcaatattatatattttgtcaataagctttctaatttgttctttgaatttatctaaacacaaaatccaaaattccatatgacataaagctcaagtttataactacctttaattttttttaattaaaatattgtcataaatctagtagacaaaattttaaaataaatcttgaaagttaagtgataaacacagtgaaagtttaggaactctataaatacaaatacaaactttgtgtttaaaaactgaacttgaaactcttgaccatttaaataggtgttttttagcgcaccaaaatcgcatataatagtttatcaaagtttattgtcgatagactatgacattttgcttctaagtttgtttttttttttttttaccattgttttatttctgagaaacaaagaattttggagaaataaactaacaattttgatgtattttgtgcaaaaattgttggtgggaatggcggatctgatttggtcgcatcaaccaaatatccaattatgcagtttatcttggtaggtgaagagctagctcccatttc

SEQ ID NO: 64264 - DNA, 570 bp, Cucumis sativus
  Intron number 2 from transcript Cucsa.236460.2 (locus Cucs a.236460) derived from phytozome v7.0 (chr-ID scaffold0201 8; pos 127303 to 127872 reverse strand)
gagctttcaccagctctgatctgttatataaacaggttattactttcccaacctcctaaattttgcttgttatgacagatgctaactatcagtttttttcttcatgctcctactggaagtttgttgtatttttctaaccgcatttttggggtatgtttgtattgtttttcaaaagaaaaattgagaattctcacttactaatctagtgatgtaattttctggaaatctcagtttttttgtttttaaatttgactagttctatattatcttctttatgagaatcaaattttattgatgacacgaaattagtcaatagagtggagggactaggatcgattattaccatttcttctgcagaatccagagaaggatagggttagtttcatttttcagggcaagtcattttgagtggcttaggagtgactttatgagctgtggaagtcgaggagagtggagagatgcatgaactcttatagttttttagccattagcttatgagtttcttatatgttcagataatatgaatgtttgacagataacaaatcacgaggagcctgaaattccacttct

SEQ ID NO: 64265 - DNA, 432 bp, Cucumis sativus
  Intron number 1 from transcript Cucsa.236460.2 (locus Cucs a.236460) derived from phytozome v7.0 (chr-ID scaffold0201 8; pos 128451 to 128882 reverse strand)
aggtgaaatttttcgtatggaaccttcatttcttgttttctttgcatactttattttcttcctctttctttattctccaaccctcaatcctcagttttgtttagtctttttattcgtgttaatatatggggtttcatggattaattagttgcttagtgggtcgatcttgatttgaacagaaaatacaacaactgtttgtttttatttacattttctgcaattcggaaatgttcctctttttattattccatgtcctcgatgtggagattttacgaatcttaatccttttgagttgattctgcaatgggtattctgttgcttttttgatctagaatataggtttaaaaagaatttttgagtgatgtagatcgttttttttttttttttctgattttaggagcgattgctgattcaatttgcagattaagggaa

SEQ ID NO: 64266 - DNA, 1014 bp, Cucumis sativus
  Intron number 1 from transcript Cucsa.269010.1 (locus Cucs a.269010) derived from phytozome v7.0 (chr-ID scaffold0244 4; pos 232865 to 233878)
tctgataggtaagggggtttgatgttttggatgctgctgaggaagattggaatttgttggatttctctttattgagctgcatcttgatttcctttcctaacccagataggcttaaacagatcgaattgggactgtggaggggtgggaattgggaaatcgtagtaaattaaggttttcttgtattcgtgggggaacttctgatcatggatacaaattttgtgaactgattgttggctcggtggttgcttaggattcgggtcctgcagctggggctattggaaaaactttagtcctttaaagaaacgttttttttatgcttggtagaaaaattgattaaaatctttggattagtgatcttatcttatttgtggaattgactaatcggaatttagaaacttggagttgagctaagaagtcatgtaaatgaaaagccaatctgggtagatcttttggaggagaatatcgacttgaaacatatacccatgctgtagatgtgcacttatgtggttgagctgaatttaatgaaatggttcttcaggtctggaatgcccaggaacaaaacgttttgagttgaattttcttgtagcttttgctttatttcttcaatattctggcaagcaactttgttggtggaatgggaatggtatatcttaagttcacacaattaggttgatttaccttgtcactttggagttccgaatttttttttattcatactgggggaagccacttctctaattggaattaagtagtgaataaacttttctgttatcgtccttgccactggtcatggatcgttctttggggttttcatattttagttcattttatggtcttcttgtaatgtaattataaattttgggctgcttagtataagtaccccaactttgagttatgataagatgaaactgatttataatgtttaataaatatatgagtttgccacatttagaaaggactaatacagctagctttattgtgtttcaggttgggccttgttgcaaccataaaggt

SEQ ID NO: 64267 - DNA, 682 bp, Cucumis sativus
  Intron number 2 from transcript Cucsa.213850.1 (locus Cucs a.213850) derived from phytozome v7.0 (chr-ID scaffold0154 3; pos 1829100 to 1829781 reverse strand)
gattattggagaattgtagcaattcttcataaaaggttttggccatgtttttttttctttaccaatgtttaaagcttttgtaagtttctttttttcctttttaacataaattagaccctctgattatcatggacaaaacccatcattgatattgataatctgtccttcctctctttttttaactatttcaactttagtattttgtttttgaacttgatgttggcttcctccaaattttcatattattattaaaacaaagttgatgaaaatttttgtggtaagtaaataacaaaaacaaataaatttttaggtagaaatactgtttattattagtttatttttgaaagaccgaacatcagaaatcaaatgtgatcaaactaagtctattggtttctcaccatttctttatcatagacttcattgttaggaagatttcaagtttcagccaattaattaatgtcgccttttaagaactgaaaccgtctacaataagtccttgattttagttttgagtttcaaagagattataagtttttttttctcttaaaacatagttttgagttttaagttttgcatttgctaactctttatggtaattgggttccatgattaataaagtacaacaaacaaacttggatttaaggcagattggtgaaatttgaaaagaagaattggagaaatt

SEQ ID NO: 64268 - DNA, 997 bp, Cucumis sativus
  Intron number 3 from transcript Cucsa.206800.9 (locus Cucs a.206800) derived from phytozome v7.0 (chr-ID scaffold0144 1; pos 6211 to 7207)
gttgctggtgttgggattgagtccctctttcctctgtaagtattgctgatttttttatgtaattattttctgcaaacgctacattcctaatttgattgtctttggccctgctcacctttgtgatgaagaactgaagaattgtgtatccgggaaaaaggactcggatacatctagacattcacctgacacgtatctgggacactaaaaaatgtttcaagattattattattattattattttcctaattttggacacgtctttcaaaaatatttaacctagaaatggggtgggggtgggggtgggaatggagattttatgatagactttatccataaatattgaattattgatccatcctaaagtattaggacgaccttttctttctttggtcactgcaactaaaatttctacatcttttaagatttcaatatgattaaatgactaaactttttatatttgtatgataaatttatgtacttttatctataaagcagtgtcaatacttcacgtattttatttcataaagcgtgtctgcaacatgtatgtgtcctattttctagaaattgacatgtcaccatgcatgtctgtcatctttgtgcttcttaaaaatttaatacaaatcattaaccttaaggtgcaaatctttatgaatttgagtcttaaatataattggatttttaaactgaaaacaaagccatcctgtcgatccaaaccaatattaaagtgaactgacagtggtttcggtcagtttatttcggcttttagagttttttggttttcccttcacccttgattctagtaaaattgtatatggtgattggtgaacaatacttattgaatgttatgtattaatatggacatatatatgtatggtctttctctatacagttgtttctttaaatgatactcgcctctgataactttgtgcttctgactaaaataagtggtttgtgcatgacagatactcaccgaacataaaagagattaaggtattgg

SEQ ID NO: 64269 - DNA, 569 bp, Cucumis sativus
  Intron number 3 from transcript Cucsa.280560.1 (locus Cucs a.280560) derived from phytozome v7.0 (chr-ID scaffold0263 3; pos 479598 to 480166 reverse strand)
caagttgaagtttggtttcagaatcgtagggccaggtttttacttttttattcatttctaaatcaaataaacgacagaaaataattttattattattattattatttttaagatattgtttttcttttaacaaaatatggatatgtttaagccttttattagaacccaaaaaaaataaacaaacaaatggacataaaattattttgttgctttcagactataaccatttattttttcttttcactgttgtaaaatagaaaaataaaaagtaaaccacttttgttttaaaaaaagaatcaccaagttatggaatatattttctccagcaaacatacacatctagtttgattgaatttttttaataatttcatttttcattttttggaagaaattttatttaatttaaatcacaacatttcttgaatatatttacaaatattaaatatatatatttttatatttttattttgtaagtattttgatttgctatatttgaaaatagtcctttttaaaatttagacttaatttttatccttttgtaggagcaaactgaagcaaaccgagttgga

SEQ ID NO: 64270 - DNA, 328 bp, Cucumis sativus
  Intron number 2 from transcript Cucsa.280560.1 (locus Cucs a.280560) derived from phytozome v7.0 (chr-ID scaffold0263 3; pos 480191 to 480518 reverse strand)
aagaaagctttaggctcaatcatacattaaaccctgtgagcaaaatcatctttattttttcgttttcttttcctgaaaatacataggttaaaggggtgtgacagagtactaaaagagtgtgaacctaattgaaatatatgagcgcgcctaccgatctctcgacttctagtatcctttttagaaaatatatataatatttatgtaggttgaagggatgaaacatcaaagtttgaagttgacacacattttgttagttaatcgtgcgtgtgtttatttatataaagggaacaaatgtttgttttttcagaagcaaaaggaaggtttggct

SEQ ID NO: 64271 - DNA, 861 bp, Cucumis sativus
  Intron number 1 from transcript Cucsa.185040.2 (locus Cucs a.185040) derived from phytozome v7.0 (chr-ID scaffold0127 4; pos 638070 to 638930)
tcttcaccatctcttatcctcggagaacacctgtaacagttcacactacttgcttctccttcaacaattttaagtaacagttccctcccttgtttccgattttggttgccgagatgtggaaattcagcttttccttttatttgcgttatgtctttttttttctttatcttaatttctgcttgttgtatattgttttttagtgttaaactaatttcttgaacacaattcttgactagctcttttattattcctagaactagtgcctcttactacctggatccatatctaaaagctacaaaccagcctttgagagatttaaaagcagagtaactaactaaaacagtaaaggaaaaatagaagctaaaaaacaaagcacccgagggacttgaacctcaaagatattacattaattttagtttatcttctttgttccttggattatctatgatatcacgttcgagattttggattagtgttgggttactctgctaggcaaggagatttaatataggtatcaaagcttagctgctatttttttttattattattgtttcactttgggatagagttctcaacattctagttggatacatgatccattagaagtttgtgagagcttatgtaacactttgttccagtgggtacttgatctgaattggaacaagtcatcgtttatcaaagtatttgaaacgagatggccctcaggtcgacttggctctttttccatggttttatgtcatttagtggttgcatttcttggcagcattgaaataatgcaagctgtttataattttgaaatcttttgccaatttttgttgtgtatatattttcaggagcaggtgaataaagtccacgatagtg

SEQ ID NO: 64272 - DNA, 1010 bp, Cucumis sativus
  Intron number 1 from transcript Cucsa.176100.1 (locus Cucs a.176100) derived from phytozome v7.0 (chr-ID scaffold0122 5; pos 462539 to 463548 reverse strand)
gttggtctagttctttcctcggcatcgttcaggtgaagaaaaaaaaaaacaaatggaactctactcgactcttcaccccccttcattcttcttccttatattgtcttatcttgttttgttattcaatcaatcaggggatttcagaattcaccttgtttatgagaacagctagctatttaatgattatgaatcgtttaatttgcatttatctctctttcgtcatatatagaaccacatgcacaaacggcagctgtttttcttttatgattgtttgatgggttctcgttgaaaatgcgtttggtgttggaatcaccgatcgatcaaaaagttttggatgggttatgataaaatttgttttaaagctgatcatgtgtttgtggactttggggttgaggaatggggatttgtattgtaaggctgtgattgagtttgctttgaagtttgacccagctgccttagcctcgccgccgcgtccttagaattgcagtaatctgtggaaggttgaagccaggaaggagggttcttacctttttcttaccaacccaagcaatttggttcaccaagtgctctggtttggcccacatgatcttttatttttgccatttgggccttctttcatttctaggcccaaccagaccccaataatataatgcctatagcttcaagtataggaaaaggataaaaagttaaaacctttttttgagtttgaactttcaagttgtgtttgtgtagcttctttagttctatgaacattaggaacatttgggtgctgatttggtagggttaaatggtaaggacacaaatttggaagttgattaccctataagaaatttcttaaaatacatggatcatgtatcaagtgatatataggttattagaagtaggcttacatgaatacaaactcaaagttggtgaaccgaacttgtaatttaggaagaacatttattttaacttttggatattttaggctgaaatttgtaaatattctttttgttgaagtcatcgtttct

SEQ ID NO: 64273 - DNA, 997 bp, Cucumis sativus
  Intron number 1 from transcript Cucsa.255470.1 (locus Cucs a.255470) derived from phytozome v7.0 (chr-ID scaffold0222 9; pos 3454180 to 3455176)
caggtgcgctttttgttcataaatctcctgttttatgtgtcatctactcatgtattcccattttttgttaattcatttcagcagtaattcctaaaccctagaactcaatgtaatttcttttctgaacgtgcatgctgatttatatatttgttcctacttatattcgactcttccatttagttgataggggatttttctttgctctgaattttgctgatgaattctaggaatttgagtaatttgagtaattatcgtttatgattagcgtttaaggttgtttatttttagttgccatttgaagaatacgaattcttttactatgatgcaatcgtgaaaatcagctctgcttgaagtgaacaaccaagaacgggaattacatacattccttcaaaaatcctttgattcctaggaaaggataccgttttgagcccttagtttattgattattcggatggtttttagtgtcatatgcagtgataaccagttgtttttttttttttttttgaagcttaaggtgcaatagtcttttgagacttaagctcacaggagcaaaaatggatgaatttccatatacaaagcataattgaagtgggaatatgaagataaaaaaaattaaacacaaagaattgtgaatttagactaattttgatctttaagttaataaagaaggaaaaccctaattattgttattatttaacaaaataatgaaaaagagccaggacttcgggtcttggggcctaacgtaagctgtgtgccttattttgtgcacctccccatttcaagacaaggtgccagacttgcgcctagggcgcaggcgtgtacctgggtgggttttttaaaacactggcgataacctctgaattagcaatccattgtttaaatctaagtccgatcatggcttcctgtatttgcttgaggttgcctaagtgggcgctaatattggtttctgatattcaatgcaggccagcgatagatttaacatcaattcccagcttga

SEQ ID NO: 64274 - DNA, 826 bp, Cucumis sativus
  Intron number 1 from transcript Cucsa.180090.2 (locus Cucs a.180090) derived from phytozome v7.0 (chr-ID scaffold0123 3; pos 434625 to 435450)
aaaacaaaaacattcttctacttcttcttcttcaggtctctctctcttttctctctttgttttaatattcatttctgggtttctctcttacttttctgcgatctttatgctgttttcatttgatttcttttgggtttttccattttatgtctgtttggttgttttcactgtgccgttggataattgtttctctatgtgtagtatactcgatagaatttgggaaatgtgccattctattgtcttgttgtttcttcttcttcttcttcttcttcttcttcttgccctcctcctgactttagttaatttgatgaaaaggagccttttgaattctcttgacttcttgatttgggattctgtcgataatcacttctacagttttgtctcgttggcgctttactcgtgtaaagtgggaacctttataagtcattaaggttataagaaaaaaacgagttttgtattctttagtacttcttttactttcctttgaacataggatttctaggaaacaaacatttgcagtttttatacagctttacgagatgtagattatgcagtgcaacttatgtagctgtatacttttaaatatttgatgtctgagtatttgtttatgatcgagtggagttactttaaaagtttccatccggtttgtttgccggccagctgttagttttgaagtcttcgatcatgtgaatgttgggatttaattatttattggccatgattttaaaaatgcaagctgtaaacaatcatatattggcaatcttcataataatgaatttgaaagtttattgaagggtgatccctctataatttcaggattacgaaa

SEQ ID NO: 64275 - DNA, 754 bp, Cucumis sativus
  Intron number 2 from transcript Cucsa.160580.3 (locus Cucs a.160580) derived from phytozome v7.0 (chr-ID scaffold0114 4; pos 734689 to 735442 reverse strand)
tgccgttgggaacattaacgacagtttttctgctggtaagagttgtttcttctcaagcttgcatatagttggtgttgcttgttagttattgcttttgcctaccaaaagattcttctagtcctctttcgtacatagtgactcgataaacttcgttcatttcctatgtcaggttaatttcattgttcacaatctaacttacactgtaaatgttggaaatcaaataaacgtatttccaagaaggaaaaacttgcatgtaattatgtctcatattcatagacccttatttataggaagatgacgctattttcttttatgaatcatgctcagcaggaggcgttgtgaaacttcatctctaagaaatattacttgacacattctcaataggataatgatgtatgagaaaaagatatcatgtactaaaactgagcaagcaaataggcttacatgctgatagtgtagaatgataggatcaaattgaacttgtttcaatgtataaacctcctagctcccttacagatactctaaataaccatagtaggactttaatagaattatattctgtttgctttgggccttttcggaaatatttggagtttccctgttctgattggcttcatattgtgtgaatgttaaagccaatgcgaataatactaaaaataagttactacaattgtaattttcttttggtttgctttacgtttgttttaagctgattatgtctgcacttctccatggaacagagagcaagaaatat

SEQ ID NO: 64276 - DNA, 1064 bp, Cucumis sativus
  Intron number 1 from transcript Cucsa.160580.3 (locus Cucs a.160580) derived from phytozome v7.0 (chr-ID scaffold0114 4; pos 735948 to 737011 reverse strand)
gcaacagtctttcgcttccaaatttcttcgttaaggtagatttctgtgtttcttcttcagcttttagtttttcttcttttttttttaattgctttatcattattgatttgattgcgcgtttcgcttaagattcctggatatatatatatattttttgggttactttcggttgcaatgtttgaaaaacaagttttcggaaagtcaattactagtgggagaaggaggaggttgcttcaggaataaattgaattaagattttgtttgtgtttggaatttgagagttttgaagatttagaggtatttgttggtttatattttcagtgcttgaatgagtttgaaatcgaacaagagaacgtgattttttttttttgtccttttttttatatgtagaaacaatattaaattttaggttctttgaatttagccgactttttgagtagaagcaatctcttgaaacgaaataagggcagggatttctcatggctttaatcgggaattttgagggagataaatttagtaaaggcgtgtttcctttttcggacacagctcgattttgtcaagttggtttctcggtaatggttattgttttgatttatctttttccaattctgtgaaagcttctatatagattgggcaactggatttagaaatttttgtctatcgtactcatatcctaaaaatattatatatttcattagctatttttttcttgttcttctgtcttgattctacaatctggaaacttggtcaaaaaccttgaagaatcttagatgattcctgattttcaaggcctgaagtggtcaaacagagtaatctctcttctttttcttccttcctgagcttgtgagattctttggatacattcaaaactccatcgtttagtctattatgctacattaaatgtgatgaaattcgattgtttctttcttaatttcgttaatatcggcaatctatgattgcagcaatctcgtttgttgtcgtttcgcaatttgatttttcggtttcttcctgctttcttatcctttacagggaaaaacttgctccatttcacatctcatacttta

SEQ ID NO: 64277 - DNA, 637 bp, Cucumis sativus
  Intron number 1 from transcript Cucsa.195030.2 (locus Cucs a.195030) derived from phytozome v7.0 (chr-ID scaffold0134 9; pos 34444 to 35080)
agcgtctgcaagcaaggcctcatttgcattaccaggtaaaattgcaaattggtttgattatgtgcgagattttgtttgatcactggcaaaatgtaggtcgatcggaggctagattttatgttcttcttcgaagtgtgctgtcttggttgtgttttggcttttttttcaaatcatttgagatgagttttgtttttttttttcctcttaaaattgtatgtggattcgttaattggtgtagagtacttattttcagtgttggtctcctgcaactttattattttctaaagtgctagagattgattgatgcttcaccacgcatataaactaaattcacacagtgtacaattgaataaaagaaacaaggaacataaacgatagattaaaggtgagcacgaaagaaaagagaacaacgaatatttccttgcttgacatcatcagttttgagttattctgatgttgaatcaattaatctatgtaaatcagtgctgtcagaaggaaaataagcttcttaaatgaagaaattgaaattttggttttgttgttctgagatgatgaagtataaactttgattctaattctaaaatttcaaatggagataccaggttggggtaacgccagaaggagtggaaatcccaaa

SEQ ID NO: 64278 - DNA, 631 bp, Cucumis sativus
  Intron number 1 from transcript Cucsa.172450.1 (locus Cucs a.172450) derived from phytozome v7.0 (chr-ID scaffold0119 6; pos 294549 to 295179 reverse strand)
ttccctctcactcttgcctgttcttcaagtgtgaggtatgtacatttctattttttttttcccttccagttcaagggtttgagagatgaagaaggaattttggttctgtcatgatatgtgaggttaaaagggtttcttgtttttcgattttcggtttctcttttacttttttgcttcagatttttgtttgttctctgcaatttctctcctggggttacttgtttttgtaatttcttgttttgtgatctaggtttttagttttctgaatatgcaaacttatggttcttttgtttctcctctctattgcttgagattctagttgggtttctctgaaatcgttagttctgaattctttaatctcatatttttatccttctgagtagaatgaaccagtggaaccaagatcttgatatagaaggactaggaagctttgtgtttcggttactttccaatatttttctccacatttgaatgaaatattgatgtcttagctgggttagaagtgatagtctaatgcagtactttgtagttatttgacaagaagtaacttttgggtgttttgcttttgctgtctaaataaaattttcatgtcgttcagtgacttacttctgtaggtttcaaatctgtaact

SEQ ID NO: 64279 - DNA, 373 bp, Cucumis sativus
  Intron number 3 from transcript Cucsa.236620.1 (locus Cucs a.236620) derived from phytozome v7.0 (chr-ID scaffold0201 8; pos 479705 to 480077 reverse strand)
gcaagaatttgacgtgacccctcgccaattggagggttggtgccgcttcatttttcaacttaaataatctctgacctaaaatgacagccttttctgtttgtggctctgatatttgtaattctcgtccctttagaattgtccaaatgccaaccttaactgaactggaagattttagatattcacaattcgttccttgttgctgtgaagaataatgaaagaatgtgacgtactatcatctgatttgggtcatagagcttcaggatttgaatgttgactatgataatattgctgtttcatactgagttaagcaactgggatttcaactaatcacttgattttttttttttttttttttgcagaggttagcaatcaa

SEQ ID NO: 64280 - DNA, 941 bp, Cucumis sativus
  Intron number 2 from transcript Cucsa.176050.3 (locus Cucs a.176050) derived from phytozome v7.0 (chr-ID scaffold0122 5; pos 443537 to 444477)
gtcgcctggtatttttctccccaaacttcttgttatttttgctagttgctttgtttacttttggtccatggaatcattcatatataaaacactgtttttaatttggtttttatttttccaaattgttttgcatcacttttatcaaatatatgggtactggctgcttgtcaatttatagaaatataatggaggaggctaagagctatatcaattcgatgtggtcattttattcatatcttgcaatgtccttgcctctcttgattggaggcctttgacatgcttctcaagagctaaattgtagtttgcctttcttgcagagtccttgtgagcatgctttctgtcttgattgtgcaaggagcgattctttatgctacctgtaagtaaaaaggctttcaaggtcataacgagaccatcaaaagattctctggtgtccagaatgtcgaaagtgattgcttaaatttagtgcattactcttatacaaaataaaaatttagtacattgcattttttcctcggctattgcaaaaactttcgctctttaaatatcagttgttttctttgctgattagttactatactacacagttttctagtaaaagcaggattcagcttttccttttgtctttactaagataatttatggagcatgaatttaaagcaccaaattgaagatcagtcaatgatatttgtagtggacatactcatgtctgtttgaattgaaatttgatcaacaaagaatcatatatatatagtatactcaaagccatccttgtgccatttcaatgttaaaaacaaagctgctgtgactgacagatcagcaatagttacactgtgaaccatcaagtctcgttttattgtaatttttacagatattgatacttgtgtacttcattgtaatgttctgaagatgacatcagaattgatttttgtgacacagttgtg

SEQ ID NO: 64281 - DNA, 837 bp, Cucumis sativus
  Intron number 3 from transcript Cucsa.207540.1 (locus Cucs a.207540) derived from phytozome v7.0 (chr-ID scaffold0144 3; pos 359675 to 360511 reverse strand)
aaatattcgttaatgtaagtttaaatttaacacactgttgattggatttttgaaattcattcattgaaaaatttgtaatcctttgtttaggttgtttttttttttaacttatcattcttgtctggaacaatatgccgtagtatttttctcctaaactctgttaggttgctttttgtctggaaacctgttttctttctatctattggtctgttccattttttttatgacatcattattgcaacactggattttgaatatttggttgagaatatacattccatttatttattcgggaatattgaagaaaaaattgaaaagcttagattataaattgtggatttttcacacattcacgagtatccctgtttttttaatgttcatgtatggatactcattctgttactgttcatagttgggaaaaatatttcggatagcattcttgtggtgtgcagatcgagtgaaacttacttggacctagtcctgtgttgtgtcttgatattctttctgttatttgctagtgatggattaactttttcttaggtatttaactcccttggttgtgtgcaacttcatatatgctttctcttttccatgttcatctctctcagttctagtgcttaaaactttccattttgaatagtgttgtatgtccacatgtcacatttccttaggagatctttaaggaaatgatcatcactattttcccatgccaactgaagttcttcctctgtatcgagtcttaaagtgaatgctttgaattttgaacttgtaggtttaaagtgccttttctgatatgtttgtattggttgtttatattggtaatatcagctttgttcc

SEQ ID NO: 64282 - DNA, 323 bp, Cucumis sativus
  Intron number 2 from transcript Cucsa.207540.1 (locus Cucs a.207540) derived from phytozome v7.0 (chr-ID scaffold0144 3; pos 360558 to 360880 reverse strand)
tggaggattgtgttaggtcagctgcaatacgcgtagtaagtcgcttgttttgtagatatctcaccattgtttcttttcttttatcaaacaaaaaatttggtgaaatcattttgttttggtagtaagtcacatttccttaagatttatggtccattatttgatgtatgtgtaggtgtttgatgaattgatgatttttccagttaatagacttaattttttaattattgaggtcaaagccaccacactctcgcattgacagaatatcacattcctctattagtaatagctcttaacgattgatccaggtcataacttggggtcta

SEQ ID NO: 64283 - DNA, 585 bp, Cucumis sativus
  Intron number 2 from transcript Cucsa.156300.2 (locus Cucs a.156300) derived from phytozome v7.0 (chr-ID scaffold0113 9; pos 643005 to 643589)
tttcttccactcttcctcttcaatcattgaatcaggtgcttattttcgcctatcaattcaactccctctcttagattcaatttttgctacatgggtctccatccattcttcttcaggtgtattttcattgtttgatttagtaaaataactatggattggaaaattttatacagaaatgattcagtttaaatactctagagtttgatttggcttcctcacgactttgtctatttaactagataatttgttgtaaagcgttcccaatgtttctgcacgaagtcaaattaaaatatgtgaaatggggttctgttaattcatgtgggaatcaaaatatttgaagttttctcaaccaatcattatattttggatctcttcttatgttctgttccactggaattgtttgttaaaactaaaagaaatgagggaaagtcaaatcattacttctctgcaaagttgtgagtttatgtttgtttccatttgcttactttatatggttgattgcaacattaatctatgtatgacattctgctttgttgtcattttcccccagggttctaattctaaagattctgccagtgaaaggta

SEQ ID NO: 64284 - DNA, 713 bp, Cucumis sativus
  Intron number 1 from transcript Cucsa.247020.3 (locus Cucs a.247020) derived from phytozome v7.0 (chr-ID scaffold0218 8; pos 54273 to 54985)
gagaataataggtaaaaatagttgtcggtgatgaaaaagaataggtatattgtgactgtcggactaagaaaagaattaggtaagaatataattttggaaagaatatataaatagtttactacaatttagaaaaaaattataaaatattttaatttataattaatttaaaagatacttcaaatttataccatattaattaatttaagaaagatttgaaattcatattaaattaaaaccatttaaaaaagataatttttcaaataatcttataaatataatatgtcattaatattcgtattatataattaataattaatgaaaggttataatggtttgtaaaatattatctttcatattttgtctaaaactttcttcggtgggtttgtttgcaatttagccctttttttcaaatatattatcaacgacggactcaaaatacagccgagatcggaataggctgctaaaacagcccaatgggtttgatgggcctattatttaccttcgggcccatataaatgatcgttgtttattattaaatgtacttctctcctctatgtgacagggcgggattcctctttttgctcccgactctgactccattttctcttcttcgcctcgctcaaagataccgaccgagtgctaagattttggaatttctctttcaccgttctccagcaggactttacaaattttgggtattcgccttctcactt

SEQ ID NO: 64285 - DNA, 1042 bp, Cucumis sativus
  Intron number 1 from transcript Cucsa.206800.2 (locus Cucs a.206800) derived from phytozome v7.0 (chr-ID scaffold0144 1; pos 2495 to 3536)
cgtccatctccaatctcaaatcttgatcctcctccgtaagtatattaacattttgtttcttgaattttttaataattcaaaacatatttttttacaaaatgttcaatccatcgccaaaatgttcaatccatctccatttacaaaatgttcaacccgacaacccgtaaaatatgggttggattgaaaactaaattcgggttattcgggttgccaacccaaataatcagaaaaatatgggttgggttgagaatgtctcccaacccaacccgttttcacccctaattctacctcacaaaaataaagggaaaataaatcagctaaacttattacaattattttatttatttagttttggaggaaaataaagctaagtgagggaggaggagaacacttgtaaaataaatataatgaataaaagaaagcgaaaaaccctaaaccatttcgtaaaatcaaaataactctttcatcatcatcgttttcttcttcttcttcttcatcttcacgccgtctcctactctgtttcagcagatcggtttcgccgccgccgtcgtctttcttacgctcgtgctgtcgagccctcttttccagcggttttgcactgatttcttactcctttgttgtcactggtattctcccaatcttcatctgcgttttctctgtcaattgaaaacacacgagtttgaacttgtctaatgaaacagtggaagagttgtttgttttctttaataacaaaattgaaacgtggtttgtatttggctgatctgatttggacgtgaatcaatcatccagtgctctactttctttttcttttttggttctgtttttcgaatttcttgtttactggtgatctaggataagctgacatttccagaaatcttgatcagtgcaatgtatatttaagctacattatttatacgctgcttcacttccatcatgtttcttctcacctgcttgttttgtaacaattctatggagattgttttatattactcaacgctcatcgagtttctgtggataatgcagctggaaatctagtgcgaaa

SEQ ID NO: 64286 - DNA, 927 bp, Cucumis sativus
  Intron number 2 from transcript Cucsa.288700.1 (locus Cucs a.288700) derived from phytozome v7.0 (chr-ID scaffold0269 8; pos 248485 to 249411)
gacttgtattcaagcattttcaggtattcacttcaatctccatagattgaattcttagtttttttcatacatttttctggctcctacttacattggggattttattatgcacttttgaatgagggttcaatttataaaaaattctcaagaacattggaaatatctttaatttaacttttgagctcatttttcaagcctctcttgtaagtgatgtgggtttcttaataaattccgttagggcttcttggaggaacttttgttattgattgggtagttttgtcacttttcctccccatattgatgaaattttctttaaaattctttttatgttaaatcttgttgggtaaggcagtcgttgcatcacattgattgagacacaatgtacaatttcctcacctgatatcaaattgctctctcatacttgttctttatcttctataatatggagcttataaaatttattaatactagaaagccccatttcaagtattagactagacatgtacatagttagaattagcctcagttcaagtatgaactatttgttcttaaggtcatgatctctctatttgaggcctagtagtcaacccttctatcaaatgtcaataaatgaagtgagccgtgctaaaatgcaagtaaaggtagtgaagggtgtgatgcaagaatatggggcattttagcagaaagaaatgactactttgtgtggtgaaatcccttgtatgtttggaatttaggtataattgtatctgatctttcgacataaatgaatactttcaagtagtcttggattagaactttctttggcctttagactaattctttaatttgagttccaacacattcttttcattttattattatcatatttatgcaaggtcacctttatattcaggtgtggaggctattcacgaactttttcttcctagg

SEQ ID NO: 64287 - DNA, 804 bp, Cucumis sativus
  Intron number 2 from transcript Cucsa.254920.3 (locus Cucs a.254920) derived from phytozome v7.0 (chr-ID scaffold0222 9; pos 3102953 to 3103756 reverse strand)
gctcttatcaagaagctgcgtaaagcggtaattgttatacttcgtatttttctttgttccattttgtaactggaaaagtgttccaacttttgtttttttaaaaaactaattcaggttcatgtgattacttccataattttagtgcgtttatgtagttggatatgagtgaactagatagaaaaatagctatccacattaacataatgtactattatgaagtccatggcttgtatggttttattggttgatattcgatgagtgggttttggaacgtaatttgttgtttttcctttaactgcctttttttaacttcagtccaatacgaagcttgtcaattggttgcgccgttaaacgggatatcatagatggataaaggcatgcaatatccgtaattcatttgctttctggaaatgtggtgttttgtattgctgggtgcctcttttgatgttgtccaagtacaaaattagcttgaattttcgatcatttgagccattctctttctcaattattgaattttcaattagtggtgaaataggatgagatcacccacatggttcttgatgatccaagaatctgactctcatgtagtcaaatccaccatcaatcatgactaatttgcatccttcccccttagcttttatattcagatgaaattatttttcctatcttctacgaatgttactgctttatgatttttttatggttgatgacttggagattgtgacaagtgataccaatctcatatggtttttacctcttatatctacagaaacgtgaggcacccccgggtgagaaaccagaacc

SEQ ID NO: 64288 - DNA, 756 bp, Cucumis sativus
  Intron number 5 from transcript Cucsa.164710.1 (locus Cucs a.164710) derived from phytozome v7.0 (chr-ID scaffold0115 3; pos 69979 to 70734 reverse strand)
tgggatacatcatcttagctggtcaagccttgaaggtgagatcaatagaagtatactgatcttgctttcaaactaatgaaatttctaattcttagtattgaacaagtgaaattacttgaaaaatatgaacacaactttatttaagtattgggggtaggtaacttgttttgacttccttgctccatgttttatgactttctatttatttgactgcacaagagtcaagataattacacctatgcgtgtacttttgaaatacactaagcttccggttgttgctatgtgccgctttctcatcctcaatatcgttcttcaagttgaacacagacttttagttttgacctattaaagactagtctaacatcaatactaaaatgtatgaaaatgcaaataatctttttactttaataggccagaattttagcccccccccaagtttaatatgaatcaaagatggtctcatcttgtcccattcacatgttgaactgctccaaaatgtttactttagtatcattagagaaaagtttggtagagtaatggaactctaattaagtaccactttgctgacaagtataattaaagaaataaattaaaggacggaaacaaaaggtcaattgttctgatcaacaacaaaagcagttcacttttatcaaaatccaagttctgttttcacttcattttgtttgtataccacgtccttttattctgtgttgcactgtgacccatcagattacttgtctgttctgcaggctcttt

SEQ ID NO: 64289 - DNA, 629 bp, Cucumis sativus
  Intron number 2 from transcript Cucsa.165600.1 (locus Cucs a.165600) derived from phytozome v7.0 (chr-ID scaffold0115 3; pos 933231 to 933859 reverse strand)
ctcattcgattattggggaagctacaatcgaggtagagttctagatatcaggaataggcgagctgttattatgttagaaatagaatgaattaaaaatagtaatgaagttcttgatcactgtagattatactgagttaccagtgaaactgcgatatgctttgaaagaaaaatcataagatttaccagttgctaataaatgcataactatagtctatagtccaaatccaatcttattgtatattgggttcccctgattctcatccacgaacattctgatatttctgtttaagttccaagtttcaaattcttataacatgaaatggctcatctaccaaaacaaacattagagtttgactcctctccaaaaaataaaatccatagtcatctaaagcttctacttgtctctggttgctttgcgaattatctaactttaatggtgaaaccatcttgctgcttgttctttgcttctagtaataagttccccaaatccaaccattgccatagtttactaaagaaacatgatagttcactttatcactaatacttcatatttgagtatgctgatgtgtgctatccaatcaacttttggtttgatattgagcatctgattgtgcaggcagctaccattt

SEQ ID NO: 64290 - DNA, 376 bp, Cucumis sativus
  Intron number 1 from transcript Cucsa.299770.1 (locus Cucs a.299770) derived from phytozome v7.0 (chr-ID scaffold0292 0; pos 232958 to 233333 reverse strand)
cttgtcgcgacgcttttcgccacctctttggtctgttgcttatactcgaatttgattgttatgattaatcagctcttggaaatcgaaatcgaaatttctactttcgttttgttgtttggcttagccaattcttcattttgtgttttcgggtaattgggtatcttctgtttattctattttgctaaccgacaactcctttttttgtagtagatatataaaggagtggcatttagtttagtagtgtgaagtaataaatattcgtttcttatgatagttaaattctatgttatgaattaaggatgagtttagtttgatttacctttattttctcttcactataggcgctcggctcgctgtggcgtatcagagtgaggtt

SEQ ID NO: 64291 - DNA, 303 bp, Cucumis sativus
  Intron number 1 from transcript Cucsa.238440.1 (locus Cucs a.238440) derived from phytozome v7.0 (chr-ID scaffold0202 3; pos 999530 to 999832 reverse strand)
aggagaaggactcgaagtgtgtggtctggtcagttatctccacttaagcattgccattattttttgtttttcagttccaatttatcactcggaccgacaataaaaatttgagaacagaatggtgggttatggggaaaatccttcgttcattgtaggctaccaaattgtttttgcatttgatgtagtggggttttgttttaatcttttgggtaagattattttgtctgtttcttttcaaggaggtttgaaatttctcttgttcttagtgactgttttcttcttctgcaggctcactgattttga

SEQ ID NO: 64292 - DNA, 515 bp, Cucumis sativus
  Intron number 1 from transcript Cucsa.273650.1 (locus Cucs a.273650) derived from phytozome v7.0 (chr-ID scaffold0251 1; pos 712628 to 713142)
tctttcgcgtctctgctcacccatccttctccaaggttccatttctcactattccattttgttttatttacaggattttatcttctttttcttttttaattcccactttttcgatttctacttacattgtatgtattagctttgggtcgtttttatgtcggtgtgtttttttttctataacattatcaatctctcatccgtgtgaattccatttgaacttgtactataagtcaatcaacggcctgattgcaagttatatctagcatgaatgtctaataataatgctgataaatcatgggttttaagtttgtgatcttttgctcgacctcttgtggtcttttttttatatcgattttgatacttgctctacattgtgtcattggtaaattattctcaaccttctagacattttcatacaaaagttgtgcactttatatgttgtattcacgataacagatattttttttccttttgggtgctgttttcaggttcatcaggcatcgttatttaggaat

SEQ ID NO: 64293 - DNA, 394 bp, Cucumis sativus
  Intron number 1 from transcript Cucsa.257580.1 (locus Cucs a.257580) derived from phytozome v7.0 (chr-ID scaffold0222 9; pos 4822031 to 4822424 reverse strand)
ctcaggttcttattgcttgctcctatcttgttttcacgccctaatggtggtttgaattgatttgtttctgttctgatttattctcattcaatgcaactattaatttgtttagttgaaatacaacttctgctttaccatgagatttatctttagaatttgatgtcctgttcctagtttcaagctaattttgttactcattttctgtaaacatacgggtcgtgaatggttttgtaatgtgattcctctaaattgtgtgttggatctctataatgtgattcctctcattgttgatgttagctatgctatgtggctgcctcaaactcttcttgcttatatctgtactttcaatttttttgcaggcaccaaagcgctcaataacacccatttgcctgat

SEQ ID NO: 64294 - DNA, 1019 bp, Cucumis sativus
  Intron number 2 from transcript Cucsa.202340.1 (locus Cucs a.202340) derived from phytozome v7.0 (chr-ID scaffold0137 6; pos 392756 to 393774)
aaaccaaagattgctggcttgttatctctgggaaggttggatctctcttacttgattcttcttattcatcactagatcgatcagttctggtttaattgttgactatttcttatttggttggcaaaaaaagcatgtcctatgtttttggacgaggaaaaccaaaagcccttgctaaagaaaaacatatggctgtggctaagggctttaactctttcctaactctggattgtggattctcatcaaatatccactaaaagagtttttgatatagatgcagtagctttgggggttcaattcctttgcatgcacgttctcatatttttgttcacagatactcaaattcgaatatcttcttcctttttcttctttgttttgattcatataatagattttttcttctgtatacctttaatacaaaagataatttagtctcatttccttctgctctgtttgtattgtcctgatttatttggtatgccgcttatatgtagtgtacgaaggctatataaaggtctgacattgactaaagagtcttaagattttttttcttctccccataagaaatcataacttccattgagttgcttgttatattatgcttagaagtatacccatcccaagggttggcatgctgtcgaagaattggggttaaccaaaatggtgattggtttaaacccctttattggctaccttgtagagatattaaatttgtcacattcttggtgaatgtcgagagctttgggtaccaaactgagtttaaaatagtgataattagagatgaggtaatttagaaattctttaccagctctcgttaagatattttgagccccaaccactatggtttggggttgactcaatattaaaaaaaccacttaaattttccagaaccaaatgccttagggaccatttgttcaaaatgacgagatactaagctggcttgtatgagtagtttattttcagtggaagtagtgagatttcttttctcatgtttgattgcttatggcctttactttaggttt

SEQ ID NO: 64295 - DNA, 969 bp, Cucumis sativus
  Intron number 1 from transcript Cucsa.307760.2 (locus Cucs a.307760) derived from phytozome v7.0 (chr-ID scaffold0297 8; pos 8492 to 9460 reverse strand)
tgccccagataaagaggttagccgccttttaataattcgcaatgccttctgaaccgattgaattttgtctaaatctttttaggattgattaaaatatgtaattcaatgttttaggtgcagctaattgttcacttattttgtatactgtaatctaatcctttttaaatagttgtttaccaagagaaatttattaaacaaatttaggggcaacattgatgttccgatttgaaagaggaggtaggtgttgactgatgggaggggttgattgaattagtaaggtcgtaggcgcggtcgtagtaggtacagttggtgccggtggaataatctcttcaccggaagttccagagcttgtcacccttagaagaaattctttgaagaagaagccttgcagctgcgatactatattgtaaatggaagaatatagaagcacgtaaagagaaaagcgcagaaaagctcattgaagagcagtattcattcctgagaaaactagtgccacatacaagagctgataggacaacaaataatgtaaaagagaactgaaaatacaataaaaaaataactgaaagatccgagataacagaaaagaaatactgaaaacatataaatgaaaaaaaattcttatcaggattttatctatttgattgattgaattgtagaattttattaatctgaacttcaatcgtacataaaccaattgttcagaaggaaaaatatagtcttgaaacttttcattccactatttatttggtgcttcttcagtaaaattactttccaagtctacgactagttgtcaagagttgaacccacagcctttctttttttaagaatgaaattatgcttactagaattagtggacttgacaaaaaaagatttacctaattttctttccttttctatcataagttgtttttttctgggtactcgagtttgcacctaactcagtgtctattttgcagcctactatttggt

SEQ ID NO: 64296 - DNA, 820 bp, Cucumis sativus
  Intron number 1 from transcript Cucsa.194090.1 (locus Cucs a.194090) derived from phytozome v7.0 (chr-ID scaffold0133 7; pos 349845 to 350664)
ctctcatcttcaagttaattaatgaagctgtgcaaaaaattattttcttaatatgtgtaccaaaattgagctttatttggtttaaattcttgaaaattttcaatgtcagtgaaatgtttgccaaaacatgaataaattttcttatcatgatttgaaactaactattaaccttcaatttcttctttcctttcacttcctctaaatcttgggtttcttgtattagatttaggttttccataatatcaatgttcatttatctattctttcaaagtgggcactaaaggcatccccttgtaatttagtgtgctttgtagaataccgtgcacaacactacctcctgcaaactatgtcgaccaggccttgaggagaaagtaatgattgactttgtagagagtttgagaggcttttaaaagagatttggaccatttggtttaactttttgtcttgctttgtttgtttttaaaattttattattaatatttatatttctaatttaaaatattctcttggtcttattttgttggatttgaagcaatttctgtaggaaagaactttttggcagcaaatgttggtctaggcgattgctttgataccaatttggtttagactaaatgacagatcagataatgatccatgaaatctaacaaggatttcatcatgtaatttaaaagaatttaacgaaaactattaaactaaactaactcactacatcaactttgttatgtgaatggttgttagtctggtaactttgctatttttttttaattcttctactgcctgatgataccgttatgtgacagattcctgtctcaattaactg

SEQ ID NO: 64297 - DNA, 691 bp, Cucumis sativus
  Intron number 1 from transcript Cucsa.307530.1 (locus Cucs a.307530) derived from phytozome v7.0 (chr-ID scaffold0297 7; pos 630469 to 631159 reverse strand)
ttttagagaagcttcgacctgcttcgacaaaataggtaggagctcacgggaatcacttgtatgagctttctgaacagttgttttgaaagggcgacgtattcgagaagtctgtcgtttcgtttagtttttttcgtgaggaaatttcggtgaaggaaaagagtacagaaatgaatttgtttgtttgtttgtttgttcctgtgcttctgttgaatgtactgaggtgggataacgtcaatccagtattttcgtttttaggtttgtgtcacagttttctcagctggaaatttgggtgtttttcttttcttttcctgtaaaatcttaatgaactgagaaagttgcgacccccattagtctgatttttttttttttattgtttttgataatttgatttgaaaagccaaggatttgatgttttggtgttaattggtatggtggtactttcaacttttccttttgagaagagatagaattgagtaattggaaagaatttttgtttatatgtatttattgttgtttctactgtcgtctgttgcagtttgtctgcaatatcaagtctcggtggttattgccttagcttgaattctttgaaattaaagcaggttttcaagaagctactttttgactttttttttccccacttttttattcttttgcagggttttcttctttataaaatcatctctttccgtaa

SEQ ID NO: 64298 - DNA, 586 bp, Cucumis sativus
  Intron number 1 from transcript Cucsa.163740.1 (locus Cucs a.163740) derived from phytozome v7.0 (chr-ID scaffold0114 6; pos 182093 to 182678 reverse strand)
ctggaactaatcaaatcaatctcaacgaagctagggtactactactttgatttaattcattttttgtttctaattttgttatttcccatttgggtttcctctcttttgccctctgtctctttctattattagctgatcaatcgttgactctgattttttatcttcttcttcttcttcttccttctttttttttttctttttttttcctttctctattccttttttatgggtttttaaaaaaaaataaattttgggtttctttgtagctgtttgtttattaattcgatgtgggtttttcgagttgatctgaaagcatttagtgtttgattttgattagggattggccgacaggtttcttgagtgtttatatgttggtctaagctgaaatgagaagtgttttttttatattttttttaagctttattttgtttggtttgagtttatttatcttctgttgtttctctgtttttggttgatttaattctgtttctctgtgcttatctcttttgaaaatacccttcggagaaatggtatttggttatttgatttggggattatgttttgaatatgcttgtttgcttcatag

SEQ ID NO: 64299 - DNA, 784 bp, Cucumis sativus
  Intron number 2 from transcript Cucsa.141850.2 (locus Cucs a.141850) derived from phytozome v7.0 (chr-ID scaffold0107 9; pos 213889 to 214672 reverse strand)
ggtaatttgttgcaacatttatctatcttttccttgttcagtgtgtttgtttcttcccagttcacatgcgctcttgaagaaaccctcccagcaaatcattttctgttgaacttttattggatacatgaacctccatcagctgggctgtggttttgggtttattgatggacttgtgtgtgttcttgggatcatggttgaacctatatttgattgatttacagaaaaaaaaaaatactgtaagagtattgatgtaattgaatttaccgtaagtcataatcttaagtttttggatcaattggtgacttgatatgacataagagttggtatgttcaaacatctgcaatgctattttctctccgtttaatatgatttttacttgggtcttctacatatttcaaattcgcaagtagaaggaagtgttagagtgttgatataatattaaatttagaaccatcaacttaagttgttgggtcaatcacatcgtctgtacacaccctattgttaagaaaatgttgcgctcccagtgtgttctctaatatgaggcatgattgttaaaacaagttgtctggcgaagttgtgtaatacatttctccccatgtgtgactgtaacaaaagacacaagacagttgctcagtattttcccataaattataccatttctttaacgtgccatgaattacccatcactgccaacaactttgacttgttgaatgtacattttcgagttttggtttggtattggtaaaaattattatattccaaacaatctattggtatgtcaggc

SEQ ID NO: 64300 - DNA, 532 bp, Cucumis sativus
  Intron number 4 from transcript Cucsa.197250.1 (locus Cucs a.197250) derived from phytozome v7.0 (chr-ID scaffold0135 7; pos 711187 to 711718 reverse strand)
attctggcattcctaaagcactacggaaacttaaggttgattcttttgttaaaattcatatttagttaaaattcaaaaaattaagtggtgtcatttgtaataggaagaagattcgaagggaaatagctcctccgctatagatgccaatgaccgttcaagtgtacgtcgaattgttactaaagctatcttttttcttttgttatatgtgaattatgttttgtgtatgagttgatatgtattagtcacaaattgttttgtgtatcagttgatagatgatgaagaagaaacatgttcagatcttacatctgtgagccatgattcaatctctgtcatatctaaatcttcaacgtcagtgagatgtggtatacggcaaagtttttgcttcaattagattaatttatcatttgaaactatggataatcactctcagggatcattaggatgttaatttcgttttagtttcgttctcaatttttctttttcaagtggcatcagagaatcggagggaaaaatctcttgcactattaacgca

SEQ ID NO: 64301 - DNA, 1008 bp, Cucumis sativus
  Intron number 1 from transcript Cucsa.197900.2 (locus Cucs a.197900) derived from phytozome v7.0 (chr-ID scaffold0135 7; pos 1101895 to 1102902)
actacatttgggttagttccttttttctggttcttgattcttctttacttcttttcttttaattcactgtgatggaataactgggcactctgtctttgagttggctcacatgcacattttcttgtttgctgcgaaattcaggtgaaaattcaactgtttctttgttgtcttgctgtttaatgttaaacgagtgagaaataggtggcgggaaattttaaggatgtatctggaccgtttttttgtttgttggatcaattatcttgttctttaagctaaatgcttcaactttagttaataaaggaaaaatgaaagtagtatttttttttctttctgggtcaaaattgaatcgtttctttcttcagaatatctgatcgtttcgtttgaagtgtatgcttgctgtgacttgagcttgactgggacatccctggttgttttatgagaactaaaggatagagttgttcaatctatatagaatagatcatgttcaactttcaagtagtagtagtagttgttcgtttttttttttttttggttattttttaagcaaatcattaatggtttattcactgtttgattggtcgagggaaaagggagagagagaaaaaattccaggtcgtaaagttgtttacaatatacttgtttcgatatgagatattgtaggatatggcatatgaaagctgtcaagagctgcaatattgagcttgatggtgattagaaagaatgaaatggtgaaatattagatctaacggctactgtagggttatggctagcttactcgagccttgacccaacaagttcatgttggctgatgactgcaatttccggtcaaagaagatgcgatttaagtcagtagctgaaagaatgatcgaaaagctgaaaaattatggcaattatccttttagtattattactggagatgaaagctaaaggctaacatcaattcttgtgttgacgatttaatgcatgtcttgggatttgattggaggctttcaattttaatgcaggcca

SEQ ID NO: 64302 - DNA, 874 bp, Cucumis sativus
  Intron number 4 from transcript Cucsa.197900.2 (locus Cucs a.197900) derived from phytozome v7.0 (chr-ID scaffold0135 7; pos 1103640 to 1104513)
ctcgtaagaatatctaattgtttgggaccccaaagaaagatttacataacttccaaataaaaaaatccaaggaaaattttcagttgacataccaatatttctgtgaataggaggcgcaatgtgttttttctggaatatcatggaaatattaactacatgtcgagaatgtcaaccagggtgaggaataaattgaaaaataataattaaaagagaataaggggaaatctacagaaatgaacatctgaaaggaataaatacttgaaagggaaattaaaatagtgaaaaattttactgctacgagaccgactcaaacctgtcaacatttttgcttgtaaattgcatatttgcatttgttcagtcccatccttgaagtttgtcgaaagcagaattcacccacaagtctcataatagtgaattgacataactttttccagcatttctcactggtctaccaatttgttttccttaatgcttcatcttctaatgggaaaagaattgatgcttcattttctaattttttttctcatcgaatgttgcttgtttgcatgtttgtgcatatatgatgcaagtatctatctcctctctctatctttcttccactccattttttttattctgatttttctctcgatttatcctgtaatctgtgtttctaatatggacaagagtgaaaagtttaatcgtttgcttaagaaactgttgaagtttcattaatattttcatgaaatttgattccttaaacaaaactagctcgatctttataatataagtataaccgatgatctacaacaatttatctctttatcctttttgttattttaaaatacaatgttgaatgattataatttccttttaattttgcagctagaaaaat

SEQ ID NO: 64303 - DNA, 518 bp, Cucumis sativus
  Intron number 4 from transcript Cucsa.259730.1 (locus Cucs a.259730) derived from phytozome v7.0 (chr-ID scaffold0222 9; pos 6100347 to 6100864 reverse strand)
gatcttcgtcaccaggagcagtaagaaattattaaactattttcattgctgccttttacacctaataaatcaactgcgttttttcaggagttattaatacagaatagataagttatgaatggatgtgcgaattgttgtccttctagttatttttctctcttctcatttagacttcaaaatttcttagatgttggttttgtaattcccacacttgaagtttcttgtataaaccatccttttcacctaaattaattataacaggaacaattatataaagatttgcccgtgttcattgtaaagttctaatttattttattttcagaatctacatgtaatttttttttatattttcaaattttgatgtgttccatataattttatcgttgtattcattatggcgcttctcaactattttaaatatatttttttcattcttttcaatgaatgcttggtttcttactcaaaaaaaaaaaatgattgattcagagacattttgaagaatttgaagcaacataagg

SEQ ID NO: 64304 - DNA, 1070 bp, Cucumis sativus
  Intron number 1 from transcript Cucsa.226900.2 (locus Cucs a.226900) derived from phytozome v7.0 (chr-ID scaffold0191 0; pos 47212 to 48281 reverse strand)
ctacttgccttgcagcttaaaggctcaaagctcaagtatttcctttcaccttttcctcgatatgattgattttttttgttccaaaaatcatttctatttcatttgtttgttgtcaattcatgtgaattgtgctctcccaattctgatttctatacaaacttttcgttctttttccatttttatttcttctagctctatgatgttggtggactatgcaagtacgtgaactgtgtttactgtacgtaaatgtatgatattttgtgggcgttgaactgattttcttaaggaagtttgcagcgatgtgtcttggactttgtttttctttcaaaaatccaaaatcgaatacagccctctctccatttcccttctatcttctttcttctccgtcgcattgccgcagccgcatgccagcacgctctctccatcgtagtagcatccattggcatcgcctttttctttcttttcttcctatctccctgtctgttgaacttctccggcacgactgtgcacgggattcttgtacaaaagctaatcgctaagatttatacttagtcttctgtaacttccgatctctcagttagatcattgttaagttcgcacagttcaaagatatgttttctttggaaattcttaaactttcagttgtatgtctaactggtctctaaactttcaattttgtgtttaatgggttctataaaatttcgaactttttaaaaactacttgatctattagatttttatgtccaattgaactctaaacttccaattttgtgtccggtagatctttgagttttaaaatatatcgaagttcatgacctagttcgtgatctcaaaagtttaggaattagataatcactaacatcaaagtttagggacaagatttgttccatttttccctgttcatttcgttttctgtatgcttttagtctcttttgatgatcttgttagttattactctcatttatctgcagtattcaagtatttttcttcttcttttgtcttatgctaatgtatatttcttctcattctcaatagcatttgatatacagggcaaacatactgcatctata

SEQ ID NO: 64305 - DNA, 748 bp, Cucumis sativus
  Intron number 1 from transcript Cucsa.207450.1 (locus Cucs a.207450) derived from phytozome v7.0 (chr-ID scaffold0144 3; pos 276619 to 277366)
tctctccttcaaccagagcataacacaagtgaaaggtaaactatacccccccttttttccttttttctaactcaagtaattccttgaaacaattgcttggatctactacatttagttacgaagaagctcgtacgattttaaattttagataggtacgttgctacaatggtttaaatatttttcttttttctatataggaatagggaattttttttgatatatttcttattagcctttttagttttttcattagctcccctgactgctagatcaacctatgaaactctcataaatgggttgtaattttgaatccctataaaagatagtcatgttgagaagaaaggcatgagagtagctacaaacgatgaaaattttctttttatactgtttcctattccataatagacaaacaatttttaaacttgtcatttacaactccttcaatttttctcattctttactatttctttaacacttgttccactttaatgtagcctgatatgtgtgaatgtatgcattcattacagggtaagatttttatttgggtgataaagtacgaaattaatgctgtcacttcttttctcattgtggcttcaaatgtgatgatgaggaccacatgctgttcatgaacctcatttatttccctgaggttcctccattggattcctaccctccccatgttgtgatttttaaatttttattttcactttcaggtttggtgggtcaggaagcattgaaggaggctacc

SEQ ID NO: 64306 - DNA, 240 bp, Cucumis sativus
  Intron number 1 from transcript Cucsa.139510.1 (locus Cucs a.139510) derived from phytozome v7.0 (chr-ID scaffold0106 6; pos 721764 to 722003)
aattcccccactcttcttcttctccgactcgtagggtttggaactttctctctttcgctcatttcagtttcgttcttactgctcaaaatcaaagtattatgcgaaaccttagggttttttttttttcttttcttactgcaactcttctattctgatttcttatgagaattctctaatcgcgctaattttaatctttcgtcttttccattcaaggatctgagtgtgcggttgtagctatca

SEQ ID NO: 64307 - DNA, 794 bp, Cucumis sativus
  Intron number 3 from transcript Cucsa.288610.3 (locus Cucs a.288610) derived from phytozome v7.0 (chr-ID scaffold0269 8; pos 181433 to 182226 reverse strand)
ggccaaagattataccagagcgaagaacaaaaggggtatgagttttataataaacgtccagagtattgaaatataatgatgtgagtaaatttgcttaacttgttcgtgattaagtcaaaggtgacatatcaatgtaacactatagaatttactttcttcttttttttgttagggagttctttagatattattcatctaatttattttctttaatgtaaggtctatcttcttttcctacctatgaacattttccatgtgaaatgttttgtaagctagagattgtttggaatctccggcacccttacatgtagaaatttctaaagctgtgcctatgaagttggatgccttctagtcaaggagaaaccttgttgatttggttgcagttagattttaaggtttaaccatccatgtaattgttaatgttaattgtgttttggccttctttcgcacctctttgtcaaatttcgttttatttgtttgttgtgtttgttaaacatacaaatttgggatgtgtttcgttttcaatgtgggtataagacattcatttgtttgttcttcttgagtttggggtatctgcatttcatttttcacatttctcatcagttatcacaaatttgtagagtcttgctgccatcttatgtttcaattgtttttgtcttggggcagttgatgatagaattttccccatattgttacctttatattgggtttttcccactttcaatttgcaatttaaactgcagtgggcaatgtggcatcaattttaactattttaattttatagctgctataca

SEQ ID NO: 64308 - DNA, 932 bp, Cucumis sativus
  Intron number 1 from transcript Cucsa.239330.1 (locus Cucs a.239330) derived from phytozome v7.0 (chr-ID scaffold0204 6; pos 187856 to 188787)
ttcgcaaaaccctggtttttgagcttccatcattggtaagttttcttcatctatgtctttccaagctattcttcatacttaaaactcacttcttaatcacattgtttctgggttttcttactttctccattttggcctattgtttcttcattgggttctgggtctatgtatctactacattgtttctgggttttgcttaatttggagcatcgaccgttttttgttcgtcttctgctccgattaaggacagtttaatctcctctgtattgggagttttgatatcttaatccaataatctgttgtataattcttgtttctttatttgattttgacaattgggtggggttttaagcttcatggcatggtcctggctgttgggttttggttgataaaccatatgatcttctttcagttatggggacttttgttcagatggacatttcattttcaggcccctaaatgattaatgacccgtccctaaaaccaaatgagtaattgaaggagtatcgcgttagctctcccattgctaaatggttgttgccctaacccaatggtcatgtctattgcgattttcattttctcacgccttggtaactttggtgtgctttcgctttggaatgttgtagtagagcagagagaaaatgaagattgcaatagagatgacatggccatcatgttagggctattacagaagagacgtttctagcatgattctatataaaatgctgaattgtgctttgacgtaaccagaaggctagtttttttgttttgtttttgtgacgggtggttaatcacttatttgttgaaaaatcttgagtgattgaatacaaagttcagtttgtttcatttggtttttcttcttttattttgtggaattgagagaggttaatatttatgattttcccttttcttctttcagtttcctcttgaca

SEQ ID NO: 64309 - DNA, 1017 bp, Cucumis sativus
  Intron number 1 from transcript Cucsa.160190.1 (locus Cucs a.160190) derived from phytozome v7.0 (chr-ID scaffold0114 4; pos 441390 to 442406)
aagcccagagccaacaaaccccttccttatctgaggtattttttcgcacctttcaccatctgcctccttctttcttttacttttacctgccttcttccttcttttttgttaattctccatggtaatgtattttcattgctcgattcgcaattgatttcgacagatcggttcttatgtggtagggattcttcaattatgaagagatgtgagattcttagtagtaaattcattcatttttattatttagaagaaattttgtagtcctgtggcaaattcccttgattagatcccccgattccgctgaaaatagaaataaatgagtttcatgactggatttctctggttggaatccgataaatgattggtgaatgcttcctttgggttgtagtttatgttactctctttatttcatttcttttgaaaagatcagtatgttgactaagtttgaaagaattggtaattatcactttcattgtttggggaacatgcatttgtttttcacccctcattaaagaaaaaaaattaattgaaatttggaaaataagaacaatagcccaactctaagcagaggctagttaatgatttcaccttacagctctgtaggagagaaggaaggaaataaacaagcttaagctgcctaggttactagggaattgaaattaattcgaagttaatttttgttcttaactagaactcccagtaatgaaccgtgttggttcatatctcaattggattgctatatgaatccttgggggctttgctatcttatgattttctttgttttacccttgtattttgattttacatggtgaaagtaaatttatcttaaaagcatagtgagaaacacttctttggttactatcgttctcatttaggggcatctttgtatagccctgtctccttcgcttttacgaattctcaacctgcttctaatgttccaatctaagaattgagaatgactttcttctaatttggctttcagcaatattccttgaaagaaaaagaggagaaggtgga

SEQ ID NO: 64310 - DNA, 683 bp, Cucumis sativus
  Intron number 2 from transcript Cucsa.207000.2 (locus Cucs a.207000) derived from phytozome v7.0 (chr-ID scaffold0144 1; pos 197814 to 198496 reverse strand)
atatagtatgtacaaaatactgtttgctaaattctaaattttatcctcataatttaaaagaaagaaaagaaaagcttgaatttagtcttctgtgatttgtaatcataatttaattcttatatagtttgataaaactctatctctaaattaaatatttattatacaaacatacactaatcgtaagaatcttattaaattatgtagactaaattctaattattaaaaccaccggaagtaaacgtgtatgattagatgtgatagttaaaaatcatttttattgtatttaaaatcattttgacaaactcttatacttttagatgcatttttattactactaaacttgattttgatgggttaaaagcattttagaatataattttaaaaataactaaaagtgattttgatcgtattagaaagataataattaggtgcaacattgaaataccaaacaaattgtcatgtagcacatcatcaatcattgaaagctgactatgctgcatgaagttgcagttaatctttattaatcactttaaacatgccataagtacttctggttttatttgaatttgtaatatcaatccaatgttcttattgtttcgaatgatgaatagtttgtctgatactgaaatatatatttaacctaaatttaagaatattttgttatggttaaatctgtagctaaa

SEQ ID NO: 64311 - DNA, 650 bp, Cucumis sativus
  Intron number 1 from transcript Cucsa.207000.2 (locus Cucs a.207000) derived from phytozome v7.0 (chr-ID scaffold0144 1; pos 198707 to 199356 reverse strand)
tttgctttcaaggcctgcagtttctcaagaagttggtaagaaaattccttgtttcgtttgtatatgatttgacttttcgtgttcttccgttcattcttaaattgaatgcaatgttctatattcgtctctttgtcacttttcttaaagaaaaaaaaagcatttttgattatattacttaaatttaggagggaaagttaaaatttaagggaacatgttatgaaaacttaagttcatagaaactaaaaaatagtttacaacaaataaatctagataatggattcttattaatcaggagtgcaagtcaagtaataactaaaaaggcaaatcaagtcaactaataagacactatcatttcattttagccttaccaacgagctaagaactaatttgattggctaaataaaacttcttttaagattctcgttagatggtgaaaaatatttttttaaaaaaacataaagtatatatagaacgtaacattcaacttaatccatcttccaaaactattttataaagtatacgtgtaaattcaaaaattgtaaatatgaaaaaatgggcattctaaaatcaaatcaatattagaatacaaagaaatcaatttaatcaaccaattgcttgccgttccattgttttccatgttgatgtagata

SEQ ID NO: 64312 - DNA, 645 bp, Cucumis sativus
  Intron number 1 from transcript Cucsa.164640.5 (locus Cucs a.164640) derived from phytozome v7.0 (chr-ID scaffold0115 3; pos 39564 to 40208)
tagccattgcaaaggaactcttaaggtacatcattatattttcaggactcgttgatagcttctcttttatgttatccttaatctttaactgttctgcctcatttgaacttcaaaaggaatggaaaaagttgaaggatcttttaattgaaaagttatagggagtgtatgaagaactgttttcaaaacaacaataattaagaaaagacggtgtttgggtaactatttttatttatcatcatttttcagcttttatgctacagatgatatgttcttctgaataattaaaactggtttttctcccacattaatcttaaccttaaaagccattcatccagttactaaaaatcaaaacagcaaaacagcctcctaaacaaccccttggtttcatttattatctctcctcttagaaccatgtttataaaactgttctctctctacctctctctggctcccttcttgcgagggttttcatggacaattagagtgagtactgtgtggtctttaaaaggtaaacagataaaatataattccagcttatatatacacacacacacactatcactgagcattttttggggggtcagaatgtgagtacttgttctaaaatgacttgttaaattctttcagctgagtaattattcttca

SEQ ID NO: 64313 - DNA, 882 bp, Cucumis sativus
  Intron number 1 from transcript Cucsa.258980.1 (locus Cucs a.258980) derived from phytozome v7.0 (chr-ID scaffold0222 9; pos 5693112 to 5693993 reverse strand)
tccatcaacccattcttcatctgacaaaggtaaaggtaattctttccttttcatcattctgtattctgtctctgtctcttttttctccgcttcatttattgcctgtttgcttttcttttcttttttttctttttttgttgttgttgttgtagaattcaactgcttaaatttctcaaatggggtttgcttgatttacatttttgttttttctttcacatgcttcttgtttggggtaatctgggtttctcagacccttaatgaatctgggttgtttttttttttttacttctgtttgtaattttaccttggggtcctataactctgtaacgcttccgagtacatcagagcagtttgggggcagcaatgaagaggcccccagagcttttctggctatgatggcccacattttgagaaaataaccttgcataagatgacccagaatttctgatgcttataataaaatagttggagataagataatctcagcttttgaaagatagctggttaaatctgagtaaggcttcttttaggccacaagtacttgtaaatatcgtaaaggacaaaagagctaaactgagatagatgccatgggagaaggcaaaatcattaacctgatgttttgttatgtgattttagtgtttgaggttgtgatcctatctgggttatatgcaaaatagaaaatgactatcgttttttaccctgtatttgtatatgaatttacctttgtcctctagtatggcttttgtgacgattctggagtgcgaaggatttgtcactaactctgacatttgacattggttctttttttcttttttcttttttcttttttttttttggctgattctagttataatcaagctgcgaattcaacgattacaggat

SEQ ID NO: 64314 - DNA, 900 bp, Cucumis sativus
  Intron number 1 from transcript Cucsa.219200.2 (locus Cucs a.219200) derived from phytozome v7.0 (chr-ID scaffold0165 8; pos 1060789 to 1061688 reverse strand)
gatgtaagttttcaataatagttgaagtggtttatttgattcctttcatttttttttttttggatgtggttaattgattgattggtaactttggaaatttctgtgtgtttggcctttttgtttcgtgggttcttgatgatttttggtgggtgtttaggtttcttagagaaggagtttcgggatatgaagatggctttttaattggaattttggctgcttgagatgctaggggataaattttaaattgtgtgcgcatttagctcatgattttggggatggggagaaattgttgaactaatattatttacaataaagaacaataaaaagtatagataggactaacgttcttatgttgaagcttatccatcaaataaagaaacacattgacggggacttttgaatggttgtgaaactagcgatgttaaatgttaaattgaggctctttcttctcatgaacacaagaaactgattgctcaaagcaacggagtgactgtaaaatgaaactgggtttgcttttttcattgaaacactatttgctactttaacctcctgcgttaaagttttgaaatatgatatgttgctctctgcatgggctgcttccaaggttgctctatcagtttctcattgggatcgttagtcttcagaacaaccctttttttaaacttataattctagttcatctatggttcagttgacgtgcattggaattgaaagtgcattttgaacatttcacaatcatatttttttacacaagataagcatgatctttatgctttgatgacttaattggctgttcgccaattatacttgtagcttttaatgttttaaatcctaaagaaaatcaatgctgttgcctaaatctccatatcttctattttatagtgattgagaactacaaga

SEQ ID NO: 64315 - DNA, 984 bp, Cucumis sativus
  Intron number 3 from transcript Cucsa.184320.2 (locus Cucs a.184320) derived from phytozome v7.0 (chr-ID scaffold0127 4; pos 54074 to 55057)
cacgaggttagatgattagcaagtttggcatcatttttatgaacttattaatgttattattacttatcatatttcctgtcatttataagggctggaaaggaactgttcttcatcctgagcattttattttacacatctcttgtgaattgtgattttgaagaatgcacaagtggagcaacagtactttaaaaagaattgtattagtttttatattagttagtatagttgtataacgtatcaatatacatatcttgtctttggttgtctttttactttcttttaattaaactacccttgtacactttctacatatgactcttcagtaaatgaaatcaactatcgtaattctttgaatccttattgtttacaatatgatataatatggtttttctcttgagtaatatgcaatatgaatatatggatgaatcttttggtgggggaaaaactaggggacagattccataaggatgtatatatcatatatttatgaatgtacatcggttttacaacactaagatagttttggagggttttcttctcctctcctaaagaggtgacaaatagtgaggtggtttgtggagcaagccttattttaaatggacaaatatttatagaaacagacaaatgagtaaccatattctattcatgtatcaacatatatattattgttatacaaaagaataaaacaaggctcgaacccatcaacttttgatgaaatagaagtttggattctcaatatcaacatcgtcatcatcatcaacttaaatttatttcttcaacactagtattacttaagttgtattattatttcatttcatgtttgagcatactaagatacgtttatgccatctaaacccgaatctgaattggaaagtggcatctcctttgtggaattcaggatagttgtttgtgtttctattactcagttcccctttcgatttggttgcagataatcagggtaactctttgatatttggttcgaga

SEQ ID NO: 64316 - DNA, 733 bp, Cucumis sativus
  Intron number 1 from transcript Cucsa.264770.2 (locus Cucs a.264770) derived from phytozome v7.0 (chr-ID scaffold0233 7; pos 29259 to 29991 reverse strand)
gagggtttgctttcttcggtgagtattgctctgtgttgctcttcttatgttcttcgtaaaccctgtctcaagttcatgtattctttgttcatcaagcgatattgagttgtttggaacaaacttgaggatttttcaaatagccccctgatacatggttctttaccattacttggcttgttgagcaaatgtgcatgtagttttagctcaaatcactgtaccttgatgttcgattttttttagtataagaaaccaatcttataaaagacattaaaaaaatatactcatacatcctccaagaatggctgcattcgaaagaatgatactaagctgataattacgagaagtttgacaaacggatgcccataaggaggctttaaatctcgccccctccatatttcttctaaggaattcaaattggaagttttcgttttcgttttcgttatttgtttttaggatttcgaatttgaatttcgtataattggataaagatatgaatgaacaagaaggaaactactctggctactgtggcatcaaattgaaccaaagccaacttaagtcgtaaatgtatagatctatttttttctatatggtagatttgatgtatgtatactcatgaaccaaggacatatgctttaatttttattggagactgtagtagtatcactgactgtacctcctttattatctttaataaataggctgcagtccaaattggaagatatattgttacaat

SEQ ID NO: 64317 - DNA, 788 bp, Cucumis sativus
  Intron number 1 from transcript Cucsa.138770.1 (locus Cucs a.138770) derived from phytozome v7.0 (chr-ID scaffold0106 6; pos 59540 to 60327)
atattctgatctgattcgtgtttcatattgttagtgatgatcattacttttatgggttatggatttttagaagattttgctgccagttctgatcttgataacttgtaatctttgggggtctatttgtgttttggaattccgagggtttgtatttttcaattcagccactgcaaaaacatttcatttatcctttgtaatttaattaataccgaggacttagaactctacaataagtggtttttgaaatgatacgagtatctgatcatgtgatttactgttttgacttttgaggttaatatacgtgcacaaaagtatactacttgttattaccttcagcaaggatgaatattgtgtgttacatttaattccttggagctgatcatgttttgtagaatggtgttacctatacaattgttctcacaccaatggtcccctcgagcctgttgtattaatcaattacattgatatgtctgtgtgtttagaccttgttcgttgatctagtagaaccagagtgattttattagtaaagcttgaaaagatttggattagattttgatgtttctgcacggtgagttggtcactgacctatggctcttcctaatagttcagactggttttaatggatatcaggtgctaccagatcagcttgagtgcatatctttctctgtttcattgcatccgtgttttttatggttcttttctccactcttactatattttcttttatggttcttgtttcttctatgggtatagaccaagggtactactagaaggagagttgacgacaa

SEQ ID NO: 64318 - DNA, 988 bp, Cucumis sativus
  Intron number 1 from transcript Cucsa.251310.1 (locus Cucs a.251310) derived from phytozome v7.0 (chr-ID scaffold0222 9; pos 428883 to 429870 reverse strand)
tcggcgttctctttggggacgctcaagggaatcaggttcgttttaatcttcccagattttgcttttaatttactttgcaattacttcatctctcgaagcctttagactgtagagaataaaattaaattagttcgtcttcgtggtgctgaagtttcatttaatatggttgttttgctaatctgcttagttaaggttttttttttttttaaatattcgagttttgaattgcaaggaaagaacaaattactgctttagaacgtgtggactttccttttccttttttgaaattaaagtttgaggaaatatattcattaagatttcttgagagtccttcgtcaatttgggattctcttacactttcttatgttttattgaatgaatggaaatttgatagtagaaacttataatctgttttcgaagatgtttattgttacatgtaatctattatttcatggttcgcaatcaatattatatatctatcacctaaaaatagttttgaaactaaaatcaaaattttgcttaagaacagcaggtagtagcactgttagtcatttaattcaacttaaaaattatatttcgtcattacagtaatctgtcatctaatcagaacctaagtacagttggtggctttaaacaattggaaacatagatgttcattgaatagataaaatgaacaaaatacgtaccatctatggttggtttttattcaatactataatgaaaatgaatgataaggacaaaagaactttgtatttatgtagtaggtttggttttgaacctattttctcttaatttttcttttacagtggtttggatctttccaaaatggttgaattgtagatatttctagaactctcttatcgagacatttaaagaagaaaagagaagggaaaataaatttctgtttgaccaacctttatagtttatgtttcctgttcaaattatgtttggataagaatgactaatttagaatttgaaaagtagatat

SEQ ID NO: 64319 - DNA, 558 bp, Cucumis sativus
  Intron number 3 from transcript Cucsa.152990.5 (locus Cucs a.152990) derived from phytozome v7.0 (chr-ID scaffold0112 4; pos 251930 to 252487 reverse strand)
gctgaacaggttttcttataatcttcatggtcataaatttttctgtattttctcttctgaatgtttatataataattaaaatcctaattatacctgaaaagttgttgatgtcaattaagaagatcaaaggaagattgaaaatggatgattaataattgacaggcactggctgtactgtgtgctaatctagagcccacaagaaagggggaaacttatatccacaatttaagtttttgggtttaattatagtttagcaatgacaatctatgaatcagtgagctctaatatgttgattaacctacagatcgtaagcttcctttcttctaattgtagatcttcgtttcaacctcttctgtcacccccaaccccgccctctccaaacaaaaagaaaaatcaacatccaaaaaggaaaaaaagagtagaaaataaaagaagtaaaaaggagggtgtgtagtctgattccttatcaaaagtgcctttagatataggaacttgtgaagttcaaaacaaagttaaaggttcttaatgcttttacagataaagcgggaaattgccacg

SEQ ID NO: 64320 - DNA, 469 bp, Cucumis sativus
  Intron number 2 from transcript Cucsa.149730.3 (locus Cucs a.149730) derived from phytozome v7.0 (chr-ID scaffold0111 0; pos 591629 to 592097)
caagtcaccataagagcttggttgatttgatacaggtactgtgtaccatttagctcagataattgttatgctagtttttagtcgagatagagaatattgtgatgttagggaaaaacaacgttttcaactctaatattcattttgaagactgcaatagatctttcttattaccttttatttaattggtttaaaactaaatcttccaaaactatctttattttctggctttactgtctggtactcaaagttatctttaatgtgctaatatcatctatatcacctactttttatgtaaaaaagaaatagcttgtgtaattctaaaatttcaacctgtttagatagttacatttggatattcattatattagattctgcaccaaccctgtattcctgtttcttatataaacaaaaatcaaaacttcgggtatgtgcaggaagactttcctcggaccccttctcctgtctacaa

SEQ ID NO: 64321 - DNA, 421 bp, Cucumis sativus
  Intron number 1 from transcript Cucsa.151930.3 (locus Cucs a.151930) derived from phytozome v7.0 (chr-ID scaffold0111 9; pos 252377 to 252797)
gtggtcgtggtatgtacttctcttttgtccttcgatttgttattatcattgttttatcttaatcttttagtgacaagaatctttggggaaaaggaagtttattgttttcaacaaaattatgatttttatcctttacttttaattcttgttgggatcactttcgttttgttctgttcgttcgatgacgctattgctctgtattgcttcggaaaggttcatttcttgctattggtggggtgtctgacttgtatttgttaagtaaatttcctgcgatcggatctaactgtgaagctaacattggatttttttttgtttctccctaaagacttacatgttcttcctcgtctcagtttctttattttcctttttgttttgatctaaattaggcggcggtggcggatatcaaggaggagatcgcgga

SEQ ID NO: 64322 - DNA, 790 bp, Cucumis sativus
  Intron number 3 from transcript Cucsa.193340.1 (locus Cucs a.193340) derived from phytozome v7.0 (chr-ID scaffold0133 5; pos 291320 to 292109 reverse strand)
cctgttgttacttttctacttgctcttccatttgggtaagtttaatctttccctttcttactcaaatgtcacttctttagttttcggatctccagagtgctcacaatagtttgtttgaaatgagttttcaacttttctaaaaagataatagttgtaaagtcatttcaaacggacctttcgagcatttgacctaaactgtttaaatttttgttcgttaaatttgaactcgtttgacaaactcgagattttcgacagtagttcgaactcccttttctcacttttttaattgcagctttttgaagttggacctagaatacatttcttttgttttctttatttcatgcttcccatactctttacttaactcctaagcttaaatgtgaagcttctcacctcaaatatcgaactttaatttgtatgtcggattgaactatattaattaagttgctaacattacttccattcgtcagagttaattttcttttcaatcttactttgaaaattcacattaaactacatttaataatccttagattctttataaagtgtgtttgttttcttctaagttcctaccctaatttcaaatcttccaagaaaactatttttcttagcctaaaacttaccttgagttttgaaattgtttgtaataaaatatttagttttaaaaattatattttgatttatgaaaatgtttttttcaaatgctaaaaactcaatttggtaaactctcacataacaaattttctttcaaacaggttagagtcagtgaagttgaaaagcagcagtggga

SEQ ID NO: 64323 - DNA, 972 bp, Cucumis sativus
  Intron number 1 from transcript Cucsa.285220.1 (locus Cucs a.285220) derived from phytozome v7.0 (chr-ID scaffold0265 3; pos 1636662 to 1637633 reverse strand)
atcaacaccctatttcttctcttatccattattaagtaagtccccctttctcattcttctgattattattggtttttctttctttctttttattcctatttttacttctctctcttcccctgtactattttgttttctcgttctttcttaattcagttcattcttaatttatttctgattatacccttatcgttatcagatctttcgattgctcttccatattgggaagatggctttgattttgatttcttgattttgatggtttctttatctgttattggatttttgtgggttttatctagattttgagatccgttttcattttgcccttgttttttctttttctatttgattggaagggaaaggcagttgctggggtagcttttaatttcatcctctctgtttctgtttgtttttttcttttcaattgttgatggttttttttctttctaggattagttttgcggcattgtgtttttaattatattactctccatttttagattttaaactccgaagggagatgattggtttggggaattcagtgcgagatttttttttctcaattctttttttattaattacttcaaaagttcctggaatttttctagataccttgcttttctttcccctcctcactagcaatagctgtttctcgggtatttcacgatttggtgatagaaaaagttaggtttctaaatctgtggctttcatctttttatataaaaaatttatagttttagtaaaaaagctgcattgggttttgattatatcgacttgtttctgtatttctcaacccccaccctcaagtttttgagtggatcttgagctttgatttattgattctttctagctgtgggattcttttatttattttttgactaggaaagagaaggaagaaagaaagaaacatcggatcggattggaattgtgaaaatttcgggctttatattggttgcatctgagagagat

SEQ ID NO: 64324 - DNA, 611 bp, Cucumis sativus
  Intron number 1 from transcript Cucsa.279710.1 (locus Cucs a.279710) derived from phytozome v7.0 (chr-ID scaffold0262 3; pos 8187 to 8797)
aacttccgcctacttcaggtttcatcattgacttgtatcttaatgagtttttgtttggagtattgggcatgatctcactggtcgttgatgatttgaagctttgagcttgttttgttttagatctctacttctggggtcttgttgttgtgtgattctagagcttattttaagttctcgcatgtctttgtatatttttgcatttagtagtttactgtactatatgttaatctcatgatctccactattcgaatcccaactcttagtagttgtgatttaaaacttgaaaattatgttgttgagcaaccattcaaatgcatgatatgaagatataaccggagcttttaatttctattattgcgttcgttcttattatgtcatagaagttggttttatacggaattatgtctagatctatttcgagatcagttgaattgttttcaccttcttgtttatcctttgaaattatcattatactagttgaattaacacatgttgttgtgctgtctcacatttgccgttagccactccacttcatttaaatatttgatttctgatgttggttacttttcttgtggggatcatcataatttcagaggaaagcacccttcttg

SEQ ID NO: 64325 - DNA, 495 bp, Cucumis sativus
  Intron number 1 from transcript Cucsa.172180.2 (locus Cucs a.172180) derived from phytozome v7.0 (chr-ID scaffold0119 6; pos 95578 to 96072 reverse strand)
ttaggatattagggtttcgtcgacgaccttttcaggtcgtcttctttttcttgctccgatgattttttttatttttatggtgtttttatgtgtgattctggatctatgtttagatcattaggattgtattaatttatcgtttttttatattttgtcttaaattttggttctcgttgttgattttacgtgctttgatttttcgttgacgacgatgtatgataaagaacgaaagacgatgatgccttggattttgtaggagtttgtttaatctcgtcttctctatgatttatggagcttttgtttttaaacttatgttaatggagacgctgcattacttttgattattgttttatgtatggatggagggggtgaattatggatttagggttttctttctggcgaaccgttctttatctcctgcacgaatgctaacatcgaagcctggttttatgatctgcaggtatctttgagtattaggtctcttggattaggaga

SEQ ID NO: 64326 - DNA, 519 bp, Cucumis sativus
  Intron number 1 from transcript Cucsa.241500.1 (locus Cucs a.241500) derived from phytozome v7.0 (chr-ID scaffold0204 7; pos 1487968 to 1488486)
agtgaggtcatctctacaacaacggggcaaaggaggtaatcaaaaaacaatattttagctaccttttctttatatatatatatatagatctatttgaatatcttctaatttttatatccataattaatattaatttgcagtttttctttcttttctttgtttttttgtttttttttttttgtcaacaattccagtgttaagcatgttattcagggttttctttttttaattccaaaataaaatattgaaaaacatgaagtcgtttgaaaatcaattttgggaattatagctagggtcatctttgctagtatttgatattgagatgttgataaaaaatcatggcttttgaatcacttgtctattgatgactttatgtccattttaatccaaagaagaaaaagaaaaaacaaacaaacagcaagctttgtatttctttagtttatttggttcatattctaattccttgtgtgtgatattccattagactagagggaaaggtggccataataaccggcggtg

SEQ ID NO: 64327 - DNA, 999 bp, Cucumis sativus
  Intron number 1 from transcript Cucsa.254610.1 (locus Cucs a.254610) derived from phytozome v7.0 (chr-ID scaffold0222 9; pos 2869505 to 2870503)
gctgttctcgacaaggcaagtttttctttgctgttcattacaatcgcttctttccatatctttaatttgttctgttctcctttttcatcaagagtttggtttcatctccgcaccaattggctttgcatgttcggaatttctgggaattcttggatgatttcttcttgaaatttaatttcctatcgatttacttgataatcttccgtagtttactctgctgttaatacttctaaacatcaagatgatgctgccctagactgaaacgcttgcatgttccttttccttgaaacgtggaactggttttggtttagacttctagtcaccttcatttttatctacttttccctggggaaaatgctgaaattccggtttggatttcggaatttcaacgccagctttggggcactggggggtttgtttgggttgatgtcttaatttctgtctattgtataattgtccagcattcatgcatgttcttcatttttcaaaatttcgggaagccttagtaatatttatgcctttgttccggtgttgatatgagttttctgttttggcctcaatgtaatattttgttttccagtttgctgtcagtatgaaatggatatctcgtgtattttatattaacggatgtgcacgatcacattcgaaatgaaaaaatgctttcaaattctttgcagtcttcccttttgtagtttgtggttataggtctgagcatcattgagctattgatgaaaatttaggtaggcttaaatagcatataaatagtgatgactgatggagatcatatgttcatagtttctctttttgtcttaaacggtgtatttggctatgcatgcatttgatgttgtctaataaattatgtaattattcaggactactcccctgaaatttgtccatgtttgacccaattgtgagccctcgtgtgtttgtaactatcgttatgattacaatctcttgaaactttcgtttacaggatccaagagaggaagtgattcaggc

SEQ ID NO: 64328 - DNA, 570 bp, Cucumis sativus
  Intron number 1 from transcript Cucsa.205180.2 (locus Cucs a.205180) derived from phytozome v7.0 (chr-ID scaffold0141 6; pos 305282 to 305851)
agcctgtggtttacgagtcacctccatcaaaatcggttctcttctcttcttttcacttcttcttttgcttcttctttttcattttactacgatgtatctcatcctctgttcttttgttcttcgtctgcggtttttgattcctgctgcatttccttcctccacctctataatgttgttgctttttatgactttcctttcctctgtaaacttgtttggtttcttctgcatgttttttattctatttatttgattttcagcagtgtttcttttcggatttttgaaatttttcatatgcttctgttcttttactctatgattatgattacttagttcttcatgttggcttgctgataacgagtattttacctactttattttttattcttagaaagcgtagttttgtttttgtttttgttttcccgatcatttctcagtggtctggcgatggtatgcatgtctgtttaacttttatagttgataggagaagcgataatggtacggtttcttgcatgtgtctgagttggtttttaatgctctgttgtgtttgaattttcagatccgtacttgaat

SEQ ID NO: 64329 - DNA, 1000 bp, Cucumis sativus
  Intron number 1 from transcript Cucsa.202060.1 (locus Cucs a.202060) derived from phytozome v7.0 (chr-ID scaffold0137 6; pos 220033 to 221032 reverse strand)
ttgaaaaagttcccattttcactaattaacgcctggtaatcttctgctctgctttgattgttcttgctctgtaatccttcatttctctctttctctatgtttgcttttactttactttgatttttgttgcttatatgcattttctcctctttccaccatctgggttctcgccgcagctattgcgtttgtttgttcgtatactatattattattctctcgtcttgtcctttcattcttgtatgacggtacttcttcttgttcttctcgtctacgagtagctggacttagtcctgcggggcttcaacagaaattcacatccaacgtggagttacgatatttttttagtttattttcatttttaatcgttcacccatgttgttgaagagatttttggttaacattgttctgtttttatttaagcttcggaaaatttgtttatcacatcaaatgtaattttttttccaaattttgggtctcaatgcatcgttaaatggtgagggaagggtgtcatattccttacagtgtcttaatattctgggtctaattagtggttatttctgacgttaaatcaaaaggaagaagggtttatttagaatcaaatttctttgatatggtggattttaatcgaatcagtctctcggcaaaggaaaaaaaatcgaatcaatgttgtgatctggaagttattgttttcctttgagagaagattcttctaagtttcctttttaagcaataggttggtttaaataaaatgttaaaccagactttagatttcgttttggtattggtttattatcagctggtatatttcctcatgctctgggactacttctgttcaagattttttcactttgttgtaacttcttattttggctgttctgatatagtgcttcataaaccttttaactatgtgatgaagatgattgcttgaacttactggtttctttctcattgataaatttgaatctttagagactggagctcgataagaaaaggatcattt

SEQ ID NO: 64330 - DNA, 585 bp, Cucumis sativus
  Intron number 3 from transcript Cucsa.185200.2 (locus Cucs a.185200) derived from phytozome v7.0 (chr-ID scaffold0127 4; pos 772513 to 773097 reverse strand)
gagggattacttcacgaaaggtaatcttgaaactaatgacttttgtttagatttttcatgatgcgggtagacattcttcagttgacattttcatcctaccaaactaatgtataatgtgataaggttgctggctgttataagtagtaatacatcaaggcatttactcaaaattaactgaataaaatcatggattcatggatgagttctctatgatttacttgtaaaaatgaatgtgacattttgtctctttggttaattgttaatccagttatgttttaatttctttggacaggttttctttaacctaaaaagttcacaatttttttagtgtgtattttttttgttttttgtcattgcagtagttgataagaatcatgactttgcaaatgattaaatttgtgcgcttttttctgtgaaattttgtggatggtgttttttctattaattagatgtttgtttacatttgttcgagcccttaaggacgtttgcttttatattgtgtgtaaattaacttttctatcaactaatgccacagatggactttgcctttcacagttgtcccaacggctcttggaacagccttgg

SEQ ID NO: 64331 - DNA, 663 bp, Cucumis sativus
  Intron number 1 from transcript Cucsa.177430.1 (locus Cucs a.177430) derived from phytozome v7.0 (chr-ID scaffold0122 5; pos 1448495 to 1449157 reverse strand)
cacaccaattgcttcttcctcctccaaaccccaaggtattcctttcaattgcttcaattcctctgcttttctgcttaattttacatctttttgtcaattttgattcaagctgaagattttttggttcttgcttcgttgcatgtaacaataatacgtttctgaatttctttctgttttttttttaatttaacttgtggaattgaacactacccaatacttctctcttaattaacaagtgtttgatgtgaaatcacctctagattttaagctgaagtacatgaattatgggtatattttgaatattccttctcttccagctccgatactaattggatttacgaagcccactatgtgaattgttagttttgatcaactgggagagaaaattacataataaggattagaacacagtaacttctgcttcagtactatgttagtttgttattaataccaattgctctagctaattggttgttagccgttgcaatttcagctgttaagggttttgaggagttgaagattattatgatttctttcactttgagaaatgcatcttgacttcttcattgatttatgctagagggtttcctttattcagtttgtgtggatgcatttcatttttgtgaagttatgttattaagtttcctactgatccttctccag

SEQ ID NO: 64332 - DNA, 895 bp, Cucumis sativus
  Intron number 1 from transcript Cucsa.198370.1 (locus Cucs a.198370) derived from phytozome v7.0 (chr-ID scaffold0135 7; pos 1442612 to 1443506)
tcaggttgttgattcgattctttctttatttgcttttatgagcattaatttgaatgtttgttggattgtaatactgacttctaattgtgatcattggaatttggattttagttcgtttgattattgactgtaaatctgcttttgtaattaagtagaccttttataatctatgtccacgagtctagactttaagttgcagaaagagacttgttttcgaaaattgacgttggttttgaatgaatttctaggtgcttaaaaacatttttttttcgcttaaaactacttctccaaatattagaaacttattccaaaaacacccttcaagtacttatcttgattgtgagtcttgtgtgtaaaagccaaaaggtgtcttagttcagattgagttttcaacctaattgttgcgaggcaacgacgtgaatggaacagaataatggtggaaattttcgttattggggattctcaaactatatgctttttttttttttttgctgtacttactggtcggaaaaagttggtagcctttctattcaatttattactgaagatgtaaaattccaagccttttcattggttttgaaagagtaaaggtattcaaaataacatgccaacataaagtcttgcctaaagaaagagtttgtcgttggtctgtctttgtgatagttgtttaagaatagaatcaattttcattgatgaatgaaataaatagtcaaactcccaaacaccttagtctctgtgttacaggataagcttccagttattgatcaaagaaaaaagactagaatgagaagaaaagagggggaaaaaagtgtctttgtgggagttggttcacttttcagtacttctgcttcctaacctaagtttttcaacttctgtaggaatcaagaagaagttg

SEQ ID NO: 64333 - DNA, 645 bp, Cucumis sativus
  Intron number 1 from transcript Cucsa.185560.1 (locus Cucs a.185560) derived from phytozome v7.0 (chr-ID scaffold0127 4; pos 1059831 to 1060475)
tttggttacgacgttggtgtttctggtgagtaaattcttctctaatatttcataaaagttattcaatatagagtcaatacaatataactttttcttccaaatcacaaacttttagacttcggtatgtctaaaattttaaaatataggattattgtcattatgattaatgaattttttttccttttgaaatgaaagtcaaaaggatgtttgttatttgtttggtgatcagactcgttctaaaatatccttatataagaaaatttggtccttttaaatggaaaaaaagttagtttttattttgttttcaacttttaaaaaatcaagtttagtcattaagattattaaattttgatagtttcttacaagttggaaaacaatccatttcaaaaaactagaagtactctataattatttctgaaaacttgcttttatatttctaaagtttattttagacaactttcattaatatgttatacataaaaacaatctttttcttgaattgaatccaaatacacccttaatctattaaaaattaaagatgaacttatagttttaccgtggaaattagagaaagaaatgaaagaaaattaggaaatgatttccttaccgttttatttgattaaataaacaggtggggtgacgtcg

SEQ ID NO: 64334 - DNA, 201 bp, Cucumis sativus
  Intron number 1 from transcript Cucsa.284770.1 (locus Cucs a.284770) derived from phytozome v7.0 (chr-ID scaffold0265 3; pos 1392652 to 1392852 reverse strand)
tcccaataataaagatttctccaggtaaagctctatgaatgaacgctcttctttcttgtgtttttctctgttttatttgattagggatttgttgactctgcatttccacagtttcttaagcaggtcggtggattgtaatcattctgacatttttatttttattcagctccagaagggctacgactgaaaagcagtttgcca

SEQ ID NO: 64335 - DNA, 772 bp, Cucumis sativus
  Intron number 1 from transcript Cucsa.284710.1 (locus Cucs a.284710) derived from phytozome v7.0 (chr-ID scaffold0265 3; pos 1361631 to 1362402)
cacggcgttctccggcgttccttcatcctcgtaaggtctgaaaattaatactcgacttcctttatcttcattgtcatctgattttgttggtatttctcaaatgcatggaatagacatagatttgcggaagaaggaactaggtctttcgttagctttgcaattggccttttaattgatatcgaacatgtatgtttgctagttattactctctggaatttgattttgttgtttgcctttcatccatttctgtttttggatcggtacctttcggctatatcttctcgtgattgcagtttgtggcttctttcttcatttctgacggcagtgttcaaatactagctgtttagctgcttctctagatctttataagttttatttgttgttttgaatgtgattttaaattcaacaatcttgatgacgcttgaacatggctccgggcttctcggttttaataggtttgaatttcatttgttgaggtgccttagactctgtttcttgatagttgcaagatctataccgatactggtttggtttccttaagttacgtcgttggtgtgatgcttcttatgcgttgtccatagatgttcttaggcgctatctatgaagaatttttgaattttgagttatttcattttgctcaaattttactgaatcttctgtatcattggtatggagaaaatttagaacgaaggagtaacattctcgaaaactttaagaagagattcttgtattgaactgcaggcggacctctctagttttgttcatagaagat

SEQ ID NO: 64336 - DNA, 922 bp, Cucumis sativus
  Intron number 1 from transcript Cucsa.202130.1 (locus Cucs a.202130) derived from phytozome v7.0 (chr-ID scaffold0137 6; pos 281209 to 282130 reverse strand)
ggcttagagaaagagacagaaacaagaggtgagttgattttttagcttcattttcaatatcccatttcagagtttgttgattgatgatgggtttctttattcgacatggatgatcatcattgatgattctttttgtttttttgattttcgaaccagaacgatagaagtctatttcttaccattctatttggagctgcaatactctttttcccattatttttcataaactggaagaaagtgttcttcaatctgttcttaaagtcaagtgggtcattttcactttaacgcatgcgattacgagttcttttgtggatgtttgtgctttgtgtttgatcaataagactttgaaactttacgctgtttcgaatcatgggtttctttttgttcctcgaattgtaggttctgaatttggaaggtcaaatgtttagcccaaaatatcccagtttccgatctctctctctctcttttcttccgaatttgctggtttcgtggaatctagttctgattcttaattctggaatctgaattctcatccctttagtggttgatcgttttcgtcggcttctcaggtctgattgatttgttcgaatccgggccttgacaaaaagttgcttctaacttttgatgtcaagtttctgattttatcattcattccaaagattcttattcgtggtggattttggtctagtgaaaaagtgttttgagtgtactctcattgtatttgattggatcccgtgggtgattcattacccttttgattattcgagcttcttaaaatgtactaatttgatgaactatagttcttaatttcattaaccttttcttctctctgtttggctgttgaagaactctgaaattctggaactacaattctttaatccatgccatcgttgctttcattcattgcaggttgtggagaatc

SEQ ID NO: 64337 - DNA, 991 bp, Cucumis sativus
  Intron number 2 from transcript Cucsa.165880.2 (locus Cucs a.165880) derived from phytozome v7.0 (chr-ID scaffold0115 3; pos 1189325 to 1190315)
aagtttataaaggacgattggagagcataaatcaggtagattttaggtattttttcccttcatgggagtaaacatgacaatggttgtcagtcgagttcattgctaccttagactcatattacttgacacattcacacagcttacccattctcaagtcaagtttgtttttgtaggttaaccttctattgcttcatttcttcatccaagaagtcttgtaacattggatatctatcccatctatgatgcaagatcaagcaatcctaaatgttttaacgtacctatcttattctaatggatgagttttggtttaaagctttttaccagtttagttgatctcactcctatcaatggtgtcattcaagaaaagatagaagtttagcattcgtcagtactcttcgtaactgataatgatgatagctaagttggcattagcactagtcactaacttttcaccccttgcctgttctgttgatcttattacagttcatactgaatattaaatcattctatatcaatgctttattggtggcacatttgtaccaaaaccattcagccattctttggtctgagaaataattaaattttttatcttgagtgcacttactttgaggaaatgtctgcagaaatctgcagtcactagcaaaaagatttttttattgtgattgcatattgacaaaagtggagttacaaatttttggtattgtctatagctgcttgattataaagatgtagaattgagtgctctctctcacctgcacgtattgcaccaacaaaaaaatctaaagagtagaggaaatgaacaatatatctaatttattgcactggtttggaagtttttatttgaaatgctgcacaactttttaatttccagacagcatatactgggagtaatcttcaaattcatttttaagcttggttggtggtgcaggaaggttctgatcttcgtaactctgttgaatgcaggtagttgccatcaagcaacttgatcgaa

SEQ ID NO: 64338 - DNA, 907 bp, Cucumis sativus
  Intron number 1 from transcript Cucsa.192540.2 (locus Cucs a.192540) derived from phytozome v7.0 (chr-ID scaffold0133 3; pos 405512 to 406418)
aaacatccatttcctttctgcctttcagctcatcggtaaagggtttcttctgtttttccctcttctttgattggttcgtatttttttttttttttgatctcttctagttgaaatacatcatgggttttgctttgttttctgtttgcttattagggtttgcttgatctatgcatgttgtttttttctcttttcccttttctctgttttcaagtttgtggaatcttttttcttcctggattttttatttttgtgtctcattttgtcttaagctctttggaaatcgaatctgggttatcttggatttaggtttcctttttctgtttggtgaagacggtggagcctcttccgttggtggtggttttccagatttctgtcttggccgatcgtattataagggttgggttttagctagggtttctttttttctatgattctgtttttgctttttgggttttgattagctattgaagctctaggaaacggcattagggttggatgttaagataccttatatgtttgccccctttcgattgaaaattttcaagtcaagatgttatttttgctgtttgggctgtagaacaacatgatacttgttgaatttgctctcaggaaggtgtattattattattattttgttcttttggagcaagagttctgttgaaatatctgttaaatgttgtgtaaagacttttgtctttttggagctactagctgagcttcatcctttggtgttttttcactttccttttacattatcctttgttttgcgacagaaatttctttgaatccttttatatttgtagacttgtttatgctctattatgttattttccactatttgcttcttcttacatttttaccaactgttgcaggttggttacttctttagataagtgactgtattcag

SEQ ID NO: 64339 - DNA, 257 bp, Cucumis sativus
  Intron number 2 from transcript Cucsa.272290.5 (locus Cucs a.272290) derived from phytozome v7.0 (chr-ID scaffold0250 0; pos 920276 to 920532 reverse strand)
tctttgacgccgtggctgctcagcttacccccaaggtttttctttttattgtttgaaattgtacatgatttgatgacaaagggatcaatgtattcgaggaagttggtatagttcgaagaaatgtatatgttgaataatctatctcagttttgagtaatcataaacaacccatattcattttgcttcttactaacagaatagaaacattttctttcatagcaggcagtagcatcaactcctgttagaggagaaacagt

SEQ ID NO: 64340 - DNA, 871 bp, Cucumis sativus
  Intron number 2 from transcript Cucsa.232080.1 (locus Cucs a.232080) derived from phytozome v7.0 (chr-ID scaffold0198 9; pos 189523 to 190393)
tcaaggtagcgaacttagtcactcattgattctcacgatttgcttttatctttaattcacaatatatctggtcgtgtttggcgaaatgaaatcatctgctccacggttagacacagagttacaaatttctgaactctttttcaactttgattcttcctgacaaattatttgcactgaactttcgggattttgtaatagaaaaaactagtgtataaattgaaagcaaagattaatatcacttatggaataaatatttgaaacacaacatttagggacaaaacttatgatttacacgaatacaaatctcttagtcgctaaaatgtgcatactatatgtcattaacattattgataactggatgctgcaaatatagctattattttccatatcaatatatattcaagctcaccgtcttgaaaaggtaaaaattatgtttaattttgatatttaataaaatgttgatattgatggaaaagatctcaagttgggagaaatgttgatgaaaaaatcggtgaaatgaatatttatagaaaataataataataaacaaacaatttacacaggtaaatgagctcaaaggtaaatgtatttatatttgttcccattatcactgtctttttcattttaagttatggatcattgattctttttaaggatataatgaatatgtcgactcagttcttacgttaataatcggatgactattacacatttgagaattttcaaaaagaaaaacaaaaaagaaacgtagatatgaaatgctaatatttgaaatgaaagagaggagaaaaagatgatagttgagaaagtggtgttgcttaatttggagtacgatggatgcagagatttttcccatcggagtttggagtgg

SEQ ID NO: 64341 - DNA, 392 bp, Cucumis sativus
  Intron number 1 from transcript Cucsa.197630.4 (locus Cucs a.197630) derived from phytozome v7.0 (chr-ID scaffold0135 7; pos 960594 to 960985 reverse strand)
tctctaacctttcatattactccttcacttcccaggtattgtctcttattcatccctattttgtttctctctctttgttttcttttcttatagttttcttcatttcctcacttgggtctctttgttttttcacaattttccatccaatatgcctctttgctgacttttcactttcaaaatgctggaaatttcggttttttgttactgcaaatgctcttttcttttatgttgagtgtggagtagcaattgccactcatgcgatgatctaacgtatgttttgtataatttcttgcgtcggttgaaatgaaaaaaatggaatttttttttatcaggtcttaagttttacattgtttttgctttgttttgattattaagatatattggtaggggtt

SEQ ID NO: 64342 - DNA, 334 bp, Cucumis sativus
  Intron number 3 from transcript Cucsa.169830.1 (locus Cucs a.169830) derived from phytozome v7.0 (chr-ID scaffold0117 4; pos 33362 to 33695)
atttgttgaagaagatcaaggtatgctgcctcatcttcttgcttttatttgaataccttttatgttttgtactgcataccagatgtttgttgaaatgcctctgaatggaaatttgcttttcttatgctaaaattagaatgctagctatctgggtccttcttgtatcgagctttttgagattttgtttaattttggtaacataatccaagaaactacataaggaattctgaaaagtaattttctagtcaaacaaactgagccttggaggtctttttgaagaagtttctctggttttgcaggggtctacagctctgagaaacatacctgttgtgat

SEQ ID NO: 64343 - DNA, 582 bp, Cucumis sativus
  Intron number 2 from transcript Cucsa.239510.1 (locus Cucs a.239510) derived from phytozome v7.0 (chr-ID scaffold0204 6; pos 304428 to 305009)
gtcgtaagtaacatctcttgtttgtaagcccgttagttaccttctgtgttgaatctgaaacgttgcctaatatatttgcaagttatttttcttagctgtcgtcatttataacatgtcttaagattcttttgatgcttcaaacattcaaaatgtattgcagcagaggctttattcctgaatgccgtatcatttatacatattataggtcaaaactcattttgaattagtgataatctagttctttctttccaaccatttggtccgtccttctactatattaatttataaattgattggagatcgagtttgtttacaaactataaagactaaaccattatattataaaatcttgaaacttaatttttgaaaagatttggaagtattaagactagttaaagtttatggattgaattattccatgtaggaaagtttaggacgagtattttttaacctatttacaattctcttgttctgaatctgaatgcacctggacataagcttcattcttgtactatttctttattgactgtcttatgcaacataacaggtaaactaccatccaggtctcgagtagtgcttcca

SEQ ID NO: 64344 - DNA, 763 bp, Cucumis sativus
  Intron number 1 from transcript Cucsa.255850.4 (locus Cucs a.255850) derived from phytozome v7.0 (chr-ID scaffold0222 9; pos 3656486 to 3657248)
acggcggttcttctcctccggctgtcaggttggtgggttgctctgtttatattcgattgttggtcaaagagaattgatatgaaatgagtttggtgaatgagcactgtcaagagtaatgaacttttctctttatagaaatgaggaatatttagaatctttgattcttaattcctcaagctgaaatcctaaactgtttgttagttttgcatttttaattataccagttaactgtagaaaatagatggtctccttgttgcactgttagagtagaaatagtaatcgatgaaccgttgtctttttttataggatcttccataacatgcatatgttagaagtgtgtatgatcctgttactatataaatagtaatcgatgaactgttggcttttaacaagatcttccataacatgcatataaaaagttacaatttggttaaatctcacaaaatctccattttagcgtcattaagatccgtctgagtcttgctatagagtatagattggctgcacaaattcatggcaataccaaccaagtctcggttgtcttgatgtagggagatgggatgttgatctaagcattccctgatgcttactcattagtcatgaaactggatatcctctttttatgttcatcgaagctcgtctttccaattgattactatgaactattctattattctttgaagccatatcctcatgcttttcgtgtttttctatttgttttcatttttccttttggatgaaccggaagcagtcaggtggtggg

SEQ ID NO: 64345 - DNA, 452 bp, Cucumis sativus
  Intron number 2 from transcript Cucsa.217920.1 (locus Cucs a.217920) derived from phytozome v7.0 (chr-ID scaffold0165 8; pos 132729 to 133180 reverse strand)
aaggttgtggatatcttcatccccagagatcgaaggtataattcccgtctctgttgcatttctataccccttttcttgttattattatttttatattcttgaatttgttcgttttatgaaggagacgattgaggtatattatatatatatataatagcttggaagagtttcttgttagttaggttgaacgtttaggggtttacgattgaattgatttcatttttattgatatttgtttggttcttatggaatcagtttgtacgtgacggtgaaatgatattcttcgtcagcttgaatgctacttggacttagtttggattttttttgtctccactgtttattcatttttttattgggaatactttattctcgttttgactattttgtaattttcttttatattatattgtggttcaggactggtgattcaagaggctttgcatttgtgcgtt

SEQ ID NO: 64346 - DNA, 465 bp, Cucumis sativus
  Intron number 1 from transcript Cucsa.138450.1 (locus Cucs a.138450) derived from phytozome v7.0 (chr-ID scaffold0106 3; pos 119389 to 119853)
ccgaaattggagactatttcggagtataaaattaggtattcgccttgtagatttgtagggtttaaacttaaacaaaaagaaggctaaataagtcatttcctctttttctttttcttttctttttcctttttttagtcaattgtacaaaaagagaccgaaatttgagaatacttaactcttaattcttatttcccaatcctattagtttgttttgttgtaaaaatgtttttttcttttcaccataacatagtttctggaagaatatgtgcatgaaaatatgagtttttcttttaggaaatttttaattttgtgatgtagtaatttactgttttcaaatgttgctgtttttgggcaatttgttctccaaattttgtatatatacatatattattttgtgatgtgaaaggtaactataaacatatatacttagtcaacaaaaacttaacttaactgtatctatatata

SEQ ID NO: 64347 - DNA, 714 bp, Cucumis sativus
  Intron number 1 from transcript Cucsa.229470.1 (locus Cucs a.229470) derived from phytozome v7.0 (chr-ID scaffold0194 3; pos 6853 to 7566 reverse strand)
cagacgagactgctcgggtaagattaagactccttgacataaagcattggctcatttgaggaattttccgacctttctgagtttgtttttcgttttaacttggggtttcttcgaaatggacaatttggggcttcgattcttcattcttgcaaggaatttcttctgtaggtctttgcttcaaccgacgaaaagatactgttttctatcatcccttttcttttcctcccattatcactccactcataggaaagctaaagataaagaaagtaaaatacctagtctttcacggagttctgtgcatgtcgggttgcttctgttgttttggtttggggaggagttgattgaatcgaagaaatttagtgtctgttcttatataacatcttgcattttgatacttcaaattttcttcagatgctttctggaaatctatgcgctttctgctttgtgttgtaagttttcattatttaacatgtttgtagagtcttttaaatctaccctgaatagggctagaacaagttatcgcccttcagctctatttttactgtactatgtttgttatgttgattctgtttaagaatcagaagcaatttgattttaagatgatcagtgctggactcattttagccaccactcgagtttaggtacttactttactgtttccatttttatttggtgtttccagatcaagtctgtgaaagaattgagtgggcaaac

SEQ ID NO: 64348 - DNA, 283 bp, Cucumis sativus
  Intron number 1 from transcript Cucsa.275780.1 (locus Cucs a.275780) derived from phytozome v7.0 (chr-ID scaffold0258 1; pos 702827 to 703109)
tcgacttcttcaaccacggttcgtttcctctatctcaattatccgtactcataatttcttcattaatttataggttttccacagaagattgatgatatgcagtagtttgagagattacgatttatccaatttgggaattattttaatccatctattttgaaaatgagcatttgttaagcttttcttctttctttctttgattatgaggttatatatatgaattttagcatttatttgttcttggtgttttccagtccttcttttgggattgcatttgacattg

SEQ ID NO: 64349 - DNA, 654 bp, Cucumis sativus
  Intron number 2 from transcript Cucsa.275780.1 (locus Cucs a.275780) derived from phytozome v7.0 (chr-ID scaffold0258 1; pos 703176 to 703829)
tggattctacgttttctggtaaccaaaatttaattttcaattttcacaaacgacctaacaaattcaattcatccagcgagccacttcccttttcttcgtttcatttctgttctagacaacaatggccactctttcaccttttagtacttaaatcacacctcaaaatatttttggttcgaataagtatttagggaacaatgtccaaactaacttctattaaatgtttcacattatcaaaatagtagttcaacgtctttccagaaagggtgctattataataacacgaaacctttaatagattagtttggacaattttccgaatttaagtcctctaacttttgttttaaaaatgtccaaaccaaaggatacgactaaattgttactcaacctagttttaaaaattaaaattgttaaattttttaaagtaggaagacttaattgttaccgaatttaaattgttttattaaagttgagtgataaaattttggaatggctaaactctggtggaacagcaagattttccatctacttgattaatctattgctttgcttgttttatgggcatggttctctaaattttctctgtatcttaatacaatttgatgtcactattctttaggtactttaaaagtcccttttcttttcttgaccaac

SEQ ID NO: 64350 - DNA, 1046 bp, Cucumis sativus
  Intron number 1 from transcript Cucsa.213430.3 (locus Cucs a.213430) derived from phytozome v7.0 (chr-ID scaffold0154 3; pos 1195886 to 1196931 reverse strand)
ccttgtctcaacagattgagaagaagcttcagcgggttcgtttttcttcacccccccttttgtttttgtttgatgaatatctgaaaatttctttcctttggattatccgtactgtactgtttggataagatgattccttttttctcttctttttactgttttatgggaatttcactttcttctttttaccctttttgggaatctatctggtgatgatttatttcctgttgatcgtcgttaacttgtggatcgatttatttaaactcagttccggcatttttggagcctgtgaattcaagtggggtttgttgttttttgatgagagacgttatggaaatgaaaactagattgtaatgttagacctcccattgcagtaacttgctaaagagtggtaaagggggaatttgttaggatgtgagttagtagtttgaaggacgaggtgtgaattttggcagggttttggaattgtgggattagtgaagggttagttaagaatgcaggggaaggctgaggtagtcttctctttgctagtttgttttgtttttaatttcttttttgaaagaaaaactagcttcgatgtagcaaaatgaatcccaaatggtatgaaaagacttaacaccacaacccaaaacccaaagaacatggaactaaacaacttggtgctccctcttaaaactttgttattcctctccaacaaattctccataatgccacacccaccctctgtggtccgtatagtctgacccttcccacaaaaaggcgggtgcaaactgaagacatctacgttgtttctgctatgcgttgacaaggctgaatattgactttttctgttagtatagtttaggctattggcaacctctaattcagtataagtttgacagtttactttacactttggttttcatgaacttgaggcttattgtgatggacagtataacctagagaggttgaatccctagtggattgtgaataattagttttaagatttatttattattagttttatttttaaatgtaggcattagcttcttcatcacagaggcgag

SEQ ID NO: 64351 - DNA, 305 bp, Cucumis sativus
  Intron number 1 from transcript Cucsa.170040.1 (locus Cucs a.170040) derived from phytozome v7.0 (chr-ID scaffold0117 4; pos 313907 to 314211)
tataaggtaatatctaacattctcttcttttgggcctttctctttttccaaatcatctcttctattgattttgttttcggaaattgtttgatttcgttatcaattacattttctttcttttagctatacccgatttttcgttgacttttctattctttctctgttttattattaattcttgtttgtgtttatctttatgttccgatttttcattaccaattagcatagatacaaacacgacttacttaattaacaaatgaaaaacaacagttaaagtatccggcaccgggagctccggcgctggc

SEQ ID NO: 64352 - DNA, 664 bp, Cucumis sativus
  Intron number 1 from transcript Cucsa.308550.1 (locus Cucs a.308550) derived from phytozome v7.0 (chr-ID scaffold0297 8; pos 622733 to 623396 reverse strand)
gattcgtacactactacttggccacaaagttacaggtattttcaatctcttctcgtctcaataaaatatatattctgaaaattgaagatggagcagacctgatctgttgaagactccattgaatccgtagaaattattctcagtcgttcattggtaatctcttcaattcgctagctgttcttcaactgatattggatttcaattcatttcacgctttttgtacacatcatctattttgtttgctttgttttcgtcacaaaaagttataccgacaaacggaattgggagatcattattcgattttttgtttatcttttggatttaaatttttttgcaaaaagttcaaaattaaagaaattatcgtaaactgtgaaaaattaaatcatgaagttcgaaaacaccctttagaagaaaagattttgccgattcttaaacttttagttaatttaggaattttttttgcccgatattacactttgcaatttgcataactaaataatttattgtagcaatttcttttttattgatttgtactattaatattttcacttgtatcataattttgatgcacaaagaagtttggacataaattaatatcaatttatatgctacttttggtaatgctgaatttatggtgtattaattatatgttttcagacagtcg

SEQ ID NO: 64353 - DNA, 634 bp, Cucumis sativus
  Intron number 1 from transcript Cucsa.161160.1 (locus Cucs a.161160) derived from phytozome v7.0 (chr-ID scaffold0114 4; pos 1124235 to 1124868 reverse strand)
cccatttctccagcgaactctgcgttccggtaattccccctctccaaaaccattcgtatttaggcgatgcccatttcttcccctttttttcttttccagatttcttaccttttttctctttacgtatacattcaatattttctttttcttttttcttttttaccttttttgtattttatatgtatagatataacattatgacatacatatatatatatatataatatatactttggtatttgtattgtttttgtctatatatgttacttctaaaattaatctgttaaatatatttcaatggtacttgaagaacttattactagaaagatatatcatttgaatttttgttgagttttatttgtcatggtagaattaagtgacaaatttacataataaaatatcatgaaaatttatgtaaaataatcaaaactttttcttaataaatatttagatataatttttgacaactaagaatgtacaattatttgtaatgtcaaaaacttagtttacttttatttgtgtaaatttcttgaaagaaagaaaggaaaatctgtagtggccacgtatttgaagccaataaaagtgtggtacgtggcaattgtttttttaatataggtattttttgtggtacagt

SEQ ID NO: 64354 - DNA, 716 bp, Cucumis sativus
  Intron number 1 from transcript Cucsa.232020.1 (locus Cucs a.232020) derived from phytozome v7.0 (chr-ID scaffold0198 9; pos 167594 to 168309 reverse strand)
ccgcctccaaggaagatatttcttccaagaacagcgtaagcattggtttattcttcttttttcttttctgggtataccgcgttttctctagtattggatctttccacccttaattttgactggatcagcttgtggtaatgctaattcatgctgtctgaatttgattgataaaatacagcttatgagtcgttcagggtgcgtgtgtttttaattttaactgaattgaatagatattcggtacgtcaaggagaatattgattctcagtttgtgaaatggctgaggtttcgagtgttaggtttagggatacgttcatgaattcttttgggatttgtattagaattgttgatttttggtatttgaagcaacgtaggatgaatgcttctatgcttttcgatggggggtgtctaatgcggtcaaacggtacttactgggttattgtggaatttttaattaaaaatgctgatgtactttgagagtgaaggttgtagtgaaattactcacttggggatttcaaagtgtgattgttgatggcatcgtcagtgtaacacatttcttgttatacatattttgcttaattttctgttgtgtctgggttgttgttgtgatatatcgatttggctatgacttatgacttcccctttcttgttccatcgtcttgatacctgatggtttaatatgtccgaggtttcttgcagtgtctaggcatcgcactctg

SEQ ID NO: 64355 - DNA, 883 bp, Cucumis sativus
  Intron number 1 from transcript Cucsa.205660.2 (locus Cucs a.205660) derived from phytozome v7.0 (chr-ID scaffold0141 6; pos 684246 to 685128)
aggtataattactgctctctttctctccttttcaaccttcatttttacctagattgcattcttatcgctgtctcttttgatctgtgattttctcatcttgtgatctctaactctacttggttctacctaatttatgagatcattgttactttcttgttcactttctctcttttactcccagtattgggaatcggagtttgtcttgtgagttgttgcgtataaatgtcttaccaaattattatggtagtggtttttttttccctgttcataattgatgtgtttcttgggacttggaatttctaaacgcttggttggttttgtgatgagaattgtgggaatatcattgtggtttacatagggttttaagtagttcctgtttttcttagtcgggaggattgtcggttttgattctgctatcactttttttttttttttgcagtcttttcaccaagggtcgcaggattgtttgtctaatcgaatacaagttttctgttggcatcatttactgtgcatttgatggcatggttttttgttttattttaacttataggggctttaaatgaatttttaggttgctgtgttatggtgcaagtcaaattggtcaactgagggcttatcttgttggtcctttttcattttttgctgaattttatattttaaaatagcgtcttggtttgtcgtttgagcttttgagtgggttaggtggctggctgtttgaaatctgttggatgatatatggactcgtgaacatgatttagttttaattcgtaattttgagaatttcctatgtgaacgtaacttttggggctgttacaatttatctatacatttatgattactgataacatttgtttaaataatgtagtcgtcatcctgaggtgaa

SEQ ID NO: 64356 - DNA, 837 bp, Cucumis sativus
  Intron number 1 from transcript Cucsa.219470.1 (locus Cucs a.219470) derived from phytozome v7.0 (chr-ID scaffold0165 8; pos 1254264 to 1255100)
gtttcggggtcaagcgccatattcttcctaatcaggtttgtaaatccacaaacacatatatatatattgttgttcatttaaaaagctatattgatccccaaacttctatagagtttcaaaaatattgttggagtgtggaaatttagttagaaaaatttgtttataggaaatgttgtgatgatgatttataaaagaatattttgattatcatatatatctatttaaggatacctttttttaaaaaaattacatgcatttttatgctacactcatctttttggaaaatatattttccaccatgtatataagaaagggttaaagggaagtacttgggatcacccatctctatatgcttctccctctcgtcacacatactaacaaaataattaaaattatttttaaaaaataataattataaaataaagcaaaaatttcagtaccaacttagaaaatgaaaaaaaatgttagaatctttagcttaacataatttttttctctttaggaatccaatccccaacttgaatttttcaatccggaccacgacttcccaaataggaaataaaggatgaagatgaaaaatcaacttatgtttggaatatgcttaatacttggtacatagtcattatcaatattatgcttagaatatgtttaaataagtactaagtacatagtcattatcaatatttgttaaaatacaaacttagagaaattaaaatattagatcatatgaataacaacataaacgaaaacgaacaatattaaaaacctttaaatcatcatagattcaacagtttttgttttgtttttattgagattctttttttcttggtatagatc

SEQ ID NO: 64357 - DNA, 578 bp, Cucumis sativus
  Intron number 1 from transcript Cucsa.189570.2 (locus Cucs a.189570) derived from phytozome v7.0 (chr-ID scaffold0130 5; pos 423279 to 423856 reverse strand)
agcgagcgagcagattttacgcgcatcgcggagtgagtggggaattcgagtgcctatttatatgtaaaaaagtggaaacacaatcactttttatttttaattaataatagatatatatttttttttaaataaagagatcttgttcctcgtcttcgtgacagagcattgccggagaagagagcaagaccgagacagaaagggcgatatttttcaccgattgccctctccgtctcgatcaacccttaataatcacaatacaattaatcttccttctttttccgttgcttaatctttgatttcttgtgatgtatttccttccatttctctttccgttaatcccctgtatttgatgcgacggttgaatgcccgtaaaagggacgattctaaaattaccaatatggatccgaccaagctgcaccttcgacccagcaccagacccaatttgttcgccagggccaactccaagaactccaaatccaaattctgggtttctcttgcagccctaattgcgtttgttttctttctcttttctctcttcgtttttgcaaggaatttaaggagctctttgaagagaaggt

SEQ ID NO: 64358 - DNA, 733 bp, Cucumis sativus
  Intron number 3 from transcript Cucsa.162810.1 (locus Cucs a.162810) derived from phytozome v7.0 (chr-ID scaffold0114 4; pos 2341566 to 2342298)
gctcatttgcccctacctgtccggtgaagagaaaggtaatttccacgaagtttcttctctttattaaatttcaacacatcctattcaattttgtttacacttttctttccctaccaacaccgtaatcctcaatccttaatgcactattttcaactttgattgcaacccatcttaattaattctaatggtttgattattattataatcaaatttcgccaaaaagaaataaaaaccctaatctttctttttaaactccaagcaaacagttcaagaaattaaatggctttaaatcgtgtgatttaagtgatcttaattgaaataaacatctacaattaacctcaccacctttgaagtttgatttctccacccatccatcatattaaaaaaaaaaaactcatgctgtcatatgtggtaatcgaaaaaaataaattaaatggttcgtagcatgcttaatcatagtttgttaattgggagttataatatgataaagactacttataaatcctatgaaatttcactaaaatcgatattttcgtaaaatttttggatgacttgacaagggaatagcattgcaattttacctctttcattttaactatcaatagtagataactatatagattatcacagtatttattaacacttatgagtcgtattttgttatattagtaaaaagttagttaattaaattcttgtgttaataattataggtacaaagaagtgttgaagagcc

SEQ ID NO: 64359 - DNA, 534 bp, Cucumis sativus
  Intron number 1 from transcript Cucsa.237560.1 (locus Cucs a.237560) derived from phytozome v7.0 (chr-ID scaffold0202 3; pos 394823 to 395356)
aacagtatgattctttgctccctttctcgtattgtcgtcattgttccctttagctattgaatttggaatttgaaattcatgtttgagtgatgttggatgttaaagaaatggacaatcaaagttggatagaaaacgtaaagcagcagagaatcgacacatatttctgagggagagcagtttatttctggagataataattcattctatataaactccctaacgttaatggtgcatcctttattattctctctattaataaactactctccttgggtgaacgtagttgacacattgatagtgaaccatgtgaatatgtggttcgattatcttcatattttcatttcttctctatcattgattgtctgatttctagtaccagaattgtgtctgttgatcactgaaagactaaacttatatttttaccttctagacatgaaggcataggattagttaggataaacttatctacgtgaatgatagttgtttgtattatttgcaggaccgaaacagagaaagtccaaaagattgttaagc

SEQ ID NO: 64360 - DNA, 567 bp, Cucumis sativus; identical to SEQ ID NO: 63772
  Intron number 2 from transcript Cucsa.202400.3 (locus Cucs a.202400) derived from phytozome v7.0 (chr-ID scaffold0137 6; pos 411582 to 412148 reverse strand)

SEQ ID NO: 64361 - DNA, 707 bp, Cucumis sativus
  Intron number 1 from transcript Cucsa.299600.2 (locus Cucs a.299600) derived from phytozome v7.0 (chr-ID scaffold0292 0; pos 132608 to 133314)
aagaacattcaagagcggaaggagaggtacttcaatttccttagcatgcgtttctttgatttcgaggaaatgtaggaaactgatacttggttcaactgagctgttggattcgtttctcaattgcgtacgagcttattaattaagcgcttcgttttactgtagcaacgtcggtatgagattgaaatctcactgtattctctcgcacttcacttgctgtgtgtggtatcttcgcaattttgatatattaattattacgtttcttaggaattataaattcgaattaagtgatcttagcatccgtatccggttcttttgaatttggcttcctactagtaatgtaggatattaaagaaagagaaactatgcagatgttaattgttcgaattatcttgcttgcgtagctcatatttgttttccgtttcgttaaatctttccattaggaaaggttattataatgttcgaataaactaagccaaagagaaaattctgtaggtgctttaaatccccttatggaaagagtgcaatgagcgtaggggatgtgcctttttctcggcctttgatcttcagcatttgaattgtgcttctagattcatttgttttctcacttttttcatcttgccaggactgtttcaatttagatatgcagttggacttctggacttattttatttatttattgttttattatttttttttcatggaaggcg

SEQ ID NO: 64362 - DNA, 296 bp, Cucumis sativus
  Intron number 2 from transcript Cucsa.136070.2 (locus Cucs a.136070) derived from phytozome v7.0 (chr-ID scaffold0104 4; pos 814916 to 815211 reverse strand)
tttggggagaaatcagtcaccgttttcggtactaggtatcttaatccatttcttctcccattttgatatttgtttaaccatgtgtctgtttggattcactagaaataatgttttttttttcatttttatttaaactcttttgaaaaaattgtttaaaatacattctaaaggtttcaatagctatttcaatattttttcaaaatgatttattttcaaagttaaacacacccctgtgtaagtttttatcaagcatttgagcattcgacttgattcattaggaacccagaggagatccc

SEQ ID NO: 64363 - DNA, 619 bp, Cucumis sativus
  Intron number 4 from transcript Cucsa.157090.1 (locus Cucs a.157090) derived from phytozome v7.0 (chr-ID scaffold0114 1; pos 154449 to 155067 reverse strand)
gttttcaggtattagagaattccctttcgttatggaaataatggtgcatactgttgcaccagagggtgaatcattgatgccttctgttgaactttacagaaaatttaactgcaattttgattcaactgatcttcctcttcttcctttttttttttttctctaaagagtggttgcatttgttgtaactatggattgattgtgttatttttatttctagaggaggcgaactgcagttgatgaactcaacattgcagagcattttttaagaaaatgatgttatttgtgtaagtgttatagcttttactttcacctataagtataaccgtcagaaagaatatatggtttcctacgttgcttacatataatattaggtcttctcctatagttttcaatttttgaagaattagacttttgaacttctgaggcgttgcctgaagatatttgcctatcaatctctaaatctctgtacaatgattacagcctaaatttaccgtgcactagtctataataaataaacaccactctcaactctcatcagtaattgttcctgcataattttccatttagaaaaaataacatcaccacatcctttctcaggcagaagtacgtggtctttagc

SEQ ID NO: 64364 - DNA, 791 bp, Cucumis sativus
  Intron number 3 from transcript Cucsa.163710.2 (locus Cucs a.163710) derived from phytozome v7.0 (chr-ID scaffold0114 6; pos 142228 to 143018)
ttcaccagttgaaaggcagcagctcaaggttcattattcaccctttttcttcattttatcctctctttttatcttaaatcttttaaccaatcaatatgtcttgatgtcgatggatattttttcgttttatttccttgaattcaactgtatgaatagacagaaatgataattcaaattccctaaccttctagttatgaatatatcatttaatagtttgttcctgcttgtgctcgagtgagagaggatgaatatttttttcatgtcgtcaataaatctttttagttgagatgatataccaaaccacttttagttcatagttattattattattcttttattccttttacgaaaacatttacatatgtggataaaattttggttaaattgtaaagaatcttattaatagtttaaaaatcgagtaacaactaatttctaaattttcaagacgtattaaactcataagccaatatttttctttaaaaaaaaaaccctcgtaataacgattagtataaggtttgatgtttcatatttgacggaattatattatttatgattttcattctatggttagagaatgtttccatatataaactctctacctctagaagtgtgttattgctctgtaatttgaattattcttcttttattcatgaacgcataatacctaacacgtcaataataaaccgttgtatttattgtttggtgtgcttagagtttgttacttatattaacaatatacatacatatacatataaaataatacacacagcattggagcaaacaaagtgcag

SEQ ID NO: 64365 - DNA, 570 bp, Cucumis sativus
  Intron number 2 from transcript Cucsa.284510.2 (locus Cucs a.284510) derived from phytozome v7.0 (chr-ID scaffold0265 3; pos 1261345 to 1261914 reverse strand)
atagtccgaattttattcaacaactttatcaggttgcttttgtttatgtacttgtgcgatttcattcttcttcattttctcagttccataactaagatctttggcaaataaccagccatatcattaggcatcttttggcactaatttgatcatctgttagtaattaagaactgctctattggtcatcaactgcacaagtttgatacgacttttagagtggtgaaagtactgttctaaaactagtttagaaagatgtacttaactagtgtttctttcaaaagtgtttataaaggatgttttgagcttatttttatttgaattgactttctaagcgtttaaaaacatttttttttgcagttagaaatacttttgaagcacttaaaaatcaatccaaattccaaacaaatccttcatttatgaaaaaaagtgtttcactttaaaaaacacttttgcaaaaggcactagtaatacgttattggttatttagtgctttagttacatggataaatcatgtaccgtaatagtgtgtatgtactaaaatgttgtatgcaggataactggtcttctgcc

SEQ ID NO: 64366 - DNA, 774 bp, Cucumis sativus
  Intron number 2 from transcript Cucsa.257150.1 (locus Cucs a.257150) derived from phytozome v7.0 (chr-ID scaffold0222 9; pos 4541779 to 4542552 reverse strand)
aactggaacttgggtttctggaatcttgatacttggtacgttcagctcgaacaatattatgcatgacgatcttcatattatgtttacctcaagattttattggatctttagcttagtttaattaatctacctaaattaaattttacaacgataggttgatgtgacttattaagaatataataaatttgaaggataccttttacaagcaaatttttcaaaagaaataacatatcaaatcaagtgcgtcgttactttcataatttgtctaattttcaaaaagtgcttttgatgaaagttctcgaaaatgtttttcataggttaaattttttttacactaaagataatcatgatgtaatatatttttagggactcaaaaacaaatcgttgagatccacttatcttttaaaatgcaattaacatcgactaaataaacaaacactaccacgtagaaagataggttgtaaagttcctaaatacaatggtttttgtatttagacaactttacacacatttcgattaatctcatagacaacctgtgtgaccatacattaactatgcttattttttaaaaaaccaacccatgatgtatccgtaaatgcaatattgaacggttggagaatattttctttgtaataattaaagttataagcttaatactttaatgttagtttgatttataattgaagttagagaagctaataaatttagtggtacatgtgattgtttaataatgggacagtgaaccaagggttggctacattggcattctttgga

SEQ ID NO: 64367 - DNA, 862 bp, Cucumis sativus
  Intron number 1 from transcript Cucsa.257150.1 (locus Cucs a.257150) derived from phytozome v7.0 (chr-ID scaffold0222 9; pos 4542627 to 4543488 reverse strand)
gcttgtctcagtatctcttgttttgatcaggtctgtaaacccaatagtaaaacaaagagtgtttgcattactttttcctctttttctttcttatgatcatcgttacgtattcatattcgtgtctttttacattgacaaacaagtagggtagtagtagtagtattttggaaggatactacttgtctaactacacgcaagctatctatatttaccactaagtttctaatgtcacatctttcaaacatatatatatattatctttgcttgattattagtaatatttgaagctaagtgattagagttagtgtccgattgttgtatctatgcaaacttccactgttttaaaccgtttgatctttcaatatctacgtgtctaaaaaatagttagggttttatttttttttattatcacatttgtggttttaatttgttaatcttaaaaatttaaccatccatatctcataagacgaaaaatgaagagagataaaattttataattcactttttttttacctttatttggtgtctgattggatggaattgaagtgttttagggatcggtgatgaatcgtgagtgaaaaagtaaaaaaaaagttgtaaaaaaggaaaaagtggagagagaaaagatggtgaaaaaaggtactgataatgttcagaaaaaactttactaaaactatatatattatatatatttccaaattattcttttaattattttttatagttttgattcagaacttaggattcttggttctgatttttctgaaatgcggtggtttatttaaatatgtatttgatgtacgtgagaaattccatttttctaattaaaatttttatttagagtactaagaagaagaaggtg

SEQ ID NO: 64368 - DNA, 999 bp, Cucumis sativus
  Intron number 1 from transcript Cucsa.171660.1 (locus Cucs a.171660) derived from phytozome v7.0 (chr-ID scaffold0118 3; pos 43235 to 44233)
aatttcggctcgaggcccctcataggcccccaaaggttgaatttttcatacttttcttttaaattttaattatccattgtttaggccatttagacacaaatcctatggtgtgagcacatacacacaataaaataaaatatggttatttttttagtccttcaatttgaaaatatttatattcatgtgcccttaaaggataacaacacaaaagttggtgtctttttccactttggtcatattcacttacatagagaatagaagagagatctcaatttgatgaacctttattggtttataaatagttgcattagtagagaatatataataatataaatatatatttttaaaatttttgttcttatttaaaattagaagatactattattataacgtgctttgttttgtttttgtaaaagagaaacttagaatcaaaataactatgaatgttattatttaaagtaatgatacaaataaaaagtaaagataatttggaattatctctctttttatttttttcagttataattggttttattcaatacattttctgcttttgtgttacatccattcacagataaaaatttaatttcttagtctttatttcttaatattgtcattttcttttccttccaagtttgaaacttttccttttcattttaatgtcagtgagtttaattttgtgtattccattataaagcagttacactccaaatataatcactacttgaaccatacttttttaataaagaaattaaaaagaaaagaaaactaattatcatctctctttttaagaattccattcaagtataacttttcaattttgtacttaaagctctttttaactttttttttcttttcttttttaacaatatgaacagtcagatttttacatgttcttcacttcattatatagcttttatgcattgatttaacaagaaaatgaataaactttatgtgggtacaggaggattgggttttgtgtagagtgtttcagaaggg

SEQ ID NO: 64369 - DNA, 445 bp, Cucumis sativus
  Intron number 1 from transcript Cucsa.281430.1 (locus Cucs a.281430) derived from phytozome v7.0 (chr-ID scaffold0263 9; pos 44071 to 44515)
agtctctgtttcagcttccagctgacatttcggaggtacccaacaaaacccagtttcttttctctgccattcgtgtttcgtggcttcattctctctttgttggcttcgtttgattgaaaaatatgcatgttgtagagcaaaaaacttcaccgtttttgcacaccccacattatagattgatgacaggattgcttccaatttttgtattgtgttaaattgtcagctttattactataggtctgaggttgggttcattggtgtttgaggcatttggtagctaggagtaatttagtaaaattagaagaaaagcttttcactgcatatagcaatttgattgcatttcggcttatcgttcaatttattgtccatgctgtcgctatctatagattagagaagtatgtttgttctatttctagctgatggtgttgtaatagcaggaattatt

SEQ ID NO: 64370 - DNA, 887 bp, Cucumis sativus
  Intron number 1 from transcript Cucsa.212930.1 (locus Cucs a.212930) derived from phytozome v7.0 (chr-ID scaffold0154 3; pos 721503 to 722389)
atttgaagcaagtttaccagcatagtatttagtatttatgttgtaaacatttggatgtttgtaactcatcaatctaataaaaatatggatccattcaccaaacttatgcaagtatgaaaatattgatatgtcaataaaattaataacatgataattggtatatatgttaggaaagttatatcgattagtaagagaggtattgggatagctataaaatcaaaattgagaaattatatagaaaaacatgtattagcgttgataattgattgagttatttttgtttgttgttttggcaagtttaatgttctctttcatcagcatcccaattacgaacaaacaccaaatttataaacaatacattattggaaagattaatttattttaaaactatgattggaaagtacttgtagattttaatcatcaaaatctgatctcaacgtgaaagctttaatgatgaatttggaaataagctttaatttctcatcggttaatttctattttttcagccaaaataattagttgggcatttatgtgaaaatgactaaaagaaagggtgttttggtaatcatctcaaccattccattcattcctacttccctccccccttccctttgccttattaaaaagttcacattctgagcttcttcaattggcatcttcttcacctcactctcccaacgtctctataaacaacgatgaaaccgccacttccaccgctcttcattctctccattctgctcttactctccaccgtcaacgccgccgcctccatacctaccaagccgactattattccggcggcccccattgaagttcctccaactccatctcctacctctgctccatctcaagctcggccattactcccaccgacatcgccttcgcct

SEQ ID NO: 64371 - DNA, 561 bp, Cucumis sativus
  Intron number 1 from transcript Cucsa.258000.1 (locus Cucs a.258000) derived from phytozome v7.0 (chr-ID scaffold0222 9; pos 5120791 to 5121351)
tcctctatcctacgccaaacgccacccagtttccggtgagttcaattctctacataaatttacactgattaacctgcaaatctacttcattgtttcctccattttccagctttacttaatttttgtgtttaatagccgttcctcttatcttgtgttcttctattccaaatttgagttggtggggcttgttttcttgtcatatgaggcatttggctgcccttgtagttgtggccttctcacttgtgcattcccattgtgttatgttattgatgattctcttttgttgttttttttttttaatttttttaggatattagcagtttgtatctgggtttcttttaattagagtaaatttcagccttctgtccgcggaagtttcgttacagatttttgttcatttcaattattcaatttctgggatctttgtgtctggtggaattttggaggttattctctgaactgcatgctttcactaaagatatttggtattagtgaactttcttggtgacctgagtcgattgagtttatgattttcaattgtttcagttgcagcgctgggtg

SEQ ID NO: 64372 - DNA, 989 bp, Cucumis sativus
  Intron number 2 from transcript Cucsa.285000.1 (locus Cucs a.285000) derived from phytozome v7.0 (chr-ID scaffold0265 3; pos 1530068 to 1531056 reverse strand)
aaggggcagagagtaggggagaaacagagatttgggttagtttttcttttgatcatagcattggaaatggggaatccgttcaaaccccttctactgaatctgatcattcttatgtacagtgaaatgtcgtacaatttttttcctcttaatttctcgttgctcctgtcttttctgattgtgtatagtcacaccacttttcaaataattcacgaaggtccttaatactaactcatgtatactttgaacaattctggaatgaagttctgagtcaatttaagtaaaaacaatgctcgaaaacagtatagatttgtgattcttttgggggtttcaacaaaatttcagtcggatcatccaactttctcttctttaagccataagaacaattcaggtctccaatatctatacttagaactgcccaattggacatttctgcgattaagttaaagagttcacattgataagccattttgatgaacatttattctatcagactttcccggttggctttggagtatgtcgaggattagctccaaatatttgatagtcattgaactgcaaatccattctgccattccacaaattctccagtggctgattcttctgccattgaagaaatcgatcaggcctaaatcatttctataaattgagtgtacatatatatttatatatacctggtttgtagcttgggaagctggaaagtcttgaccaagatggatcatgactgttgcccctgtggataaggaatagggagacttattaagatgaggtaagaattttaaaggaagtaatttcactaaacaaagtttgaggattgtatacttgatgcagagacagtattgaagaagatgatcagtaaagagacaaggaaaaaactcataaccaagtgttgggtttggtctgccattttcattacacagttttgatcttcatccacttataactctcatatatatactggtaaacgggtttgtgaattgaagcacatagaa

SEQ ID NO: 64373 - DNA, 481 bp, Cucumis sativus
  Intron number 1 from transcript Cucsa.217790.2 (locus Cucs a.217790) derived from phytozome v7.0 (chr-ID scaffold0165 8; pos 41952 to 42432)
gactttgtaagttttcgtattctcatggcttattaattacagcaaagcatgtctttaagtctttgaaactttgaaactttgaaatttcattttctcattgataattactaagtgggtcatagaatatacaaaacatattctataacccaatatggccgagtagatcgaactctcgcaatttcatttcgtttcctttctagttaatatcagtaacatatagttgtaagactttaatatatattattttgttttttggttttgtaaactaaacttatttgtttcttataataacaacactttttatgaaacaatagttagaattaattccaaatcaaattcctaaaacaaaacaaaaaaaaattctaaaggttactttttttagttttaaaattttatggtggaagaactccctcatcaattaatatggttgatttatgtatttgtagatagtagctttgtcccgccattggtatacgcagtg

SEQ ID NO: 64374 - DNA, 868 bp, Cucumis sativus
  Intron number 1 from transcript Cucsa.160870.2 (locus Cucs a.160870) derived from phytozome v7.0 (chr-ID scaffold0114 4; pos 940896 to 941763)
aaggtactttggttatgaattcacgtatatgtagttttcggttgttttggctaatgtgtgctgcttgttagactgaatcttattcttcttactttttttttcgtttgctattatctgaaagaattttggaatttaagatctgcgacgtctgtcctttgttttacaacttgctgaataggtagtcaagagctacggatttcactcttaatttgtttatttattttttgtttgtggaacgaattttcttttttctttttgatctttggattgatttcggtttcagttatccctgtgaatttaatgcttttataccagcagctacacacatgttcattttgtagatttatttgttttggcttagatactttgttttctctgcctcttatgcttcctgatttttggggggaaaggctacgagtagaagattgttcttgttctttatttgattttcttttctacgtgactgtttcagccgctccccaattcctaacagttatgcaaataatttaggcggttgttatatgtgaaattccgatatgttattttggaaacgtttctgttcctcactgaatttcacgtcatatttgagagaagaagtctctttgggttaatgaagatgaaagtttccaatcataatgtccattttcttctttatttatttgattgtttttcctcaacttgttggatggttagaagaaagtaatttgaaattgggagtggtgtcttatagtctaggcagctggacaaataacaaagtagagagaacagaagaatctttgcagtttggctctctagttgaaattgggagattcatcgtgttttgttttatgcaggtataaaatccgggcctttttctttctggaatttt

SEQ ID NO: 64375 - DNA, 388 bp, Cucumis sativus
  Intron number 1 from transcript Cucsa.239900.2 (locus Cucs a.239900) derived from phytozome v7.0 (chr-ID scaffold0204 6; pos 799367 to 799754 reverse strand)
aacatccctggatttttcgccatttaaggttctctcaacttcaactgacacatcttttatcttttgaatgcagttcgcatctgcaatagtcgtgtttctgtagtctagattctgccgcatcgtttggttttatgagttttggtcaatttttcggttgatttgccttctttatagacatttttactatcaaatcttcatctgaattctctttcttactcaacgatgatgtccttatttcttgtaagttaatgacgaagaattagggtttaggaggaaatgaaaggatgccaagggtgcgaatgtttgctagatcccgacctttctactttatacttttatactgtattctcttatcctgtaggtgaaatattctgtaaagatcatttct

SEQ ID NO: 64376 - DNA, 998 bp, Cucumis sativus
  Intron number 1 from transcript Cucsa.276320.1 (locus Cucs a.276320) derived from phytozome v7.0 (chr-ID scaffold0258 8; pos 105148 to 106145 reverse strand)
tatacaactgtcataataggtagtttttcttgtagcaatatttctctaaaccctctcatttgacacataatttctacaatcaactaattatattatgtaaaccacacaaatccaacacacaaacataaaatactttaatattattattaggatgggtgtggtaaactgattgaataatttgtcaaaaaaaaatgcttaattaaaaagatgaacaaaccgaatgtagttagaacaaataaaaacaaataggttgaccaccaaattgaccaagtatccatacaaggaaaaaaaaatactaatacataaccctaataataataatttataaaaaaagattaaaacaaataaaataggattaataacaaaatagttaagggggcaacagaaattgggtagatcctaaaaaatttaaaggctggccttggatatctccccatcgtaagtggtcatggaaagggatgatgggttgcaatttaggcataccctttcaattccctccaaccttctttagtttcaactccaaatccttttccataccttttctcaactcaactaattaaatagcagaaattttaactaaaacaaaaaggaaactccatatttttttaagggggtattcctaggcttcccatgcattttccaccaacgcctagttgaggttatatgttaattgggagccacattattatcggtggcttagctttgaagggccaatgccaacgggcgtgcgcgtggcagggcttatgcgcgcaccggccccattgatcagcgccgcttcttccttcttcttcctctttttcttactctcatcatcatgcataattgtggtcttctcggtttctgatgccgaaactttgctccaattcaagcgatctttgacatcggccacggctcttaacaattggaaaccttcggttccgccttgcgagcaccacaagtcgaattgggctggagtgctttgtttgaatgggcacgttagaggtctaaggcttgaaaat

SEQ ID NO: 64377 - DNA, 700 bp, Cucumis sativus
  Intron number 1 from transcript Cucsa.273580.2 (locus Cucs a.273580) derived from phytozome v7.0 (chr-ID scaffold0251 1; pos 663558 to 664257)
ctggtttccttcttgttgctacctacttcgttattgttcgtctatgtcccctccttctccaattccactttgcttttctgtttcattcattcattcgttccccgtgttttcttaattaccattttctttcctcgatttaatttgttgttttattcgttttcatgtttttcttctggctgagtggtttcgattaattcatctctttttctttattgaatgttgtttttttagtgattgaataattctactccgtttcaacccttctcttagatgatcaattcgttaacaaaatagttcagattattgtgatggaatacttcgaattgctgccttgaattgattcttaaagtactggtatttgaatcttcatgtcagatgtagagctcatgaggttcattgttattgtagtgctgctacgatcccttatatttgtcattaaattttcgccttcctcaaagggcttgtctcaaatcaccatttaccgacacttgggactgacatgaattcttaaaattttcttaatcatgtttgctctgtgtttgagaaagtccttattcctatacaagtacatttttcccctattctttacatctgctttgataactggaagctacagaacagtctctttcagcaattgtaataatactcctgctgaatgctgaattttgtttcttagggaacggctgcaacaaaggtcaag

SEQ ID NO: 64378 - DNA, 773 bp, Cucumis sativus
  Intron number 1 from transcript Cucsa.146600.3 (locus Cucs a.146600) derived from phytozome v7.0 (chr-ID scaffold0110 0; pos 43969 to 44741)
gtgcttttgcaacaatctttccatctccacagaaggtaatgctgctctttttgaactgctccgttttacttagaactctctccttttcaaatatgttcagattttgtcgtagaattccaaatgacttggaagagaaaacatacatcgaggtgttaagtgctgagtttttagaagttatattgcataatgctaagagaatgattttgaaacttatgtagcattttctgaagttcattgcataagggccccccctaccattttttgcttattagcaatgatgatatatgtttgtcctgaattcccactttgactactattgcaagttttgttgcaggaatctcgtgtatatttattccattttaattcttatattcccaaatcttccgttctgatccttaaacttttacaaatcttcttcaattgatataattatatttagcagagatcttttgcatccgtcaaaacgtcttgtatcaaacttaactgatgtggcacaggatttgagtctgcatttgtactgaaatgtaatatgaaaagttattgttaaggactaaaatgaaattttacttcaaaaataaaattggatgttcaagctacatggagggaccgatgtgaagactagaataagacttatacatgttattcgtttatgaacctggatggggttccggtggcaagtgccatgagccattgtcaaagcatcactttttttaacactattatttttctaattttcagggagcaggtaggaattcttctagctctgtggattg

SEQ ID NO: 64379 - DNA, 380 bp, Cucumis sativus
  Intron number 2 from transcript Cucsa.146600.3 (locus Cucs a.146600) derived from phytozome v7.0 (chr-ID scaffold0110 0; pos 44760 to 45139)
aagtcaaccacatcacacccgacaagggaattcaggtgtgtgaattgaaatacaaatcctgttaaattcatggacaaaagggtacgatatccaaattcacagagagttatggatcttttaaaaccattttaaaaaaatctatgagaatgccatttctaaaattcctaaactagaagagtatagtttgtaactacttctaatgataggaaagggataagggcaaagagtgcaaggtaccgtgaaaaagaaataaaaaccacaggagtatgatcctcaattttagaatgttcctaagaaacaagaaacctatgatccctaacaaaaatcaaatctgataatttcaaggagggagcttggagccttgtcatctgagttcatct

SEQ ID NO: 64380 - DNA, 1015 bp, Cucumis sativus
  Intron number 1 from transcript Cucsa.254900.1 (locus Cucs a.254900) derived from phytozome v7.0 (chr-ID scaffold0222 9; pos 3094731 to 3095745 reverse strand)
tcccgcccttcccgttcttcatttttcttactcaggtaactcatcattttctccgccctttccttctaattcccttccctgtctatgcttcttcccctcctgttttcattttccacactttagggatgcttttccatttcaaacttcggatctgtacccgttttctggttctctgtaattgtaagatgattggatttctatgcgttttttttttttccttttcatttttcatttgtggcggtctctgattatttttcttctgccgtctgattcttgattcgaccctctgtttggattcgggattgtgatcgcctggtgatttgtgatacgaatttcttatttttgtgctgattaatcgaattaaagtcttttgttgtgtgtgtgtgtgtgtgtgtggtcagcttgtgaacagagattcggatttggcttaatctaaatctcctagcataatcgggtggatcctgtgtttattccttttggaaccaaccattttgctatctttgttagagttttcgttttcgttttcttaagagttaacagtatttattcgaagtgggatcttcaaatttatgacatggaatccttataagtgctgctaccaatatattccgctaatgttatagggcgatatgaagcaaatgttttctttctatctttgcttttgttttacccttcaagtgatggttggaattatggctctaaatttcccagtctcaagcatttttcatcatgcggatatgttttttttttatttaaacaactgcggttgggtgtttgaatctttgaccttaggacggatcatactttagcttggcaccatgtggtacgtgggtgagttcatacagtttaatggagttgcatattttgtcagatagtctaagaaagcaaatttggtgaatcaaatgttctttgcattgttgttcttaacattgtttcggattaaaaaaaaatccagtttcttataagatgtaaattgataaatgttggtttacttgaatgttatcagatctaggaa

SEQ ID NO: 64381 - DNA, 575 bp, Cucumis sativus
  Intron number 1 from transcript Cucsa.175630.1 (locus Cucs a.175630) derived from phytozome v7.0 (chr-ID scaffold0122 5; pos 224548 to 225122)
gtcaacaagcttatcaattccgcaaatcctccctggtttgagtttctctttctctgtctgctgtttgtttatctcactatcaatcttgaaatttagtgttgctttgtttcttcttttaattttgtgagatggatctgggtttgtatgcaatttccgtagctttgtttgaccatatgttccgtacattatatgcttgcgaactcggatctgctgtaattcgtgtctctagatcggctaaatcattttggttgttaatttatagttacagtagtttgtgggaataattagagttccagcttcagatccattacttttcttctttccccctccccctcccccgcggattccggcctgatctcaagaaccttccgttctctaaggtttttcgtagtgtagttctaactgaagttaaatagatatcatgagtatacattaagagttagagcattttaaatattcaaacatttttagaataagctcttgaggtaatcctttttttcttttctagtaagtgtgtgactaacgaaatttcttttctaggtgcggaagacacaacttctctcatctgtagtcgg

SEQ ID NO: 64382 - DNA, 995 bp, Cucumis sativus
  Intron number 1 from transcript Cucsa.169280.1 (locus Cucs a.169280) derived from phytozome v7.0 (chr-ID scaffold0116 3; pos 210170 to 211164)
catctataagctcaccaaagagagaacttgtgctggtaatcctcggatttttgtcgctaaatgcctttagttaattaatttatggttctcattccaagtgaactgataagtgaaatcatttgtcgaaatttgatcgtggattcggattttttacttttctccgcttgtccctaattatttaatttctagctccatttggcctttagctgagatgaactatgggaattcaagaaccctctttcttagtttattttggggagattttatagttattctggttaaagttacccaacttttattgagaaacaatgtaagaatatgctgacatacagtaataaagttctcaaagtggaaccaaactgctcgttgttggaaaatgaccttagtcaaaaaggacgagaaccttaaagttttatcttcacgggacttgttagggtgtcatttcttctctaatcctccattcaaatgtttatgttgcacatgcagcaatttataagttctatttagactgcctgtacttgtaatcgtgtgagatcactattcagacatgcagaagttagaactttaggttccatctgataacaaatcaaggctgtaaacattacttcctcatattggttgatttgttttgttgtctatgttttaaaattcagctcaaattgtttgggaattcagttaaggattcaaatgtttactttggaaagatgaaaacgatgatcgagaaattgtgagaaagcaagtacaatttaaaaacccacatagttatcacacgagaccttgttatttatttggtttcatgtcatttaagttgtgttaattttggtttctcttgcaaatcgtattgttttgaattacttgggtattccattgcttcctttttgcttattgattgctctagatgttctctcctatgcattccctcttcaaaatataattgtgaaacattttatggttttgcaggattatcgctcaagtctcaggagttaactgccatt

SEQ ID NO: 64383 - DNA, 664 bp, Cucumis sativus
  Intron number 1 from transcript Cucsa.149280.3 (locus Cucs a.149280) derived from phytozome v7.0 (chr-ID scaffold0111 0; pos 137879 to 138542)
aaggtttctctgatattaaacccttccttttctctactcctaattccgcctgctcttccactcgcggtaatggcatatttacagtttttaagcaatttcttttgtggttattcttgtgtttcaagtttgaggatagccctgttgaataatgagcaaatttcatgtatatgttggttgattttcttgcttgcttattcttttatgattgttcttgtttaattttctaaatctttgatcatttccttcacggtacggtagtcttgagtgatcctattataaaaaggtgagaagttcttcaatttacgtttctttatctttatcaaccctcttttaatcactttcgaagcatatactatattttccttttgcagctttaattcttattttggaaagtaagaactgtttgtaggtttcttctttatgattttctatgtattaattttttgaagtggctttgttcttttattttggctttgttttttcggttgttagatatattcccagcttgtataacatggtggcgttctaatcatgcatagttaactacaagtattctttgtatctatatctgatcaaaatatttaggcttcttcttggtattgatttcattccatttatgatttaaccattaaaggatcaagtgctacaaaatctgtggagttca

SEQ ID NO: 64384 - DNA, 827 bp, Cucumis sativus
  Intron number 2 from transcript Cucsa.194230.1 (locus Cucs a.194230) derived from phytozome v7.0 (chr-ID scaffold0133 7; pos 533659 to 534485 reverse strand)
acgaggtatgagatatcttcttctatgttgttactactgtgtatgagtacccttcaagtttcaacattgctaaaaaccaaatccatttgaccaaaaatagatttcccttgaaacttcacactactccattgctgatattttgcagatcctttaaagtactttatatatcattaaccatatataatctgaagtcactatatatccttatacaaaataagttatttaataacagagacctgcctcctttcctagtttgttcagatttcaatcaaatgaaatcattctaacattaggaatatagactctattagaactaaaggtgtgtttggtttgtcttttcaatgtttaattctgaaaacaagattttggaaaaaattggagtgtatagaaatcactcaaactagcttcttaagcactttttaaagtttattttaaactatttttgtcaaaatagtgtgaaacaaaatgatttttcttttctgtaatcaatcgaaacccccatctaacagactgatagttaatgggtcaaaggaagtgtgttaagttaagggtcatttagtttgatattagaacgggtcttatttataacttagatgatgtgacttaatttttagagggttaagtaaatgtagtagatatatatatatatatattttaaaatgtatttaacagccatgactgtgaaagcgatgacttttgttagaagtgactaatgaaagtagatgttatgaatgaataatggtgaattctattgcataaaacttgtattttttttttttttgtctgaggagatatatacttgtctgacatgaaaggtaaatttgtgg

SEQ ID NO: 64385 - DNA, 673 bp, Cucumis sativus
  Intron number 2 from transcript Cucsa.242750.1 (locus Cucs a.242750) derived from phytozome v7.0 (chr-ID scaffold0204 7; pos 2425660 to 2426332 reverse strand)
aacgtaagcgattctggtactttttctttttggtttgaacgtggagaaaaaaaaaaaagattctttaacatgagctgaaaaacttagtttggctgttttttttatttttattttctgatctcttgggataatatgaagtgggttttaaaaaagaaacgtacttatagttttatagttatccactatggcggatagataggtgcagagaaaatcgttaggtttggaactgttttggttgattccctatatgaagcatgctaagttttgtagtcatctatacatggagtgatatcagagcatgtcgcaacttctcattaaaatgcacgagaagaattgatgagtcaacaatattgaggccgaggttcaagcaatatttaacattcctaccatgtgattttggaaactgccttaatgggtcgaattataaccaatgcattgttcagcattagggttttcttttcttcaagaaaaaaattattgaaatgtgtatatatctgtttaatgttctgaggtttttttttattggatggattgttttgctaagcaatcgaaactaaatattttcatctgtttagctaaaataaataatttcagccagttttgaattgatattcacatgattgtcatgtaaattgcagggttcttcaattgtgtagccagcatattataaata

SEQ ID NO: 64386 - DNA, 479 bp, Cucumis sativus
  Intron number 1 from transcript Cucsa.136420.1 (locus Cucs a.136420) derived from phytozome v7.0 (chr-ID scaffold0104 4; pos 1052444 to 1052922)
ttctctttcatttcgtctctgtggagatcaacaatgtgagttccaattttccgatcgttaggctaagacaagctgttgattctccgtcttttgtttaatggtttttcagaatttgatgttgtaatttatttagtatatcaatatgttcatgttttttctctttttatttttttattttccattttgtatgattctttacgtaatcctttttctccatgactaaatttatgatgccgtatagtttgaagggaactgagtcacctttggacttttattttgatttttgctgtagaattttcactttccggtattagtcctagtcttctgggttggaagatataaggctaaataaccgtatttcaatttcaatttggtacttaattgaggcgacagttctcacaaatatttcttttatattcattcaagtagttcgtggtttcttaactgatcaacatggtttcagcttccttgagaaggga

SEQ ID NO: 64387 - DNA, 846 bp, Cucumis sativus
  Intron number 2 from transcript Cucsa.264010.1 (locus Cucs a.264010) derived from phytozome v7.0 (chr-ID scaffold0233 0; pos 140211 to 141056)
tgccgatccctatttccataccttagatcctgaaggttggattcaacttttcaattcttttaaaccaattattatcgtttaatttactggcatgtagtggagtttaccagtgtttgtttttttttagtagaaattcgattaacaaaagacagagagagagagagagggacagagagcatttttattagtagtactgcaattgagtttgtttcttgttagaaaaaagtagtacttcaattgctggagtgaaatctataattgacgctgctgcaaagctaagaatcaagcttggattgtagaaaagaacgagcctaatctgagatattaaaatgatatgagtttcttgataacttgtctagggagatcagctgtaagctgctttggattaaaaagaattttcctataacttttcaaccaactaaatatagattcataaaagatattggcatatagtggttagagaggcagggagtatttatgtggagggatatggggttcactggcaatgatcacatttgagaaaaggtgtgacattaatagtatttagcagggattgtgcatagagataggttctctttgactagcttggcatcagattcaggagagttagtgcaatgtagctctccccgttgaatcaatacagaggttctttatcgtaattcgattaatatttctgaattctggttgatgtaatctttctccatcttgtgcatcaaatatgccacaccttgttgttcagtttgtttactttgagtatatattttatacctcatcagtaacttgtaaactggtcgtctggtttttttctcagatattggttatttagaggcaaagaaaatttataat

SEQ ID NO: 64388 - DNA, 650 bp, Cucumis sativus
  Intron number 2 from transcript Cucsa.238130.1 (locus Cucs a.238130) derived from phytozome v7.0 (chr-ID scaffold0202 3; pos 804906 to 805555)
ctgttagacaagtccgagagtatcctttcttaaatcttcgattcacccagaagcttaagctagtgggtgaaagcaaatttaaacttatgcctaacattttctcctcacttgtgagctcaaaataggaagaaaaatccaacaagtggaaatgaatattaaatcgaaaagaaacgtcgaacttagactacactgctcatgtactatcttaaatcaccgattcacccaaaagcttaaactagtgggtgaaatcaaatttaatattgtatctaacataaactatataatgttttttattttatgggatggtgggaaggatgagttgtgcatatctactctatgccataactaaccccatttggaactagtaatttacatttgtcatatttcttgctagaccaataactctctgattagctgttacatatatatgtatatatgtatacacatccatactatttagtattttgtaggtttcctccatatccatttgaaaaaaactatactacttcggtatttaattcatggagggaaatacaatttaagttaaaagaacagaaaagtttgcctcattgtttaaaacggcataaatatggttaaatcttaactatcatatagaattctaagcagatatcaactagctgagttcgagg

SEQ ID NO: 64389 - DNA, 976 bp, Cucumis sativus
  Intron number 1 from transcript Cucsa.283960.2 (locus Cucs a.283960) derived from phytozome v7.0 (chr-ID scaffold0265 3; pos 900850 to 901825 reverse strand)
gcatcgtgtctatcttcctccacactcattttgtggtaagctttaacgcaccattttcttaatgtaatttaagcttggcccaccaatcctttggaaagtttcctctagatggtgcgtgtcaatttcaaattaacaatttgaacttatagttctaacccccatattgtctgccccttttctcttcttcttcttcttcttcttcttcttctagttttgttctggtttaatctttttgggttttctctgtgcagggtagtatcttttgagcttagttattttctcttgttaacaactctaagcagtgaattgttagagacctattatttcatataaatactagatgactttgtctcattgattagtctggaagctgtcaaaattaaaaagtttgacaaatacccactagtttggtaaccaagagccagcaggaacatttgtatttattgagacaagtgaaagtttgttattttctttactcaaaatctttctttaattttatagatatagacattacttggataagaaagggagttcaccggccggaagttttccttcaaatttaacagtgactgaggtctctttcagctttgtttttttggtgttattactgtttgctcaatcccttgaacgagtggtgtaacttgttaaatgcccacaaattcatgggacgcaatcctttaggagaaaggttggccactagttattggtggttaccgtggctcttagcaacttagcatcagaatttgtcttaaacttctagtcgttgaaaattctcttcatacaaagctaagtctgcttatttgtaggattcgtaaacatgagatgataagggtgatgggtctaagaatgcttgatggaaacatggttattggacttgcgtattaattgaaaaaacgagccttgtttctagctagaaccctccttaggattgtattgtttcaattctttcagcttgttctgcattttagaggctcca

SEQ ID NO: 64390 - DNA, 868 bp, Cucumis sativus
  Intron number 2 from transcript Cucsa.194230.2 (locus Cucs a.194230) derived from phytozome v7.0 (chr-ID scaffold0133 7; pos 533618 to 534485 reverse strand)
acgaggtatgagatatcttcttctatgttgttactactgtgtatgagtacccttcaagtttcaacattgctaaaaaccaaatccatttgaccaaaaatagatttcccttgaaacttcacactactccattgctgatattttgcagatcctttaaagtactttatatatcattaaccatatataatctgaagtcactatatatccttatacaaaataagttatttaataacagagacctgcctcctttcctagtttgttcagatttcaatcaaatgaaatcattctaacattaggaatatagactctattagaactaaaggtgtgtttggtttgtcttttcaatgtttaattctgaaaacaagattttggaaaaaattggagtgtatagaaatcactcaaactagcttcttaagcactttttaaagtttattttaaactatttttgtcaaaatagtgtgaaacaaaatgatttttcttttctgtaatcaatcgaaacccccatctaacagactgatagttaatgggtcaaaggaagtgtgttaagttaagggtcatttagtttgatattagaacgggtcttatttataacttagatgatgtgacttaatttttagagggttaagtaaatgtagtagatatatatatatatatattttaaaatgtatttaacagccatgactgtgaaagcgatgacttttgttagaagtgactaatgaaagtagatgttatgaatgaataatggtgaattctattgcataaaacttgtattttttttttttttgtctgaggagatatatacttgtctgacatgaaaggtaaatttgtggatgcaggaataaacaaaaggggggcatcatctggaggagga

SEQ ID NO: 64391 - DNA, 760 bp, Cucumis sativus
  Intron number 1 from transcript Cucsa.218650.1 (locus Cucs a.218650) derived from phytozome v7.0 (chr-ID scaffold0165 8; pos 677891 to 678650 reverse strand)
gagcagtttcgaattctccggcaaaaaggaacagagtaagtgggtcttttcgtttttaggttgtgtttattctttaattctgtggttggttgttgattgcaagttgcagcctgtatggatatttgttaagggaatcagagtatgtgagaggtctagttcgagatatattagaatccaatttgttcggaaaactcaagaacagctaagaacactaaaagatggatttagaaatatatcttgtaaaaccaatgaagaaactaaaatttcatagccttttgaggggtgtacatgcttccaaattcccacaatagatattcctttcagattgatgcacgctctccgaggagtaggactgtaacacactacatttataaccaaggtatccttggctaatgatccgtatgcccttactattatcctactaataaacctaatatatctatatatcactaactagggctctcacagaatattattttggagatcaggagtacatgttctgcctttagagactcgttaaaaaagttggttagtaaaaggatgaacagagatagagtgggtgagagaggaaagttagtcaaaatcttaggagagtttttagactctcaaagagtcaaagtgatcagcaattgtaagttccatttttattttgcaatgcaatataatatctgtgttattttctgtcaatctctattgcaagattaagttccttttacagatctgaagttggggtattacaggtatccaggaactggcattt

SEQ ID NO: 64392 - DNA, 494 bp, Cucumis sativus
  Intron number 3 from transcript Cucsa.286340.1 (locus Cucs a.286340) derived from phytozome v7.0 (chr-ID scaffold0265 3; pos 2414567 to 2415060)
aacaaggtcaattgggattcgtgtttttttgtttctttgttgtgtttttggtttttggtaaatttcaaaaaccactttgttaagtagttgttgtagttatacgttcaatgatgaaatttttgagtcaaaatattcaaattctttcacatttatacaattatataacaaactaatttttaactcataatttggagaaaaaaaggtagattactgtaaaaagaaatatttacacaaatatagtaaaattttataagcttctaagcttctaaccaaacaaggtgcatttctacctcctttgtcgccgaaccatcgatgaagcttataacattttgtatcttgtatgtgtcgagaagaggttctcggttcaaatctactcgctgctaactcaaactaaataaacaaagaaaatgtgtagtttgaaaagatatatatttttcttatcctattttcccctgtttttgtatttgattgatgaattcaggggagtatcctga

SEQ ID NO: 64393 - DNA, 794 bp, Cucumis sativus
  Intron number 1 from transcript Cucsa.138720.3 (locus Cucs a.138720) derived from phytozome v7.0 (chr-ID scaffold0106 6; pos 26280 to 27073)
ttcgttttggttgctcattgatttgagaagaagatgtgagtttcatcgtcttctgtccatttcttcgaatgggtttggcttgttttatcttgtctctcctcatgttttggtttaaatttcaatttttggattggaatagaagtacccctcttgttggttgtgtgtttttcttcattctgatggaagtttcttttggaaattaggaaatagttgttagctgtgcaatctaagagtattgatttcatgtttgttggttgtgtacagtactaagcctctggaggttggggagtttcttggttttttcaaatgggtgtctgcttaagtaccagaattaaagctgagaactcatgtaatacaggtacttgaagaaggctttctttacttagctaatgaaacaatttggtggaattgtttgggtctcttgttgtttaagtcttgtagaattttagatttatgtagtgagatgtcttcacgtttaccaagcttatctcatgtctgcaaaacagatgaaatgatgaactttatatggttcaattggctagtttgaagtgaaaggtggatcatggatgtttcgctaagtgttgtgaaacattgagaaaacaattgtatgatatgcaagaataccttcctttcattgaatttccagacatcaagatgtttgcttaaattgaaaatattttgaaacagcttttgtaaaaagtacacacttgagagacagtctcggtttaatttatttgattaaacaacagcgagtgtttagaggttgtgatttctttgtgcaggagtgaattcta

SEQ ID NO: 64394 - DNA, 423 bp, Cucumis sativus
  Intron number 2 from transcript Cucsa.286350.2 (locus Cucs a.286350) derived from phytozome v7.0 (chr-ID scaffold0265 3; pos 2420621 to 2421043 reverse strand)
caagtcttctttcttttttgcatcgagtagttgatgtaagttgtatatatgatcatatcattctccaacaaagcattttggtatttcaaacatgtttaatttggatatataacaatgttcacataatcttagttcctgaagttacatggtttagtaagatttcttgaactttgaggctacttaggatctttttctatcaataataggagaataattttcccccattagtttacttttcagcattgatttcgttggtatatgtgaaggaattttctattttgttttcttcatatatcgattttaggtagattttgggacttccaagcaaataggtttcatgatgagaaataaaggtaataaacggttgatctgaatcattatgctacaggtcttcaagcattattttgaagagttggaagaaga

SEQ ID NO: 64395 - DNA, 539 bp, Cucumis sativus
  Intron number 1 from transcript Cucsa.160210.2 (locus Cucs a.160210) derived from phytozome v7.0 (chr-ID scaffold0114 4; pos 450041 to 450579 reverse strand)
tccctggcttctccgattcccacaagcttcctgcggtgacctatcttttctctttatctctgctcccactcttcatttcttcgttctcttttcttctccttcgcgtatgattgtgttttcaactgcgtttcttacgttttttttttttgtttggctgagagaagtattcctgattctagcaattgaaatcgaattgattagagtgcttatttgactaacgagtgtaggcagcgaatagcttcgcttttattatgtcttggatgagtgtaatgcactctaattttatgtttgtattctttaattctatcggtcggggggttttctcgactttgaattgtgattaggtagggcattctttgacttcgagtcgtgtttgctgactgaatactcttgaaatgtttgacggggtggttttaggttttctctttgtgaacttgtgggttgcttcgattctgattttggaaaattgctgtttaacatatttaatgttccttaatcatgtagcaacgtgaattcaaacaccagaggttgagcaccga

SEQ ID NO: 64396 - DNA, 709 bp, Cucumis sativus
  Intron number 1 from transcript Cucsa.142940.1 (locus Cucs a.142940) derived from phytozome v7.0 (chr-ID scaffold0107 9; pos 1259656 to 1260364)
ccccaccatcagtttccttcacttccctcctccaggttagttcttcttcttcgtgtttggacccctgatccttcttggcaacttgcaattttctcccctttttttgaacttcattccttagtaggaagatgaaaaacagttgtttgtagcgatttctcttttctgaatttctcatgttctgtctgtctcaatgaggtcgaagagcacttgtgtgctgtattttggctttgagatattatactatgcacattcccttgtagtgtttctgaactttggtggtgaagatcatccgggtgtctgagtttttccaactatggtaggtatagactttgggctgatgaccgtgaataaaccctaaaccctaaacccatgtctacattggcaacttccaaatgtttcattcttgtcaatcaatccaattagaaatatatctaacttttgattccttagatttcgtctgtgtttggtttagctcttgaagtcttttattttgaaaataagtcgttttggaaagaaatggattgttttacatcactcaaagtagctaatttttcgaaatttaatcgaaataggttttatctgaagagttcaatgtttaactttagggtatcttattgcttgttttgtttgaagaggatctctattatctttgcttagttttagttatctatttcttcaatttgattactagggaggatctagtcagtga

SEQ ID NO: 64397 - DNA, 1045 bp, Cucumis sativus
  Intron number 2 from transcript Cucsa.195000.1 (locus Cucs a.195000) derived from phytozome v7.0 (chr-ID scaffold0134 9; pos 2676 to 3720)
gaagcaacttccatctgggttgcttttagtgactggtgagttttcagcattccctgtaattgcctgtcttcataattttttatgtagtagcacatcgtgttggggtttgggaggttttattatttatacatggggattaggttttctcttctttacattcattgtgtactttggattagatttgcatttggcagtgtcattttttatggcttagcgtcttagcaattgttggcttaagctttacaaactgatattatcttaatgtgttgccggcatagtgtttaccattgagaaattagaagtaggattccttgggatttagattttggtagtattaatagcttaacctcggaaccaattaatattgaaatgtctcgtgccttgcattctgatttctgcccatatcccttgcaatggtctttacatactactgaaaattttcatgcctccaatttggccccagagacgaacatcaacgttataatgggtgatttcctattgcgtctggtcttttgtgagaaaggttgcttcttgtggttggcgagggtgtgtactctcatatggaatctttgtgggtaaaaaaacaatctagtgtttggtgggctggataaggagtctagtgatgtttgggccctttttaggttttccctttagacttcaaatttgatttatttgtttatctactatatgcactattttgatcaattgggccttgtttctttaatgagtcttttgtgcttgatttttttgtttttccttgtatgctttcattttttccctcaattgggccttgttttttaatgagccttgtttcctcaattgagccttaagtggtttcttgatcaaagacatgtcttaatttcctaagcttcatgtgcaatatctgggagggattggcttgatgatgcggattgtattgtatgtttgggagaagggttgcatataaactaatgattagatgtggtctgggattttagatccgaaattcttgaacctgccgactatctgaatttaacggttgtcattttaggtccattcaaagtca

SEQ ID NO: 64398 - DNA, 1036 bp, Cucumis sativus
  Intron number 2 from transcript Cucsa.209330.3 (locus Cucs a.209330) derived from phytozome v7.0 (chr-ID scaffold0146 6; pos 56647 to 57682 reverse strand)
tgtatgtactttaaattctgtattatcactactttttttttctttttgggttttagacatatctgtcaccagtttgcctcggactgctaccatatctctctaaagttcttattctagtttttcttggtttattgttatgaattatactaaaagaacaagtcctatagttaaatatctttgtgtttgcttaaagtttaaatgtcttctttagcatctgtaacggcccgagtttaagagggggacatgaatgaaccagtattacatcacggatcctgaggacatagaagtaaggttaagaaagacataaaagaattgaaagttactaactataccaacaaggtccaccttccttttcggtggctcgatcataggaattctaatactaaacatgcttaacttagaacaattctatgttgggtgacttcctaggatgcatgtgagtgatgacaaaacatgctaaaaagactcgtgttagtttgtagagaactttatctctaataagcttttaagacaagtaaggatgatgttgtcacgttgcatgggatgtaggagaatatcagggatccgagtttcgaatcctaggcctggggcgttatagaatcatttttccttttatggcttcagttagccacaaatcagcattattatcgataacattgtcattgctgttgtcaaagatgtgatggttactattcttttgttaagatgtcaaattttttccttctcataattacattatcacttgtacaatgtactcattgttattactttgagattgtgtccaaaccagggaaatactaaccatttgattctctactaaaagattttcgcatcttcaaaatattttgataggatgaatgattttaattgaacgggttaaccaggcccaaattaatggaaatactcattgttgtaatgaagctgaaaggtcgtttgggttgtaatttttcatttctagaatcattaagatcttattaaatttgatattttactgctatcaggtattacactgctccatcaggcaagaagcttcgtt

SEQ ID NO: 64399 - DNA, 739 bp, Cucumis sativus
  Intron number 1 from transcript Cucsa.250450.1 (locus Cucs a.250450) derived from phytozome v7.0 (chr-ID scaffold0221 9; pos 604599 to 605337)
gaattgtggtcagtaataaacccttcattattccatttcaaatatttttactaaattacaaaactacccttatttacaaaatctatcattaattttttgaaataattaatatatcacatagaattttgaaaaaatattttttccatcactccttttagtcttcctttggactctatttttcaaaatcatatgcatttagttttttctctatctttcaaaatttacactttaaaaattgttttttttctttaaatcgactaatattaatgtctattaattaatataaaattattttaatttttaatttattttgaaaggtattgtaatagaactcgaaccacctcttatgtttgagtacaggtagatgttagttgagttgaaatcacttttagtaaaatttgaattttcaaccgtgatgaattaataattttaatttttttcaattaattaatagacattaccgctaaagatgacaagtccatatttagtgggaaaaaatggggactaaaaatgtaaatttgaaaccttaaaattaaatttgcacaaaataagaataaaattatataagattttgaaatgaatggactaattagttaaattgaaactaatcttcaaacttgaaaactaaataaaaactatatagaatcaaaatatatttttccctcaagactacttttggaacatggatttcttctatattaattattttgttcaataggcattgttggtgtggatcaaa

SEQ ID NO: 64400 - DNA, 1059 bp, Cucumis sativus
  Intron number 1 from transcript Cucsa.160920.4 (locus Cucs a.160920) derived from phytozome v7.0 (chr-ID scaffold0114 4; pos 1001906 to 1002964 reverse strand)
aggtccttgtagagctctgcttgctgatcttaccggtaagtttttcggtataaagtttgaattttgatatctctgttagtatataatttcgtttgtagagattcttaagtgtttagcttcaactcttcgtttagacatttaccgttgtccctatattactagcgtgcctcccaatttactgaagtaatatcaaatatgctactaattcttgaattaaggctagtggtgtgtatttctattatgatttctcctttataatttccatgtatgtcaatattgatctattagggggtgttggggacattgaagtgagttatgaaatttgaagtcaatatgttggagttagaaagtctctgttagggtggttaggggtgcagagatgtcagacggagttccttgatagtagtttttccacttggctaaatatatatgtatatactagaaagaaaaattaaaatcttacactgcgccaatcattgcaaaaggttctaaaaagtcagtcatgtataaggtattttgctgtaaattgtaatagtaaattaatggttgttgtaaacaaaaacacgtgcagtaatttgttgttaaaggacaacttatgtgaatcttgaaaagttttaattcaaatcaatgtgatgatttatgtaggaaattaaatacccttttgagtattttgatgcttaatgttgtggggtggaatcatttttttgtgggattatttgtcccttgcacccaaaattatataaaaaaaaacaaaattttgtagtttgattttcatcctctagtataaatggatttgagctaatgtgctgacatgctaagagggcagtttaaggattagaactaagataccaacttttgtactcttcaaatgcttgctaatgcacacaatcaaggccccctcccctttcaaaaccagtagttcgtggtcgtgggtatgacatgtttggttaaacctaactacctaataaagatcttatgttctgtggatcttgagacacttatgtttttaaaaaattaatattgtgctaggaaaggatcatcgaaggaatcgagtggcaa

SEQ ID NO: 64401 - DNA, 653 bp, Cucumis sativus
  Intron number 4 from transcript Cucsa.232460.2 (locus Cucs a.232460) derived from phytozome v7.0 (chr-ID scaffold0198 9; pos 408657 to 409309 reverse strand)
ggggcagtgtcgactttctgtgaatatcttgcaccgtaagtacttctattgttaatgaacaatttcagttgatgcatattcaacaacctatgaacactggagcttgatgttgatttgagaaaaccctccttatgtatagtatatgtgtgtcatctaacctaatttgaacatgaaacgattcacaattatcaatcacaatttgtatgctgattgaattgttttttgacctcggtcagtgtttagaaaacccactgaggccccttaatgaagcccacttaaggggtgcacgtcaatgtcttaaacctgatttcctaccttcttttttgtgtaccatgcaagaatattcttaccatcttcactagaagctctattttttctgaacgttttatcatcccattaatcatcatgctatttttcttcatacgctatctttttttagagaatactgaccagggcaaaaatagagatgaatgaagttaaaatgaattgttgtatttctgccttctggtatatagaacgaattagagatcaaatcccaaatgtgcatgtctttagcttactgtttgtactttctaaagagcgacaaaatcaatctttcttcctcttttacttgtacaggctgctgcatttgtcgaaaccaggaatatccacag

SEQ ID NO: 64402 - DNA, 432 bp, Cucumis sativus
  Intron number 1 from transcript Cucsa.272110.1 (locus Cucs a.272110) derived from phytozome v7.0 (chr-ID scaffold0250 0; pos 799176 to 799607)
gatccttacagggtatccctctcttcatgccctaattctcatcccttccattttcaatatcttttttgttcctccttattaatcacgcctttgcctttacttcttttcttcaacgttgcctttttggctcttgatattatcgattttattattagtattttattttaatttattcttatcggcatcttgtttttctctgcttttgtttctaattgtttgcgtttttatcggataccgatacacggaacgtttgagaattttgtttttcttgttttcgttttatatcttttttattcgatgatgaacgaaggctttgattctatggaggatgtttagctagtttaattgttgtgtatatttttgctgagtttttttttcatcttttttaacgatgcagcaccgaccttcaagtggctacaacacccctttctg

SEQ ID NO: 64403 - DNA, 822 bp, Cucumis sativus
  Intron number 2 from transcript Cucsa.272110.1 (locus Cucs a.272110) derived from phytozome v7.0 (chr-ID scaffold0250 0; pos 799635 to 800456)
gaacaacaactcctcgttgaccgttggacccaggggtaagaattggtttctgatattacggtttttgatttagttgttaaaacatcagtaagattatgttaatattgcgcgtttattattattattttggttgatatatggtggtttttatattatttgtaatagaagttactgtgaatctgggtttacaatttagtagtaatgaattgagatgtttggcaagcctctcccctggttctcccggtcaaggctcggagaattagcgaggttggaggctctaatatctagttattaaaagagaaggctgttttcatctttggaaattcttagacgttagctctagatttaattacagcttatacctgtaagtagagaaggccatggagatttgtttgttggtcacatgtgcttagaagctattcaagttttcgccacttattaatcctgcgttgtgctctaatgtgaattaagaccagttgctgaaagttgatggtccattttgttattaaaggtgtatattctggtagttgttgaatgtgagaaaaaaattggtccccggaaaacttgttttgtgattcttgtcattctcatttacacaattcgcaatatgttgtccttgcttgacgaatattttctgcatatcttaattctataatttttttggcaaaattgttttaaatcttgctccatattgggatggataagaataccaaaaatgtttgattggtccattgtatttgaaggacggactatcgatgaaaatactcatatatgttttatttggcaggtcctattctccttgaggattatcatctagtggag

SEQ ID NO: 64404 - DNA, 161 bp, Cucumis sativus
  Intron number 3 from transcript Cucsa.259460.2 (locus Cucs a.259460) derived from phytozome v7.0 (chr-ID scaffold0222 9; pos 5941219 to 5941379 reverse strand)
ggccagggtagacctctctcactacgtttttctgtgcccttcgttcttccttttgagtttatgcaagttagaagctgttttttttttcatgattagtagataggtattttattctaacttttgggttgggttggtttagggtgaacgaggtcgtcatcgcg

SEQ ID NO: 64405 - DNA, 917 bp, Cucumis sativus
  Intron number 2 from transcript Cucsa.259460.2 (locus Cucs a.259460) derived from phytozome v7.0 (chr-ID scaffold0222 9; pos 5942156 to 5943072 reverse strand)
aaatctggtatattgcaatttctttaatgtagtatgccatttttaacaaagatgttagtaagtgggtcataacttgtgcagattgtattgtacgaaggatcccttctgtggtcagctttgagtgaattgattgtcttgaatattgctcttaaaaccttttttttttggtattgccatcggtggaatgagtgtgttgtaatgtgaaactgtattaagataatagatgcaccaaaatgatcatgttcattttggtgtcatacgcattggatgttgcatctggattattgatgtgtgttttaatctgaattctttgatgttcttgaagaaccatactcctcttggctcacagttgtctgcatgtatgcattgatggttagtattgtcaagtataattcctacttttaagcttcatagcttggagttttgtttggtttttttttttttaacattcttacatgtggatgtttgtgcattcactggaatcatcttacgttttccttgctaactgaaattgcttactttgggcatgagttttaaattatctttattttctggaaaatatccttggtcctcacccaccttgccctacatcgtatgaagttatatgtaaatcaacgattttggaaattttggctatagggtttattaaattgtggtattatagtgcaaggcttctccacagatactaacactaagtgtaaaagtaatatcacgtttttatgattaatactaaaaccgatgttttttacataataaaatccagttcagtgacatggatgcatagctattatgctgtgaatatcatccaatggtccatttttctgatgaaaacttaatggcaggcacaattgctatttttatggggaaaacctccatataagatgtttcttttgacgcaggaatttcttctaaggaaa

SEQ ID NO: 64406 - DNA, 844 bp, Cucumis sativus
  Intron number 1 from transcript Cucsa.258910.1 (locus Cucs a.258910) derived from phytozome v7.0 (chr-ID scaffold0222 9; pos 5642894 to 5643737 reverse strand)
tctccagaaagatcctcctacttcctgcagcgccggttcagtattctttctactctactttctttttgctatctactatttcttcacctttttaaggtcgatctactgattgcgtccttacaaacagcatcggtgacttagaacaagtttcttcttcttcttttatttgtaaattaagtggatccaaatgtttgtttgtggattgcgtgaaatagtatcaactcgggaattcaattatcatgttcataattagctaatcatatggaagtctaggaatatcggttttggactttgtaacgtttacctgtcatctcaaatttacggttgaaatatggaatatggtttcttggttgtctcttctcaaaataattgatcgtattgtggaatggaatttggatagaaactgaagcgtgcattgtagtttgatttttttgcatatgctatggttgttgaagcaagactctattgagtaggaaactatagataccagtggatgtactgtcttaatatagttttctatattccaaaacgctattctaagaatcttcaagtttgaattatagttgataaaaaaattgagctaaactcagagcggtgtgatcgcttaagatttaggtaggagattataaatacatttttttaaaaaaggttggagattataaatttatgctctgtgtctgacttagataagaaaaagaatcaaatggcacaatataagacaattgttagatgtttattttttgcctgaattagtctgtgttttattaaacctattttgtttctcctacaaatgccacaatataagacaataagttgttctgtaacaggtcctgtggctgaagat

SEQ ID NO: 64407 - DNA, 664 bp, Cucumis sativus
  Intron number 1 from transcript Cucsa.286240.2 (locus Cucs a.286240) derived from phytozome v7.0 (chr-ID scaffold0265 3; pos 2340043 to 2340706)
ctcgtttgctcgacgcctatattgactgccaaaaggtgaaagaaatgaaacgctaagctctatttcttcctttaatacagctaactagcttcatgaaatccttaatcataatactctccttctttgttaattattattattaattttgttttctctttcttttactcacagagagcataagctttctcggctttaaatgcttccgcagacactgtcaacgaagacggaaattaattaggatagagagaatttggctatttactagaacgctttctttatcggttttttgacctgctgagggttcagtttttgtctcctttcacatttatttctctttcttttaagcttcgaacgtcgttttaccgaatcgcatgattatgcctatctgatttctggatttggctagaaaggggggaaactggtagagatgagaattgtcagttttgtatccaaatttatttcttgaaggcgagaacaatgattgttagtgttcttttagttgattattgtatgatatcgaggcgcgtttgaagttcgtggatgagtttttttttttgatttttttttcgttgttacaaactgattctcctcatgaatattgaatgagatgcggggtttattgtgcgcaggttggggcgcctccggagattgcacatttgttaga

SEQ ID NO: 64408 - DNA, 995 bp, Cucumis sativus
  Intron number 1 from transcript Cucsa.138770.2 (locus Cucs a.138770) derived from phytozome v7.0 (chr-ID scaffold0106 6; pos 59333 to 60327)
gagtagaaatcaaaattaaactacagaagaaattggtaagaaaacccatcgattcccatcccacccccccttcagttttcttttatgagtttctttttttcttcctaaatttcgaattattgttgaaaagatctgaactttgatggttgtatgtaattattgtcggaagatagatgttggtgagcaagcaattttggatggctgatgatattctgatctgattcgtgtttcatattgttagtgatgatcattacttttatgggttatggatttttagaagattttgctgccagttctgatcttgataacttgtaatctttgggggtctatttgtgttttggaattccgagggtttgtatttttcaattcagccactgcaaaaacatttcatttatcctttgtaatttaattaataccgaggacttagaactctacaataagtggtttttgaaatgatacgagtatctgatcatgtgatttactgttttgacttttgaggttaatatacgtgcacaaaagtatactacttgttattaccttcagcaaggatgaatattgtgtgttacatttaattccttggagctgatcatgttttgtagaatggtgttacctatacaattgttctcacaccaatggtcccctcgagcctgttgtattaatcaattacattgatatgtctgtgtgtttagaccttgttcgttgatctagtagaaccagagtgattttattagtaaagcttgaaaagatttggattagattttgatgtttctgcacggtgagttggtcactgacctatggctcttcctaatagttcagactggttttaatggatatcaggtgctaccagatcagcttgagtgcatatctttctctgtttcattgcatccgtgttttttatggttcttttctccactcttactatattttcttttatggttcttgtttcttctatgggtatagaccaagggtactactagaaggagagttgacgacaa

SEQ ID NO: 64409 - DNA, 978 bp, Cucumis sativus
  Intron number 1 from transcript Cucsa.283840.2 (locus Cucs a.283840) derived from phytozome v7.0 (chr-ID scaffold0265 3; pos 807264 to 808241)
aattttcagacccagccaagcttaaaaccaaggtatgatttttcttcttctgggtttttatttgaattgtcataagagtatgaaatggtgatatggtgaaggtttaagagtcgaatccagagttgtaattaagtttcgcaagttaaacagatgagagaagataagatgtatctgcacttatacagtgaaatttctggaagaagttctacaactataagtaaactgaggcttagagcaaagaaaataggaaatgcccaaaaagagagtagtgtaggtagagagtggagtagtatttgttatgattattaatggatttgtctgcattcagtaaataacattagatctattaataactaaggcatctttggttaaccgttttgttttttgaaaattaagcttctaaaatttgtatgttttgttgtctactttctaccaacattttaaaaacccagtcaagttatgaaaactaaaaaaaagtcattttttagaactggtttttgctttttgatattgaataggaatgcaaatgtttcttaaaaaaaatagtgatattcatgttaagtaaattaggaaacaaaattgttatgaaacaaggccttgacgggattccgttgacgtgtattaaactttagttcgttgggttaaatattagtttttcaaagtagagaagtgtgatttccgattcaacattgccttaacgagaatggtttttttggctgaagcctcatttgatcatttaactactttattatcgtttttggctgaatttgttggccaagtcctatggtctctgagcaacacctatctaaagatcgttgttataatgtcatcttgatctcaataaggtaaactgttgacgtttgagtctaggggcaaatccaaacgtttatttcctttaataagtacatcaataggactggtgattaattgtcaatttgtacagtgtgtatttgaggacaaattcattgcacgtgattc

SEQ ID NO: 64410 - DNA, 878 bp, Cucumis sativus
  Intron number 2 from transcript Cucsa.182190.1 (locus Cucs a.182190) derived from phytozome v7.0 (chr-ID scaffold0125 1; pos 261212 to 262089 reverse strand)
acgaggtatgttgttggagactcgtcttaattgaatgctgtagattgtttttgtttcttgtatctgattgtattcggattttctttgctcgaggtgtgttttggggtttgattcttgtgaatctagggaatctaattgagaatgacatccaagtttgatttcttgcgaacttagttagctatcttaggccttcttctggagcccttttcttaatctgtagttaatggtataggtttgtcatttcgatctttctgtgatcggatcgtcatttccttttgatccaagaagatagaaagagagattgacaaaaatgatatctttataggttcggtcgtcccccttctccaaaatgatcagggaatttttaacgaggtttctattattcatcttcaaatttgcttgaagtttcgacaagtttcaaattgttctttcctcattctctgttatttcctttgttcttcaaaattgtgaaaagggtgcaatactcgtcaatgggagcactcgtttaaaacataactcagaaaacactctgtagaggatacatcgaaagggttcactaggcaactcatattattgactagaggctgccatgatcatggttgtagtgcaatgtggttcttgggattgctagaagtgcatcgcttaattctatagcctgagctaagaaagggatttcaagttggtatcatgtatcggatatttgttgttcgatacttcccaactcatgctataatagtcatattgataagttctcggttggtttttagatgctcattgcattactgacgagaatattctttcatcacaagggtgttgatatctattttagccttatactttacagtctgaatggaaaaccattaactgtgcaggtcagc

SEQ ID NO: 64411 - DNA, 1011 bp, Cucumis sativus
  Intron number 1 from transcript Cucsa.156970.1 (locus Cucs a.156970) derived from phytozome v7.0 (chr-ID scaffold0114 1; pos 104328 to 105338 reverse strand)
gggaacgtgtggttcaagcatatgggtttgtacttaatcatgacaataattagccgtaggctctcatggggaaaaaagaactttcccacaagaaaacacacacaaaaaaaaaaaaaaacgtttaataagtctagaagatcaaggttgcaagctgacttccattgaaaacttcaggattatcttatttgaaggaccgacaaaatctttcacaaattccgtcatttatataacagtatcatgcttgattcttggacaccattttagctgtttatgatataactttagtttaaaccagacgtattcgctgctttgaaatccttcacaacctatctggttgttgtagagaactgaattccgctgtttaaaatactttgaaatttgggattcaacttatgactttctgatgctgtagaccagggcaggtatagtacaaattgaactgaaaaatctaaaattaacctctgaaattctactaagattcttcaaaagcctctgagaatctgtcagaaaatcataccatatttgaaatctaattgaaagaactgaaacttgtcttaaaaaactctagaattgatttatgagaagtagaaagtggttctgtaaaaccactttacaacgtaatcgtatgccacactctcaccttctttactcaacagtaaaagaaaaaaaaaagaatgccagaagatactttttgttgttgtcaaggaacagaagataggaaaccatcattacaatactttcagggatctgaattcccataaagcagccttatattctatttgtttcttcattttcgaaaaaaaaaaaacaatcttttatgttctgggtgtctcagaatggattacatctattctatatcaggcctgccaagtaataaggctcaaatctgatggtcatttaaatttaagactgcttatctctccactaagcatttcacagaccactttctctaggcccttgccttagttgtctctcactatctaaaccatgctttcttcaacaaggaagacc

SEQ ID NO: 64412 - DNA, 202 bp, Cucumis sativus
  Intron number 1 from transcript Cucsa.196390.1 (locus Cucs a.196390) derived from phytozome v7.0 (chr-ID scaffold0135 7; pos 84692 to 84893)
gtacctaccgccgtgtacgtatttctatacccctttttcaattttggttgtgtttgattcttttcttggaagtcattcacgaaacccagaaaaattagtgaaagattgctgtcttaagctctcattatgtttggtggttttatttcctatcatgatctctttgttttttttggtaatgtcgatgtttttttccagcgtttca

SEQ ID NO: 64413 - DNA, 301 bp, Cucumis sativus
  Intron number 1 from transcript Cucsa.177460.1 (locus Cucs a.177460) derived from phytozome v7.0 (chr-ID scaffold0122 5; pos 1459798 to 1460098 reverse strand)
tggcgttagagtctttccggaaattgactccccgggtgagttcaattcggttaattttgtttttcttgtctcaaaatctgaaccggtgaattgggatgttttttgtgtgatcttgatttgtttggttctgttaatttgcttgaaaatctcttacgtcatcttgttttagcatgtatgaagttgggttctatcttccattggtttatcaatgactcgaaactgatgagttaagctgtaatttgtgaagaatttggcataatgatacatagaattgttgtgtaattgcaggacatactggatc

SEQ ID NO: 64414 - DNA, 249 bp, Cucumis sativus
  Intron number 1 from transcript Cucsa.161710.3 (locus Cucs a.161710) derived from phytozome v7.0 (chr-ID scaffold0114 4; pos 1542048 to 1542296)
ttcgatcgttggaggactctcttccgattaagtaagttggtttttttttttctctctctctctttttctttttctgtgttctgtgtgttgttttatcgattaattgattgagatcaagaaacgtttagagaaatataattgtgttatatatatcttcttcaaacaatcttgtggtccaattaatttgaaatttggtgaaattttgaatgatcaggagagggttatcgagtcatttctctggaaaatcga

SEQ ID NO: 64415 - DNA, 513 bp, Cucumis sativus
  Intron number 1 from transcript Cucsa.179950.1 (locus Cucs a.179950) derived from phytozome v7.0 (chr-ID scaffold0123 3; pos 320158 to 320670 reverse strand)
ccccgttcggcaggtgatgaaggaaatgtgtagtagtatcatttcttcttctttcttttatcgccattttttaagtcataatgttgcagcgtaaacttgggaaatggaagagagatttcgtgttctgatgaagtcatgtgctttttcatctagttgatgtagggttttgtgaaacatatataaacttctattaagaacctcgagaaagatattgatgttacttaaacctttgttataatcatctagaaattaatttagtaatgtgtaatggattcatataatttttgttgattaaaacgtacttgttctttaaccaactgggtctaatagattagggtactagtacccttttcaaaaaattgtggaagtacttttttaaagtcttaagtttgttattatcattttgaattcaaagctcattaaactgttcctgacgcaataacttttataattacatgttagtatacaatgcccttactttcttctcatgttcatacaattgttctcaggaaa

SEQ ID NO: 64416 - DNA, 698 bp, Cucumis sativus
  Intron number 1 from transcript Cucsa.284460.1 (locus Cucs a.284460) derived from phytozome v7.0 (chr-ID scaffold0265 3; pos 1232061 to 1232758 reverse strand)
agaccacaagttgttgtagttgcatcaactaacaggtagttatcttctattgttctactagaaattctatcattgttaaaatattgtctttaaatttttacctaagatttaatatcctacaagtttccttggcgcttaaatgttgtacggtcgtgttgtcccgtgagattagttgaagtgtgcattattggcctagacactcgtggatataaaaaaaattgtttacttctatcaaactttagttttgtcgcctattattaattaccttttaaattttaattagttgtacgtggagtttgctatactttgacatataaggtgctatatattccatggaagtatagaatagttaattcattcaagtgattgttaatttttctgaccttggcgctggtgagagaaaaattgtattatagatagcaatatgcaaagtccttggtgttttttctctgtctatataataagctgttgggctaatgtgttcaagatttctctctttctctctgtctcaacttgtgctgtctcattacattacatgggtaaaatattacaacagcactgttggtttttgagtgactgtttagcgtaaaaataattgtacctaactggttaatctttctttgctcttttttccttttatttgtcagtttttcgctcgttgtctaaatatttgatattcactttttgttaaagagtgg

SEQ ID NO: 64417 - DNA, 415 bp, Cucumis sativus
  Intron number 1 from transcript Cucsa.139200.1 (locus Cucs a.139200) derived from phytozome v7.0 (chr-ID scaffold0106 6; pos 384561 to 384975)
gtgatgtattttggaaacagccttacctgattggctcgcctttgactacttagtatcaccctaaacccatcttaaccttcttaacaactcttccatttcaagacgtttcttcctgaatttatgcttttcatatccttatttatatttgtgaatgtttagattaacttattttttactattagatttgagtgttcaaacaaatgatatttagaagatagtaattaatatttgcaaacacacttatttatttctctaatttcgtatattagtattaataatttttttataaaaaaaatatcaattttttggtactttactttactttcttgaaaaacccgttgggtatttattcgttttctctttctcctctgtcgtctgagttttatcatcttctttgactctcaatcttcaaagt

SEQ ID NO: 64418 - DNA, 543 bp, Cucumis sativus
  Intron number 1 from transcript Cucsa.240480.4 (locus Cucs a.240480) derived from phytozome v7.0 (chr-ID scaffold0204 7; pos 534053 to 534595 reverse strand)
accctcttgaaggtcatcatccttggggatagcgggtgagaattcattgttcttctatttcccttttaaaattttgcttttggggttgttcggattcctctttaatactcaacagatcgacccagatcgttacatcctgaacttaggagattttcttttgtgggttctccaatttgctgccctttgatctggaggggattcaaatgggggttttaagattgaagattatttgtgcttggattttagattgtttgatgatttgggcttttttttcttgcttcttttttttgttgggaacacttgctttgtgacttactttctatttttgggctctgttggtgtactttttggaaagtgacttttgtcttgtttggttgatagtgtactcaaaccaattaggctgttattgaagggtctaatgtggggaactgacacgtttggatcagttagttgtgtaacttgtgtttagtttgttctatatgtgtgatatatggtaatttgaagctttcttcgtgaatttgcagggtggggaagacctctttg

SEQ ID NO: 64419 - DNA, 726 bp, Cucumis sativus
  Intron number 2 from transcript Cucsa.242370.1 (locus Cucs a.242370) derived from phytozome v7.0 (chr-ID scaffold0204 7; pos 2119478 to 2120203 reverse strand)
cacggtggtcaagggctagaaccagggctgctaaggtaactaaaaatctaaaacaaaaaacattatttgttgcttcggttcttatggatcattggacctatagttttaagttttagaaagtatttgatttatagtatgcaaatgaataacacctccgtggaggcctaaaagtattaaaagcaagtaagagggagaggttcaagaattattacggtatgatggttggatcatccaccttccgatcctgcaatagtttcaaagtgatttacttttaaggaaaatcaaaagtacatatatttgaaaaggaaaaaggtaaaattgaaaaacataataggctttccttttcttttctttttcatgagcatttgctttacggattttttttacaagagaattaaaaattaaataattatccaaattttcaatagaaaaaactatattaatgaaatattaatttgtaccttaacagaaaaatgaaaattataaaatatttgattgatattttacattctaaagttagttaggctatctatcatgtaatttgcctataccttaagtagggtctactccactttattttttgggtttgtaaacccattcttgcttactttgtgatcaggtgaaatcaccgatggatccaaaagctttaaaactataatatattcaatctctataggcattcctaacacaaacgtcttccgtaggtagggaaaggtttgtcaaagg

SEQ ID NO: 64420 - DNA, 643 bp, Cucumis sativus
  Intron number 1 from transcript Cucsa.136820.1 (locus Cucs a.136820) derived from phytozome v7.0 (chr-ID scaffold0104 4; pos 1421471 to 1422113)
gagttcgtcttattgcttgcggtacacctctcaaggtaattgattttactcttcacggattcattgtcttttttcttgggaactgtagattacgattcgactcaatcagcaacaaacttagcctataaaggattccattagccttatacctctttcaatagcaagcctgcggtgaacagatttattgtcatgtcagtggtttggtacttggggatgcaaagattattgataatcccatattgggttagaagtagagaagattgttgagacattaccttcattgttattaaggctttcaagatagaagctaagagtgaaatatgcatattccgactcgaagtagataatatagttgtaccactatggagatgtagagagatcccttggctctttgtacaagtttttacaaaagattaccactcttgccaacattgctcatttcgtaggtgcaagctcaatatgatgatacttgtgatgaaaaagatttctgaataattttgtacaaaagacataatgtacttaatgttcgtgtccttgctattctttgatgtatgatcttgctttcttccacatacatgaaagtcatattgttatgtcaatatcaataggttttgagaattgtacaagcagagggtatcagggg

SEQ ID NO: 64421 - DNA, 637 bp, Cucumis sativus
  Intron number 3 from transcript Cucsa.301490.1 (locus Cucs a.301490) derived from phytozome v7.0 (chr-ID scaffold0294 5; pos 11183 to 11819)
gtcttcttccaaggaatttctccatctcattacaagtaaatatatatatatatatttcttttcaatttcttttctcattttattgttcttacttgttcttatgattacttttcttctcttttttgttattttggtagcttaaaaaatgtgacatatgcatgttttttttggataatttgttgtcaaaatgttaaaacttttttcccttgagagttttgacttggttactcttataatttaaaatttttggtttaatatctatcgttttcgatatattatttttgttagcttaaatttttacatgtcacgtgtaagtgaaattgactcaataataattgacactccagccctaattattgtaaaagaaaaaaaaagacacataaaataatgtatacacgtatgttttgaagagaaaccctattggtaagatcaaaactatcaacatttagtaaaactatcaacatatcaacatttagtaatgttaagatgaatttgagaggattgaatacaataatatcagaactaaattgaaacttcaagagagttggatttggattgggagacatagcaaaaatgttattaattaaatgttttatttttcaaaactaacaattttttgtttgtttgggcagtggca

SEQ ID NO: 64422 - DNA, 497 bp, Cucumis sativus
  Intron number 1 from transcript Cucsa.303540.1 (locus Cucs a.303540) derived from phytozome v7.0 (chr-ID scaffold0295 1; pos 1427703 to 1428199 reverse strand)
aaaatgtatgagaaaaacgagtaatttcttttgtggtggttgtttaattagtaagagtataaacaaatcatttaacttttaaaagtcagtgttctttaataagagcgtcatagtagaaaacttgtgttgaactttgcaagacaattgcatggtgcacattctacgtttaggaatgtttaaaattggattgtataaagtgatcttaggtataacattatatgttttaggagactatattaatctcggccttcacaaacaaagttagcttcttaagatcaaaacacctaagttgcttaaactgatctaaccccaaatatggtgtcatgatcatgtcatttcttttcttaacattcataagtaattaacaacatatataaataaaaatgagacaaagccataactcattagtttaagatgtgagatgtaaaacatggcttctttttaaaatgttttggagtgtggtctttggcaggtgaatttggtgggaggctactacg

SEQ ID NO: 64423 - DNA, 974 bp, Cucumis sativus
  Intron number 1 from transcript Cucsa.263440.1 (locus Cucs a.263440) derived from phytozome v7.0 (chr-ID scaffold0231 0; pos 47940 to 48913)
acagaatctggtgaaggggcgtcttcaaatttcaagtatggtggtagaaccatctcaagagagagttccaacagtaactgtatgactctcctttcaaactccacacatatcaggccagactcagacagaagatcattaaatgtttgagacaaaataactgtgtgcagtttcgtcctgttcaaggcattatcacaaactccagctgtcacaacacgcattaggtacttaaataccttgacccgatcctcaattgaacactgatatgagtcccctccactttggaaactatgaagtgtagtaagcaaaagagaaaatccagtcacttcaccaaagaccctctgtgcagaattattaactcccagaatacgccacaaggtccccattgtttcacattttgcctcattgtgaagtccatactgagaccctgaaatgctggtgaccattccacttttcaaaatttcaacaatggcacttaattcttcgggatgggcctggtgggaagggggaaaatcaaattgtgcagtataaacacatctttaggcaaaactaattgtaaaaaatttaaacatgataaaggcacggaatgagatttatgtccaaatggccgctcattgcaactagttaagaagatagtacctgggcagtatcttctatgatcaaacatgacaacaaccggagaaccccttgacgatgtacattagacaccaaaaatggaaggacgatggccacaccattagatgatcgaaatgatgtttggctggcttcagccttcttcagtaaagaggcgatacaatcccatgcaacggtagtagtactctgaacttcaaaaataggaaactttccagagcccccagactccaacaacttgggtgaagaaagaattgtatccttattgtccaaatgcttcttgaagctgctggtgctggattttctttctagctggtgaaagttcccaccagcctggtcaggactct

SEQ ID NO: 64424 - DNA, 907 bp, Cucumis sativus
  Intron number 3 from transcript Cucsa.162230.1 (locus Cucs a.162230) derived from phytozome v7.0 (chr-ID scaffold0114 4; pos 1932572 to 1933478)
gcctaggtgataagggatcaaggtactaatgacttgtcttctttatgttctcctccctgtttggccggcttattagagttattttgctaatttttggttgacttactttgaatgaggttaagaagaaattatggggtactgatttagtatgaaacactcactttgaactctatggtacattacatgcaagtttcaaactttccattctaattcgtggattatatctcagtagaagactttctttttgtcttccatgccaaaaggaaagaagtggccgagtgagagaatgtcagtgtcttgtcctttcttcttgtgtatgttcatatatagaaagtttgacaaattctatatgcctttactagagattcttattctggttttttttatgggggaaggtaatggtacattgcttaaaaaaatattgctagttggcatttttatgtcatatctttgattctaagctatattgaggtgttgcctctatatgacaaattgatgaatggggaccacatcatgttttctgtccttaagaattagaaaaaccaaaattcaacataaaataatgattattattataatttatgagcctaaccaatatcaaacattcacatcatgaaaggagggctggtttcttcattattgggtaaccaacaagagtgtggtcccagtttcaaatgtttttgaatctatttggaggttgttttcgatattctttcatcgtaatctgcaaacttgacaaatcctttcagaattgttgttattgaattttagaaagcccatcggcataagcatttgtatttagttggaatgatggaagttatggcgtaatgaggacatctaatttattattgaattatttttaatcttttcagttggtctcagatcttggaaactcttcctctaccca

SEQ ID NO: 64425 - DNA, 902 bp, Cucumis sativus
  Intron number 1 from transcript Cucsa.286730.1 (locus Cucs a.286730) derived from phytozome v7.0 (chr-ID scaffold0265 3; pos 2719823 to 2720724)
aagaaaacattgttgatgttttgttgagaatgaagagagatggctttcaatctgaggcactcatccttacacaagattgcattaaagcactaatcatggtaataagctaaatattttaaaactttgattaggtggttctatatttttataatcatttcattcttgtgaaaattaattagattttttcacgttcgaacaattgtagagtggtcagttcatccttataaacatttgaattcggcaattaatagttgtctcccattggagctgtcatatattatacagcaagaaaataaccattcaatttaaaaaacacactcacaaaattacttgggtcacatgaaaaaattttaatggagtaaagttgcataaattagaggggtgcaacctagccagcatctaggtatttttttgttagctatgcattgcatctaagtcgttttttcctcgtaaaaatatatatatttttctttagttttcagaattttgaagggttaattttaagaaatatttgtggaaaaattattagataacaaacaaaaaaaaaaggtgtaaggtataaaataatgttcataagtttaattttcaaaatagaaatatttacgtacatctgtgtatgtttatgcatctctatatgtttatgcatcctaatttgttgtgtggtagattctttaatttacttctcttttaagttaatttgattgttttttcgggtaagcttagaaagagtcttaacgcatcaaaatggttgtgtcgatattattcttttcaaaaatttaaaagcaaaaaaaaatcaaatttctatcaaacaaaattcaagtttaattttttctttcatctcaaaggatcaagtgttgttctttttaggatatctttctagcaggagtggaaacaggagcaag

SEQ ID NO: 64426 - DNA, 896 bp, Cucumis sativus
  Intron number 2 from transcript Cucsa.259540.1 (locus Cucs a.259540) derived from phytozome v7.0 (chr-ID scaffold0222 9; pos 5979596 to 5980491)
accaggcggattgttggcttataatctctggaaaggtctgatatattttgtttttctggtattttgtgaaattatatgtttacaactcaatcgtacttccccattggaacagtagactcatatgagaccagattgaggtatggcagattaagtttctttgtttcttctacccatcttcacaaactgatagactgggtattcggtttaaatactactttgaccgaatttttaactttgattaaagtgtcagtttctcgaaagtacaggaactaagtaaaatacatctttactgcatggcatttgatgctcaagaaacttgtagaggttgagatacaggacactgatctttgtataatggaaactaaatgcacagaaaagctgttgtttagcactagaggaaaaatttgggcttccaaattattgagtttagctacttagtatgtgtaggattcgaaactctaacttctattacccacagagtctatctctgaaggtctaggtgagcagagactaagagtaatacttgaagagtacatctcagaacttcgactaacatattctatgtagaatattgaaatgcttttatggattgtcgggatgcctgtttaatgcaacaagtctctcggtctcccttttatacgtctaagtttcaagcatggaacttgggaatggaagatacattgtaagccatgacaacatatcactagagagtggaatgaaattacagcttctgaaattgtttctgctgttgttatatcagtactcgtctaccagatatgcatataatcagacctttctaacttgactgtccaaatttatatagatattttccttatttattcgtattgtcattctgtttcactgctttgtccctgtgcatttcccatgataggttt

SEQ ID NO: 64427 - DNA, 634 bp, Cucumis sativus
  Intron number 1 from transcript Cucsa.285300.1 (locus Cucs a.285300) derived from phytozome v7.0 (chr-ID scaffold0265 3; pos 1728543 to 1729176 reverse strand)
aaatcagtgaaggctctcgccgtgctaggttacaggtaagggatttcccatcattttaattgttaattttggctacgattcgtggattattattgtggcctttactagtttttgttcttcaggttgcgacgtaattgatgttgttgttgagtttatgtgtatgtagtcatactgttgtgaacacttgttcgccctaattttgttaggtgatatcgtctgcttgtctgactaggagttttagatagagatctaggggttttgattacggggagggtatggttaacagatttattgaggtggaatgacttagctttttagtttcgttaaggcgtggatgtgcaatagccagttgttagttttccgaattgaaatccttgtctcaaggacatttctttgtgtcttgcttgttctgttaacgaaattaaacagttccatcactttctccatccttttgattattgaacttgtttttttgttcttcatcgaacttgcgattggtgtaaattttaatattctgtatccttgaatggtgggttttcatgtttgatgcatgctcatttttctgcgttggccatgagtgttggagaaagtgaagttaaaattattgtccttggtttattttcagccggtgagg

SEQ ID NO: 64428 - DNA, 589 bp, Cucumis sativus
  Intron number 3 from transcript Cucsa.163800.1 (locus Cucs a.163800) derived from phytozome v7.0 (chr-ID scaffold0114 6; pos 211838 to 212426 reverse strand)
tctatctcctcccgttttgccgattcaaagtcaaggtaaggtcaacaactgctctgcttccgcagttagctttgtcgtgtattgtactttgtcccaatgaaatgaacagaacaaaatttgtatgttctttgtttgtttctcagtatgtggaaaccttggattgtagtgttgtgttttgtctgttgttgtttctttgtttccatctgggtaaattttctgagcagttggatttaatgatataggactggagaatgatttgagttgggagcaattaaaaatgaacttttctggattacttactgtcaactatgagattcataacttttgttaaagagatccctcagtgttgaaaaagctaaaagatgggcgtgaggtgaaaagaaggcttttttagtttttaaaaaatgattgatgattctgctttttctgcttccttttttcttcttctttgcctttctcttaaagaattcccccaaatgtttagcactgattttatgtagctcagtgacttcttttcttttcccatcctttcccttctgttaatttttgtttttccttgtagatcaatcggagaatccatcccaatata

SEQ ID NO: 64429 - DNA, 697 bp, Cucumis sativus
  Intron number 2 from transcript Cucsa.192320.1 (locus Cucs a.192320) derived from phytozome v7.0 (chr-ID scaffold0133 3; pos 198587 to 199283)
tggtaagtaagagctacttctgtttttggtccgtgtttgttctgctgtcaatgtgcataaaatgatttggaataaaggaaacttttcgatgtcacgctataatagttgttaatttgcatctaaaattggttattattttcaatattcagcccgtttctggaataataaatattttgtatcatactaatcactattggttgtctggttttaaatggataattagatgctctccaaattatgcgttaaataggtgatgattgtcaatgtgtgtatcaacattttccatatttgattgttactattgcatttgtgagaaattagtggaggcatgttaatttagttatgacttgcatagttctgtgtaaaaaagatcatcatgcatttaatttcatatgtattatcttcgaactttacttgattattcataaaagatctaacaatttttatgtaattgcgtattttagttgggaaattatccatttacaactagtaaataggaaagtctgccaatggttcactttattaccctctacgtattgaactataattttcttttgtatcatataggttataagacgatgttcacactctcgactggatcataaatgttgaggggagcatgatttccaaaatccataactagagtaaattgtattctttaggtcaattaccttggcggcacctccaggccaacttc

SEQ ID NO: 64430 - DNA, 1043 bp, Cucumis sativus
  Intron number 5 from transcript Cucsa.236120.1 (locus Cucs a.236120) derived from phytozome v7.0 (chr-ID scaffold0201 4; pos 112675 to 113717 reverse strand)
agtttctcagacaggtaaatcaattcagttctttgagttttcaagctgtctgcgatattgtggttactgtggagcttgcttatcattactctattactccagatcttttacagcttgccgaggaagaattattagttcatgttgcatgattttctatttgttatgcatgagacttctcctgtgaatgatcaaatgccactggaatttgttcagtcttgtctcggaagtttaggcatgcagtttttcctttcatgtcattatttgggaaactgttcctacagtaatggtccaagggactttttggtcgttaggaaagattgcatatataggactgaatggttcatttataatttgcttcatttccttggatttatttgttttgactagtttgtgattgttgttttaggtattagtttaattagctagcttgtgacctttattcctttaagctttgtctaaaacaccttcagagaatttttgtgaattagaatggtaccttaagttgaggatctactgccttggaggtcatttgtgcctggcttgtagataattgttttgtcctttgatgtagtagcttttttcttcgctggtgttatctgttctttacctctgcaacgtccctggcttgtcattttttccttccccttattgaaaaattgctgttttatctgcattactctgctattcttgatttagtgttttgtgttgctgaggtaatcacattgaagtttatgaggattgtgattaaatactacaattgtggacaatgatgtctcagaaaacagagttaatctcacaaaagatactgaaggcatatttgtgcattagaaaaataaaagaaaaatactagtacacccatgctttctttgctttcttcatgtgtttaatatgtgtgctagtctgagtgtgtttatttggactagcagatctttttcttttctgagtctcaattggttccaatttttggatgacgtcttaatattactattttgaccttatttttttcaggcaaacccaccagaccctaggacgtttccatttat

SEQ ID NO: 64431 - DNA, 429 bp, Cucumis sativus
  Intron number 3 from transcript Cucsa.236120.1 (locus Cucs a.236120) derived from phytozome v7.0 (chr-ID scaffold0201 4; pos 114060 to 114488 reverse strand)
aaccagtatccttcttaaaattggttgttgacaatgatattgatctgtgttttgagtatgtgatcttggaattcacggttgacttctttttatttgcccctttattaatgtcatgtcatccggaatttgtatgccttttgttccagtttatgtggaatatcgtgattcatcttcttctgttgttttgttaaatttttgacttggtgagaggtatgaataatttgttttttttttcaacctaagactgatattcttttttcctttattctttttgtaaaattaggatttcatgttgtttgaccattttgtatgctatttttttcgtatgtctgtaatatgttatttattgagatttgacccactagaagtcgatgttgagtaatcattgccattgaactagaatatggatcattgactagctaatcagat

SEQ ID NO: 64432 - DNA, 798 bp, Cucumis sativus
  Intron number 3 from transcript Cucsa.182170.2 (locus Cucs a.182170) derived from phytozome v7.0 (chr-ID scaffold0125 1; pos 250501 to 251298 reverse strand)
gaggtgaaggcgaaccgtacgtctttctttgttccttttgttacatctcttttattcaaaatgaaagttctgtggtggtatatatataatgctttttttggtctactatcttctagtagatttcacgtttctgaggttgtgtttattcagaattcagattcatttcagtcttcgtgatgcatattttgttgaaaacattggctgtaaagtgcattatgagtgtattatctcaatcatatacgcagcttacaatttccctctgagttggagctttaaataaactctagttccgtgttccatttaatgtgattatatttagacgagacatttggacagtagggtcaggtttgtataccaaaagttatatgtttggagtgtctatttcgtttgtaaagattggagttgacaatccatgtttatatttggtatttgtgtatcttagactatgaattaaatctgtgatactaagaactgcataaaacccaacttctgaagaaaaaaaaaaacccttttaagctacaagctaacttttgtaatcacaatccaacaaaatcgatgttgaaccacgagctgtatgagctttatactgcaaaaacatctcgtaccttgtaacatttcacagtggactatccaaaccttggcctctcaactcttggttacacaaattcaaactttcaagctcatgaatcgaacaccttcataaatggcctcgtagttggattttagatttccatttggcctatactcaccattttcctgtcaattattgcagacggagtcgcctccaaagcaagctct

SEQ ID NO: 64433 - DNA, 910 bp, Cucumis sativus
  Intron number 1 from transcript Cucsa.145050.1 (locus Cucs a.145050) derived from phytozome v7.0 (chr-ID scaffold0108 3; pos 16920 to 17829)
gttcttcttctgtaagttatttctttaattttctatttctcttgggattttgatgaaattggttgaggggaaagaggagtaagtcacgggcttcaggaatttcatctcaaattggtgttgtttgtttccatttttagtcaccggcattcatctacaacttctttcacttcactttcttcttgatagaatgtttaatttagcgcaacaggtttagttggtaactttatcagtttaacctagtttttcggtttggtgctactgattgaacgaaccgtctcttgattctcccgatctatatttgattgtttggctacagattttcatttactaatcttgtatattctcctagaaattatggatgatcttgattttgccattggaagaacaaaagaggaagaggggatccataatttcattcattttcatggagtacccaatatttggttcatagtatcgcctcaaacgatatgtatttgttgagatatgcaattttctgcatctttgaatatccaatttcataaattacgctcaggcagacaactgtgatgaacttttgacttttatattttggagcaccgctttcaactattctatttttagttaccgttcttggtctttgccgtatggacgatgtaatttagaagaatttaggataaggaaagaggaaattgctagatttataactagtagtggaaaaggagtttagttgcataaccatttaaggttcatacgaatcatttcaaagttaagttcatgaaagttgctaaaatgtacggccaattttctaattttgaaatatgttcataatgggatgctgttagtaagtaaaaaactataccctttttctgaaatttctctacgttttgactttgaaggaagaggttgccaagaagatactgtttcaattcca

SEQ ID NO: 64434 - DNA, 439 bp, Cucumis sativus
  Intron number 1 from transcript Cucsa.197630.1 (locus Cucs a.197630) derived from phytozome v7.0 (chr-ID scaffold0135 7; pos 960547 to 960985 reverse strand)
tctctaacctttcatattactccttcacttcccaggtattgtctcttattcatccctattttgtttctctctctttgttttcttttcttatagttttcttcatttcctcacttgggtctctttgttttttcacaattttccatccaatatgcctctttgctgacttttcactttcaaaatgctggaaatttcggttttttgttactgcaaatgctcttttcttttatgttgagtgtggagtagcaattgccactcatgcgatgatctaacgtatgttttgtataatttcttgcgtcggttgaaatgaaaaaaatggaatttttttttatcaggtcttaagttttacattgtttttgctttgttttgattattaagatatattggtaggggttatgtaattgcagaattctggcatttcattcggtttcacttactgttg

SEQ ID NO: 64435 - DNA, 492 bp, Cucumis sativus
  Intron number 1 from transcript Cucsa.285440.3 (locus Cucs a.285440) derived from phytozome v7.0 (chr-ID scaffold0265 3; pos 1815379 to 1815870 reverse strand)
tcatcttcatcatcttcattcaccggtagatcactgtgaggattccattatgacatcttagtttctttcttcttcatttgaattaatacttacaaaattaactatttgcgtcaaaatgctattatcttgaaatttattaccatctatcttcagggtgtgttatagcatgccattgaaaggaaacctaaatgattacaaggacaaagaattgtgttacgtggcgaaagataatttttctccggctccccctgccctatctgcccctgattttattaaaagattcatttaacgtggtttctaacgagttttcaaccttaaaagacattttctcataaagaaattataagatgatttcttcttgtttgagaaattgaaacaaaataacataaatctgagtattgagttttccttgttgtgtctagttttgtctactattaacaatatttgtaagggtgataagtcttgcatgctttccttttcacagagaaactg

SEQ ID NO: 64436 - DNA, 690 bp, Cucumis sativus
  Intron number 1 from transcript Cucsa.308930.1 (locus Cucs a.308930) derived from phytozome v7.0 (chr-ID scaffold0297 8; pos 895232 to 895921 reverse strand)
ctggagctctatttgttcttaaatctcgaggttagtgttggccttagcttcctacttcttccgtttttgtaagtatacgtaaatcgtccccatgttattttcaaatcatgttaggcgttggcatgacacacaataaacgttggtagctagtatgaaaaagtgaatggtgtaacttgtagaaatggagaattaaactatcaatctttaagatgaaagattatgtcaattatggtcggaagaacctctcgttagaaaaataaaagtgaaaatgaaaaaaaaaaattaaaagcacaataattaactttataaaattttcaaactggagaaaaatccctgaactagaaaaatccactacgtgaaactttactatcacacgtaataattctctcatgactgcaattataatagcactttcttgtagtaaactttatgatcgcactaataattatctaaaacttaaaatgtttctaactgagacgacttaaattagaggtatttgcttatcttttaccgtcctaggagaagaaaaactccatttctaacattttactaaaaaaactcaacaacttacaaaacaaacaacttgttaatattatatatttgatttccctttttctatagaattggagaattcaaacttttgtatgagtagttattaattgatagttgaatgaaattgatgatagggtc

SEQ ID NO: 64437 - DNA, 744 bp, Cucumis sativus
  Intron number 1 from transcript Cucsa.284310.2 (locus Cucs a.284310) derived from phytozome v7.0 (chr-ID scaffold0265 3; pos 1141868 to 1142611 reverse strand)
aggttggttggtttaaatttcttatttgattgtcaacataattgtatttggtttaattttctaattgataataagtctgtcggagatcatattgaaaaactaggcatgggttacttttggcatgaaaattatgtttaatctaatacttctcttgctttcttttctcatttttcttttcttttcttaactacaagtttgtaatcccttgcctttgcctgatcctgatcccctgcaagttagcagtttattgctagtgcaatactaaaattttgtcttgccatgtacttctttctttgtgatttgaggttccaattttcataacccactaatgagacacgatggtgcaatgtacaatgtgaaaatttctgctgcatctctctgcccttcacccgcttagttatttttctttcaaattttctctcgtttatataatatgtaagagacacgttgcccgatgatggaatactctgattagagcggttagtaacgatctttattacaagcctttgccattaaccaactcacacatgatttctctctctctctctctatcaatatggttctgatatgtaagagacacgtccttgtttggtcatcagcatctgaacgctagttggtatttttcgtggaacgctagttggtatttttctggaacgctatcaagttatttgaaacatttatatgaatgattttcctttctacaaaacaggtcagaatacgaaatttctttgagaagacgaagaa

SEQ ID NO: 64438 - DNA, 800 bp, Cucumis sativus
  Intron number 2 from transcript Cucsa.235620.1 (locus Cucs a.235620) derived from phytozome v7.0 (chr-ID scaffold0201 2; pos 180409 to 181208)
tccggcgccgtatgtatttctattttttatcctttttattcagtttattccctttttctcaatactactaattaatagctatatattttttcctttcttttcactacacacttcaaaagcctaggagtttgtacccagaagaaaaaggaaaaacaaagacgaaaagttagatttgactttttccttttttaataacgtatgaatagatcttaattaagactatctaattctactgcaagtatttataaacatgtatagtttaattttgatggataattaaaaaaatagaatagtgagtacataaagtttcgtcacgtaattgtgagacggcaagaaatgaggttttatcggtgggaatggtacttataacttataagtcggcgtaatctaatcggttgttaattcatgtctgacattatttcaaccccatgaatgtggaactgtctgacaatgacagctggtattaactaatgattttcacagttttttctttcataaaaagtggagtggaaagtttgaaatatgcaattattaatcattatatagatttcagcttaattaattgctttaccggctgaattggcacatttagctcaataagttgccatgttgtactaaaaaaaagtgaattaagttgtggttaatctaaattagaaaaaatgtgacgttttgtgagaatgatgttatgttggctttttcgttttgtttttttctttttaactgggtgataaaagttaaaagaaaggaatatttaatgtttaggatttgttgggaaatacgtgcaggagagagggaggatt

SEQ ID NO: 64439 - DNA, 742 bp, Cucumis sativus
  Intron number 2 from transcript Cucsa.139430.1 (locus Cucs a.139430) derived from phytozome v7.0 (chr-ID scaffold0106 6; pos 651795 to 652536 reverse strand)
caaggtcttggtgctgagattggtaaatactcttatggaactctcttactttctgcttatactgttcagctcccctggatgtttgctgtctggtgcatgtgtcttttgtttctcgccatgccagatgtttcttcataaataaagagcaactcaatgttgaccctttattctcgccatgccagaatataggacgcttcatttatatggccttctgaattctgatttattgatacatattcgtacacttatctttcttaccttgaagctaaatcttttggtcttttattctataggtctcaaaaagtttgaaacttggtttgatttaatgatcacttttctttatctagcttgtgactaagattatgccttgcccttacaactctccttccataaacgtacatgcatgctttttagaaatacatagtttcgtatcttatattcatgtatacatacattgtttttttgttttttaatttttttattttttgagctctcgcaacttctgacaatatggatatctatagaaccatggttttggattttgcacaatggtaaacactagatcatgtcacaatagagctgattgtgttttcagtttttgcctatccttgtgattttatttggatttcatctatgtgggtattttctttatgcatgcttgcctgcttttggttcttaatgtttggtttctaagttttctgttttgatatcttattttatcgccctgtttctgcagcaaaga

SEQ ID NO: 64440 - DNA, 490 bp, Cucumis sativus
  Intron number 2 from transcript Cucsa.144010.2 (locus Cucs a.144010) derived from phytozome v7.0 (chr-ID scaffold0108 0; pos 398499 to 398988 reverse strand)
aaactctaatcaaggaaactggtaatccttcttccttgctttctttccctcatattctgtgtattggctgatttgaaaaagtggcagtgaaaagcttcttatgcatagtacatctttaagtttaatggttacactttgcaggttaatttgctttaaaaagcaatattttctgtttgaaatggaagactgaatataaactgaagttttcttaggggatgagaagtgttatttgagttaatgttccactgctttccttcttaagattgtcagtttatcctgatgaaattaatttatttgtgaagtttatgacttatgttaattcatcgggttattgtgcatacaagctgcgatacattgagttctttagttcatatatgaaaatcatcactttgcaatggttgagttgtgtgtcagttactcctcaataataatggtatttctctttcttgcttctgtttcaacattatttggaaattggttttgacagcgg

SEQ ID NO: 64441 - DNA, 410 bp, Cucumis sativus
  Intron number 2 from transcript Cucsa.149430.1 (locus Cucs a.149430) derived from phytozome v7.0 (chr-ID scaffold0111 0; pos 258322 to 258731)
tcaggtatgatggtgagtttcctgctgatcagctttgagtttagtagaactgcattgtgataacttctagtttttttttttttcttaagattttcagttaatgagaacttcctagtgagtgttatatttagatataaacattatatgaagatttgaactgcttctgcatttgcttaacgattattattattacggtttcccaaataaaaatatgatctggggactctcctaagtgtggaaatttcaagagttagaattgcactggaaacatgtaaggggagttatattagggtttgattccatttcactgtgtcatatttattagaattttttggccaatggtatatggtgttgatttttgttgataaatctttctttggcagggaaatattgagacaagatttccagtt

SEQ ID NO: 64442 - DNA, 660 bp, Cucumis sativus
  Intron number 1 from transcript Cucsa.204990.1 (locus Cucs a.204990) derived from phytozome v7.0 (chr-ID scaffold0141 6; pos 153667 to 154326)
atttcttggtggtgctgttgctctttcttcgccaggtaatggggttatctcctttatgctgttattgggtttttattttttcggttttggtatctgggtttgttgatttttgctcctttttgaggttttcgcttcctgggttgttttggctttgtttctttgtgaataacgatgaatgtttgggggatttcttttttaatgagagatttgtatggggttgtgttttggcttttgatttggaggtgttgtgattagactgtttctttttcttatattaatggttttttttgttttttgtttttatttcttattgttgagcctgcaattgattgctggtattgtattggtattgtgtttttttttgccaccggttttgattccttgagttgtttttttctcaaggtctttcttttctcttattcttattctgaagttttcgtttggatgtctgttaatgtggtgatttgttctgagtttaagtgttgtatatttatctttttggttcgtgttttaggaatgactgtggatttttcatgtttgaagttaatcaagttaagttcttgtagcgtttattgttatttacttgattttcttctgaaggttcactgtttatggttcttttcaggggtgttgaaataataacctactattgttattcgt

SEQ ID NO: 64443 - DNA, 603 bp, Cucumis sativus
  Intron number 2 from transcript Cucsa.300610.3 (locus Cucs a.300610) derived from phytozome v7.0 (chr-ID scaffold0293 1; pos 164136 to 164738)
ggccaaaaagctgtcaaaaacagcccttttcctaggtatttcttttcttttcttttctttcccttttacccttctctcctctttctttttctcttcttcttttcctttttcttttttcaccacccaccttacctccctcctaactgccatctccattccctcctcatcgttcttctactcaaaatcccatttaactacttcttatctttctcatcaccatatctgtatattatctactcactttgtaaggattattaagtcacaaatgggttaaacaagaaattaggaacttaagtgcatttaggacaaactactctcatctataattaactaccgatattaatatttcaaattctacccccctttcatactcatcctgtctctctgactaatttgctcccaataagtattaattattataacctatggaataaaccaaattaatgctccacatattgaatgatagtagaacgactctccacctttagttttaaacttgtgtgcaataatgcttgagtttgattgaaaagttggagatattttttttaatttgtgctgtttttatcttctctatagaagttattaccgttgcacgagtgcagc

SEQ ID NO: 64444 - DNA, 482 bp, Cucumis sativus
  Intron number 3 from transcript Cucsa.284920.1 (locus Cucs a.284920) derived from phytozome v7.0 (chr-ID scaffold0265 3; pos 1479695 to 1480176)
gtttgccacctgagagttttgagtttaaacaagcagtatgacactttatagaactctgctgtacgttattgaagttcatagagttattgtatggggatgtaattatatagaattggtgctgttccttcatgttcttgtctttgtcttgaatgtgaaagcacgtctagtttaggtaaatttgaaccacgaagcattccaaactgctggttgaaatggatttctatttaacatgattggttagacatgtctgatggataagttcactttgataagttcatttaaacatatcaataaagttttcacttttttacctattttgatttataagaaatgttagcgttttgaggtcttgaagctattgaaaattggcgtggttatattttgcaagaatataaaagaatgaagttactcattatatggaaatttgtacttagtttattctttgatatttgactaggttggtgaggctataccgttgcctg

SEQ ID NO: 64445 - DNA, 830 bp, Cucumis sativus
  Intron number 1 from transcript Cucsa.307090.2 (locus Cucs a.307090) derived from phytozome v7.0 (chr-ID scaffold0297 7; pos 387217 to 388046)
aactcagggaaattgagtatgctttctttctttttccttttcttttcctttttctttttcaaaatatatccttccccgtgagacatcactacattatagtattaacaaccaccatcgttccatataccaatttctatctaaaattggaatgaattttatatttaaataatagttataatatttcagccctaggaagaatgaaattgatatagcagtataaactaactatacactcaaacataccaaactaaggtcataccttaataatattaaaaagagactataaaaattatcaattttgtttgaaaacaaatatagatgaggccattcgaatggccctatttattacaataaaaaaaaatcataattttaaatgacaaaatgaaaagtgaagggtgaaccaaaacttaatatgtatgcataaaagtatcaaacaacaattcatttttttttacccaatataacattaatttagcttaataatttgtattatatttgcatataagttaaattttgattgtaaaaattaatctttcttacttgcaataatgctatttatgcataagcttaaaatttttaaagctataactctctttttattttccccccaagaactctttaatctaatgtgttgtgtacacaatcttcatttagctaatttggtgtgaattgccaatttcatatctccaaactatagtctgataaaatgctcaaaaaggtcataaagataaaatatttagcataaacataataaagaagtactatatgaattaaattaaaattttggaatactaaataacaattggtattgaatttagggtgtttgggac

SEQ ID NO: 64446 - DNA, 827 bp, Cucumis sativus
  Intron number 1 from transcript Cucsa.193150.2 (locus Cucs a.193150) derived from phytozome v7.0 (chr-ID scaffold0133 5; pos 129344 to 130170)
atcggtaaaagtttgtttattgttgttcaatggatatgctggtgtgtgccatgacttttgctgtaggaatatgaatgagttgtttattgtttctagttttggaagtggatgaagtgttgaattggattcattgccattatcgctcagtaatttttctttatttgtggggctgttgtttgtttttttcttttgggttagaatttatcatttgggatgtggttgatgaaagggataggaaggtatggtatggttttgttagccatttccatccccgagagataaggtttcaatcttcaattaggttaaagtctttttctttccttaaattaaaataattaaaattactttactggtttttttaaaaagaaataaactattttgctatttttgacattttttctatgctttattttttttattattgtgaccattattagaggcacagataaaatttgattccatgtataagatcatgtagttttttttttttttacttgcgttctatgtgaagttacggaaacaatcaatcaaagcacccatggtggccatggactcttcacattcgcttctcgctcatttaaattttcaacttaaatatatgaacatttcatttctttcttgttttcttattttcactttctctttatcaaacacttaaactcgttgattttgctaattctctgagttgtcgtttggtgtttgtcatccttcttgagcacaaagctgtttggattttctcgactttctacaatacgatatcacttttgatactcttgattgatttataattttttgtttttgttgaatatggtttagagtgaaagttg

SEQ ID NO: 64447 - DNA, 959 bp, Cucumis sativus
  Intron number 1 from transcript Cucsa.193910.3 (locus Cucs a.193910) derived from phytozome v7.0 (chr-ID scaffold0133 7; pos 42924 to 43882)
tcctcttaattggggttagttccttctaaaccttctcttttctaatttttatttatgaatttccccctttcttcattcatcttttcactctatccttaaagtttaaagtatgtacttcattcattcgttagtttttataatttttcttttttctttttttaaactgtttattctgtcatatcatcatcatctgggttgtttgcattttgccatttccatagtctttatttcaataatacacatttggaagacggatttagtaatgaaaaataatggacactagtattctcattattattctgtttggtaattccattaatttctactttctttctgctctgatttgtgattttctttgtggggtttcttttttttaatgaatggagggtgcattggggcataaccccaccttcgaacctaaagcccatctgctcattcataatagccatctcttttggatttctcatttctttgtttttggttttctgaatctttttgtttaatggggggttgtttgaaaaatctgcaacttttgatatctgattttgtgtcagataatgggtaaatagatagggagaagaagaagaaggtgaaccttttggctttgtcaacttagaggagacaattgtttaatacccattagatatctttgggaatgtcagggaaaggtccatagctttgtgctaggcctgaaactttccctgtgagaggaatttattgcaatgtcctaaaatgggaggctcttctcatctcctctttttctagcttctgtagaaaaaagggtctggcatctgggtagttatttgggttcaggcccttggttctctaagaggaattcatggctatgacagctttgctgtaccatttacttttttgggtctttgaatctctaccttattactggaagttatttcatcttttcaggtagctgtggtgtttcttgttgtctcaagttttaa

SEQ ID NO: 64448 - DNA, 839 bp, Cucumis sativus
  Intron number 2 from transcript Cucsa.200130.1 (locus Cucs a.200130) derived from phytozome v7.0 (chr-ID scaffold0136 5; pos 578093 to 578931)
ttccaagaagatttttgtggcactgcacttttaaggtacaccgctgttttcttgctgatatatgttgactcgggttatattggacagggccaaatagaaatttgagtgaattccatttcggccatttattcgttgaggggtggttgcagatcattgtaaatgtagtaagaaatgaaacaaatattcgtgtataattgttattatgattatagtttatctatgtctatcattcaataattgctataatcttagtaattaattttttaggttatagataattgtaataatcaatgataatagtttatgattaggtttgtaatatactttgatggtgtaatcccatgacattctgttaccttgactccatgcttaagaaagaaaagaacgtagcaggagtatttttcattgcaaccaccagttaaatcctcatcagtcacgaactacttttatttttaaatttttataagtacatttctagtaagttggttggccgatgaacttattttcaaagattgagaccatcatgcatggaatagcttgagaatagttgaacttgatttgccattattcttttgaactaaactcactttttgtttagttggtttggggctgaggcttcccctcttgttcggctgttgtttttatatgtcctggctagtttttttttttttagtttttagtcttttagaaggaatagttcaacttgactttattgttattattatttttcaatttctatttgtgaacaagctggaaccaaactttgaattgtgagtcatttcgttggtgttagttggatggattagaaatctgatacgtattacttcacacagtctaga

SEQ ID NO: 64449 - DNA, 644 bp, Cucumis sativus
  Intron number 1 from transcript Cucsa.234200.1 (locus Cucs a.234200) derived from phytozome v7.0 (chr-ID scaffold0199 9; pos 160531 to 161174)
gtgttctaacccaagcggaaaaacctaggcttcaggtactgttctgtagctctcttttagcaccactcgttcttttattacttttctcatagtttcctatgcttgcttttccttgaatttctgttttgcatcgcaagatttgactggaagtagcgattgttttcatgctgctatttctgtttttttttcttgcttgttcgctttccgggaatacgaacaataaaaaggattgttgtttcccccactttttgggtctgtttttctggatgttttagtggactcaatcctgtgttatgttgctgttcttcgcttcttttccccggaagttgaattgttctagttggtgcaggaatttattttggaacatataaaggcatatgtaaaagaatcaattttccatcgaataattgcgttggttcgataaattcggttgatttaacaagattcagttggaaatttgaatgttttttttttcttgtttgattgatcatgtaatgcgaccattgcattcaatgatgcccttttacggttgttttgtttatgggtttaagagcccataatccttttataagatttttgagctccatttaattgtgtctctatttgcagtgtattattggagtaagataagttgttgcagagat

SEQ ID NO: 64450 - DNA, 541 bp, Cucumis sativus
  Intron number 4 from transcript Cucsa.234200.1 (locus Cucs a.234200) derived from phytozome v7.0 (chr-ID scaffold0199 9; pos 162073 to 162613)
gggtgagtctctattcttttgtgcacatgggctcttttgaatacatgcaactgcacctataattccctttgacataaaattatactatgctgattttagctttgtgtgtatagacagatgcatcttttagtaatttgataaggaaccctattatactggttgatgatggaaacatgatctgattctaggatatagatattatgtggtgagatgtctaggatacgtatgcatactcctgcactaattggtgtgaactcttgccattgctgatatcttctttcttattcatgtagtatggtttttcatagctatagtcctccatgtttctctctggtacagagccaattaaattgatggtttaattttgatttgtatcatattccaatgtaattacttttctttagggatgggggatggcttgggtataaagtttacttaactggttgtatttgacctatttcttgcactatgttaacacttgtattacaaaaaggttaaactacgtttgttttgacagtctttaaccagaaaacgttgtata

SEQ ID NO: 64451 - DNA, 888 bp, Cucumis sativus
  Intron number 1 from transcript Cucsa.281540.1 (locus Cucs a.281540) derived from phytozome v7.0 (chr-ID scaffold0263 9; pos 200301 to 201188 reverse strand)
ccaagaggtataatacaagtttttattggggttttgaagcttttgttcttccgtttctgtatttggatggagaatttcatgggattatgtgacttaggatttcttattactgacctcagaatcaacttccgtttgttttttggtttttggagtatttgttcttccgtttctgttgtttttttaatttgcaactgatggcaatgaaggacccatttccagattagagtattagttttttattctccatatttaaactaagaatatgaagtttcatgggatttcgtgatttgggatttcttataccgacttcagaatcaacatatgttgttgtgttgggttttggagcttttgttcttccatctctacaattttttaatttcaaaactgatggaagtccaattttaagattagagtattagctattgagtctccatgtttggttcaagaatattaaattttatgggttttggtgatttggattttatatatatatatatatatatataactgggttcagaaccaacattctgggaagctggaattaattagtattttctcggcacatggttaaatgttaatcaatctaaatagagacttcttagtaagagagaacaaatttagtaactgcagcaaacattttggcttgactctgttttttttgttctctaatctagactgatattaatattatataatatgctttgaataataaattttaagtaatctaatttcatttggactttgtcttttttatcatgagtttgagtcaacattattgtcttttttctttattaaattgttctaaatgatttctgaatcaattctgaaaatgaatcaaaggctccattttcagtggatcgaggagcctgtgcttctggtgacgaggtt

SEQ ID NO: 64452 - DNA, 255 bp, Cucumis sativus
  Intron number 2 from transcript Cucsa.147020.1 (locus Cucs a.147020) derived from phytozome v7.0 (chr-ID scaffold0110 0; pos 342947 to 343201 reverse strand)
tggtatgtatgcccttttcattttggttctatttggcaataatcaccggttgtgtttatgttggctttaattttttactaattcattgaagcccttatctttactaactttaaattatatctggattcggaactgaatatttttttgaaaaagaaaagtaagatgttccaatggtctatttcttgacaatggaagtaattatcatttgattagttcttgtcttgtggaaccatgctatgatgcagacttatcccg

SEQ ID NO: 64453 - DNA, 573 bp, Cucumis sativus
  Intron number 1 from transcript Cucsa.147020.1 (locus Cucs a.147020) derived from phytozome v7.0 (chr-ID scaffold0110 0; pos 343325 to 343897 reverse strand)
ccaatacgctgtaaccctcttcttctgtttctttacgaatcgaaatttttcttaatttttttgtttttttgtttttttgtttttttataagttttttttgatataaatagttgagaattaagaaactgattctgatatgtgtattgcttgatttactttgttaactttcttttgcttgttttggttttctgtagaaggtatttgttctactgtctacagtataatggactgtttacttcttgaaactctgtacattgttgaaggttggataaggaatgttaatgtcctttaatataatgtcgaatcatatttagaatgttcttaattgctgcgtagttgtttagtttcacgattgggggtgtggagtttaattaactgtggtgtttatcaggaatagtaacgaattttagttattgattgcttttatgtcggctgtgtaaaagttgagcagtaggtaactgaagaaatatttgatgattgttttgaattggtcaaattttcttaaactctgtttagttgtttgatcttttttccctttttcctgcagtgctttagactgtccaagagagagtg

SEQ ID NO: 64454 - DNA, 955 bp, Cucumis sativus
  Intron number 2 from transcript Cucsa.255630.1 (locus Cucs a.255630) derived from phytozome v7.0 (chr-ID scaffold0222 9; pos 3551345 to 3552299 reverse strand)
gaatgtaagttcatttgttttaattttttttttcttatcaacctgaaatccgtaatagttggtttttatttgtatagaactttaacgtttgtaagtaaatcctgaaatctcaagtttgataacaaccttgttctaatatggctgtttacgaatacataatgttctgtgttctactgtcttacgtaacgaatcaggcgttgatttctagttcttaatatcttgctagaaagaaaaaataagaaataagcttgccttgtgaaagcaaaagaactaaaactaaaatagcaatgaattaacaaaaggaaaagaagcacaaaacaaattctattcctttttccaagaattcttcgtcatgaaaagttgagaatcaattacatgacaaacattaataattcaaggacttaagacccttcaactgatgcaggaacagaaacgttctgatatgattagtttgaattggttcctggtgggtagcacatgaaacggcattaagaaatgtagaggtccactgaatgttaggatatggaagtattgaaattttaaacttattcgaaaatttgaaagttaccaaacgatgatagtatagctgtttgttgctcatgttagtcatcttgtcagactcagaggtcttcaactgttctttcagtttgatgataggaatatcaaatcattatgtaacttgtgtctcaacttctcgcatataacaagttaccagtcaagattttcatgtgattccttgtgatttgtgaataagattttttaatgattctttacatgtttataagaccaaacacttcgttataaaacaacctgttgtccttcaattccataagcctcaatacacgtttcagcctaaaccaatgagctttaatttttttcacagtagtggagactctgttgaagaagctagtatatttaacataaccatttcgaggactaatttatgtttattagt

SEQ ID NO: 64455 - DNA, 575 bp, Cucumis sativus
  Intron number 2 from transcript Cucsa.193040.1 (locus Cucs a.193040) derived from phytozome v7.0 (chr-ID scaffold0133 5; pos 64532 to 65106)
agaatactacaagaagcagttggcaggtgatggtcatgtaatctatatagatatatgaactttaatttaatagggtttagactaaaattattgatccatctcttgctagtctttgaattttttgttcgtgtttttaatatatatagaccttctttgaaaagtacgtaagttagatcgtcggtcatagcttttttaattagctataagtttttgtcattatattcgatataatgtcgtttcttcaaatggattgatttcaaatattgtgactgcaggaatttgatatggaaattaaagtctaaactcaatcattatattgactagcttgacttgctaggataagatcaaagaaaatttgttagacagtatatttttcttaaagtcgaaaaatctattagatactctttaagaactcaaagacatgtttttgacctatgcatgtatcagtattgaataattaattcattatttgtatgatcaaatcgtcaaataatgtactgaactatgaagaaaaataaaaaagcaatacgttcatttcagtaccttcgccccacactgtttgctccatagctaca

SEQ ID NO: 64456 - DNA, 567 bp, Cucumis sativus
  Intron number 2 from transcript Cucsa.181180.1 (locus Cucs a.181180) derived from phytozome v7.0 (chr-ID scaffold0123 9; pos 166935 to 167501)
aaaatatctagagaagtttcagacacgaccgggtaatcatctttctttgctgtacttatactgatttgattgcatgcaacttgtttgctcgaactagttttaaagtttcgtccttcaattatcaaaatgactgttcttttccatttcccaaatggaaatgttgttttataaattttgtgtgtgactatgtaatttgtggtcttcagctccaagagctctaccatttactctggattgttgttgttcgccctcttgaatatttggtcttatggatgagtttggctagttgtctgttacggttgcaaacggggtaaattcttgtttcttgctatttaggaaaaggaactttgttcgttagatgcaatatatgtatgtgggggtcatgaagcatgtaggatagcttccaaatttagtttattttgtggattcaatgctcatttgaagctgcatgtttccccctcttattctctctatatacactcatccatctctcccctctctctgtctctctctccacattccttttgaacaggaagattgtaacagtggaagagatcttaacaattg

SEQ ID NO: 64457 - DNA, 668 bp, Cucumis sativus
  Intron number 3 from transcript Cucsa.280500.1 (locus Cucs a.280500) derived from phytozome v7.0 (chr-ID scaffold0263 3; pos 406479 to 407146)
ttgaagaggaagatagttatcgacaaggggtatggaagtttcttagttactctaatacccattgtacttcatttggaccgtacctttttcactgcttcttttggtgaacttttgtgagctgctgaggttactttttggtctctcattatgaaataggacataagcgttgatcctgcttacagttgtatagaaagttaggtaccattagtatgccttgaagttgtagttagcattgatattatttcaaaggaaagccctctagttgaattttgtcctttgacttgataaaactatttatgatggaaaatattttttgagtctcctgactatcgtcagtttgatttgattaaatcagaggttttattttattttattacagttctattggtagagatttgaagaactcagttataataataagaaaaggaaccactgtttacaaattgtcttcatgtgtgtgtgttttttcttcagtaatgcaatgtttaagtaaacaatccaagtaacagttctaagatgtgtacctatgcaatgtttaagtaaacaatccaagtaacagttctaagatgtgtacctactttattgtgtatctagttatatgatatctaatatttttcaatctgtcgtttgaagggagttgatactttggcaggggttgaggctattat

SEQ ID NO: 64458 - DNA, 364 bp, Cucumis sativus
  Intron number 5 from transcript Cucsa.146890.4 (locus Cucs a.146890) derived from phytozome v7.0 (chr-ID scaffold0110 0; pos 242442 to 242805 reverse strand)
tgacacaaattttaaaaaataagcttgggttcaaggtgcatttgagagtgatattttctgccacttatttattgtgtgtgaacttgtcagacccaaattctacataagattcttaaatcacttgttgattcaaaaacttaagttgatggatgagaaaaaattaatagatgtgtatcctcatagtgagaagagtacaagattctgcttagagtgttcatgaatttgtaatcatcctaagagtcgtagctttctaagagattatattttcctctatggttttgatttctagtatggaaaatggctgtaacatttggtattacttgatgcagggttttgttatttctgattggcaaggacttgatcg

SEQ ID NO: 64459 - DNA, 602 bp, Cucumis sativus
  Intron number 1 from transcript Cucsa.198910.1 (locus Cucs a.198910) derived from phytozome v7.0 (chr-ID scaffold0135 7; pos 1808012 to 1808613 reverse strand)
agatcgttctctccggcctttctctcgtgtttgaggtcagtattcactcccttcttctatgcatggtgatctcttttggctcatacttttgtttcgaatccataccattggcaccacctcgtgtctccgagatagttactaaacaagcgtttatttttcgattttgtgtttgtttgcctctagcgattagtgtgagatttatggagtgaatctttcggtcagttggttgtgtgattttgttaccacgattgaattcctactctgaggaaaatttttgagtagttgattaaatggagaaccatattaatgtttgttaaatgtttcatgatactcaatacattgaagtgattagaattggaactcgcatatgctttctgaaagttgatttcttttacacatatcctgcactgacatttaatagtttttctgtttgtcactagttttcttgttcctagaacttaaaattaggttgttcgaattaagaaaggtagctatgtaactaattgttatctggtggcagattgtttagcaaatatctacttggaacttagaaggggttattataaatgaaaaagattctttgaacttgggtttgtgcagga

SEQ ID NO: 64460 - DNA, 975 bp, Cucumis sativus
  Intron number 1 from transcript Cucsa.256200.1 (locus Cucs a.256200) derived from phytozome v7.0 (chr-ID scaffold0222 9; pos 3880217 to 3881191)
agcagccggagtataatttattatctcggcataaggtaagtgtcttgtttttgctgctaatcgatcgttttcggatgtattctcttagatcgtagaaatggagttttcagttacagtagacaaaatttctgaagacgattttcaatcttgagattactgtttgatcgggtgttttgtgagggtttctgcaattggttttcagttgaagatcttgggtgggattttttacatatgggttagatacagatttctgtccttgatctatgttatttttcaattttattgcaatatagttttttcattcaaaacttgactgcgaatggactagatattgaaaagtaacaatgtggtgattgttagatattgaatagtactaatttccaaggcggtgattggtttatcctatagtagtacttttaatggatacagttttttattcctatccgataaaggataaacttttggatagtggtaggacatttcgaattgggtaggttgtttggggttgagttgagttatgtggaatggatagttgttttgatttattagtaggcacgcctaactcggtgaaaagaattatataacaattaatgaagtggtttcatttcccatcatcacttttaatggtaaatactattgaacccttacgatgagtacaagatgaaatcaaaagtttgaaaatattagggattagattgtagcctaatggttgcttcgtcctatgtatctttattggtaaaattattttctttcttttccgcttccatttggagattgtgcagtttttaaagtcgaggcctattttcagtaatttgtcgaaaacagtctttaacttacttaatccgtgaacagtttaatccggcatcttgcgaaattcctctttagtttctgttcttttgtcatggagatgagactcagacgtgttactatattgatacaggttgagtccgagtttctccctctgtacagcaacta

SEQ ID NO: 64461 - DNA, 1007 bp, Cucumis sativus
  Intron number 1 from transcript Cucsa.228020.1 (locus Cucs a.228020) derived from phytozome v7.0 (chr-ID scaffold0193 3; pos 30247 to 31253 reverse strand)
tgcattcctccgccattccttctctattcagcactgtaagattctcttcctttctcattctttctcttgcatttgacttcaccattctaccctccttttcccaatgctccttctccccccttacccaaactcaccaattcttacgttttcttatttccatgcacctctccccatttccttcgccttcttccttcatcctatcccccccccatgcacaatgctcattctattgctgctttaactcctctccaccttcatattttatcattctttaattctattcccttgctttctttcttgggttttcccccttttcatgcctccaactcagctgcttctagggtttctcttttgcctttatttcttttgcttcatactctgattttctttttactttttagattagctgggtcattgccatgaacattgttttttctgtttccaatgttggattactgaattttacatctccttattcagaatcacaactatgacctgctgggtttttcttttctatcttccaccctacatttactttccttcttccaacctccaacctccaatccccaacgtccacaccaacaaattccaacacttgcccgctccctttttaattaatgtaaatttgttttctatcctcactgggtctctcaatttttgtgtgcattgtctgtctttaagttatgcattccatccgttaacgtttgggttgatcttggtttttttgtttttgtcacctttcttaatttttgattggttagacaagaggaagacataaggaagttcgaatttttagtgttaactgcgtttttgtgttgtttttaatggaaaattcgtttctgctagacatgataagcttcaattaggttcttgattttcacttttgtttttgtttgtttgtttttgcattgcttagatttggagaaaattttacgttaataactaatatctgatcacttattcaacttgaagtgttgcaggtagagaatctgtgatacgtatttagt

SEQ ID NO: 64462 - DNA, 611 bp, Cucumis sativus
  Intron number 2 from transcript Cucsa.205370.1 (locus Cucs a.205370) derived from phytozome v7.0 (chr-ID scaffold0141 6; pos 464130 to 464740)
cattattcccccaaccgtaagtattcattctattctttttttttttttttttaatttttgtgtttaatggattgagaagctttaaaacatgtcttagttttatgcatgatccatgtcaatttaagactatcaaagttacggattggatgctaactctaaaatttaaagacttattgacaatttaagacccttatttgtttttatattcacactcttcataatatacaaataggctactcctaatctctcattagatattagatattgatgttttctaatattttttgataactattactaaaaagccacgctagaaaataaattttttcccataacattattgttatatttttgttttatgatatagatatgaattcaaatgtttcaaagcatagttttgggttctaggatttcaaacatttttttaacaaaattgatggttctaaggtttcaatcactttttcattataaacacaacattactttgaatgatcaagtaaataactttaataaaatgtatggaagataagtttttgtcaattattttagggttttgtgtaaataatttggatgcagtcaataaagtttaacaaggtgacccaagggttgat

SEQ ID NO: 64463 - DNA, 845 bp, Cucumis sativus
  Intron number 1 from transcript Cucsa.167260.1 (locus Cucs a.167260) derived from phytozome v7.0 (chr-ID scaffold0115 4; pos 631680 to 632524)
aagatctatttcttggcatcaatttgcttggtattcttttcttttcaacgtttgattgggttattatttatatattttagtttttttcaagataaatggttataaatagcacaaacaaaaataaataaataaaactatttataaaatagaaacaagatttcaaaatgaacttgaaagacttgttaactttgagtatattttttaaatagtttcaataattggaaaataaacagtgaacacacttcattaatctagaagacactccgatagattggtactcttctagtaatcgtatatttactaaaataatcaagctctccttgattgtattttaaatcttctaaagatggttaggctcttttgagtttgtaattgaacacagtcaattatcaattcttctttgaatttcttatccacataagaacaggctttcgtggttttttatatttgaacacattcattaattattaaggttttctttcaatctattttcttcatatagatctcaaatcggtctttgaagaagtcatatggtttttattaaaatatttgtttataaaagtaaagacatacgtttgataaagatccttctatagctcttacttgtgtacatcttgattcaatacctcaaaaatgaatgaattttcttttttataattagagaatgataacttcgaacaaagtaagctttaaatattttgttcgttaagaaagttttcaaagaatctttaaagttatttttatggttgatagacacacatttatttgaactctaaatatatatatatatgattgttgatgatcatataggtggaaaaatttcagctcaaggagacaaaataaac

SEQ ID NO: 64464 - DNA, 760 bp, Cucumis sativus
  Intron number 1 from transcript Cucsa.177330.1 (locus Cucs a.177330) derived from phytozome v7.0 (chr-ID scaffold0122 5; pos 1362169 to 1362928 reverse strand)
ccaaacccatcatcttcatcaacaaccacgcttgggtgagattatatttattcaaaacctctttatcttttgtttttgtttattgatttttaaattgtgtttacgagtaccctcaaattatttaaattaatcttagaaacgtgttgtgtttgttttgaaatatatagacagagtactcctccctatttttatcttgacgaaagattcatattttgttttggttaaaatatcattttgattatgtataatattggttcatcaacttttaacattaatctctatcatgagttttaaaaaatgatgtttattaatattttatttataaatcaatcaaatatatgtgcataatgtgtcttttccattacagttattattgaactaattttgataagatttctaaaatgatcaaaaatcgataattaaaaaatacacaaggtcatgtacctatacaaaataacatatatatggaatttgatattattctttatttcaccatatacttctttgactttgatcctaactttatcataattttcttttccattgttgagtgaaaaacaattttttatagaggtttgaaattaaggttttcattcaataacttttttttagaaagttgtgaaaattaaaggaaaattatgtcaaacatttacttttggtttttaagatatggaattgctaaatgatgaggaatcgttaattatttattgtcttttggtttggagtgaaaggagggggtggcaaagaagagaataataag

SEQ ID NO: 64465 - DNA, 414 bp, Cucumis sativus
  Intron number 1 from transcript Cucsa.237330.1 (locus Cucs a.237330) derived from phytozome v7.0 (chr-ID scaffold0202 3; pos 277880 to 278293 reverse strand)
aatcagtttttcaggttaactttttactaattttcttttcttcttttactctctcaaatatgtaattccattacttaaaaaaaaagtaatacttcgatccatcttcaattacaaacgaaaaattatattttcttaataacaaaaaaaaaaaaacaataaatattaattaaatacagaaaataaacaaagaaataattgttaccaagcgattctaaattctataatttaaaatgtttataaacatattattaaatgaactctttgttgaaatataagaattaaaagttcatcaaatcatatagattatttacgaggtttacaagaatcaaaatctacaatcttttgatgacttttaatttagaatattgtttgacttcagggtcttgatttcgtgatatttgaagcaagaaagta

SEQ ID NO: 64466 - DNA, 1050 bp, Cucumis sativus
  Intron number 1 from transcript Cucsa.252250.1 (locus Cucs a.252250) derived from phytozome v7.0 (chr-ID scaffold0222 9; pos 1188589 to 1189638 reverse strand)
ttggcgctttctgataccgacatcaactggaacaggttctccaccaactttctctctaccatcgcgtttgttccatttttcatcaatgttctactaatttgctagcgaaaatcttgatcctcacttctttttggcttagaacggttattagtatcggtttctgttttagaatatcgcttaaggaatgaacggaagtgtgctagacagatgttaacttcttgttgtttgttttgtgtgtcttaatatccgttttaggaattgatttaagagactgagagatgcgttcttgatattaacttccgattgttgtggaattttgtttgctttgtcttacaccttggaagatttttggtaagagaatgtattaggttctgatagttagtcttggcgtaagtcttttaaagcattaggaatttggagcttaaacacagttaatgttctttaaatgccgaactaggcttcggtatgtgagttgatcgtcactcaacataacgtataatttaaaactaggtgatttgtggagttcatctccactttgcttctaagttttaacgtctttggcttcaataatttgcaccaggacgccttcactcttttcttttgactttcactcttgctaatgctactctagttttctttcaaaatgaaatcatctttggcaattaagtgttacaaaatcaaccatcaaagaaaatcgatggaataaacagtagagaacaacgtcttagctacgttcagataatatgagagatcatatttttttttatttgagagaaatatcgtataatgcatgagttcggtaagtaggtttatatatattgcgccctgtaatttctagagccaaaatcgttaataaaataaatacaaaacttcagcacttggtgattcggagctagataacagattaaggtattataacctgaagagttgtagattttctttttacaaatattttggaatgtatttccatgcttcttgtaatgttatgttactgatgagtgatgacttcaattaggttggacaagacaaagtttcatataattggggcaa

SEQ ID NO: 64467 - DNA, 509 bp, Cucumis sativus
  Intron number 3 from transcript Cucsa.151760.1 (locus Cucs a.151760) derived from phytozome v7.0 (chr-ID scaffold0111 9; pos 136205 to 136713)
gtccaaataatttgttggtaagtaatttccgtttgaaggaactgcatttccaccatatatattttcttcgttattatcttttattttaaaaaattctaatcgctttgggcttctttggatggattatatatatatatatattttaaaaaattattgttcttattatttgataggaaatcaaatgaatagtgtatgatatgtagttggaaggtcatcctttttttcccctacatttattgttgtgttcattaagatgaattttccaatagaacagagtatttgaaagggtttttgtgtgggtttgtccaccgcattgcatattatatgctattcttaacagcacatgtggaaatgtttgtattgtagataactttgtacaattttcttcccgtttttttttttttatttcaaaatttattaacctatttattttacttttaataaattcctgctatttttgttacttgtctgcagaaaaagggttcgactcagttagaaatctcaactaa

SEQ ID NO: 64468 - DNA, 964 bp, Cucumis sativus
  Intron number 1 from transcript Cucsa.308490.1 (locus Cucs a.308490) derived from phytozome v7.0 (chr-ID scaffold0297 8; pos 584896 to 585859)
ttttcgtcatcggttacagacctctccttcgctcggtgagcttccatttctcttctgtcagttaaaaccctaatatcagtccatttttcttactcctatcacctatttatcatctgttcctgatttgctctgatgctttgcttcaaactttggtcgttccggaatcaacggcacctgtacaattaatgggtgattttgattttctgtgttcataggaatatcttgtgttgagttggtaaaattagtgttttttctattgttttcgacttctcaaagacaattaagtggaagttatgtgtatctatgatctaattggttgaatatcattgaagagttctctctattgttttgtatggtttctttctgatatataaaatagattcatttctttggtttaaatcaccactgaacccaaaaattctagcggatggataacagtgaatttaattttatatcaacgcttaaagctaaacatatagttagaaggatatatgggaagaattttttgcccgtgtatttcgtattaatgctccagttcaagtggggtttgaacatacaaatctccttagttattgagttttgagctttgtaatagacaatttgaaatctggctgatttcactatagcagtgaaacgaggctgtgtaaaaggctgcattatagttttgaaacaacttgtgacgtttcaagtgctaaagtttgaggaaagtttcttgtagatttacaaaatattcttggattcatttcatttgaatgtatttaaactcagtagaacttcccagctgattgccttttcttgatgtttattattttgtacacaaccttcatctatcatttatattgtcttataaaagtatttttttaacaaacatctctccattttatgattacttttgctcaaactgctaacaagaacaattttgatggcagaaagcacttgcccaattcactcatttgcaaattca

SEQ ID NO: 64469 - DNA, 752 bp, Cucumis sativus
  Intron number 2 from transcript Cucsa.202260.1 (locus Cucs a.202260) derived from phytozome v7.0 (chr-ID scaffold0137 6; pos 344619 to 345370)
ggtgcgtattctgttccttttttctctttttcttattttcttccagatctgctctcattttccccttctatcttctttaattccttctaattattgtcactatcacccactgtttccttggatctctctacgtgtgtgtctacacttgatgcctttcgatatgatctgaatttgttcggttcttgactgttgtattgttcgatctgtgtgtgtgttgttttttttttttaatgtgactcttgatgttttaattgaaactattgcgcattttgttgttttgctgtctcacgttgacaagcgatggaattaagggaggacagagcgttaattataatagttagagacgcaattggttgctgataggttgagaggaagtgttttggacgagatgccgattaatttctctcccctctcttcggttggggattggatctggatccaccgacaattcatgatatgaaatcatcgctatgttctcgtttcttctaagtgtagtgtataatgccattgctctttcaatttagctctcttgatagtaatttttgtagctacgatcttgattcttctggcacggttgatgtcgttttcccttacgagctagagctacatatcttctacatttttttttaccttgaaagtttgtatatgtttattgttttgattatcaatatcatgtgtaatgattgatctaatgtgttattgttcatgtcgcaacagctggggactggttgcagggcccgtacgtatactac

SEQ ID NO: 64470 - DNA, 917 bp, Cucumis sativus
  Intron number 1 from transcript Cucsa.257280.1 (locus Cucs a.257280) derived from phytozome v7.0 (chr-ID scaffold0222 9; pos 4634991 to 4635907 reverse strand)
taagaaagtacaagcggtttgagagggctttggaggtaacaaagatgataaatgtttgggtgtttatattggtgtttatgaattgtggtattgatttcttcagtctttagttgagttaatgaaaaaaatgatgtcgatttttatgtaggattaactgatgttcagctaaatcgatgaggttataggtttgacttcgaaatggttaaaatcactttttttttcttacatttaaaatcaaattcgatggaatgataaccgcttttagaagtgtataataaactatcgaattaactttgaatgattataggcatatttgttactgattttgaatgtgaaaaagcaattctaactgtttaaaaatcactctcaaacatgtctttaaatagatattgtggcaagtatgaaaatcattcttggttgaatctgtttttcacttcgtaatttggattggcttgtaaagctaaagtttcttcttcttcatcacaagaaatttcaactttgtgtgggcaaacacaaactgtgccaatgctttagcgtttttttattctgagaaaatgatgcatttcattgaagaatgttatataccatcttttgaacttttccttctttttgggtctcctatattcctaataccttgtgattgaggaattataggtcatcatcattgagctgatctcaatgcctaatttattcttacacatatttgtaatgtatcttcttatatacatgtgtgtatgtgtgtatgatgtggttttgatcatctgatctggttatatgatacttttctaaacatcgaagggatcacgtgtaaaaatactgaatttggcaatttgttgcatgtgttacatagatgatatatatgtatagattgttaaagctgtttcaattctaaaatttcattttttttctgaagatat

SEQ ID NO: 64471 - DNA, 908 bp, Cucumis sativus
  Intron number 1 from transcript Cucsa.300760.1 (locus Cucs a.300760) derived from phytozome v7.0 (chr-ID scaffold0293 1; pos 334520 to 335427 reverse strand)
gtcgattctttcacccgacggcttattggtgcgtccttttaatcagggtgttttttctttttcaaattttcacccactcaaacgtaaaccctttgtttatctgttaatgatttttggtgatcgagcttccattaactctcttttctttctttgtttgctcatttctgtgtgctgctggaggagctgtggttttatacttttgtttttagtttaatggaaatctctttcatactttctgtttttcgttttttttttccttcttaaacactgaacaaacaaacaaattggaagtggaatatagagataacatatcaatgaaggattaagaactccagttgcttcctatgaatggtaacccacgtcaaaatgtaatacattttcgttgaatgggttatgggtatcgtacaagcaacttctccttttctgactcatcttcctgtttgacgttttggaagttggattctgccttttgggtttgtgttttatttttgagatggacaatctcatgtagatctttactaaataaatggtttgttttcttgcattggaggtgttgtgaatttgaagaatctctactcttgtctctttgctgtatctcccttgtttcttccattgtgtttatctatgaaggattctgcattctgtccacattcatccatttgggttgtttggaagttgcaactccagtcgatcatatgatcatgaataacaaaggccatcaatgatcatactataatttataaccattaatcatatcgaagaagttgtgctgctttataaaattttaatggaattgaatccataccatgcattcagaaatgcaagggtaaagtgaatttaatagattttgcaatgggactaatcattgttcaaattattttcaggggtgttcacttgttcatttggcg

SEQ ID NO: 64472 - DNA, 638 bp, Cucumis sativus
  Intron number 1 from transcript Cucsa.138670.2 (locus Cucs a.138670) derived from phytozome v7.0 (chr-ID scaffold0106 6; pos 1455 to 2092)
cctttgttcttttcttcttcctattgctatttaaggttatataactgttcccttctgtttttcttttcctttttgttcttaattctgtaataaatatcaagggtgctttaactcatatcagctgcctcaatttattgtcctgtgagagtttctcttgggggacctctgctttaacttttttttttcttttggaaaaaaaaactttcaactggaaattctgtttatgttactttaactattttgttgaagagttgtatttcctttaatgtttgggttgtcaagattcaactttctgacagtttttttttttttgaagaatattgctgttgaaatatagacccttttcttcgtcaactcaacatctacataattcttcagtttggattgtttgagtgttggagtggccctaatacttttcatgcctgctttctatatttgtaattcgcgcaaagaacttctggatgctgttaagaatttttcattagtcttgttatttgttgttgtgtcttgtctaaatttctgaattgaggaaatttggttggggaacatcccacatcatgtttagttccgtttatctaagataaatcttaggtagattttgaagtggtagttttgtttttgtacatggaccctgaagg

SEQ ID NO: 64473 - DNA, 472 bp, Cucumis sativus
  Intron number 2 from transcript Cucsa.138670.2 (locus Cucs a.138670) derived from phytozome v7.0 (chr-ID scaffold0106 6; pos 2293 to 2764)
cttcctcacagaaagcattcaagaagtaagttttgagcatgtgccaaaaaacttaaatttattgcttctaaatttcggtctctattttctgttggcaccctttccaatgattgttgatcttttatttatctgatatcttcatttcatggagttgaaagtctcttcaggtttcatttgatttctttcatttatttacttgattaatttttttggggggtatctgtgtagtctagttctctccatctgaatagaaatgttcaattgttgcggaactattaattattagaggggatttattggattggggagatggtaaattgggaaatcaggttcaagttagttttcttctcaatatagcgatggccatagggcatacatcctgtttcagatttttgtgaatttagtaatctgattccatttcccttttcaaagtattttaagttctagttcaaacctcatctgcaggcaagga

SEQ ID NO: 64474 - DNA, 352 bp, Cucumis sativus
  Intron number 4 from transcript Cucsa.182060.1 (locus Cucs a.182060) derived from phytozome v7.0 (chr-ID scaffold0125 1; pos 195591 to 195942 reverse strand)
acttatctatagagttcttggacccttctctcaaggtctgagtttgatcttttatcttcgggttccatttttcaatcttttcatccattatttcttcctttttaatcaaaggcatggttgttgttggcacaaaaaagaaattttcttctttcatataaaaaagatcattgctcttttttgatataaaagattgtggaatctagctttgttaatatattcacacacacatatattgattttgttccctttttggctatgttatggctgtttcatttcacttaattgaccgccttgtttagtattttataatgtttacactttttaattattttgctttatttcatacagaaat

SEQ ID NO: 64475 - DNA, 318 bp, Cucumis sativus
  Intron number 3 from transcript Cucsa.182060.1 (locus Cucs a.182060) derived from phytozome v7.0 (chr-ID scaffold0125 1; pos 196014 to 196331 reverse strand)
tcaaggttttttctttttgtgcttgtttatgttcttcaatttttctgtacactttacagttgcttgattaactcaaattgttttattaagctcataaaaaggttaagggttttcattttcaaaggaagtatggctgtttcatactagagaaaaagaaaagtaaagcttgtatttcttgattctctttttgtttaaaattttaattaactattctgatatgtttttttatcaactctttttttcctgatatgatgctatattggtttatgataatttcctgcagaaagttgcttctagttgcgtgtggcttgcgtcaaa

SEQ ID NO: 64476 - DNA, 1025 bp, Cucumis sativus
  Intron number 1 from transcript Cucsa.182060.1 (locus Cucs a.182060) derived from phytozome v7.0 (chr-ID scaffold0125 1; pos 196720 to 197744 reverse strand)
tgcacgaaccagcaaagactcgctcgttttaagcggtaaaatcttgcttatttacttatttagggttgattgtgttggtccattattgggattctgtttatttagcttttaattcttggaatcgtgttttttgaattgaattaggccgcggcagaattttggcttagtagaatcttagtttgtgaaaggattatggtcagtggggcatacttatacgattttaattgtttgcttatttgatgccttctgttgtttgaatgttttgaaatagttaattatgtttcctattattgattagtgagattattgcgatatatgctggatttatttggttaatgtatgtcgagtgttgtttattgaagtctatagatttattatatcatagaaagcatgttgaaagtttgttagggaaatatttatttgagtgcgagtttttgattatgtcaaaaggttgatcggtaagctgagcaggggaggaagcatggtaattggattcattctgtcgtaaagttggaaacttggtgattttatgatgtttcaagatagatatagtgggacttgattttttgattatgtcaaaagcttaatgtcttggcagagtaagggaagaagtatggtgattgcattcattttgttgtatagtggggaaaattcatgagtagatgatgtatgaagaactaaagtttttagagactgatttttgatgattgtgctaatagtaagaataatgatgagttttcaagcttaattttgagaaggtctttgatatgattgattgggacttgaataagcatggtttctgaattttggcacttcaatctcatggttattttttctttctttcttttgaatgatgattattgcttatttagtcatatttaagaggtttatggaggaatcaaaatgaaatgtttaattatgaaaaataaactagaaataaattaggcttcgtcaattgtgcctggtggctactatttgagagtttttcttaatgtcagttagtttttccttaattcacaggtccg

SEQ ID NO: 64477 - DNA, 858 bp, Cucumis sativus
  Intron number 1 from transcript Cucsa.280340.1 (locus Cucs a.280340) derived from phytozome v7.0 (chr-ID scaffold0263 3; pos 299272 to 300129)
ctgaatcccgcctccgcggcatctcaatacttcaggttttctcttctttccatcatgatcagttccaggttgtgtgttcatgaatgaagttttaacttttcctcatttcaatgtcgaattcctcctgggttttcgttgttcttctgctttggttcctcaaaatgtcgaattttttagaccccacttgaatttctatgatcttaattgggtgtttgttaatgccgataagatgtttgataataatcattgtatgtgtatccatccatcttacttccgaattaactttgtaaacataaaatagattgaacaatgaacatgagtacatgctttgattctgaattttttatttgtggggtgtttggtgatttgtatagggtattagctgttgatgtacacaagcactgagatgcacagctgttcatgctgctgctaccaactaacatgaaaaagaaaccaactaacatgaaaaaccaatcctgctttttgtaaggaatttttttccaattttctctctttgaaaagatctctaactcccccccttcatttacaaggttattgaattgagttgtccttgattaaacaatgattcactaaaagaagtaaggtcccataggcagtggaaaaagtatgcctatcaagttcttttctattaaccaaaattccaaagaagtacacaagtgttaatgtggggttcctttttgtatttgttttaattttcttggaatgtttattactttaatcgaagatttgattcagaaataagttattttgttaacatacgtagcaactgtaactgaaagtactgtggtttttacctgtgcagctcaacataggagttgcactggacagagatatttt

SEQ ID NO: 64478 - DNA, 605 bp, Cucumis sativus
  Intron number 2 from transcript Cucsa.257830.3 (locus Cucs a.257830) derived from phytozome v7.0 (chr-ID scaffold0222 9; pos 5012389 to 5012993 reverse strand)
agttcaaccgctgtgccttcgtttatcagttccaggtattcagaattttgccaatttgttggatatttgatccccagttcatcattttatcaatccacacggtaaactgtattagtgcagatgtctaaattttgatgtttaataggatggaaaggaatccatgtctgaaactcgagaaatatataactgggaacaaatgggcaatagttagaaaataattgaagttctagcgtgatttataatgttttgtcttgcaaattctgagaaataataactcgggaatctttggtatcgtcgtttgttttaccctggacatcagtcttttcactgctcgacagtgcgcaattgtcacgatagcatttagtcattattctgtagtcttttattatttgttttctttcgcagactattttttcttttattattttgttattcatatctgcctcatacgatattcttacactccttatagaagacatacctataattctgacggagtaccagttaaagttcattgattttctgttctttcacttatgcatggtttacaatcattttctttcccaacagcgaacaagaaaaggtgaaatcttatagacaaaaaa

SEQ ID NO: 64479 - DNA, 621 bp, Cucumis sativus
  Intron number 1 from transcript Cucsa.236080.1 (locus Cucs a.236080) derived from phytozome v7.0 (chr-ID scaffold0201 4; pos 46347 to 46967)
gtctggtgggagagaccacgtttttgttctcactggtaagtttcttttcttatctccaactctaaaatttagcaattcaattgctgtgtgtgtgtgagagagagagagaggggaggctcgatgataatgattcagctctgtggttgttaaaaagtgattgaaatctatcatgctgattctggtattaatagatcttactgttagaaatttaataaggtgaagaacatgagactagaggaaattgaactggtccagtttcatttgtaggattctctagttttttatttgttcattggtcttttattgtggatgatcggttgtctattttgttagtagcttaaatttgtcctgtaaagtggagaatttgatgaactatttcatgcaagttggagtttgtttggttaataggttaaaatcctcagtaaattgagaggattaatcatttgttttagcgaattttacaataaacacctttttgttaagacttcgagatatccctccttgatgctatcaagacgtcaagaactaatactgttgtgtgctttagcagtttttgatttagtcctctggattgtcaggtaatgttaaaacttgaagcattctttgacagacccagttgcg

SEQ ID NO: 64480 - DNA, 1049 bp, Cucumis sativus
  Intron number 1 from transcript Cucsa.202010.2 (locus Cucs a.202010) derived from phytozome v7.0 (chr-ID scaffold0137 6; pos 167924 to 168972)
ttgctttccccagggtttatatttattaatctcaggtattttactttgcaatttcgatctccttgtgcaccgctactttttgcccccattttttaggtatttggacctccgattccgtctatttccctctggatttgcgttttggggttttcgatttgcatgtctggttctttacagattgttttgggtttcttgtcttcttctcgttgccgattgtaataaattgtttcttgtgtgattttgcatctaataattttttgttgtaattacgtggacgatgaatagcattgcaatgttgcgtgaattgttggattggtttctatgatgggtactcgataacgggttgtgattttttctagttatttgtccgtgttgatctttattggtgatgttgcttttattcttatgtttggcggattggttcgtgctttgaaattgcatttgattggacatgcggtgatcgaattctttggtccatttgtttctgttttcaattttaagtgctttctctgagagttagggagaagaaaaaaagtagaagaggaagaagcaagagaaagagagtgcagatttaatgaaatgccagagaaagagagtgcagatttaagtcaaatgactacccattactaaatatgaaaccccctcttcttactgccttatctttgcttctgtacgaaaatttgcaccgttgttgtagtgtaatgcacacccttttgttcttgcattgaacttgctataatggttcaattttatgccatgggctatggccgaaggcagttatctcaatagtaaaagaaacttattcattaacagttgcggttgtattttattcatctccagattctttttttgcatgagaattaacgacagtgaaatattgttcatatcaatgtagaattaagtatttcatggtacaattgtctatgtgattgggaattataagttcacgagcgtggagttctgtgtttaactttgtgcactatgtttgaagtttaaattgtattaaggctgcccatgattttccagtgttctcctgtaagtttggcgaa

SEQ ID NO: 64481 - DNA, 632 bp, Cucumis sativus
  Intron number 1 from transcript Cucsa.198200.1 (locus Cucs a.198200) derived from phytozome v7.0 (chr-ID scaffold0135 7; pos 1309015 to 1309646)
tggaataagttacactccgctggcattcttcagaggtatgatcgtttttgctttttcattagcgtttttttttcttttcttttctgttgtgtagtttttgtatgctgttggcggtgttacgaaggtaatgggaaaagaaaaagtgaagaattgggatatactcaactgaaatggagctctggaccatatcatacttatcttctcgtgggcaaattatagttttctgtgatagttcactgaaacggactattgtattgctaccgggtcaaccttagcacaatcctgttccttgattgtctgaaaataatatttttcttaattcctcgaatccatgtatagtgaaggagttgcttatttatttattttttagactagctttacgtgataattgaaactttcatggaatccaagagttccttcatgcttcgtagtctttatctgttatgttgactatttctagtatttatctgtccgttttactagcagattttttctgtcaaaattttcttggagattttctgaatttgttgtttgagataattcgatttggtttcagtttcttgaataagtagtggagctagctattccctttttcaggtgtgtggtcttgaaagggaaagaagcagaagata

SEQ ID NO: 64482 - DNA, 776 bp, Cucumis sativus
  Intron number 1 from transcript Cucsa.258430.1 (locus Cucs a.258430) derived from phytozome v7.0 (chr-ID scaffold0222 9; pos 5393749 to 5394524)
ttctaatcggaacctcggttccttcgttggctcaggtaagttttctgttattctcgtcttactttggatgctttttattcgaaattgaactggtagtttggctgaatgttttgtgtatagtttgtaattcagtgcttgtttgctgttgtacctacattttgttctgctgcatttcgtttgttcgaggttgaacttcgattgagtgaagtatggaagtggttcgcatgcgtagttgaatggaactaggcttattttcgcgcggaggaggatattttttgtgacagttggttttcagtaaatttttcttatagatagttgtaactcgttctgtgaattttaggagtaatgtgtttcgtggtatgtaagggtaatctatgtctaattttgtggtgtgttattgtaacggaaggagtgttggatattttcttgaacaagatgttgctatttattcgcgctttttgattttttatcgctaaatttttgttgtatccgccttgttagtttggttttcaattaaatatattatttatcgagaaacggttctgatggaatttgcaactttctgaaaatgtctttctgttaaatcttctctacacttttttgttcttaacaatttcttaaattaattaccatttgtcctgttagttatttaattctctctctgtctttagaatttttatttgaactcaatggccaaccttaaggaaacacatttgattgtctctacccttgtatttgcaggaaaagtgtgcaagacagaaaaagcttcgtctcac

SEQ ID NO: 64483 - DNA, 254 bp, Cucumis sativus
  Intron number 1 from transcript Cucsa.254140.2 (locus Cucs a.254140) derived from phytozome v7.0 (chr-ID scaffold0222 9; pos 2539829 to 2540082)
ctcaatccctggagcttgccaccagagtacgcattctctcttttataggcgagtgtttttcgagttcggcctcctttcccctgttccctaagagaatgatttgattagttcttggaatcattttctcttttatttcttatgctctctcgatgcattttctcctcttctgaaatggagtgatgtgattaatttggatgaaacttatgaactttttttcagttggctggtcaaattgctcgtgcggcaacaatatt

SEQ ID NO: 64484 - DNA, 1019 bp, Cucumis sativus
  Intron number 1 from transcript Cucsa.168400.1 (locus Cucs a.168400) derived from phytozome v7.0 (chr-ID scaffold0116 0; pos 151939 to 152957 reverse strand)
tcttcatacttgtaagttacttcttttttgttttttcgttttgggggtcgctcttaatttcttttcttttagattcttttcatttttcttcttcaattttattgtcttcttctttgttttctgtctttattttgactctttttcatccaggttagttagtttgtactttgaaccccatttatggtagttttctatctttgatattgaaaacctttctttttatgtgtgtttggattaatttctgttgacccttttgttaattattgaaaaaaaaatgcttttcatgagagaaagttcttcatttgggtttgtactgtttcatttttctagtacatattcttcatgacttttgagttcatctggaaattcacacacatttgaactcatacttgctgtgcatttgatttgatttatgtatgtcaactgatcctattgatttgtttgagagtataatagtacagtttgtgaattgtgaattgtgaaaggcttgtgcttttcaagtgattgagctaagcaactttttcagcaaaagacttttgtgtacttgcataaatatcaagaacatctccacatttgttgtgtgaagtcgcatatggcttggtttaacgaatttgagttaagtttaagagttgacttccttatgaaactacttactgtgaattttccatgtctccctaaccttctccatgtctgtgtgaatgtcatttaatctataaagcacaagtcactaaattaataacctttttttttctgttagtgtatattgtatggaagtaattacaaatttttagggaaagggctgaacttttttcttgaactgttaaacatcctatttatttaccctttttaagcactttagcttgctaatagttttaatttcttttttcctgttagtgattagtcaaatgaatagtattgacttaattaaccatttgaccactgtggaagtagtttatattaataactcagtgttaaattttccagtttgcagaaagtgcatatccgacaagatttctgat

SEQ ID NO: 64485 - DNA, 736 bp, Cucumis sativus
  Intron number 1 from transcript Cucsa.232370.2 (locus Cucs a.232370) derived from phytozome v7.0 (chr-ID scaffold0198 9; pos 361919 to 362654)
agaaagccgttgggcttggcgggtggcattggctggtgatttctctttttttgttttttgttttttttttttactcgagttgggtttttttagaaatggggtttttaacagacattgaatttctttggattctcagtctgggttataatgtgaggattcatttcatgttttcttatcaatgtctgttcaatttccctttttttttttagttcaattttgtatattagatcttagatcgcgtatcagccaattctggatttgagtatttttgctttactcgttgttattaactcagaatacagggttttctttactgtaatttggatttaatagagaactggttttttgggatggcatcttcaatttctatctatattattctctattgcatgttcgtttaatcattggatctcatgattatatcagttttcccaaatctacaatgaatttgatacccattttcttaatacctcggccgttttctgggcaggattgttttattttctttgctcttgtttggcctaattcaacgtattagatgaaattatgatgggtttttttatcacttgaattggagttgaaattttcccttttttttctgcttcatttaagttgtgatttcggtgtgttattggatgctcatttctttctcgattattaggaattaggttttttggttttgattcatttttcctggatgtgacttggaatggggattacttgcaggttctaacaa

SEQ ID NO: 64486 - DNA, 1013 bp, Cucumis sativus
  Intron number 1 from transcript Cucsa.201500.2 (locus Cucs a.201500) derived from phytozome v7.0 (chr-ID scaffold0137 4; pos 400627 to 401639)
tagggccttcgcttttccactactaccagaagccagtaatctctcagatttcgacttcatatccttgtttgtttcagttttctgcattcttgattttgctgtggttttttctgataaagattgattgtggaattctgtcggttcatttctttgaacagattatgattttgcatgatttttccgctttttttattcgttgctactgcagatttgttgatcttagtcactgttttatgggatacgcttggttgtttggtttctgtttgaacacacatcattaaactgatcttggtttgtgcatgtcgaatttattaggtgcgaaaaattgtttatgcatacttacgttcttcttctgtttgggggtcgtgttttcatatttctacgtttgtctatattttctcaacttcgtacttctatatatagataaaaaaaaagcgtccacgtttttttatgcgccttgcgattaaccagaagattattgcgttttattgtgcctttaaaaaccgctgggtagggcttagtaaatgtggatccattctttgagaccttgaattaagtcaagcttcacttcattcattactttatacagcttttcacccttgaaagttgaaactattcttgcactagtaacttctatggttattgctttcctatgctggtactttgatttaagttgttacatgtccactgtcaaaaacatttgatcaagggttgctattttcggggcgggcagactcctatatcttagactagaaaagtttaataaaagggatgagttttaaagttttctctcgtatcttccccctcataagtttttcgaattgaaagattatacgtgtaactggtttagatcaaacttttggcggactttataagaaatctacccaccctggccagtttgttttgttttgtatttgatggattcccttaatttcatatgtccacacattcttcagaaactgatctgtttgatttacgctcttaatttacagctcaacattgtagaaggaaaa

SEQ ID NO: 64487 - DNA, 746 bp, Cucumis sativus
  Intron number 2 from transcript Cucsa.244560.2 (locus Cucs a.244560) derived from phytozome v7.0 (chr-ID scaffold0213 5; pos 424937 to 425682 reverse strand)
tgccttcaggtatttgtatcgttgtcttgttgctgttttttcatttcattttcgtttgagtggtgattttttgcagtttgatttattatttctgtaaccctctattaggttcgggtaaacttttcatcctacgaattatttgcctaacgaacttcaggaatgcgatgttactgaacgcattgcttgtaattgtttcttgaagacttaagttaatgtaatttcattgtaagtgtgagtgaaaatacttctgtacgcatgtaatttccgttctgttcaaaatgctctgtgagaaggtatatgataatacatatacagagtgggggcttttggtaatgttacatctctaaattttctacttgtaattgaaggataaattgaactaccatattgttttcttttacccgcttacctctttcctctaggagaaacttcatagacatccggaatatcctccaagtcaccagtctgaatgttaagagagagtagtgaattctaagtatcttttggtatttacattgacttgggagtgaatgaaacttttcagctgtacatgaccagttacgtttgtgtacggtgattctccctgctactactcgaatttttttgttacactttggatatttgctttatttctaatacaaagctcttcttgttttcacatgtatatgatgtttgatctataaaactttttttttctccatatgattacagaattttccttgtcaagaagttgaaagacacaacaa

SEQ ID NO: 64488 - DNA, 744 bp, Cucumis sativus
  Intron number 1 from transcript Cucsa.265920.1 (locus Cucs a.265920) derived from phytozome v7.0 (chr-ID scaffold0235 2; pos 377042 to 377785)
gataggccacatttggcggacgtaaaaaaggcgccgttgggataaaggcaatcaactgacgtagaaatttctcgatgttcctttcctcgacacctttgtgtacgttgagagaactccaatttcttgtagtgtatcttcattgctaaaggaattatattaggatactaccatgtatgtttcaccagctgatttgcttacaaatgtcacaagcaaaaagaacaaagcataattggagcctgaagtgaaccagcaaatagtaaattaaacaactataaattggaacaaaatggcaacaaaaccctaagaacaaaagagtttttttccaaataacatcacccgattagatttgaaaggaatcaaatacatagaccaaccagaaaacaaaaactgaaacgaactcaaccttgtgagaacatagtgtcttcaaacgaataagcaaatggacgaatgtaaactctagaaaggctttggtaccatgcactttatacttttggagaataataatcttattatatattttaattaggctaaagatacatatgtataggcgactaagaaaccctactaatctagggaatataaaattacaataaaggacaactatacatgatgatgatgatgatataaatacagattatagcaattatatttccttccattgtgtattaatttgatctaacgtagtaacatattattttttaaaacataggaatttaagaaaactgaaatacataaagaacttcc

SEQ ID NO: 64489 - DNA, 745 bp, Cucumis sativus
  Intron number 1 from transcript Cucsa.284840.1 (locus Cucs a.284840) derived from phytozome v7.0 (chr-ID scaffold0265 3; pos 1451381 to 1452125 reverse strand)
gctgttcctaagaagaaggtattgaatttcttcctcctattttcaaataatcaaacgcctacttttagaatagaaatttaacctgtttatttcttatggataaagtagaaacttcaaatttcacattgcttgaagttgtgggatatggaagatgttgctggaagtattagaaatgagcttaaagaattcaaagattttagagagcatttgtagttgcattttttatgttcacttcttctggaaattccagatggtgctatgattctatgagatcactatttagccaaaaccatttggtttttgaaaattaagcctattttttctcaatttcttaggtagaaaagttgaattcttagcggaagaaaaaactagttcttataatctatgttttcaaaacttggacttggttttttataacattagtaaaaaatagataataaaacaaaaaatgtggaggtggaagagatgtttattgattaattgatgctaaatgggaccttatatattcatctttacttaacaatgcctattaagttcaaattctcgtatgtattgacaatgtcaatatttgagtatggcattgtttatacttacttacacacacacacacacatgtttgaagcgttcctttaggtttccaaagctccttttctaaaacttgttcgtttgggtttattgagaaatatgagaaaacaattcatagtctatattctgcaggtttctccacataaaaggcgcataagaa

SEQ ID NO: 64490 - DNA, 952 bp, Cucumis sativus
  Intron number 1 from transcript Cucsa.137480.1 (locus Cucs a.137480) derived from phytozome v7.0 (chr-ID scaffold0105 3; pos 244609 to 245560)
cggtgcttacacgaaacctgcggtaggattttattctgtatgtatgtgtgtagatatttgtgtccaatgggttaatcgaaggcctgttgatagataagatattgccgaaggaagaaatgatgttcttttatatggttgcctacctcattaaatctaaatggtttgacatctttttatgtggcttgtgcttcttgtggttccttcatcagatatgcaaattacattagtataagacagaaatgagttgctgcaaattagaatctaaaagtgagctttcctggtagtaaacaatgttgatcgcaagctccctgtattttgtagcctggtactactatctgtgcataaaaaaactcactagaactattagggagcatgaacatgtagcttagtactacgaatagaaacatttcttccagaagtgtgagttaaactcattagaattgattgccaaacctaactattggtaatcttatactcattttgtgcctgaggaatggtggctgtttgattcattatttagtggagtatgtgagtgaagtattctatggagtgttttgaatcaaagtaggtcggaaagaggattatgctattgtccgcgtgtaaccaaaacacactcgtctgtccctagtaatttggaatcaactttcctttgtttgtgctctttttttttgcctttggacgttatacttcctggcactaaacctcgtacatatggatgtttgaacattttaatgcttactacttatcaattggcaactctgatttcataaactctggttagattttaatgtgattcctctgttcaaaccagactatgattcccaggataaattttattgtttaattggaactcatgcttgaactagttggcttactacttctagtagaaaatttgaagtggtatgatgcttttgtaggctcgttcgtggacttttgaaggttctgttaagta

SEQ ID NO: 64491 - DNA, 737 bp, Cucumis sativus
  Intron number 4 from transcript Cucsa.153120.1 (locus Cucs a.153120) derived from phytozome v7.0 (chr-ID scaffold0112 4; pos 327111 to 327847)
caccgagcctttcagtccaaaaataaactgtgttggtaaggacacaataaccttcggtgtttgcttacatttatttaaagttttatcactttggcgttttttatgaatgaactggttccggattctattcagcatggtctcaaatgcttgttgctccttttctaatggcattaccgtccacacgagtgatacctgacaacctgcattttatttttaattttcttgacttcacaaatgcctaccgagaagattttccagtacttctattcatcatttagtcacgtcatctgtcattgacactttattagattcatattatatctttttcattttttttcttagaactaagtgcttgcattgagggaaaaaaaagaaagattacaaaacctttaagaaaaagaagaaaaaagaaaaccaagcccacaaaacccctcactagagtaaggattaccaactaagtaagatgtttcctaaagagtaattacaaaaaaattcttcaaggtcaaagcccagagtgatgcatgaaacttcaccaaggaccaagcatcacaatcatgaaaatgttatttatggaaacgaacatttccttcaaatttgtttggaaaatcttctcatttgcttggaaattaagaactccttcaccaaattttgaggctccaataatttaacggtacttcttgaattgtcatttatgaacattttatcttcctgttgaacatattttgcagttggtgcga

SEQ ID NO: 64492 - DNA, 772 bp, Cucumis sativus
  Intron number 1 from transcript Cucsa.251800.1 (locus Cucs a.251800) derived from phytozome v7.0 (chr-ID scaffold0222 9; pos 879872 to 880643 reverse strand)
atcggtttgtgtagtggagaaaggcgctgaagttggtaagctgcttgttcatattcagatggaccattgtagatgtgaagtgtgtgcaattgtgttttaatttgcagtttcttggataatttggttgtttaactgttgatttgttctctttgtctctatttgtggacatgcgtagtatatcaaattgcctcataatctgaattttagtgcccttctgttgcatgcttgtgttgaaatttgaagattgaaataatttgagacccttggtctcatcaggttgtgcatgacagccaagccattctaggccctccaacagtggtgggggaaagttctgggttccattttaatttgcattttagacgtattttagaacttagcaatgtgtgctttatcttcttggactttagagaatgagcagttgagtaggagaagatttagggaacatctgaaggacagttgcacagctgagggatgattttgaatgaaatgttgatggaacgatgcaatacttcaaaggggattcatgtcatgaacgtggtgcccctcatcattattgaaattagaagttcatttggatgttattaactatgatttatttttgttttattcccatgatgggaagcagcattggattttcttggggaaatgttaagtgtctatcctatgccgtcatggagacttatgtttctcaattattatgaaatcttttcgatttattgaaccttctaactgttctattgattctcaacaggcgctcacatcctctccggaa

SEQ ID NO: 64493 - DNA, 379 bp, Cucumis sativus
  Intron number 3 from transcript Cucsa.148810.2 (locus Cucs a.148810) derived from phytozome v7.0 (chr-ID scaffold0110 7; pos 794620 to 794998 reverse strand)
caaagattggtaagttctttgatttcttaatcgccagcatgtgcttactgctttgtttcatcttctgcaacttttagggaggataatctgatgcttgcttgttctattattgtatttgtgtagcttttgtttggagatggtgtcatctacctccaccttttgcaggattttctatttatgtaaactgttcttttatgtacctaggctattttttgggcagatggtttttcttggaaatttaatagtaggcactctgttcatggtaattgttatgacattatgggggttatgtatcaaaatgtgaacggcaattccgagatgaaaagactagtttctgattcttcaaactcacatatatgttatacaggtttcatccatc

SEQ ID NO: 64494 - DNA, 963 bp, Cucumis sativus
  Intron number 1 from transcript Cucsa.257840.1 (locus Cucs a.257840) derived from phytozome v7.0 (chr-ID scaffold0222 9; pos 5016281 to 5017243)
tttccgcttcatctgttttggatccttcttatctcgtatgtttatttttctttctttcaatcgatcaatgtgcaatgcgtttgtgggtgaatggtgtgccacctgattaagtttgatctattcactatggttgtttctacgaggtcaatctttgaaagaattgatgtttctggtgaatttagaaaataaaatgtttcaggtggtactggcatttgtattataggtttaaggatcttcttgtgcattctcttttaaggtagatctgcgacttcgcttagaataaagatttattgattcgagtcaaattaagaccactagctttgtgacccgacattcttattgggtcgcggaaaattgaattaggttgaatacagaaggacgattggaaatcaattttttttttttttttcacgtagtttgcttgcgatggaagcatattaagttccactagctgcatggtggcgtctatatttttttgtttcctctgaacgggagtttatttttctgaacacggtgaataaaagcgtcaacttgtgtttatttttttagtccgtctctctgaaattagtccgtgggttctatcttttcatgaaaatcttacgaagtatgccaggttgggtttattttgactgacctgcccgatgaacgttaagatgaatttcacttggaacttatatctattgtctatacaacacattcttttagaacttctatgcagcgacgatatttacaaattttattctatccagattgtttgtatttggtgaattgccatcgatgaagtcttgtcttaagagatatctgttttttttttcaaacaattttttgttcaaaatattattttcttattctgataattacttgttgagtggtcaacttagaagagggtattctatggattgaatagtgtattattgaatcagatttattgttgtaataagataaactatttctctcttgtag

SEQ ID NO: 64495 - DNA, 898 bp, Cucumis sativus
  Intron number 1 from transcript Cucsa.146960.1 (locus Cucs a.146960) derived from phytozome v7.0 (chr-ID scaffold0110 0; pos 293076 to 293973 reverse strand)
gatagggtgagtgagctctgaattaatccaattatttaatggctttgcaattaacattattaattataaattgtagtgtagagttaagattattgttgttaattaatttacataacttacgtcttagttttgatgacttgaattttttgtactgttcattgggttttagtcaaatggtctagagacttgctatatattgcaagtaatattttattttagatttggtgatctgttacttgcctacttctttcttattgtatttaataggaattacatttcttgtagttgtaaactagttaagaaagaccaaatgtatattgatgaaagttagttagctaagataaaatattgaaaatgtaatcacaatctcaattaggttagacttatcatttccaacgagaatcaaaataagattaaaatattttgcgacaagagaagtaaaatgtttttcttttttaaattattatttctaaaaagcgaacctattattaatatatacttaggtctatttgaattgacttcttaagtaattgaaaaaaaactataagtccaatagtaaactattcgacttatagactaatttttctaagtggtttgtaatggttgactatgtatttttatttttttaaggaaaataatgtattttcttctttagatagaattttagcacttttttagtatttttctcacgatgctcttaaataagaaactcatttatttcttttgttttgtaatcctacaaatctgttattgttctagatatttgattcctaattcaaaattgtaagtagaacaagttcaagtttaagaaacataaaactaagagtgaaagtgtgattttgtggggcatattgatttttataaaacacatctgtttgttcaatctatgtaggtaaat

SEQ ID NO: 64496 - DNA, 523 bp, Cucumis sativus
  Intron number 1 from transcript Cucsa.303370.1 (locus Cucs a.303370) derived from phytozome v7.0 (chr-ID scaffold0295 1; pos 1325521 to 1326043 reverse strand)
gagagaagagcccagattgcgagagcaagattttggtacttctcctctcgcccacccgccctttcctacttttactattattactttaaatttcatattatttttagtaacttaattaaatgcaactttactaatttcaaaattgtttgatttttggatttatttgcatctttaaaagtttgtgtaacggagtacttatgaattaaggtaaaatattgttactattcatgaatagtaacgttaattcagtcttcaaaggagtttcccaaatttgaaagaaaaaacaatcaaatttaactcacacacatagcgacctgtatcaattttcaatttcaacagagtgaagggttgagatcaagtgaacctaaacgccacaatcttgcatacaaataagtctaatcaaaactaacaaaaatttaatccaacaacacaggtctaaagtgtcaccaatccagtattaatttactaagcaaggtttgtgtttatatatttataaaaaggaaactttcaagatagagagaaa

SEQ ID NO: 64497 - DNA, 707 bp, Cucumis sativus
  Intron number 2 from transcript Cucsa.161480.2 (locus Cucs a.161480) derived from phytozome v7.0 (chr-ID scaffold0114 4; pos 1397913 to 1398619)
tgtcttcaaccttggcgagaatctcactccgagatgtgagtgtctttttttttgtttgtttgtttctggcggtttgccctttgtgttggattctgattatgcaatgattgttctggagcgtgtaaaatagtgtctgcattggtgggtttttccttcttatcaaacaaggaatttagagtgaagtctactacaatcaaaccagtattttttgttgcacatatcataagaatctttcttttatcacgttttcttgaaagaaagaaagcaaatagggtaaggaagaattcttagaactttcttgatatacatatgtatattgattgctgccttgccacctggtgtgagctgcaatgcgattctttgactatgtcatcagttcttttgaagtatagatctttttgcaattttcagcacaggttgagtttgactctatttgtgaacttcaaattatcaatgaaattgccttttataggggaaaaaatcacatataaaattttcaatacttttttttttgttataaaaaacccagaatcatatatgtattctcattcttttttgtcatttactcaaattatccattcccttagtcatgattagattttcctttcgtcatgatcttaactgtctgagtctttgaatttgctatacttgaatcttactgaggtagttgataacatgaatgtcttgcagataaaatcctcagcaag

SEQ ID NO: 64498 - DNA, 490 bp, Cucumis sativus
  Intron number 1 from transcript Cucsa.181200.2 (locus Cucs a.181200) derived from phytozome v7.0 (chr-ID scaffold0123 9; pos 186164 to 186653 reverse strand)
tgtcaagaagaagaggaatctcccaggaaatccaggcaagaacaaaaaaagagctttgcacttatatgatcttctttttactatttttgtggcttatgtttcttctttgtgtagggggaatttagggtagaatattttgatggatatattcaacttttccatcttaaaactctttgtttctctctgaaaaatgtcagaaaacaaccttttctctctcattattgctcttttggaaccctcagattctgttcttctttgagtttcttaaaaaggaaaaaaaaaaaaaaaccctcatggaaagggttattacaaagcaaccatcttttccctcatatcttcatgaatatgaataaaaagattaaaattttcataactcatctgcttaaacatttgatttttgagtctgatatcagagtcggttttcttcgattaatattgataatcatttttgacagatcctgaagcagaagtagtgtcgttgtcaccaaag

SEQ ID NO: 64499 - DNA, 950 bp, Cucumis sativus
  Intron number 1 from transcript Cucsa.258680.2 (locus Cucs a.258680) derived from phytozome v7.0 (chr-ID scaffold0222 9; pos 5516246 to 5517195 reverse strand)
gattgattcggcaccagaaagtgcaggtaaaatgttgttctcaaattctctaggcgttgtgtgagctcaagaattttagagttagtatgtgctgcaatatgcaaagtgcacatagcatttatttggtggatataaactttcaatctggcttcttgatccacgggcaacttaatctccgaatctataacttgggatttataagagttgcatcagatgctgtaaataggctcatgtaagaaagccagtgtagagatggcttgtttacatcatgtggtgcgtttaattagcattctggtagaatatctggggtcatgaacttccacatgatattgagcttggttgtttttatagttttaatcgctagaacattgtttttatagtttttattttattttattgataatgggttatgaggatcccaccatttacatatcatgggggacttcatagacttgagggcaactcgatagactaaaagaattattaagctttctgcacgggattgagttcagcataatagtgattttcttgtgtcatatcataattctatgtattgaatttgtatataccatagagctgggtgacatattgattttaagaatcagtacaacattttgatagtgaatcttctcgtggatcacgtgcttcaccagtatttaatgcattagaaagaatcaaaatgttcaaatttctctgtacaatgcttatagagaacatgtatgatggggaagaagtgtttctctcttcactgtttctttctggttgtgaaatgagtcagaccatttggttctcccctattgctgaatcctacttttaattaaaaattaaacaatttttaggcatgttataacccgccctccccccaatcctgttgaattattgtgaggtatggaacaaggttttattgatttttactgtactgattatgttcctttcttggacttatgtag

SEQ ID NO: 64500 - DNA, 869 bp, Cucumis sativus
  Intron number 1 from transcript Cucsa.299630.1 (locus Cucs a.299630) derived from phytozome v7.0 (chr-ID scaffold0292 0; pos 155256 to 156124)
gtggtcagacctatgaagaattttttacctacccaaaagaaagaatcagttcaacccaatccaacgcaaattgatatatatatattaaaagttaaacaatctcataagattcgggagtattttttttttgcttaacttgatattgattgatttatgcttgatgatttatattataaatattttttaaaaaaattaatttgaatcgacaattcaactaactcgaaaatatagattgaattaaaaatgttttttattcgatccatttacattcctaaataaagggttgctctattgatttcttcgtgaatagaaaatggctaatacataagtagtcaccattatgtgttctattgaaattatattattgtccatttttctcagccattttccactgcaataatgacgagttaaatgcatatgtttgtcacactttccaaaaacaaataagacaaatgtagcattgcccctttgacattttatatagaatttgggacttagggtggtaatccaaaatatccttcctagactacgcccgccccacgtgataatgatattcatctgaagttgtaagaatttctaactttttttcaaaaaaaatataaaaaatggtcaaaataacaaatttaataaaatatttataacaaattacatttgatagacatgaaactatcgaattttgcatcaattcaaacatacataaaactatctaattttgcttcgattcaatgcttctgttagctatgatttgtgactatttatatttatacattcatggctatttttattttggaactcaagttgtgctaacagtttaaattcactatttatcacaaggatataaaacctgacaatcttcttctggacaaaaa

SEQ ID NO: 64501 - DNA, 753 bp, Cucumis sativus
  Intron number 3 from transcript Cucsa.238290.2 (locus Cucs a.238290) derived from phytozome v7.0 (chr-ID scaffold0202 3; pos 909843 to 910595 reverse strand)
tcacctggagacattgcatttaaggtgggtttctctacttccattccctaatttatattccttcccaccttttaccgtttatcacagctcggatgcatataagttagaaacattgtaatattttgttggcttaggttttcagtgaaaagaaaacagtgattatttgtttagccggatgttttctctttaacttagagcctgaactcaaatgtgtgaaggaaattttatgcaaatatgatttgttcagataaaacctattatttagcatgacaataaatgctttttatttctcatagtttaatcaatgtttaacgtcatcgtgcatttaacttactcaattttttgtgtagaaaaaagacacgttttttaggagaattttggtaacagaatcatataatgaaaatccggcctccatctctgtttcttttttttttttttttttgtggaattgggacttctttgttttggagtagtagtgtgcttacgaccttacttgaaccctatttgttctataggttgtacaactgtgtccttgagttgtaagaagtagtagtgtgcttctttcgaactccttccacgtgcctgcagtttcaactattttgctcaaaaccacatcctgttcttcccactgcttttattatttcatattctccattcttcttgctatcttcattgggaaatttggaccccaaattaacttttggcttcacaattgcagtcaaactttgctacattggacgagaaaacaggaat

SEQ ID NO: 64502 - DNA, 915 bp, Cucumis sativus
  Intron number 2 from transcript Cucsa.238290.2 (locus Cucs a.238290) derived from phytozome v7.0 (chr-ID scaffold0202 3; pos 910884 to 911798 reverse strand)
cagaataaagtggtaatggcggaaagtggttgtaacattttatagaccatccatatcagaatttcacaatttcgttttcttttgggttcaaattcaaacctacttgcgaatttaatttatgatggttgtgcagaggctctagaggtatggtttgtggaattcctttgttatcttcattgatctcaatcaaatatgcatgtaaaaacgtagagtttgtgaaattgttatgtcttcacctttctgttatcgacgtcgagcttgaatttgcttagaagcaattgtatctgcttcatccgaagaaatttaatcttgaaagcttggatgtttcgaaagaaatccattattatcgagcttctgcgtctatacttccttttagggatttctgggttgtttcccaattgccaatgcatggataattgatcgaatttagatattaagttgtatgttaaactatttctgggtaattgccagttcacccggtgattactttttttttttctctctcttttttctcttgagctaaattgtgtataggacctatttgatagccattttttagtcatcttttgtcaagatataagtttgtttgttcataatcccttttatattctatcaacgtgtttagcaattttaaaatttaaaattagtattttgaaaagaaaaaaaaaatcgaaatttggctaagattactaaagagttttcttgataaaggagtttaaaagtgaaaaaaaaaaggacaaacacgataagattgcaattaaacaaaagtgaacttctcgtcgaataaggcttcaattttcatttgtatctattttgggtttgattcatgcaactcttttaattgacatcatgttcttaaacttttctgacatatatgaagaaggaaaaagttaactcaaataccaagattgtgca

SEQ ID NO: 64503 - DNA, 443 bp, Cucumis sativus
  Intron number 1 from transcript Cucsa.284550.1 (locus Cucs a.284550) derived from phytozome v7.0 (chr-ID scaffold0265 3; pos 1281463 to 1281905 reverse strand)
ggtttgattcctacgatctttaacttctttgttatattatagctcaattttttaaaatttcgttataagtggtgttagcttcaaacagtgaacagttatgttacttttgaccttaaaattttactttcatgaattaaactcttcgttcaaactagttgggcaaaagtaactaaataggtgagttgtttctttctgtttttggagatttcagtgatcatgtgcatgcattttttcttttagtcgtatgagtttacatttcttacgagaaatgtttattttgacgtttgtattcacttagaaaaaagttaaaccaatctgattaatttacttgaatgtacattcaaaacagagctagtgaaaaatgtttatctcttttgatttttaattgataaatgtctacaaaatcaggttgactagctcttcggagagctttggtgcaagat

SEQ ID NO: 64504 - DNA, 674 bp, Cucumis sativus
  Intron number 4 from transcript Cucsa.149260.2 (locus Cucs a.149260) derived from phytozome v7.0 (chr-ID scaffold0111 0; pos 122958 to 123631)
cattgctttcagtggtgcagaggtacgttgaatactttaaggctttgcactacttgctattagacagactagagttgtgaggttataggtgtctatttacctttcttcatgaattgaagtaaatgctgatcttgacatttagagtagaatagcagttacctgcgattatccatatacatactttttgcttcttatgtgagctcaccctactatggaagatgttttgagtggtgtttgtaaaagtacaaagcaaattaaagagcaatagggcttgtagggcttaagtgcaggatcaaaagaagggtgaagactttaaagaagtgaagtgcatgacatataatgacttaattataaaaatcaacagaaagagagaattatcgtgttaaatgggttgagtttctcaaggagatttccctggaaaacaaaatgtaatcctcttttgccacgtatctttttttttagctatctacatgtcattcttgtataaaacacaaaccaatcaacttgttagttacactggtaggtagccccaccttacttcttgagggcacttgtgttttgcatttgtatttgttttacttttgtctgtttgttcttgtgtatctgtggagggtaataaatgtttgatttttatgttttatttcacttgtgggctgcagttcatctactcatac

SEQ ID NO: 64505 - DNA, 604 bp, Cucumis sativus
  Intron number 2 from transcript Cucsa.271740.1 (locus Cucs a.271740) derived from phytozome v7.0 (chr-ID scaffold0250 0; pos 540811 to 541414 reverse strand)
attgcagtggctttcaagctgacacagaatttgaggtgattcctttttctttgccgtttcattataaaatatgtcttccaaacgttgttcttttgattacaaaatattcatatagtttgattgcataatggttcaaaaacattgttagggtagaaattctttcaaacttcggatgagaattgagtgtcaaatggggtggcaaccacctaaaagaaaatttgaacactgcatgcatcattttcagtctcgtttctattcgaaattttataagatttcaatgtcaacaaaagcttgatactggtgtaattttaaaagtataggtttgttttcttataatttacatatacaaaatcaaaagtataccggttcataatataaaatttaaatttctatgacataaaatttttaaaacttcaaaatttgacatattaaaaacaaaagagatagctaatggatatggacaccaattcgatagcaattcaatcatatgttagacacgtttgaaaagtatttaacgatattgatgatgattgttattattatttattatttgtttgtttgttttttcttgaaatggaatatttgctttgacttctaatgcaga

SEQ ID NO: 64506 - DNA, 434 bp, Cucumis sativus
  Intron number 1 from transcript Cucsa.202790.2 (locus Cucs a.202790) derived from phytozome v7.0 (chr-ID scaffold0137 7; pos 272 to 705 reverse strand)
actcgaggcaagctctacgaattcggcagtgctgggtattctcttttcgtttactttttttttttttccttcttttattttcacgcaatatttatttatttatttatttttgtttcatcaatttggataaacaccccctcctcctgcccttctcgcagttttcattttttgggcaaaatttgatctgtcttcgtcttcttcttcttctttcagacctgatctgtgtataaatatcaaaactttagggtttttaattcgtttcctcttgctcatccaaagtaccccctccccccttttttgtctcgttttcttttcaccctttaatcctttggtaattaatgagatctccattattattatatatatttaactgggttttggtttgtgtgtgtgtgttagtacttccaaaacattggagcgataccaacggtgtt

SEQ ID NO: 64507 - DNA, 473 bp, Cucumis sativus
  Intron number 1 from transcript Cucsa.157840.2 (locus Cucs a.157840) derived from phytozome v7.0 (chr-ID scaffold0114 2; pos 82477 to 82949 reverse strand)
ttttgcgatctagggctttcttcttcttcaattgggtacttgattctgttatttttcctgattaaatcctccccaacttcttgtttcattcaatttccagtgtattcggttcctattgtgactaatggcatataagttgaagacccatttgagttttcttgagttttttggtttttcttaacgggaattttgttttcatttcgacgtccgacgtattagggttttctcagatgtggaatttttttagcgctggattctttctgttggtagctgtgtgatgctttgttctactgaaatttgtaccttttctccatctgtgtataatattctacttttagactgttgtttaagtctgatttatgagagatagtgaagtacgtgggcgattttttcatcatcgttttgatttttggagttttggtgattttggttgttatccttgcggcagattgaagtgatatgaatatttgaat

SEQ ID NO: 64508 - DNA, 704 bp, Cucumis sativus
  Intron number 1 from transcript Cucsa.219360.1 (locus Cucs a.219360) derived from phytozome v7.0 (chr-ID scaffold0165 8; pos 1160180 to 1160883)
aagcgttcaattcttacctcatccaatttcgagcagtactttctttttctctccccctatcaatcatagctgttacggatttttgaaggaaatgttgcctctttgttctaaatttaacttctctacttcacggaagtttggaaatggattttgctatgaaatcaaacagtttatccagctttggagcccgcttttccctttcctgaattgttatcattgttattcaaatcatcgttagtctcagtcgttcttttgttttaatttctgagaatagatttatcggcttgtagtggcagctactgctgagctgactattactttctaagaaataatttaaatttaaacccgttctttcattgtcttatacatagtctatgtagcattttctttaactactatgtttctaggttttggatgatataatataatgctgttcttaatcatgaatagaacgtccatggatcatttcctattcaaacagaggtatgcttttgggaggatgtagagatcggttttaagttctataggaaatgaaatcgagggtggacaaatattgttggatgttcttttgttgttgctaaaactaaaattattgactatcttcatccactgtattttcaaatgagatgatcccctaggcatgaacacgcaagaatgccagttaacagttgcactctgaataatatcactcaatctgcttgtag

SEQ ID NO: 64509 - DNA, 809 bp, Cucumis sativus
  Intron number 1 from transcript Cucsa.175940.1 (locus Cucs a.175940) derived from phytozome v7.0 (chr-ID scaffold0122 5; pos 388892 to 389700)
aaccaccgcattttcctggatttcttaaggtttgttttgtctattcatcttctccatcctacatttctttcgctttcgttttttccttgtgatctgttttgcatttgcttgcttcacgagatgttcggaaacctgaaggattattgagaatgttttgcattcttttgcgtgttgctttcttcttgacgttgattggtaataatgctggcattattcctcattgcttttggtttctcgaaacggtgatgtttggttggtgcctgactctgtaaattatttcaggttctttgtctttttcccgcggaactgctgtcctctctctctctctctttctttttcctttttgttatacacattttggtttccgctgctgctaaggcggtgcttgaaattagtagtttgtataagagttgagaaatgtgtagatctgtgaacttttctgctttgacttcagattattgctaggttttgttttaatcttaaagtgtactcaatgtggtcaagtaaggggtgaattagaggaaaatataacgaaatttctttttgaattatctgttggtagatgagagcgatatcgacgttgtaatttctgataaaaacaaactcagaaactgcagatgttcacggtaataatctgttttgtaatagctttgacatgttgaacaaagacgttcttgagctttatctttctgatgtacaatagaagataagaatgttttagaaatttgtccgtgaatgaggtatgttttgctcgaccacgtcttctgacattgtttgacaatgtaatagttttcagtacctgctgtagt

SEQ ID NO: 64510 - DNA, 489 bp, Cucumis sativus
  Intron number 1 from transcript Cucsa.142100.4 (locus Cucs a.142100) derived from phytozome v7.0 (chr-ID scaffold0107 9; pos 412259 to 412747)
gctgtggataggatacgattgattttactcatttggtaatgtgagctgtgtttgtgtttgtttgtatttttctttctcctctttttgtacgttttttttatttttcgaggataaagtggagtaggagacgaatcgtttattaagttttcaggagttttgtttttcgtttgcttaattgtgggaaaaagtggtccggttgctatgcatgtatatgtgtttgaaggggggagtgcatgtggaagatagcgtgttgaatgttgtgcatacttttgaatcggaatgaaaatgacttttggtaaagtattgcaaagtaaatttaaacgtgcaatggcattaattgtaagagaatcttgataaagaagatgaaaaggaatttatgaggtttttgataagctgctatttttgagctttacttggtagcagttcattagtattggtggaatgtatatgaaagtgatgattgttgtttgattatgcctactgtagttg

SEQ ID NO: 64511 - DNA, 626 bp, Cucumis sativus
  Intron number 1 from transcript Cucsa.143470.1 (locus Cucs a.143470) derived from phytozome v7.0 (chr-ID scaffold0107 9; pos 1841272 to 1841897 reverse strand)
gctcccagcaagtttaattcctctgtaatccctctctctctccctctctctctctctgtatttactcttttctttgttgtgatcttgatttgtgaatcaaacccatatcttttttgggattttttacctgataattgggctttctgggcttttttcatgctctgtttgtttgttgtaagggatgtatatatttatttattgtattttagttttgatcttcgtgttgtgtttctggataaatgtggaataattgggtgggttctcgttgctgatttggaggaattgggatttggtctgactgatgctgaatttgatgacgatactgatggatggattaagtgggaaaagatgctttttgttgtgggattaaagtttttttttttttttttcttagaggactgtttagtttttcttttttctttttactttctgagattctctagtctttctggaaaagtgggggtacttttcttttacttctatttatttagaatgttgctctacaattttccctgaaaagaaacaaagttttatgtcaattcttgaacttctgattctcatttaatttagttttatggccaactaaactgctgttgatatagggagaaggaaacttttctagcccc

SEQ ID NO: 64512 - DNA, 980 bp, Cucumis sativus
  Intron number 4 from transcript Cucsa.268980.1 (locus Cucs a.268980) derived from phytozome v7.0 (chr-ID scaffold0244 4; pos 149999 to 150978 reverse strand)
tacttttggaacagctccaaaggtgtaggtcacaggtaacttggttatccctttcttttaatgttattatttattcatatgttttttaaaattcaaagaagttacaatctcacttaagatttagttttggatgttgagttggtgacttattatttataacaattttgaaaatggcgtaaggaactatattaggggctgtttggaaagccgaaatgtaattaggattactggaaatcagatgagagttgaaaaatgtgagtaataaaaaattaaacgaaaataagatcgtgaagtgaaaacactcaaaaagatggttggattgaaaactattagaatgaaatgagttttataacaaattggacctagaacgctcaatccaaacatgaattttagactatattacattacaaattcatcccatcacggatcaccaaaacacccccttacagtcactctgagaaaataagaactatgttagtgatacatattgaagaaatgttcctcgattctttgttaaattttcttataatttcattttcctttcaaactttatactacgttctattcatcttgtcatcctattttcatcttcagccataggtcttgagtccagttagattttgtttgatttgaccaaaattgattctggttgtgtatcattttaaatgcaacaaaatgagaagacaattgttatgtaaccaagtttgatgcatggtacgatggaaagtaagtagataatgcgatggatgaaatggtagtggaaaaatttgtaagtttatagactgatggatgaacagaaatgcttgtttcattacacttcaaaataggtcttttattagtttatgtggaggcaggaatcatgaacttgtataaacataatctcatgaaaccaacttccactcttgatcttagtggttgattattgattatttcccatctgatttctgtttacctttagggggaagtagtcatttcagaga

SEQ ID NO: 64513 - DNA, 480 bp, Cucumis sativus
  Intron number 1 from transcript Cucsa.178450.1 (locus Cucs a.178450) derived from phytozome v7.0 (chr-ID scaffold0122 7; pos 681328 to 681807 reverse strand)
gccggttcctaagaaagagtattttccttttccatatatatatttttactcttttgctcttcatattctattcttactgtatacttctaactatcccaaggtgagagcatgctggactgagggaaaatgcaaagaaaatgtgacatttaagttcggttcgataacaagtttattttcgagtttttcatttttgaaatttatatagtcgtgttatagaactaccaattttttaattattgtgagtttgaactttattaaggaaacatttgaatttttaacttgtacaaaaaaaaaacaagatttgaaaattatatatgtgtgtgaattgttttaattaaatgatataattgttgaaaataattacattataacaaaatttgtagtaataggaattaaagtgaattccaaatcaatttttagggtatgtttttttcttaaatgacagtgacgaggccaatttgattcaaagaattgttcaag

SEQ ID NO: 64514 - DNA, 930 bp, Cucumis sativus
  Intron number 1 from transcript Cucsa.161900.4 (locus Cucs a.161900) derived from phytozome v7.0 (chr-ID scaffold0114 4; pos 1675721 to 1676650)
taccttcagctcacaccaagcttcttcacttcctggtaaaccccttcaaatttttttcttcttaggatcattttcactcttttaatgaaactgggtttctttttctgttggggttttttttttttttcgtttttctccgtgggcaataatccctattcgttttttttagtcaatttctatgtcatttgattgtcgtatattttttcccctaattctgaactacagaatgttgtgggtggtgttgtgttttgtggcaatggaaattgtattcttctgtatttattttgaggaaacttacttggtgatggatgggggttctttataaggactctatttcgatgtaggtttgcgttgttcaggtgggtgcttcttttttatattaattttgttacaatggacattcatgggtgaagttattcatctaaatgattttccccagttaaaagagataagttgataacgtcttttattttgctaaagagtctctataagatattgaaagaccgtcgacttagttaaggaacccaacccgcattatctttattttctctagcagaattttggttaacatcgtgaagtgatcatatattgcaaagtgcagtttgtaacctgacacagatgattattttgatttttgccagcagaaatggaatacgggttccagttctcttattattatttttaacattttctttcctttttaactaacttctctgtttttattattattttttttggggggaggggtggtgcaaaaggttggttttggtaggttgtataggtttccatatttatataaagcattgggacgctcaatatttgtcaccctgttggttttttgtgaatatggtgtacatgtcatttgaccttatgaatactacattgagttgaaatggtgttatttctgaactcagaattagtttttctaag

SEQ ID NO: 64515 - DNA, 352 bp, Cucumis sativus
  Intron number 1 from transcript Cucsa.234260.5 (locus Cucs a.234260) derived from phytozome v7.0 (chr-ID scaffold0199 9; pos 202928 to 203279 reverse strand)
gctgagtttggacgacgaaccgctacaagttttaggtacaacccatttgtcggtttgcatttatcttctactttattttgagtattatatttgaaattattgttctaatttctcatttgggtttctttttctttttcttttttttccctttctctaaaagaaaaaagtggtggggttttgattttctgtttaatggtttgcttttctggatgcgttaatgggttgttgttgttgttgctgctgcttgtttttaaatacttgtagttaaatactggttctgtctttctttcttttatgggtggaataaggtttctgaatcgtttgttggttgattttggtagtagagagtgaa

SEQ ID NO: 64516 - DNA, 429 bp, Cucumis sativus
  Intron number 2 from transcript Cucsa.160130.2 (locus Cucs a.160130) derived from phytozome v7.0 (chr-ID scaffold0114 4; pos 407442 to 407870)
ttggattttgcagagcacagcgagcaaggagataggtatttgctttattcaaactcatcttaatcgagttcattcgggtcaaatttaaagtgtttagtaaatgaatcttcaactctggcttctgattttccttgttcttttgataagaattctcagggttttgacgattctgtctttttcatgtcctttccttcatgcatctttaacttaactttgtgcacagccaattatctatatatacattcgtagtaattggagaaaagagaaatgtaacattctttctggggaattgaatgctctgtttctgattatgcgcatcattattcatatgctggatcaatgatataattgacataaattattactttctttggttctaaatcatttattgttgtgttttcagataccaagaacttgcccaccgagttg

SEQ ID NO: 64517 - DNA, 198 bp, Cucumis sativus
  Intron number 1 from transcript Cucsa.146550.1 (locus Cucs a.146550) derived from phytozome v7.0 (chr-ID scaffold0110 0; pos 16342 to 16539 reverse strand)
gctgttctcatgtaagatctctaattacttaattattctcttgaactgtagttaattagctttaatttctgtttgattagtagaagaaacaaaaggaattgcaacttggtagtaaaataattaggtcattgactttcttcttttacggcgaatttttggggatatttacgggaggtttttccggtgtgttaggtggcg

SEQ ID NO: 64518 - DNA, 761 bp, Cucumis sativus
  Intron number 4 from transcript Cucsa.180660.5 (locus Cucs a.180660) derived from phytozome v7.0 (chr-ID scaffold0123 6; pos 222679 to 223439)
atttggtcaaggataattttgttattgtgtacgaggtaatatcccaacctattcacgtacacacatgctgatttggatttaagggagtaccttctactgtagttctagaaactttcacaggaaaatgaatggttacatttgttccatgtttatgtaagttcttgatgtagttttgtagttcttaattgttgtagtttgtagtttttatttattcatttttatcattacattatcattggagttgaatatagggtggggggaatcaaatctcctgcctctagggatgtaagtaatgtgccggctaagtgaactatactttgctgttgtcttttttctttttagtttctaatcatctagttgtttacttaattagaaggtggtagcctcgtaggttaacccattaatccttatatacagtggtttaatctcttacactttgtataaccctcatgtacattgagcttgtctctttatttttcaatattaattatagtgagattcatatccttttcaaaaaaaaattgagggaggatcggcaggcgcacccaggcatctcaactaggttgacatccccttagtgccctcatcacatccaaaaaacgagaatacatcaattctgtgtaaattaaacagcctatgtgcaataaagaaaaggatgtcaggaactttcttgccaatcttctttccttcttttagattgttaatttcatttgccctaaccaaaaattaataattagtcagttgtaacttgtagcttctgg

SEQ ID NO: 64519 - DNA, 783 bp, Cucumis sativus
  Intron number 1 from transcript Cucsa.251510.2 (locus Cucs a.251510) derived from phytozome v7.0 (chr-ID scaffold0222 9; pos 575925 to 576707 reverse strand)
aagcaattgagaggtaacaacattattgctatacgttgaaagcacttactgctcgagagacgagactccatctggaagcctatgtgaagaaactgaatgtattaactgatattgtacggaaaatgtaaatgccattttttttttctggcaattttggtttgttattttcttccgtatcatcagttagtttaacactaaaaacattgaacttagttatgtatatagccaagcggaggtgttccatcttgtttccatgttaatcggtatgctatgagcttaacttaatcactcgtttttttcctatacgtatatataacgattatggaaataagaatgtaggcaaagatatgaaaggaaattaaacagtacttaatctcttaactattggaggttcttttgcaagatatactgatctttctgataaattagatccaaagctatgtgtcttgccttctttgcatttacgttatattctcttgaaatttagggaaggtccaaaactaggcatttatcaatgccaatgggtatctttctttgaattggaagagtacaagaaagtgcaacatacaaaggatttcgaaacaaaaatcgtctacttctatacgctatcatacaggatgtcatgtgttctgggtttaggagccactttcatgagatattaatacaatatttatactaccaatatctacttcattgataatctgaggattcttgaaacctttattagttctaacaaattctctgatttttaggtctggagagcttgttactttcatttccagc

SEQ ID NO: 64520 - DNA, 962 bp, Cucumis sativus
  Intron number 1 from transcript Cucsa.213400.1 (locus Cucs a.213400) derived from phytozome v7.0 (chr-ID scaffold0154 3; pos 1154914 to 1155875 reverse strand)
tctgattcaactcctcttctccagtttcagccgtgagactccttttttctctgatttctctgattttcacttcattttgtactctttttttgctttattttcatcgctcttgcttctagatgtcattttaccacctacctgttctggatctgatttatgatcttgctttgatctagatcgttttggttttttttctccgatttgctcaggatcagatgtcgttgattttaatttcgatttttttttattgatttcagtctcatcggaactagtttctgttgattactgattaccgctgtttattagttattaggaattaatcgtttgcgttctagttgggttgggagctgggatttggtgttcttctgcttggttctgtggatttagatgttttttttgtgatttagatgtttgcgtatgttatcagctatcaggatgttaatcttgtgaaatgaactgagtgcatgtatgattgttgattgctgataatcggttacttggtggcggcagggtctgtggaccgaataagtcctcaactgccatggtgaaatagagggaaggatttggaatgaaatggatttttgatattttatcatgatgcctactttgaattttcaatattctatcaagttttgataagttggaagaattgttttcttgagaatctaaatgtaatgctagtacaaaataggcaactgctcgtttatgcctaaaacaatggatgtgatctcaatgattgtgagaatagactctaaaaaaaaaccttgtggagatcatactgataaccaatcaggttctataaatgtctaacttaaagaggaattgtactaaatgtgatttgacagtgtgaattctttaggcatttgattttgcttactgtttacagctttgacttctttgcccttgaattatattttcattttcttccaattgtttttctgcaggctaacgcggcatctggt

SEQ ID NO: 64521 - DNA, 491 bp, Cucumis sativus
  Intron number 1 from transcript Cucsa.252750.1 (locus Cucs a.252750) derived from phytozome v7.0 (chr-ID scaffold0222 9; pos 1615074 to 1615564)
gatatctctgccccaagccaactctacaaggtaccctctctatctctttagcttctggtgatttatccctaatttttagccgtttcttaaggagttgaataatcttacaatctgggtttttactggcttctagcgattatcctaaatcttctgcagtttctgatcagtttcttagttattggaagatttacaaatctgggtttctttctgctcttaacgcgtttgtaattttgtttctacaaggctcgattctggtgatccattgaaattttctgtagtttctgattagttgtaatttttgcaatctgggtcttgcttagctttacattgagtttgtttgtgattgggagttcgattagctgttggtggggcttcttttcttgcgggttttttggaagctttgtttcgattttgattctgcctgaaatttcttgaactgggtttgagtttgagcttgaatttcatttctcaaaatttcaggaaagagtgag

SEQ ID NO: 64522 - DNA, 362 bp, Cucumis sativus
  Intron number 2 from transcript Cucsa.273420.1 (locus Cucs a.273420) derived from phytozome v7.0 (chr-ID scaffold0251 1; pos 536986 to 537347)
ggtttgctattcacatgtaagtatgtcatcagcattccttctaaggttcactacttttagctcggcacttcttttccaacatcattaaatttctcatgggaagatgttgtttgtcggatttcttggtggggtatgttgtcagcgcagatgatatgatccgtcaagtctgtctctgtttattttctttatggtgtttgttcaacatttcaaacactgaggatttgaattttgaatgttgatacccttttccggcattagtttgagaagaaagcaaataaagatgccttttacaatggccattggttgaatgctaggactgaataaaagttgaccatttccataggtacacagccaataagtcg

SEQ ID NO: 64523 - DNA, 404 bp, Cucumis sativus
  Intron number 2 from transcript Cucsa.239870.1 (locus Cucs a.239870) derived from phytozome v7.0 (chr-ID scaffold0204 6; pos 752120 to 752523 reverse strand)
aaggtcatactctttctataatgtttatggacagaaacgtgaagcaaccgttttgcctttaacttgaatatttctactagaactttaaggagtcaattacatcaatattaaatactcttaatgccttcattgtatgtagactaaataaagtccctgcttgattttgaaaattacaatcttgttttaatttcaactacttatcttcttgaggaatttgattattttctttctgattattcaagatctttttcaatttctgacgtagagcatataaagaatttattttcttctttaattttgatggacaaattcttagactaggaatgccatgtagccacctgaatgattgtaaattgtgttgttctccaggcagtggcagatatcgttgtgcataggcactttgg

SEQ ID NO: 64524 - DNA, 903 bp, Cucumis sativus
  Intron number 1 from transcript Cucsa.239870.1 (locus Cucs a.239870) derived from phytozome v7.0 (chr-ID scaffold0204 6; pos 752698 to 753600 reverse strand)
ggaaaacattctgtgatcgtttgtttgctcttctggtaatccatctctttctgctacattctcctctcctttctgttttgcttgaattctggtacaatgtatgatttattatggattcatagaggtttgatcttatacattctcgtctttaatatcttcgtccttttacggaacctttgtttcagtttatttgtaaaatggtcgttgctagattgtgggtattgatttattttcgtttatttggttgtattttagatgattattacaacctaggccctgtttttgaatgaattcctcaaggctagggagatcccaagttcttttcctgctttgctatttgctaagagtctgaaggttttgtggttattggatttggagaattttggacaaaagaagaaaatagactcatttgttttgttgcaagcagtctcattctcattccatgtgtttctccttatctaattcaacaatgttcatttttctaggctcccgatttaaatatatcttatttccagcttggacttctcatatgggggcaaaaaaaaataggcattagatgaatgtaagatgctattgttttaatatcaatttatcaacctgtaaaatcgtggattttaaaggaataatttatcgttagtttttatcttaaagcgtacctagcagcacctcacgtttgatgcctcactgctgttgagagtattcggctttccttcggccaagttaaacctctcgagcaaaaagtatgatttcacttgaggaggctcgttcacacttatgtgcataataagttgtcgactttttttttttcctttaagttgtgcccgcttgtaattctgtggctaacacgttgcattggtactgacatactatgcttttggggaggtgctacagacgaagtcaaag

SEQ ID NO: 64525 - DNA, 246 bp, Cucumis sativus
  Intron number 1 from transcript Cucsa.236470.1 (locus Cucs a.236470) derived from phytozome v7.0 (chr-ID scaffold0201 8; pos 147657 to 147902 reverse strand)
gttctcaactcttgcgttatcgtgttgttgccgtgaaaattctctcattcccttcttgttttttttcttcttcttcatttatagattcaatacaaaagtagttcaactgatttagacatatatcatcaaaatttgaataatattatcactttttgttattgaataataaaaaaattattgatttggtactgtgtttgaatcttgtggttaggttttggagttgggaattgttgtccattcagttgt

SEQ ID NO: 64526 - DNA, 631 bp, Cucumis sativus
  Intron number 2 from transcript Cucsa.158950.1 (locus Cucs a.158950) derived from phytozome v7.0 (chr-ID scaffold0114 2; pos 973838 to 974468 reverse strand)
atcactgtcttctttctccttggccttattgggtaacaataaacctacaatcttttttaatgtttctcttctttcttcttataatcatcaatcaatttaaaaatacttaaagcaaatagttgaaagttgtaaattaagaataaattggattgagtatattgacagacttcttcttgttatatgataagtctattattcgtgatagagtctactgttgatgcactcctccctacactgtagatttagtaaactagatatgtaaattatttttgttattgtattatatttataaatatgtattgaacctgattgctatatttatcactgcaactatatgaatacttgaacatgtgatagaagactcaacgattggaatttaattttaattttggagaaaatgacactgcaacagtttaaaaacgacaccaaacataagcataagattttacgtactaattaatttccattaaacagagtttgagcaatttaaaagcttaagttgatagttaagttgataggtgaggataagaatatagttgtaatagtttataataataatattattactaattttgaatttatggtaataattaatattgttatgatgatgaataggagtgtggggcagata

SEQ ID NO: 64527 - DNA, 508 bp, Cucumis sativus
  Intron number 1 from transcript Cucsa.158950.1 (locus Cucs a.158950) derived from phytozome v7.0 (chr-ID scaffold0114 2; pos 974472 to 974979 reverse strand)
cttcttcttccctttctcctactttctctatccaggttcctccttttcttctcctccttttcttcttcttcttcttcttcttcttcttcttcatcttttagtgcaatgataatggtggaaatatttcttttctgttttttatatttatatgtttttttttccaattatggttttcatatttctataatgaaaaagttgagttttcaagtcaaattctcaagatcacaataacaaaaattttggaaactacaattttggtggatgacatagtttggttttttaagctgaagcttataaacacacactactttaattaatctcttattagtttgaattttgagtgtttttttaaagcaaaatatgaaaaccttaaataaaaaaattgaagaaagcaagcataacctttaaaaataaaaacaaatggttaccaaattgaagattatgtaacctctttgtatgaatttgtaatttgtgcagagatagacaagctgcccctctatctttctct

SEQ ID NO: 64528 - DNA, 685 bp, Cucumis sativus
  Intron number 2 from transcript Cucsa.251860.5 (locus Cucs a.251860) derived from phytozome v7.0 (chr-ID scaffold0222 9; pos 943043 to 943727)
aaagaaatccttttgtacggtctcctcattgttgaactttttggtattctgccaagattttgctgttattttcatttttaagtttgtatgtttgttcgttggaaggcacttcttatcatgttatgtgaatatcaattgctttggttatgtgtatgagataagaacttctttgtggtttctgactccctatgcttttcgttagctctgtatgaaaaatattggtgctgggcttaactttaattcaaggcttgaatttctggggtatattattttagcatttgatataacttttatgtggtcactgttttcaatattttttatccgggatctcttcagttgtgtttggagcttatgatactttatttttatgtttcacatttgtagatgttacttttcagatgatcccacgttacccatccagtcatatcccttcttctttgatatgaattctaataatgcttgctggtgtaagattagaatatcgattttcagtttgagtaccttgtttctgtttcatacttctctcattagtacaatgaagaaaatggtgcaatatctttttctaactaattccagtgcagtttcatgctcataattttgttcgattcaggatatagaaccaatttttcctgttatttttattaccttttggagtgaaactcatggatttcaatacctacttcag

SEQ ID NO: 64529 - DNA, 565 bp, Cucumis sativus
  Intron number 1 from transcript Cucsa.244200.2 (locus Cucs a.244200) derived from phytozome v7.0 (chr-ID scaffold0213 5; pos 35563 to 36127)
agactttttttgagacgactgataaaggtagtaatgtatgtttctgatccaaagcactttgatttcatcttctttctgttttccatttctgggttttcattcttcatactcatagcttgatttcctctgttacttagccaaaaagttttgtggttttcgttttagatttccccccctcttttttcttcttcttttgtagcaaagggagtttttgcctgtcctttctttattaatcataatcattcaggtttggtcttcaaaacccagttctgttctttttcgaatctaagcattcaaccccatcttttactttttcaaacattttcccagattccgaaaggatagaaagaacgaaacccccctctgattttccggctaaatgttggggtttcagctttttttatgatgggtctttcttctcttgtgatttttgcgagaaaaactttccacccaccttcatttctctctttttctcttcaaaaaagttgttgaaatttctctgctcctctcatcctttcttttactggcagatcttttgtgctttgttcttcagttcaagagcttg

SEQ ID NO: 64530 - DNA, 589 bp, Cucumis sativus
  Intron number 5 from transcript Cucsa.244200.2 (locus Cucs a.244200) derived from phytozome v7.0 (chr-ID scaffold0213 5; pos 37781 to 38369)
tcgagatcaagtagctcttacattggaaaactgaggtgagactacacttgacgaacagttatgaaatttattgtttgcatactttactatctatgttaatataattacagcactgcaaattttcacacttcttaggttacaaatttattgtttgtatacattaagtctgtgagaatggattgtgatataaaacttaggcctatactgtgaattcaactagttgtttccaatagtggcattgttgtacaagagattttataaaactctggctgttgatcgagaaattaagaaaggcaaaatggaaatatgaggagaatttcctgttttaggcccttaagctgaatttatgagaggtgttgatagagcaacaacttggtttgattctttgttggtgtgagtattgaactctcttgagttttgttctacatggtgcctttccaatgagcattttttctgtcgattcataatgggaaactttgatttcttttcgtgggattctttattcatccatagaatctatatatctttcctgattcaattttcgtgtttatttccaggtcgaattttcttggaacaaaattcattgttt

SEQ ID NO: 64531 - DNA, 799 bp, Cucumis sativus
  Intron number 1 from transcript Cucsa.255040.1 (locus Cucs a.255040) derived from phytozome v7.0 (chr-ID scaffold0222 9; pos 3173512 to 3174310 reverse strand)
attgccctttctccaacctccgccagttcttcaaggtttgtatgctcagttgatctgcacgatgtcgtaacgaatatcgcccatttggattttcctttttttcccccaatttctttctctcttcctgtagggttttaatttgatcggggtttttgctccggattccctatctgcgatcatcgcctttaatatgggttgttacttccttcgcgttctgggtttatgtttttttttttctttttttgtctgcggctatcctatttcttgaggttttgattgatgcattttctatccctctcgagggattgtttttcttttgagattcgtgtctcgcttaattcctgattatctttccgaatcttttgacttttacactctaatggtctctcgtttatgtcagataggtttttttttcttttttctttttttttttcttttttttcttttcattttggtctacacagctgttacaagttgggcatgtttggtttcatttgaaattaacaattatgggaaacgattatgattttttggaatttgcattggttgaaggacggaaaaactgatatcagttttatacaatacagtctattccttttcaatttttaatgaatgaccagctatatcaattttacattcattacatctattatgtattggtgtctaattggtttatattgggaaaggtttaactctatatgttaattttccttgcttttttgttgcctggttttgacctttttggtgtgttttgcatcatttagtgagaggagaggagaggagctgattctgaacaaag

SEQ ID NO: 64532 - DNA, 698 bp, Cucumis sativus
  Intron number 1 from transcript Cucsa.159750.2 (locus Cucs a.159750) derived from phytozome v7.0 (chr-ID scaffold0114 4; pos 128402 to 129099)
ttctttcttcagttcttcatctctccttctcactggtaagctttcatttctctttcccttttgatttcttatatgtttttcccttttccctaatcccactttctattttggttttttatttccatttcctgctttttactcctttgaatcatatctgtttctatcacttcttccttattctatctttctcctgcttactctcactccaatctttgtgaaatctgctttaatttactgcttatttgctgtttttgaaacttgctgtgtgatttgtggcgtttttttttcttctagggtttcgtttgcttctggttgttattgttctttttagctcagaatttgttgtggggttgttttatttttcgttttgagttgagggttctgctttaagctcacggctcgaagctgaaaagttgactcccgtttactttcctggttatagtaattaaagaatcggatctttatgagttttgctttcttcataatcttttagccctttttgccctatttttcagctggtttgagctcgttgaaaccgatgaatacgctttttgtgactgctttgacttgattgtttttgctgtatctactgaatttttgtactggaaactaaggcaggagagggaaattacagaaacattgttggggtttatttatttttgaagtgtgattaatttatgttgaatttgattgtttag

SEQ ID NO: 64533 - DNA, 1050 bp, Cucumis sativus
  Intron number 2 from transcript Cucsa.159750.2 (locus Cucs a.159750) derived from phytozome v7.0 (chr-ID scaffold0114 4; pos 129181 to 130230)
ttaagtggattcttcgtttggtcttctgattccaggtgaagtatctactgctccgaactcacgtacatcttgtttctgcttatgattacttgcttagactgtggataaagtgctctgctgcttaactgtattacttcatacctgagctttaattccacaagacagttatttctctctctcgattgtttattgttgcccagaagttgtagaggtgtttttagatcttcccttttatggatgtgtatatgtatacaatttttgcaaccctagttggtcaggtcggttagtgtcttctttgtttggtcagaattttgaatgtttctcttaatggaagtcaatagacttaacttgtggtagtaacttgtgtatacaataaagggagtgatgcgtccgttgttggaatgatgttgtattgattgccacctcctcgatcaattagagttggttctttaaggggttatatttggctttggcttgtagttttatctgaattttttatttgtgccaccggagtttgattttgaatttgaataaactaatattattctctttatttagagagtgaacggtatcaaacatcaatgtcaagaaaagtgaaattacatcgtcaatttatttgaaaaataaagttataaacacactttcactcctaagtttctttaactttgactttgttcttagaatttaaaaatgagagaaagtaaatataaatttcaaagataaactaaaataaaactattataagttggagctccgtttgggatgattgttctcacatttttcttttactcatggttttgattgttggctcatttttaataacaaaaatatatatttttgattttctctttttgcgctgaatagaagtatttcttttgaggttcaccaatatgtgaatattttatttgagacagcattttcttagcttgcattctttctcttcatagtgtatatcatagttaggtaacatattggtaacatttaagcatatgaatgattgccattttgtttgcagtggagctttttcattactgtatctgtgttggttat

SEQ ID NO: 64534 - DNA, 569 bp, Cucumis sativus
  Intron number 3 from transcript Cucsa.202140.1 (locus Cucs a.202140) derived from phytozome v7.0 (chr-ID scaffold0137 6; pos 286900 to 287468 reverse strand)
aatccatcctcgacttgcaaggtattttatctataattgttgggaattgaatttattctaaagttgagagacgtgggcaatttagcgtgcttgcgatcctttgttatttaccatcaacttgattggtcttggcaaccattgcatccaaaaacatatattagttttggtgatatttttatgtatggtttgaagaaaagcatatattagttttggttatatttttatgtatggtttgaagtttttggggttcattattgagcatcctgtgttggaaaaatcaagggacctcactcttcataagatgtactactcttgctgtcagttagttttgaggtgaaactccattgtatctaatattgatattatgttacccaccaaaatgtattatacatttaaatttcttgcatgcatgtgattttctttcacattatatttttagacatgtaaatttgtttttcttttcctcgactatttgtgtctggacttctacctatttcatttagtatctcttatccacttagagtttcctttcagttattctaggcaagtatcattcttctggcacacct

SEQ ID NO: 64535 - DNA, 804 bp, Cucumis sativus
  Intron number 1 from transcript Cucsa.155430.3 (locus Cucs a.155430) derived from phytozome v7.0 (chr-ID scaffold0113 6; pos 205150 to 205953)
ggcaaccgaagtacaacacaactagttaaggtattgttagaagtttgaattttcactcacttatgttattgaacttacagagtagtgtctttgaggttatttttattcattagaggggagaggtatatgcacttgcacatggtcaattgctgtagatcgagtgcattgaatttctgcaactgtatctttagaaaagttgagtttcttgcatattttttcatcttacaaatatttaagattctcatagatgcaatacctgactggaacttgtgtgcatgttttacatgaatgaaacatagatgggatttggattctaaagactgtcagtgtgtgggataaatgcgttctgtcttaattattttgcaatttgatcgtgctggtatttgttttttacttaaaacagatagtttcacttttgaaaaatggtctttgttatacatcagttcattagaaagttggtcttttatttgttgagatagttttatcttactattctatattagttagaactcttggccttaagaggatacaagcagttgagtgatagggtctagggagtaagtagtagagacaatctttagtttctgacccaaagcttgtgttcctcaaattgagataatcatccaatgggattccagagctgtgcttcttggtcaagtatgttttccggtatttatgactgaactgctagtaacttttttcttctctgaatattaaggtgggaaatctgcccttgtcttctttccttattaatttttttcccttacaatttcggataggtaaacgattcttttgtttcaaagt

SEQ ID NO: 64536 - DNA, 541 bp, Cucumis sativus
  Intron number 2 from transcript Cucsa.148120.1 (locus Cucs a.148120) derived from phytozome v7.0 (chr-ID scaffold0110 7; pos 347921 to 348461 reverse strand)
cgtttccttctcgagaaattgctgcacggcaggttaagaattcttctggattgtttctttatactttatggcatgtaatttcatttccttgtaagaatgctgaccatgggttagatttaggtaaatgatggattgaagactgaaggattctttccactcagccatgaggaagcaaaggctatttgatgttatttcatgctattattctcctggcttttgattgaattcaatggaaataaccattttgaaccataaaacgttagtttgtgcattcatatggattgccacgagagagacctaatgaagcttctctgacctgatagtatgcattctggaaaaacattgggaatggggcttttttaatcattagattgggctttagagtttctttatttcttaggattggaccctagacccgtacaaccagtaccatatcgtcttcttaaaattgttttcttttgctagttttctacctttctaatgtttttgtttcttaattaattgatacagattgttgatatcattgcctcccatccacaac

SEQ ID NO: 64537 - DNA, 535 bp, Cucumis sativus
  Intron number 2 from transcript Cucsa.239700.1 (locus Cucs a.239700) derived from phytozome v7.0 (chr-ID scaffold0204 6; pos 568144 to 568678 reverse strand)
gccaacggcagtactacttgcctcattactcaactgtatttttctctctctctctctgcatctatcacattgtatatgaagagttggactactttgaattagttttcttaagcattcatgtctgtacgtaagattgttaggacttaagtttaatttctagaatcaaattgttgaataaaactaacttctaggtgggggggcattcgttttaatctttttagtgagtcccgatatattcatggactgtttaaaaataggatctgacatgcaggaatttgtgaagtatataaatatgtatcaataattttgcacttgtcagccgatggaaaaaatcagtccttttagaagactaatcccactatattgctttcatgtttagcatccagacaaatcgggttgtcataagaggatataatctacttgaaagaaaagatcagagtagagcatatttgtttctcgtaacagactcatgttctttgttttctctcttgttctttgaaattcatgttatttatatgattttgcaggcacgttt

SEQ ID NO: 64538 - DNA, 365 bp, Cucumis sativus
  Intron number 1 from transcript Cucsa.239700.1 (locus Cucs a.239700) derived from phytozome v7.0 (chr-ID scaffold0204 6; pos 568809 to 569173 reverse strand)
gaattcaccacaacccatcaccgatcctgatcaaggttctttatctctctccttttccatctttagtgtgttctcggatgaaaaagttgtggtgctcacttttcttatacacgaccaaaaacccacttacatcttttgattttttcagtccaaagttaagaaacactatacaattcacctgaatcttttattttgttcatggattgagattatttatttatattcatctttgtgaggatcgccaaggagtggatataaatctgaacgctttactccaacaactatattatatttgattgattatgtcttctgagtgtatgtgtgtgtgtgcgcgcagcaagagctttgaattccgtatttagaca

SEQ ID NO: 64539 - DNA, 545 bp, Cucumis sativus
  Intron number 2 from transcript Cucsa.168040.1 (locus Cucs a.168040) derived from phytozome v7.0 (chr-ID scaffold0115 7; pos 31994 to 32538)
cagatattaaacctatcatcacgtcaacaggtaaactctatcttcaagcaatagatataatcatgatgacagccgtacttgaataaaccatgtctttgacttcgatgggcataaaataactatattttgatactgttaaatgggttttgacttcaaagatcactcctttagaaatcatgacactcggaaactcaactgtgaaaaccaaaagcatcatgctattgttgatcatgcatgatctcattcagttggagttcggtacaaggaatcaccaggtgattaaatagagtatatttgttatcttaggtgtaaagtagcctttttttcagtcaagtacatagttcaaatttcaataatgcttttaaaaacttgagttgcaagtttctgaagttgtactaagatgaaatgatggccaaccatttcctgactctctttatttgttcctccatctcatcaaacatatacaactgcttgatatatttatattttacgaataacctacatcttccaacattaatatgtctggtttctttgtaatacacagt

SEQ ID NO: 64540 - DNA, 647 bp, Cucumis sativus
  Intron number 1 from transcript Cucsa.303630.1 (locus Cucs a.303630) derived from phytozome v7.0 (chr-ID scaffold0295 1; pos 1489969 to 1490615)
aaggcccgtccacaaggttttcggcggaggaaaacgtaagtagttttcattttttttcctttatggttttgtttgtgtactgatcttaggagacgttttgatggtagaaatggtgagggatttttttattattattattgttattcttatttgtttacttctaagtggctggatttgaaaactggatgatttttgttgttttttgtttttatgttgattttcgttgattccgagagtggttatattgcgtctgaagtggatcggtgtcttatggatagtctctcttcatttttctggaacttttagtttgagctttgtagatctggatctatttataagaatctaggttatgattttcagtcaatcctgtttcactctccaattgttggtttacaatcctttaggtctttcgaatttgcaatttcagggtgcgaatgaacaattttttttttttttgcttgattatctaatctagtgtcattgtttcttttcaaattaaactatgaaattcaaaatagtgtaaatggtacattttcatgattcgttatagcttgacattcacgaagaaccaattttcgttgatatataaaatgataattgtttgccttacagccgctgatatttttctgtggagagacaagaagttg

SEQ ID NO: 64541 - DNA, 1022 bp, Cucumis sativus
  Intron number 1 from transcript Cucsa.256460.2 (locus Cucs a.256460) derived from phytozome v7.0 (chr-ID scaffold0222 9; pos 4085302 to 4086323)
gaattttcatctggtgagtacaattttccttctaattttgtatccatgtcttttctttcgtctactctttttgttcttgctactcgattacaagctcattcaattctttgcagatgacgaaacggatattttatttggttctttcactttgctgaaaatagtttaatctgtgaaattttcgacatgggttccgtagtttgttgttgtgcgttttgaaattgaattaatttgcttgtcttttacgtcgattctctgttacacggtgcaagctagggatttgctttaatattcaatagtcattttgaatgattgctttgagtttacgtccgagagtgagaaagatgtcaaaggattgataattagaaatttggaaagatcgtcgtctattgtaggcgacgtgttgtgtctgaggctttgggaatggatggattgtgtaaattgggttttcttgtgaaaatgtatggaggatatagtccaactcaaactttgaagcatatacgaagtaattgttcatgtttcaatacttaagaaatgctttcatttataggatttcttttccattttagcagacgagcaacaacaaacattgcatcttgtattgttcttatttcttgtgatcctcggctccttgtttgttaaatcccaatcaacccaaaaatttaaaaattcgtagaacgtccaacaagtgagaatgagaatcaatatttacaagagagtaaataacattttaagagttcaaacacaaaacttcttgctctgatatcaaattaaatcaccaatactccatccctaaaagcattttttttaatcttctcaagtactattttttttggttatttggctacttcttgagttgctattttactcattggatacactgatatcgttttcatttgacttgtcaggcacacattgattttctctatcttttattataaaggaatatctcattcttgccctcatgtccaaagttggaagcatatttttctgctgcagttcatcaaataaatataacagactgg

SEQ ID NO: 64542 - DNA, 330 bp, Cucumis sativus
  Intron number 4 from transcript Cucsa.256460.2 (locus Cucs a.256460) derived from phytozome v7.0 (chr-ID scaffold0222 9; pos 4086984 to 4087313)
gagatcccctgcacgcattacaaagactagattcagtattgctctcttcattaaggatactccatatttgttttcgtttttgttttatatatcgcttttgaaactccaaactgtctggtcaaacaatatgttgagtacatattcatttgagctgagtagtagattgacacattaaatctccgtctacttaaaccgtcttagctttcaactttggttcaaacttctatgccggaaagatcaaagttgaatatacataaaccaaaattgagagtgtccttaaaccttggttgtttactgatttcccactttttcttgatggatgcagaggaa

SEQ ID NO: 64543 - DNA, 927 bp, Cucumis sativus
  Intron number 1 from transcript Cucsa.180520.1 (locus Cucs a.180520) derived from phytozome v7.0 (chr-ID scaffold0123 6; pos 106579 to 107505)
cctcctgctttttatcataactccaaccatatcaggtaattcatctctttctaattaatgtcgatgtgagttcttgatatcgtttcattttagatatacattattatcgttacctttatttcttattcgtcaaactatttcatacaataattattagacatatagttgttttcctttgtatacaaatccaagatcgttttcttactagactttgattacattatttgtcgaacaaaagggactgtcaaaatcaaaatgctatggttgtttttcaaattttttccactttcattacttcaatagatgaacatttattgtttttaaaagtcttgtttatttaggtttccactaaaatgattttgtttctagccatctacttttaaaatatatgcttgtttttctcaaattttcagtcactgattgaaggatgtatttgaaaacttttgtcaaattcgaaaagcaaacactgcatatatatactttttttagtttttaaaattttgctttggtttttccaaaacattaataaaaaaaaaatgaatagcaattaaaacaaagaaacttatagatagaaaagtgtttataagttaagttcttttattaaaaaattaaatgaagaaactaggaagttggtcccttgatggttacaaaagaacaatgttgggtggatgcttctcactttgagtttccctatcaaacttttcaactttaaaatgaatttttggtagtggctaaaaaacatcagtgggatccacttaaaaatgcaacgaaaatagaaaagtaattagaacaaaaccatattaaacataaaatattcgtacttaaaaccaaattaatcaataaaataagaaacagaaaggttatatatatatatgaatcctttgcagagaagatagtgtattaataaagtttgatttgggacaggtg

SEQ ID NO: 64544 - DNA, 1006 bp, Cucumis sativus
  Intron number 1 from transcript Cucsa.207270.1 (locus Cucs a.207270) derived from phytozome v7.0 (chr-ID scaffold0144 3; pos 45657 to 46662)
ctttctccaaccttcaatctggtatatatcattttttttcttctccaatattttctaatatactttttacctatatatatatatatatatatttgtattttgtatacagtatttaaggagttcttgtgtttatttaaaagtacttttaatacaaaatgatggctaatgaattattttatatagcaatatatttaggtgtttcaggagttgaatctaaaattgaaaaagaaaaaaattgtttatcatatgacaaaagtgtggttgtactattgggtggattaattaagaaggtggtgtagctcatcatgtatttaattaattttcaattttattcctgaaaagtgtttaatttcttttagttgaaaagacactttagcaaaaaaaaaaagtgtttttttccctttctaaaaccctttttataaatagtacttttgaaaaaaaaaatatttctgtaaaagattcaacaaaagtactatgatctccattcactagggtaaacaaataatgaatgtgtaaatctatgtcatttattaaaagagtaagaaaaatcgaccaaaatacccaaagtctcaacaattggataaaattctttggtcttctaaaattttataaacttaatagtttgtggttaaaaacacttttttgaattttcagtttggacgaaagcaataatttaatttttaagtttttgctgatttcatctaaaaatatatagtttttgtattattgaatttataacaatttaatcatttaatcatttaatctccaaattttataatttggaatgattactagttcatgtcataaaaaatttgatcagaattatttaacattagttttgattgcataatcagttgatgtttacaatttatagatattcttaaggatgtagataaatgtacatgtaaaaaaaaaagagtaaatcatactaatatttaaaggataaaaatgggtataaatttgaatgatttccattattacaaaacaggcacactcaattccctca

SEQ ID NO: 64545 - DNA, 725 bp, Cucumis sativus
  Intron number 2 from transcript Cucsa.263920.1 (locus Cucs a.263920) derived from phytozome v7.0 (chr-ID scaffold0233 0; pos 5785 to 6509)
ccttgtgagctacttgaagcttcacggtttatctgtttctttttctttctttttttaaatttttgtgctgattctgaacctatgttccttttttgtgtgtgcgtttggatttgaggagttgggaattattcttgtgaatttcgtttatgttgtgtgggtctcgtaatggaactttctttttgttggaaaatttaaatgctggaaattcagtttcttcaaagatgagaaacacagacagcgggacgaaagagcaatctgtggttacttatctcatggcatctattcaatcttcgcacatgcttaataagggaaataaagaaataattcaaccatttacatgtattcacttgacacgaaaaacttcactcaaatattacagcagggtaaaaccaagaacttggagattagataaaacaaataaatgatcaaacatggtggtggaactacctcagtagtgaaactgcgatgcctaaaaattggagtatatttgatgtgtagaaattactgagtttcttttcaggtgagaaagcaaacgtttggatattattttgtaaatggaaattgaatttcctgcttctctggtctgtgtttgcattttgtcacaaagtcttaggggttcaagtgacaggaataatacatcttttttttgtgtagaaaaattttctattcttaacgtccgtttttaaatctttgattgactaggaggaattgaaggagtgggacca

SEQ ID NO: 64546 - DNA, 807 bp, Cucumis sativus
  Intron number 1 from transcript Cucsa.261760.1 (locus Cucs a.261760) derived from phytozome v7.0 (chr-ID scaffold0226 5; pos 312371 to 313177)
caagctttggtaacactttttttttttaatctatttaatttgttcattttgttgtgtgctcatatgattcagcgttcttcattacttcatatagaattttcgtagtggatttaggttctatattgaacatatattttgatatgttttttttctctttttagtccatgccttaaactatattatgtatattttggtattagaaattttttgttaattaggattgggtgtaaactgaacttttattatagaaaggttcattttagataataaattgcgttttgggtaaattttaggttaaattaaataaagaaattacctttattttttaaaaaaagtaataattaaatactccctttttaatttcaaattttcataaatgtttcaagggtgaaatgagatttgagtagaattcttacaattctctaagaaaatttgaaacttgaaagggatgagataaatggtatagatcaatggtgtagtgatcatcatgtccacctttcgacttccattccaatgtcaccttgatattgttgtaggtcgtcccaattttcgcttaacatttgtaccgaatttcattacaaaaacgtttgaaaggttatatggaaaatattgtagattttgtcatgatgagggaatattggggtggttttttattttttgaatttagcctaaaatttagatataaaatcatgccagctctgtttgattttaaatgggataatttcttcagatttttaaaatcgatgttgttggagcaataataatatatagtacacaaaattttgggcaggcgaattgaaaaagttg

SEQ ID NO: 64547 - DNA, 997 bp, Cucumis sativus
  Intron number 2 from transcript Cucsa.271810.1 (locus Cucs a.271810) derived from phytozome v7.0 (chr-ID scaffold0250 0; pos 607424 to 608420 reverse strand)
gctcctctacgagtctccagcggcgaaaacaggtttgcatttggttttttcttcccttgctatttgctgcgtctatttgcgtcttcttgatttggattgctttccaaattgaggaatctatggtactacaacctgtgcatttctgagaatgaattatatggctcctttgcgtttgttttatggattgtgttatcctttagtattattgagtagattagggaagttgttggttgttcttgttcacttgtttgtcactattgcttcttgtattttatgctccgtttggtaatcatttaagtaatcaagtgataactaattgattttttcgtttttagttttagtttttagctcatagacattttgtccacctctaaatttctatttatataatctaccttctacctatgttttcaaaaaccaactaaaatatagtttttaaaatctgttttttcgaatttagaatttggctcatacaagaggatttaggtgcttaattttttaaaacaaaattgtttagggtttaggtttacgttcatttaacactgttcatacagaccaggcatgtctttttttctttttccttttctttttttaagaagacatgacatgttttgctgtcattgtacatttcgaattacagtccgtgaaagaatttttgttgcatagttgcatgagcatgtttgaattaggttgaatgcattcatacatgtaattgtttggctggaagctaaacttacaattatgcaaatgtactactggatggttggttgaactttcttgtactttaactgggtataatgtttcaaaatttatgtaactttcttgcatcctcctgagtttctagtttgttttatcatacatcttttgagagtaatacttagctattattagttgtatctttcccaaccatccttaaaaaattttacacctattaatccttttagaataaagaaaaaatcttccccttccccctctctttgcagtactccgttagcgg

SEQ ID NO: 64548 - DNA, 380 bp, Cucumis sativus
  Intron number 1 from transcript Cucsa.255960.1 (locus Cucs a.255960) derived from phytozome v7.0 (chr-ID scaffold0222 9; pos 3729259 to 3729638)
cttcctagtcaacttcataaaggatacaccaatttgtggaaaaatggaagaatgaggaatagaaaaagaaaactctcttttgcacccagttagcagtgttactccctgttccaaactatagctgaaataagaaacttatctttcaagggcttttgtgcgtccacatatcattcggacaaccttcagaaatagtaaatgctgaagagtgtattggaaaaacaatactggctttgtgaatgctttatttagaatgcattttgttctggttgtttgtttttcatttaatgttgtgatactccaattttgttttctttctaggctttgtttttgagtatgtattggtctatgcagctttgagcaattctgtattaacctgacca

SEQ ID NO: 64549 - DNA, 953 bp, Cucumis sativus
  Intron number 1 from transcript Cucsa.212270.1 (locus Cucs a.212270) derived from phytozome v7.0 (chr-ID scaffold0154 3; pos 63448 to 64400)
gtcgaacctaaaggaaagattattggtgcgatttcgatcagcaagggagggatcgatatgcggccaattcctgaggatcagataagaaaccacagtagaagagtattggaacctgtttgacaaactaatggcgccattatcaggcctggaagatcaagtggttgaacagaccttcctaaatgggttgttaccatggatcaaggcagaagttgaattcggccggccgattggtttagcctaaatgatgcaattagcgcaactcgtggagaatcgggagatcatttgtaatgtggccaatatcaaaggatacgcaagaggtaattcctactactccaatctttttaaatccaatctggggcgggaatgagtaataatgagaacaaaggtaataacacgtggcctatgagaacaaccacacggagagaagtggggactggagaggtaaaaaaataagggccatcaaagaggttgagtgatgcggagttccaaaccaggaaggagaaagacctatgctgatggaactccaattggtaattaagtaagaaatctcttattaatccgtatctagaaatgaatacaaggattcaaattgataatccctcaattcggaaaactctccctattatgccttcctctctctcaaggaattgcaaggatatctcaaaccactttctaaataactttctctcttcctaacgtttctctacttatacttatagacttacaaaatgacaactcattatttactcatactaacaaacttacaaaacgacagctaatcacttttaatttccgttttcttcactcgtgtgaactgttgtggtcccctcccctttcttctcgttccttctactatacttatgtataattggtggtctatcatatgctttcacggtaatgaaaaattttcccatggccacaagtgtaaggtgagggagcaaagagaactcaga

SEQ ID NO: 64550 - DNA, 606 bp, Cucumis sativus
  Intron number 2 from transcript Cucsa.255040.7 (locus Cucs a.255040) derived from phytozome v7.0 (chr-ID scaffold0222 9; pos 3173512 to 3174117 reverse strand)
ggttgttacttccttcgcgttctgggtttatgtttttttttttctttttttgtctgcggctatcctatttcttgaggttttgattgatgcattttctatccctctcgagggattgtttttcttttgagattcgtgtctcgcttaattcctgattatctttccgaatcttttgacttttacactctaatggtctctcgtttatgtcagataggtttttttttcttttttctttttttttttcttttttttcttttcattttggtctacacagctgttacaagttgggcatgtttggtttcatttgaaattaacaattatgggaaacgattatgattttttggaatttgcattggttgaaggacggaaaaactgatatcagttttatacaatacagtctattccttttcaatttttaatgaatgaccagctatatcaattttacattcattacatctattatgtattggtgtctaattggtttatattgggaaaggtttaactctatatgttaattttccttgcttttttgttgcctggttttgacctttttggtgtgttttgcatcatttagtgagaggagaggagaggagctgattctgaacaaag

SEQ ID NO: 64551 - DNA, 499 bp, Cucumis sativus
  Intron number 2 from transcript Cucsa.291280.1 (locus Cucs a.291280) derived from phytozome v7.0 (chr-ID scaffold0276 4; pos 41505 to 42003)
ttggtgactctttacaggtacaacaataaaacacatacatcacagtttccactaaccattccaaatcttaaaattaaaataaaaattctgtagttttttctttttttttccctctctttctctcttgatttgtcaatctttatactaaatatatatatgtatatatgtatatattctttaatctctatagaccagacatgatcttaataatcataattatgtctggtcagctggctttgtgtttagataaaatctccccaagccattcatgttgtttctttgataactcaaaaagaatcaaaatttgaggtttcttctcttttaagatttttgccatactcttttcaaaagctggttattttccttaaaaaaaaagagattatgttcgaatagcaaaaggtacttgggaatatagcataggtccaatgatatataaatgtgaataaaatggatagttctttaaaaaagaaatttgggtatgatgtttgatatgtaggtg

SEQ ID NO: 64552 - DNA, 944 bp, Cucumis sativus
  Intron number 2 from transcript Cucsa.220320.1 (locus Cucs a.220320) derived from phytozome v7.0 (chr-ID scaffold0165 8; pos 1796293 to 1797236)
gtgatatcgtgtcatcctctgttgactggtaatttagttccctagttgtgatcttcatctgggtataggagtagaatttacaaggtgttgcaaaatgtatgcattataagatttatatcaacatactcagtttgaaatgtcgatgttcttgcacgatagggtgttctatagtaagtacccattttttttgttaaaattattattattattattattattatacttcgaaggggttttaatatgggttctctctcaattagctagttcgcgacatcaccgactattcgtgtaattatgttagaccatgcacaaatttactctcaacattggcaagctgtaggattattaaccttgtttgacaaccctcgtttgggtttcttttacttttcctgcttagtccttcaaatcaagcgtatacgagataagtacgcttgatgaaatcttgagcattagctcaaaataaacaatgttagttgtaaaaaagagaaaaaaagattgcattgcaactttggtttttgttttgcaagctcttgctcaggccatttacgttttacagctgggctgtttctcttgtgttttcattcatacttaatagaagttacttttatttctgtgcaggaccttacagattcttttgtagttatagcagtaccatgctttgtacccttctacccattggaaggcatttttgtatcttacttcatttgggattgatggcactttcatctatcactgaattttttgttttcttttttttcttttaaaaaatatttgtgcatgaagaaggttctaattttaattttgaccaaaactgaagctgatttttcgttagtgcacatctttttggtgaactaggttttctgcttagtgcttctggccttatacttactttatacaagaataaacgtgcgatatttgcttctttactccagtactttaaggcg

SEQ ID NO: 64553 - DNA, 668 bp, Cucumis sativus
  Intron number 1 from transcript Cucsa.139720.1 (locus Cucs a.139720) derived from phytozome v7.0 (chr-ID scaffold0106 6; pos 1005431 to 1006098 reverse strand)
tcaacgattctcgtcttcctcttctcagactgtcggtaagatcatcaacatctcgatttattcatctatctcatttcatttgcgattgaaattgttgaatcgatttcttcctttccttcccccccccccccccactttcttctcaactttccttaatgttttgtatgatcgcttacgatatctataataatcatatttttacgaaccagatctgtttattcctttcgttgatcgtctattttatgaatttaggatcgtttgaattgaagtcgttgaacttgattctcattcgaaatttcttagctaagcagaaaagatttggaatcattgtttttttttacagctattttgctcgcttgatcggcgggttatttagctgtctgtcttatattctgatttgttgcttaaagcatagagctatttaggatgctgtgtatattcaggcatttcactgtgaagcgtatggaatttagttaactcagtcaatttttggtgaatgaagtgcctgaatgggagagagtttgattttcccttttttcccccttctagtggagttggttaccagctatgttaccggtttatttattgaatcagtattttgtctacttatgtaaattgatttgtttgtttgtttcttgttcttagcctggcaacctgagaaagaagag

SEQ ID NO: 64554 - DNA, 687 bp, Cucumis sativus
  Intron number 3 from transcript Cucsa.138790.3 (locus Cucs a.138790) derived from phytozome v7.0 (chr-ID scaffold0106 6; pos 73575 to 74261 reverse strand)
aatttctttccctcgggtactaaaatcagaaagtggtaggctattaatctttttaattgtttgtttgttacttctgatttatggttgtttcaccaccttccctagttaataattttcccgctcatgagtttaatgtaacaaactgtacccaactctaaatactgttattcggaagtagtttatgttagaaacgaagggtaatatgagatgcctttgtcccacattgggtagaatggttgatcaatgtggttcttaagtgacttgacttttccactccgatagctggcttttggggtgtggttatccaaggtgcttaggtaccttgcaatttatttcctaaaaacggaccatacgattgaaactttgatggattatttgtttttggatttctttgttctcctttatgattagtgctggaaattctctctgaacatgatagattgaaatatatatgtttctgatggaagtactttgtcttgcttacagaaactcttgaatcaaaggaaaaccatttttgtttgcctctagtgtgacattttatgacttaaaagtcgaaccaaactctgctttatgttcatgatagtgcctttttgttaacttagctcttctttatcgttgttcaagaaactgatttatcttttttatggtctagtgtggttttagttgaaggagatcctcatccagggg

SEQ ID NO: 64555 - DNA, 878 bp, Cucumis sativus
  Intron number 1 from transcript Cucsa.193360.1 (locus Cucs a.193360) derived from phytozome v7.0 (chr-ID scaffold0133 5; pos 314002 to 314879)
ttcgccgtgcttgtgaacgcgacggtttctttctggtaatcatttctttaaattcgattacatgtgtattttcatttttgtttttgtttttttgtagtcttcagtttatttaaatttctaagtgaagaatattaacacttaactaacaaaatagttacttagaattagatgcatgcatgcatatgattttcaaatgagatgatctttgatttaatttttaagttgttaattgcttaataaagtttaagaggttaattcataaagttgtagtaaatgtgatggaagatattataagttgataaacttacagaagcctaagttaaaactgatataataattttttaagtttaaggtttaaattaatatattttactataaattttgaactccatttcaattatacttattttttatgttccaaaaatacatcttttaatagtagaaattgactgtggagatttgaataacacatgtgcaaatgtcagttgacacttttgtttacaaaaaaaatgtatttattggtaaaagaagtctaaaacatggatgcagataaaaagtcaacagcatagttcacttaaaataaactttatgtgtaaacatttattataagttgaattctttgaaacaaatttcaagattcaaacgttgatcaattttttctttttgaagttcgaactttgaaaagttcgaaagatttggataatttaaactacaaatttcttactcggaaatatatgtgtaggttagttgagattataaatcaaactttacttctaaatttattatatataatttaaccaaataataaacgtgggcacaaaaaagtttgtgtagtattatattaaaggagtggggcttggtgtgacaggtgaaaaacc

SEQ ID NO: 64556 - DNA, 659 bp, Cucumis sativus
  Intron number 1 from transcript Cucsa.273130.2 (locus Cucs a.273130) derived from phytozome v7.0 (chr-ID scaffold0251 1; pos 125676 to 126334 reverse strand)
ggtttccttattcttacgattgtttttgttcataggtttgactctctcccttttcctctttttctcttgttggatggtgagatctagggttaacgtggagggcgacctaaagtttgttgccttttttcgcttttctgtttctgggatttctcaattaattgatcctgatttgcttgtatgtgggtctgttttttattgcacttgttgttttagttttgtttcagctgactagaaagcttgaggcaaaacagaacttggattctctcttttttctttttccttttttttttttgcgtggttttgttcaaattgtatttttgaatcctttgtgatttaatttggaatctttgactgattctgttcccttagatatgattgggtgggtaaatgtttggttttagtgttgtatggaagattgatgaatttaaagtgtacagttatcactcagtttctggtctttttgggcatatttattaatgtttggatcctattgaaatggatatcataagaatttgggtgactgggacttgtaacaagtaaatgggtaaatgaatccaggaattatacaaacttgaattgtagtgtatgcgatctaatttggctccttttttttctctgtgatgtggaaagcagagaattattagtttattacattgaag

SEQ ID NO: 64557 - DNA, 647 bp, Cucumis sativus
  Intron number 1 from transcript Cucsa.176290.2 (locus Cucs a.176290) derived from phytozome v7.0 (chr-ID scaffold0122 5; pos 603786 to 604432)
tcatttcttcttgcttcgcttcatatcagcaggtcgtcggtattggaaattattctttctttgcgattcttcttttgtggtttcatatgtttttttttttcatggagaatcttggattgctgagaattatctcttcgctgtctttaattacttatagattctcaatgtgcgaacgagagataatctgtgatagttttcttgtccttttttttttttgcttatttatggattctagataacgatcgggagtttaatatttgaggaggaggattctaaattgcgatttgctaatatgaaagtcggtgaaagatagtgttctatgccttcgattttgagtttttgaacgaagtcttcttgttttgtaattactcattactttgtatgtctcggacattatgtcagtttttccacagaatgaagaaatcgtttcttaaaggtttaggttagatcgaatcaagattaataaaaacttcggaagtttagaatgggtaataaagtctcggcggatgcctcaataaaaaagagataattattgccagaaaatctaggaagtaatgtgaaaaagattgttgcaaggatgtatatatgctaataaaatcatcctgatattcgtagaacttgttctttgcaggcagatactattcaga

SEQ ID NO: 64558 - DNA, 918 bp, Cucumis sativus
  Intron number 2 from transcript Cucsa.256660.3 (locus Cucs a.256660) derived from phytozome v7.0 (chr-ID scaffold0222 9; pos 4220582 to 4221499 reverse strand)
gttcgacatcgagtggagaccctcatttaaaagaggtcagcagttgattcgattgaacaaacttacacgtgaattttgaagtttcatccactactagaaaacgcaaatgcttctttcggtttcttgttacacatttctcctctcatctgtcgctatttcgccaaacaattgaatcgaatacggttttctttattcaaaagtatgttagttgtgtttctcgtaggaaccaaatctgtagtgtcttcaagaaccagaaatattatttggatttcctcctcaatgtgatgatccttcgttcattgaattttctttttgttaaaagtttcccctcaagaaatttatgcttgacaacagaacaaatgcatgaaaatattcatttcgctatcaattaacttcaatcatgcacaaccttatttgataagattgaaattgttgctggctcttatgatctgccagaagttattcttggagagagctatgaggatagctcaagtggaagaaacatatatatttaaccaaaaagttaaaaggtttgaatctcctagttcccacatgttgctgatctaaaagcaaaagaaaaagagaaagaaagcgatttattgtttctttcttgcggtatttgctgattgtttaatgaaattacggctgagaattagaccttggattctcgattcccccagttctttgtgactatagtttgttgctttatctggtttttgtggttaaactcaaatcttggttggttggtggctggtaactcaacagaacttaagctaattactccttctatcattcttacaacctgtttaattttttgtggcttccgcaaaatctgttgatcaaaactagaatttctacttctttgactcttctgagatgaatttatatgcaggtgttccacccggaaaagcagcagtt

SEQ ID NO: 64559 - DNA, 828 bp, Cucumis sativus
  Intron number 1 from transcript Cucsa.199880.1 (locus Cucs a.199880) derived from phytozome v7.0 (chr-ID scaffold0136 5; pos 232331 to 233158)
ataggtgtgtaatctatttttgaacctttcttttgttatcctatttggttggatcatacaaacataatgcttctgtttagttgggttggttacattgaaaaaatgttttagaagaaaaaacgttttttacttaaatttttactcctattgtgtatttagtacttacttaggcacaaaactaaaacttcccatataaatttgaagtaaagtaaaatacagagattatctattaactatcatccaactttaacaatttttagcagtgaggtttgcatatttattcaaaaatcacattttttccccatattttctaactcgccgcccgaaattactttacacatatttattgatcttatcattctaactttaaatttcataattcaactcatggtttcaaacaagttttcacttgcatcctagtgtacagcagtccgctctacctacgagacaaaactgctttctttaaagaaaaatagaaaaatttgtccagtaatagttgagggttaattacaaaaaagatgagttagccaaatgcatccactacttctctaaattttacctattctgtactttcataacagaaaaagtacttgtttttaaaagcaagactaacgtgcttttaatatggtacaagtggtcaaaaccaccccgcatatgaacaagtttttttttccttcttttgtttttgaatacaacaagtcgcttgtataagtcagtaactctccgttaaaaaaaaaccaataatatttcattttagaacgtttctcattaataaacatttttcctcacacagataccttagagacattgtcgtcagcttcctcctcg

SEQ ID NO: 64560 - DNA, 331 bp, Cucumis sativus
  Intron number 1 from transcript Cucsa.286010.4 (locus Cucs a.286010) derived from phytozome v7.0 (chr-ID scaffold0265 3; pos 2200203 to 2200533 reverse strand)
actggattttgagaaggctgcagttcaagagtaaggtaagactaatttacgtaacagttcaaggaatttggtgctatcatttgaatgttttcatcaggttatctatgcattcagctgctgatagtttcaattcctatcctgccatcgtttatatgctttggattttggtaatggcatttatgaatcctcatcgattattcttctatatattttaaacaccattatggttagatgtgagtagtttgccaacactttctgatgcatatttgcaagatgtgtttctttttttttttgtgcaggagttccacgtttcccttctccatatcctggt

SEQ ID NO: 64561 - DNA, 690 bp, Cucumis sativus
  Intron number 1 from transcript Cucsa.295030.1 (locus Cucs a.295030) derived from phytozome v7.0 (chr-ID scaffold0285 2; pos 14479 to 15168 reverse strand)
cgcgggtctaaagtttaccgtcggagatattttaggtttggttccatatatatatatacactaattctctgctgtttaattctttattttcgttactgaggcgtgctaattcgattgatataatatgtttattattaattacatgaagtttaatatatcattttcatctttactataattttgctttttacctatatatttgcgtggtctctgtcactcacatgtgtacttgaatagcaagaagatacaaaacattagataatattaaactgattagtataatatggacttatttaatactatacaacataatttaatctctcaaattacaaactaaaaagtaaattaattaatagtaatattggcctaaatgattaacttctttaattttcttaaaatttcaaatactgctagaactgaaacaaatatcctcaaagtttttttgtcttatttttttattacaactactctgtataaaaatgtttaggtcaacaattgttaattattcattcttaaaatttggtggttgaattttcaaacttcaacgaggtgaaagtttttttcaaaattacactcaagtaaaaattgtttatagtaattaattttgacaaataataaataaaaaaatagtaattcaagttcaagttttgagtcgttgttgtttctatttcggttgcagtgttcaacttt

SEQ ID NO: 64562 - DNA, 899 bp, Cucumis sativus
  Intron number 1 from transcript Cucsa.158010.1 (locus Cucs a.158010) derived from phytozome v7.0 (chr-ID scaffold0114 2; pos 178770 to 179668)
cttcgctctgttcaagcctctgttgcctctgttgggtatctttcttttatttgttttttttttttttttgagttgtggtctccgatgggttctgtatacttatgacattgcttccatttttaatttgttctatgctgctctcacattgctgttagaaacatttaacatgttctccaagtttcagcttttgagttgggtgatggttttggtgttgtatcgattttgtttgatttggaactgtcggttactccctgattaaaaaatctctttaaaaacttcgtttaattggctttatggatcaaatccatgtttgagtctggattgaaaccagacataattgattttgacaatttcaaaatcgctcacaaacatgtttttaaaaatatttactttttgagtttggtagtagtttatttaggagtagatctgttttcctgtttaggattgtgttattcttttcccaagtgctgttttttatgacaaataaaaatattgttggaataacttgatcaaacactttgaatgactaagcatggggtcttgctgtttgtgaattattttgatatcgttaaaaccaattttaaccctagagttatggagtttgctatataaagtctctaactctattagcacctctagatctgtaatatgatattttctctctatatgcatttgatgtatctaatacaatgttagtgttgatttcactattctttatgttcttggtttatttgcttggtttatttgctcgcctatttcgtatctgatatggtgtttgttgttacaattcaagcatttttctgtctgtgactctgtttctgatggaacaagctataattttaaggatttgtttctgcattgtagaccgtcccctaaagctagggtggatatcagtgaga

SEQ ID NO: 64563 - DNA, 758 bp, Cucumis sativus
  Intron number 2 from transcript Cucsa.204910.5 (locus Cucs a.204910) derived from phytozome v7.0 (chr-ID scaffold0141 6; pos 73726 to 74483 reverse strand)
aaatatcgaaatcgatttggaatttgtcggtctgagtaagtaaaggtttggatttgggtatgtttgtactaaatccttgctattgggtttctgggttattcgatttggctcattttaggttattttccattttatgtttgtgtttaatgggtttctttttaatttctgtttgcttcgatcctttgtttagttttttcattatcatgtctagattgatgagttttgggggattttagtggtggtggtgtttgtgtgttcttgtttttatcatttttttggagtgtttttttaagtttgttttggcattaccaaagttgttgtttggttattggtacctaaatattggtgtcgacccatttcctgtgttgttctttttctttttcaactattgcttttatggttgcttttccttcaccaatgctatgatatgttagttatgttaactttttatatgtttgggaatttgtatttcttcttcttcttcttcttgttttgattcttgttttcttgcttattttgtgttaatttaggtaactcatgggttagattctttggaggtccctttgatgtccttgagattgactttgagtatgttttagttgtttcaagacttttgaaattttgcacttgctatgttggacatttcatcttgttgaagtgctgattgctttactttttcttcttttcataactttatggccattgctatatcacaacgattaggaaatttgcattgggattgaacattcatcttcaat

SEQ ID NO: 64564 - DNA, 612 bp, Cucumis sativus
  Intron number 1 from transcript Cucsa.148570.1 (locus Cucs a.148570) derived from phytozome v7.0 (chr-ID scaffold0110 7; pos 634553 to 635164)
ttcttcacaaacaggttcgtatcactaagaaaaatttgatggggtttcttcaattagctttgatcgatgggttgaaatggtttctcctggattcctacgttttaggttctagtttgggtgttttctttttgggttttgtatttacttggggaaacattgtccatttttcgtttattaaatgcagccgacagtattaatgttcttggttttgtgtattttcgtttgttgattaaagttgtatattctcaaaaattgatcaccagcagttatagcgctattaacacgattttttttttttccttttttccatttcgttccatcatcaagttgttttcgttttccttctccttgtgattgggtgaagaactgtttcttttcagcatttcctccatgaatcaagatttagacaaaaccttaggttgtttgtggatttatggatttgatttcgttgttatcatgagtattcttataacatccaccgtcaattatgggaaaaaggtggtctgtttcgagaagcttaagaaccagctctgtcgggaagattgtttcaatatttttgtttttcctaaaaagaagagataaactgaagatcatattcaaattgcttgcagg

SEQ ID NO: 64565 - DNA, 507 bp, Cucumis sativus
  Intron number 4 from transcript Cucsa.173570.2 (locus Cucs a.173570) derived from phytozome v7.0 (chr-ID scaffold0120 9; pos 282793 to 283299)
ttggagaagagtaagttcctgccctttactaatgttttgctaagctcaaaaccacaatgaaataatgggttcatgtctcaattgttgtctttctactttgtctggtgatgaagatggtagtataaagagaacatctcccaaatctaagttttgattccatcacttaaaacctcaacaaattgacaaggcgtgaatttaagcagatgggtcaacttggtagtgatcaaggattaatgaaaatgtaaaagcctagtagagaattctttcaaacgtattttgttagattagttgaggtgcacgttaattacaggtcgaaagaaaaaggttggattacaaccttttgttgtcttataatgggatttatctattattagttaggtgacaaatgttgtcgtttttgtttttgtttttgttttgttaatcatgaatggaaagatgtaatatgattaaagaaatgtttggtgggtgtgtaaagtgctagaagaggaagaatatatctaccacaag

SEQ ID NO: 64566 - DNA, 760 bp, Cucumis sativus
  Intron number 2 from transcript Cucsa.286100.1 (locus Cucs a.286100) derived from phytozome v7.0 (chr-ID scaffold0265 3; pos 2264241 to 2265000 reverse strand)
tgtagcgtttattaatcgcaagcaacttggtatgagtgatttcctttgtgccatttacacttgcgtctgatttttttttttcatttaaacttgtttaattagtatgactgatctggtcgtataagaaatatgaaatggaaaaagaattcctctgcttagttttctgtatgtagatgccaatctattcgggcttaggaagggaagatgtccttgacatattaaagggttacctttcgcctaagattaatcagtgttttgtataagaacatcgtggctaaatagagttgttcctagaattgcttagatcctgtttggtaatcattttattttttgtttttagttcttagaaatttaatctataaacacttattccacttctaaatttcttgttttgttatttaccttttaccaatattttcaaaacaaaaccaagtattgaaaactgaaaattttagtttttaaaaacttgtaagaaattgagtggtagcttttggtggtggggaggaaacacttcattttcaaaaatcaaatagttaccaaatggggccttaacctttccttcgtttagtagcctaaaattataaaatggggtaacatgcaaagtgagaaatgaactaaatatgccccaaaatagtcattaccttttttctttcggccatcatgttaatgtctttgtgtccctttttgctatatcttcccctgctgctctgctgaaaactgaaaactaatccaggttcccaccaccccaaggatcttgaca

SEQ ID NO: 64567 - DNA, 687 bp, Cucumis sativus
  Intron number 1 from transcript Cucsa.165820.1 (locus Cucs a.165820) derived from phytozome v7.0 (chr-ID scaffold0115 3; pos 1126549 to 1127235)
tttgaatttgaagagaaagaatctggagactaacggtacgttgacgaatttattactcttttgatttctgtaatcagtgtgaaattatttttgtagattttagttgattttcttgttcttttctgaatcgatatcgtctaatgaagttgaggagaattatgttgtcgttgttattgttgttgatgctgtttatcatttcgaagagcgagtgacgtgagaatgtttatatttcggttttctgttttttggagtttctccgttgatgtaagatattgtagccgcgacagaggaaattgactcaaccagagctgaatactttgatgatcgggtttgattttgttatcgttgagttctttttatttctagccttagatgtcgttcctttacttcctctattgtattatcgtaatcaaatagaggattgcggatgaaaatctggattctatgaaatggtccttttgaattgttttctgaaaaattgcgcggtttgcaatcggagacgtaaaactcttttatttggataatttctcagtcaatagtcattttaagaccgacattgaatcagtgtctgtcattcttctacatgtcgaaaatctcttctggtagaatattgtatctctgtcatttttctccgtgtctctcaattaacgaaactctttttttaggtctatagtgattgtattagaa

SEQ ID NO: 64568 - DNA, 442 bp, Cucumis sativus
  Intron number 1 from transcript Cucsa.302710.2 (locus Cucs a.302710) derived from phytozome v7.0 (chr-ID scaffold0295 1; pos 821995 to 822436)
attcttctggtacgcgatttctgttttttgttttttgttttttgggggggttttctggtgcttcagctcttcttttctcatgctcgacttatgatcctgatgggtttttctgtttggtttcttctcttgatcccaatttggatttacttgcatttgggtctgtttcgattttcaacagtagttgaagtgtgtatttgatggtgggtgttttttttttttttgagctttcgaagtttcaattttgttttagtggttgtgattcttgtagtgtttttgtgaaatggattttttgtttaatcaatttattgaattttgatgattgggtgtgtttgaattctgaaaattttggggagattgagaggagggaagtaggttgaattttgattttgctatctgaagtgtaattcttgcaccttacttgctaggtagtacctggaagctg

SEQ ID NO: 64569 - DNA, 554 bp, Cucumis sativus
  Intron number 3 from transcript Cucsa.302710.2 (locus Cucs a.302710) derived from phytozome v7.0 (chr-ID scaffold0295 1; pos 823622 to 824175)
tccttcaaagcggctcactgctaaggaggttctaggtaatcctatgactttttttggccgaatttttatttatctgtttagataatctagtaaacatgtaagaaaaaacaataataaagaacttaaagaaaagggatccgagatttgtttcttggatacctcgagaaccatcttccacattgccaaacattatgtgataggaacgctattaaaggtatagtagtaagtagttggggagtttattatgtgcagggcccgccaataggaacacaaacatcgtagaccatttaatgtcacgcttttagaaaggtttgattacttgggaatttggcatggtgtgacgaacaaacatttatgattttgcataattctcaatttgtcgactatcgactagtacaacccttgagcattcgtgctggaatatgccagcctacgcttggtgttaagctttcaattttggaataagcccatgcatcacatgccaacaaaatgcgcaattctttgtttctccttctctgaaaatcaaccaactttatgtttcttgtaggtcattc

SEQ ID NO: 64570 - DNA, 1055 bp, Cucumis sativus
  Intron number 1 from transcript Cucsa.197280.1 (locus Cucs a.197280) derived from phytozome v7.0 (chr-ID scaffold0135 7; pos 724154 to 725208)
ggagattccaggggattttggggaagcttaaggaggtaccattactattatttgccctaatttggtactttttattcttcacatttgctttcttaagttctttatttactttcttcaataaattttggctaatctaattatatattttaatctcaaattttctatttaataattttccaaagtattcttttatactttttctcatttcagttggagtaatgataagtttcaaatgcaaacttaataaatgctcttaatttgattcacttaggggaaatggagttccatgaaaataattttaagtcccacaaggtttgttatatacttactcgtagaagtttaagatgatgataaatttagatatttcattaaaattaaagttaaagatgactctgcgttcaaaattttaaataatatgatctaaattgaaaaaaaaaatcaagtttagagtgttaacactgttataaatattctattataaattgcaataaaaagcatttttgtatgggtagactaataatcgagtaaggaaacatgacctatacaaatatattttcaaattttaggatgaaaaaagaaaaattattataaataataaaactgaaagtcactcaaaatatattttgatttatatattttgatttatattttgattcaatctaaacagaccctcaatccaaatagccctcgataatcaccaagagggttgctatattttgtatttgaaaatcgtcttgagataacgaatagataacaagtagttttattttaaaaaacaacaataaataggctttcttgaaaaatataggacaaaaattagatatttgaaggtatgaacacaaaaagttgaataaaattttgctttgacatttttgcaatgctatgattacaacaaagatgattaggtatcgtactccatatttagaaattgcattatttccctatgcaatttcaataaatccaggcttccaacaaaaccctatcacttctcttaactattgagggatttcgttttctcaggttctgagagtgaacaagtctgtggtgtttaccgg

SEQ ID NO: 64571 - DNA, 759 bp, Cucumis sativus
  Intron number 2 from transcript Cucsa.158910.1 (locus Cucs a.158910) derived from phytozome v7.0 (chr-ID scaffold0114 2; pos 946082 to 946840)
aggaggatcttcagaaaggtttttactcgcttccattggatatatgtttctgtttcattctttcaatctttttcgctaagaatattgaaaaagaaaaatacatataatacgtacatagtctttgatagttgaggacaattctaaattaatctttaagttttgaggtttttacttctatttaaaatctgtatgtgaggctcttggtcacgacaagaaagatttgggcctattgtgagagtgtcaggccatctctagttatgattttgtaaagagattgagtagaagctcagcacagagtaaataaaatctaaagtacatattgtgaaagataccataaattgcataacaatatgtgcatccagagaatatttcaaaacatttgttggtcacgtgctttctttctttttgtttatcttgtaaagacatctgtggattgcttgttcttgtcctatgtccattttacttgctgaaaatatacattattttgcgaaggaacaaccgaagaagtttgattctagaataaaagtgcatgctactaccagtttgtcaattgactttcacctctcttctcttggattggaccgtgtcattctgatgttagctaattttccattatgggtggggtgcccaatgatccttatttgttgtcttttaaatacacttatctaatatatttccctttgctagaaccttctaattatcgaaggatgcttaattattgcagaggttgaacaacttttggaaccagaagaacgagca

SEQ ID NO: 64572 - DNA, 928 bp, Cucumis sativus
  Intron number 2 from transcript Cucsa.213350.3 (locus Cucs a.213350) derived from phytozome v7.0 (chr-ID scaffold0154 3; pos 1122742 to 1123669)
cgaagagaacgctccgtgagattaagcttctacgccatttggatcatgaaaatgtaagggactttgcccttgtagatttactaaaactgttgtttctgttaaatcattgcgaattttgatttactctgtttgtgtttgtgatttctattttgatgagtaaattggtggctgggggtaatgatgatagacttttatgaaattgacaaataaagatagctagaaaacgtaaatgatcggcacggatttacttagttcactggcatcgttttagctacgtttacaagtagagggaacgataggtttggtttattttttgagagaactattagataatacccattgtaaatgtgccagatttaaagagttcatatatagtgcatccctctagccaaatcgtaaataacataaatctagatacaaattaggtttggtcattttgttagatgattgattcaaggcataccaacatcctagaaggttcattttcattgaattcaattttgatgttggaattccaacaacattactgacgaaccaacccacttattgatgaaccaacccaatatcatatggaatacattacttttggtgtcttggttcatcaataagtgggttggactttgtcagtacttagccgcagcaatggtcgggtgatttggccatatactagttgaataacagctgtagtagcatgtggtcttaattattttgttgctgatggaaagtttatgggattttgactttgttaccttataataattggatgatgaattggaattgctttgtacaatggttatcttgctttctctgtactttctgattgtatatttaaaatattggagaaagattcttaattttgtcctttagggtgagaagaacaatcttatatagattgtgattcattgaatgtaggtaataggcataagag

SEQ ID NO: 64573 - DNA, 348 bp, Cucumis sativus
  Intron number 1 from transcript Cucsa.233820.1 (locus Cucs a.233820) derived from phytozome v7.0 (chr-ID scaffold0199 8; pos 12166 to 12513)
tgggaggttggaaggttctaattcttctatatgtatgatgactcaaattgaaatttaattttttttgtttccaaattttctatcaaacatattttaactttttaggattaaatttattacttagttgctttcctttatcatccccacatcaaaaaaaaataattaaaaatgtttagaaataagaaagaatttgttccgagaaaagccatgaaaaaaagaattattagctatcggtagccagttggttcggtttacaataaagaaaccggcagccaaattggagcattcctgaacgaaacattgagaaaaatagttcgccagttttcccttcccatctcttcttcttcc

SEQ ID NO: 64574 - DNA, 583 bp, Cucumis sativus
  Intron number 3 from transcript Cucsa.252010.1 (locus Cucs a.252010) derived from phytozome v7.0 (chr-ID scaffold0222 9; pos 1030134 to 1030716 reverse strand)
agccagtaagcgtgggtggacttaccttgtttaaagtaaagattcttctttattttttgttttttttttttcttttggtagagtaagactgggggaaggagtttgtgaaaatgactagaaacctgcttaagtactgtctttctgtttatgagaagtattatttgttttgtagctcactttttataacaatgtttaattctaagtcaaattttgaatgcaatgaaagtagtttttaaaatttgtttttgtttttgaaatttggttcagaattcaatagtgacctgaaaaacacactaaagaaattgagagggagcgagtgtagcttttaagaataaaaaatttatatggaatcattatccaatggggcttatgatttgagtttggttctgaaagggagatattacatgtaaaaatctggcctttcacttggaaagaaagttgacagagttgttttctctgattttttagctttgctatctataaatttctgttcaaacttcaaagtatagcaatgttctcagtgctgttaattctttgaacttctgtagggacgggtcagcactcaggaggttttctccctgtc

SEQ ID NO: 64575 - DNA, 854 bp, Cucumis sativus
  Intron number 4 from transcript Cucsa.299430.1 (locus Cucs a.299430) derived from phytozome v7.0 (chr-ID scaffold0292 0; pos 23582 to 24435 reverse strand)
atcagcgctttccgctttgactttgctggaaacgggtaatatcttagaatggagtattgtagttttgcatgtggtcaagatcattgtctattcaccttatgattggaaattggttgttgtggtttaccggtatgattaaaaagaagggtgctaactgcatatgtgaaaagtcgtccaaatttacaattgtgttcatatatatcctactttaacgatggttttctaccgttttgattcttaaggaacgaacatatttgatttcctacaacactaagctcctgaagtttcttgcagaattatattatcatcaaagcttctcagtgtttattcatcaatacttctgtgaaagctctgctctataggccttctgttgatctttattcccatgtttccttcataatctccgttgatcgagaacgagaaccatatactataatgcctaatgactacgtgtagtcagtctttattattgagtggcaacaataatctttaaaaaatggtttttgttattgttctagtttctttggtgtttctggtttattgtttcaaattcaggttggggtctgcttctctgggcattaggacttacataatttgattccttatatcatattaagtgtcttgatttgaagaactaagtttgttaggaaaaaaaagttgcctgttagatacaaacatttatcctcccaaatttctttcttggagacgctctagtttctaattactagggaaaccataatttgccacagatgttcccagttgtgtacaatttgcaaatgattgttccaaatttgagcaccaaaacatttctttttgttctatatttggcagagagagtgaaggttcatttcagt

SEQ ID NO: 64576 - DNA, 787 bp, Cucumis sativus
  Intron number 2 from transcript Cucsa.235830.1 (locus Cucs a.235830) derived from phytozome v7.0 (chr-ID scaffold0201 2; pos 584205 to 584991 reverse strand)
ctgatttcaaggaaggtggtcaaaggaattggtaactttacttccttatactttaggatattcacttcttaacttttaatttattgttcacgaggaaaattctgaaatttctactttattttagtctgtgctttgattctattcctttaatgctagagcttaaagttttaaaacagctcgtcaaaggaagataattgatctgttttgcatataagttttatacttgggggtcctgttatagagctgctgatctgatttcaacatgttcgggtcatttgaacttcccactgatctgattcaatttaatgctgaacatagtctatggtatcttcagaagctcaactcttgatggataaataggaacttctgtttctccctgtttggtaataaactattagttcaaaatggtctccacatgtggcatggctaaattaacttgagatgcaagctgcattgaacgacacttcaagaagagtttttttttataatttttttttaaactgtgatcaagtcaaagattcgatagaaaagtatgtcactcttatcacgcatgttgaaaatcccactgtcgacaaatgaagaccttgtaatgtttacaaggtacatttgctattttgagatagaagttcatgtttatccaataattcatacaagtgacatggcactgtgattgtgtgtgattagatatgtcagaaactatcctaccaaagttcttgcaataccattgacgctctgttattactccttttcaggattcaagttgtttttaatagtggtattgctacgg

SEQ ID NO: 64577 - DNA, 956 bp, Cucumis sativus
  Intron number 1 from transcript Cucsa.143410.1 (locus Cucs a.143410) derived from phytozome v7.0 (chr-ID scaffold0107 9; pos 1755637 to 1756592)
ttattcaggtatttggagatttcccttttgttttattttcctatatttatcgtgagtggaaggaattgcctttttatagttctggttgagttgggttttcattgtcgcaattaaaagggttgaattatttttggaatgggttgcatgagatgtattttatgatgtggagttgatctttccacaatcctgatatattggactttaattcttttttatttctgatttgcaaattagttttaaatctagattgttttctttgattctatagctgcttttcgcacctactgtaattgaaaatggagatgattgaaaacaagaaaaatttaaccgaaatcattatcaaactatgtttcaagatgtttgtagtttgttgatcttgtaatccagagtgtgttttactactaaaaagcaaagatatacatgccactgggattatatgaataagatggacttaaatattttccctcctgtaagctgtagctttttatttttatttttatttttatttgtcattgatattcttattcttcttattattgtttcgagtataatacttattgggatggagattgaacctttcacctctaggaatgacaggtaatgtcaatttggtgaagctgcagtgtttagttatttgttgtgaatttaatattttagatatttgtatttgttcgcaactcagtcttgtacttctcttttactcctttaggaactgtagcttgggtttattaagtcctgggttttaagcgggtgcttagattgtggaaaaaatatttgttaagcctttgtttggattgcatggggagaatatgcttgttaagcctgtatttggtttctatattttcgaacccttaacttaactggatgtatatgtgtgtatatgtataattgtctcatgtaattcatgaattgaactttcaggcgtttatctttgttcttgttcgacccatttcaaa

SEQ ID NO: 64578 - DNA, 650 bp, Cucumis sativus
  Intron number 3 from transcript Cucsa.241040.3 (locus Cucs a.241040) derived from phytozome v7.0 (chr-ID scaffold0204 7; pos 1217691 to 1218340 reverse strand)
ttgtggtgagtaacttcaagcttttccgctccatttttgggtccatgctttgtgtcaaagcaaataaatcacttataaccgcatgctagacacttgtatattttcttgaaatatttttgcagctgctttccttttatatcctgggcaactcttcatcttgcaccatcggttttttgtcctgttggcattacttgtttgatgattctttatgagtaagctccatgagttgggtgggcggaaaaagttgtggcttggttttgctctacatctcccttgcatacttattatattcaaaattcaagctagataagtaatgacagtaacttgattgatttggttacctggaccattgtatttaaccactgaagacaggttcacagtttggttggaaatgcttcgtctaacgtccaatgttctggttgccactcgtgagtaaaaagatgctgttattttgagtttgtgagctgacttttctgtaaaagtaaaatagatgtcttgttttccttaacgctaaccagtattggttattgataataaataattctttaagctgtggcaaatgaaccttttttcacttcgatttcttggttgacatttgcatcatacatccttggacaggctccactaactgaggagttggtgtttagagc

SEQ ID NO: 64579 - DNA, 531 bp, Cucumis sativus
  Intron number 1 from transcript Cucsa.137530.2 (locus Cucs a.137530) derived from phytozome v7.0 (chr-ID scaffold0105 3; pos 300100 to 300630)
cacagatctacagattttgcaattctctctcaaggtcagtgtttccccccctcattttcttgttttcagaatgagatttgattttctttatggattgcgaatttgtgaatgaatttttcatgatagtttttctagttacgtgaacttcggattcacgttcttagtttcttcaacccgtttttctcaatttttctcgctacccaaacaaacagagagtcaagtcctccctccgtctttgaaatttgaagccatgtcattacactaatttttaggcgatcttcatggcgtatacttgtgaaaattaatttaaaatatggtgattttttcatttcatgaacgcatttggcgccttaatttaggtgttttcatttgattttaatattaatatatatatatatatttttgtgttttcattatcggtagaggaaaaggattgacgttgtatatgtttctctctctgatttgaatctggtgtttgtggtgaacttgatttattaaagggaggaggaattgggaatttgaattgagaaa

SEQ ID NO: 64580 - DNA, 675 bp, Cucumis sativus
  Intron number 2 from transcript Cucsa.204910.4 (locus Cucs a.204910) derived from phytozome v7.0 (chr-ID scaffold0141 6; pos 73726 to 74400 reverse strand)
tgggtttctgggttattcgatttggctcattttaggttattttccattttatgtttgtgtttaatgggtttctttttaatttctgtttgcttcgatcctttgtttagttttttcattatcatgtctagattgatgagttttgggggattttagtggtggtggtgtttgtgtgttcttgtttttatcatttttttggagtgtttttttaagtttgttttggcattaccaaagttgttgtttggttattggtacctaaatattggtgtcgacccatttcctgtgttgttctttttctttttcaactattgcttttatggttgcttttccttcaccaatgctatgatatgttagttatgttaactttttatatgtttgggaatttgtatttcttcttcttcttcttcttgttttgattcttgttttcttgcttattttgtgttaatttaggtaactcatgggttagattctttggaggtccctttgatgtccttgagattgactttgagtatgttttagttgtttcaagacttttgaaattttgcacttgctatgttggacatttcatcttgttgaagtgctgattgctttactttttcttcttttcataactttatggccattgctatatcacaacgattaggaaatttgcattgggattgaacattcatcttcaat

SEQ ID NO: 64581 - DNA, 778 bp, Cucumis sativus
  Intron number 1 from transcript Cucsa.267160.2 (locus Cucs a.267160) derived from phytozome v7.0 (chr-ID scaffold0236 4; pos 259862 to 260639)
catcccaggtatgtgcccaactttaatgaaacttctatctaatacttggaattgtgacgagttcttgtgttttatttatctagtttgttggaaaattttgatttttgtggtttattttgtttctctggttgagagaacgttatttggtacaagtttataataggctgacgcttgtatagaggggcacaaggttttgattgctttttatttgatcgaaaattgtttatcttaatacggcatttgaaattgaaacgtgcacgatcatcacacatgggttgctggaactttttcttcgtttgcagctcccatctacaatgactttgtcttttggaatttatattgttactttattgtcaacgttgtagctcatccatgtattgaccttgattttcacaatctatcgcaatactactccatgttcttgatagctcgaaattgggaattcctgccatttttctagtatatgatagttgaacaaaaaagaagctgttagtttaaaagctttattgattaagcaatggaagctttgtgaaattttctgggaattagaaataagttgtgcttcagtgttccaattgtattttcatccttgtatgataaatgatcattggtcttttgtgtctgtatcagtctaaaatggaactgtaaatttgtgactctttagttttagttttagtttctagtgtttgaatcttaataaatgggtgattattgattcctaactccattgctaaatgataaaggtgaattgggctggctttgacaagttagagtggga

SEQ ID NO: 64582 - DNA, 781 bp, Cucumis sativus
  Intron number 2 from transcript Cucsa.165300.3 (locus Cucs a.165300) derived from phytozome v7.0 (chr-ID scaffold0115 3; pos 637107 to 637887 reverse strand)
ttacctcattaagcttttgcttattggcgatagcggtattttctcaattcttcttcttcttcttcttcttcttcttctttttttggttgttgtttgagttttgaatttttgtgtttgatttgcttgttggaaatgggaatggaaatgggaggtgatgtgaaagatctgattagtgggttgtatgcagtgtgctatgggatttgagatttgttttcatcaatgtgattttgagattccttgttttggtgggggtaaatttgttgcatgttctccggttgtgtttggattggtccttttgatttgaaaatggtcgattcgtgttgatctttccatttatttgggactatattttgtgcttaagtttggcattctcggcatgttatgttttacatttaatcttctggtggaatgcgccttggttttttgtgtaacaacgttgtatgcctggttaaaagggctgtgatctttagacgccaacaagggaaaaaaacaacattttttttctgatcgctaatgttgagttttatgcttaattgactggtgttgtggctcccaaaatgcttggtatgataaagttgtaggtgtaacgtttgatctttctgcttctggcattaagttccttcatgaaagaatagtaagtttaattatggaaatttcatgcaaattttgtgatagatttgtgtgcctatccttgttgcatagtaataattttcacctaagctttttccgttttgtttgttttgcaggtgtgggaaagagttgtctgcttctacgtttttct

SEQ ID NO: 64583 - DNA, 511 bp, Cucumis sativus
  Intron number 1 from transcript Cucsa.258620.2 (locus Cucs a.258620) derived from phytozome v7.0 (chr-ID scaffold0222 9; pos 5472297 to 5472807 reverse strand)
accagaattgctatcaagaatctcttgaataacaggtgatcatgtcgactaattctctaatgttattatcgtcgatgttgtaaatttacttactttgcttctgtaactcgagtgtcctgtttggtttcacgaaaacgaattaattttgtgctgtgtttagaatgtgctgtagagaatctgatgctgttgtttcttttctattgtggggaaggaatgtttcaaactgctacagttttaggcgtttctgatttgggatgctcttggtttgaagattatatagatgctgaagttttagtctatttttgtactaggggtcaagctgaaagggaattcaaagtggaagtggaagcaattgggcgggtaagacacaagaatcttgtcaggttactgggatattgcgttgagggtgcatataggtactgacgtactgttgattttctttaaatttgaggtactttttggttccatagatgtttattatgaacttttgctttctttttcatttttcaga

SEQ ID NO: 64584 - DNA, 759 bp, Cucumis sativus
  Intron number 3 from transcript Cucsa.283340.2 (locus Cucs a.283340) derived from phytozome v7.0 (chr-ID scaffold0265 3; pos 505191 to 505949 reverse strand)
gaatcgtctacaaagacaaggtatttgatatcaatatgctggaattgatattgtcttctacctcttttaatatatttatatttatataagcatgatatgccattctgtttcgcccattcactggtgcatctttggcacggagctttatagcttcagtttgttttcgttttttttttttattttgattctgttttttcataactttatgaagggcatttttattttcagctcaagtgatttgatgttttacttcttttttgtccctatatttcgttcctttatcttatggaccattatgcttatggttctcacagaatgtttttcttctaccgaggagttattttagctttacccagatggtcctcgtatctagacaaatgttccttccttctccttttcacaacttttttaagttctaaacaaattttgattacgtagttaatatgtcctcttgattaatggtaggatcgagagcgttttagagactgaaattttgaacgttatcttgtgtttactaatatggtgtgagaggaaaatagaggtcaaggaaaacacactcgtttcaatatctttttgctggggtcatttcacctttttggttcattatgttttgattgttgctcaacatcattaagagaatttatgtgcttttttggggaattatattgttccattcttttatgaatttgattgttgttttgttttcatacatcctctttttgtgttattgatgtatatactttggttgtttgaaaggcg

SEQ ID NO: 64585 - DNA, 567 bp, Cucumis sativus
  Intron number 1 from transcript Cucsa.281820.7 (locus Cucs a.281820) derived from phytozome v7.0 (chr-ID scaffold0264 1; pos 3015 to 3581)
ataggctttcttatatcaccttttcttcttcccaggttttgttgttgtttttcttctttttcagtgtttaaattttgatagatcccctatggtttcgatcaatttttgttttacatttatgtgtctgatttgttcgaatttggattttggttaatcttgaaattctgggggttttacttcacgatttctttttgtttttatttctgccagtaatttctttcatttctgagcttacttggctgacattttgatgaatctgcatcgtcatgtcatcagaatgttgagttttatttccatattccctttgttttggctggcatcgaatttcattcgtattcttcttaattgctctatttggattgatgtttactcaccggaagatatgtaagtttacgtgtgtggttactaatttgattttccttttgggttttgttgattgctatgttaatttggttttgctgaaaaggaaatttatatgcagtatctcccttgttaggattagttgttgatgaagttgttttgttgttgacaggttgcagtttttgtgtctcctccttggaaaaagaa

SEQ ID NO: 64586 - DNA, 593 bp, Cucumis sativus
  Intron number 1 from transcript Cucsa.241470.1 (locus Cucs a.241470) derived from phytozome v7.0 (chr-ID scaffold0204 7; pos 1475831 to 1476423)
ctcttcctattcaggtttctttccctttaacattgattttttttctctcattcctttcactgatgccattagtaatgatccgcctgacaaatgtatgaaacccaacatttggcctacgtccaagctctaagtttgcgttgaccatgtctatcacagacttaatgtcaccgtcgcttttgttattttcgtttttatcaccaatattcgcagaaaacaccataaaagattatgatggctgaattcttacagaaaattttaaagaacaaaagaattttaaaactattttttagtttttcagaacatctaaaaacttagctaagtattagacagtatataaccaagcaagaaatttagctatgaaaaaagtgtttgtcggtttaattacgttctaaaaaccaaatggatgctaaatagagctagaagacatcaggtggagaatcacatattgagaagacattacaatttttatacaatatacatgaattacttttctcaacggcaaatttgaagtttgaatagaatgatcatgttctctataactatatatatgtagtgatttgagtgatgatttaaaattcggacattaaaaggaa

SEQ ID NO: 64587 - DNA, 424 bp, Cucumis sativus
  Intron number 3 from transcript Cucsa.308090.2 (locus Cucs a.308090) derived from phytozome v7.0 (chr-ID scaffold0297 8; pos 323085 to 323508)
ttgcagccagcaccaacgacgatttacgcacggtccgtaacttaagcttaacccacacagtccccaccccttttgttcatctcttaattcaaaaattatttaacttcatatacatattttattttaatagtatggggtattttaaaaattaacaataaacaataaatagtgtatatatagacactgtatcaatgaatttctcttcgaactcaaaaaaagaaaaacttttattttcgaatagaacaataaataaatgttcaaatagaaaaatgaaaaatttggacaatttcaagtagaatatgttttgaacatgtgaggtagacacggtttggcattaggttggataattaagaagttacaaaaatagtgatgaaaccaaatggttgcagctgttggttggattagtgagtgcataccgttacaa

SEQ ID NO: 64588 - DNA, 442 bp, Cucumis sativus
  Intron number 3 from transcript Cucsa.271240.1 (locus Cucs a.271240) derived from phytozome v7.0 (chr-ID scaffold0250 0; pos 143213 to 143654 reverse strand)
cggtaatgtttgtttcctatttctgaaagtacttccttcgtatgcttatttgagaattacttgtttagaatatatataatgtatgtatggtaggaataatttcggtgttgggtttcatatctacttaaacgtttggattgaacggtgatttgactctaccttcttcatagtatacttggagcaaatttgttgtctctgtaatggagagaaaatgaaggaatatgcattggatcagtctcatggttcaaatttgtatgagttgattgttaccatttctataagatgtacactttgtgcatatccatatagatttgagtatggtggttaaagtcttggacccttggctgttggactcttaaattgtttgtagtgctgttgtttgtttcaaatgcttaaaccatttgagtagctgctttttttttctttctgtctatttagttaa

SEQ ID NO: 64589 - DNA, 372 bp, Cucumis sativus
  Intron number 2 from transcript Cucsa.162420.3 (locus Cucs a.162420) derived from phytozome v7.0 (chr-ID scaffold0114 4; pos 2063495 to 2063866 reverse strand)
gttggagctaaagtcaacggtgaagctggaaagaagtaagtggtcttcttatgcaccatctttagcttttttcttttcagatttgcttatggataaattatcgcaccatggtttcttgaactcgtattgtgagagaatttgagatttggtagtaatcgtatccatctggtttagtttggatctaaggcagttggattaagtagttgtttgagcttggggtgaacttaaattcgattttttattctccacaatgcacatctcttacaaaatatgaaatttctcttcattttcttttttgcattttttcttggaatgtcgcatttcttgtttctgagattcttatcttctttcaccgtctctctttcaggggtt

SEQ ID NO: 64590 - DNA, 611 bp, Cucumis sativus
  Intron number 1 from transcript Cucsa.254960.1 (locus Cucs a.254960) derived from phytozome v7.0 (chr-ID scaffold0222 9; pos 3135390 to 3136000 reverse strand)
taattgcgtgagtatgaatttacttggttgcgtataatgtatatatatttgtgggtagttaacttaggtggcaggctttgaattctatgtgtaactgatagtatttcagcatgttgaatttggaaattttgacattcgtcctgactccgttattgatattaatggtgtgctcgttgttttttctggagaactccttttcttgttgactgatgaaggcttgtcatgaatcttcattaatagaaacaaaattttacattataacttattgtgtggaaacatttcaattcgattttaaaaaaaaaaaatttaagggagcaaatttgagtagagtactttagtattagaacttttgcaattactttttaatcttagacgagaaacaagaatggggcatttgctctcttcccttctatttgctccaccttggttaagtggtttaatatgaatgctttggatttcgttggacaatgtttaattaatctcttagctaaaagaaaaatataagttgtaatcatgtcatagatgccattggataaaaccgtctctcatgataaattatttttttcattgctccagcaataaagaggagggaaaagagcaggatattatta

SEQ ID NO: 64591 - DNA, 934 bp, Cucumis sativus
  Intron number 1 from transcript Cucsa.240720.1 (locus Cucs a.240720) derived from phytozome v7.0 (chr-ID scaffold0204 7; pos 853199 to 854132)
ccgtgtcaaactcgatcttttcgccgagccctctggtattttttctgggtctccccccttttgatttatagatgtaatttttaacggttctgtataattgcgactgccgatatgtgttgtttgtttgttgcatgatttggttgtgttttggggattgtttctttctgtatgtgggtttgtgttggtttctatttgcgcttttccatctgtttattttctaatggaagcggagagttttgagctcctggtggcttcttttcctatctcatcgagtttgtttttttttttttttttactgtttggaattaatgcttcttcggttgcttaggaggggggactagtttgaatgttatgtgaaaacaaccgggatgggggattgaaactcctatccggaagggaagagagggagagatgcgctgtgctaacctcaatttggtggtctttttgtgtgtttcatagtatggggcttcattgactttgtgttgtgattaatgcaatgttggtctagtctatgatatctaacttggttaacttgatgttataatgaatgcattacatttctattgttgatcccggttgcttctttaaatttttttacttttgggtatatctagtcttcttcaacgaaaaatgttttgcatctagatatcagtgtggtgtggtcagcatttgagatataaagtagtctggatgattgctaaaatggaaaaaatatatatattaaaatcaaagacatttaatttagtttctattggaattttatacacattctttctagaatcagggataattctctttatattagttgttctgtaatacatgatattgtcgcaagctcatgcaattttagagttatcattctgagattattaatatagaaatagatggccttattttaatggtggatgtgttattcattttctaggagatttag

SEQ ID NO: 64592 - DNA, 817 bp, Cucumis sativus
  Intron number 1 from transcript Cucsa.205010.1 (locus Cucs a.205010) derived from phytozome v7.0 (chr-ID scaffold0141 6; pos 162538 to 163354)
atcggtttcgttaggattttgagaagctttgtttggtttttgaagtttttgcttcgtgaaaggaaggaggaaaattcttcccaattctcccaattcaaagtgatcgaagtcgtctgagattcaaagcctttctgtaattattttctgagtaaatttctctccatttcaatcaaagaaagattaattttaacgaaattttcgaatattccatccatcattgttctgattatatattatttagagtcaactgaattccaaattttgctttcgtatgaaatttcttaacaactatcgaaaattgtgatcgtggattccaatacagagggattggagtattattatatttccattatttgtaatcatcctgaaaaaggaaagagacaacaaaaattacctctgttatttgtttgttttgatggcttaaatttcaacattttttaatttgtctgattagaaaatgacaagaagaaacgttgtagagtttgatatcattttgttgtgtccaattcaaacttgccagcttgtttagtagtttataaactttgattcttgatcttttctttaacatttgtttgggaatatcgaataaaatcagatttaaagaagatttttggctgctttgttttgagaaatctctgcagtgacattgtgcttaggtttattcatcagctcgatttaaagtagaattaatctctggagttatactgttaattgattttgttcatcaacttccttctgctctttaatggctgatggtttttttccttcacaccatttgatttcagtggctcacaaccaggtactttcttcccctcta

SEQ ID NO: 64593 - DNA, 417 bp, Cucumis sativus
  Intron number 3 from transcript Cucsa.150080.1 (locus Cucs a.150080) derived from phytozome v7.0 (chr-ID scaffold0111 0; pos 1047846 to 1048262 reverse strand)
tcagttggctttgttcactatctgaatcagaacttgtaagttcatttgaaaacggagtttctttgtcgttattccgataatgtttgcattcgttgttgatttgttgaatccctttgtctatgtgttaacttgctcatgaaaatccgagcattcttcttgtggaggttgtatacctacaatgtttcttgttctttttaaactttttttttctttgaaaggattaatatcttctacttgacctcgattgataacaatggacgatcatattgtttagtatcctcatgttttgctgaaagtacagacattatgagctgtgtgggtttttcttcttattttgatgtatgagaaatttttactatcatttttattgacacagtattatgatgtatttggcaggacctgctgattagcattaaa

SEQ ID NO: 64594 - DNA, 860 bp, Cucumis sativus
  Intron number 2 from transcript Cucsa.150080.1 (locus Cucs a.150080) derived from phytozome v7.0 (chr-ID scaffold0111 0; pos 1048309 to 1049168 reverse strand)
aaagtgtataatcccgggggattgagtcattgaaagtgagtgatttattttcaagtattttcgttataaatctatatatgttattatagtacgttgtgattgtgacaattacccatacaattgttttatgatctatgtgttagaaacgttttcaaatgtgatttttggttttccatgaattattatatttcagaaatgtggttgaaccaaacttattagtcatgatttatgacaactggtttgaaaaatactccttgatctgttataaacttggatggttagactctcattcttttaggatgtatatattaagttttatattccttcatgggatggttagaagtagcgagagtcaagctgttatatgtgttttgagagattcttattggactgtaatcattttgtaagtaatatctagtttggatatgaactctgcttgaaactctggaatagtttggataagtttgtggtgagacacacttgatatgatttttgagtttgaagattttatatatatatagaagtgaaaattcctccattttcaggtttggctaacccaaattttaagggagatgtcagaatttctgcagaattttataatgcttttttctatagaagtttaagttgaaaaagtttattttcgaaaatcattttcatgccacgatctaggttaggagggaaaacctagaacggggtgtgacaggtttagtcaaactattttagctttgtttgtgtaccaacatttatttatttttcttttttgggaagataagtgaaagtagatgaaattgcttcttgttgtgacggtttaatcatttgactttgaagtttcttctggagtaatattgcggaagatttct

SEQ ID NO: 64595 - DNA, 1007 bp, Cucumis sativus
  Intron number 1 from transcript Cucsa.150080.1 (locus Cucs a.150080) derived from phytozome v7.0 (chr-ID scaffold0111 0; pos 1049151 to 1050157 reverse strand)
gttagagaggattgttcatctttgctaagtgcttggtaagtattggagtaatttaagtgagttttcttcgagttcttgaatgtccattaagtttaagccttgaaattgaattaccatccttgagttgaatgttaagggttgaaaatggatttgaccttaatgttggagttcgcttgggtgttatttgaaacattaaatggttttaggtattagattcgaatttagaaagacattaatgtattgtcaaggcgatttcgacaaggtatcggtaaggttttagataaatttagtgagttctctcatagttcttaaaaaacctatttagttttaacataaacttgatattacctacattgttttgtatggaagattgaagatttggagaacttggaagcattgattaacatgtttaaggtcgttttagacaagtttgggaagttcctaagtatttgacttgttatattggtattgagattgttaatggatctaaacctctaaggtatggatattaggatataagagcttatggatatgaaatacgacttaagttcgggtgcttatggcattaagagttgaagttgaagttaaagtttaagggaccaaaagtgaaattttaacataaatgaaagcatttgggggaataattcaatctaaatcttaggaaatgtttaatgttgttggtctcttgttgatacaatggatataaataaaaaaaaaagataatggagataaaagtgtctccatgtgaaagacccattgtgcttgaactaagttggatgctcattggtttaagtatctagatttcaaatctaagggtttgtaggtgaaaagtctattctaatctaaggcgaattgagaattcaagactttagaaacataaaatagtttgagttggccttatgaagtgatttggagattgttgtgtcatcttgctttgtgaagataaatgatggatcttaatctttgcttcaggccaaattgaagtggggaaagtgtataatcccggg

SEQ ID NO: 64596 - DNA, 569 bp, Cucumis sativus
  Intron number 2 from transcript Cucsa.149780.1 (locus Cucs a.149780) derived from phytozome v7.0 (chr-ID scaffold0111 0; pos 675192 to 675760 reverse strand)
tgcggcttctgggatcaaaatttgcttcattataggtacataattttgtcatgatatattgcatctttattaagtgtgaatcagattttgattaagcaaatctaaaacatgccttacatatcctttgctggcggtttaattttgttggttctatttacttggcctaggttcgattgataatcattgagtttttgtcaacggtttttgaaatttctttactatagatttaatctttagcaagggaatcgcttgaatttttagccaaattctaaaagcaattactacttttctctagttctcaaaacttggcatgggttttgaaaaccttgttagatgatagactaaagaaactcatagataacaaaacagtgaaactctctagtttttataagcttaattttctaaaactgaaaaccaaaaagctgttcactcctaagtcctaatatgcatagcgacttttgccctcccttactatatggatttttgagtttcagtagaatggcttaacctcttctattccttggtcctttgcagttgtaggttggctagctactctgtgtgttgcagga

SEQ ID NO: 64597 - DNA, 610 bp, Cucumis sativus
  Intron number 1 from transcript Cucsa.228750.2 (locus Cucs a.228750) derived from phytozome v7.0 (chr-ID scaffold0193 6; pos 36054 to 36663)
acaggcagtccactccgccttctcagtcccaaggggttggcatttttattcaaccctttgtgcattttaaacgttcaattcaacagtcaatgtgacgctaatcttttcgtactttggtagctttatggattttttcaaaatgacgattgattgatttctgatgcctctaaaagaatcgaaaatcaacgaatgatggaacacgaaaagatcgttactctgtaatgactaatagtgaatgctgcaaaaggaaatagggaagataaatgtgtagttcaagacttatggtgtattttagttctggatatctggcaatgtttcacagctttccactgtccttgaaaaaccttcgtgtacggacgtgtagatgatgctagagtcttaacttggggaggatgctataggcagaacatttagccctctatttctcttgcaatgaggattgtagagtataaaatatgtcatcatttgataaatatgattaaatttggtcgggccagtttctttgatacttatatcctttgtactatccattctttctaatgccttggtcactgttggttgaaaatacttcacaggcagcatttcctgtaaggtcaggtgaaagccctat

SEQ ID NO: 64598 - DNA, 507 bp, Cucumis sativus
  Intron number 1 from transcript Cucsa.201730.1 (locus Cucs a.201730) derived from phytozome v7.0 (chr-ID scaffold0137 6; pos 9030 to 9536)
tcgctttctttactttgtagtctctgctctctgaggtatctttctagtctccattgtttgattttgatgcttcttcttgaatctgtcaccgtccagctcattgctggttatctctccatttccccctgctcacagtctcttatacgatccataagtaaaatccattttccttgggattatgtatgaataggactcccaattttacactagatttgtttctaactatattgagtggttctgtagagagcccaaagggaaatgcatctgggtacagcttcttgctttagtgaatcctgatttgggtcgggttagattttacctgttgacaattcgctattttatttttaacctcaatgaattattaggaatgattgaattattagttgctttgctaggcaattgattgtagagttgagtggaaatgttggggttttgttagaatcttagatttcttagatcatttcatatgacagttgatttgattcagtttggtttattccagaaatc

SEQ ID NO: 64599 - DNA, 326 bp, Cucumis sativus
  Intron number 2 from transcript Cucsa.201730.1 (locus Cucs a.201730) derived from phytozome v7.0 (chr-ID scaffold0137 6; pos 9750 to 10075)
gacccaaccaggtttatgtttcttccttctttgggaaactactttagtttatggtgtggctagtatatgtagtgatccaaccagataggagattaatgcaaaccataatcttaataacgtgacaaatgcattgcccttttatggttggtggcaataactagtaagatgtctaatttgattgtagattttgattttgatctttcaaagtattaacaacttactggaaaatgatgagctgcttttgggagttaggttttgaagcgataactttttttactttctttgatacagtgctgacaaaggaaatcttggcgtgcctcagttac

SEQ ID NO: 64600 - DNA, 297 bp, Cucumis sativus
  Intron number 3 from transcript Cucsa.241080.2 (locus Cucs a.241080) derived from phytozome v7.0 (chr-ID scaffold0204 7; pos 1242175 to 1242471)
gcagtttggagctgtctaaattatattcctaacaggtatgaacccacacctgaaaatgaatgttaagaatcatttgctacatcaaaatgaaaaagagtttcagaaagaataaatgaatattccattgcgttgtttttatgtgaaaggatatgaaggacacggaaagcaatttatctatttgtgtttcttcttgtatggcaaggatttttatttttaattttatttttattaattttgttacaaaaaaaaaaactaccaacaggctagcaggagcagcactattggcgccagttgtta

SEQ ID NO: 64601 - DNA, 787 bp, Cucumis sativus
  Intron number 1 from transcript Cucsa.308370.2 (locus Cucs a.308370) derived from phytozome v7.0 (chr-ID scaffold0297 8; pos 504666 to 505452 reverse strand)
cttcgtccttgtctactgcactgctggcatttcaggttcgttaactatatcctgagcgtgtaactacgtgattaacgattttacatcttggtcgttacatacatattcttactttgagtaaagaaagtaagggataccattatagccgccattttgatgtaaaaaacgtagtttgttagatttttttttttttatacaaattgagaatagtagaatttgaactctagacctcttctcgacccctctggttcttacgttaagctaacagtttagtcttgttggctagtttgtttgatttaatatggaagagatgttaaacaaaatagcttatttagtaaaagaagaattttttctttcaaaatctacatattcatacattattggtaataaaaatatagtttaaagtctgggatttattcttcctatatgggtttgaaaagagaagcagaatacatttttgtaatttcctatattattttctaggtcccttcctgataaaacattgaaatatttcttcacagagcagagatctttaatattttacgctgtagatttttttattccttcatttaatgagacagtattgattattatacatatatacaaaaacaaatcagatcccaatcaaaatcaaaatatttttttgccaagtttaatgggtgattttcttaaaaatgattataatatttgtgggggaaaatgaactgcaggagggcacataaacccggcggtgacgttcgggctgttcttggctcgtaaagtgtcgttggtgcgagcagtagcgtac

SEQ ID NO: 64602 - DNA, 555 bp, Cucumis sativus
  Intron number 1 from transcript Cucsa.207030.1 (locus Cucs a.207030) derived from phytozome v7.0 (chr-ID scaffold0144 1; pos 233127 to 233681)
tcacaagaagttggtagggattcatgcttattctttctaatatgattgttttttagagttagtttcttttcgggcaattacattaaagtttaatcgggtttggccttttatttgtatgtaaattttaaaaataaacattttcaattcatgttgtttaaaaaaatattttatcaagttattacttttgttattaattatgtctctaaaattgtcctaattatgtggaaacaaattatgcttaattttttgttagaaatttataagtttgttataaagttaatgcatgtatatttattttctttttctttttctttttcgcaaagttattcaatataatcaatatgtgaatataatgatcaggaatgaaagtcaactggaaaaggaaataaaaaattgattgaatgattgcatttaatttgaagatttcgattttcctccaatggaataataaataatttgactttcaatgccttgtggaggaatttacttaccaacccatttgtttttctttggtattgcatgtagaaaatcaaagagagtttgattataatacaa

SEQ ID NO: 64603 - DNA, 688 bp, Cucumis sativus
  Intron number 1 from transcript Cucsa.162020.1 (locus Cucs a.162020) derived from phytozome v7.0 (chr-ID scaffold0114 4; pos 1766455 to 1767142)
tggccccatctctactacctcagatcttgcttctggtctctttcttatttgatgatttgttgcttgtgcttcattttgaaagattgtatgtgtgttttaagttttaaggtgttacgttggggttttggcttccttttactttaaagaaaaggaagaaattattgggtcttttgggatttcttttggaaatgattagtggtttgatcataatatggtgaggcagagtgtggttatttgctatgttattatctcattttgattttggttttgtttatttgttatcagtaattaccctattttctgccattttcttgtgttaatttatactatttccattcttcttctgagctggtgaatgatttgttgtgttttctgttctcgtttcatggaggctagttatggagttttgtagctttgatcatttttgtgttctttctttatgcgttttctcttacatgtctgaatgttttgactttgagtgaaaaaactattgtgaacataacccaaaaaatgggcattgacattgagttttgagatggattgacatggacttttctggcaattcaaaatctgttttgactgagtttgtttactgacttggaaattgatgtatgaatgcaaagtttgatcctctttctcattggtatgagtagaccgacaggtagggagtcatcttgaaggtgttcca

SEQ ID NO: 64604 - DNA, 401 bp, Cucumis sativus
  Intron number 1 from transcript Cucsa.144040.3 (locus Cucs a.144040) derived from phytozome v7.0 (chr-ID scaffold0108 0; pos 449348 to 449748)
ttcctcttttctttgaagagcagagttgtagcagtgtgagttctttttaacccatttttttcttcttatttacttgttttctgttttgggtttttcctgttttaccaactggaaagagaaattttagcttcaagaatcttgtcatatggggatggggattgtaatgatgagggtccatgatctccatttcgcatttatgagcccatttggatatattcatcagttacccagaatcaaaatatcgtcaacattcaattgttctgtccacaaatccccttgtttctcctctgttttgagttttaatggcggtcttgatagagatatcaactgggtttactgataactgactgataactgacataacttctcttatcttcttcattttgtaggggaatacagat

SEQ ID NO: 64605 - DNA, 737 bp, Cucumis sativus
  Intron number 2 from transcript Cucsa.181950.3 (locus Cucs a.181950) derived from phytozome v7.0 (chr-ID scaffold0125 1; pos 140335 to 141071 reverse strand)
gaggaaagtcgtaaagattctgcataatattagtatatagtaagtttagttattattacaagccaaaatatttactacttcttttcttcttagatttgggttagtgatttatttcaatttcaaattttgcttcaatttttcagattttggttttttgttttttgtgttttttctcatgggttttgtttattttctctctaccataattcttttctatgattttggttgatttctttgtatttgtatcattggttttgtttaaaaatctgaacttttcttttgtattgcttattttctctctaacaacatgacttagttcatcaatttttgctttatttcttcacatttggacatttgattgtgttcaaatccaaatttttcaacaatttctcacatgtaattctttattttccctaaaaaaaatttgggtttttcatttcttcaaattttgttcactgtttcatttcaaaaatcgaaactttccctcattttttcatctgtattttgatatttaagttcctacaaatccaaaatttatccaatttgctctcatgggtgttcttcaattaccttatactcataatttttcttcttgaaattcctcaaatttgtcaaaaaaaaattcttcgaaatcatcaggagttcactcagtagaaatcgatcgaaagcaacaaaaagtcacaatcacaacaaacatcgacgaacaatctctcatcaaaagattaatcaaggcagga

SEQ ID NO: 64606 - DNA, 817 bp, Cucumis sativus
  Intron number 2 from transcript Cucsa.144340.1 (locus Cucs a.144340) derived from phytozome v7.0 (chr-ID scaffold0108 0; pos 760377 to 761193 reverse strand)
tggcggtggcaaccccacggctgcgatcttcccaggtctctctctctctctctttctctcttctttataatttaatgttcttttttttgtttggacaataagcttggataatacaaaatgcttatccacttttaacttcatttaaatatgttaagttgtgaagattagaagaaagtagttaaaaggttaaatttgaagtttgtgtttaaaaagtatcttttctaaatgttatctatgtaaaactttcattgagtagtagtgttagttattgcatataaaaaattaaaattttggaataaaaaaaactttgtaacttgtttgttgaaaacccaagagagaagtttttaccaaaagttgttctcaaccgatttggtaaaattgaccataacttagtgcagaaagaaaaataaaaaaaaaacaaagcgacgacgtatggaagcatttaaattggccgccccatagtcatcagggtgacgtggcagaaccaagttgaagaatatttgtggttatttttacaaatacgtggatttaaataatttataaagattgttaataatatataaaaataattaaattttgatttagaaagtttaaccataaaggcagcaagttgaggcaagtggtttattttgacatgtcatgcaaaacatatatacatatatataaatttggatttccaaatacaagttttgccttctacttatacatacatatgcatcaataatatcaactttgtgaacgaattgcatatacaaattctgattgaacttaattttctttttccctttcaaaaaatggaagtttcaacgcaagccta

SEQ ID NO: 64607 - DNA, 367 bp, Cucumis sativus
  Intron number 1 from transcript Cucsa.247060.2 (locus Cucs a.247060) derived from phytozome v7.0 (chr-ID scaffold0218 8; pos 101141 to 101507 reverse strand)
atttctcttaatttcttcaaggaattcccctcaaggtacgcatcttattctaagtttttaaccttcttctaatcatcttcatccattttcaatcaagtttgttaatagccttttcttgtttttcctgattctatcaaattcatctcgatctgggacttcccgttttgttacggagtttttcgtttctgctttgctaaatccgtcatgccctgatgatctttttttcttcttcttctttgtttgcttaggaattcgttgtgttaatttagaggaggggaattggattaagggtttgatgatctttgaatcattgatttgttgagggaatcatttttttgttttctgaagatcggatcggtgcgtcttg

SEQ ID NO: 64608 - DNA, 970 bp, Cucumis sativus
  Intron number 1 from transcript Cucsa.197720.2 (locus Cucs a.197720) derived from phytozome v7.0 (chr-ID scaffold0135 7; pos 1014374 to 1015343 reverse strand)
ttccatttcgagctacaatttttctgggtttcaaggttagatttcttcctcatttctttgtttatttttcgctaaagaagtcggtgatgggtgtcggttgaatgttcattcattcttcataccattttcggcaaaatgtgtggttttatcgatttgtttctgttcatttcaaatgctttggatctgactgctgcgttacttggtttatatattgtttaattttgaagatggggtttcgattaggaattcaattgtcctttcattttctcaatgggaaggaatgaaggaaaaagagaccttttttttttattttttattaaattgatgttacttttactaccatttttcttgtgctttttagcttctggggatagatatttgttgatgttcttttttttaagttagaacaaaaaaaagttgggccacaactttacatggacaatcaagtcgttctttttcttaatttgtcgtcttttatagccaagagaaaactgatgaattacaagttgaaatatgttttgtagtacctattatatgaataatctggatagctagttgtgtttagaaactgtatctacttccatcgtcactggtctatcgttgccttctttcgatttttggtaaattttaacatgtatcaggttgctgtgacttttattataggatatgggtaatgtttgtaatttcaaggattggaaattttcgtttgtgttgtttatttagtatggtttgtgtttttgtaagacttttgtttttctggagggaatcatctgaatatcttgttcatctttatggaacatattttttgaagttggagcagttgtcttgtttttcttactagagtttaactatctagtcttctgaataattttatgaaaaaaataactttgcttaccagactatatgtgttacttcattagagtacatctattttgacgcttcctggcctctttctttaacagagtcagaa

SEQ ID NO: 64609 - DNA, 453 bp, Cucumis sativus
  Intron number 1 from transcript Cucsa.167040.1 (locus Cucs a.167040) derived from phytozome v7.0 (chr-ID scaffold0115 4; pos 411233 to 411685)
ttggccggttttcttcccatctcaagattggaattgtatgttcttacttccatcatttcttttatcgtttgattatctggattatagtggattcccagtcatgcattgatgaagaatggaatttcattgagctcttcatttattccgaatatattaaaaaaaaaacgagctacccagttctgtttttcatttgattgtttatagtcatgtttgtattcatggttttctaatccaggatgcgagtgcttattgtggttttgctgttctgttactagattacgcttctgctttatagtttgttttttcttctgcgcttaaaacatatggatggacctggcttttgagacactgtacattattttctgaaagtctagtattgttgttaggtgctgattatccatctttacacttttgtgattggtctttgtttgggatttcaggttggattgccaa

SEQ ID NO: 64610 - DNA, 344 bp, Cucumis sativus
  Intron number 1 from transcript Cucsa.163180.1 (locus Cucs a.163180) derived from phytozome v7.0 (chr-ID scaffold0114 4; pos 2599136 to 2599479)
aatatatttagttctttcaaacttcgctgcagtaggtattggagcttcatgatcatggaaaatttatcgtttgttgtttctttcccacccgtatgaagaatatcagcgtggcttctccactcatttttttttttggttgagtagactagtttattgtgctttctctgttattttgccttgctaacaggattgatatggaaaaaacttctcgtacttcgttggatttacgattcatgataattataatttgagtgttggtgaaacttgaagtaatccattgctttggacatgttattcatttacctaaattcgtgcagttcttgaagacgttataacctagctaa

SEQ ID NO: 64611 - DNA, 650 bp, Cucumis sativus
  Intron number 5 from transcript Cucsa.163180.1 (locus Cucs a.163180) derived from phytozome v7.0 (chr-ID scaffold0114 4; pos 2600339 to 2600988)
atattattttaccaggttgctcttttagctattatgtattcttttttcatacttcaagataccatttcccttgaaatcattgttatgaaatttttatatatgttccttttgtttgcttgaattttttcttctcattgttggctctgacttctctcgcctagcagaacgtttacgcttcataacattataaattttggtttggttctgttgtaagcacgtgattttgatcatatgtagaaattctttcaattttgtggacttggtgggatttttaactacattgaaatgtacccctttcttgagatttatgtaacaggacttctatgccatggcttatctttctttttgtatttcctttccaaggaaatgtcttttcttctccaaaaaacacttcaatattttctcatacattcagtcttttccccaaaatacacatcttttcacttttgtactcctttagtttgtgcttgccactcctctctctttctctctctcttttattttaattcatttattctatacaattagtttctttaatatttataaggtgaagttttattcataatttgtcttaaatttcagcattaatttttattattcaatttatatttgcagctctaggaccatattctattgactatacttcaaac

SEQ ID NO: 64612 - DNA, 635 bp, Cucumis sativus
  Intron number 1 from transcript Cucsa.169130.1 (locus Cucs a.169130) derived from phytozome v7.0 (chr-ID scaffold0116 3; pos 114357 to 114991 reverse strand)
tggtatgcatcgattggtcaattcgaatcatcttgtttgaaaacttcatgatggtgatcttatccaaatccaaatattggtcttaattgagagcttttcatttatccttcttgtagtcttattttcatttatcattatattatctgtttctttgctttccttgttcttttattgcattagtcctttccctagaggagctggtatcttttgagaattagcttattttcagtccatcaatgaaaaagtttagcttcttttttcttttaaatgccagttcattgaagtgttcttggaaagttcattgccaaatcatccgtccattagttacctaatagtcaaatgaactttgagaccattattaccatttttgaaatctgaatggacaaaagtgaattttgcataaaaaattattattgcaagtataaaagcagttctttagtctgcttatagcctagattttccattacaccttatgcttttattaattcaaatcatgaaacgtatgagtatgactgaaattttttttcctttagtttttattattttttatcattgtttattttctgtcttaaaaatttattggttgtgatatttctgcagagtgtacaagtcggtgcagcaagggtactgtctat

SEQ ID NO: 64613 - DNA, 882 bp, Cucumis sativus
  Intron number 1 from transcript Cucsa.281880.1 (locus Cucs a.281880) derived from phytozome v7.0 (chr-ID scaffold0264 1; pos 66619 to 67500)
atgttagtatctctcttctttttcctcgttattcaagaagactatcataatgtgattgactttaatttctttacttatgttagattgtgagagtttctttaataattttttttaacaatgaaatataattaaagaaaaaagatagtattttaattcaacaatcaataaatgatgatgtaacttttcaaaggagaagtaggattaaaattaggcattcaatataagacttaatttatatttttctctcctcaaaattaaatctctaaattcgttaaaactacattccctcaatagaaatgttagatcttgaataatttttttaaaaaaggaatttttttaaatagaaattgttgtttatgaatgttttttttaatagaaattgttgtatatgaatgagttctttaaggttcttaatgaagaaaaaaagttttaattactacctaatcaatattttcaataaaacaaaattactaattaaaaaagtaataatgtcaaaacataaaatagtaaacaatataataaataaacctaaatctacattctttattttaaatagtcaatattcccaattgtaaccacacaaaaatatacaaaacaaaatagtaccagtaggtgtaattaatatatctatacagaatagttttaaaccaaaaaaattaaattattcatatatatcctatatttttggaatttctacacaattacaattgtatttttttatttatttttaaataatagttttgaatatttgaactttaaattacaggtatcttcctccatatacatcttttcttccattaaacgagaaacaagaactagaagatcattttcgacatcttcaaagaagaaaagttagatcaaaaaaggcaaaagcttggcaaa

SEQ ID NO: 64614 - DNA, 813 bp, Cucumis sativus
  Intron number 1 from transcript Cucsa.273490.3 (locus Cucs a.273490) derived from phytozome v7.0 (chr-ID scaffold0251 1; pos 594489 to 595301 reverse strand)
gtgaaattatcagcgccgactctgtgcaggtcaattgacaatgtctgtccttgtatggtgcatagaaaatgggaggagaatcaaaacgaaactggaactgtactttaatttaggttatctacaattgttgttgatgtttttactaatagttgtttggtgttgaggatgccacgttgagaaattagaataactcacaatctgtataagatacacggtttagtcctttaatgcctactggtttttagatggataattatctaatttttggattcttctagccgtgcagtgaagctaatagctttaactcagacagatttaatcaagaaaatttttggctttcagaagattaatggaattgaaggctggaaattgatgtggtacagtgaagggggtatgaggaaattggatgtaagccaaatgttgggatgatgaactgtcagacatatgattatctttgcattttcatgtgaataaagcacgaaacattaatgtatgggaatttcaaactttatagaatctataaaatgaaattacttttggcgctaataaacatttgaaaagtagagaaaccaatgccttcttagctctaatgctctaagtaagcaagtacatgtcttttagcttttaaattttttccttggcctgtgtactgtgtatctcataaggggtccattgctaacattatttctaattttacttagtttcaatgttcttctctttgtattagtaatgaaccagtttcttgaatgctaatattattcattctgcctaattttaggtataccagggtcttgatattggatctgcaaagcc

SEQ ID NO: 64615 - DNA, 924 bp, Cucumis sativus
  Intron number 2 from transcript Cucsa.265890.1 (locus Cucs a.265890) derived from phytozome v7.0 (chr-ID scaffold0235 2; pos 347847 to 348770 reverse strand)
agtgtaagagaacattccaggtgattttcttacttatctcactttaagttttttggttatgacttatgagtatgactttgtgagaaagatgataatgctggaccaatggattagaattgagttgattgtttattgttttagcttcaccaatcgttctttgaggtctgaattttgtaatgtaccttacgtagtacaaaataccccagaagtaagaaactagagtaatattacatgaagctagatctttgtatgggattaatggaattttctttgattgtttcaaattcatcaaataatttaaactctggatataagttatttatatttggattgtaaacttttatccgtggagttaattgtttgaagtgataatatattattataagtgtcactattttattggtagttagctaggtcttatgtctcttaactagacacctttctggtagtttgacgccatttcttgttgttcagctctttttgtgggtttttttctttttgtatgtctatgtattctttcaatactttcagaatgaaagtcatatttttgtattaaagaaaataaaaggagaaaaaaagtagatgcctgtttaatacatgtagatatacattttacatagtttgtgatgttttcttttatcccggtttttactacttttcacacttctggtgtttgcttttcttctgggcagacacattttccatgtttcttgtatttgctttcttaaccagatgcatatgcatatatttcattaatgataaaaaaaagttgtcatttagatttgattgggagtgcttatatttctgttctctttgtaaattcatttagctcaaattcatcaatggctgctgatttatcatttggatcttggtataagcgaataatgaatctgggctgctgttctaggaaacggactttagaga

SEQ ID NO: 64616 - DNA, 887 bp, Cucumis sativus
  Intron number 1 from transcript Cucsa.284940.1 (locus Cucs a.284940) derived from phytozome v7.0 (chr-ID scaffold0265 3; pos 1485714 to 1486600)
gttgattattctctctcctttctgcccttaaaaatgtaagctttctcccggcttttttgtttcttaaagcaccgtttaatttcctactttgttcttccctaaattttaggcctttttttttttttttctttttcttctatgattgtttgtgtgttgtttttgaagtagggatactttcttattatcttttcccttgacgaccttgttttgggttttttttttttttttttttatatattattattattattcctttcttttctgcttgaatagtttctcttttctagtgctttagttttactctggaggcactgtgtgtcaaattgaaattattatggatttttgtttatttcgcttttaatttttttatttgttgtgtgtagttgcatttttagtaataccatttatgatggttgttaatgatatatatgatttcaggaatttagctaagttggcttggggacctctgattttggctatttgacgctgttcttgttgttttcctttgaatttactattttcttgattctttgcttgaaatgtatgttctttacctaattcagctatttccagcagctcattatgagctcattaaatgtgcatatgaaccttcttactgttggcttgatgagtttgtgacttcttattgtgacggtttttctgatggcagttatgttgtggttgggtcatggactaagaaggtttttggggacaaagatagagtctgtggttgttatgtgtaacgaagaatttatgcgaatgtgataattttgagttgacattcaagggctatttgcttaccggaagtgtgggttttgacttccaaatgttgtgttgtatttcatgatgtagtttgtaagagagatacttgtcaatttaggtgggat

SEQ ID NO: 64617 - DNA, 1040 bp, Cucumis sativus
  Intron number 2 from transcript Cucsa.284940.1 (locus Cucs a.284940) derived from phytozome v7.0 (chr-ID scaffold0265 3; pos 1487036 to 1488075)
agactgccaccaaaaggggtactattactgttattgcatcatccttttctatagtcttatcataatttttcatcgttgtgaccctgtgggtggatataaacattttcttatggcagttaaattattttcacggtttcatcattctatataaacattttcttaacatgtttatatgcatacacaaagatatgggagagaagtttttgttaaagatagttgtaggtttctgtgtgtgtgtctttgttctgtttgtatttgagacagctttttcattttatttaagtggataattgtgtgattgtactaccaatgcctttgtgagagaattttaaacggatagctatctaacattctatgtgtgcggaagaagggaatattatttaatatcttaagggtgtggacaatgtccttggacttgcactttttagtcttatggcatcccccacctcctaaaccaaagattgaggcaaagattgtgaagtattttgtagtgaatcgatttgaaatttttaattatttttcccttttatttgttttttcttgtgtgcattaataaatgccttcatgggaaggaatgccattttaaattagcgagcagtaccctgttcattagagtgttgttcaagtagtttatccctatgtatgcatgtattcgagtgagttaagcatggaagtgtggataggtacaaaacagtggtacgtcctctagcagctagttttacctgtttaacttcctctgcgtgaacttatactttgaaccaaaagtttgttctgacaaacagatatagcaattacatgagaatgtgatggttgtttaaaaccctatatatgttgtgaaagattaaaaaacagtgtgttgtacttagatccttctatgtaacttacataatcctaaaattgagtatagggttatgtaaaattcatcaatattggaatagttttgtttcattgctgctatggttcgacattcattgaactgttttcttgtctgtttttgctccttagatccttcgttgaggacattttccttttggcctgcg

SEQ ID NO: 64618 - DNA, 626 bp, Cucumis sativus
  Intron number 1 from transcript Cucsa.180200.1 (locus Cucs a.180200) derived from phytozome v7.0 (chr-ID scaffold0123 3; pos 512395 to 513020 reverse strand)
taatccagctgatcttcttcttgatcttgcaagtatgtattttttctaaaaaaaaatgcaattgtttttatacatcccacttgtatatctcaaatttaacacgtaacaaattatgatcaactaacatgtaaagaatgaaaaagaaaataatgcagtggagacactaaatatttttcttttctaaacataggtattatattaggtatagcaatatgcacaaagggaaaggagaaaaaaaaagttgggttgggaattttcattttcacttttatttttctaaaaaaatgaatttgtttgtcctttttttctctttataatactgaaatcatgtgtaggccatttaatcacttggcctacttctacacattttgatgctttcaaaccttttccactcattttaaaatttggacccttccaacatctctttctttaacaatcaattatcaatctttaacgatcaattatcaactttaattttagaatgataattaatgtcttgatgacatgtatcgtcttatgaagataaatttcttttataataatttaaatttgattgaaaagcaatttaataaatatagttttgttttcgttgtaattaataataggaatcgcccctgattcaaagt

SEQ ID NO: 64619 - DNA, 893 bp, Cucumis sativus
  Intron number 1 from transcript Cucsa.301820.1 (locus Cucs a.301820) derived from phytozome v7.0 (chr-ID scaffold0295 1; pos 81883 to 82775 reverse strand)
aacactatcatccgaatcagccctggatattacgtgtaatgccctcttcttctcaatcatacacacattcatcattttaaataattcccacaataataatgataatgataatgataataataattcacatttttatcttcttcttctttgttaactttcgctttacgtataaatctttccctctttttcagtaacttcccccaaacgcattgttcgaaaacatgcataaatattattcctccatttttcattcttcttcacttgtaagcttccgaattagctcgtgctcttaaattcattctttaatattattaactgagagtcaccattaagattttgacacttttttttcctaattaaatccccaatcaaacttcccatgtgtactccaattctttttataaaattatattattattattttgccatcttataaaaattgcacttagttttggtttcacttaattaatcattgtcttctaaattacatttaattactatttacgattagaatgtcccatacatgaactgggtttctatacttttataacatttagatcgttaacattaattatcgaaaaatctaatttatttataaactgtaaagaaaagttgaatactaaagctaatatgtataatctttttatgagatttgtcatgataaagagattaaattattaaaagtttgaaaacgtaatgcatgtcacagatttgaaagtagatggaatagtgttacaacattgttattttggatttaaattgataaatctcttaatcagaatttacatatttatggggatgatgatgcaataataaggtaattaaaaaggtaaattatgaatatgaataatgaattagggagaaagtagtggtgccggcgacgaagccgtaca

SEQ ID NO: 64620 - DNA, 793 bp, Cucumis sativus
  Intron number 1 from transcript Cucsa.174100.1 (locus Cucs a.174100) derived from phytozome v7.0 (chr-ID scaffold0121 9; pos 58445 to 59237)
tcggtgagttcttcttcttcttcttcttcttcttctttatgtgtgaatctttgatgcagatctccctcccgcatttatgttttactattactcttctttttcttcttctcttaatactcaatccccatttctggaattccaattttaatgttcttattagggtttttcattttcaacatctctgtttctacagtacttttctctttctcattcttttgcccacacaaatttcacttacattttctttttcaattccaatttatcatcaacaaaacactctcttccttctttccttctgtttatgaatttagttgcctcaatctcagcttactttcttttcactttgatgatgaaaactcaatgaattttaaattattaactgttaaatcactactactaaactcaaaaacacatgtgttcatttcaactattaccttgtcgacgatccaaccatcgaattttccaatgttaattccctatttctggtttcttattcattaagatatatcttcggagtgactcaaaattgagttcgtagatatgacattttcctcagttttctgctgattggatatatgacattgcatactttctctttttatatttattctttagggtttaatttgaagaatgaaataatattgtgtggaagttagaattcataaccttagacttttgctattatgtgaaaccacttaattgaaaaaaatatttgaacatattcttaattcataagaagataaacacttttgcatttctttatacaattttttgtttttgtttttgtttttag

SEQ ID NO: 64621 - DNA, 787 bp, Cucumis sativus
  Intron number 1 from transcript Cucsa.142230.1 (locus Cucs a.142230) derived from phytozome v7.0 (chr-ID scaffold0107 9; pos 523352 to 524138)
gtgggtcttgctttatttttcatttcctcaactgggttagtctcgattctcttgtattgattcgttttttgatcatcggatgttgaaaaatctctctgattcttggattttttataatgatgtttgtgggagagagaaaataaaactttatgacccatgtttttgttttcccttttcattgtgagtttatggccttttgctttctatgatatgatgtgggttacggtttcttttgaggggttttttgtattgtgtgtgtagttgcgttttcttggatttagtgatctttcttttgatgggttatgttctcgagctggaaatctaataatgtggttgtgttatgagttctgatgtttttggtttttctttttgttttttttttgttttttgaggttctctgggagtcgatcgcttttcggggttgagtttttattttttgaaatcttttttttggttttgaaggtttcgtttcttgaatgacttgcttattgggcaatcgatcgtttcagatgatgagattgttcttgatgagtttgtgattgttgattaaaggatgttgctatagagtacttgttggtttatttttgtacaatgcgaggctgtcgtttcagtttaaatttgatgtgattgaagatatactgatagtactttgttcttttgtgattgtccggttggctttgacattggaaacatactgtatcattgtattattttatttcttgtgattaaactgttactattctggtatataggtgattaaggggctttcccgtgtacaaaatagaaa

SEQ ID NO: 64622 - DNA, 457 bp, Cucumis sativus
  Intron number 1 from transcript Cucsa.175510.2 (locus Cucs a.175510) derived from phytozome v7.0 (chr-ID scaffold0122 5; pos 176141 to 176597 reverse strand)
ttcttcttttgctcttgccatttcgttcctagttggtaagtccagtttcttctcatgtggttccctgattttgccttcttttctccattatcttccttgtttgatctctgatttggatttcctttctgggttttgttgggttttctattcttgcattttttttaaaaaaagtttttaatgggtatctaaaatggggtttggattgaacttgtaatttgactgtttgataatactgagtaacataaacatgggtgtggttttctttgttggaattccttatggaatattgaacttatgaatgagattggtgtggactgaactttttaacagactattttgtactgcattcttgaatgaaccattaaaattgaaattttgaagagagagtatgttgttcaagcatactgagatcagttgtgatgttttttttttttttttgtaggatttctaaatcaaa

SEQ ID NO: 64623 - DNA, 940 bp, Cucumis sativus
  Intron number 1 from transcript Cucsa.256460.1 (locus Cucs a.256460) derived from phytozome v7.0 (chr-ID scaffold0222 9; pos 4085302 to 4086241)
gaattttcatctggtgagtacaattttccttctaattttgtatccatgtcttttctttcgtctactctttttgttcttgctactcgattacaagctcattcaattctttgcagatgacgaaacggatattttatttggttctttcactttgctgaaaatagtttaatctgtgaaattttcgacatgggttccgtagtttgttgttgtgcgttttgaaattgaattaatttgcttgtcttttacgtcgattctctgttacacggtgcaagctagggatttgctttaatattcaatagtcattttgaatgattgctttgagtttacgtccgagagtgagaaagatgtcaaaggattgataattagaaatttggaaagatcgtcgtctattgtaggcgacgtgttgtgtctgaggctttgggaatggatggattgtgtaaattgggttttcttgtgaaaatgtatggaggatatagtccaactcaaactttgaagcatatacgaagtaattgttcatgtttcaatacttaagaaatgctttcatttataggatttcttttccattttagcagacgagcaacaacaaacattgcatcttgtattgttcttatttcttgtgatcctcggctccttgtttgttaaatcccaatcaacccaaaaatttaaaaattcgtagaacgtccaacaagtgagaatgagaatcaatatttacaagagagtaaataacattttaagagttcaaacacaaaacttcttgctctgatatcaaattaaatcaccaatactccatccctaaaagcattttttttaatcttctcaagtactattttttttggttatttggctacttcttgagttgctattttactcattggatacactgatatcgttttcatttgacttgtcaggcacacattgattttctctatcttttattataaag

SEQ ID NO: 64624 - DNA, 423 bp, Cucumis sativus
  Intron number 2 from transcript Cucsa.165970.1 (locus Cucs a.165970) derived from phytozome v7.0 (chr-ID scaffold0115 3; pos 1270991 to 1271413)
atccccttaaatcctaccttaatagatacagagaggtaactttgtttatttatttattttggttttatgtagagttaattcgttattgtacatgaatatcactgttgcggtattgctctttctgatcacgatatggttgaattttttattattattattattttgtgaggttatgtaatttgtttgatctcatctgtatgatgtgctcacatttgttttctgtttttttttcctttcccttttttattggtgggggcattggtgtttgcttcagttggaggtaattgaaaccggctcttaaacctagtattctactggtttattgtacccccccactaccacccccccttctaacttgagcttttttttgtgagaaaagaatcggctgagcttttctgcttgaatgtaaacttttccagtgtg

SEQ ID NO: 64625 - DNA, 550 bp, Cucumis sativus
  Intron number 1 from transcript Cucsa.163070.1 (locus Cucs a.163070) derived from phytozome v7.0 (chr-ID scaffold0114 4; pos 2515658 to 2516207 reverse strand)
gctctgttattcgtgcagctgctgcaggttttccatcttacttatcatttttcttttacaatatattcctatataacgactttaatgctaaatgtctataacataaataatatgtaattatttgcgactagtaagatttttaagaatgacaaatataactaaaatttattagtgatacagtttgaaagtttgatttaaattttgttagttatttgatagtagaatgtttcatcttcaaattttgacaataaagggagtaattcaactatatataataatgagtgtaaatgtgctaaaaggaatcttgcttaaaaaatgcataatttttgtagtcggtcaaatttgaccattttatgaacgtttcttaaactttagaatgaaaatggatttcacaatattgctaaaaaaagaattgagaaataattgagagttgaaccactaagttaacttgtaatttaacctgaacttacatttctcctaaactaaatgaacttatttggaaaaaaaaaaaacagctttggatttgataaagaaagtggaagtgcaagcg

SEQ ID NO: 64626 - DNA, 267 bp, Cucumis sativus
  Intron number 1 from transcript Cucsa.253470.1 (locus Cucs a.253470) derived from phytozome v7.0 (chr-ID scaffold0222 9; pos 2072952 to 2073218)
cctgtttttctccttttccaagtttgttcaattttgtaattcatttcctcttgataattcttctttatttcaattaattttccttattctggaacgtggttctgattttgtgagttgaattcaattgctgcaatttgacgctcgaatttcggttgctctttgcttggtgtcataggtgttggtgattgtccttttgatcgccttgcactgtctttccgtgttttgaatttttcttttgttattatgtttcttttagttttctggact

SEQ ID NO: 64627 - DNA, 487 bp, Cucumis sativus
  Intron number 2 from transcript Cucsa.283250.1 (locus Cucs a.283250) derived from phytozome v7.0 (chr-ID scaffold0265 3; pos 453327 to 453813 reverse strand)
actggctggtaatcatttttttcttgtcaatgtttttttttcttgggtcataatttccattttactctgattggatgctcaaattaaaatcagtttttagcatgtagaagagtgaatgttcagcattaagtcatcttgatattgaattggcagatagaataagatttgagaagtatgtgttgtctagtttagcaaaactgttttctcatcccttacaattgaagggtttcgattaagccaaatgaaaatgtgttcgctgttcatggtggaaaagtttgaaggacttcgtttctttcccttgcttcttgtctgtccttcaattgttttattgacacagggatatgatttacttgttatcattgaaaactccatttacattattttctatgtattatgaatctgttctacccacattttctgatttcttgcaaataactttgatctttgcacaggtttaacattgttggacaggtggttctaaacatct

SEQ ID NO: 64628 - DNA, 1047 bp, Cucumis sativus
  Intron number 1 from transcript Cucsa.253810.1 (locus Cucs a.253810) derived from phytozome v7.0 (chr-ID scaffold0222 9; pos 2317249 to 2318295 reverse strand)
gaacagtttcggattattcgccagaaaggaactgagtaattctaataaccccttctcttgttagttttttttttttttttctgtttgttacattcgatcagtttctttcgtataacccaattgctgattttgttgaatttacgtgcatcagaaatgaattatgtcgttttcgtttttctattgtcgattttgtctcactggttgttggtatcttcggctttttctgaacatgtttcgctgatgattctgtgtgctaagtggggttttcttgtttgtttgtcttgttttatctggaaatgtggtcaaattgtttcctaatgtcattggaaaatttcagtattcagtaatagcagccattataaataggtatttcgttgtttgacatttgttggagaagcagaacttacttcgctgcactgaatgatgaccacctatgtcactacaattctaaaatagtcatctttgtttaatgcatctgaggtctatattcaatctgagacacctttgctagtttgtggttgtaatgttatggaccagaaatctcaaaaggttattttgttgttacaaaagaccacagcccaatacgttcaccaatttaattcagataggcattcaaaaagatataccacatcttcatcctacacatacgagacatggaaatgaatacaacacgacacagtgatacacgaattgtaaaaaagctatgacacgaacatgttgaggatatgcatttatttatttgtatggtatatcatataaatttaacacgtactcctctgaaagaaagtataaaatgtcaagttaattaacaattgtaggagatgaaacgtgtaggtaattttttacttctagtttttttttttttttttttgtgcgttttccttttgtttttctagatgtttgtttaacatataattaatttgagctttaaaattggtccatcccacgtgtataaaattgaaaacaaataaatagaaatggtcctttttagttatcagtcaccgtagccagaagttgacgtatgcaggcctcgtggcactgggaaat

SEQ ID NO: 64629 - DNA, 482 bp, Cucumis sativus
  Intron number 2 from transcript Cucsa.143280.2 (locus Cucs a.143280) derived from phytozome v7.0 (chr-ID scaffold0107 9; pos 1623889 to 1624370 reverse strand)
taaatttcattttttcgggtgcttcacattctcaggtactttaaatctgcttgcttctgtgttccaaacaactgaacttgaattttttccttgctattgaactattcaattgattatttatttatttttatttttttaatcttctctgatgtaactttacggacatctactttacagcacatgattattttcttgtttgtgaaatgaaaggttgtggtatatgcatctttttgaggggcagtaacatttattctatagggagtgatcttgggaaagtttctttgcatttctttggttttttcttcgtctgtccttccttcttgggttttctttcaagttgaaattgtcttcctctctttataatttataagctggcaaatactatacttgaacgtagtgctcctctctaccgttgctttaattagttttgactgtgaatggaaaatggcaatatacttattaagtttcacacttgcaggaga

SEQ ID NO: 64630 - DNA, 713 bp, Cucumis sativus
  Intron number 1 from transcript Cucsa.143280.2 (locus Cucs a.143280) derived from phytozome v7.0 (chr-ID scaffold0107 9; pos 1624488 to 1625200 reverse strand)
tgtttgtcttctgcggatcgctccgtcgttgaaatgtgagtttctaaccacctacattttgggttttcttgttttgcttctgtttgtgttgaggcgagtggtggtgggattcctttgattgtgtttaattttgattgaataagtgatatttggggttgaatgattgcttgtttcatttcctttttttttccagcaattgcgaaatgtagaagggattgttagggagtttgagtccgatggtactcttccattgtgtttccttcgttaattgttgcttggttttaaagaatttggattttatctatttctttttctgggatctggtagactagagatttgctgagaagtggttttggctgtggcagatggctttagacgaaatgtctcgtctgatctgtgtatattgtgtatgggtttactctactttaatctaggacattggaaaactttaggggctgatttttcatgatctgtttctcacatttaggtgtaaaataatacttggtttgcttatttttctcttctgtttcaagttgtatgttggaacctctaacggtttagtttggtaaacttttgtaatgggttggctttgctgaacagtttggagtgggagtttgttcttttagtttattgcctggagtattcatttggttttgtgatgtttctgcattttacagaatatttgttaacttcagtgttaacttcagttgtgt

SEQ ID NO: 64631 - DNA, 533 bp, Cucumis sativus
  Intron number 1 from transcript Cucsa.185070.2 (locus Cucs a.185070) derived from phytozome v7.0 (chr-ID scaffold0127 4; pos 662080 to 662612)
tggaggtgcggcttacgtagtcactcaaccacccagtaagttctctctaactttctctctttctctctttctcattcatttctatcatcggcgcacgttagaaaagatgaatccaacttgcgccactcccgactcccactcgtcttttacgctataatgctctggcgcggaccacgaggcttaataatggagttgcacgccagctcagtaataagtcaaatttcactgcccacatgccggccaccttccaactacggaatctcattttgcttacatggcacttttccttttctttttatttaatcttccttccatttactctgcggtaaaaggtaaagaaaacgaagaatctttgcaacggatggatatttcttttttcttcttttcctctctctttactcaatgagagaagacaaaaactgaggagattctcaacttttttgggttttgttttgctgttttggttaattctcaattcctttgagcaagttactgaaactgggtgtttttttttctggtttgtattgcagagt

SEQ ID NO: 64632 - DNA, 822 bp, Cucumis sativus
  Intron number 1 from transcript Cucsa.218010.1 (locus Cucs a.218010) derived from phytozome v7.0 (chr-ID scaffold0165 8; pos 216193 to 217014)
gcatctcattaaacaaggcttgattccacttaaaggtatggttccattttaatgtgtgttttctttcctttttttcatttttatcgatctttgttaaaaatgaatttttgtgtggtagaatttaaaattaaaaataaaatttaaattttagagagactttttaaaaaatagtataatcaactaaaatatttacaaaatatatcaaaatttcaaatcttatccataatagatatagatagatttcgctattacttgctatatttgatataataacttttcttaattttatttctaataaattctttttttaaaaaaaaaatgatagaacatgtcaaaaattaacctcagaatgacatatatacttattaggatagaaatttgaaaatttagaaacaaatcaaatacttacatgtttcaagagaattttttgtgggatagacttgtatcagtttaattctatcactgatatagttagtgttaatgatgggcttctctctgtcaatttcaatcacagatagatattgataaacttttatcagcttttatcaatgataagcttctagtattgatagatgacactgatagatttctacctgtgtttagcctggattttctaaatttcttattaggtctatcagaatgataagaaatttagaattttttgcaataactagtaagtagtttaacctatcttccaatttaaaaaagaactcggacatccactagaatacacaaccatgtggaccaaactcatcattttaaccaaattctttattttgatgtttgagtatttagttttgatctcttccctggttaatagat

SEQ ID NO: 64633 - DNA, 666 bp, Cucumis sativus
  Intron number 1 from transcript Cucsa.147890.3 (locus Cucs a.147890) derived from phytozome v7.0 (chr-ID scaffold0110 7; pos 204135 to 204800)
ggcagcgaagttataaagaaattcttaactttaccgtactattttttctacgtttccaactttggttgccttttacttaatttttctgcttcattgtgtttagggtgtttatcgatttgagcttatatttatttgatttgagcttaaattgagttgaattttaattgaagtcagagttcttttttttttttcttctctcaaatctaagtttgccgtgctctagttctctttcttgattcaatgaatcccagttctttcccatcttcatttcattttggttcttaatgtttaatataattaagaacttaagcttttagaaagttacttccagctttttctctctcagcagttcgctttccaacgtcaattttgttctgcattttgctaagtttcatgctcctccaacttcactgcaactttgtttttctctttctggaaaacccattttcttaattgattcagatttgaatcgtttttagtagttcttgaactttgagcttacgcctttggtcggtggaactctgctgtttgttttgttcgattcctgacttgggttttctgggtattgtgtttaatctttgttttatggaatattgagcttgaattgcgtcgctttttatggatttcattatgctctttgttttgttggtggtttcaggttggagg

SEQ ID NO: 64634 - DNA, 973 bp, Cucumis sativus
  Intron number 2 from transcript Cucsa.147890.3 (locus Cucs a.147890) derived from phytozome v7.0 (chr-ID scaffold0110 7; pos 204938 to 205910)
ccaagttcttttgggaattacgaatccaggggattgtaagacttcattttaattttaacattttagttttctgaatttgtcacatgattcagtcacttggatggaagaaaatactggaaaaagaaattcgaatcagagatattattaatgaattctgtatcgtcttttggccgcattattaaagcatctttagtttgtccactgccaccgattgtcatgctgagtgaatgtatttctgtaaatgtcgcatcgtgctgccatcctataggggagaagtcttttctcaatatctatccaagttggttttcaactcaatggcgaacatctgaaagttataaatttttgggaagttagcctgggcttagcttctcttgttgggctctgttttagtacctaccattctttcttcaatggaggctttgtttctcaaaaaatggaaagaaagaaatgagatcaatcacttttgctttatttgttctagagttagtggttttctaggaagcattgacactttactttggatagcgtgtccgtatctgtgtccggcacttgttagtgcaataaatatgatagacactaggtccatcatttgttagaaatgcattgaacatttgttaagtacactaataagatagaaataataaattttgagagccaaatagatatggctagttttgtaagcatacaaatgaatgaataaactcattgactttcaatttacttctggcataaaagtgatatatattttaataaatgtgtcttttgttgtatatgtgtcctaggtttaaaaaactatgtgtcgtatctgcgtcgtgtcatatctgtatctgtgcttcttaggtggtttctaccggtattctcttgtggattcaatcattagagtttttatatagagtccatctctttagctgattgtacaaattattttttcttgatagtttctgctattagtagcttacatactgcacttgga

SEQ ID NO: 64635 - DNA, 725 bp, Cucumis sativus
  Intron number 1 from transcript Cucsa.165890.1 (locus Cucs a.165890) derived from phytozome v7.0 (chr-ID scaffold0115 3; pos 1194119 to 1194843)
ccttcatccattacgaccgcatcctcaggaagctggtgcgttctcgccctttctatatgtgtatggatgtttattggttatatttttggttatttgttgggtgaattgggtgatgaagttattttgattttggtgtgagtttctattgctcatttgaattttgttgttggtgaggaaccgtggtggagatttattagaaggttgtagtggacattcttttcagtgcagtgtagtttatgaaatttttaaggctagtttgataactgtttgttcttttattttttaaaattaagcttacttctacctgtgcctatggatttcttcgtgttgttgtcctcttttttagggatgttttcaaaatcaaaattaaaaaacagagtagtttttaaaaacttgtttttgtttttgaaatttggctatgaataagaaatgtatggtaaagaaatgataagaaaataaacaaattttaaaaccaaaaagttatctaacggaaccggaatgattaacaagcatataaagggacattttgacttaacttgcattttagtgataaaaatttgaaaataataatcttggtcttggatcactcttcccattcatctattatctgttttgctaagatcctgtcaaaattactttaatttagtgttcagaatgagatgtactcatgcggaactatttcttaactaggggtgtaacttagcggctcaaagggacagcggtag

SEQ ID NO: 64636 - DNA, 638 bp, Cucumis sativus
  Intron number 1 from transcript Cucsa.219830.4 (locus Cucs a.219830) derived from phytozome v7.0 (chr-ID scaffold0165 8; pos 1436610 to 1437247)
aaagggaacctgttttggtttctggctccgagaaggttctttctatctcttcttgtgtgtatctttgtcgcttggagttttgattttagtggtgttttggcttgaagaagtacgttgttagtcacttaatcatattatgtatttgcaattcaagagttgcttagttaattcttatacacgtctttttacttgtctcactgtctaattgtttgcctatgtatgaatttgtaagatttcttactggaactgctcgattttgttgtgttccatactgtgatggttcacagctcttaatgacatccttcagttacgcaattgagttttctggccattgattgctgtaggttcttgagttttgtttacctcttcatttttcttttcctttttgggcgagatgtcaaaagatcatatagatggattataaatttatagaggatgtagttatagttgttaatcctttggcttttacaaactggctgctatatgcatatatggtggaaattactgaatgagaaagctgttttttcctttttcggtatcaaactggtttctgattctttttctttttcaactttctacaaattactcttcgaaacctttactctttcggaatgcatcataggagtggagaacttgtg

SEQ ID NO: 64637 - DNA, 283 bp, Cucumis sativus
  Intron number 1 from transcript Cucsa.228390.1 (locus Cucs a.228390) derived from phytozome v7.0 (chr-ID scaffold0193 3; pos 314640 to 314922)
tgcccaacgtgttcgaattgccctcaacctaaaaggtattactaattaaaccactctgcaaaattattttaatcattaaaaaataaattagttttttataacagtatgaaaaaatgtgttcaaattaagtaatgaactaaatcaaacactgagttgatatatatcaagtgatctcaaatgcattattgcgatcaaagtaattcaaaatcatctcatgcatgcatatgttcttttctgttacttttcaggactaaactttcagtataaagctgttgatattttg

SEQ ID NO: 64638 - DNA, 576 bp, Cucumis sativus
  Intron number 3 from transcript Cucsa.228390.1 (locus Cucs a.228390) derived from phytozome v7.0 (chr-ID scaffold0193 3; pos 315082 to 315657)
ttgttattgctgactcttttgctataatagtttgtgtttctctcttttcttttcttttcttttctttttttcataagtttcaaattatatctattattacatttataaaaagtaagatctaagtttcgaaacaaagcagtttagttgagaatttagaaatgacagctttaactaagatggagtccttaaactcccaggtcccattcattagtaattaagctaattttgcaaaatgataacttacaaaaccaaatgttaacaaaagtgaactaattaaattaagttgtgcatatatacttattaagaaacacaatgtggaaaggaaacattttaaaatgaagagagtactatcaatagatataactcaacaaatgttacctgcagaagaattttaactcattggagactcttaaaatcaaaatatattttagaaatttattaatgaaaatatttgtgatgattagttagcctacatatctacaaattaaatatggctctcctaatgatatcactaattgatattagttgtgtaaacatacagtatttggaggaaaagtatcctgagcgtcctttgct

SEQ ID NO: 64639 - DNA, 434 bp, Cucumis sativus
  Intron number 1 from transcript Cucsa.281050.1 (locus Cucs a.281050) derived from phytozome v7.0 (chr-ID scaffold0263 3; pos 969563 to 969996)
ccccaacattggagaggtctctctctttttctctctatcctcattactagaacttaacagagcttattatagttaacctagagcaccattctcgtaagcttgagtttattagggagtatggttaacaattacctcaaagttgtgattttttatttgaagttgttttggttctgtttttcagtatgtggaagagctcattatagttaacttcatacactaattcattttagaccttgtaattcaaagaactattctcagaagcttaaatgtatttgggagtatggctaactgctaccttcgagtaatgattttttatttgaagttgttttggatttctgtttttcagtatttggattctggtttttgtcattgtcttaattgtattcaggattgactattatcctcatgattctaatgttttgggcagtgttgga

SEQ ID NO: 64640 - DNA, 649 bp, Cucumis sativus
  Intron number 1 from transcript Cucsa.253080.1 (locus Cucs a.253080) derived from phytozome v7.0 (chr-ID scaffold0222 9; pos 1825146 to 1825794)
ccaccaaacctttcattcaaaccccttcttatacagtacagtttctctcttcccctctctatctctctccttgaattaccaagcactctacttttcaagaatgattccttctttatttctatccatgtttgttgttttctagtttttttttagtgaaaggatttctaatggagtcatttcagtacttcatatccctcttgttgagttcgcagacagtgtagtggttaaattgcttatgtttgttcagtgcgtttgcattggaaattgttcggaatgcgtgtttttgtatttgaaacattggtcctttttattggtttattataatatcacgtttcattgttgattacgattcaattttgatatggaatggcatttgattctgtacactttttcggtgtctcggtattgaagaacattcaattgtgatatgctgatgaagtttttctttttggtcggaaagaaaagaaaaaaataaaaatttctttgacgaggtacttctagctgttcagttatggaaatggtgtttaccctcgtggatcaactcatctgtcttttattcctgaatgtgaattgctggtgccttatgtcaatgtactcatgtttcatatttccaggtattatcacaaagaatttcttcaacacttaggag

SEQ ID NO: 64641 - DNA, 691 bp, Cucumis sativus
  Intron number 1 from transcript Cucsa.177620.1 (locus Cucs a.177620) derived from phytozome v7.0 (chr-ID scaffold0122 5; pos 1592641 to 1593331)
cgccctttaccctccaatcatcttcatcaaataaggtattttcccgccttgaatctttccaatttttacttgaaacctccatttcaaacattctgatgaacccttctagcttatctttaaagtctcctcccgtttttccatctcaatgcttggtttttgtgaaaaagattcagaattccacccactttcttgttaaacgatgtgggtggtttttaatctcctcattggaacttattttaccaatcccattcgcaaaagaaaacgagtttggatggattttgagttgtgaaataatagaagtttattattatcttttccctgatcaagtctctgtactcattgtttgactgtcagtagattgctatgattcatatggtaatatttgaatttatctggaggcaaattcttgaaacttacaagtttgtttgctcttgatcattatgattgttcttgatcttttgaccttgtgaacggcattgtttagtgattaattttttgaatatgactatattagtatcttcaagtagaaatatgtatgtgactcatattagcatttgatgggcaattctttctaataattaaattagatcacaagtttttaggtatctgatatcccatgcttggaaaaagccatatgtctttgtttgatcattcataaagaaatggttttttttctctgaacagggcgctg

SEQ ID NO: 64642 - DNA, 709 bp, Cucumis sativus
  Intron number 2 from transcript Cucsa.177620.1 (locus Cucs a.177620) derived from phytozome v7.0 (chr-ID scaffold0122 5; pos 1593485 to 1594193)
ccactgttgatcctgcattagtggatgtaatttttctcctctccctttctttctttagttaagctgctcacttatgaattttaatgatgtcctttgctaattctcttactggataagtgatatgaatagcagcagagtgatcaaaatatctttcaacagctatactgaagatagctattggattaaagagctcaaagattgaataatctgttttcctgcattttaatgcttcaaaaagtagttgtgtttccaagacattgtggtggccagactctaattgcttgtgtcactaccacgaccttgctttaacaagatcaactttataggttgtaaactgagtccttgagttctaaatatatcatgcttatgtgccccgtgagatgtcaataatactcttcaaggttaagtttttgagatcatggaaatcttctgaaagatgccaaaagattatgatatttatccttaggacttcaacaaagaaccaaaagcaagtttttctcttattcaaccataagtatgttacagtttcattctgaataaaattttatgcttagcagagtaaaaaggtattagaccctcgtgtataaatgtacactttctaatgaatttgttaaagtaaataatctgcttctctaagatgcagatttctgttcttttctaacttctatctttataccccataatgcataactaaagtttgttggcactg

SEQ ID NO: 64643 - DNA, 778 bp, Cucumis sativus
  Intron number 1 from transcript Cucsa.238530.1 (locus Cucs a.238530) derived from phytozome v7.0 (chr-ID scaffold0202 3; pos 1080288 to 1081065)
ggtcactttttacttggggtttggccttattcttgctctatgtttctgataacctgaatttttgttgttttgagatgttttgaaacgagtttgttcttcatttaaagttcaaaacttggcttattttccatgttttttggatttctgttgaaatgggttcgttaagtagaaattattttagaggataaccttcacagtatagtttccagtcccataattgcttagaaaaaaagttattgtttttttttttagaaagagaattaatttaattgattattgtaactcagatgtgtgtcatggtgtcggaaaaaaaatgaaatgagatctatgtttgaaataccccctctcaatcagttttctggaaatcgtggaaatcctcaggctcggaccattcataaaattgaagtaatggcatatggatactaattttagatggtatcaattagtgtttgttgcttctcgagtttgattaattgctttacctgtgatgtgattcatctgatgttaaagtttcagaacaataaattgttctaatattagatgagaatggtgtaggacttgtgtattggagccatgggagactgtcccacacttctttctgtgaatgaaccttctatttgaagaatctttgtgctttccttttcccctgcagtgcatgttcacgtgctgaagaaaattacattgcaatttaaatttgatctcgatgaaaaatcaattttgatattcgatctttatctaatgaaatgatcaggtgcaaacgattttggccaactgggtg

SEQ ID NO: 64644 - DNA, 617 bp, Cucumis sativus
  Intron number 1 from transcript Cucsa.149880.2 (locus Cucs a.149880) derived from phytozome v7.0 (chr-ID scaffold0111 0; pos 793959 to 794575 reverse strand)
gaatcagaggagggaaacgtctcattatcaaaacggtgattgttgaatttgatttgggttttaatttctctcattgatacttggattcaaggggtgggttttccctttttctttttgttcactgtgtgtgtttgtgtgtttggaggggcccaacatcatgtgtgaaaattctaatcaatgggggcaaaggaaagtggaaattgtcggttgttgttgtcggatgttaaattttacagctgcacttgatatgctttcatgttcatcatttgacaatttatctccacttatcttttttttattttctactcctttatctgaattcttcatcttttcccccccctgaatgtcttaactcaaatctgaagattttatttcaagatcaaattaattggatccgttgttttcccatcttgccagattgtagcttgtagggtaggttttgttttctgttgtagattcaatagatttgttacaagcttctgttttcaagtcacattttcgtgtttcagacctataatcaatagatgcaaacattcatacataagaaataatgaaaatggactgtgactaataatctgtccccatagattccttttgcagatttttgataggcaatc

SEQ ID NO: 64645 - DNA, 727 bp, Cucumis sativus
  Intron number 1 from transcript Cucsa.284210.1 (locus Cucs a.284210) derived from phytozome v7.0 (chr-ID scaffold0265 3; pos 1055539 to 1056265 reverse strand)
gcaactttggtaatcacctttagtttcttcagtatttggtgaactatcctgcagatacctcattaatgatctctaagtagccttgaaaatgaaatctagtgtttaatcaacattgtcaagaaatatgtttattagtttccttacctaaatgattgaattgaacctaggttgttgaattctgttttgaatggattatggataaatgattctgttgtagaaggaaagctatttgtgtgacttcatgattatgacatcacaagggcaccaataatagaatccttgtggagtaaaaatcaaataaatctttgtgattttggaatcagtttgatcctggtaattcctttgcatgattgttttatgaattcttcatatctttggagctaagtaaaaatgttcatgattattgtgacacaatcaaatgttgatatatgttttctttttttttaaaaaaagaaaacctgttatccttgctacctgttttcgagtggttctctggaaaaaaatgtcatttcactgccagcatgaagattagatagtgcttggttaatgtattagggtgatattcttgcaactagacacctgatttgaaattaccagctagttgcatctctttgtaccaatttatttgcattggttaaataaggctggacaatttaacttgggaggcatgggtaaaactttaactggtttccttgtcattccatttcagatccacgtttgactgact

SEQ ID NO: 64646 - DNA, 554 bp, Cucumis sativus
  Intron number 1 from transcript Cucsa.300510.2 (locus Cucs a.300510) derived from phytozome v7.0 (chr-ID scaffold0293 1; pos 16344 to 16897 reverse strand)
tggtttccgttctgttctggggatttgccaatcaggtataatttcaaaagctttatcatttgattcttattcgttttgtgatttatgatgatttggtttttgggttgttgactgctgctgatgatttcgatcttgttcgagtgtgtgttggatgttgaatattattgaatgacgactcttgtttgtttcttctggatgctagtttttgcttcggttggttcccatggcttcacatggtgtgctttgtgaaatatgttttgagtgtatgatgaggttgaggatctgtgaaatggaatgaaatggaaatgaattagttctgttgcatttgtgtttaagtgaaaaatattggttttctcccatagactaatccttgctacgagtctgctggtattcgtttagttcttgagcttatgttttgatcatgtatggataggttttatggaatctgtgtggccaaaatagcaagtttcggaggattacctcattaatttctcttctttgattgccattttcctgcagataactactgttgacgaagccaaaaagttctatcc

SEQ ID NO: 64647 - DNA, 432 bp, Cucumis sativus
  Intron number 5 from transcript Cucsa.144100.1 (locus Cucs a.144100) derived from phytozome v7.0 (chr-ID scaffold0108 0; pos 533256 to 533687)
gaagcaacttgcctcagaagaaggttttattctatttctttggaagttactgtatagatgcatatatttaaagtggaggcagaagccagaacaagaaactatacaaacttttatttagaattttcataaggttcgatttctataagggatgagtttgtatgttaaacgataccagaatttacattcgtaccattaattttgaaagagtaaaggtctgtacttaatgtatcgaactatcaagtgatgaggtggttaatttgctagatgttgaagatggcatttctatcttggtctgagaaatagggagttataatctctttttcattttgcttcctctattctgaggctatttgagttaacaaaccttttaacagctgttctcttattttaaaatttgaatcgcaatttctataggtaaaagagttcctgaag

SEQ ID NO: 64648 - DNA, 819 bp, Cucumis sativus
  Intron number 1 from transcript Cucsa.158390.1 (locus Cucs a.158390) derived from phytozome v7.0 (chr-ID scaffold0114 2; pos 512879 to 513697)
tcgtccccgagattcgccatcgccgccccgacaaggtacttatctctatgctcaaaatttctaatgctacaaaatgacaaggatgctatataaatatgtgttaaacaacgtagtagttgagacgacccagtacacctacccatactctgttctatttctctaatttcgtgtaagggtgtagcacattttaagcttttaacctagatgaaatcttggcaataagttcttcttcttcttcttcttcttcttctttcttttttttttttaagaaaactcaacttttaaaaaacttaacttgacccggatatcatgggaagaaaatactaagcaagtttttcttattttttaaaggagaatttaaagaaaaataaattagtaaaaaagaaagtaaatgttgctttaagctaaagattctcattgtcttgatggggggttcacatttgactctattatacacttaattcatgccaccaattgataatgtacggtctaaagaaacttcattggtctagtcaattaaagaatttaacaaattaacattaagctaagtaaagcaatttattaaaaaacatctttaattttcaattggatgtgccataaacatgattaaatcaaacccacttgattattcaaaataggcaaaacaaaccatacaaaagtacaaccaaatgtttgcttttttgtttaatttcatatttgactttattatatattattctttattttaattaattaggtttcttcttcttctacttattattattttcttttgtcttttcttcaggtatcagcttcaaaagtccttcaagagacttgcaa

SEQ ID NO: 64649 - DNA, 713 bp, Cucumis sativus
  Intron number 1 from transcript Cucsa.302420.2 (locus Cucs a.302420) derived from phytozome v7.0 (chr-ID scaffold0295 1; pos 607146 to 607858 reverse strand)
ataaacaaggggtagcttgaagaattgggtaattcatctttatcgttctatcagcctctaaacctcaacataatctgatttttcttttctttctttctgttttccttaattctccttgaggcttccctaaatctttgatttttgttctaattcctcatttgaatctgtatccttgaacggagggttttggtgttttgagttccttagatcttttactggcttaagaggtatggattttttcaaaccatgtttgacttccattgattcagaataatcttagatcgtttttatttggatgagaagaaaattttgggtttttacgttttctgaggttttgattttttttctcttgtcttttcgtcttccttgtttactctggtgggtagatagatagatgttcttgttttgttctgtttgatgtttctgcgaatccttgcgggttatgatactggaaatacttggtcgagttctgatttttttaaggaaattttctttctactttttgtttgatgagttttggattttgttactgtatttggattggatttttttttttggttttctgagaattttagggtttctagcaagaagatgaaaaagggaattgatcaaagatatgttcaatttgaatactgatatcgagttttgtttctttttttttgtgtttttttttctgaaactacagcgaattagaccaaacgagttggaaaaat

SEQ ID NO: 64650 - DNA, 371 bp, Cucumis sativus
  Intron number 3 from transcript Cucsa.177400.2 (locus Cucs a.177400) derived from phytozome v7.0 (chr-ID scaffold0122 5; pos 1416050 to 1416420 reverse strand)
agctgtggcacgaggattgcttgggctccctgctggttagttggagaaaactcattccacttccctgcttttgattttcattcatttaattactgtttgatgttgttcatgtaattaagtattttgaggactgaaattctgaatacgaagatcatatacctttaattttcttaagtacttcacacaatttgtatggctcatgtcaaatatggtgtcgtgagagttattggacaggaggaaagattctaaatgtagctatagactcttttctttttttgctttttcatattgatgtatagtggtttggttctttttactgagcttgtaataattggatctatctgccgtttattatgcaggtgctattatta

SEQ ID NO: 64651 - DNA, 812 bp, Cucumis sativus
  Intron number 3 from transcript Cucsa.273690.1 (locus Cucs a.273690) derived from phytozome v7.0 (chr-ID scaffold0251 1; pos 741676 to 742487 reverse strand)
caatattgtgaagatcactcctccgttatctaaatgtatgatgcctttgctgtttgtcgcataaattttataagttgtcttctttcgtatagtttctattgtgaatggtagtctagatttgacttgcaacattttactatttaaaattgttccttgcttgacctgaaggaaggtgaacttttcactgttgatttagttaatagcaatattcttcagttgatcacttgattatcgaaatgcacagcattgttcatctgatggtctccataatttttcttcagatgcagtcctttatttcgaaagttgtagtctatatttaaacttgcaacatttagttttgagagttgttcaatgcttgatccataatgttcatacagaaggcaaatgctgagcctctgaatttactagttgagatttttggaatgctgattttgattcaaatacaaggtgtcatactttattctcacatctgtctgatatgatgtgccatttttcggaccccataaagtcatcacaagacaagctgtacaagaagtatgaagtatttaatacagctcagttatgtttccatttacatgtgttttatctttgatttgatgcaaaattatacattattccccgtgcctttttagtgctcctattttaaaaaaatataaagtgtagtgtatgcacttgtgatgattcatttttgttgaataatatttggaatcttttcatttatgaattactaactttattccattttttgcttctgtgttattctgattgccttcgaagatactagagcaagattggttgctgggtcatttcaa

SEQ ID NO: 64652 - DNA, 601 bp, Cucumis sativus
  Intron number 1 from transcript Cucsa.236610.1 (locus Cucs a.236610) derived from phytozome v7.0 (chr-ID scaffold0201 8; pos 475439 to 476039 reverse strand)
tctaattcttctacttcaggtactgctcttctttttgttgcagttaagttgagtgattcaatggagtatttgaattggttgttatgtctctgaattgctttatgctaattttcaagctcataagtgaatataccataaaaatggatttagctatgtttctttaggagtggtgtttccatggccaatctgctcctttgattattgggtattccaagtgtggttcataaagtgttagagcacataattctatgtcttattcatcataacatcacttacttcttaattgatactgatattgatatttgtttgttggtatcggtgattttctagttagaagtgcagtgaaggtcttacaatgtaatcgatgtacttcaacttcttataatgtaatggatgtgattatgtttttagctttaatggtgatttaacacgaagaacaaaaagatggtctttatttattattggttgtctttttttttcttttttatgaattctctctttatgtatgttttaccaacggccaatcttctcatttgtttcatattgttttgttgtggtattgacagagatagggaaagtggaagtggaattgagttttgga

SEQ ID NO: 64653 - DNA, 764 bp, Cucumis sativus
  Intron number 1 from transcript Cucsa.258970.1 (locus Cucs a.258970) derived from phytozome v7.0 (chr-ID scaffold0222 9; pos 5685154 to 5685917 reverse strand)
gaagagaaggagagaggattgcaagaaggataacggtaaaaaaatcttttcttttcattttcctcttttgatttccctcccatggatttccctttgtttggctcgttcgtgttcatgaaaaagagaaaacctggaatcattgaagtctttaatttattgaagatatattaggtcccccctgggggggtcggggggagataatcaggaggtgaaatttcataatgatcggggggaaaaatgatgggggacctaaggttgctagttgttaatgttgttttattgaaattattagagctcacgacgttggattttacattttgacgggtgtgtggatagagaaaggctgccacagcaatgaatgatttacatcgtcaacgaatgttttttacaacttcttcattatatgattttcgcatacaatgaatctaaataatttgagttttcataatattatgtttgttttcaatatatgaaaatgaaactattgtttgcctcatagtagttgctcttgtttgctattctgttgttttgatagaactggcctgtgaccaagcaagtttcgttattgagcatgtttagctctgtagacatcagacatactattagttttatattacattgtcattaattggacgtggatattggtgaattacactgtaatttcaattattgttgtataacatggccttttatgcgtattccctgtgcacttgttttctttaatctttataataaactttgtttgcagttgttgatctaaacgg

SEQ ID NO: 64654 - DNA, 941 bp, Cucumis sativus
  Intron number 1 from transcript Cucsa.165610.1 (locus Cucs a.165610) derived from phytozome v7.0 (chr-ID scaffold0115 3; pos 945373 to 946313)
attgccttggggttttgagtaatttcctttcctatctattctctcttccttctcttctgccgctccttctgtttggctgaatcatttctttttcttttgtttctgatccatctttgatttgtgaatatcgtattcaatgctcttccttgccttgttctttactggaaatattctttttctatgtcgtcgcttgttgttttcttcactttctaatatagctgctgcatatattccttttattttaattcgttttttcttttgtttctcaacagtatttattcttctcccactttgttacttcctctttaatttctgtcctgacatggtgcgatttttctgtttgttctctgtgacattttcttttcttttctttttgcgttgaataatgggggaattgtgggttccgttggctttattttgtgtatttaatgagctattgacctaatcattctttggatgaatttaaaatttggagaagagaatatgtaattccaagtttcaaaggcctgaacgagaagctggagaattatttatttatttcttttgctataattggatgtggatgttttgtggttgattgattcttacagtttagtattttttctctccatatttaagtgctgaagttcattggttgtggtgtagagagttaagcagtagttccccaatattttgggtttctattttgagctggctagtttatggtcctggatcctgttaaaatttttacctttcttttgcctttgtaaaagcatgtgtatgtcttcatgtttctgtctgtatggctactactattttttgtaattcgggattgacgtagagcatagttagatttcagtttgttaaggaaggaggaaaataaagaagcaaaagaagcttggaaacttcatttatctgtctctcatacttttcttggggaatgaattcaggtcctgaagatt

SEQ ID NO: 64655 - DNA, 921 bp, Cucumis sativus
  Intron number 2 from transcript Cucsa.136290.3 (locus Cucs a.136290) derived from phytozome v7.0 (chr-ID scaffold0104 4; pos 944409 to 945329 reverse strand)
tgctcagtaagttacccctctctctacacattgttgtgcgtggtgttgattcttgaaatgttacatcccaacaccaatggagcccacaaagttgcattgattattatcttttttcctgtgtttctcataatctataatcctactcctaataacgtaggatttttaggatgtgaagaagtctagagagaaggtttaacacttctgtttgggagttcgtcactggacaattttgtaattataacatttatcttgttcttttggactaaaatcctttgtttggtaagtgttggattcctgtttttggggacatgttttttgtgcttcttgcacccttgcattttttcaatgaaagttcagcttcttacccaaataataataataataataataatttaccatgcatgttatttaaaagtaaggatggtgtatcttggtgtttaagagctggaggtgtctatgggtgcagtttaaatcttgctactaattatgtgttttcattttcgagcatttctcatgtctttgtaatttgagcaatagtcgcttttcatgaaaagtgttgttgccatttaaaaataaaataaaataaggatgtggacttattatggacttctgttctttataattgggtatgtatttcggaattgatacaatgtattgtttttgtgaatatctggagtcaagggttacataatctacatcctttgctgtctctatgcgcttgtgtggttttatgaactactgaagtgttgcatttcctaaaactatttttaatacgtggctttaaattttcacaatatgatgcattttactcaaggacaatttcatccctatgtacctgtagtgtacacagtattgtacctgagagctgagagttaatttgattatttaaataggtaccaagctcaacttcagaagaatttg

SEQ ID NO: 64656 - DNA, 583 bp, Cucumis sativus
  Intron number 1 from transcript Cucsa.136290.3 (locus Cucs a.136290) derived from phytozome v7.0 (chr-ID scaffold0104 4; pos 946120 to 946702 reverse strand)
atcgcgcgaccgctgcttgtttttcagatcccaaggttttattttctgtttttgttttgtttttctgggttatgttggtggtctattctctttcactcacggaaaataaaatcacgaacaattttttgttgttgttgttgatgatgatgatttcttttccaatagatgttctactaacctaaatgaaaatataatactaagaatgtatatcttacagattagagaaaaagataatgaataaaaatgaacaaaacatatcattcttatcaacaaaatagaaaattaatattaggttcgagtttgattgaactgtcgatgggtttgaaatatcatagggagacgattgcatatgaattggctggatataaataaaaaataaaacgcttatggggtagagctagaaacagattttgaccgattcaggggttccaaacagggggtacaacctcagaaatctattttaatgtagcagattctctttcttcttgcttttgggtcttcctttatcttctcaatctcttctgatttgggaaattacttttctgagaggtagggctaaggttcacattcaggaaagccaaag

SEQ ID NO: 64657 - DNA, 1025 bp, Cucumis sativus
  Intron number 1 from transcript Cucsa.273040.2 (locus Cucs a.273040) derived from phytozome v7.0 (chr-ID scaffold0251 1; pos 36631 to 37655)
aattttggcaatacttgttactgtaacagcgtcttgcaggtttcctccttctttaccggatgcatgatgcttttaccttcaattctattcttcctttttctaggatcttagttggtttcttcttagggttttgtttgttttgcgatgcatccaacgctattttaaggctagaatgccggtcgatggattggattagatttgcgagccttcgctatatgattattcatttgattgaataatcatcgtggtcttaacattcttcatcaatcaagtaattgcatttttaatttgtagtatgtattacccagggactttttaacctaatattagttgtgtagtttcttagtctgcagggtaagatttccctacccttgcaacttttccctgtggaattatctgttagttgtcttcggaatccacgctcatatttgtagtattgggatttgggggacaaatagaaacggtggtgagattttatattatgcattgattgcctcttatcttttcaaactctgtattattttatatatttcacgagtacatcttaatctcattttgttttacacatgttttaagaaatgccaactttgattatacgaatgcagattccttggtttgatgtatggtacttctccattttttttcctctaaattttatatcaaagtgtgttattcaaagtgtaattctctatgcatgtgttattcaaagtgtttacaattagatatactcaattgtgagaagatgattcatcgtttcactttaaccacaaaaggtatttatgttcatgacttttatgagtttctacagtttactgatacaacagatgtcattttagtctcttttaatatcatctttcctcgtgtttatgttggattcctaaagcatctgctcaatatccagcttgaatccttgttatcttctttgatctgtcacgtaacattctgaaattttcaattgtattatactcatcatttttctttaatattcaggcactgtatttttgtgttccttttcgtgagcaatt

SEQ ID NO: 64658 - DNA, 845 bp, Cucumis sativus
  Intron number 3 from transcript Cucsa.273040.2 (locus Cucs a.273040) derived from phytozome v7.0 (chr-ID scaffold0251 1; pos 39057 to 39901)
caccaagtatgttttgaattttgtttctgaatgtcaatgtccccgctttggttcttacattaacatggactcattttcctagttttatttttcttcgttttctcttctttacaatctaagaagcatgaacacgacaacacaccattttttaaaaatctaggttatagcgtggcaaggacatgtttattaaaatattcagttttaaaaaatatatataatttttatagtaaaagaaaattcatagtaaatgaattgtatatgcttaaaagacttagcttgatgtattctgcaatagaaaaatattattgtcatatatgtgtctttttagtctgctcaaccagtcttttatttgtctaatgcatttttgcactaataagtgtccaataggtgtccactaagtgttggagtgaaatgtcccacacgtgtcagacacagtcaagctactaaagtgtccatgcttcttagtttacaattcatatattaaaacgagaatttctacccatattaattgagttgatattgtaatgaaatagaaaaaaggtattcaaattttatctatatcgcaattgatgtgcatctttaaatggatcttcgtgctgttttgtttctggattcagtccgcatcatttgtatcttaatcatttattagtggcttgtacatttttaaccttatctcattttcattggttcagtttttgtatactgcttttctgtttcatttgggtgttcttctgtttggcttttggttttccttttatgtgctctttggatattttattcatcaatgaaataaatgtttggcaagtgcttctattttcctcttatttggcaacttctgatgtagg

SEQ ID NO: 64659 - DNA, 534 bp, Cucumis sativus
  Intron number 3 from transcript Cucsa.159830.3 (locus Cucs a.159830) derived from phytozome v7.0 (chr-ID scaffold0114 4; pos 206732 to 207265 reverse strand)
cgaaggtaagatattgctttgctttgctactggttaagtcgcataatctgttttatcctgtccctcatattcccttgagaggcacccttggctttaccctcttaaaatgttgatccaaacacatttttatcactgtggatgaagtccaaaagtcttgaatatgacgaaatgcactggcaatttcggtcctattcctatgctgggtatatgggcatcattattatttgaattggttggtttcataaaaagagcgaccaaactttgcagcccaatgaacctgcttgaaccctgcatttgtcacagtgattctagctctgtggtatctcagttgcaggaagccaaccatgtgcgaccactgtactaggatttcagtggcacggggtctgttccgcatattctcctcattgttttgaaattgatgggaattgatcttctttgatttattttacagaactttccgttgtctttttcttaaatatgttattatccatgatggatgctgtctctttatatgtagtcagggtgcaactggtg

SEQ ID NO: 64660 - DNA, 1004 bp, Cucumis sativus
  Intron number 3 from transcript Cucsa.280760.2 (locus Cucs a.280760) derived from phytozome v7.0 (chr-ID scaffold0263 3; pos 677403 to 678406 reverse strand)
ctccaacaatagtagcacttcttccaaactgggctgtgagtattttattggatatttcattggaaagtagcattaaaacctttatttttttttccaaacagatgtattgactttattgttggttgctaatactcaagcccatgttggtggtgcgtggcggacgccataatgaaatatatccatgaactagaatttcatgaatagttattgagatccacttttctgtaggactttcttctgttttcccttttcattatatttttaggagttctgactttttaatgggtctcatttcttgcaactcaacgaacacaattatttccatacaggaattacttcctggattgcactcttgacattcattttatatttactttcccacttggtgcctaatgcaccgtgtgatctttttccccaacccattgcaatttagtgtttttgtttttcttgttttcttttccaacgggcaattcagatacctttctaagagacatttgttttgcctatttaaatataaagaatgattttatccaatgtgaatcttctcccaatcctactttaactgttatatgtaccaccatgtaccatgaagttaagaaatgagcagtatgtaaagtttgcaagactgtcaattttgagataactgtgtatatccaccctctactccatgatggtacttaaaacaggacgacctgagtgggaaaccacgcttccccatgatggtttatgtacttataacagtaggaccttgtgagataaagatttacatccaaacttacactgtgggatgttatgctaacctttctattttgtaccaatgtaaacaattaaaactaattatagaattttaactttacttttaccaaaatttacttccacgtgacttttctttggcacaagttatttttatgaaattcaccatccatttcttgtttctggatcatttttccattgtctgaatgacaaaatgtgcttatctcacatgtaggtctacttcacagttt

SEQ ID NO: 64661 - DNA, 522 bp, Cucumis sativus
  Intron number 2 from transcript Cucsa.280760.2 (locus Cucs a.280760) derived from phytozome v7.0 (chr-ID scaffold0263 3; pos 678447 to 678968 reverse strand)
gtctcccttctggtcaaagtggaggtaatcttttagtcttaacattgggaaagttgttcctttttttagttcaacaataagtgtggtggaaggattccatgttctaacctctttggttgaggacacatgccttataactagttcagccaagttgaccgtttgattctttaatgtgcaaatataccatgaattggaaatatcaaattagtcacttacagttggtaacttccaatgattccgtgtataagtctgaatcaattcactatttcgttttttctgaagactgtaacacctgtttgtgattgaccgtattatttttgagaaccaaactagaaatttaatctggatcaagacgttgaagaccagtggtcaaaggatttgcgttggttttagttatgtgataagtgatattatagtttctgcatctgaaaatgaaggttgagcttgtttagggattatatttctttaatctccgctgttctctacccaggtagtatcatcatcactagcctacaaagcata

SEQ ID NO: 64662 - DNA, 499 bp, Cucumis sativus
  Intron number 3 from transcript Cucsa.161190.1 (locus Cucs a.161190) derived from phytozome v7.0 (chr-ID scaffold0114 4; pos 1135817 to 1136315)
ctatagattggataggtagataacttatacatataatctctctctccctctctccctctcgttgtgttctatcaactgttcacagtgttaacttccacgatgttaaataccactgaaccatgctttcggtaactaaggagaaaaatgacattattagaatttgagcacaagaccttctattttgatacgatgttaaaccacaacccaaaagcttaaactgatggttgcggtacagttatatgaatacttgtaacacaggtcatcaattgctttgttttttatacactcctgaccatatcgactaaatagtttatgcgtatcccattaccaccactacgtttaacgaaaattttcaggaccctgtttttctccaaactgaagaatggtgttttttctttttttcttttctcttttagcttggttgatattgaaatttagtctttttagtgaaacattctaattgtgttatggttattgtcttgtgttcttattgtaggcc

SEQ ID NO: 64663 - DNA, 286 bp, Cucumis sativus
  Intron number 1 from transcript Cucsa.252930.2 (locus Cucs a.252930) derived from phytozome v7.0 (chr-ID scaffold0222 9; pos 1728625 to 1728910 reverse strand)
gtttgtgcaagaggtaaaaccaacaatacttctttctttctttcattgttggtccttttgtgaaaatgaatgaggcttggttgatttcttcaatcacttatgtactgttccaagctcaaactgctgcaatgtggctgtcatgcgagagctgtttgtgttggatctctgtctggtttacggaggatgcaggatcagttcaagtgatttctattctgtcagttgattgattggacaatttcttattaaaatatagatggatgttcatatttaatcttttggcaggggg

SEQ ID NO: 64664 - DNA, 948 bp, Cucumis sativus
  Intron number 1 from transcript Cucsa.142010.1 (locus Cucs a.142010) derived from phytozome v7.0 (chr-ID scaffold0107 9; pos 323017 to 323964)
ccgccggagacgtacgaatcgggctttacgttcaggtgattcattctgtttttttgaatctgtttccgccttttcgtttttacttcgaaatggaactggaaatggaacagaatctttgatttatttaattgctgtcttggaggagggagtgattggattaattaaggtagttcttggtgagaatcttgctttttggtttgattcagatttattttctgctttctttttttcgagttcatcgggagataatgagtgtgttgaattaagttgcatttatgtttttccaccgctgctgaatctattaattacgttgctatggtgtaatctttgttatttttgtttctgactcaactcttcatgcccatgcccatacctattcctttttatttatttattttatttattctttttaaaaaaatgttttattttgagtcacacgaagtgttgtcttttgcaatgtttcattttggtgattgtcatgcagtgttatctttctctctaccatttagagatcttggtttatgcaaattttcatttctcaaaaactggctttattatatttttgagttgtttcaacccaaaaaacctatattcttttgggttgtgtgaacacatgattaatttgtcctcaacataaacagtcttgttaaactcagcttggccattaactaattctggagtttgtatatgatatctatcatcaatgcgttgaagcctgtggtcgttactgcaagtatgaagtttccatgatctttaaaagttggtttgaattctgcacatcgtttagatatgttctgttgggttctgaattccttggacatgaaaaattttgttttgtaaaaacagggcagtgtaaaaaacagaaagaacactgagcctggttattgttttgtcattttatttaaaactccaggtgagactgtcgctatagctgttcatccagctgaa

SEQ ID NO: 64665 - DNA, 1010 bp, Cucumis sativus
  Intron number 3 from transcript Cucsa.285940.1 (locus Cucs a.285940) derived from phytozome v7.0 (chr-ID scaffold0265 3; pos 2168273 to 2169282)
caatacaagcattaggtcagttttaaataagtgatttttgtattatttttcttttttccttgtaaatatcaaattgtgcatttcaattttcattccttctatcaaatgatgttttcctctgtatatatatgctgtatgtgcttgtgcctgcttttctcgattactagtgaaaatatgatcaagcaactatcagcaggggtttttctttagctttcattactgcagtgaattagaaacctattaatattattgatctagtctaatatcaacttgtatccccaaaactggattacatcacggaacttttgtagattctttaaatgttactttatccttagaaagcaccttattggaaaagagcgtaatgaatgggcctatctctccaatatgcttcaaaaatgtgatttttggaattaccatgattttaagatgtagaaactcgatgttatggaatccattattcaaaatcatatttttaatttcacttttgatattcattctttctcgaaccagcacataagttctttggtgtggaagattatagtgcctaagaaggctagtagttcaagtcttcatatggactttattcaataatgggcaaaatacctgcagtaaactttgaaagtgctccctgaatcctaaccctaactcgtgcaagtttgatgaaatgaatcaatttaatctctacttccatactttcagtttcattttctcaattgtctttttttgttggtatgctgctcactgtttttggcatctcttcgtgcttcaacaagtgttgcaagttggaagtctagtctttcaactccttggttgtcaacttttcaaaggtgctatggaacaagtcagatattgccatgttatgaagcatactttgaaaatgagagaagtcaaatgagttatcaagatgctttctcctctacagtgtggaagtcttgtgcctggttaaacttttcttctatcttatcttgtatttgtgatttttctttgggcttcttctttaggaaaaa

SEQ ID NO: 64666 - DNA, 417 bp, Cucumis sativus
  Intron number 1 from transcript Cucsa.304220.1 (locus Cucs a.304220) derived from phytozome v7.0 (chr-ID scaffold0295 1; pos 1916078 to 1916494)
ttgcgctgttgcttgttacagtattgcagttggaggtaaactaaatcccggaccccaactatatattaatgtttagttatgttctctttttctttttcttttcaaaaataaagataaaagattatgttttctgtttttttgtttcaaaatttctttatacagaaaaagtgaattgttgtgttttctgaaaaaagcattacttttttcttctaaatatttaatgacacttgagctctttaaaagagcagaaaggttagatatataattaaatttatttttacctatcatctttaagcttttagtcaattgattatatccttcactagtgatgatctccgtctacgaagaagacccaaataagagaaatgtcaaatatatttttttaatgcaggtggatttgcttcatatttactgggg

SEQ ID NO: 64667 - DNA, 587 bp, Cucumis sativus
  Intron number 2 from transcript Cucsa.168370.1 (locus Cucs a.168370) derived from phytozome v7.0 (chr-ID scaffold0116 0; pos 128197 to 128783 reverse strand)
gggcaaaagccaattaagggttctcctcatccaaggtataattaaatctcaaaacgtttatcatgatattgtctactttctgcatattccatgaaaaaattgttcgtactttcaaaattttcgaccgcttagccattcttaaagaggtacctgcttactatgtcatcagatgaagatgttcgtataagatataacagtttaacttgcttagttaacaataaaaagaaaaagaaaaagctccaatttgttttgtggttttttaacaactcggaaacacgaaaactttggcgatcattcaaatgtatgcctgttttgttaagattgctgatgaacttgtttgctgctaaaagatacaaacttttatgcgattcttatccattgttcttatgcattatacatatgtgatgtgagaactgaattttatatttgaaactacagaatgcaaagtgaattagtgtatattattctgctgctgccgcttcttgtataggaatcttttccattttcgtctcttcggaccaatttctatctcaaaaaactcttcatctttgaggagctttgttaaatctgtgcaggggttactacaa

SEQ ID NO: 64668 - DNA, 528 bp, Cucumis sativus
  Intron number 1 from transcript Cucsa.147610.1 (locus Cucs a.147610) derived from phytozome v7.0 (chr-ID scaffold0110 7; pos 56121 to 56648)
agtagaaagtattataattaagttgtgaattagggtgataaacaaatgtttggtcaaaactgaaatggctcaaagagatgtaaggattaacaaaaaggtgaaagcaaaggagaccacaaggctacttaagtatcattcaataaagtccttttggttttatggaacccatcaatattattggcgtgtgtacaacaccttccaataacacaacctattaaaccaatcccattgaaaagtaacacacaaagcaccaaaacagagagtggattgttgttattattattattattgtttttagcttttctttaccttcgctcttctcttacaaataccatctgctttttcatcttctctcactgccccttgacaccaaaaggggaaagcacaaaaccagagagaaagaagctatagaaggaactgaaatcaaatcacagagttaaactgatttggaaatcaaggtttgttttttatttatttatttttgaaatggcagacaataaggaagaagaaccagaaacagccccacca

SEQ ID NO: 64669 - DNA, 318 bp, Cucumis sativus
  Intron number 1 from transcript Cucsa.304190.2 (locus Cucs a.304190) derived from phytozome v7.0 (chr-ID scaffold0295 1; pos 1901525 to 1901842)
gcccctggtattggcggctttggtggtctttttcctctaggtttgtttatttttttggcgacctttttctgaatttgtaactgtggaagttgtttaatgattctgatatgtttatccatttctggtttgaactgagaagtatagtttggtgtaatggttgggactgtttcaaaatcttgattttcttatgaacttggaacttaaggggatgctgctgttgatttgttgtttttctaaatagtttgtttttctttgcctttttgtttcttttctggatgaattttgatgcaggtgattcatatcttgtcgctggcactg

SEQ ID NO: 64670 - DNA, 658 bp, Cucumis sativus
  Intron number 5 from transcript Cucsa.283260.4 (locus Cucs a.283260) derived from phytozome v7.0 (chr-ID scaffold0265 3; pos 457780 to 458437 reverse strand)
aggatataaaagtttcccgagtgggcatacgtcttgtaagatagacatttacttatgaattatgttatataactgtctgtgactgtctattttttccccctttaatcattttttatttacttctacaattgggcatggtacacggagtagaatagtagatccaatctctgtgtaaatgcaatttgcttgccgtgattagaattatcattcaaaaaggcattgatattcagtatgttgctaagggaactcatagcaatcatttatgtcttgtattttctcttggttcaaagtttcgctattgattaagattgtaatatccaagcaagagctgtctaggctttgatttttcaccgtaaattcttaatgtatgttttagtgagactacattttaggacgacatatattaatcagggacttgtagttaattggcatttataatttcttgctatttcattttcttattgatcccagccttggtcagtgattcatgttgtggattagtcaatacaaatgcttgcttgtgacgtatgcattacgttagtctttttccccctcttcagtttattctctctcacttgtgttttctttaatgcttattaacgtagaaagccgtcgatatgcagggtcttttgctggccttggatttcttgcgtggtat

SEQ ID NO: 64671 - DNA, 866 bp, Cucumis sativus
  Intron number 1 from transcript Cucsa.283260.4 (locus Cucs a.283260) derived from phytozome v7.0 (chr-ID scaffold0265 3; pos 459245 to 460110 reverse strand)
cttcttcatcttctccttcaaactggaaaccactggtaatttctctgttctcaactattcttctttctctgtctatgccgtttttactgttttctgttatctgttgcctttctctaattacactgtggactccctctttcacttctttggataaaatgcgaaatgatatgaaaatgtgaactcgctcaattacatttcagttctacttcttttcctgttctttctttttttcttcttgttacttcaccatgaaatattgtgtttcttgttccttgcatcttgttagtttctgcggcagtttgaagttgttttacttttactccattatggactggaatcaagcggtttggtatattttggccctgataacaactctaaagttgagagatgagttagggaggcttggtgttgagtttgaatggttctaggattgcggtacgtgtgcgtgtgtgtgtacgtttaaattaatacacgaatttccattagaagatttatcgtccgttactttattcgaaggacgcgtttagattttgtagtcgtcttgttcagcatgaataggttactagggttctaatgtagaatttcctttttttgtgtagcttgttctttgccatttttacatcatttgcggcctttctcttggaaaattccttgtgttgtatgactttcacggtaaatgacatggttatgactctgattgcgaccatactttttatgaagtttatttttgtgtgcctgagaagccccgtttactgtatactaatcactttaccacgtgattatttttttgtttgttgttggtgcttaaattacttcactatgtttttataatttttgtttcgtcatcttatcagatcacggacaaa

SEQ ID NO: 64672 - DNA, 712 bp, Cucumis sativus
  Intron number 2 from transcript Cucsa.166980.1 (locus Cucs a.166980) derived from phytozome v7.0 (chr-ID scaffold0115 4; pos 353039 to 353750 reverse strand)
ctgaacaatctgctgcagaattagccatagagaaggtttggttatttgcattttaacaattttcattgtatttctctattaaaaatacacttgccttcttttggtggatgatgctacggatttgttttgccatttattttttattattagaatattaaaaatggttctttttggtattcaatttaggaggcattagatgataaatctcatggtctcttaatattgatgtacatgcatttttgtttttacttccatatattccttgtgattcaagatatctgtacccctatgattgttggtgaggcgagcccaagtgcttagatttggtgagaggggagtcaagtgaaaggtctcaacatttgtcgatcaatcagaattaatagaatctttcatgttagatccaactttccccatatgagcaagtcatttaaatagaaagaaggatgaacatcttgttcagcatgataaacctcactgactcaggcttccaacttcagttttaaatataaatatttcagttcagtgtattgggttctacatcgacttgtgattaacattgtactggtctatctatcaacttcgtagtttccaggtcttggttaatgttacattttcttatatgggaagattgcatacttccgtttgactagataagataatttgatttattgcttattccattgcttacagttgggcatacatacaagaacca

SEQ ID NO: 64673 - DNA, 649 bp, Cucumis sativus
  Intron number 2 from transcript Cucsa.242570.1 (locus Cucs a.242570) derived from phytozome v7.0 (chr-ID scaffold0204 7; pos 2291241 to 2291889 reverse strand)
aagaaagcttcaaagaacacaccactcttaatcctgtaagtctaaaacacttccacaaaacttaatccaaaccataccttaaacccatattccatcgtctcttcctcctaatttctttattttactttttcacttgtctcaaaaacagacttcagaatcaaaaactaattcaattttatttcttaatcagttcggattattttgtgttaacatctaatttcccttcagcttatgattcctttctcactaggttttggttaatactcattttgttttcagttttctatttttctatttcattctttttcttagtttctcaattatgatttcatatttgaattcttttgtcaaattctaaaaaaaaaaatcaaaatttaacatgattttttagtaatatttataagattactttgtctctaaaaaaagcaaaaaaacaaaatagtcttaattggcggtggtggttttaagaatgatataaagtctatgaaataaaatattcatatattttgtactgagtgtttatatataaatggaaagaaaaaaaaaacatataaattttaaatttttgggtatggctgaataatataattttaattctttaaattaattttcagaagcagaagctagcactagcaaagcagctaaacct

SEQ ID NO: 64674 - DNA, 759 bp, Cucumis sativus
  Intron number 1 from transcript Cucsa.172980.1 (locus Cucs a.172980) derived from phytozome v7.0 (chr-ID scaffold0120 1; pos 173197 to 173955)
gcagcaacaagaatagaacaaaatccactggcaggtaacagtaacaccataactatcaatcaattgcttctttgattcactctaccttttaacttgagatatgaatgtgcatgtttgatcttctgtgttgatatgaaaaacagagaaaatcaccaccgaatagatctatttctattttgggtcattctccgggctgtctgtagtatcgtaagaatttactgagttgaacataaatgggtttctactgaaatgaagaacttgcaaattcagtatctctaccattttgggtagtagaattcctcaagctgttttatgcactagtaattctaagaacttgctgagttaaattgaataacatgaatgaattttctctgaaaggaagaacagccaaattcaccattaaataaggcatcagtttgggtagtataatttttcgagctgtttaagaattttgggaagaataggaatgggtttcctctgaaatgaagaacacacaaatctctccattaaaagggaatcatcgcttctctgcaccattttaagtagtgaaagattctcaagctccccatcctctaggaacataggaaaatctgatgagttgatgatgaatgattttctctctgaaatggacacacaatctcacaattcaatagaattatctctactatgcattgttctgggtcttgaattttctttaagaaactgctataaactgggttgatcttcattcttatgaatcaatttaatacaggcgtgcga

SEQ ID NO: 64675 - DNA, 748 bp, Cucumis sativus
  Intron number 1 from transcript Cucsa.165230.5 (locus Cucs a.165230) derived from phytozome v7.0 (chr-ID scaffold0115 3; pos 578150 to 578897 reverse strand)
ggtttgattgaatcattaggatccttcttctacaggtgagtttttatttttcctgctcagagattttctcggagttttggattttatattttgggtcgtgttcttcgggttgtttggttctcgcaaaatatgggaatctgtctggattttgcttcttcttcttttttttttttaaatgggttttgggttgcttgtggtgtatttctgtcggaattttgaacaatcgggtctcttcagaaattgtctcgagttcgtaagctatggttttgggtttaagatcggatccagttgaattgtttgaaattggtttggtttcggttgatccgatcttctctgtttggtttatatgcttcttgaagcaagtaacttatgaattggggtttttgatttggaggttttggaattgggttttttttcggaattctgaatttttagtgggttttccatttctccaatctctagttgaaattttgatttccatttcaagtttatttgaatgttttctttcatttctaaatctggggttttttgttttttgttcttgctgacgttgtgaattttgggaagtcttcctttgcttagatggggtttaacaagggatcattgctttcacattgctgttgtaatgctaattgtggtagcctttttgttgtattcgtgttcgtgtttggctgtatagagtttcaaatttgaatgaatctgttgttttgatgattggcagtgaaactggcgaatctctctgcgtttg

SEQ ID NO: 64676 - DNA, 308 bp, Cucumis sativus
  Intron number 1 from transcript Cucsa.202310.2 (locus Cucs a.202310) derived from phytozome v7.0 (chr-ID scaffold0137 6; pos 381489 to 381796)
acccaattccccattctcccaatcctcatccccatgtaagaaaccttttcctccttttccctattttaattatttacttttcattttctttattaatcctttttttttcttctttctccattcgcatttccttcacctcttttcctctgatctttgatttttggtttattggtgttccagttactgtgctaattgactcattcatgcctgctaaatctttctctacttcacaattccattgctttctcgttttccttaaacattttcttatcttttctttttgtttgctgtttgctagaccaggttca

SEQ ID NO: 64677 - DNA, 755 bp, Cucumis sativus
  Intron number 1 from transcript Cucsa.236100.1 (locus Cucs a.236100) derived from phytozome v7.0 (chr-ID scaffold0201 4; pos 87090 to 87844 reverse strand)
ttcaagccatatccacttctttgtttgcttttactgtaagtaatttactctatttctttcaattcttcttcttcttcttcttcttcttcttctttcttttcttttctttcttttctttcttttctttctaattgtcaaattgggtttttcttgatgtttcttggccctcaggctgatggctcggatttggttttgataattctgattgggatttttagttagtttcttaatattcaattctcaaagtgatttgtgtttcgtttcctaaattttctactcatgggctggtgttgtgttggccgggtggagtttttttcttttgcatttgggttttttcttcggtttctttggaatttgatcaccttcaaattcctattcttcttggtgaagaatggtaattgaggatctacttgttgatttttgtttgctgagtttgttttatcttaacctgggtttgaagataagttctgtctctgttcttggctacttcttgttatttggtactcgagatcattctactagatgggtgtcagatttcttctaatgggttgtttggattgccggtgttaaaacatttttaacagttgttttctgcatgcaatcttttagaggttgattaaactgtttatcgtgatcattgattgatatacaattacttaaatgtggtttccgaatctcaaggaaatattgtattgacagtatggtattattttgccttagactgctgtcggagaggctgttctcgagtgaaatta

SEQ ID NO: 64678 - DNA, 866 bp, Cucumis sativus
  Intron number 1 from transcript Cucsa.280970.1 (locus Cucs a.280970) derived from phytozome v7.0 (chr-ID scaffold0263 3; pos 902211 to 903076 reverse strand)
gtgctgaaagttgtgttgggttggtaataattccgcttggcattttcgtgtgtgtttagtgtattgctttaactatcactataattgatatttgaaaagtaagaagggaggactttgagggttttgtcatcaatcaaggggttgaaaaaaccaggagctgttctctatcatttctggctgttcttcattgaaagagttgttagtgtagttttacttggctcttcttttaattagaaaattgtaaaagcacatgggtttcattttttcttttcgttttgatacctagaatctatgctctgaagggatgctttttcatctcaactttgcatctttttctctttctacttattccaaatcttacctcgcaatgaaatgtaagctgcttgtaaaatggttttactatttgagcagtagaagaaggcagagcataaggaggtagtcgggttttggcttttgcctgttgttgtcttaggttcataaaagttgaaatcatattgtagagatttgagttttatggtttggaccgtataagccgttcttgtcaactggaaagatgataattgggtttttctttgctcgtttgtttagtattgaaatcgtagactctcttctaccctgtagatttctggattcatccttgtttggtatatgctgtccttttcagatttcatcatcaggagatgaaattctcatttgaaatgattcgcccattcaattctatcttttgctttcttttgaaaattgatacatttgctctttttactatggattttcagttttttttcatgcaggcagtcattctctggctaactctgttctttttattcattgataggttggcttcacctgaatctagcttttgagct

SEQ ID NO: 64679 - DNA, 467 bp, Cucumis sativus
  Intron number 1 from transcript Cucsa.144440.2 (locus Cucs a.144440) derived from phytozome v7.0 (chr-ID scaffold0108 0; pos 894534 to 895000)
agcaaattaagtgagttttcttgttttctttttttctttttcccttgatttggtctgttctcgggaggaattttgtttgtggattttttcttggacatctgtttttgagttatgttattgtgaatccttttaagtttgtgttctgttatgggaaggattatttttctgttagttatctgattttcttaattatgtgatggattgctttcatttcttgctgatttgaggtttagtgttttttatctttggtttgaatatgaatctttatcaggaaatttctttttttctcttttaacgtacatattttgtttggagtttccttgttggtatttttatatgcatatgattctttgcatggaatttatttgttaccttacaatgaaacatgcatatttgatttgatattacatttatggttatatatatgaaaactaacgagattggatttgataacagtgttgaataca

SEQ ID NO: 64680 - DNA, 532 bp, Cucumis sativus
  Intron number 1 from transcript Cucsa.178310.1 (locus Cucs a.178310) derived from phytozome v7.0 (chr-ID scaffold0122 7; pos 473561 to 474092)
ttacctattacacttaccatctactaggtaatctccaaattactttttcttttgacaaattacaaaatacaccaatgtctaagtaaattataaccccaaatttttcgatggcaaaaattaataattcaaattttacttccaacctatcatagttgattaagttatactcaaatcatactcatactatctgtataatattaatcaaaagaaagctttatgtttaaatatactaatctccatagaatagaacaatgatcaaggttacatctaatcctatgcttcccttcttctacaaaaaaaaaaagtatacctattttttataattattttttaaatgaataataaattttcttgtttcaatcattaggaagaagcctgtgtttatcttttatttttcgatagaatatatgtgtatatatagtaaaaactttagtaaacaattgaaattggaaatgagttgtttcaatattataatgaggaacaatgatctgatctctccatatatatatctgtttaaaaggtggaaagaaga

SEQ ID NO: 64681 - DNA, 254 bp, Cucumis sativus
  Intron number 2 from transcript Cucsa.272290.1 (locus Cucs a.272290) derived from phytozome v7.0 (chr-ID scaffold0250 0; pos 920279 to 920532 reverse strand)
tctttgacgccgtggctgctcagcttacccccaaggtttttctttttattgtttgaaattgtacatgatttgatgacaaagggatcaatgtattcgaggaagttggtatagttcgaagaaatgtatatgttgaataatctatctcagttttgagtaatcataaacaacccatattcattttgcttcttactaacagaatagaaacattttctttcatagcaggcagtagcatcaactcctgttagaggagaaac

SEQ ID NO: 64682 - DNA, 1029 bp, Cucumis sativus
  Intron number 2 from transcript Cucsa.154990.1 (locus Cucs a.154990) derived from phytozome v7.0 (chr-ID scaffold0113 5; pos 18304 to 19332)
ctcgatctttggcctctaaatcctccatctttcaggttggttttaaactctaaattttcataggtttaaatcaattcaactttctctaaaattatttttcaaaactgaaatttctggtgaatgagcaggaaaatatagaaaaagataagaggaagagaagtaaatgaaaatggttcaaatttttagtaaaaggttgctgccatctatattttaatttatacaagcaacaatgatccgatccctttcattttaatatatgaacatacccatgtgatgtgattccattaacaattttttagttcaaattctgccatgtgatttctttaataattttagattgaaatcttatgattccatggaggattttaaattgaaattctacaattgtaattccattcatgatttaaaattaagattttatatgattccattaacgtttttaaattgaaattgtgtttgtatgtgtgcacgtgtgtgcttgtatatgtgtatatatatcaagttaactttagtgatagaataatagtttcttagttttgacataagcttccctaagtttgagattctattacttttgcaaaagctcttccagctatgttcgagatctcctcaaacacacttactttagctcctctcaagtataaagtcttgtcatctctatgatataacaactcacatcaaaggagtgagagtgtaatgttagcttaggcttcactaagtaatggtgtgaactgtagtgaatcgcaattcacagtgtaaacacttcaccttagtctaaatgagtattgccaaacatatcccgataacaacaccaacacaaagtttgtaggattacataatgcggaccttggcgaccccctacttcgtatagaaatatatcaataataataagctctaaaaacattaaccctaaaactatgcaataacacatcatgtggatggatattttcatccttttcaacaacccaaaaacaaataaataggaattagtattgagtgcttacccttattcaagcagagaagatctac

SEQ ID NO: 64683 - DNA, 429 bp, Cucumis sativus
  Intron number 2 from transcript Cucsa.303060.1 (locus Cucs a.303060) derived from phytozome v7.0 (chr-ID scaffold0295 1; pos 1076065 to 1076493 reverse strand)
ttattcacgtcggagctggagaagtatgctactcctatgtgcttttaattttttaaacaaccaattttaagtgaaatatgagttcggtgatagcctttacttgaacagttattttatacacatgatcttgtggattaatcaatctggttggcaaggcatagtttcattgtacttttgagtcccttgaaatatggagccttgaagatggctgaaaatggttactcttccatgttaaagtaaaccttatttttgttttcttggtttcttgaggttgtgatatttaaaggagggaacactacgaatgaaagcttgagttgctttctctctttccccctcctccactctagaaaaagaaaggaaactaaagtatttgaacctaaacctttgttttcaggacattgtagcaaaagtattgtcattcgcacaaca

SEQ ID NO: 64684 - DNA, 615 bp, Cucumis sativus
  Intron number 1 from transcript Cucsa.149330.1 (locus Cucs a.149330) derived from phytozome v7.0 (chr-ID scaffold0111 0; pos 160956 to 161570 reverse strand)
gagcgttacgttttcaagcgccgcaacggtactttcttaatactccttttaacttttagatcttcacatttgattttcattctgctctccacgttttcaacctttgcggtgttttttcatgcactggaactttcagtactaatgtgcactcgttgttgttctctacttgctttttctcaatgaccttaatatttggatatcaatttctcatgtccagagcggtcatagtttcatcagtgtatgtatttattttgttaatttcatggtagtatctgcaattcagcgtcggtttctgactgttgttatgtgattgaatatctttagtttttattgtatttgccaatgagacactgtttaataatcttagattattcaaccatgggttttacacgaacgtatgatgttatttttatttcatcccaaaatgttggttcatatgtttatagatttgaatcacatactccagactctgttgtttgaatacacgattcttaatttgtggaatgttgagtcattttagactcaaagaggattgatattttcgcattggatatgaatgaacttttttgctaatttcttttcgttaggaatctacattattaacctgggtaagac

SEQ ID NO: 64685 - DNA, 717 bp, Cucumis sativus
  Intron number 1 from transcript Cucsa.255400.1 (locus Cucs a.255400) derived from phytozome v7.0 (chr-ID scaffold0222 9; pos 3419310 to 3420026)
cggatcctcgtcgattttctccatctctgtctaaggtacctttctcgattccaacctctgtgaaatctgcaaaattgttgcgcgattatgtttcaaacggaggtgctattagtaatggactgtttaggttaaccctcgataaccgctttgattcctgaattaggtgaaaacgggggaaattggatatgtgttgtaggttggttcatctcatcttagtttacaatttcactggaatgcattatttaccattcacctactacattttgtgttcctacttgaaagaaagacaatgcaaaggcggtgtagaggacctctttacatctactattcgtattccattttccattcataaaacggcggtatctatttgttctctattgtatgaatatctcgttctgccccctgtgtattcgattatatttttctttccggtcctttctgggaggattggtgtagtcaagtgagcttctaaggttagtttattcatattaaatcagttattaagccatcatcatctgcaagaaatgtttttgggttttacttattttttcctatttaggaatctatctctttcaccttgtatgagttttattggaagattaaatttttatgtctttagctaaattcgttttcctacatcactgaccttcgtcttatcttcttctttggttaccgttctcagtaacttcggcgttcctctgaaatattcgttctgct

SEQ ID NO: 64686 - DNA, 228 bp, Cucumis sativus
  Intron number 2 from transcript Cucsa.255400.1 (locus Cucs a.255400) derived from phytozome v7.0 (chr-ID scaffold0222 9; pos 3420040 to 3420267)
gctactgcatcaggtatatctcaaatgcaataattttaccaaaaaaaaaaagaagaaaaagaagtctccgtggaattataaacacaacctaaatctaagtgtgatggtggttaccctgttaggttagaaccggagaagtctctctcttcatcggaagacattgttttgatttactcttttgttggtgtcgcagttgctttcaaatctagggaggatcatcgcaaacaa

SEQ ID NO: 64687 - DNA, 880 bp, Cucumis sativus
  Intron number 2 from transcript Cucsa.213350.1 (locus Cucs a.213350) derived from phytozome v7.0 (chr-ID scaffold0154 3; pos 1122790 to 1123669)
aaaatgtaagggactttgcccttgtagatttactaaaactgttgtttctgttaaatcattgcgaattttgatttactctgtttgtgtttgtgatttctattttgatgagtaaattggtggctgggggtaatgatgatagacttttatgaaattgacaaataaagatagctagaaaacgtaaatgatcggcacggatttacttagttcactggcatcgttttagctacgtttacaagtagagggaacgataggtttggtttattttttgagagaactattagataatacccattgtaaatgtgccagatttaaagagttcatatatagtgcatccctctagccaaatcgtaaataacataaatctagatacaaattaggtttggtcattttgttagatgattgattcaaggcataccaacatcctagaaggttcattttcattgaattcaattttgatgttggaattccaacaacattactgacgaaccaacccacttattgatgaaccaacccaatatcatatggaatacattacttttggtgtcttggttcatcaataagtgggttggactttgtcagtacttagccgcagcaatggtcgggtgatttggccatatactagttgaataacagctgtagtagcatgtggtcttaattattttgttgctgatggaaagtttatgggattttgactttgttaccttataataattggatgatgaattggaattgctttgtacaatggttatcttgctttctctgtactttctgattgtatatttaaaatattggagaaagattcttaattttgtcctttagggtgagaagaacaatcttatatagattgtgattcattgaatgtaggtaataggcataagag

SEQ ID NO: 64688 - DNA, 644 bp, Cucumis sativus
  Intron number 1 from transcript Cucsa.303240.2 (locus Cucs a.303240) derived from phytozome v7.0 (chr-ID scaffold0295 1; pos 1207862 to 1208505)
ccaaaaagcctggctgtgagaacgacttcattctggtaatatacccaatttttgcagcagaaatttgttttcatttatttgatttaattattggattttgctttgactatcattagaatttcgatcacgtttccccatttgttctcccttttggctaaagtttcatttctttgattttctaactgcattggtggggatgtggatgtatatctgttcatgttctatttggacttttatttggtcatctcgaggttttcttcatcattcattctggttagtttgcattgctttaaatgaattagtcttagtttgtgtactttacaatgggagatactcttcctggaaaagatgcaaaggatgctttgaagatgatttgtcattatttgttattgagccacactactgtgtacttattgttcttcaaacttctatttctatgtgcacataatgttattaatctgtgattaattcttgctgctgttctcgttgagcgttcagaacccaatgccaggtgcaggttgatgttgtatagaacttatttatcaagactgtatgctaatttatttgaatgggcctaactgttttcaattaatgtggcttattttgtgttcgcgtttgttaggttaaagttcaaacttggattg

SEQ ID NO: 64689 - DNA, 856 bp, Cucumis sativus
  Intron number 1 from transcript Cucsa.251290.1 (locus Cucs a.251290) derived from phytozome v7.0 (chr-ID scaffold0222 9; pos 420828 to 421683 reverse strand)
aggtatgttatatgatatcataaatcaaatgcaacaatcaaaacgaaagctacacatttttcttcgataatcaatatctatatgattgagttgtttcttggaaataatgcatctatgaataattatatgaatgtttggaagataaattttgtgctggtgagttcgaattccaattgttttctcttattcttcatcttattgagtcattgaccacatattctattgacatcaatatcaatattttttttctttaacttgcaagctttcacttagctcaacctttataatcatgctttaatgtttcttacaagatgcaataaagcaaatagttttctgggcttacgtgtttgtgtgacaagctatatataaaagtaggtaactataatggatagccaaatataacaaaatctaaatctactgccgatagtctatctgtgatagattaataaaatttgacaaattttgctatatttgcaaattttttaaaatgttgttatatacttaattattttgaatctaattgctaaatttgtactacgttaagaaagaaacatgcgttacgtggaaatacaaaaataagacccctaaacacaagaaatttagcattttagtttagtaaatttgatttttttgtagtgaatatagatggaaaaattctaattgttactacttttataaaaaaaaggtaatgaaatgccctaaggcccaaggtttgcgccttgaggcttcacacaaggcacgtgtctgaggtctgccttattttgtgagtcttgccttttgaaggcaaggtgccagacccgtaccttccagttcaggctattacctttggatcttgttttcattaattaggtggccc

SEQ ID NO: 64690 - DNA, 747 bp, Cucumis sativus
  Intron number 1 from transcript Cucsa.288620.1 (locus Cucs a.288620) derived from phytozome v7.0 (chr-ID scaffold0269 8; pos 183839 to 184585)
ctctacccctccaggtataccccaaaactttttaatctcagtcttcatttctgtttcttttgtttgattgtgattgtggggatggttttgaaactgaaaactcaatggatttcatgttacatgattataaaatacgaaacctaaaagagaatatacaaccccaatgaattcaagtttcatctttaacacaattttacttaccttagtgctgagttgggaataattgtgttgccaataattgtctcacaggatacaatagattagttttcctatgaaagcagtacaattgtccacaagatccgaccatcttcacttttgtagagtaaaccaaacttcaacaaatttttaaatggaaggcaagttttattagaaaagtgttgacatatttatagactaagagtgtatttggtttaacttttcaagtattaattttaaaaacatatcatttttagaagaattgaagttgttgaccatcactcaacatagctctttaaacactctcaaagtgtaatcttaaatagtttttacttttttttccctaatcaatccgaacatatcataatttgtggttatttgagtagtcgtatctctttttcaaatttgttaaaaaattgaaaaggtgtatcctttgaagagttacatacccatttatttcaacatttcacctgttgttgcatacatgccctttcattgaactttgagagaaattatttgtgtaatgttggttgtaatataggagggtgttga

SEQ ID NO: 64691 - DNA, 1016 bp, Cucumis sativus
  Intron number 1 from transcript Cucsa.238190.1 (locus Cucs a.238190) derived from phytozome v7.0 (chr-ID scaffold0202 3; pos 841883 to 842898 reverse strand)
ctttcacaatacaggcttttcaatttttactgacggtaccttcttcacaaccctaaatttctccttttctttttttttacctctcgtacaatatgcttcttctcattccttatttggtctattacaaccttggctcaacttagctagaatgtattcgaattaggaatatttcaagcgttttttcaatgccccgtctgataattgagtctgaatttgtttttttttaaaaaaatatatataatttgattaatctttcgaaattttagaatttgaagagttgcttggtgctttaaatcgatttttgctcactttagtaactgggtttgcctcaaattggatgcttgagtttttttcccctatttaaatgccatgctgtaaagaggtgtatgtgcattgttatttatggaagttcaaatatatgctgccaagttttcagttttcgttatcatcatctgcatccaattgtaccatttttcagtgatttgatgttgttgatataatactttgaagcttgagtaataatttgtgataaagaaagttggaaaaaagtgctgaccacaggtaaattaaaggaggagttcaaatcctcaccccacattttgtggactataaggaataattaacttcaacttgataatactgtttttagttttaacatgacttggatatgtattttcagaatttttagacaccagccctttggattagtttctaaccctacaacgttatctaatgaatacaccagttgatggataatatccaaagttggggatcttggggaattttgaaacttgttttataagatgtgaggttgttttgaaagtttcggattctgaaagtgccataagtcagatagatattttttggattctttatagttttattttcttgtaaaattaatatttatgtaagttaattaagttcctggtctacttttacctgaagtgttcttggtgttgttatggcattaacatgtcccattgccactttttattgataggtgatttctacctggt

SEQ ID NO: 64692 - DNA, 849 bp, Cucumis sativus
  Intron number 2 from transcript Cucsa.271350.2 (locus Cucs a.271350) derived from phytozome v7.0 (chr-ID scaffold0250 0; pos 257124 to 257972)
ttcgacagcgtaaaaggaagtcacctttcctgtcagtaagagcttcatacatttaacttttcttctaattcttcttcttctgagctgaatcaagatatatttcattatcttttggttattcacatttcacaacagcatcacaagatattgacctgctcatgagctagagtggaattatttcggtttacagtgtaagagcaattaatctatcctgctgttctatatgatttgaggaggaaatagtagctagatctcgagcttaatgaagagttatttcatttttcaattagaacggcggtactattgtatgattttatgctgaatgtagaattgtttctttacctcttgccagtcagtttattccataccgctaaccagtaatttattgtggttcttgattttaaaaggtttgtttcgctctataaatttgtggatcctgtaatttttaggttgaacttggaaaatttgttcacccatagtttctcttcatttttgaaattctgattctattcagctttttgatgcttaacgtctgattatttccgtttgtttctcaataatcttttttggcggttaaaatgcattcaaacacaatagtgaccaaggttattcagtctttgtttcacggttgagattagaaagttctcttagaatatgtaatggtgacggggatgaaatatctcaatgtaccaagtatatctccttgcagcacaaagataaccaatgaataaagtggaatttaatctactattttcttccatattctttctggataataagagtactaatttgttattgttcggtggtgattttatccaagattttgtgagttttctgcaggcgaatcca

SEQ ID NO: 64693 - DNA, 696 bp, Cucumis sativus
  Intron number 1 from transcript Cucsa.219750.1 (locus Cucs a.219750) derived from phytozome v7.0 (chr-ID scaffold0165 8; pos 1394038 to 1394733 reverse strand)
gcttaatcacagcaacgcccgtcagtgcgaggttcatttttatttcttttctttatgcctgtttcttgttcagttacttctttgattcagtaacgtttcttggctgagttttgggaaccttttgaattatctatgggagaaacttttgggttatcttgtttatgaagcgattattggggttggcagtgaccagttactaaatgaaattggggaagatttagacctgtgaaaattcaacttgaatccctttagaaaattatttgattgtgggtgaaagagtaatttgtgaactgttgcaattctaagacacttcgttcatcttgtgtagggtgggtatatattttttacttctccctgaaaaatttatacccctttttatggttgttcattttcttgggaaaatgtgcttaatagttagtgttcccttcgctaaaactctaagaaaaaaaatacatttggaactttaattggtgtttgctgagaagtatgatattaaattttaaatctaatggtgtaagaaacccgggttcgttgaagaggtcagcttatttttataggttattaattttttcttttgcgtattttgtatgtgtttcagaactgctgttttcggtttaaatatttcaagaataaattttatatctgcctttctcatgccaatttacatctattttcatgcgtcgcaggtttgcaaac

SEQ ID NO: 64694 - DNA, 819 bp, Cucumis sativus
  Intron number 1 from transcript Cucsa.193300.1 (locus Cucs a.193300) derived from phytozome v7.0 (chr-ID scaffold0133 5; pos 270517 to 271335 reverse strand)
tactacttggctcagttacaagagcttctcaaaaggtaagactaatccatcaacttaattaattttcttccaaataaaatgaaaattttcatatgcatttcaacattttcattaaactctataaaagttcagtcctaatcttaaatatactttttaataatcaatattttgtcgattatcataaaactaagatctttctatattttaaaaaaatgtatttgtgaagggaaactattcctcagatttatattttttttgccaccccatctcttccttccaatcattttgtgccacgtagccaaatttgtttgcttgattatgaagttattttgtttcttgcgaatacaacaaactattaatagttttaaaatcttgattctcatttttttccttatactatattttagttttgattctcaaattgtttttattttaatctattcagcttgttcatcgtatttttatttaattcatgtaaccacaaagtaaatgtaattttttcaaatctagaatttgttgggtacacataaatttaaaaacaagttatatatcgaatagaaattgaatagtcatgttttcaaatgtgttttgtagcaatttagacattgaattttagttttaacagtggtttaaatttcgtttaacaaagaatattcataaaccataaaattagttctaattattaatatatgagcatgttttaggttagaatttttatataattatattggagaattatggtaaatgtggtaaattcaagcattgtttattcatccttatttcatttaacaatttgattttgtggatcccattttagat

SEQ ID NO: 64695 - DNA, 791 bp, Cucumis sativus
  Intron number 2 from transcript Cucsa.176320.2 (locus Cucs a.176320) derived from phytozome v7.0 (chr-ID scaffold0122 5; pos 623043 to 623833 reverse strand)
gctctcgaggctgatattcagttcgccaataccttgtaatttctccatatgctgttcaactttcttataatttcatatctactctggtctctggactgtgtttgaattgctattgcaatgtcggcgtttccattgtctggaaattatacgctatgttcgttaaattttcatgattcgaactgaatcgagtttcaatattttgtttcttgtgatatatgctttctccatgcttagattagaatggtattcgtgctggtttcgctgcgcgtggagtttgaagttcagggaagtttctatgaaagtggtttgatgggttatgatttctgagagagccgcgagttttaggttttgtatcacatcatctgtacattcttgaacacttagtagattagatatttagtcatctcgatcttatttctggaattgttctccgcctgctcatatatgttattttctgcttaagatttatgaaaacggtttatttaagatttgttatcaacttctgtgtttcttattttctagatgttaagtgtgtttgaatgtatattttcttccttttgtgtgggttatcttgtatgcttaggtggtttgtgaactgtcacattctccagatagtagtgttgtaagatatctcggcttctcaggattgtataactacagaattttactgcaacaaatcatttctcttgtttttagtgtgcaatagttccggcgagccttgtttaatttataagcattgaaatataatgctttaatactgaacagggcttctgattatccgaaggaatacg

SEQ ID NO: 64696 - DNA, 547 bp, Cucumis sativus
  Intron number 2 from transcript Cucsa.161350.1 (locus Cucs a.161350) derived from phytozome v7.0 (chr-ID scaffold0114 4; pos 1256568 to 1257114)
atcgtggctggctccatcttcagctgtttggtaatctcttttattgtgtgttattccaatatgattaccctaatcttacaatgatttctctattttctacgacggggagaagattttatatgcacagaagaaaaggttgttatttatttctcgagacaagcaattcagactctgatttaagaattgttcatatattataacccccatgagatcacaatcaaagatcaaagatgtatagatggaaaacaatagtacattgttttgttttgggtgaaattcactcaaagaacacgtatttaatcatccaaaattgatttcacatctaattttaaactttaatgcaattttcatatgataaaatctggttttgaatgaataaaagcattttctacagtgatttttaaaaatgataaaaagtcattttaattgtgtgaatgagaaaggaacgcaaaagatttatttttttttctttttcattttggtgttggtttggcaatgctacaacgtttagttgtttttgttttgtttcttgcttttgtaacagggg

SEQ ID NO: 64697 - DNA, 633 bp, Cucumis sativus
  Intron number 2 from transcript Cucsa.286170.1 (locus Cucs a.286170) derived from phytozome v7.0 (chr-ID scaffold0265 3; pos 2302459 to 2303091 reverse strand)
ggtcagttcttttaccatctattttgttttacataatctttttattgaacacaatcttaatgctcactagtagatctgatgtagttatttattctatatgttgggcgatttactaataacggaggaaacattgagaaacaaatacataaacaatcatgtcgaggcttgagttcttgagtacatcgctctcctcaagaaatcctctatcctgttcaactcaataactcaattaaaacattttatgattcaaatcattcaataccactgtacaccctcttttggtctatttgcacttcaaagttcaaagaagatcaatatgggaaggtagaaagaggagaatgaaatttttgcttattgaaagtgtttggtgtggacatattcatcgggacatttagattgagtgtatttattacataaagtcttaatactttctcagttaaatgaagaggtattttttttattttaacgtaacgatattacactatattgggttacttgtgcattcgactaaaagtaacgagaagtagataagccacacatagaaaaaagggaaattttcccatttactgattttatattgttatttatgttctttcagcttcatttgggtgtcaatagtggttcaacgaggtt

SEQ ID NO: 64698 - DNA, 816 bp, Cucumis sativus
  Intron number 1 from transcript Cucsa.286170.1 (locus Cucs a.286170) derived from phytozome v7.0 (chr-ID scaffold0265 3; pos 2303382 to 2304197 reverse strand)
tacataagattccgttgcagactccggcgttccaggtgagttcctagtcttttaccggaatcgcctttttctgttagtttctttctttttttgtgtgtgtctgtgttcaatttgtctctgcttttaaggggtttctgtaatttggtcaacttctcagctcaggccatgttgcgggttgttgtttttttttttggtttagttcaaggtgttcattgaacggcttgtttattgttatcttctccggatcgtttcgtatcaatttggagttggatttttgtattttagattaaatagtttaaaggtttctgttcccagcgatgttgtaaatgattgtgttttggttgacaagatctgttatagtgatgtaaaagaattgttgaattttgatttgagtttcttttaatgtcaggagattgattgttgtttcatgcaaagttctgggttgactttaggtcaacgtttttgtgctttcccaagagcttgatctgattgtttctagttgaatttattgagatgtgagtgttaatatcgaggagaaaacaattgctctttattacattagagcaagtgtttatatgttatataaatataggcatgttgacaaggatgtctcttaaaagctttggtttggatcattggctttatgaaaattaatttgatattctcaatatatctcgacattagcacttttcatcttactgccacttaataagttcacaaatctaatgaactcttggaaagggagaagagactgattctaattcttgggttggtctttcaggggaggacttggtagcaaaagaaagttgttgacaa

SEQ ID NO: 64699 - DNA, 812 bp, Cucumis sativus
  Intron number 3 from transcript Cucsa.300690.1 (locus Cucs a.300690) derived from phytozome v7.0 (chr-ID scaffold0293 1; pos 237988 to 238799 reverse strand)
aagtatgtgaacctcatccttttcaattcatatactaatagattatcataagtattggttggttgtattattttggttcttgtactctctcatgtgatgatttgtaggcagaagttagttcccttatttagaaatttggttattagtgagatgcagaagttagttctccagtgctcgtatactagtagtttatgatatgcattgtattggtttgtttaaattttaaatcataattatagattttccttattgtacattcttatgtgatgatttctatgcagaagttagttctctaatgttagaagtttagttgttgatgagacataggaatgagtttatacttggacatatatttgagtttggattatagagtggtttatctaatgtaccttattcacttggcctaacctcaaatacacaagttggcaattgatgagattttaaatgataatttgaatgccaagaatttaggctctatttcataactatttattttttactttttgttttttcaaagatttaagtaaataaatactacttccacgaagattgaaacttcatggcacttttataaaaagaacattcaaccatttgcaactaacatgtttaggtactgcggattttaccatagaaaccaattatagttaactcaagtcagtttacagaaaatcagtgaggtgttcaactgacaattgattcgggaaccaaaatttccacttcgatcctgttttttgctaacacaacgctactctactccttgatgtaatgcttgtgcaggttcttccatctctgggaatatcccaaagccaact

SEQ ID NO: 64700 - DNA, 494 bp, Cucumis sativus
  Intron number 4 from transcript Cucsa.280250.2 (locus Cucs a.280250) derived from phytozome v7.0 (chr-ID scaffold0263 3; pos 166004 to 166497 reverse strand)
aggtagttatcaatttatttgctacttttccactctgtgctgaatgacgttcctaaattaattcagttatgtctgggaatatcttccatctttttaatacatttgtttcttttaggggaaaaagaaaaatacgaaaacaaaaaaactaacaatgcctgtaaagagtggctttcttttttgtttatttgataggaattttaataaatattcaattgcctagaagttggttgtattctttttggtgatcataagctgtactctccttgagaaggattttagaactaaagaattgcattcccacgttttctgtacttcctgcttcaatgcatttggtttctcaaaaaagtgcatgaatagttgggatgcactagaagagtattggctcatctagaggacatcaaattattcctttgatctaaattactgcattatttgttatactttatttattatggggaagaaaacctttgcaggattttgggattaaatacaac

SEQ ID NO: 64701 - DNA, 947 bp, Cucumis sativus
  Intron number 1 from transcript Cucsa.233830.1 (locus Cucs a.233830) derived from phytozome v7.0 (chr-ID scaffold0199 8; pos 27402 to 28348 reverse strand)
gttttcacccaaaatcaggtgctcttttctctgcattgctgatccatcctttatttttcgcattcctcttcatcttttctgtttcttttctaatttttttaatacccttttgctttagagttcgatttctgtttccttttgtttttttttttctttttcttttttctgggaactgtttcgatgaagaaatgttaataggtttttgtgtttggtttctaattaggattgcgttttcctagctttggaattctgttgtttatttggagttgggaactacgaatgttgatttgaagcttggtttttgtgtgtactatatgtgctttgaaatcttgtgtttatcttcgattattgatcattttgggaaagtttttaattatttgtttctttgcgaataatttgtgcgttgtttttggaaacctaaaaccgtccgggtacttagggatttcttcagaaatttgattttcattggaatttaacaaaacttttttgtggaatgtatttaatacttcttttgagtttgattgcagttcttatttaaacttctgttctggttaatcttcataaaaatctatttttgttaaattcttaggcttctatttctggatttactgctaccaattatatgatatttgtggtttaaaatataagttttatgtggtactacatcagatttttgttgaatgtatgattgggatatgttgggcaaagacgaaaataagatttttttatgtgaagttggagttttataagttgaaatgttggaaaatgtaaaatcagatatgtatgaatgttgaagaccaaaataagattcgaaaacttacttttgaattgttttgatttttaaagaccaaagtaaacttcccttcgtttttgttcttgatatttctcatgttaatccttgctgctccaagaagattgtaatttctaatttttttggcagttacttg

SEQ ID NO: 64702 - DNA, 849 bp, Cucumis sativus
  Intron number 1 from transcript Cucsa.167140.1 (locus Cucs a.167140) derived from phytozome v7.0 (chr-ID scaffold0115 4; pos 517974 to 518822 reverse strand)
ttcgcctgacttctctcacctctcgccgtcttccggttacttttcgttctctctctctttctctctgaatccgtacacttgcttgtattcttttacttgattttgttttttcatgtttgaaactgttgagttaatgtgtaatggcgatggcgatgacgatgacgatggtgattgcggttttttgttttgttttgttttgttttgttttaatttgaacggaacagtgatagtgtgcgtttaattgtttcattgtttttttttttttgcgtctttctggctgattttaattttggaaagtatacgtatcttcattgaacaatatttgtatcggttttggtgtttcaggtgatgcggttttttaggtataaatttgattttgattaggttacgatcttgttttggttcctgaatgttcgtcgatttcgattctctgcctaatgtaaatgaatctgtatcggttctctgttcgttttggatcatgtgcttttatgaatcggcgttttcgaaattataggaatggtttccaagtagtaaaactcaaatggattgatattggaattcggaattggagtttacacttcacaggaactaaaattgattcgtgtacttctttttcttttcaatattttgatcgttttttaaaagacaaaatatgccgcaaattaacaggtccaaaaatgagatatagtcttcaatcattatttattattggtagactagtttattttcttggaaatcatcaaacacatgaaaagacggaacgaaaatcaagattacttgtttctcactcgatttgggggaatttcagtttcttacattttttttattctgattcagtgtgaagtcgga

SEQ ID NO: 64703 - DNA, 494 bp, Cucumis sativus
  Intron number 1 from transcript Cucsa.231840.5 (locus Cucs a.231840) derived from phytozome v7.0 (chr-ID scaffold0198 9; pos 46947 to 47440)
agtaaagtggtatgattttcgcactctccctttctacttccgttcgatacattttcgtatgtgatttcggtggaattttggatttgatgcttaggtatattggaacatctttcatatcttaacaatttctgttgcatttttggttattgttagagtttcttctgttcggtaatttgggaaaactcgcgattgattcgtcgttaggggtttattatatctatgtttgattgtgtctagttattcgtttaagttcttcaagtttgactagttacatattccatttggagtgttgaaattgctaataggacgaataatcgaatgttttgatttatcgttctcttcaatttttctctgttactcgtttcgtgtctttttagaacaagtctttggaatacttcaccttgttatagatagtttcagctctgttgttcctgatgtttctagaattttgtttggtagattgtggtggattttactgcttcttggtgtccacc

SEQ ID NO: 64704 - DNA, 414 bp, Cucumis sativus
  Intron number 1 from transcript Cucsa.204830.1 (locus Cucs a.204830) derived from phytozome v7.0 (chr-ID scaffold0141 6; pos 9322 to 9735)
ctttagaagaccccttctctctggtttatttaattgtaagattcaccgctgttttcatacttgggtttgaactctctgttttctgctgaattgatctgctgctttgtttctacattactttcttctcatttgatttaattctgtgacgttttcttctttttttttttctttttttttttattattaagagtagtttcttgttttcttgtctctgttttttagatacattggctctgagttttcgtaattgtaattatttgagtttagttcttgtgtggcagttttgtttctgttttatacattacgtagtatggaattttccttgtcatttataccttcgcttgaaatctgatgttttgcattggtttcctttatccagagcctgaagaattgtgttttgattggaactattag

SEQ ID NO: 64705 - DNA, 290 bp, Cucumis sativus
  Intron number 1 from transcript Cucsa.167590.1 (locus Cucs a.167590) derived from phytozome v7.0 (chr-ID scaffold0115 4; pos 979902 to 980191)
ccgccaaattccctcctccaaatttcactctataggtattaatttctttcaatgttccagcacactggaatttctcccaaataagattatctgatagcttttagaaactcttcatttgattcttcatgagagaactgagtttgcagagaggctgagaacttgaaactttaaaaatatttgattacagactgtatgttttttgttatgcatctatattttatttggttgctgtttttctgtttttcctccaatttttgacagaagctggtatacttgattctttacgaagg

SEQ ID NO: 64706 - DNA, 763 bp, Cucumis sativus
  Intron number 2 from transcript Cucsa.219080.1 (locus Cucs a.219080) derived from phytozome v7.0 (chr-ID scaffold0165 8; pos 948189 to 948951)
aaccaaaagaaagaagttggattcgtcgaaggctggtaagtcgtctctgtttctgttttaacgtacgtcaactcttacgtagtggatttcgcggcggcgaagtacggatacggtgaggaaatgaggtgattggatggatttggtctaggaatttttgttttgttgttgaggaatgtggaagcgatcgaaatcggtaatgggctgacacagggtggaaagttcttttctcacatgaacattaccgcaatttttgggtcttctttccaccttttcttctttttctataaaatatacttttcttattcaaaacattatttttaaaatactaaaatcatcccaaatatttttctataaaacgtaaatattcgtttattgtttatattatattcacgtaggtataaaaaatatcattgaaaaataaattatatcgatggaaatttagtttcatttattactctattttacgtttctagccaatagtttctaggaattgatgtattttgtacctaaagttctaatttcataacaattttaatagttagttaggatgttgcattggagaataataacttgaaagggtaaaaaaactatttttccaaaaacaaaattaggtatgatcacaaatttcactttccctcccaattttgataattactacatagtttgatattatattatgatgatgatgatgatgatgatgataaagaagatctgaatttgggtttgtaaattttgcagtttggctgcgctttgttgctgcttt

SEQ ID NO: 64707 - DNA, 935 bp, Cucumis sativus
  Intron number 2 from transcript Cucsa.302970.1 (locus Cucs a.302970) derived from phytozome v7.0 (chr-ID scaffold0295 1; pos 1014517 to 1015451)
gatattgtgttcccggattggtccttctgggggtaacttctcttttcttctcattttttttttaataatttaaatttcattcaaatatcatttagtttttaaagttaaaaatataataaaaatcaacgctagtaaatattaggttaaaaaaatgataaggaatataattggagatttgaaaaagtactgtggcgaaaataatattttaattcttggaatttttaaagaccttataatttcaatttagtggggcacacgtgttaaaataatattggagaagaaggaaacacacttagttggcggtaggaccggtttgttgacgtgaggttttattgccagatggcaagaggagaccacctagattttgccacgttcgacagctggcgttatttatacctaatggtttgtttttcctttttaattcaaacctgtccgggtagatcgccgtgttccattcatttctttataatttattttataaagacaaaaactatattatttttctgccttcctttacttcgggaaaataaatttgtttatttccaaaaaaaaaaaaaaatagattgcatgacatggcatgaaacatgttgtcttattattatttttttacatgtttgtattttttcaatatatatatatataattatcatcctaaactaattgttatatcaaattagacattgaatttttataaatgtaaggatttaaactcccgcttgaatgcgtttgtgaaaatactaaatctaatttgatatagttattagcttggggtttaaattgatataatctaaaaaataaattcatgttttgtcgattaatatatatatatctttaaaagttgtttcaataaaaaaatgttgttattgtttaattaattaaatttggaaatgttgggtaattaaataaaatattagggcagagataaacataaggcc

SEQ ID NO: 64708 - DNA, 821 bp, Cucumis sativus
  Intron number 2 from transcript Cucsa.150000.1 (locus Cucs a.150000) derived from phytozome v7.0 (chr-ID scaffold0111 0; pos 971116 to 971936 reverse strand)
gacaacaaaagtttggatcaagctcataggtaacagtaagttaccttcaaattgtacaaaagatattgtttatagaaaaaaaaatacttctatgcaagtcttacatttaaatttttaaattttaatcttttcattgtaatttcttttcatgtacatcttattctattactttttgaattttcgtacttttaaatttagcacaaccaaacataagacgtagtgcaatgtttactataatttgtattatacgtgtctcttactattatgaaaagtgtagaattagttaactcaacctaatggattaatgtttttatatcaatattaatgatttgttttagatccatggtgtagtaatgaattaagaaaaaaaatcatcacaagtttatttggaataaataatattaatgattaattgaggaaatatattgggttgaattgatgtgtttttagatctgacttctctaccacccaaattgattttcttagaaagaacccaccccataataaatagtcaattctaaaattaacaatttactaaaggtacgcattttgactcaaatttaattttgaaaaggcttataaataaggagatcagaacacacacaaaaaaaaacaacacatcatccacaaatcatctaaaaaattattgtaaagaaaagaaaagaagaagagaaattttcttgaaaagaaataagatgaggtcgtggatgatatgtgtggttttcattagcatggtggtgatgttccaaaatgttgaagcagacagaaaatatcttaaatttgtagattgtaatcaaccgaagccacctccattttgcgga

SEQ ID NO: 64709 - DNA, 1036 bp, Cucumis sativus
  Intron number 3 from transcript Cucsa.172200.2 (locus Cucs a.172200) derived from phytozome v7.0 (chr-ID scaffold0119 6; pos 115513 to 116548 reverse strand)
caacaaaggatattttcaaagaggaaggtttaccggttggttgtttatgcttgatcttatatgtattctgcaatcgacatgttatgttggaaatatgaagtttaggaaagattgccgttacacgagtttgcctatttacattatgttactcttattaatgcaagaaagattgtatgcaattggaaagatatgcgaggatttttttgtgggtagagatacttgaggaaattaagttgtttacttgataactgatagtggaggaatagggattgggaataaggaagaggagaggtgatgtatttgctgatcaaatcgtcttgaaagctctttgatgaaaccaatgtggaactaggtaattgcaaatatggtgattggatgaaaattggtttacaaaataaagattgactggtagctaatgcagaaaaaatccacacaaaacaaggatttttcagaagattatccagtgtacctttcaaagacatgtaatgctctaagtttgattataaatctggagggaaaaaaagcttgccaaacctgtacatctgcaagtttctgagcttaaaaggcttgattctaaccactgcttacttcattcttggttttcttgagacctaatttctttgttaaatcacactaacactgtgtcatacttgattgagtaaggcttttattttgcattcattgcctttaatgtttcaaatccctatggcttgttcctgttcagttgtatctgtgtgcttcctacagctctattcttttgacattagaagttaacactgtgcatgtattttgtgactaaagtaaccgatataatttagtataatttctgaatggtttgaccattccccctttcctcgaatttgatgaatcctggaaaacgtagcatggaatacttttgtttacttggactgtttccacttctattcaacattcttctggatatactgcggtgtcatatatatcccagattttttttttttgtattttttccttctttaatttaagagttatctattgcagggtttttggcgtggga

SEQ ID NO: 64710 - DNA, 829 bp, Cucumis sativus
  Intron number 1 from transcript Cucsa.306790.1 (locus Cucs a.306790) derived from phytozome v7.0 (chr-ID scaffold0297 7; pos 213032 to 213860)
gttacagattgttcgaattttccgatccatttgaggtattgcttgtgtagtgtacgtattcgattcgcttgttgatttttctgaagattttttctgttcaccatggatgcagttcgaaaccctaaatcgtctctgatgacctaaaaatggagtggagattgttagaatatttgttttcgattgtctgcttgtgatttgaatttaaggaattttaacgtaatttggttaattagttgttcatgtaaggttttgctgagtgatcgttcttcggatttaatttagggttaaacgatttgaattagctgggaattctcagtcgtctggtagtagtgaatttctagtccaaagtttgattacatcctctattttagtttgtgagctataagtttatttggggtagggtttgattgaattgatggaattaggttttgtttctcatttttgtgctacaggattttggataaatagggatgcctgcaaagctgtatatgagtaatcatgagttatgtcgtaatggtcgtagttatacttttccattttattccatttgatgatttatgaattgctggacacaagaaaccactcgttatgttttacttttacttcgtaattgtttggagtatgtgaagcccagtggtaagctctaccattgttaacattttctggtgtttctcctgatgttgtacatgattaaattggataaagacaatctgttttaaagtgctactctttctcgtatgatttatagctttttaaaaaattctgtaagaagatcttggatttctcttttgactttgaaaggatcacccatttttgcagttgttagctg

SEQ ID NO: 64711 - DNA, 629 bp, Cucumis sativus
  Intron number 1 from transcript Cucsa.258050.5 (locus Cucs a.258050) derived from phytozome v7.0 (chr-ID scaffold0222 9; pos 5153186 to 5153814 reverse strand)
cttttcttaggggacactttcggtttttggtggaagtaagtactcgaaaatctctctctttgttctattttttcacttttcattcttcttatcaccactcattagcttctccttttaatttcatgaaatgggtatgtgttagtgatttcatttggaagtttttcttgagaaaaaatgggaaattttgagtgattccctcgtttctttcattttttatgttttccccattttcttgaatcttctgaggtgtttttaagttgtttgcatttttgtgaattggggtttttgaatggattctgttccatggttctttaatgaggttttaatattctcctttgattgttcatcttttgaggaagttttggttttgcattgcgattgaagtttttcgtttcgaggggttaactccagcgccataattgtaagtttcattgttttttgtattgaaaattttgtatgctctttttttcatactcgccgattgttcattggaattgtgttcgagcccttttggtttgtgggttacgagaattttgaatttgtatcagtgtgtgattgggaaattataagttatgattttcccctcttttcaactcaggtctaaattttggaagctaccggattttctt

SEQ ID NO: 64712 - DNA, 970 bp, Cucumis sativus
  Intron number 2 from transcript Cucsa.163570.2 (locus Cucs a.163570) derived from phytozome v7.0 (chr-ID scaffold0114 6; pos 37893 to 38862)
attggagcgttttgattgtgcacctgaggatagtggtaatgcataatgcccagttgaaacccaattattcttcaaaagtagtaatttaaaccatgcaagtcttatttcaagtcctttaaatcatacaagatttggccagaaaaaaatgatttgattttttgtttgggcaacgtgtcttggacacttggacccctgttgaacacatgtcaaatacttattaacacaatagagatgtgctagaccctagtttttcaacgtcaatgtgggttcaacagctgttagaggtgtgttgaacatttattaagcaaactaaatggatacacaataataataatattggacaaaagcaatcaatttcaagaagggaatacataaaactcattcttttaggatataagtttatatacatattgactttgaattttcttcttgtataaaagtgaagaatatatttatatatattttttaaaatgtatattttaataattgtttcttataaaaaatgtatattttgataaacgtgtcatacccgtggaccatgcccatatcctagatttaagaaaaaaaggatgtgcaacattatgtatttgtatctgagtttcttaaatacactcactagtctgatatatttatgatatttatttcttttaagaaagaaacatttcatttaataaatgaaatagaggagagaccccataattcaatgaaatagaggggaggccccatagcacctatagcctataggtgatttgcaaaagagattttcaattggaagatatattcataatagctgttattctctataaatactaaaaacaatggttatctgtgatatctgctgctagaatgtattcaatgaaatattattgagagtaggaccataacttcttgttttatggcatctttaaatttgttttcatctctaaaattggaaatgtcctgcttgtagaagaagaagacatccaattcc

SEQ ID NO: 64713 - DNA, 754 bp, Cucumis sativus
  Intron number 1 from transcript Cucsa.161610.1 (locus Cucs a.161610) derived from phytozome v7.0 (chr-ID scaffold0114 4; pos 1476829 to 1477582 reverse strand)
cgttgtcctcggcgccgattctcgtaccagcactggtaatttcatcgcgttcactttttggccctaatttcttagtatgcttatcatttttcatacgaatattatcttcaagagatgttcgaaatgattaaatgcaagtggagtaaaaaataggtagaatttgcttctatgtggaccttggatgtagatcattctgtatccttcacatttggaattaagtttagctttgttgttttgagtctctacatgtaggtgtagtcatttaaagatttcatttctcgtgttgtttactagttttcgttccccagcatatagcgagagtattaagtgaatttcgtcgttggtcggatcctcttcatgtaaatctccagcattttttagaacattaaacgactgaaatttaggcgggtattttgaatcctagcctgcttaaaatgacgagatttagtatatactaattgtgtgttacagtgacaggttttgaaaatttaagtaatgtagtggcggggatgaacgagctatattccatgaaaaattatgtactggaggaaaaagtaacttgttaaaacagctaccacattatattaattagtttttgttttgaaaatcggggttttttttaaactgaactcccaagctatcttaaatggaaaaataaatctcagttggtttgtttgtatcagtctttttcctatacaccttgtgctgaattgatgttgacatttttctttcattgttcttgtgataggtgttt

SEQ ID NO: 64714 - DNA, 1055 bp, Cucumis sativus
  Intron number 3 from transcript Cucsa.197520.1 (locus Cucs a.197520) derived from phytozome v7.0 (chr-ID scaffold0135 7; pos 895014 to 896068)
ctatcttcttgataagtgctgcaatagaatccttggtgagttagtttccaccaaagttgttctttccttatataatatgatttgcacgtgggttgctcggttatgttcaatgtatggtctttcatgataatgaaagaatatattcaagagatcaattcatccaaaagtgtaagatagttgttgaagataaatttaaatatatatcacgaacaatcttctcacttgtgggcttgaaatatttgaaaggtccaataagtagaaatcaattttaattggagaggaaaccacctgctctgataccatattaaaccactaattcactcaaaagtttaggctagtagttgaagataaatttaaatatatttcaccaacctagatgagtacatatttaatatacaagaattgaaccgaaggttttatgttcaaactattataatatacgttgaaattactcaaatttgttatttgacactttgaaactttggttatacttatatttatgttatttacgttatgattttattatagatctaagacctaagagggatccactatatataaattactcttgaactttactcgtgcctttgaactataccttttattctctctaataataaactactctctctgccatatgagagttaatatgtgtcaattttgtatgttttctttgattggatgatatcataggaatatcatattgaagtgcttaccaaattaagagtaatggaccctaatggtaatttctagatcttttagtggagcattttccatcgggaacagttgacatttgatacgaagcttgtgactcatttaaatgcttttggtcccacatctgttagtgtacagtattttgtgtttttgatggggtttccattttgggaaaaaaaaatgtgtataaggtgttctaatcaagtttgaaggctcataactattccatcaacccaaaagcttaaatttatggattaccgtaaattgagttatatcattattttatcataaacaaacatgtcgtggggtgcagggtctggtaattctgacgcttcaagctg

SEQ ID NO: 64715 - DNA, 854 bp, Cucumis sativus
  Intron number 1 from transcript Cucsa.201780.1 (locus Cucs a.201780) derived from phytozome v7.0 (chr-ID scaffold0137 6; pos 51617 to 52470)
attttcctcttagagcagtctgagttgttttgaaggtatgtgttctttttgtttttccttgaatgattctgtaaatatgtagagtaattttttaaacaaatctaacctggttttgtatatgcattcttgatcttgatgcaaataaaacactgatctagatgagatcgtgaataaaatagcaaacaaagtcgtgttggatctcaaaacattccatgacacagtccctacactcaaaactatgatttgaactctatgatccaagtgtttataagtatggtatcttttgttggtcttttttgtttaagattagaagctttttatttcgccattgagcaaagaacatcttttaggtaaccctttgttgtcaataatattagattggtacatggccaatttgtgggacattggaacctgtggtaggaatttagtactaaagtatctaagttggatctcataagagacttgtatttattggtcccatctgatttaatgattttaatcttgctaattttgagaactatacttgttttagatactcacaggattcaccaattcttagaaataaagacagttttcaaacatactctttattgttttttgaaattgtgcaactgtgatacagttttgttagcaagtacaaattgtttcattctgtttaatttgataaagagttttttgcttggaagaattaaattttctgtttagtctcccttttcatttttaacaaaataaaaaataataataaaaaaaaataaatcaaaccatggtttatggtcttcaatctttatatttttttacaagttttaattcctgaaatcgttatgtctatgctttctaggtgttggcacttcatc

SEQ ID NO: 64716 - DNA, 923 bp, Cucumis sativus
  Intron number 1 from transcript Cucsa.213810.1 (locus Cucs a.213810) derived from phytozome v7.0 (chr-ID scaffold0154 3; pos 1736645 to 1737567)
tgttctattggtttcaaaatcataaagctagacaaaggcagaagcaaaaacaacaacatcatcatcatcattttaattcctctttccctttttttaattcacttccttcacttcaatcacaacaactctcctttccctcctcctcctcctcctcccaataatggttcgtctaaacctcatctccctcatacatactatactatactaatacttctgttgagttatgttcgttttcagatcttttattaccttacgttcatggagtatctttttcttttattctcttttgatttgacccaaaaaagaaaaaaagttcaaatcgtgctacttttcttttctttcaatgtcaagatatatcttttcatactgatcaaaacatctcaaaatccattttttccgtttgatctctttcaaactatcatatgtgatattgattgattaggttgttaagaaattaaattcacatctaatcccattaggataaattttgttgggtttaattctaatttcaacttgtgtttttcgtttgataaatattttgtttatgaaaattttaagtttgtttattcatttaattcttagtgaaatttcaaacacaatacaaaatagttaatactgttttaaaatttgaaatattaaatttttcaaaacatgtgttggattagaaagttatatcctaagcttaatattcaaaatctaaaattgaaagacatttctatgtttgagtattgtaatgttatttgttgataatcacttaacgttaaaaactctacttatcgataatcttagagcttcttcttttgttgtgtacaattgtaatgaaattatttttgactaatatgaaaatttcttgttttgtttattgttattctgatcagtggtttgcagcccatactacgtacatcaaaacgacgtcggattat

SEQ ID NO: 64717 - DNA, 386 bp, Cucumis sativus
  Intron number 1 from transcript Cucsa.283390.2 (locus Cucs a.283390) derived from phytozome v7.0 (chr-ID scaffold0265 3; pos 536578 to 536963)
ctgtttataagcaccactgtaaagctgaggacgaggttatctgttttttcttttccttttctgttttcctcctttttagtaaatcaatgcatgtatcactgcctgccagccctgatgagaaaagggcttcttagtttttaggtgaaaccaattctgatcgtgatgatcagccaacttcataaatttatagagtttttggtgtaacaggtgaaaaatgagggattaaaactatgcataattttgcagtttcacagtataagagctagaatttcgatttatatgcaatctttcggtatgaaatactttgaggggtgggacgtggggaaacctcaaatgcgtttgaaattgtaggtcatcttcccggctctagatctgcgagtgaaaaa

SEQ ID NO: 64718 - DNA, 499 bp, Cucumis sativus
  Intron number 2 from transcript Cucsa.283390.2 (locus Cucs a.283390) derived from phytozome v7.0 (chr-ID scaffold0265 3; pos 537121 to 537619)
tttaaggaagaggaacaggtaattgttttgacctgactacgatagcttaaaatcatcttagttctaggtcttttgattattggatgatatgatagtctttatctatttgctggaaggataaacgaacaagaattttggaaggaagggctaaaacttcttcggtcattctcccttccaaatgtttctgaataatccagtgtgtaatatttacgttagtgagaatcttccctgcctaacgatacgattatatggtgaaagccaaatagaagaggtaagtattactacgatccaatataaataattttagtatataagaagataaaaatctcgatagcagggaatggttaacgtcatattagcatctgtgtacagacgactattacattgcttgacatgtctgaaatttaaatcggtattcaattgagtatcccagctgaaaagatagcttctttgcaaatttgcaggtgttccctttacttactaagaagttttcttttga

SEQ ID NO: 64719 - DNA, 582 bp, Cucumis sativus
  Intron number 3 from transcript Cucsa.149190.3 (locus Cucs a.149190) derived from phytozome v7.0 (chr-ID scaffold0111 0; pos 39333 to 39914 reverse strand)
tgctcgtcctgctcccagcgacattcttgagtggcgtaagtttgttcctattgatattgttttggtgttagtgatggagcttctcattttctgcgtgtaattttgtatataggagaactcacaatggttttttgaagttgacgtcagtcctatgttattattttattttatttgttgattataggagacttcagtttagcttttaattgatccagactgtaaaatgacgtattattattatgatgtgtggaaagattgaaagagaactactagattgttgtgacgttgaatactggttagattgtgataattcttggctgactggaaaacttgaggtctacaatctatttgtcattgagcattgcatgcggttttagtaatatgttggcgctgagagtttttgaagcattgctttcctgatctacggcataattaaattcttattttcagcatttttttttctctcaaattccaacttatgatttgattctctctctctctctctctgcatgaaatatgtgtttttttgcttatcatattgacattatagtttgcatattaaacgttgttccatttcagatt

SEQ ID NO: 64720 - DNA, 698 bp, Cucumis sativus
  Intron number 1 from transcript Cucsa.232940.2 (locus Cucs a.232940) derived from phytozome v7.0 (chr-ID scaffold0198 9; pos 690655 to 691352)
tgagtgtttcatattagccatgttttctcgggaaattgacttccattacaatcactgactggttattatgctttgaatttgattgtgtgttttaggtcatggatgaatatgatgaacaatctgaggttgctgaacggctaaggatcaaggtaagcttgttttctcttcttgattgccaagttgggtttgtgttgaattagactgaagttttgacaaactgttcttggtctcttcggaaactttctgtttgctttgagatattaaaatcttcttattctaattattgtaaggtccgattttaattttaatttttaatttttaatgatttcagtaatttttattattattagatttttgctgcattaaaaaacataactaatataatatttattgttgtttcaaacatcatcaagaaagtattaagaaatggttaaattacaaattttgtcatttgaagaaaattagtatttagtttgaaaagttatgtttagtccttaacaatacctcatgaatattcattataatttgatttagaggtagaaaaccattaaaattagtgtttgtttgtgattgagttaattaagttcctaaaatgttaatgtttatgataaacaagttttgtttttgtattttagttcactaatgttgaaatttgatgatggcattgcagactgtgccactgttccacttctacaaag

SEQ ID NO: 64721 - DNA, 514 bp, Cucumis sativus
  Intron number 2 from transcript Cucsa.286610.1 (locus Cucs a.286610) derived from phytozome v7.0 (chr-ID scaffold0265 3; pos 2632994 to 2633507)
aaaaggaaagcttcgaagataattcgcaagtcgaagtacgtatagtgcctgtatcaactctgatattttgatgcctattgagactagcactgagagtgaacatgattatctagtaataagtatgccttttctggcatagaagatgggtatttggtcaacttggatcctccaactaacaatgtgatgaaactttaaaaataatctaacttattatcttcatcaaaatggctacaactgtctttatgttttctagcaatatttccatgtttgagtttttatgttctttatacttcttgttttccgtcttctttaacagaactcaagtggtacactttgctttctaattccttttcttcttttgtgcttataaagattagttattgtatatactttgttaattccaatttctccttaacgcttataatttttgcaatcagtttatatgttctgggtacttatttcaaatttaaaaattacaggaggaagaaaaataaatcttcccctactgaagaat

SEQ ID NO: 64722 - DNA, 803 bp, Cucumis sativus
  Intron number 1 from transcript Cucsa.219240.1 (locus Cucs a.219240) derived from phytozome v7.0 (chr-ID scaffold0165 8; pos 1098240 to 1099042)
cttccttctgtgtttgcttcaaggttagtggttccttttctgtttccttccatttgtattggttgcaattttgtagctcgaatcggtagtagtggttcaaaatagcaatctttcgggaggttgaaggtttaaatcaccacttttacataatcgaaggtagcttaaataggtcggacggataacaatatacactttagtaataagtcgacgttgatacaactcattgccataaaagaggatgattgcaaaagattgttagtgtgaaagtagattcagttaaactataagactcatagtggtatttttagcttccaagatgggttcgtatggctcaaagtttataagatacatttttgttaatcccatatactaattcaaggtcaaattcaaatttggtatgtatggttcggtaaaagttagacttgattccctggtatatctttagaattctgtccctattgttcgataaaaaccttcacaaataatcccttaagtgaggacataaaatgattttatcgaactatagggactacttaagaggttttatcgagactaaattctagcttttgaaatcatagggattaaactctaacttaattcaaagttaggtacctttctagtacctatgtcatcttcaactcccagatctatacaaactcaaacttttcggtctcagacttaaaccctaaaccaagcgcttcctaaactcttccagcattttgacccatttgatttactggctcattgtggatgcaaaagttgatcttatcgaactaccgttccttcactttgcagatccaaat

SEQ ID NO: 64723 - DNA, 403 bp, Cucumis sativus
  Intron number 1 from transcript Cucsa.170000.1 (locus Cucs a.170000) derived from phytozome v7.0 (chr-ID scaffold0117 4; pos 270749 to 271151 reverse strand)
cttttccttcgttctcccttctgctatccccaaaggtatctctctttctgctaattcctacttcttgttcttaattgattctgttatttacaacctaacctactttcataacattaagagcctcattactggctgggtgttacagtgtaggtgtgaaatgggtgaagtataatattcttgttgcaagtgtagttcgagatatcacttatgagtagaatgtggaagatgcccatcattggaatgatcttttaatttattatatgtactctaattgtagcgtttggttttattcaaagcaatctacaacttttgcctttgttttttgctgcagttttgacttttgttaaggaattttctctgtttctcagggttactgcagttcatccggaagtataaattctgc

SEQ ID NO: 64724 - DNA, 705 bp, Cucumis sativus
  Intron number 2 from transcript Cucsa.192330.1 (locus Cucs a.192330) derived from phytozome v7.0 (chr-ID scaffold0133 3; pos 207787 to 208491)
ttgttgggttgttctctattgtgcctcttagaaaggttggtaatgcaaacaattaaaaccccatttttaaaatgtattgtttggttttagttgctctttttattctattttaatgcatgtttttgaattgtttattctattttaaagcatgtttgggaatgattttgaaatgtttactctattttaatggatgtttgggaatgattttgaaatgtttatttcattttaaccatgtttttgaattattttgaaaatttattttatgttaatgaatgtttgggagtgattttaaaaaaaatcacttttacatgttgaagtcaatttgaaatatgcatttaatcacacaaagtcaagtaaatccttattttttttcacttttaaattcaattttcatacattttgaatgattaaaaagcatgtttcagagtggttttaaaaacttagttgttgattcaatttagacatgtaattttgtttatttaaagccacagatttaacgtagtagatgaaatattgggctctcaaatgagttcgagttctagtttaaatgattaatggtagtggtagatattcctttaatctgaagacaaaacatatcattagaacaaaaggaaacgagtacgaaatgatgggacccaaataaaatctatatcttattgtttatcatcattcaatctaatttctgaattgaattcttttcaatag

SEQ ID NO: 64725 - DNA, 875 bp, Cucumis sativus
  Intron number 2 from transcript Cucsa.240270.1 (locus Cucs a.240270) derived from phytozome v7.0 (chr-ID scaffold0204 7; pos 238347 to 239221)
aagcaaagggatcccaatttggtcctgcacagagcgtacgacgataatttttcacagagagaaagaaaagagagagagttttgattctgaatcaatcaaccccatctccctctttctttctctcttcatttccgtcttcatactttcaagaatttgtttctaatttcttcaaatccacccaagttccggttccatcccttcccctccccttctttttttttttatgcttcattcactgatccaagattattgattttgtgtttgatgaatcttatcttgattgcccacttgcatcttatgtgttcaactcccttttcctgagatccttattgcttcggttcttatttttattattattttcatctttttatgcatttttatgcttcttttgatccaaccagttaattattgattgaatgattatgtaaacgtatacacgatgtattggggaacagatgtggttggggaatatgaggagatttctctagacaagtttggggtctcattggattttattttattacagccaattgttggtggtatggtgtaatattcacgttctttctttctttctttttttaatgtgttttcaatggtaacaggagacgcgttttcactatcctgctgtgttataacttgattgttttgtttggtaaagttgaggttaattttgttaagtctttactgtttttggtactcaagtttactggtttttgaactggaaataaaaggagggaaaataaacgtttttatcatctttagtggtgtaatttgattgggattagtcattagttcctcaaaaggttttttttgcaatgtttgaacgtggtctgttgctaatttgatatcttctttttacagcaacctgtagaacg

SEQ ID NO: 64726 - DNA, 791 bp, Cucumis sativus
  Intron number 1 from transcript Cucsa.253250.2 (locus Cucs a.253250) derived from phytozome v7.0 (chr-ID scaffold0222 9; pos 1921137 to 1921927)
cccaaccaccccgaatctactcttcttcaattcgagtaagatccgcctgcttacggccttttctcaaatctgaatacccataccatttttagctaaccttcatttccctgttcggaatgtttttaagtcgtttagtttaggctctaatctttggaacttttttatatgtagctccggactgataatttgcgtttcacttgattgatgatgtcgttggactagagtgaaaaagtgtagtaatgtctcctaatttgggttgaaatttggggtcattacaaaaagaaattcataatatatgtggagggggaagtggcagcaaccattgaagaaaggtgtattgtttctgaattagaattagatactctacagataagaatccttttcacgctgattgcgatatgatactgttcgtgtcaaagccttttgttcagttttgttctgttttcttgttttaatattggggtttatcaggtttctttagaatcaaattttatcaggtttaggatttttctttgattttagaggtaattacggccatagagattcttttagctaaagggtttttttgggattttcatatgatctttgttccctaagcagttcctgctactaattagcgtttagttttaatgaattttaggtttgatgttacttgactttccgttagtaatgatgataacatgagtagaataagaagattagtacgttgatattagccaagtagtttaataagttgacacgaacttaattaggttccacatgtgtaaatgtagattcccaggagtagagaa

SEQ ID NO: 64727 - DNA, 482 bp, Cucumis sativus
  Intron number 2 from transcript Cucsa.143490.3 (locus Cucs a.143490) derived from phytozome v7.0 (chr-ID scaffold0107 9; pos 1865657 to 1866138 reverse strand)
ttacatagacgagggatctgtttggattgactacggtgagaaatgttttaaaaaaaacgattgtatttagaactcattttatagagacagtttaaaataaacttttaaattgtttcaaaattaagcacttgaaaaattaaaccaaatatatctaaaatatagtggtaaattgtatgtacaactgtcagcaaatatgtggtaaattgaaaattagattgcatgtgcatgtatatggacatgggatcaagatgttctttttgataatgaaatagtgcagcatggttgtgttttctcaagcgttgctcattgtttcatcgcctaatcaaacatgagccattatcatgtaacaaattgtcactgaagactttgttgagcatgtatttttcatcttcatgtggggcaacttttgactcagagtgaatttttatgtttcattaaccaattaaaattttgattcgcacaggtactagacaatcttcctc

SEQ ID NO: 64728 - DNA, 962 bp, Cucumis sativus
  Intron number 1 from transcript Cucsa.142470.1 (locus Cucs a.142470) derived from phytozome v7.0 (chr-ID scaffold0107 9; pos 742608 to 743569 reverse strand)
ctgaccctttgcccccttatccagcctccattaaggtactttcactccgttgcgagcttaatttttgttctggattggtcgtttccttagttggccggaagaaaatttgattgctctttgtgtagctggtggactttgctttgtggggttcatcgttctttggtttttgatcgaaagaaatgaaatgatgccttcagattagtacttttgtttttaataccaaagtagcggctttcatcgagtaaaaatgaaacgaaagggactttctttacaagaaggggctttaactatgtgaaatcatgtacaaatgattgcaaaaggtctttgatgttaaagctcaaaggaaaacatgaaattaacaaaaggactgaagttgtataaatttaagggaagggaaccgacctttttttcccccaaaaaacagaccgaggagctccctgatcatagctctaatatctctaaggtgagtgcttgccataccaaacgtctggaaggaggaaccccaaacaccactcgcaaagttgttgcgctagagaatatgattcaagtcttccaccgccttataacaaagagtacgacaaaatgcctcaacaggcttgtcagaagtcgcctttgctagttggttcttggttttagtggagctgatagattaattgataacggaaaacaaactagtcctaatcttaatcaatcaaagaaactaatgtcaatctaactaaactaaggaaactaatcctaatcctaataaactaatgaaacaatcctagtcctaatcaattaaaagttttgccaagatattctaatttactacaattctactacatcaatatgtttcagtggattttccctcttgctttgctttctgaggaagcaattatgttataaattaacgtttactttgggaaattccgttcaagtgtgatggctagattcatgacactcaggtaatctctctttgtagg

SEQ ID NO: 64729 - DNA, 914 bp, Cucumis sativus
  Intron number 3 from transcript Cucsa.142130.1 (locus Cucs a.142130) derived from phytozome v7.0 (chr-ID scaffold0107 9; pos 442967 to 443880 reverse strand)
agagtttgtgctgactgttttaataactcctcacagtaagtcatgtttaaatttgatcatacgctctgtcacatttttctttccttatgcgaagtcttttgcagcttcgaacatgaaatttcatgttattagtttcaagttctatattatttttcctataaagatacttgaaagaagacggttagaatcatcagcgagatagtttcgaacttttgaaaatttggagcttgttaatagatattcaggacaagttagaatctgtggtccttgtttctgttgaagaaggggcttacactagtgcgtgcttgttcatgaagtttgcacctttgttttttattccatttcttatttttagctttcatgtgaagaaaccattgaaatttttagtgggtttccaatctcattgacaatgagaattttctgctcctgtgtgaattagtgtgactggaaccaacattctaaaaccttctttgaacagtctttaaagcttaacgtcattcaaaaccaccaatgttgaggtagttggatattgatgagtgatctgaaggctgatgcttgtgtgggatgaagcattaaatttcttacatcagctttcagcacattcttcttggatttaattataaaaaatcatatacagattttggaagctcttgccttcccttgtttcctcctaatacttggtctctgaggcatccttttgagctctcaattttaggcaaagattgaacctagtatttagcatctatgccatataggattacatctatagagttcagctttttaaaaaattatctttcagtatttaaactttaatgtaaaaattatcttcatcatataaacaaaaactagtgtaaatttattgaatctactttattacagatctaaaggagttggtcaaccgccatcgttagctg

SEQ ID NO: 64730 - DNA, 787 bp, Cucumis sativus
  Intron number 1 from transcript Cucsa.163280.1 (locus Cucs a.163280) derived from phytozome v7.0 (chr-ID scaffold0114 4; pos 2671322 to 2672108 reverse strand)
tgatcggttagtcctctgtttttttctgtctttttcttcttcatctcactctctatataaggatcttcgtcattctttcatccacttcctgaatctgctttctacttcgggagctgagttctgatgattcatgtttaacctcgcaaatcaccctttcagaagaacgaaggtttgtggatttgggagtttttgctgccttgcttgcttagtgtaggtgctggaattttgggtggtgtttggatcctgtgtttttcttttttgctttggagattgcgaatccgtacgttttttccatattgggggattgtaaatttatgtttcttgtctttggaaatctggtaaagattcaatcggaattggttcttgtgggtttttcttctttttttcgttttcttgctttttcgttttttaatgaagctgaaaaaggggtggaaagcttggagaattttgagctgatcggttgagttggtggaatgaatatttttaagacatggaaggttaatttgatttctcatctttatccgtcgatcttgcgatttcttgcttgctttgcttatgacttcgagtgtaattggtattgtttgtactgtgtagttttagtatattgatctaacggacatcttcattcgccttaacttccatcgggcgatggatgtttcccttgctcttctactgaaaattttgtattctcagcttatatggagttgattgaagtttatgcttttctctttttggtacagaacaagggatgtggttgtgagcatcttaaatttcaaattgggcaaag

SEQ ID NO: 64731 - DNA, 535 bp, Cucumis sativus
  Intron number 1 from transcript Cucsa.200320.1 (locus Cucs a.200320) derived from phytozome v7.0 (chr-ID scaffold0136 5; pos 771422 to 771956 reverse strand)
ttaaggctcatccacaacagccgataagtcatcctgtgtctgaagatttcgagttgagaagggcaacagattcgacttcgcagctgactgaggacaccgcagtgactccggagatggaacccaagatccggaaaggttagagacttaagagtattgatataatttaacatggtattattataattaaatcaatttttgacaatgaatttgttaagtgacatcaatttgaactcttttaactttcggcccactaattttctaacaaacaacaatttttcactcattgatgcatgtagtttcatattgtatatgttttataattaattgaacacataaaggtgtagcaaacataccatcatgtccaaatatatagaacgacgaatttgcagatataattgtgtttgagttgaatgaataggaaaaaaaggtaggaggaggaggaagaagaagaaggagaagaaaagggaaattaaggaaggaaaaaggagaagcaaaaagagtggtggtggtggtggaagagagggatataagaggt

SEQ ID NO: 64732 - DNA, 977 bp, Cucumis sativus
  Intron number 2 from transcript Cucsa.205620.1 (locus Cucs a.205620) derived from phytozome v7.0 (chr-ID scaffold0141 6; pos 645688 to 646664 reverse strand)
ttgaaaaagcgaaggagctttgcctcgctagatcggtaaccctcttgactcttttccattaataagctgatttacttgttgagcgttctaggttgggtttatttaaaccaatttttattttcttattgcgctgttgctggtaagatttctggatttaggaacggtttcttttccagaaataatgtgaacagattgaaatgataattattttggaaagaaaatttgtgcacaaaaaaattgtttaataaaaattattttcaattgaaatgggaatagcaagcattaagaatctaagattgtcattatattgttcattcatgctgccattgtaggacaagaacaagttaaagtaggaagtgattgttacctaataaaattgatcaacaatgaaattccttatccacgattaaacaaatcatgctctaggaacattcaggacaactatacaattatgattagtatttaactgttgatttgattttttgaaaattaaaactctaatggatttatatatttgcattctgctagtgctatcatagtaggattgtaaaaggtataaagaataaaaaaaagtaaaaagtgattgttatgtaatgaaattgattaggaatgagattcctgattaaaatacgatgctctagaaacatcgtgtacaaccatgattagtatttactgttgacgtgattgtttttctttttttttttcctttcaaaagttaagtttctaatggacttcatatttttattaaatgaaacattaacacagcaagggtaaggggatttattagaaactgcggtcaaatgggtgtagtagctagtttggttcttcaatttaaaggtctaattggtgtctaaagcaaacattggagaagggaatccacttgaggaaagaatttcaagtagaaagatgagagaactttgtaccatctaatattgaagatttttgttttgaaattccttatgatattattcaggtgc

SEQ ID NO: 64733 - DNA, 920 bp, Cucumis sativus
  Intron number 4 from transcript Cucsa.205520.2 (locus Cucs a.205520) derived from phytozome v7.0 (chr-ID scaffold0141 6; pos 590025 to 590944)
cctcgtgaagcatttgaaggtaatgtggttagtggttacagactctggattatgtatgtaattgaattttaaaaaattaaggctatggagggctgctctggctctaagatttcaacttaagacccatatcttgcacaatctatctatttgtatgggcatataccatacctcagtatagccttgagagatttgtcttctatctagggtaattttgtgacttcaaacagtttctctatgttcagtatgctaaccgctctccctcttgaaattaactttaaattgtttctcctcactatatcccaaagagaagctttttggtgttggtggtaatattctctatctgtagaaggtaagcaaagcttccaaaaatctatgaaccagaattccccatataccaaagcaaaagtagatctagtcctgttatcctggaatagccataatactctccaaccatggcaacagagcttagaaacgtttctgttaaaaatttatgacatggttgtctctgtatatgcatattgttacttcaaatgtcctctgttctctcttttagttttgctggactaatatttctggcgtattctttttcagctgatatatatgacaattgtgacggccaattacagttgccgatataaacagagatctcaaataacctatttcatcttttcacctagttcaaaattgatagtgtatatatttaattttttaaaaaacaaattatgaaattctcctgcatgtgggggatgttaaagaggctgattttatacttgagactttttttaattaattagcttaatttttttggtttggtgcagataaaaaattatatggagactttgaattttgctatcataattgtattgttaatgacctttctttcaggaaagaagaaaagcaagattgttatatctgaggca

SEQ ID NO: 64734 - DNA, 1029 bp, Cucumis sativus
  Intron number 2 from transcript Cucsa.200090.1 (locus Cucs a.200090) derived from phytozome v7.0 (chr-ID scaffold0136 5; pos 500405 to 501433 reverse strand)
atcaggtggcagatgtgagtttttttgtttcttatctattatcaccatgcacatatattttcattcaaaattttcacatattgtgggtctttccatttttgttttttcctttacaattattcatctaaggaaaccaaaatctttgagttgtaatttggcggaccaaacacttctgtgtttcaacacccagggagaaattcatttctacatgtacagctgaaggtgtatattataacccaatgctatgcttatggttgcgtggtcttgatcatcaagcattctggaaacccaaggaataaatcataactcatgaggtttgtgtggtcttgtttctgttgagagtttggttttcagtttgctggtcaaagaacgatccacgctatgatcgaggagtttcttttgcatccgcctttcagagagaaaggctggtttttgtgacttgcgggagtgtgtgttgtggtttaggatatttggggtggaaggaacaagagagcttttagaggttttgacattaggggatttggttctttgtgagatttcatgcttctctttgggctttggtttcaaagtttttttgtaacaatttcctaggtaacattttgttgagttggaaccctttattgtactgggcttgtttttggtgggcttttttttgtatgcctttgtattctttcattgaatgaaagttgtctagtttcattaaaaagaaaaaatcgtaacccatgagttaacttaaatgctgtactattagttgtctagtcttgttaagattacagaatccgatccaattcttgatgtattttctattggattttttactgatgctaagcatcaaagctgcattttttcaatgaagttgctcaggctggtatcttactgtgcctctttatatgagcatttaagtaattgtaatctcgtgcagtttctgaaccgttgttcaagtgtgggcattgatgcagtatcatgatgcatgtgcatggtttatttcttgcagattgccccctttgatccaactaagaagaagaagaa

SEQ ID NO: 64735 - DNA, 476 bp, Cucumis sativus
  Intron number 1 from transcript Cucsa.255600.1 (locus Cucs a.255600) derived from phytozome v7.0 (chr-ID scaffold0222 9; pos 3540210 to 3540685)
ctcctgtgtgtttctcttacttttttcatcttctttacctttagtaatcatagaattttcctgcattatgatgtctacttatagtgagttctatttcattttgtcactgcttatggttctcctccccaactctcattatatccttcttctttccatgttatgggtttgcttcatttctcagtatttgttgtttgacaggtatttatggagtagttaaatttgatgggttccaataagctatgctagtaggagtttaggagaaacaattgagtcgactcttctcaactcctaaaccatttcattttttcaaattgattcttgtggtgcaaggttttactgattgggaattgggcgtcctatttttgtaatttgctcaaatttcgagctgcgtgccttctttttgtttatcagaagtggaaatcttttgtttttttcccatcttttattccttctgtttttgcagttcttcaggtgga

SEQ ID NO: 64736 - DNA, 713 bp, Cucumis sativus
  Intron number 2 from transcript Cucsa.181460.1 (locus Cucs a.181460) derived from phytozome v7.0 (chr-ID scaffold0124 1; pos 21284 to 21996 reverse strand)
gctgccggtgttttggtactacactgatcttcttaatatgcagtactttcatcctttgaattgaacataggaataggtaatcaaaccttattttggtaggcacaagcacaaccaaggagcattgtgcgatattggaaatagaggaataggaatatcacacactccttatgatagatattgcggtaggtcgaaaattttgttaatgagccaagatactgtaccactaactggtgtaagacatacatccttgaccttagaggtttaaatcccactcccatctattgttagactgtggaggaatgagctagaataagcacaagtgcacaactagtatttattattattattattattattattattattattattattattatattcaattggaaatccttgttttgaaatttcaggttgatgggttggggtatctatccttcttagctttcttttctattatcttctttgatgtatgcaattatttgaccatagtaaaccgtaacttgttttgtttcaatctataactgtcatcgttttgtttatatgtttgaacttcagtttattttctcaaactcctttaagtccaatcacttcagtggagattaaagaaacttgaggacattggaaatatgctacgatttttatcatattcgtgagcaggttgtttctatttttcagatagttgaagaagcgggtggagcagtgactcgcat

SEQ ID NO: 64737 - DNA, 500 bp, Cucumis sativus
  Intron number 3 from transcript Cucsa.155320.1 (locus Cucs a.155320) derived from phytozome v7.0 (chr-ID scaffold0113 6; pos 109360 to 109859 reverse strand)
tcgtccagtttgcacaatcattggccatagcaaaggtcttccatttgccctttattaaactaatcaattcacccaaaaaccaaaaacttaaggtggtagttgaaggcaaatttaattatatatcaacattttgttttagttccaattcttccaaaactcattctttgtttataaatattaagtagccgtaaaataccttttttgtaccttttctgtgagggcgacattgttgtttaaagaaaaataccttttcagtttccttttgggtacaaggttttcatttagtacttaaatttcaagatgttacacattttgagtttgatttcaatttagtttctagatttcaaaagtgttacaattatgtccttgatatttgagttttatttccttgtagtccttaggtctaaagattgcgcttttaacctcgacttttcactaaaaccacatgtttttttgtctttagtttaatatatattattacttgtaatttttaggaggtg

SEQ ID NO: 64738 - DNA, 790 bp, Cucumis sativus
  Intron number 1 from transcript Cucsa.257410.1 (locus Cucs a.257410) derived from phytozome v7.0 (chr-ID scaffold0222 9; pos 4724344 to 4725133 reverse strand)
tttccatcggagtctttcgttttctggatttgttggtaagagggttttcctttatttgtgatatatgtttgattccggtttctgtttgttatgtttacatcattcattatattcatgttatcttgttcttgttcttcattgtgatcatttttctgatgaatatcatttattggatgcttttttgttcctttcttctctttttcccgcattttttgtattgctaaaaaacgattgaatttgaatgtatggttattttttctaaagataatttcatctgtgcgagtttgtcggtgttcttcatgtcttcttgattttcaagagttgcactgtttagagttgttgatctattgttctattacgaacttttaatgtattgatgttgaattaataggtggatatgattttactggataaataagcttgaagtaatggctttagctatcgatttcgcatcatttgcccacaactgtaaatttcgcttcgagttcatcttatttgattctgtttaatttttagtccgtctcggattttctttggcatcaataagatcggtctaacatgcaatttaaacctcaatcgataaatgattctgaagacacaaataacttgcttggcatatcatcatcctcttcagttattcattgatatttatgcccttaaattttctgttacccgtcctctacaaaatgtttcccaatcttctaaaaattatatgcctgatacagcattcttttgattccattatctattcatagcttggtttagagctcttcgaaacttgaagaaaaat

SEQ ID NO: 64739 - DNA, 651 bp, Cucumis sativus
  Intron number 1 from transcript Cucsa.302410.1 (locus Cucs a.302410) derived from phytozome v7.0 (chr-ID scaffold0295 1; pos 594252 to 594902 reverse strand)
gtggaggtttgtctcttcgattttctacctttttcttttatggggttttattttttgtgttcctttttaattttattctggagatcctggtttcttctttatgagttgttgcatccaagtgatttggaattgagggtatttgaaaagggatggttttggtgaattattctggtgttttcttattggtttcttgtatttgaaagggaaaaactataactttgttcgaataagaacggggttattcaaccctttcaattgacaaacaggatggaagtttgaagtctgcttggagcagataagaaccgttttgacatgtcattttttcccctctaaacaacgttaatttgctttcgacaaagtttcattattgagtgcttggggaagttggtaaattgattgacgtttcgcaagcttctatgttcgaatttcaaaattccatttcttgtatttttgcaccaatgatttaattctgtccggatggtattaaccttttgataatttaatttttgttttattgctttatttgataatcatttactactttcattgtcaaggaaggtcactttaatgagatggtcttcctttttcacacattgttcataatggttgagtgtagttcctggaagagttcgagtggctgttagattgcga

SEQ ID NO: 64740 - DNA, 778 bp, Cucumis sativus
  Intron number 2 from transcript Cucsa.172420.1 (locus Cucs a.172420) derived from phytozome v7.0 (chr-ID scaffold0119 6; pos 269949 to 270726)
cgtctggctggtttacatagctgttgttcgacaaggtccttttctcagtgttatttttgtttctcaattttctacttaagaacagattgctgtgaatgatccagaaggtgaaattctggcataacgtgatactgaactaataattttgacctgaaaaatcattctagaggtagaagttgctctctagagtcttgagaattacgagtattgaatcttctgtcaactgtacacttcgcaattcatttcaataggactggcgggattgtacttggcttcccccaaattctaaccgacgatttctttctattcgatttgaaggacgaaagttcctttagttcatcacagaccaattcaatgagtattctacctctctcactgatttatttgaattcattgaataacatatctcaaggccaattcactatggaaaaaaaacttatatgtcttgttaagattgtaaggacccttatttttctatggcgagatcgtctcatcaagatggagtcacttttggtttaccattttggatctgattcaaattttcgtttttggaatgaatgccaaatcggggttgggctttatggattatgatatcatgttagataacatgagttttcatttaaaaactaattagcaatgagagatgtagtccatgcaatgaggttagcttgtttcttttataaaaaaagtagattctcaccaaaatttgaaaaagaaatataacagagctatctactccatgcaagcttagagtgacaatatcttatatgccttgcag

SEQ ID NO: 64741 - DNA, 357 bp, Cucumis sativus
  Intron number 4 from transcript Cucsa.232140.1 (locus Cucs a.232140) derived from phytozome v7.0 (chr-ID scaffold0198 9; pos 233721 to 234077 reverse strand)
ctagaagctgaaagtctattaaaagatcttgtaaggtaaccttcctatcatttcttgatgcctattatatcatttcttcaattggatggtgctttgattttgataagtaatagttacctgtttgatcgtctagtttagaaggtaagctgcttatcgttcatttgttcagtggacggtaagaataagggtcaccctttctaagggttattggataaaaaagttccaacaaaattgaagagctttgttatatcctcttttccaataatcgaacagtcattacttcagtttttttattgccattgtaatattttctcgctttatgatgcagctctttcacatctctgaacagtcttacat

SEQ ID NO: 64742 - DNA, 445 bp, Cucumis sativus
  Intron number 2 from transcript Cucsa.236460.1 (locus Cucs a.236460) derived from phytozome v7.0 (chr-ID scaffold0201 8; pos 128438 to 128882 reverse strand)
aggtgaaatttttcgtatggaaccttcatttcttgttttctttgcatactttattttcttcctctttctttattctccaaccctcaatcctcagttttgtttagtctttttattcgtgttaatatatggggtttcatggattaattagttgcttagtgggtcgatcttgatttgaacagaaaatacaacaactgtttgtttttatttacattttctgcaattcggaaatgttcctctttttattattccatgtcctcgatgtggagattttacgaatcttaatccttttgagttgattctgcaatgggtattctgttgcttttttgatctagaatataggtttaaaaagaatttttgagtgatgtagatcgttttttttttttttttctgattttaggagcgattgctgattcaatttgcagattaagggaagattgcttttctt

SEQ ID NO: 64743 - DNA, 476 bp, Cucumis sativus
  Intron number 1 from transcript Cucsa.184560.2 (locus Cucs a.184560) derived from phytozome v7.0 (chr-ID scaffold0127 4; pos 238322 to 238797 reverse strand)
tcctcctactcagcaacttttcgtccataattccggtgcgtttatctctcactctcttctacaaatgtttcaacaaattcatgctttaactctgtaatattagtttttgaatcggtgtttggttatggatctatgtttgaatttgtttttttttttttttttctgggttgtgattcaatatgtttttccttgcactgcttagctttagtttgtagatctggtttagataagggtaaattttcattgttttttttttcagctttacaggtgggatcttctttggtataacttgttgaggtttgatttggatctagcgtggaagagataaactagggttgtttcaaaggctgttgcttttgagtatagttatcatcttttgtgttgagttgtagaagttggatctactcaactgcgatcttgtttttcaacctaaaactggatacatactttgacttggatttggaagttgttttgct

SEQ ID NO: 64744 - DNA, 383 bp, Cucumis sativus
  Intron number 1 from transcript Cucsa.142300.1 (locus Cucs a.142300) derived from phytozome v7.0 (chr-ID scaffold0107 9; pos 599336 to 599718 reverse strand)
cagaagaagcgttttgagaggtaattgtattttcctcttctttttcttttgtgggtttttgtttagattttgggggaaaattgaaaatttaagaatgagggaacctttgattcttaatccggttttgggtttagggagtttcgtttacttctcattaattgattttgttgcatcttcgttttggtaaatcatgtggtttgttttaatctattgaatgcagggttattagagggaaattgtgttgatgattcactgatttttgggggttggatcttgaggttagttttgtagtgctgtattttttatggggttttattggatttggagtgtttctttgtacaaaagagtgaatggttgaatgtgattttttttgttgcagagac

SEQ ID NO: 64745 - DNA, 997 bp, Cucumis sativus
  Intron number 2 from transcript Cucsa.158110.2 (locus Cucs a.158110) derived from phytozome v7.0 (chr-ID scaffold0114 2; pos 245536 to 246532 reverse strand)
ctgagaatatcacgtttgagaattcttcccctcaagtacccttttacttttaagacacctttgatcatcttatcttatctttactttggattttggatttactttctcactcattaaacatatcagtaatatggagatggaactaataattaaaacccatttgtatttcaatttttgaggttgatttttgaaattgtaccatgaggatctttgtacaagctaatttgctgcgtttttctgatcaacttccttagtgttttgaagttggtgttgttttagttatcttgtgatttctttgttttcttcagggttctggacaagctgtggctatcagagttacagcagatcgttgtgccttttacaattgcaggtttcttggttggcaggtattccaatagtgtatagttagttcaagaagtctaacaatattaaaggcctttttaccatagaaacttgtgcttggtttgttagggtggatgtttaacttaccatatttattcaaagaggtatttcctaagctaataaagagtgcgatcttctacggtgctgatcctggtcttgggctaagttcgagagtaggcctgaatttcctctcttagccattatcagttatctattgttgaggattccacattagaataatgagggaccataacgtttgcaagatacatgagctactcctctcctggctagttttgagaagtaaccccatgttatgtaatatctatattgtccaacttttaatgaagttggctcaattccatcaagctttctttgcttttgctatctataactcgtgactaggatcatcagtttgatgctgttgttggctaccttaatcagccaatgctgtttgtgacgaaagtagattgtttttttgtacctctattgcctgctattgtttcttcatgtgaaagacttttggatgcgtaggaaaagctttgatcagttccattttccctatataatttgatgcaggatactctgtacctacatt

SEQ ID NO: 64746 - DNA, 508 bp, Cucumis sativus
  Intron number 1 from transcript Cucsa.180100.3 (locus Cucs a.180100) derived from phytozome v7.0 (chr-ID scaffold0123 3; pos 445607 to 446114 reverse strand)
tatctcaaatacaatcttagagctccggttgtgaggtaaacgtttctatttttgttctttgtagatttttacttctttttttagttgttttcatgagtttaactgggtcgaggtttatgtaagcctgtgttctctgttcttttcactgttttttctagaaaccaatcatgggtttgggatttcggctgccttttcatctctgttttttgagttttagcttttgggtctctttgcggatgtttctttgttcaaatgatgttgcaatagagataattattggtctgaacttgaaattctcataccatgtattatcttaactttctcctgaatttacctctggaaatagtgtgcgactaatatcattccttttttaactttcaatcttcttcctttagtgtagctagcgaatgaaattcttgcaggtttcatgttaactctaggagccagaaatggatcttgattcatccaaatttgatatagtttttgctgttttgtttgggggtgttag

SEQ ID NO: 64747 - DNA, 772 bp, Cucumis sativus
  Intron number 2 from transcript Cucsa.205430.1 (locus Cucs a.205430) derived from phytozome v7.0 (chr-ID scaffold0141 6; pos 527010 to 527781 reverse strand)
atagttaaaactgtcatcactctgaattgttataggtaaattctaattacaaattaattccttatacaacatttctatttgattgctttcaatcaactgaagcacactagactagacactaaaatgctaatcatttttggttctcacaggattttaatgaagaaggaagtttcttctattctatgttttgcatgtgtttactacttatctggtgaaaccttccttccatagctaattcctggttggatggtcacttgatacatatttttgagacctagaatggaaatatggaatgccacctgttttaggttcttaccacactattctaggtcccaacttctgtaaaaaatttcagaaaatttttacttcatgagtggatttgaaacttttagggaaaaaacaaggttgatattacaacttttgaatgatagagttatttttgaaacagagaacaagattcagagtgtttattataactaacctatgtaaaagtaaccatactacctactcaatgtctgcgttagattgcctcttaattgatttcaacaattttgacttatccattgcacacaagcctagttgttttggttgttctcacatgtgagatgaagtatttgctttctctgttttctcctcttacacctccacgccaatttacttctttgtgatggttctatgctcaaaatttagtctataccgtttatcctattatcagtgaggttcattatatgctaatcacttgatgttgtagctgttgtgagcctgctcctga

SEQ ID NO: 64748 - DNA, 363 bp, Cucumis sativus
  Intron number 1 from transcript Cucsa.162060.1 (locus Cucs a.162060) derived from phytozome v7.0 (chr-ID scaffold0114 4; pos 1793154 to 1793516 reverse strand)
gctgaggcgagcagagtcaggtacttaggttttgtgttgtattggttatgatggttgggaaaatatcaactgtgggaatttccgtttcttcttctgacttgttttccctggtattcctgagctcttaaaatatagtcatgatgttttttcatactgctgtgatgctcccttgctggaaatcacagggtacttgcactggacgcttgattgaggaaaacaaatgtttacaacctctttgggtggatttcttatgtgttttgattggaattcccgagaattcttatgatcacgaaaaggtcatattagaatgtaacttaccttacataataattacttttttcttttaggaaaaatattcccttg

SEQ ID NO: 64749 - DNA, 579 bp, Cucumis sativus
  Intron number 1 from transcript Cucsa.218070.1 (locus Cucs a.218070) derived from phytozome v7.0 (chr-ID scaffold0165 8; pos 252038 to 252616 reverse strand)
tgacctcataaagcaaggcttaataccactcaaaggtagtatgatttcattcctattacttttatgttaaatttagaagaatttttaggactatgtttccgattgtcgtttgataattgttcttgataaaacttttgaaaatatctacaaatataacaaaatattacaatatatctctacgacagactactatttgtgtctatcatgatacgcaaataatagtctatcctgattcataagagatagacggtaatatgtcactatattttataaatattttgattcatgttgctatattaaaaaataatctgacttttaaaaactaaatcaaaaattgaaaactaaaaacaaatatgttttctaaaaacttagcttattaattttgttttccaaagttgactaacaatgcaactcttacatcaaaagaaatatagacataattttggaataaagtatataaaaaaaacccttaagagaactattaggatatgcaaccatgtgaacttagactcataatttaactaacttttagtttggaagttgtgtatttaattttgacatttttattgattaacagat

SEQ ID NO: 64750 - DNA, 981 bp, Cucumis sativus
  Intron number 2 from transcript Cucsa.181910.3 (locus Cucs a.181910) derived from phytozome v7.0 (chr-ID scaffold0125 1; pos 120286 to 121266)
cgcctcttccactccaccgtcatctcctttttccggtaagtttcccaaccaccgttccatgatatgccactctaagttaagtatatgtgtggcttttgattacgtctttttgtggggtttgtgagctgtgcccttctcattgggcattccattaatcctaagttctaataataattttaattcaatatgtattgattattgttattatgaaatgactattctacccctcctttgtacctacaaataataatgcattattcccaaattgcccatactctctttttttgatgtgaaacaaaatatttctttcaatttcactcctactatgtttagctatgtatatatatacaaactttattcatcaaattaaaacttgccctaacatggattattttcttttttcttttttgttaacttcaataattatagtctatagtgtgaaccattaatttttgaggtggtaattattaggggaaaaaaattaaactattgaaatacaaattgtttaaattagtatgttataggaaatatgagtgtattatctaaaagaaagagggagatattgtgttttctttaagcattttatttttgtatgcatttgtcttgtaattttaatatgtagggataggggttgagatttgattcttgatatatatttgtttgatcggtcatgaaggtaattatttttaataagttgaattgcatcttagtggatcttgataagggtggtttcttctttttcaatgtggggacgaatctattttgtatttaatgaatcttttaattatgcccacaaggctacttgatgttgatttttctagacatagattcatctactgtaattatttgatgaaagtaataaatgtgatttaaaaaacgattatgcaacaagtcaatattaacatggttggttcggttgtgttattacttacggaggtagagaatcatttagatttcgaagaagatcgacatcggacgctt

SEQ ID NO: 64751 - DNA, 798 bp, Cucumis sativus
  Intron number 3 from transcript Cucsa.228800.1 (locus Cucs a.228800) derived from phytozome v7.0 (chr-ID scaffold0193 6; pos 66507 to 67304)
gaaacatagaggtatattactcaaggtttttcttcatagtccatcctgataattgcattttgggattttctcaatagtgacgtgtgattatgttttttttaaaaatcctttttctcaacgaggcacgtaatgagataatgcttattttatgcttaggcttcctgatcttctacttggattacttttcttattacccaatcatcatgtcacagaataatcatcattaagcccattagattgtcttctccaattatatattaacttttagcttggaagttttcatctagtgttttcacaatgtaaggtccagtttaagttgacaagctcgctgcttgtctgatgacgggggcacattactggccatattggactataactagacacatagtttagaatagaaataatatatattgtaaatagaagattcctgtacatgcgaacaataaattttattgcttctgttcctaagagttgagaaatgggaaaagagaaaataatatgaaaaaattgtttttgattttctttcggtatagtgcactttgccttgtcagtaggggcaaaatctaaaaagcaatccaccaggtgcttgtcatagactactagtgcagtctctgtcgcccattgctgcagtgggcaatctcttaaagcttgtctcaaaataaattcacaataaaattctctatttttacgttgtgtggtcatcaatagcatttgattttaattctctttttacgtatagcaatttctggtcaataacagtacctttatctgaaatgtacaggacgagtttgagtcatt

SEQ ID NO: 64752 - DNA, 609 bp, Cucumis sativus
  Intron number 1 from transcript Cucsa.272180.1 (locus Cucs a.272180) derived from phytozome v7.0 (chr-ID scaffold0250 0; pos 855260 to 855868 reverse strand)
gaaccggcgccgcccagtttggatcttctcaagtggtgatgaactgtctattttaaacacacaaaaaaaaaaaaacattttaaaacaagaaaaacccttcggaaacgatttataaaatctaccaattttaaatttctttttaaaatatgtaataaaaaaattgaattgctgtgttatgttatccagacgaacgagatttaattatttgtttaacttcgcgtgtaaattgaagattctggcaaactttctgtcagatcggttgtttgtggtttgtgtttgacttggtcaagtttcgtctctattttatctttttgaagtttgagatcattgtagctctctttcagtagataatattacttaatggaactctcacttttttttaaaattttatatttcaaaccaaataatggagtatcaactagaaaaagaatgaatttgtcttatctctgactttttatgttgatgtaatcaaattggaggcctttctaaacagttaaatattatattgaaatcgaatcccactaccccaagagttgtaatattgttttaatggtgatattaacttaatttgcagagagaagataaagctttgaaagcgacagaccctgc

SEQ ID NO: 64753 - DNA, 572 bp, Cucumis sativus
  Intron number 1 from transcript Cucsa.192400.1 (locus Cucs a.192400) derived from phytozome v7.0 (chr-ID scaffold0133 3; pos 256109 to 256680 reverse strand)
cgttccacaagtccaagacgcttgataacaaatatgtatgttgggagtgaatgactgctttctgaattcacagggttttgcctgcaatggggttcttcttgcttgtgcaattttgaattttgtttggttgtttggaatttgtgtacgcggaatgttttctggaagttagatggatggagagttcgtaatgtaggttgggatagaatagaattgaattgtttgttggtttgtttatttgtatgctggcatctggtggctactggagatgatcatcttgaaaaaagaagcacttggaagcaagaaagattctgaaatttattatctgtttcagggttcaatcggcgatagtgtttctatgatatactttgttcactttgtttttttttttttgtcttaacaccttggagagtcatgcttctttggttcatattgaatattcgaccatggttttcttttttcttttatttatcagaatatttaatcaagagttgaagttattttgttcacgcggagaatatctgaaattcattacatcgtcagtggctagaagttaatgtgaattattggtgcag

SEQ ID NO: 64754 - DNA, 716 bp, Cucumis sativus
  Intron number 2 from transcript Cucsa.288510.1 (locus Cucs a.288510) derived from phytozome v7.0 (chr-ID scaffold0269 8; pos 104438 to 105153 reverse strand)
ctttgcttgtccccactccttactatcctgggtaagttcatcatcacctgttcgttttcgtatttcatttcaaaaaccaatctttactctaattactataccctcaacaaacgttaaaatttaactctcaaaccactttccaagtatgaaggtttaattttaacgggctcatgattcttgtatttcagttggatttttaaaaatgaatttataaacatttcatctccacaacatgagtgaatattttgttatctacttttacttcgtggatgttttttttcctttcagttgtcctatatttttactgtcttcttgtgttgtactcatgttttctatcctggggtggactacaaaaagatatactatatctagctcaagatgtaaacaacgtgtattttacgagactaccgaaatcttcaaaaatccaaaccttaattttgaaaactagaaaaattgtagttttttaaattgttatcaaaacgagatctttattcttcttgctatcaaagataattgcaaccatatcacaaaactttatgagtgttttttttttctaactgtttttttacaacattttgagttgtattcatttttctgttaaagatatatatatatatataactcaatatgttaactaagtagttttacgagactcttcgtataatttcatgcactaataatatagtttctttttccagatttgacagagatttgag

SEQ ID NO: 64755 - DNA, 818 bp, Cucumis sativus
  Intron number 2 from transcript Cucsa.218460.1 (locus Cucs a.218460) derived from phytozome v7.0 (chr-ID scaffold0165 8; pos 571026 to 571843 reverse strand)
cttttgctgaaccgtcttcaaagcctaatcctccggtaatgatgtggttgtttgttcggagacttcatttcgttttgtcagctaatcttcttttgacggatgagcgcttgagaggctagtgattttggatactaagcatgttgcattattattattgtttctttactttatttctttaattaggtgatttattgagcttgtgatttgaatgaggaactctgcttccgttttttttttttgggattctgagttatgctttgctttctactgtccccaactttgcttacttatttcgtttgtaattaattatcgaagagaatgctgctttaatttctgatatcgagaaggaattgcttggaatggtcttcttaagggggtgtttggctcaaccaaggagttgggggaagtctactcattctttcatccaaggagttttggcccatgactataaaacatcaattttatgccatattaagttcataatttcattccttgcccaatgtagtttgtctgtcaagccatcacgaaaatattaaatttgatgcaagtgcatgcttgttttatcgagcatttttacggaaagatgatatatacttcatttacacaagcctttcttcatctatagtctttaaccatccgttgatagaatccagcttttatctattttatcaacttgaattgattcatgattgtcaattgtggcattttcttataatgtttatctctagattgtgtatttccctcattgaatttatcccttttatccttttttttttgtaccagagggttccaaatctcataagagggacttttgttga

SEQ ID NO: 64756 - DNA, 446 bp, Cucumis sativus
  Intron number 1 from transcript Cucsa.194030.1 (locus Cucs a.194030) derived from phytozome v7.0 (chr-ID scaffold0133 7; pos 178516 to 178961 reverse strand)
actctgtcactaagagcaaggtatttcttctgctgcttttgttttagatctgggtttcttttctgtttttcatttctctgcttctgcagatctgctttctatgttgattttactgttcagatctggtaaccaatgcctcatccatgctttatatatgtaactagtgaagtgttgaactataactctgtgaatacaatgtttgaattagtttctgaatcttgcatgagtttgaaccaagctgataatggcttaactgctgttgaccattgttctcggttctccgtatccacttttcaagttcagttacccttttcgttgctgttgactgataatctaagatctttcagctgccagtcttgccatgctttgtggtcaattttgagttccaaacactaatttggttcttgttaaatttatttctgactgtttgcagtttgacaacttgt

SEQ ID NO: 64757 - DNA, 1017 bp, Cucumis sativus
  Intron number 1 from transcript Cucsa.236880.7 (locus Cucs a.236880) derived from phytozome v7.0 (chr-ID scaffold0202 3; pos 14662 to 15678 reverse strand)
ccagcaaaagttaattacgttttggggaatttccagtaagtatcgaagttttttttttctgtcctttcggaattcactgcaaattgctgaaaattgggctttaatatctgaaatttcattatgcctaggtttggattgtgttaaattaaaggttttagagaagttttggatcaaagacgggttgggcaaaatttttaatgatttttggagttaaattacagtctatatttaggtcctaaatcttgaaactaatttaagttatgctttaggatgagattgaggattcggtaagccaaaggagaattgttctgttcatagtcggggtttaactgtgaggttagtggtttacttatggaatgtcctggtgctaggttgggcagaatttgatcgagcttatggctttgccaaccaatttgtacatgatagcttgaatgcattgctaattgacactttgaaatttccatgtttttatcatgacgaatacgcttgattgtgggacctcgttattgcatgttacatgtcgtagtttatttagtttagtggcagttaccctcctatgcacttctcagttttataaaaagttatgtacatctcaacttcaaagattatctcaaatctattttttatctcagaagaatagagaaaaaaaccttaaatgctagggagtccactattaaactaacaaaactaacctatctttaccatttaaccgagaacaagcactaaataatagaacatttacagtgcagtaaaaggaaaggataaagcgtaaacattaaccccgtaaagacaatgtaaaaacagaacaactaagttgcattactttccctctcacctctgcttcatatgtgagtttttttgcctaccataatgtccttgtttgctatgaagaccacccctactagtatcgtgcattcaatgtttttaactaatgccctatgctgttgttgttatagtctgctccaattttcttttcagtatatatctttatgtatgacttatcctttttaggcatta

SEQ ID NO: 64758 - DNA, 475 bp, Cucumis sativus
  Intron number 1 from transcript Cucsa.242630.1 (locus Cucs a.242630) derived from phytozome v7.0 (chr-ID scaffold0204 7; pos 2339825 to 2340299 reverse strand)
ctccgccagcatcttcaactgtaactcactcttctgtgagtcattctttttgttaaatgtttttaatttttttttttttgattgatcttgtgtgtcattcttttgattgatcagaatcaatttcacttatgttgcctgttttctttcatttgggttgattgtgattattacttctgtattttgggggaaagtggaatgttgccttattatattattcctcttcataatgttagaaacacatagccaacaagatggcttgctattatttattaaagaactagacaatgatgataaatgaagcttaaaaggtttttgtttgattaacgaaatatttcttacttatggggatttgtgtgcatttcatttaattttattggctttaaattttttattcattgtactggctgggctatatgaaataaatgaagtctcttatgcaggaaaaaattcgtaatatacggttctgtcagtggtg

SEQ ID NO: 64759 - DNA, 563 bp, Cucumis sativus
  Intron number 1 from transcript Cucsa.206800.1 (locus Cucs a.206800) derived from phytozome v7.0 (chr-ID scaffold0144 1; pos 2495 to 3057)
cgtccatctccaatctcaaatcttgatcctcctccgtaagtatattaacattttgtttcttgaattttttaataattcaaaacatatttttttacaaaatgttcaatccatcgccaaaatgttcaatccatctccatttacaaaatgttcaacccgacaacccgtaaaatatgggttggattgaaaactaaattcgggttattcgggttgccaacccaaataatcagaaaaatatgggttgggttgagaatgtctcccaacccaacccgttttcacccctaattctacctcacaaaaataaagggaaaataaatcagctaaacttattacaattattttatttatttagttttggaggaaaataaagctaagtgagggaggaggagaacacttgtaaaataaatataatgaataaaagaaagcgaaaaaccctaaaccatttcgtaaaatcaaaataactctttcatcatcatcgttttcttcttcttcttcttcatcttcacgccgtctcctactctgtttcagcagatcggtttcgccgccgccgtcgtctttcttacgct

SEQ ID NO: 64760 - DNA, 432 bp, Cucumis sativus
  Intron number 4 from transcript Cucsa.256170.2 (locus Cucs a.256170) derived from phytozome v7.0 (chr-ID scaffold0222 9; pos 3845010 to 3845441)
gttatttgtctccatttcagggccatacatgtaagttgctacattatcaatgtcccttctgaggtgaagttttgtttgttacttacgtgttagttgaaccataatccatgtagtcattgatttatatatatatatatatatatataaaaagttgtcgaagaactcaattaaaggatcatatattttcaagtgagaaaatagccttttaagtatgacacattcttgaaggaggtgtagaatttggtttccttaattactgaaatagcattttctgcttttatacaaaattttctttgattgttttctccatttttattttaacaaaactcattgagatctatccaagtttgtttccgcatgaatctcagttgaatttgcagaagatatgtatcttatttttttaatcatctggtggctttaaatgagcagcaa

SEQ ID NO: 64761 - DNA, 413 bp, Cucumis sativus
  Intron number 1 from transcript Cucsa.280580.1 (locus Cucs a.280580) derived from phytozome v7.0 (chr-ID scaffold0263 3; pos 504651 to 505063 reverse strand)
ggcggagagtgctcaatactggttctcctatcactgtaagacatggttttgattgttgtaatggtattgatttgatgagatttgggttgattttgtcgatttttgttgtcttcactatctttctattttgtgtggatttgttgaaattgaagttgtgtttacatgggatgttcaactggaaggactaataatttgtagatcctcacgctccccatacgctatgcttttccatgttttcttactgtcttttttatctcgatatgtttttcaaacggacacagtatgctaatgggtataactggtttgcatctttatgtgggtaaaataatgttcttacgacaatttgtgggttccaatttaatttttttgtcattgcaggttccagttggtagagctactcttggacgtattat

SEQ ID NO: 64762 - DNA, 916 bp, Cucumis sativus
  Intron number 1 from transcript Cucsa.153260.1 (locus Cucs a.153260) derived from phytozome v7.0 (chr-ID scaffold0112 4; pos 443459 to 444374 reverse strand)
ttgtcacgcccctgccaacatcaaagattgcgtcggtatgctttcttcctttttagatgatatatatttaaatttagttaaacttttggatcaatagattgtttaagaccgtatcacattattatcttgtaatgttagatgatatatatttaaatttactttcactcacatgtataaacttttagtttaacgggtgatttaagactttgattattggtaatgaaaaaaatacttaatattcaacttgaggtttatctttccttgtggatcttcttatttgttatgtaattagttcttcttagtttgtgttggacttcatctatttttgtgcaattcactctaaaaaattttgatttttttaaaaacattaaattgttattttctttcctatgtatagatgatgcgtctaatcacttttcttttaattcttatcgtttctgcaagatgagatatggtatagaaattagatgtctgtcacgtcgatgtgcttttaaaaatagaatgagatacagagatattaacatagggtttaacagtatttatagtatgaaaatatagaaagtattatacttctatttattgtacctaagtattttccctcaattagttgtttatactacacgagctatactaataaagaaaaattgaaatactgatttttctatttattgtacatcatgtcgtgtttctaaaaataagatgagactcacgaatattaatataagaagttcattaatagcgtgtcgataagaaatatatgatactcttgatactaaaaaatttctaaaaaggacgatacacttaagtatgggtcttttcatacttaattatcgctattattattttgtaatggagcatgtatattattcgtgtgaatatagggcttctccatctctcgccaaactccccagaggct

SEQ ID NO: 64763 - DNA, 587 bp, Cucumis sativus
  Intron number 2 from transcript Cucsa.255420.1 (locus Cucs a.255420) derived from phytozome v7.0 (chr-ID scaffold0222 9; pos 3431787 to 3432373)
tgccacaagcatttaaaaaagtaggaccagatatttcttttgattatggtctgttgagctaaaacaaacattgcgaagtttgtgtctgcttgtgcagaatagtctgtttaatgttgtctagagatcgaagaacaatggtgtttaaagagatcaaatttaaaaattgcaaacagtttgtattgtttgatcgccttcttacatttcagtttttttttaatattaagttttctttttgttctttttagcaatccagttttgaataaaatacaaaccaaagcatgcttttgtatgccaatgcatctgtgacttattttcaatgaaattgccggttctgctgagcattaaaatcaaggttcttgtgtttcatctagatgttcttcagtcattgtatttatgttggaagtgatagtatttgtgaccccagcaatctccagacttcgtcatttcattgacatgttacatcattctttcattttctattgatttttttgccacaatcttagtagatctagaaataaatcctactatctaacttaaaattctaatatgcagcagtcaagccatcacaactgaaaataaaccaggta

SEQ ID NO: 64764 - DNA, 447 bp, Cucumis sativus
  Intron number 1 from transcript Cucsa.155240.1 (locus Cucs a.155240) derived from phytozome v7.0 (chr-ID scaffold0113 6; pos 11277 to 11723)
aaccataatctcgtttggccttctctctcttgccggtactttgcttacttcaactctttctttctttctttctttctttctttctttcttatgctttttactgtaatgtagcttcttttctcgcctctagggttttctctttgctctttattttacttctcttgttgtttttctttggattgttggatctgtcgtcttttgtttttttagggtttttactatttgtcgcgttttttgtgaatttgagcttgtgaaattgagtgggttatgttgttttttgttaattatcatgttgcattgtgtttattggtttttatgttatctttcattctcttctacagctagttggtggggatgggggttgggtatatggtgtttctttgatttgagtttgacgattttctgggtctaggtggggtcctcagcttgagcaagcgacgtataaga

SEQ ID NO: 64765 - DNA, 362 bp, Cucumis sativus
  Intron number 2 from transcript Cucsa.213760.1 (locus Cucs a.213760) derived from phytozome v7.0 (chr-ID scaffold0154 3; pos 1674579 to 1674940 reverse strand)
agcgttacgattattggtcctcctgatacgctttagtatgtctacactccttcaatttgtagattctatcgtttctcttaactttagggtttttactttttcttttttttttctctctttctttttagttgttattgaattgaattaagttgggttcaaagggtttctttgttttgttctttgtgttttgattaaatctgtgagatttacttttttcactttattctttattcttcttcttcttctgtcattctgaaaataaaactcttcgaaatttgagttttttgatgtttggttattatcttatttttgctagtcttgattatgtatataatgtgattgcagcgaggggggtttcttta

SEQ ID NO: 64766 - DNA, 446 bp, Cucumis sativus
  Intron number 1 from transcript Cucsa.246970.1 (locus Cucs a.246970) derived from phytozome v7.0 (chr-ID scaffold0218 8; pos 32518 to 32963)
tcggcttctttcccgaagctgttctacttaaggaggtgaaattctatactattctttcttcatacttatgttccttatctttaactgcctgcgattcttaaactatttccaaccggtttcgacctaagaactgagaggccgaaattaaataagtcaggaattcttggtggtttgttagaatgtggttacctatgtaagaagtctgagaacgaatcggtttcttttggttaccttctgatatgccattagagaaacgtataagaaatgagaattgaaaatttgataggaaggatagatgttgtacttttcgtactctgtctttgagttaaagtttataggaagctgctcagatatactgacgtttaatctgcttatattcttttgtaagtgtgataaatttcttgactgtacttttggttttaattggcagaaaaaagttgcagaag

SEQ ID NO: 64767 - DNA, 775 bp, Cucumis sativus
  Intron number 1 from transcript Cucsa.162040.1 (locus Cucs a.162040) derived from phytozome v7.0 (chr-ID scaffold0114 4; pos 1778985 to 1779759)
actataaacggttttggtaaatccatgcaaacttttttcatgcaattgacgtacacaatttagggttcatttccgtaacgtatatgcatataattaatttcatgcatgaaattaattggagttaaaattatcataatatataggtaataggttcaatcattaatattaattttaattttaatttggtatttattccaactgattatatatcataacgttttactcaatttttttctatgtatactcagaaaaaaaattacgtagtatttaaaaatgaaatattagaagaatacattttttttaaaaaaaaatggaattaagtaaaagtagatatagtttactaacaaagagtctaaaaattatgaaatttaaggctttaaattgatacaataatttataataattcttgaattttggagaatatataaatggagttttgattgtttaccaaaatttggtagaaatttagtggttagttataagatttagaaagtattaagaactaattttggacattacacaaaatgttgtaccatttttaaaacaaagtagattattaaattaattcgagactaaaaattaaaaagatttgcttaaattgttttttgttttaaatcttccatttgtgttttgagattatagaaatttgatggttttatgatctaatcacactaacaattgttatatatccccaaattgaaaattttctacaaattggatatattattatcattgtagttttctttattatttatttatttatttggttgaagtg

SEQ ID NO: 64768 - DNA, 971 bp, Cucumis sativus
  Intron number 2 from transcript Cucsa.228300.1 (locus Cucs a.228300) derived from phytozome v7.0 (chr-ID scaffold0193 3; pos 233227 to 234197 reverse strand)
ctgcttatctcgatgtcagtttcactttcccatttttctgcctttcaattgatcacatttctccttctctataagttttgtatctaatatcagatatccaatttgagatcattgctccacttagtgtccatctgaatctcaactcttgataagaagctgtgtaacctcaaattcctacccggatgaatttgagatcaatgcaccacttagtgtcgatctgtgatcactacatacattttttttcttctagtgatgtaaatagtgtaaagatcccctctccagtctcccctcactgtcactggaaaaggggaaaagaataaactgggttttcattatttgttttcttgtagaaagcaattcatggacaaatagttgaagaaatctgggttataaagttttgattaagttacttgaaaacacacaacatatgagttatgacatgaggaattgcatgagaggtatgagcggattcagttaactaaatatattatgacaggccacaaattccttacattttttaagaatcactttcttggattcttaatctgcatagctaatccttgaaggatggcaattctaggtaagtttaagagaaaaggagatgaattttatccgattttaacctgaaggtgaaattagaagagaataggtggacttagtaagaatttctaacttaactttgttgttttccctttgttggttactggtaaggcgtaattttgtttgtcttggttttggtactttcatttgttgtgaaaaaagctagttttatgtagaaaagaaaatgcaagtgatttagcccgcacacccaccattggtggtaaaatgtgttatgtctctttaattgcttttacatggcatcagtcatttccatgtattcttctcattgaacctattttcaagtgttcgtatcctactttctctctgctattttaggaggagatcgagatcgacagcaaagttttgcgaat

SEQ ID NO: 64769 - DNA, 848 bp, Cucumis sativus
  Intron number 2 from transcript Cucsa.213410.1 (locus Cucs a.213410) derived from phytozome v7.0 (chr-ID scaffold0154 3; pos 1181452 to 1182299 reverse strand)
ttgtcattctcatttctacttctatttctcttttggtaatttattcttcttactacttctctttgatttcaatgtttaaattatttcatttgatcaaatttttctttatcattatttctttatttacactattattttttaaaataattatttggttttgtacaaacttaattaaaacttatccctttcaccattaatttacactaacttgtactcaatcaatttgtgtctaatcttctccttttgtggaccaaaatagtatattttcaataatgttgtttgtttcaacgtgattataataataaatattattcttgtctttttagaatatacagatggaaagaatcgaacctctagtcgttttcattcaactatatgcttattttttatatattattaatattattagaattatctaaaatatttattatatttgaagtgtggtgaaataatattgttatggttattgatcattcaaacatgtatacatatcaaattttaattgaaaaaaatatttggatgcatctcgagctgtaaccatctttatgtaactcatttaaggggttcaattcattagataaataaacaaagatttttaaaccaatagatagatgagaaagtataataactcatatatcttacaaaaatataataatgtttctccattttagatctcaacatatactctcaaggtggtctcacttttttttctcttgaatatcttcttgttcttctcttttcttgctttgctcttcctttgtctatacaccaagtttctttactcatttttacaacactgctttttaataggtaaaaaataataatgcatatgattcattttgtaggcc

SEQ ID NO: 64770 - DNA, 938 bp, Cucumis sativus
  Intron number 2 from transcript Cucsa.258450.1 (locus Cucs a.258450) derived from phytozome v7.0 (chr-ID scaffold0222 9; pos 5405602 to 5406539 reverse strand)
aggtacgctttaactgtccgattttggaactgacttctcgattgctctccaatttgtttgaacagtagttttcacactcaattttggtttctgggatccaattcaaaaggcctagtccttaattccggatatgtatatagtttaagtttaacagttttggaccattctaataccgtcaccgaagttcgatcctaaaattttagagcttctgagggtgttggtggtgatagtgttgttgatcctacccacagtgtcttttacaagtttatgagcaactcctctcactatcaagatgaactcgtgtaatctaatatggtaccaaaatccgtgaatctcaaatcgataactgttcttggatcggtgaatgtaaagcgcataatctaatcagtgtttctgtattatcaaaattttcagaaatatacggtaacccatgacaaagaaatcacattagaatataaggagctaaactttgtttctgcagatcaataatggatgtattatattcaaatctaagctgtctgttaagaactttcttcttaattttactctttattcagagaactcgttggattgaaaatttattttaaaaaaaaactcttttaaatgtggaaatgcctctggttttcgttcttacatgtctttttatcttcatattactcttcatgtacaaaactctagtgattctcaatgtttataactcaaatatatggcatcacaatgaaaatgtattaccaagaacatcattcctcacacctagttttaatcaaatttgttatgggctgttgttcctccgttctcattttcagaaagaacccaccaaacacaactttctgaatagaaaagtcagttaaattttccatatagattgtatcacatgataatagcttttgaaattcagtttgtactttttttaaattattctttttgatagcagttga

SEQ ID NO: 64771 - DNA, 609 bp, Cucumis sativus
  Intron number 2 from transcript Cucsa.147040.1 (locus Cucs a.147040) derived from phytozome v7.0 (chr-ID scaffold0110 0; pos 360349 to 360957 reverse strand)
tggctgtggcggcggatttttatagctttggaagagtaagccatttgcattttaattcaactttgcacaatgcaactttttcttagttaaattttcctctcttttctttggttgaaatattgtttttggtttattattttttttaattttcatttcagttatgattttaaatttagccaaacgtaaatttactattaactagtttaaatgatactaacaataatcttataatgatgaaaattaaatatttgaaaggacagatatgaaaatgaaaaaaaaaaattgaagtttgaaatatagaaaaagttgatagattttaatagaaaaaaatgaaaactattttcaaatataatagtacattttctaaggatatattatcattttctcaaaaggagtaatttaaaattttaatggttgtttttctaaaatagttttaaaatagaagtatacatttttcttgtattttttgataattgaagatgataaataaggtgatgagagaaataatttttatttctaaagcttgaaagaaagttctataattaaaaaaaaaattaaaaattaagtttaatatattatatttgatggtgacttttgtgccacgtagac

SEQ ID NO: 64772 - DNA, 935 bp, Cucumis sativus
  Intron number 1 from transcript Cucsa.168240.1 (locus Cucs a.168240) derived from phytozome v7.0 (chr-ID scaffold0116 0; pos 4248 to 5182 reverse strand)
attaaactagacccgtcaaatcacgctctttataggtatattcctcttttctttttgtgcttgcttgatacagtttgcataattaatcaggatattattctgatgtggggttttgttttggcactcttcagttcattctgactactaggattgaatgtgaatgcaatgtttcttctgatctgaggttgttatctaaatttaaaactcaaatgttgatctccaagtatctaattgacaagattagactattcagtacaaataccataatgggttgtcctagtgctctatgagggccaatgtaaaagtaaaaggttttaagcaagggtacaaatcatggtagccacatgcctaagatttaaggttagaggttaggtgattgcgtcatgggagaataatttaagtgtatgcaagtttacttggacagtcatggatgtgaaatgaagagattgggaaaataaagaattcagattgaacggtggatgctggcttatgttgccaaactactgtccatgagtgtgcaactcataacctgtgggaattatagtgatcttacaaagaaaattgaggaaggattgaagtttctttcgctctctcaattgcactgccatttcggtcccactttaacacattctaccattgaccattaggctggctcactaccaaaatgaaaattttaacttgcttccaactaattcaaaaaaatttctggtgtttacatttgttatttactcaatctcgatcattagcggggagtacagaatgttaggaaaattttgtttagaacctaaaacttgatgttgtgatgatcagacaacggatagttttgaaattatcatacttctactataacatgtgcttgtaggaattataaattgtgctgatgtacttttggtttctcagcaaccgtgctgctgcatttcttcatctagttaagc

SEQ ID NO: 64773 - DNA, 290 bp, Cucumis sativus; identical to SEQ ID NO: 64705
  Intron number 1 from transcript Cucsa.167590.2 (locus Cucs a.167590) derived from phytozome v7.0 (chr-ID scaffold0115 4; pos 979902 to 980191)

SEQ ID NO: 64774 - DNA, 562 bp, Cucumis sativus
  Intron number 2 from transcript Cucsa.292610.1 (locus Cucs a.292610) derived from phytozome v7.0 (chr-ID scaffold0277 9; pos 114935 to 115496 reverse strand)
ataatttgtactcttttttccactattggaagcaggtacatttatttatataatcttgattaatattttattaatcacttaaccttctttcttcttcttcttcttcttcttcttcttcttcttcttctttttcttttttgtagattttatttattcttcttctttatgcatttctacattattattatcttcttatgtttagaatagtgtgtataaacaattaaatttaccctaaccaagcttacttaaacattacataacaatgtatatataagcatttgcttatatggatctagcttgagaatttacaggtggttgataatgtatatttgatttcttcaaaaaacaagtaactttaacgaaatttttttaggatttttccctttcatcttcttgtggatctagcttgagaatttataggtggttgatatatctcacgagtgaaagatcgagtaagcttttcttagggtttttttttctctttctttctttttctggatctagcttgagatcgatcaaattcgcaggtggtcaataatcgcaacgcaattaccgggaagaa

SEQ ID NO: 64775 - DNA, 380 bp, Cucumis sativus
  Intron number 1 from transcript Cucsa.292610.1 (locus Cucs a.292610) derived from phytozome v7.0 (chr-ID scaffold0277 9; pos 115582 to 115961 reverse strand)
tggtggaaattggatctctctcccccaaaaagctggtaattttagggtgttagggttttgaatctgttattttcccttcttcttaccataaaggtagggagatcacaatgttaaataattgtattactcgtacggttttctttgtttaagtggggttttttaagtctcttttttagatctctttttgtaaaatgagtgttttttctttttcattgcatttgtggttgaggtgtgatgagggtgcaggatgtataaacttagttgagatatgtcggttaatttctctttctattttgttaaaataataatagtagtcataatactaaaattgttttttctttctttcatgttttgtggattattatggaaggtttgaagag

SEQ ID NO: 64776 - DNA, 257 bp, Cucumis sativus
  Intron number 1 from transcript Cucsa.201960.1 (locus Cucs a.201960) derived from phytozome v7.0 (chr-ID scaffold0137 6; pos 144715 to 144971)
ctccttcttctcgtctcttcttccgctttcttctggtgaagacacccttcatttttcgcggtctccaagcaatttggagaactaatttcttttcatcttttctttctttctctcaatgtgtatttcaacccccatttcatcattcatttaataacgcaatcaggtttttgtctcttatggctgttagtaagaatctgtgatgttttttatttcttttatttttttgatttgatgaatgagtgtttgattgttgcaga

SEQ ID NO: 64777 - DNA, 732 bp, Cucumis sativus
  Intron number 2 from transcript Cucsa.201960.1 (locus Cucs a.201960) derived from phytozome v7.0 (chr-ID scaffold0137 6; pos 145237 to 145968)
ttgcaaaggtaatgttgagtctgtgttctttttgttgttttgtgtgttggatacttgaattgtctgggaataattggaaatatgtagcgtggggttcgattggatggtttgttaagtaccttcggggacaagttatgggtttataggcctttgaatagatgaccagtgaaatatggaagattatttaaaaaatattttctccttccaagtcttggagatgatatgatagttgttcacaacttcttaagtttttcttgatgtttgaaactgtggagaaataaggaaagaaaaattgttaaattttataataatttacaaattttgtcttggacttcaaaaattctcaattaagttactcttgattttgaatttgataatctttacttaaatatttgtacaagttgaagtgctcgtaagttggtcaggacactcatgatacaatataaaagaatggtgataatgatatgtcgattgggttagcaagtgatagtttaaaatgatgatataacaatagggaataggtcacctaggtgaagtaagagtgagcaagccaaaaaaaatggtttcaaatgtactgggcatgggcacgatcatatctggaataatgcagtatatcatctgaacttcacagtgtatcatatttggcgtccccagcatattgtacaatctaaacactctctgctttttgaattattagacaaggttgcaagctcaagctgcaggagttcctta

SEQ ID NO: 64778 - DNA, 908 bp, Cucumis sativus
  Intron number 1 from transcript Cucsa.142570.1 (locus Cucs a.142570) derived from phytozome v7.0 (chr-ID scaffold0107 9; pos 818824 to 819731)
gatagctgctctgagtgagttattctttctctcttgttaagtgcaaatggtttaagcctgatgtttgtggtttttctctgctgatcatattatctagtgtagatgttttgttaattggattgaggaagtagggtttggaatcttgcaagatacctgaatttctagcattgttttaatggagaaccaaatatttatttacgaacgtgaatgaatattctagggtacaaaatagaactagccccatgaaaagagtcccgactgtaacttaaaaaaaggactccaatctaaaagaataagacccaacagacaattacaaaaacgtggcctatgcccatggcggggtaaatttggtattaaagctaacgacagtgttaggaaaacaacaaacgaagaaaactgaaaaatgtatggagcagagaaatcaacagagagattaagtggctcactaactgtgtgttagttaagttcacgtaaaaaataagagagcaacttattattagtaagaaaatatcatattacagagtcaagagagctttcatcaaaactctgaaccaaaattgtaagtaacgcaaatatgaatttaaattagttgtttggagtgccatataacatattcaaagcattccgacaaaacacaagtcttaaagatacttaacaatttagaaaccttagtcatcaagaattggcttgggtatcctaagccagccagagattaatggtctggtcaagaacataatttaaggagtggccactcaaaacctgttcatatgaaaaagaaacacaataaggaaaatacgtatgcaagtcactgccttgaaagcttttgtttcttttcttttttgttcctttctccaagcacgacaaatctgaactgctatgctatggttgtaggatttttgaatcagtca

SEQ ID NO: 64779 - DNA, 507 bp, Cucumis sativus
  Intron number 1 from transcript Cucsa.193950.2 (locus Cucs a.193950) derived from phytozome v7.0 (chr-ID scaffold0133 7; pos 87097 to 87603)
cctctctttaccttccttctctgttcttcttcttggtgtgcttcagacagttagctttaaactctttttttcatttttgctcctaattttagccttataaggtatttccaaataaattaattttttaaaatataaaataataatcataataattgtactaagactgcattaaaaatgcattcatctcaaattttttaaaatgaaaaatcgattcattgttgaaccatatttttctgtatttgtaaaatttgtgctcatgttaaactaagtcctttttctacctttatctttaacattgaaacatactaaaatccatttgattttaattcaaaaaatgtttgttacaatcaaagttggtacaactcattatatatattagtgtggaagattgttagtaaaatgttgtttattaaatcaatttagagagttacaagtgttaaagaatagtagtaaatgggtaaagttttggttttgattatatttcacattgttgtgtctgtgcaggtt

SEQ ID NO: 64780 - DNA, 961 bp, Cucumis sativus
  Intron number 1 from transcript Cucsa.166810.1 (locus Cucs a.166810) derived from phytozome v7.0 (chr-ID scaffold0115 4; pos 187855 to 188815)
ggataaaaatcttttacttggcattagtctcactggtattacaatatttctatttgtttttagttattttttaatatcaagtgaccattttttttcttttcttttcttttctttttgaaaagtagccctaaaagtgttgcttccactttgtttgttgcctacattttatggtgtgttcaaaatctaaagtttaagaaagaaaaataggttttacaaactctttttgtttcttaggaatttagtacactttgttttcctaaaatcagatgacaacctgagatggcaaccttagtttaaaaaggaattaagaaaacaagcatagtttttaaaaataaaaattagggcttttattttatatggagtataaaaacttttcttattttactctaagatagttgttttgtaacacaaacaattattaccatcaagagcttaactcagttggtacatatgtacatcaaaacactcaccattgattataattcaagaagatttcacaacaaaaaaatgtttattataacatatttttgctattggaatttacctatgaattaactccctcttgtttttttttaaaacttagttttttagagaacaatataatatattttgctcatgactctaactttctctcaaatttgtttctatacttgttttatcataataaatttatttactaccctctatcttttatttaattttctacagtaaatgcatgtttaaatatctgaatttagttgtgtaaggaaaagttatttgttaccctctatctttttcaaatatggttattgttgtaaagaaaagttagaaattaaaacaaaaatcggaaaacaagaaacaaaattactagaaatagaaaacgaaaattagttatcaataaaacatgaatacacatttgaaattccaattgttgatgatatatgcaggtgggaattcaactcaagaaagtggcaaaacaaac

SEQ ID NO: 64781 - DNA, 597 bp, Cucumis sativus
  Intron number 1 from transcript Cucsa.304130.1 (locus Cucs a.304130) derived from phytozome v7.0 (chr-ID scaffold0295 1; pos 1865987 to 1866583)
gccacaggtaatttcactttcttcttcttcttcttcttcttcttcttcttcttcttcttcttcttcttcatctttctgttttccttaattttttagtaaattttctttatggtttttctttttttgaatttctatgtttttttttggggttcactttgtttgatctctccacttctcccaaaatattcagtgacaaaactgatactttcttcaggacattttggcatttgtcctttctctttattttgtgttaaaaagaaaaaaagggttttcagttcctttttctttctttctttttcttttgtgtgtgtgtatatatatatatatatatatggatgagataaccttgaaaactgttataaagcagcttttaatttagttgaatttgttgttttgttatatatgtctgtctttcttccactttagaatataattcattcatttttgttttctctttttcctttcttttatacccttcacaaattccgttcactcgttcattaatatgatctcttgatctttttattgtttgtatgtgtaaattatgttgttttttttttaggagattgtggtgaagccaattgaagaaattgtgac

SEQ ID NO: 64782 - DNA, 881 bp, Cucumis sativus
  Intron number 1 from transcript Cucsa.183410.3 (locus Cucs a.183410) derived from phytozome v7.0 (chr-ID scaffold0126 1; pos 288102 to 288982 reverse strand)
ttttacttcttcaactgctcccttctaatcttcaggtttgtgatttttttcctttttttcttcttggtttttttttttctttctttctttctttttgcttttttatgtttttgcttattgtttctccccttttccccaaaccgggtctctgttagatccaccttttggaggttttttgtttcaattttcaggttcatagacttctggggttcttcctttgtttttttttttcttcttcttttttctgggtgtttgaggttaggtgaaagtgttgaactcatgttgggggttttgatttttgttgtttttcttggatccggaacatggggatcgaacttctcgtcaatgtgttgttttaagtctttgttgatttcaattggataatcttctattttgctgaatcacgagacgatctacttctttttcttcttcttcttcttcttattattattttttttaaatgaaatggatgtgcgtgtccctttgttgggtttcaattttatctttgacatcgtcaatatttcatgttgttttgatcggatttgcggtaaaagttctaatagatagatagcggctgccttttgggcgcttcatttaagatgcacaaaacaaggtgcggctgcctcgctgacagcgtggctaagctaagtgtcagaggcatttattgatctataaggccgctcctatctcatagattccatttactgttgttcttggttggtaataaatatcttgaaaggaggagtatgtaaacacgtttatcccatgtgttctgcccggatagtaagatatttaatctgattcttgtgatgttcttttttaacgcatcaaccaccggttttgcaggttgattggcacataaatatctctctgatattatt

SEQ ID NO: 64783 - DNA, 649 bp, Cucumis sativus; identical to SEQ ID NO: 63914
  Intron number 1 from transcript Cucsa.197530.3 (locus Cucs a.197530) derived from phytozome v7.0 (chr-ID scaffold0135 7; pos 901347 to 901995)

SEQ ID NO: 64784 - DNA, 549 bp, Cucumis sativus
  Intron number 4 from transcript Cucsa.239400.1 (locus Cucs a.239400) derived from phytozome v7.0 (chr-ID scaffold0204 6; pos 212180 to 212728 reverse strand)
tctataggctacgaatacaagggctctactggaaggtttgaaatatttagagagactccaagactgttcttatcgatttaaaaatcaatggactctttctcatcaaagaagtgtccatgaaccaagctgccctaattgtttctgatgatatgctgactgaaggggatttgtggcatagaagactttcccatataagtggaaagcaattaaaaatgttgttagaataggtgatcattcctaaagggatcgctgaaaagctttctttctatgatcattatgtagctgacaaatttacaagataaagttttcaaaaggctaatcacaacaccaaagctatcctagactacatccattccgacctagggggaccctcacaaataccatctttaaataattccaggtattttctaacatttgctgatgattaatctagaaagagttgggtttatttcttaaagattaaagaccaaactctaggaaaatttaaagaatgaaaatccatggtaaaaaaacaaacttctaaacaagttaaatgtctaagaattgata

SEQ ID NO: 64785 - DNA, 601 bp, Cucumis sativus
  Intron number 2 from transcript Cucsa.187910.1 (locus Cucs a.187910) derived from phytozome v7.0 (chr-ID scaffold0128 9; pos 3128 to 3728 reverse strand)
gctgaggaggcacctgtaagcggtggaggattaaggtagattcgttggttttgttgttcttaaatctgtctggtggattcatagctgtttagattgattaatttgttcttctgtggatttgtggttttgttttaatttggatgtcgaaagaacagaatcttattaaagtttggtcgtgctttctgagtagtattattccttattgtgtaattgattgggtttgtaatttattgatgtttattttaagtgcctttaacctgagattccttgatgattatattcttctctgaaacttatgcgtaatcccttcgtcaattcaattttgcgattgactggcaaggataatgttgattggtatttcccctttgctccagttgaaggagtaaatcccaaaacgttggaggctgatttttttttcacgctggttttattgttgtgatcatagatggttttgattgtaggacgttcttggattgttattttaatttctctacatatttaagaatttgattgtttcttctttctgattaatttccactacgagctgttagaataaaatactaggtagactgaaatgatctttttacttgatacagtcaga

SEQ ID NO: 64786 - DNA, 829 bp, Cucumis sativus
  Intron number 1 from transcript Cucsa.239940.4 (locus Cucs a.239940) derived from phytozome v7.0 (chr-ID scaffold0204 6; pos 823747 to 824575 reverse strand)
ttttactgcctcctcctcaggttctatttaccaattgattgactgtgtttgtgatttgattgtgttcctctttttcttattgtttgttttcttttaatcacggcaacttcgcttaagttgggtttctcattttactcgtaatgttgctttcctgttgaagtctgcgttttccaaccttcgatgttctggatagaccaccatttgattcattaattcatcttttttgagtttgggtggaatagttttctagcatcagcatgaactctgattgaaaccgatgctaatagatttattcaccatgtttgtcttttcatgaaaaaggagttttatggtcaggttggaactttgaagaatcaaagtgaataaagtaacaagtttccttgacatctatatcatcttctttttactcgctttatcagtttctttatacgttgcattcagggagcattgttgggtaaaggtttaattaagatgaatgggaatgaacttggttttatgtcaaggtcaaattctaaggattctttccatgtggaagagttataaactctctcaagcagtaacataaaatcgaagagcagagaaagttcttagtcattgaagaatgaattttgacccaagtggaatgtcctacagtaaaaaatgtgttttatgattatttacatgaaatccacataatgttgatctttctcctattttcttagagtcttaaacccggggaaatattttcgagtaacatgacatttatgacatttttttttacaattcatgcatacccttctgatttgtgaaaagtattcttctcaatcagcttctctattccctggattgg

SEQ ID NO: 64787 - DNA, 482 bp, Cucumis sativus
  Intron number 1 from transcript Cucsa.142110.1 (locus Cucs a.142110) derived from phytozome v7.0 (chr-ID scaffold0107 9; pos 430294 to 430775 reverse strand)
agggtttgtgcttttctttcatctccttccttggattttgatttcttgtttctctggctttctctactgtagagctgtttcttcttctcctcctcctcctcctccttcttcgtcctccgaattctctgtttacaagtgggtttgatgtcatgtgacagagaggaaaaatccaactgaaacttatataattactaaatccatgggaactgttgacttagattaattaattaatatatttattcattgacgacttagataattagatttgagtaacactaacattagctaatgactttgcatgatcattccatgtgctaggaataaaatggctacttatttctagactgtacttgatttgagatgaaattttggtttatgctaattaactgtcgctcatgttttgtctcttgtactctgatcgaatgcttgtttctttttgttgtgtagttttgggaaactttgtctcggctcttaacaagttt

SEQ ID NO: 64788 - DNA, 551 bp, Cucumis sativus
  Intron number 2 from transcript Cucsa.140420.1 (locus Cucs a.140420) derived from phytozome v7.0 (chr-ID scaffold0107 1; pos 307225 to 307775)
aaaaaaactcgtttatttgagatcacaaaattatatgaccaacatacatgtttttactctgaacttagtcaaagtcatgttcagttggattcttcaatgcttgcatgagagttttttgaacctgttagataaaccatcaacaagtgttgtgtcactgcaatcaatcatcaaggaaaagtttggctatcatgtttcttatcgtagggcttgggatggtaaaagaaaagtagtggccaaagtgtttggcgattgggatgagtcatacaaattattacataggtggttatacatggtgaaacatatcaatcctagaacacttgttgaatggagggtacaagtcacacctactgaaggtcatgtcatactatcattggtattttaggcatttggtccatgtaggcctttaatagatgtaggccactaattcaaatcgatggcactcacttgtatggcaagtatcaaggaaaattattaattactacgactattgatttgaatggccatcttctgctattagcatttgtcgttgtggaagatgagtctgcaaattc

SEQ ID NO: 64789 - DNA, 1027 bp, Cucumis sativus
  Intron number 1 from transcript Cucsa.201770.1 (locus Cucs a.201770) derived from phytozome v7.0 (chr-ID scaffold0137 6; pos 34593 to 35619 reverse strand)
taacttttgctgagtttccttattatctaaggtaatgatatgattctatcttctttgatcttttaaacatcttttccttttttgttagtcagcaaggtggctggaaagttcctcctgcttattgattttggtttaagccagattgattatacagttgatccttgagatagttgttgtttgaggctccttcttgatatcaccctgtttgtataatccatcaaagcatagaatctttgttacttaccggttccaagaaattggaggttatggttaaacttcgtttgattctatgtggtaaaacgcaacgtgctattggatggtgtttactgaggattggattcatgtatacttggtgaatggaggaggggatgatgagatttgagaagattatgtctatgccttgcctatttgtaaaacattttgattaggggttttcatgattcaatttgaagcattcctttttgtctgtgttgagcttctgttgttgaaactcttttgaattttaatgcttcatgtgtgtacactaatatgtcaaccacaattggtattctgtttgttgcatccttagtaatcaataagaaaaatcgcagaagtacatcaatacaatgaagtagttcattagaagtacaagaaaaaatctacttgtgttgtcaatttatttgtactttcatccttctttttatccatattttttcaacaatctcatggttttgcagtcttttagccaagtccttgtaccaaatatgaaaagagaatctttgtaccttaaagtgcttttgtgccaagggatttaaaaatccttgttttttttctttttcttttccactgttcagaacttaatcaggccatcattgtgaaaattccagtttgtgagaattttctgtggttacttcatcctcaacacttccaacatcacatacctatagttttatatcttgaattcacacacctgatcatattttcatgttcttctttgaactaatctttctttgataataatcacagcgaaaggactcgagtccttttg

SEQ ID NO: 64790 - DNA, 922 bp, Cucumis sativus
  Intron number 1 from transcript Cucsa.189560.1 (locus Cucs a.189560) derived from phytozome v7.0 (chr-ID scaffold0130 5; pos 402191 to 403112 reverse strand)
tagaaactccctgtgcttgtagtggtagtcttaaggtatttcacgctttaccctccctttctacccgttcttaacttcttcttcttcttcttttttttaatgtgaataaacaggacaccctttttggttgttcttcattgatttggccttctccttttctctgctttggatttatgtatgctgttgctactgaatttgaaactttggatatagttcaacggggtttagcaactttctgcttttttctggggatgtgtttaattatatttttattgcttgtatttgttttcttcttttaaattcttttgttacttccaaagtggttttgttttcgtggaagcaagatgcgaaaggatatcaaattatgaagttatttagtattttcgaaatctttgatggatcagagttccgtatgaattttatagtgcctgttgaaaaaagatgtgcttatatctggagaagatttatatcattaacgtagcgaggactaggatgaagtgcacgaaataacttgcttcattggtgctctccttttatacataatttggttacttgcttatcgatctatataaaattgttcccaatgctttgtttgtgaccttttagtgttatctcccgtccaatgtttggtgataagaatagttccttcaactaagtttttgtttgtatcaatttctatgatcgatgggaaattttataagccagtacgtgtgtagtgtatctgagttataaactggcttgataaaacttgactaggagtttggttattaatcttgctgtcatcgtatttttcctcgccagaatacatctacgtcctttgaattgatcaatatgaaacctctggtgaaacttttaacgggcttctttgtttattaatcttacgtgtctgatgaatgctttgtgttcagtacgctcatagaaa

SEQ ID NO: 64791 - DNA, 950 bp, Cucumis sativus
  Intron number 1 from transcript Cucsa.202000.1 (locus Cucs a.202000) derived from phytozome v7.0 (chr-ID scaffold0137 6; pos 164842 to 165791)
ttttgtctttcgctgcactgtttcttctaattcaggtccttattaatcgtttgtttgctttactctgcttaatttagttttctaggttaatggtaatactatttttgctttggaatttctaacaaaattgcacttgtcgatcttgatgagaaattgttttgaggggctggtcaattggttttatgagatgttctgtgtgctacctaagtttaattactcttgttctcctctgttattagtcttggattttagaattagtcaaaatcagcaacccttttagaaccatccacttctttggatagtttcaagtttgagtcaatgatttcagtgccgttttccctgccattggttgtgataattttgggcaatgagtgactgagtgcgttatgtaaggcttggtggcaacatttctgctactcatttcttcaatttttctttaaagaaataaaagcaaaactgtgtttggcaattgtttctatttcttattgaaatttgaaagaacaaaaaagcagaagatggataattttataggggaaaatattgtgtagttttttcagcaatagtctcccagttttcaaatattcaattattaacaaaagaacaagatgcagtcgtttcagcaatgtttaattgttcgaagaacagtgtgttgttgtaagtacttgacaatgttttgggttcacctgacttcgttacatgctatcactggaggccctcctcacacccgggacacagaaataaaaaaccccgtgtcaaagatcaaaagccatggcgaaatctagaaatgccatcctcggtttcaatgattgcacattgtaggaaaactgtttgatcaacttcgttccgttcctaatgttaatcttttacagtattcatgtttgttgtgttgtcctccttttgcactttacaagagctgccattcaatttgctgctgcaggaaaagaagggac

SEQ ID NO: 64792 - DNA, 826 bp, Cucumis sativus
  Intron number 2 from transcript Cucsa.143720.5 (locus Cucs a.143720) derived from phytozome v7.0 (chr-ID scaffold0108 0; pos 47484 to 48309 reverse strand)
ataccttctgagaacaggttttcctttttttcctcatttcttttagacagaatgtagatgtgattctgcttccaaaatcatgttcttaattaattgctctattctaagtccctggcaccatccatttttgaggtaggatggaggagaaatagaaatgacttttttaacaccgaaatagaaataatttagggagagtgagacatggtgaacagtagttgactagctaagatgaggaatgagtatcatagagtctattatttgctcaatttagaatttacaatttaagtgaaaattcatgattaggaagcaaatagaacgagtctcagaatgtcacaacgttcctatttcctactccccaaccaactataaaaagggtgcatggttcctcgagattctgtgcttttgaagtctaattctttaagtagattgcatgggaaacagaacattctacttctttaatagctctttaagttcctaatcagaacattatctttggattatatattatggcttccacttagtttgattttaaatttgcatcggatcctttctagaggcttttctctatctttaagtacccagcacggttttcaggttttcttagattgcgatccaaaagatgtacaacctatcttttggcttctgctaaagaagtagtgaagaatgaagtacttattgttgttatgtttatgctgcaattaaaaaagcttaacagggaaaatcttacaacattaatatttcctagcacttggttctatagaatttcttgttttcccttctccttaaagtctcctctgcctcttgatgcgaatgatggtatacaggt

SEQ ID NO: 64793 - DNA, 472 bp, Cucumis sativus
  Intron number 1 from transcript Cucsa.143720.5 (locus Cucs a.143720) derived from phytozome v7.0 (chr-ID scaffold0108 0; pos 48362 to 48833 reverse strand)
tgctccttcatcactgctctcattgcataacccaggtaccattcttcttttttcatcaatgtacttccataattccccacttcactcagctttgtgccagtaaaatgcatctcaagaaactgcgatttcgcttttgctttcttttcgtgggttttgcgattctggtgaatttatgggttttttcttttactcatttcccagatctgggtcgagtggcttttgtttatgaatctacaatttgctacttcgtcttctgggttatgggtgttttttttgggttttatgagttggattttattccttttttagtttaatgattgtctgcttgtgggtttctttttttccttctaatggtaattttgatgaaatgttcttcaaatttgtgttctctgtcctattgaacttaccagcattgtgtttgtttctactgtttttagttcaggatctacttctctgcttagctgattgccat

SEQ ID NO: 64794 - DNA, 671 bp, Cucumis sativus
  Intron number 1 from transcript Cucsa.152120.1 (locus Cucs a.152120) derived from phytozome v7.0 (chr-ID scaffold0111 9; pos 445667 to 446337)
tcagctggaactgttgatccaactccggcagccaggtactcttccgcttcttcttcttcttcttcttcttcttcttcttctttctcttcactttctactcttctccttttcatcatttcttcttcttcttcttcttcgactctctcttctttggtcaacctagggttttacaatttttcttcttttcccctgatttgaggtctcaaattcttcaacttactcttcattctcccacacctacatggattccatatttctttttgggaacacgggaatggagggttgaatttacggttttcaggcgggttaatttaccgaataggttatgcggcagaggatctactgtgttttgctcctaatgtgaggtgtttgcgaaagggttatatgggtttcttttcttacatgattagcagcagcttggaatttttagtcttctctctctctctctatatatatatatatattcttctggagttgtatttgatgttgagttataattcaacaaaattcgaggtgtatacctgataaattatctcaatggataatgatcgaatggttagaattgtaagataaagcttgataatttgaattcacatttgtcttcttaagttcttgttgctctatgattcttatcagttctgctggagcctcatcacctgctgttccaacaa

SEQ ID NO: 64795 - DNA, 940 bp, Cucumis sativus
  Intron number 2 from transcript Cucsa.152120.1 (locus Cucs a.152120) derived from phytozome v7.0 (chr-ID scaffold0111 9; pos 446518 to 447457)
cctttaagcctggaaattggtttggaaaacctaaggttataatgtttatgattatttataaatcctgcagtgcatgtgtgaaaatttgcatgtattttaataactactgtacgtattggtccctttgtacataactcagttttataattttcaactcgtaattttaacttgggttcaatatagaaattctgtcctagaactagcttggttagaggatcaaactttttgttacttctcgcttaaacaggaaactgtttgttctcttggtttttggtaccgtttacgtaaaatctgaacttcaaaggaaaataagttatttattcatttttcacagaaaacagaccatcgacgtgtttttattatttatttggtgcgtgtctttgtctcttattaaattagtgtccttttgacccacattgttcattcacatctatatttttgtttgttgtgttgtctaaagagaggagactaagatacctccagttttctgtaatttggcaggaatattgagcagattttagtatttctttgctgccttattcttggaagtattgacaattaatataattcttttcatgtattagtccaatcctggtcacttctttcacttgttacttcatacgtagtcgatctcttaatctcgaactcaaatttaaattaaggaaacatctatggctgtagttggtttataggtgaaagtggaactaatgtaaagcaatgttataggttgtcaattttgtaaaaaataagaatagtttttttaaattgattaaaactttgggaatcataaggctttcacatctcatttcattttcgtacaactctatttttatctcttaaccactcaaagtaataatgaaatagattgtagtggtaatgaattttgaaacttaggaatattattctttcttgatattttgcaggtagtcaattcacttgc

SEQ ID NO: 64796 - DNA, 800 bp, Cucumis sativus
  Intron number 1 from transcript Cucsa.166260.1 (locus Cucs a.166260) derived from phytozome v7.0 (chr-ID scaffold0115 3; pos 1508701 to 1509500 reverse strand)
acatcactgcttctcctctcggcattcctcaacaggtctgtttttttttctttcttttttttcactttctttttgtttcaggctgtgtaccacgctagtttctgattggaacttaggatttgtgggttgctttcgatttcggttccctttgtttggttatctattggtggtcactttcgtcccagattttggtttggtgttgttgatttttcacatggatttggaatttcctgagttgttgacttgtggatgtatttatcattttttggacttgggggttccttttcagtgatcttcaagattaatgtcatctctaaagtgatggtttgggtgaacttgtgtttaaagatttctaactgaatcttgaactgatttcagaatctttgttttaggactgtcgtttgattaattaacagagaataatgctggagaaaacggatacacgtttctcaccgtgatttttattttattctttctgtgcctcattgatttgccttttatggtagttttaagacactctctttgttctttaggttgattttcctcttctgttaattttttctattttattttatttgaaaggttgcatcttactgcctatgctggtgttttttaattgaattcttctctgattcgattgaattttcccctacttataactttatattggcccttttcaccacattttcactttgttagagttttcaagttttgtagatgtgaaattgttagtgcatatatgattttgagtgacttaaccgagtttattaataaattcttattgtaggtcatagcagtta

SEQ ID NO: 64797 - DNA, 875 bp, Cucumis sativus
  Intron number 2 from transcript Cucsa.303640.1 (locus Cucs a.303640) derived from phytozome v7.0 (chr-ID scaffold0295 1; pos 1497711 to 1498585)
acccattgtcattggcatcagcattttcttagttggtaattttctcacaaaatagtgaactttacacacaaaccatagtcgaagttttgtcgtttgacgttggtctaggtggtcaagtactctattgaaccatggttttgcttataataatgaatttagcttcatagatttaagataattcaagaaaattaatataaaaattaccaaaatttggggtgttacaacttatcagtttaagtttttaggtaatcaatcattgatttaattaatctaacaaccttatgttaccatcttcataatgtattatgttaaatccatttttcgcttagttctcctttcctttcctttcctttttcttttttctcctttgttgaactctttttccttgaagggctgacgaataccaatgaagtggcaaccatgaaagagaattcttgagttcaaaaaatttattgaatgattcaatgccagataaatcaaactttagtgaccaaaaatctgtttaaaattcatacatatttgaattgaatcaatgataggtttattaactcaatctagagtcgacctagatcaacattccatctaataaatgaatacagattgcaacaatacaaaactagtatgagtaattaccatgaacaacttcactttagggttatagggttaattttaagcgaataacaacaatttcaaagaacttcaaatatagaagaataatccaagagtttcatctctccattttgttatatttgcaaattttctactgatatagtttggatatgattgaatatataattgtaattataattatatgatagggtgatgatcataatgtttataaatttgaatgaacttcaggaagtataacaacgttg

SEQ ID NO: 64798 - DNA, 915 bp, Cucumis sativus
  Intron number 1 from transcript Cucsa.251290.2 (locus Cucs a.251290) derived from phytozome v7.0 (chr-ID scaffold0222 9; pos 420769 to 421683 reverse strand)
aggtatgttatatgatatcataaatcaaatgcaacaatcaaaacgaaagctacacatttttcttcgataatcaatatctatatgattgagttgtttcttggaaataatgcatctatgaataattatatgaatgtttggaagataaattttgtgctggtgagttcgaattccaattgttttctcttattcttcatcttattgagtcattgaccacatattctattgacatcaatatcaatattttttttctttaacttgcaagctttcacttagctcaacctttataatcatgctttaatgtttcttacaagatgcaataaagcaaatagttttctgggcttacgtgtttgtgtgacaagctatatataaaagtaggtaactataatggatagccaaatataacaaaatctaaatctactgccgatagtctatctgtgatagattaataaaatttgacaaattttgctatatttgcaaattttttaaaatgttgttatatacttaattattttgaatctaattgctaaatttgtactacgttaagaaagaaacatgcgttacgtggaaatacaaaaataagacccctaaacacaagaaatttagcattttagtttagtaaatttgatttttttgtagtgaatatagatggaaaaattctaattgttactacttttataaaaaaaaggtaatgaaatgccctaaggcccaaggtttgcgccttgaggcttcacacaaggcacgtgtctgaggtctgccttattttgtgagtcttgccttttgaaggcaaggtgccagacccgtaccttccagttcaggctattacctttggatcttgttttcattaattaggtggcccatgctgtggctcgacattctgcagagggtattacaaagaacctgggatttgccgttttg

SEQ ID NO: 64799 - DNA, 477 bp, Cucumis sativus
  Intron number 1 from transcript Cucsa.235800.1 (locus Cucs a.235800) derived from phytozome v7.0 (chr-ID scaffold0201 2; pos 544102 to 544578)
atcttcggcgacgaggctcggattgggttccctttgtaagtttctttctttgcctacatccagaattgagtgacgaactatttgctatttaccgagtcttttttaaaatgaaaataattgtttaaacattgcgattatgtaaaggaactctctctaccctaatgtacaactcttaggctgcaaccaatggtcgagagtatcacatacaagaaactgaaagaaagttgtctttgccttagctttaacccagggaaaattagatttttatctttatacttgtctcgtcaaagttaaagcataaaattaagagtcaacaatcagaagtgttgaatcaaaatggcgagactcttgattaaggcacttttgttttttacttctaatggtttcacatgttcaagttgattgggtggattaggttcagttgctgaatggcttggcattatgtccattttcttttacagaaattaaaagtttcta

SEQ ID NO: 64800 - DNA, 776 bp, Cucumis sativus
  Intron number 1 from transcript Cucsa.303420.1 (locus Cucs a.303420) derived from phytozome v7.0 (chr-ID scaffold0295 1; pos 1366230 to 1367005 reverse strand)
gtcttgtttggtaagatttgttttttgtctgcttgcttgtttttgtttatgttactagcatcgagttttaaatggtggggttgttcttgttttgacgattttttatatctaaactgctgttcttctcttctttagctattttctgaaaagtttgtggaagttttggcgatcctcctcctgatctgcttcctggtagtttacttgtttggtgaacatatgttctgtttccagtttggtttgttaatgcttaatttgaatgaggaatatgtttttggggggtcttcagagtttgaatcacccagtaatgaatcgtattagatcatttctattggctcatttcagtgttgcttgtgataatttgaacatggttggcaacaacaagacgagggaattgaatctttaatctcttggtcgaaggtatagatatgttttgatgagttgagcttgtgctcaggttgatacatggttggctaagcttcgaaaccatgatttgatcaaacttagttaaattggagactcactaaaggaaactaactttgtggaaattagaagttcagtagaaggtgtagttctattaaggcttaccttttttcaatcacagtatgttgctgctacttataaatgttttctttcctgtggaacttacctatgaatcatggttgtaaattgttcattcagttggaagtttcgagtaatattgtaatgatttcaataaccaaactatgttctgtgtcgcataatttctctctgtagtgctgctgtaaattcagagaccc

SEQ ID NO: 64801 - DNA, 1055 bp, Cucumis sativus
  Intron number 1 from transcript Cucsa.196950.1 (locus Cucs a.196950) derived from phytozome v7.0 (chr-ID scaffold0135 7; pos 506816 to 507870 reverse strand)
agtggcgattcatttgatcggtacaaggaatacaggtttttcttctttttctttttcgattcttcactcctgttttctatctgagtgcgattgaagtatagaatcaagtgaattggagtgtgcttttggctgtagtggagtttgtacattttcattttgttatcttcttcctgaattgacgaaatgtctcgtttgttcaattctttctgtttaatctgtgcagacttaattgttttagttcattgttcagttagcattgactagatatccatccttaatctttaacgtgtagtatacccagtgggacctcatagatttttaccgtaccaattcattttttggatgctataaatttccttccaagcagaatcaaagcttgaaacaattattgtgatgaattgttttgtcattcttctgttctttgcatatcacattatcatcacatgatttggtgctttaattgcagtcttcaatttgaaggcacctcttattttcaatgacgagtgccatgttaaaaatggagctgtcaccttcattccaacctattggttgtcgagttttcaatgatatcacagtccaaatgaatccttttactactctatttaattcagtctgacccacaactttttaagacacgttccaacgctctgacataacaacttttatatgtccttcctccagttgatttctgctttaagttacaaatcttttattctcaattcccatgttggttttcggtataatttcaattgtgtgtactgtgagtgaaggattgtggtggaagcaatctcagtgttaagggttgtttcttaatttacatgcctttttgcgatcaatcatgtgtgccattattcttagcttcccttgtatttcaagaatacatcatttttccatgctataacgtgaatgttttacttaaaggatatagttcttattcattttgttcaaatttttttcaattttctagaaatctttatgtttttttcctgccatatattaatcaagtttatttgtcaacaggtactgcctcactgtgaatataattgcattcgtgt

SEQ ID NO: 64802 - DNA, 447 bp, Cucumis sativus
  Intron number 4 from transcript Cucsa.170740.2 (locus Cucs a.170740) derived from phytozome v7.0 (chr-ID scaffold0117 9; pos 74393 to 74839)
gggtgagctcattttctgtttataaattataattgctcatagttaactgtcacttctcttttccctttatgattgcttaataacactgtcgacaatgtcttcttcaagtagaaattgtcttctgcactggatttaacttgtcaacaccaatcgtttgcaccttatcatctagtttctcacaaataatcaaataatcaactgcaagtagaaatgtctaatgcattggatttaacttctaacactaatcgagtggagtggacaccatttgctgtaccttatcatctagtttttcagaaataatcaacttattactacatgatccatgaatgtttctttaagaatgagttgggctaggagtgggactaggacaggtgaaagtgttctcataatgtacaattgattgctattgcaggctgcagatcaaagtttccaagcaggattaagcac

SEQ ID NO: 64803 - DNA, 558 bp, Cucumis sativus
  Intron number 1 from transcript Cucsa.234390.1 (locus Cucs a.234390) derived from phytozome v7.0 (chr-ID scaffold0199 9; pos 332313 to 332870)
ttagtcgaaggatctctcctcttccttattggcaggtaactttatttatttatttggtcaatatatatttgaatctttcttctcttcaagattttaattctcttttccctttttgtttttgttcatttcatgttatgagcaacacgtctttcttcttcaaccttagctaatgatatttaaagttctttaaaattaactaacttatggctaccaccaaaaacaatatactcagaaatgtaagtttggtaaagtttgaaatatagaaaccaaattaaaatgagtgaaatagttcaatagtaagagactcaaaactttttactgagtgaaaatctttctttctttaatgttttttaaattattaggcaatatatttatttaacgagatatcgacattcagtttcagttagcaagaaaagtatggtttgatgattattaaattgggaatgaaacactaagaatcatccaatttcagttaagcaaaaaaacagtttaattagttcttctttctaaaaatcttcatttcaactaagaaaaaaaaatggcgtttgtgctgttcag

SEQ ID NO: 64804 - DNA, 204 bp, Cucumis sativus
  Intron number 1 from transcript Cucsa.275810.1 (locus Cucs a.275810) derived from phytozome v7.0 (chr-ID scaffold0258 1; pos 738676 to 738879 reverse strand)
acccttattgaaagtgaagaggtgcttaatattcttctttgatgttttctggattttgaagatcatacaagtttcttctttatatggttataattattgtcagtaaatgtctcttatcaacaaaaaaaaacaaaatattgtcagtaaatgttctattggcactatgcaggttcgttttaaacgcactgggttgtcagctagtga

SEQ ID NO: 64805 - DNA, 562 bp, Cucumis sativus
  Intron number 1 from transcript Cucsa.149200.1 (locus Cucs a.149200) derived from phytozome v7.0 (chr-ID scaffold0111 0; pos 65071 to 65632)
tcaaaactttactcagttccaccattactaatcaggtacgactcttccattaattacaccattgcgaataaattatctcagaagattcacattttgaagttttctgatctttcattttatgagcccaagaccaagacatttataaacgcatagagaaaaaaaacaacttttttttcccttgagtaacaacaatgtagagttcgtagatttgagttttgaaactcaattgatttattgcttgccatatttgttagaaattcaaaggtttcatttaatattatccctatttactttaatttcttaccatcgttcaagtaccaggccggttgattctttgacaaattccaagaagaaaataacctttttttttcaaccatttgcttagtttttcaaagtattggttgaaaggagatatcaaaacaaacattttagattggaaaatgagggggtaggcttaacttttctaaaatttagataaataggatatggagtagagagcagctgaaaagaaaaaaaaaaaggctggaatgagaacgatgtttcattgaataattcaggagac

SEQ ID NO: 64806 - DNA, 496 bp, Cucumis sativus
  Intron number 1 from transcript Cucsa.160070.3 (locus Cucs a.160070) derived from phytozome v7.0 (chr-ID scaffold0114 4; pos 357983 to 358478 reverse strand)
ttcgccactacgaatttattggtgtttctgaggtaaccttcttcttttaatttgactaatcttaaaggaattgtatgcagttaagatccttgctttctgtctggtagagggtttcttctacctcactctaggatgtggatttgacgcgttgtagttatatcgttgaattgtggtttgtaagaagatttatagattttctacctcttttagtcaagttattgtcagtttgtttatggagcacagaactgaataaagcttagaagactatcgattctaagaattattgcttctgaagttcttagttgtttatcagttgtttttgttggtgcaattgcaagaattgggattttttgttcttcacattgaattttgaaaatggctagagttttgagtttattgtatactggatgaaggggtggaggcagactgtaatgtttgtcaggatactaactctttaagtcttaattattatttgttttttgtatgatgaagggag

SEQ ID NO: 64807 - DNA, 721 bp, Cucumis sativus
  Intron number 1 from transcript Cucsa.220360.1 (locus Cucs a.220360) derived from phytozome v7.0 (chr-ID scaffold0165 8; pos 1816557 to 1817277)
tccttgaagaagaagaggaaaaagaaaaagaaaaagtaaactttgagcaaacccacatagaagaagaaaagagatgataattttgtaacttcagtcatccattatatgtcaggttgtcaatgtttcgttatggacctccaaaacgggtcacgtgtgcaatctccacataaatttagtagtttaactccaaggacatgcttcttccttcattttgcatgtttcttaaaatcaattattcaattccttttcttcaatttgcacatttttcttcaatcaattcttctttttgaatcgatttttcttcgattgaatatgccatttttttttagaatgagatacaagaagagtgaggagaactataaaaagtgaattgagaaaatgagagagggaggaacaggccagaacaaaaaaatagagaaatgactatataccaaaaaaagatctcttcctgaggataaaccaacagctatggtcgttattaacgctcacgaggcaacaaaatggaaacccacttcataatttcttcaacaatggagcgtttgattcttaacaatctaaacccatctttatccaaaccctttcttctcaaaacctcttttcttcactctgtcttcagccatcaaatcactctccggaccgcccaaattcgcagtttcagtgtcacttgtaagaataaggcctcgcaggacaagaagctgaagaacgccagcaacaagattgt

SEQ ID NO: 64808 - DNA, 730 bp, Cucumis sativus
  Intron number 2 from transcript Cucsa.220360.1 (locus Cucs a.220360) derived from phytozome v7.0 (chr-ID scaffold0165 8; pos 1817468 to 1818197)
gctcttggtatcgtatcacccttttttgttgttttcttttaagtgcttccttatttgattggtgaatggatgatgcctctgcagaaattttggataacatgagaattgaactagtttttcttgtttatccagagcatttgcaaaccgccaaacccctttcctttggctagatcaaatgtttctgtatgcttctatctatttggattagtatctggattgaatgtgattcttcgaaaaagaaatagaaaaagaaaaacaataataggtaacgaatgttattctaatgcttctacctatttgcggtagtctcaaaatttcagtttataaaggtaagttttgtagtttcaaacttataacaatttagtccttgaactataagatgcagtaattagttcatgtacttatttgtaataatgtaatcctaccatgaaaaatcatttatttattatgtaacaaattaatctttttagctcataaacacattttgatctccaatcaatgtattgatcaacatatgcaagtaaggaaatttttggtctaaattgttacatactaaagttgagggactaaatacttattggaacaaatgtaattgtaagactaaaatgtttcattgatcagctgttaaacatgttgaaatgataccatattaatgaaatcagtctgaacttatcatgtttggcactgttttgcaggtactgtcattgatcaaggcgaagcccctgatttc

SEQ ID NO: 64809 - DNA, 298 bp, Cucumis sativus
  Intron number 2 from transcript Cucsa.237430.1 (locus Cucs a.237430) derived from phytozome v7.0 (chr-ID scaffold0202 3; pos 340698 to 340995 reverse strand)
aaaatctaaaggcaacacttctaaggacttttgaggttttctctctattctttgctttttaactcttcatatgctagaaatataattattttagagaaaaataatttaagtcacgtttagtaactatttgaatatatatggtttttcttcggttcaatgattggttgtattttataggctcttgtactatattagataacatgtgtgtttcatctcaaaaacaatgagaggaataatccatatattttcatcaaattgacactcttcatatgtatcttcaaataggaactgaagttgt

SEQ ID NO: 64810 - DNA, 656 bp, Cucumis sativus
  Intron number 1 from transcript Cucsa.236630.1 (locus Cucs a.236630) derived from phytozome v7.0 (chr-ID scaffold0201 8; pos 486536 to 487191)
agtaggattacagtggttgaaaccattaaagggaggttctctttcaattaaatgctccacggtttgcaaaaagatatgctgaattatcaatgtgtaaggcccttgcagacagagaaagaagattcatttggtcaaagcttttatttcttttagactgctatgacttgatgtatgagtggagattttaatgttactcgtttggcccacgaacgtttcccttttggcaaaagcacacgaggaatgaggttatttaacttcattgatttggcaaaccttatggagattccattttaaaacggtagatacacctgtctagagagggtggcggctcagaaaagttaaaacagcagttaaagcttggcatgcttcttttcaggcttcccttcaacggaagacagtttgttgaaggacttggaaaattgaagaggaactacatttagaagagcaaactgaattggctggttgtggggaatgagaattgtggttttttccaccgttttctaaacaaagaaaaaggaggaatcaaattacgaagttggttgatgatcaaggagtagcaatgaagtcctctcaagacattgaaagggtcaatttcggtttctttgatgtttaatacaaaaggattccaagggatagattcatcccatttatcactg

SEQ ID NO: 64811 - DNA, 259 bp, Cucumis sativus
  Intron number 2 from transcript Cucsa.160050.1 (locus Cucs a.160050) derived from phytozome v7.0 (chr-ID scaffold0114 4; pos 349091 to 349349 reverse strand)
ttttttactataagatgtaaggatcattatcatctgcttctgttttgtttttcttagttttcaggtcagagtactaactttaaaattccatgaattggtaattttattgatctgatctcctatgttctattgaatttattgtgcattttattgggccatgacatttatctaattattgctttgatctcccttttagcaacatcttatgcattcttcaaatgcaggaagggggattataaccgatacttagcggagttta

SEQ ID NO: 64812 - DNA, 233 bp, Cucumis sativus
  Intron number 1 from transcript Cucsa.160050.1 (locus Cucs a.160050) derived from phytozome v7.0 (chr-ID scaffold0114 4; pos 349639 to 349871 reverse strand)
agccagacttgcagaacaggctgagagatgtgcgtttcatcaaacccattttttctttcttctctttatcgagttttaactctcctttttatggattattaatgcggttttgttgaactcgatggttttcacgattagggttttctttgtattttgaagctttttaaggttcgaaaattgtcgagtacttttgatttcactggcatataatttcatctgggtttgtcttagaa

SEQ ID NO: 64813 - DNA, 500 bp, Cucumis sativus
  Intron number 1 from transcript Cucsa.288990.1 (locus Cucs a.288990) derived from phytozome v7.0 (chr-ID scaffold0269 8; pos 483256 to 483755 reverse strand)
tgtaagagggattctacttggagttcttattcatttaaacagtttccaatttcactctgttctcttctaaggattataatgtgtgctacacttttcacatgtgttcatgcaattatagttttcacaattatgacttttcttcaaagaattgtgtatttgtgctctgtttcatgatgattctctgctttggcatacagtaattatttcttgcatcaagatgctttattaagcttttcctttctattcttcccgagtgtagaattaagaatatttagcatccttgttcctttagaagtaaaacaaatctgaaatccactggcttaattggaataatcgctggtgtttgtccacaaggaccaatttaacgcaggagctacttcctctagttgatctggacatgcataaaaacaaaagtcaaaacttcagctactagcatcatgattatgcatttagttgtagtctcagataatcttacttcgatatcaatttggatattgcag

SEQ ID NO: 64814 - DNA, 664 bp, Cucumis sativus
  Intron number 2 from transcript Cucsa.157510.3 (locus Cucs a.157510) derived from phytozome v7.0 (chr-ID scaffold0114 1; pos 461199 to 461862 reverse strand)
aatccaagcggaggactccactgttgctaggatttgtaagcatttcaaatccatttccttcttctgtgtgtgtgtgtgtgttttgtttttttgttgttatgaacttcatcatgggcattgagttgggtaccttacgaagtctgatttcatctatctatggcttctgttaatgatctccatctctcacatttatgcatagaaatgttttatcatttgccttttttcagttttgaaccgtgtatatgaggcatttgaaggacttgcacatgtcttagtaaatgacggagtgggtgggaatggtgtattgttatgccaatcagttatccagatataaagcggagtttataagttttgtagctttcatcttttaatattgttttaatctattagaagtttgtacttcaagtccgtagtatcaattgacatggaacaagtgatgatgtgaaaattttgaattttttatttttgaattttgacgatttaactagccaactgtaggtagtagtttctttttgatacattagacttttgcaatgaaacaagtttctctaattttttttttgctcaactcattgaaaagccatggccaagggatagatttttcagtacgtgcatgctattaaatctgtattttcctattttagtgtgtgagcaggcatacaga

SEQ ID NO: 64815 - DNA, 635 bp, Cucumis sativus
  Intron number 1 from transcript Cucsa.251000.1 (locus Cucs a.251000) derived from phytozome v7.0 (chr-ID scaffold0222 9; pos 157786 to 158420 reverse strand)
cttagactttgcaaataccaaggtctcttttctcttttcattctcttctgggcttcttcttttacaatgtgttcttcattttcatatggatgtctaaagtttggattactacacaattttgagattaaacttaggaagttttacccattggaatttcatttttaaaacaatttttgttcatttacacttgagtattttcagccacatttaaaaaacaaaactatgagagaattggaaacaaaactaggagagaaatggtatctataaacttagttttcaaaaatttaaaagcaaatagttatcaaatataatagaactttaggatatcttaattagttaggtccaagtgaaaggacataagaataaaattttcttttgaaacccttttgtccttccaaacccaagtacgagaatacctaatgatattgataaagagggacaactttttagtgttcccaagtataaaaaaaaatactttttagtgttgccaagtataaaaaaaattgtttacaatcacttaaaaattaaactcatttgaataaagtatagtatagaaagatattgtaaaatgataagattatcttgtatattttatttcagttgtgactctaaaagacccaattgaagcacttgat

SEQ ID NO: 64816 - DNA, 411 bp, Cucumis sativus
  Intron number 1 from transcript Cucsa.271760.1 (locus Cucs a.271760) derived from phytozome v7.0 (chr-ID scaffold0250 0; pos 561999 to 562409 reverse strand)
ttcggctccgtgaattacttgcggcttgctccaaggtaagacctagaagttccactccaagaacttttctgctcaaatttcatcccccctccggattgttggctgctccatttaactatgtgacaccagggaccggattttttcggttcgttgttgaacgtgtatgcttataaaactgtcatttttaggtagttggcttacctggctgcaagttctttcgtttaatgcgatggtgacttttatagataagaatgatgtaaatgttttcaggggcaaggattatgtgctattaatttattttcttcaaatgaaacatggtgaacgagtccatgactaatcttgttttgcgttcagtagttttgataatggctggattttaacaatctgtttgtcttttaaagtcgactgaaa

SEQ ID NO: 64817 - DNA, 957 bp, Cucumis sativus
  Intron number 3 from transcript Cucsa.306760.1 (locus Cucs a.306760) derived from phytozome v7.0 (chr-ID scaffold0297 7; pos 199735 to 200691 reverse strand)
tttcactcgataaatccagaagccgaggagaataggtacatttccctttcaaattgtgcttcgttttccccatcgtaatcatattgcccatctccatacaaaacggtgatagtttaatatattagattccatttgcatgttaaatgtgataaggctttggtgctgagggttagctctggtagcagaactgtgctaaagtgtgtcacgaaatttaaacaaatccaaacgatcagcccaattgtcttgttttgtgatctgttaatacattcttttgggaaatcaatttgtggatcctgtcattcatttgattttagaagttctaatcaaagagaagttgagttttcttcccatcaactcaaacaaatatgttctgctaatatcaaaagtggctaactcttcgatgcaacagtgtaaattcgctggcatctgcacttgtgttgtaattctgtaagaattttgttggggaagtagcagcattttccttgttgtgacaatgcttttacaatgtagtctatggtttttcaaaaaagaaaaaaacaatgattctcagtgaatggtaaaacatgtgcggaaacctaattggagaagtaaccaggcacctcgccctcctccagggtagcttgcaagctactgatgtgccttgtacttaagggcatataatgtaggatcttgtaggtatttttgttttctttgaagattttacaaagccgctcctagatattcttagagagagttagatatcaattcattagaagttttagagagtttatctatttggtttgttccctatattttcatagaacagattcccatcccttcaatttgaatgttgaatattccaagaatatagagttgtcactgttactactaatttcaaagaaagttaaattaattttcatgtagataaatgtttttctccattgcaggatagtttctcttccagcaaatcaagatttt

SEQ ID NO: 64818 - DNA, 758 bp, Cucumis sativus
  Intron number 1 from transcript Cucsa.254540.1 (locus Cucs a.254540) derived from phytozome v7.0 (chr-ID scaffold0222 9; pos 2800728 to 2801485)
accagatcggctctacttccgtctctaaatttgaggtggatggctttcatttcaaatgggggtgacccttttgctgtttgattgtgttttatggttattttgggagtttttgtcatctgggttcggattggtttgttgtttttgtgcatgttctttgatttctacttcgttgacttctatacccttaattggccgatcccatttctgcttttgtgggatgtgttggttgcatgctttggatttgtcttgtgaattccttgatctgttatctttgtgggctttggttggtttttcacgaaaatagtgttttctaagtttttaatttggtgaatttgacgtttgtttttctactgatttctctttgatggtctgtggaggactgacttccttgagccttttgaattcaaggttcagatctccaatttcggcaacatttgctttcataaaggccgtggttctgtttctatgctcgggtcctttttactgttactttgaaatttgaaaattggttgcggttcaccaagctttagagtagatctctatcttggttttggctcgtggtttcatacttagaaacagtgtttactggcttttgaagttctgtggtggctttgcttggtgttccgttttcctttgggggagagggtgggggtgtttatgcattagattggcttcatacttcatttttcttttcatgtctcaagtgaattattgatgatgcaggattccccagttttcaactacatcaataatctttc

SEQ ID NO: 64819 - DNA, 824 bp, Cucumis sativus
  Intron number 2 from transcript Cucsa.283440.1 (locus Cucs a.283440) derived from phytozome v7.0 (chr-ID scaffold0265 3; pos 575176 to 575999)
caagttattgccaacgtaaaatcaaatatccacttctttgaagcttcttagtgattatttttctcaaatttttttgctcattattcttatttcttctactgatctttgagtgaattggggtgactttattttccctctccagggttctgtttctttatgctgttttttctctcactccctcctctttttttggggggtatcttttcattatttcagtgagaagattgtatgtaagtgtggagggagtcttcaccgtttcaaatgttggtgtttgtttgtgtctaatgtgctcagaaattatgtttcaagttaataagcattacatttcattgtagcttataaccattacgattatttcttttctggggaagtggtttttaagtagtataaatggttgatgcaagaatcaattacttcaataataatatttagtttgtagacagaatgctgtttgaaatcaccaaaaattattcttttctgtttttgctgaagttaacattaagatatcttgacaattccatttgttcactgaactatatccttttttcatgatagttgataagtctaaaatttgaggggcatttgtctggaagatgtaaaatgttgaatattaattggtgttcatcggctcaaaactttgaagtgtttcgattgagttgggaaatagatcatagaagtactatatttctcccccaagatttcaatcatttttcggttttaccatgattacttgaaccttactattctcaaagcgttattgctgaattcaaaacatgttatatttgatttaaaagacattaaatcgaggacttaatcaggtcgtc

SEQ ID NO: 64820 - DNA, 883 bp, Cucumis sativus
  Intron number 1 from transcript Cucsa.198180.1 (locus Cucs a.198180) derived from phytozome v7.0 (chr-ID scaffold0135 7; pos 1297286 to 1298168)
atcatcgccgcatacgggaggttcgtctttatatatatatatatatatattctttctatttatatgcatggtatatccctgactctttcttctcagaaaactagggtttcgattttggaaaatatcaagaagttagatagtggttggagagttgatgttaatctcaatcaaacttacctcgacagtaattaacatatctttttaatccgtaaatctgaaagaaaaatacaacgatcgtatatataaattaagctaaattaagggagaagtatttgacctaatgagtgaagttcatgtaaatttgtgcttgaaggagacgatagaccaatactggctggagtttaggatgtgtacttgtaagagatcggatgtttgatcattatttgaccacaacaaatcactattattcaaactaaacaactattaaccacacaaaatgagtttaaaattctatatttggttgtagaatttttgtttaatttgtactttgtagttttgatatatatgtttgtggccaaacatctattggatattttccattattagttaaaatagtacgaaacaaatatgatgaatatatatattttccgatgacttataggtaaagactaaaccaaactctcaaataaaatgtgaaaccatttttgtgaggaaaaaaaatggaaaattaatcctgtttgtgttacattaagatttttcatatattttatattgatttacataatcaacgtaattaaatataaatatgtgatttaaataatataacttaaaaattaagatttctttttataatatgtagtgatgaaggtaatatttatttaatatattgggtcatcgttcaagtacaggaagagatatcggtgctagtacaggcccttgcaag

SEQ ID NO: 64821 - DNA, 768 bp, Cucumis sativus
  Intron number 1 from transcript Cucsa.205550.1 (locus Cucs a.205550) derived from phytozome v7.0 (chr-ID scaffold0141 6; pos 607005 to 607772 reverse strand)
attactgtcaactcagacagcaatttctccaagaggtaccctttgttttgtatttggtaattcttgtatattttggatgtgttttgttggtgcgcttgtttattgggctggaaatacgcgttggaataatctggtagctgcagcaatagtactgagaatacaagctttgtgcggattgatctttgtttactgtgattttgttggaaatttgttgcatattgtattggattgtggaattgatgagcattacagggatgtattcgaataattgatccgagattttggccatgatttagtgtaaaagtgaaagttacttcttcaagaagtgtttgttgatttcgagtgcattccgattcctgggtcatttttgtttttgtgaattgtgaagttattgaatctataagctttgggtacattatgttgtcaggtggattagcatcatgtctttatttgtggaattctcatatgatccattgtaaaacatggactcgttaaggatgttgcttgtctagacgctcatggatttctcgattagctagcttttgtagttgtaacgctatgtatccattttctttttgttcccctttcgtttaatagatgaacttagtattgtacgtgtgagttttgaacaataggaggtgatcttgctctttaagttatgattgttttgttggaaaaattgcctgtgaactcctaattaactttgttgatgtttctctcttttgaattccaggtatctcaaatatttgaccaagaagtatttgaaga

SEQ ID NO: 64822 - DNA, 880 bp, Cucumis sativus
  Intron number 1 from transcript Cucsa.244570.1 (locus Cucs a.244570) derived from phytozome v7.0 (chr-ID scaffold0213 5; pos 429788 to 430667 reverse strand)
gatctaagtaacaataagcttccaggttcttacattattaatcttctctttctttctatattatcttttcattttttgtttttatttaacattattatatatgatggggtgtgatgtactattcacaagttttcttttttaaaaaaagatgcccctctttttgttatgttcataaaatactcttcaaattatttttaaatttatttaattggtgtttgtttaattaacaaccttcttaaaaaaaagttttttttgttgaaataacccatcctattcattaaaaatatgatttataactttttttttcaatagtctatcatattttgtaaatgatatataatataaaggagattattattttttatatttataattattttggtttcttatgactatattttttaactaatttttactttaaaacattttttttaaagatcaatttagaaaaaataattaaaataactctattgaaattggactttttttttaaaaaaaaataaacgtgtaaagttttaaaatggaaaaatatgaataaaaaaaataaaatttatattttaagtccataaaaaaaagatttttatttcgtcaataacaggttctctattcaatataccttgcaaagagtgtttacttttattcttcccataaacctctaaaagtttcaattttgaactttgtaaggcagttaaacaaaattagaaacaagtttcgaaaatgatttttttttattagaaaaaatgggttagaacaccattgtacttttgaatttttttctacagagtccatgcagtttggatatccaaataattaaatcaagtagtgatttgaattgaaaatgtcaggggggtttccgacgaacgtgttgggagcgtcggag

SEQ ID NO: 64823 - DNA, 408 bp, Cucumis sativus
  Intron number 1 from transcript Cucsa.306700.1 (locus Cucs a.306700) derived from phytozome v7.0 (chr-ID scaffold0297 7; pos 142165 to 142572 reverse strand)
attcggattgtttccttgggccgacggtgattctggtacgtttcttcttcttcatctttcgttcttaacaaatctgttgcttatgctgaaggaccgatgcgtatggttacgttatttacatttcccccaattctatttacctgatttggtgagattatgtttgattccaaatggggtttccccccttttattttattgattgagtaaaagggtttttttttttcttttttaaaaagtttgttctgttgttacggtatgagggtggttttcgtaattcgagtgatgggaatgaaatgaattatttgggttctgttttatttatgaagtcaatctatcttgtacaagggattgcttaaattgaaattgtgtacagaaatccattggcttcctgaggagagagtcacattg

SEQ ID NO: 64824 - DNA, 374 bp, Cucumis sativus
  Intron number 1 from transcript Cucsa.157810.2 (locus Cucs a.157810) derived from phytozome v7.0 (chr-ID scaffold0114 2; pos 51535 to 51908 reverse strand)
cggccctcaccgtcgttcgttttgcctctgaacttgcttgggccgacgccggtcccgaggttcctaattttagtttccttttactgatttctctgcttccacatccattctggatgccttatttgatcactacgcatttctgctaattgggtggcacgggaagatgttgagaaaccctggttattgagtactcagaggatattagttcgttagtctaatttacataatctaattaatcttgctatctcaaaatgggttgcgattagagtttatgtgtagttatgcttgttagtcccgtggcttattatttgacgtttttttttcttcaaatttttttagactgctgagccacaagttaatagactctgcgttga

SEQ ID NO: 64825 - DNA, 796 bp, Cucumis sativus
  Intron number 2 from transcript Cucsa.175870.3 (locus Cucs a.175870) derived from phytozome v7.0 (chr-ID scaffold0122 5; pos 365337 to 366132 reverse strand)
ccattaccaatctctgtggtatgtcaacacctttaaatcctatatatatatattatcaaaaagttttctaatcaactcatgtttattcttaaatttttaatttcagggcattccattctaaaaaacgccttgttgcacttttatcgtattctcaatttctactaaactcacacactactttcaaaaaagatgtcaagaacaaaaatctcttaccattcactagttttcaccactaaatatataattgtaattattttgaattaattaattgaaataaacccaaagaagggtgtaaagattttaatcttttacctcaaacacatgtcaattattattgcttagttagatttttttttctagttaaagtacatagagatgaatggatgagttcaaatttgaaatccacctttttattgtctatttgtttgtatattttcaaatctttgcaaacttatttacttctgtaactaataactttgttggttgagaaatgagctttcaatttttaattatttataattttcatgaatatgtattgtccaaatggctaatggtatactattagtaaattgttttcttcttcagctcagcgaatgattttgctaacttatttatgactatgtgtctgattctgataaagtaagtgagaattggttaaaatgtatacttcaacttaaagggttaagaatatcctatcattttgtttatcaaaataataaaagttttaacccaagaataaagaagaaaattctgatggttgggttgttgaacttgaaggcagtgtatttggacagtt

SEQ ID NO: 64826 - DNA, 651 bp, Cucumis sativus
  Intron number 1 from transcript Cucsa.256640.1 (locus Cucs a.256640) derived from phytozome v7.0 (chr-ID scaffold0222 9; pos 4206346 to 4206996)
aggtattatattagttcactctaccgatttcaactttcttttttcggtattttaaggataatcatgtttaattcttagcggattttggaacctccttcgatttttttgtgtttccccttgtttttttaaagtgatttcgtgtttaatttctcatatggtgtccatagagattagaatcagtgaagaattttaatctcaatgattttgaatttttaaagtgaggaaaggaagcgtcgtttttcttttcctctttcctttttgttcttccgactgtcttatacggacgcagtacgattggtagtgtatactgttcatgtttaaacaaggacctatcgttgattattcagtgatttgttctatgatcaagaaacggaattgcactagcaaatcctcccaatatggaattccgttactgtaaacctctaattttccctactcttctgtttacattcaacattttcacctaatttctttccttctccattaaattcttgtgttctaccgaacctgtaaggaatcctttatttttcttcctccactgagtctaacaaacaatcaatcctattgcaaaatttcgatttcctattttcatatcatatactcaaccttccaaatttgatattggattcaggaagttgcacagaaaagtgg

SEQ ID NO: 64827 - DNA, 705 bp, Cucumis sativus
  Intron number 2 from transcript Cucsa.303770.1 (locus Cucs a.303770) derived from phytozome v7.0 (chr-ID scaffold0295 1; pos 1604982 to 1605686)
ctatcgacggtatgtaagaatattacattcttctctcatccagtctctttggtttagtggaacaaattgttgctataccatcccattctagaataaaggcattgtaggaaaatcattcaagccttttcaatttatagcttcattttcttctaaacagctgatgctgattgtcaatatgtgacactagtctttgtagatggatatacatatatataaggagtctgttagaaaatgaatgctgtgtgaactactacgataagtttacttcgagtgaacttcagtgtgggtacatcttttccttctggcatgtcagtttttacccatataaactgaggaagaaattttgaaattaaagttttaatttcatcgaaatgatccatgaattcaactaagtgaggtacttaatatccacatttttgtgagttctttttttgtgggtgttggtttcttgtagctcacagttttcttttccctcctacaatcactaaaagcagcagtgtttgaattgcattgcaaagaatgaaatggactgagaagatgaggttcttcgtgccttcagtttttcaatttaacgatcaagcacttcaatcttatatcagaatcactttttttttttatgcttgaaaatttttcatattggcatatgtaacttaatcaagtggttgtatatttgctcttaggtggaactagcagttcatatctacc

SEQ ID NO: 64828 - DNA, 777 bp, Cucumis sativus
  Intron number 1 from transcript Cucsa.223440.1 (locus Cucs a.223440) derived from phytozome v7.0 (chr-ID scaffold0177 4; pos 47310 to 48086)
gttcccatagctactccaaaaactcccactatcaggttcttctcttttatcatacatctgttccaagttaaatcctatatttgaacctttaaatacgtgtcataaatgacttagaacagcgtgcacaccaccatttctatttagaattataattgaaacagtgtggtaatggttggattcttctgtttttattatcatcatattgttctaagtattttttttacaactaattgtgaattattggtgaaataacttaaaacggcgcacactacacacatcacgttctttcattagaatttttagggtggtggagcgtgtggattgtctcttttttcaattatcacccaagtcaaaattttgattcaatgaatgaagggccaagaacggtggacaccaacacgacatgacgatacctattctttatgtaatcatttcaaacggtgtaaggcacgtaaatttgtttgtggaataatctagaaccgatagtttttattaggagtttagaatagcactggtgttaaagtgtttagattgttctgtttttagtcactactaccacacctcttgaaatgtcgaaatttgaataaccatctaaaataaaatgttattttatatcaaggattaaaaattagacgtggagataactattactatagacaaagttcagttgtatttctgttgtaattcatttcagccatttaacgtgagcaacacaacaataagatgatcatttcttttccagaaatcatttgtagacatagtaaggatcaaagtcga

SEQ ID NO: 64829 - DNA, 823 bp, Cucumis sativus
  Intron number 1 from transcript Cucsa.248600.1 (locus Cucs a.248600) derived from phytozome v7.0 (chr-ID scaffold0220 7; pos 522414 to 523236 reverse strand)
catttaagagagtttcatgagtaaagaggatgaaagaaacatgagagagaagcttcaaacatcatacaagggagtggatcccatgaaaaaggcacgtcttcgaacttaaaagctaagtttgaaactttgcatatgaatgaagggaagccatcttagactatttttctagagttttaactgtcaccaatcaacttaaaagaaattgtgaaaagattgacgatgttaaaaccatggatatctaaaatactaagatcattgattcaatgtttgatcatattgttgtcataatggaataaacaaaagacttggacatcatgactattgagcaactcatgggttcgttacaagcatatgaagaaaagaaaaagaaaaaagaaaggaatcgaggatcaatttctcaagttgcgaattgattaataatattcaactagtggaggagttagtccaataatataaccaaacaaagacgagtacatgatggacatggaggacgaggaagagaaaaaagacaaagacaggggcttgattggagacccaatgaagacaacaacaataactatcaaagatgatcaagaaactcaacacgaggttgtggacaagccaactcaagatcaacgtatgataaatcaaacatttaatgctatatttctcagaagtttagtcattatgcatctaaatgtagagctcctataaataatagtattgaagatgaggcaaactacatttaaaatagaagttaagaatgtgacaccttgttaatgacttgtacaaatagcgaatggagcaatgataattcatggtacctagacactagagcaaacat

SEQ ID NO: 64830 - DNA, 774 bp, Cucumis sativus
  Intron number 3 from transcript Cucsa.157920.1 (locus Cucs a.157920) derived from phytozome v7.0 (chr-ID scaffold0114 2; pos 132259 to 133032)
ttgatcctaaggggtgagtacaaagttcttatgcataaaggctatagcccttacatttgttgattcaagtttaatgccaattgattgtacatttgtacttgatgatatatccaagctctgttttttacactgttttcaaatcatttgaaccaacgttataaatttaatctaatcttggttaatgttgatgttgatcccatagggtgagcacggagttcttgtaggtttagccctggcattcgatgtttgatgtcaactgattttactttatgatataaccaagctttgtttttttgcaccgattccaaatcatttgaaccaaagttataattttaatctgatctgggctaatgctgatgtcgatcccaagggatcagtactgagtgcttgtaggtttagcccttacattggaagattttcaagtttaatgcccatattgcacttgatgagtcaaccaagctttgtttttttgcatttatttcaagtcatttggacagaagttataattttaatctaatcttggttaatattgatgtccatcccaagggatgggcactgagagggttagcccttacatttgttgatggttcaagtttaatggcaactgattgttattgttgattcaaccaagctttgttttttgcactgatttcaagtaatttgaactaaagttatacattcaatctgatcttagttaatgttgatagatatcttcttttttctcatggtgtgtttgcagtggtaggagaatcacttcgagcggtcgacgggatc

SEQ ID NO: 64831 - DNA, 551 bp, Cucumis sativus
  Intron number 1 from transcript Cucsa.219500.1 (locus Cucs a.219500) derived from phytozome v7.0 (chr-ID scaffold0165 8; pos 1267715 to 1268265)
gcagttacaggtacatttaattgaactaaacttaaaattttctcttttatatcatagctttcaataattaaatcatttgggacaccgagttgagtttcttgtccagagctcaacttaatcaatgggtctaaagctcaaagttaattcaagtccaacccagtttccgtcctaaagttaacatttgagtagagtccaatttaacacaaacaaatatgcatatatatcaagttattgatgtgttatattatatatatatattaaaaaaacaataatcatgctctttaattaagaaattatgagttaacaaacctggaggaaatatattttaaacaaaatctacttatgtaaactaaataagagtaggtttttttaaacttgtatacacgataaaaggttagagaatggaatttctcacaagaatatatatgatattaattaaataatcaatgaaaaaataataacatgtgatagttaatgaaaaggaatgatcaaaatctaaaatgtaatagagattaaggaaaattttaattaattttcagggatcttgtacc

SEQ ID NO: 64832 - DNA, 1037 bp, Cucumis sativus
  Intron number 1 from transcript Cucsa.240160.1 (locus Cucs a.240160) derived from phytozome v7.0 (chr-ID scaffold0204 7; pos 94688 to 95724)
ctctgttgtttctggcatcaaacgttcttctgacggtatgttttattctgtctattcaaatctcttggcaaaccactttaaaaaatgacgcaagataattacttgagtacttggagattggctttaagcttcaagaaaacgaggcaagatgaatgcgttcacctctggttcctgaaaacatcaccaatgtgatacttaaatgttttgatccttttcactggtctcatatgaccaccaaatggcattcgagattgtgggcctttggtttggcttcagtgcctcgattcgtgctgttcgctgtctttttcgttaatatatatgtgtgtgtgcgtccgtgtaaaacagtattttcctcgttttttttttttgtggaaatttcgatagaatttgtggcataaattgccacgatgtcctagtcaatttattttctcccatatctttggcatattggacgaacatcaacccgaacaatagttcaatttaagtaggaaaagaaagtagtcctcattcttttacgttctctctgttaaggacagtgggatttccatatggattctgtaaccatgtattttatttataagccatctttcttgtctggaggctgtagctgtagccaagagatggtggaaatctctagtgatccatgccgcccactatatcatatcctgatatacattagtttatgtatggggttggtgtaatggttcgttttcatcctgctgctgtacaactaagttccaccacaacgcaatgatgcagttttaattgatctgatttttcgctatttttatgtttaattctagttcaaagttcctaaattctataaatcttcctccagattgcttatttatatgatatatatttcaaaaatgttatatttatacattatctactatatttaatttctaaatctatacagccgaaagagtaattgtaaaactacttacgtagtaacgtacatgtttgtctttcttgtacatatttgtctactatgtacaatagtgctctacgatcagactgttttgggttcctataac

SEQ ID NO: 64833 - DNA, 560 bp, Cucumis sativus
  Intron number 1 from transcript Cucsa.139640.1 (locus Cucs a.139640) derived from phytozome v7.0 (chr-ID scaffold0106 6; pos 901406 to 901965 reverse strand)
gggtagtacggtgagttttaggatccatgtctattttttgaatttgggatgattatcttttgatatttgttgaagttgtatcgatttatggtttagtttctttagttttttattagtgaagttgtttattgttttaattagtactattacttcggtctcgtaatcgatccaatacctctgatgggtgctataaaatgaagttatcagcgttttagtttctgattggttctttaaggttcagctaaatatggatagatgttagatgcttgaaccaaggtaggtgagaagggaaataaggtgtctgaaaatagtcgggttggtatggtggacattttatagtcgtttggtcttgtgcctacaatgttaattttcgtttacttgcaaacgttgtagaagggtgaagatttgagccatgacaagtttttctagtgagattgtaacttctaattatccgttttctgtttatatactctgggttaagaaatgggaaggctggaagaatttgaagttgtagaatcaggaaatttagaatttattttctgtttaatagcctcttgcag

SEQ ID NO: 64834 - DNA, 712 bp, Cucumis sativus
  Intron number 1 from transcript Cucsa.153550.1 (locus Cucs a.153550) derived from phytozome v7.0 (chr-ID scaffold0112 4; pos 595318 to 596029)
tcattctctacattccccttctctatcgcaaaaatgtaagcatttccttcctcttcttcaactctaatgctcaccttttaacgtctcaatccttgtttccaccttttgtttatttaatttccttctgcaatcttaacttctagatctgttggtttctttattattggaatttctttttccaaatgcgaggtatacaatgtagatacattttgctgtacttcattggatactagtgcgcgtcagtctcttgtctgttttaccttaccttgactaattgctttgcgtgatttgttaactgagtgatctgggttcgttatgttatgcccatatgttaactgggtaattgtggaaaatgagtagttggggtttagaaaaaccaatgctataataaaattgcgtctttttgtttcgaaatgagtcttctacatatctacacaagcgggtttcgtccttttttgattaatcaggttcattaatacataaatgtaactgagctagcttgacaattcttgttgcgatttggcactttggatcctggatattagttatattagtggagtactatatccaagtcaatttttttcccggctccaatgaacttcatttaagtgaaatggtcttttatttgacatttgaagctcgagttccttattgtttccgtggtttaaattgtgcagatttcgattttcattaacgagataccagttcctga

SEQ ID NO: 64835 - DNA, 526 bp, Cucumis sativus
  Intron number 2 from transcript Cucsa.153550.1 (locus Cucs a.153550) derived from phytozome v7.0 (chr-ID scaffold0112 4; pos 596271 to 596796)
taagcctagctctgggctgtcaattgatctaaaaggttaaatttctggtgatttattttcgttattttgttgttctggtttacatatgttgtgtatacttctctgtttctgtattcatttcagtcttcttggctcacttgcctttaataaattgtggcattcatccatagtgcttcccggggattctacgaactatactccctttttgtggggggcttggttcttttcatgcctcttttaactctttcattctctttaggaaagcttagtatcttattaaaaaaaactagattttttgaattgtagtcgcaactattattcacattatggtgtcagaccctgtcacatttgatgtataagggggattttgaatttgctgttactttattttcacattgtgtatctggggttattctttctcatatataggcatgaaatacttgaaaattaacaagtactagaaagttttcaatgaacgtcgctttctcatgtgtaggtaagagagcatttattgctggtgtagctg

SEQ ID NO: 64836 - DNA, 991 bp, Cucumis sativus
  Intron number 2 from transcript Cucsa.179790.2 (locus Cucs a.179790) derived from phytozome v7.0 (chr-ID scaffold0123 3; pos 166173 to 167163 reverse strand)
cttttggattacagggacgttgtttatagttggaggtacaaacttctttccataaattgggctctttgtaattaccagtttagtctcatattcatttagattagggtctgcccttgttgatagggttgagactccatttcttttccctccctatgatatgtgttacttttcacatttctcattctcggtttcctacacagacacatatcttaatagttaatactgtgttacagagttgactactagatcttttccatggttgtggtttgcgtgtcttcatagtagccaatagccatagtttacttctattttttgtgattgaaggttcaatgttccaatctgtgtatggctttccacaatgcaattattttttctgtagtcaacggggtaaaaaggaaaaaacaaaagcattttccacatatatttcataaataagtctattgaagctattgggggaaggtgaattatggcaacgtttcaccatattagatgttatattgactgaaaaggtgctattttgcatacaaatgttgtctctgcatcttccaagactgatatcttatctgtgaattgtcacgagggtgttacaaaagtatcaactaatttctccgtttgtatggagttacatgtactaataaaatgtctatagtactgggaaggaaaatgtttatgggcatattatctctaaaataaatattttaaatttagaaatgacatgtagagaaagatagatgtttccaatactttccaattttactgcacactgctcatggtggttgcaataagagatctatatgaactttttatacttctgcacaccactattcacccttatgcccactttaatatccgtttcccttaagggtaaattttcttgatgaatctatactccacttcaatcaaattgctatttgaatcttgaaattctgtcagttgatttgggtttttggttatcctttcttatttgcaggttatttattctctcttaatc

SEQ ID NO: 64837 - DNA, 564 bp, Cucumis sativus
  Intron number 1 from transcript Cucsa.200160.1 (locus Cucs a.200160) derived from phytozome v7.0 (chr-ID scaffold0136 5; pos 622345 to 622908)
tcggtggcgccaaagagaaaccataggtttttttttcttgttctttagaaaaatctcattaagttacttaataatggtgtttatgacgtttttcttctaattgaaaaataaaattgtgtcgtatctgttgttaatcaagaagaaaagtggatgaaatggagacaaagaagatttaaagaatgcatagtagcttctctagtttaattcaattgaaaaaaacaaaaaagttcaattcaattgaaaattgcatttttaatttctagttgcgtgtcaaaactagcttactctgtcatatgccacttgaaaatacataattccgcccactgattattcttaagtcaaaagcagtgaccttccctgattttaaacaagcttccttcaccgcagctgataactcaacaattggtgtgctcacaatcaacacctcaatttttggtacatagaacaaaaatcatatcattctttcaaacatagagtagtacgttgttttgttcctcccataaaccataagtgcaaagtttccaacttttccatcttctgattcttactttcttagcaggaact

SEQ ID NO: 64838 - DNA, 876 bp, Cucumis sativus
  Intron number 3 from transcript Cucsa.141620.1 (locus Cucs a.141620) derived from phytozome v7.0 (chr-ID scaffold0107 9; pos 47977 to 48852 reverse strand)
tatcgcaggaaagcacccagagggcaaagcaaagagttgggagaaaaggcaagttccaacttccataaactggtcattcttcataattcatttttgttctggttttgaactttctgattgtatttatttagtagataattttaaattttaacttattaatcttttgattgtttgagattggacgtgaaagattattcatgcagtactagttcttgatcatgcttcttttccccactgaatgatcatagttgactatcaattttttttattccttttttcatttattagtcatgatatacaaatttattttttggatcgatatgtttatatttagggttgtgtgtaactctttatttatctatttgtatatgcaagattgaaattatatcttaatatatgaatatcttaggttattttactgttacatagtatccttcctcaaaacagagatctataagatcacatgaatctcttaagaagactttgagggcagttttccaatcgtgaaaaattgagggagcaaaacagttctatattaggaatttttatcatgtgtctacccaaaattgaccacatcattaagtttactagccacatcatgagtgtaatgatgaatttgtagaatgatccatgaagttctgataatatgactcagcatattaattatgcattacgtggtcttgtgctaactgtactacccagtacatcagggaagtacactgaactttcatctgttaatgaaccctacatctaactgaaatttactagcacaatgactagagatttttagttcttttaacacacctccgttcgtttgcatgcctgttatattaatatgcagcggcacctacacaagttgcatttggctctggaggt

SEQ ID NO: 64839 - DNA, 213 bp, Cucumis sativus
  Intron number 2 from transcript Cucsa.181160.1 (locus Cucs a.181160) derived from phytozome v7.0 (chr-ID scaffold0123 9; pos 157788 to 158000 reverse strand)
aggtttgcatttttatctataattcagttaatgcagaaactgttgctttataggtattgtacactgagcgtggaggtttacaattatgatatagattggcatgtcgggttgaataggtttatgcagagtgtacattttcttcgggcttttattttttgaatttatttgagaatttttaattctaggcaggaaatccgaacctccacaagctct

SEQ ID NO: 64840 - DNA, 726 bp, Cucumis sativus
  Intron number 1 from transcript Cucsa.148830.1 (locus Cucs a.148830) derived from phytozome v7.0 (chr-ID scaffold0110 7; pos 813595 to 814320 reverse strand)
tcaactgtcaaaaggttcgtcattcttatcttcatcaatcagtttaagctttaattttaagtttcattcaaatacaagtgtgaaaatttaatgataattttgggttggtacgtttttcttcttctttttgataaccctattttttgatatcaggccttcttttaatttccttaaaaatacgatactcgtattttaagatgacgagtaaagaaggttaatttataagagagttcttgtttttttttttctaatatatatcttctaattaacctatctgtttctatttcttcttgattattatttattacggcttcttttaattttccgatcaatatgaagaatttaggaagatgagtaaacaaagtaaatttgttggctaagtttttttttttttaaaaaaattatatcttctaacctatttgttgctatttcttcttgcttaatatttgttagggatattcttttaatttcccatgatttaaaatctaacaaagaaagtaaatttgttggtaaggttctttgtttttcccttctaacccatttgttgttatttcttcttgattagcatttattaggtcttcttttaatttttcataatttaaaatcagtaatttatgtattatcgtgactgttgtgtttttgttatgaacatgatttcatgtgagtgtgtgtgaaaatgctgttggttcaggtgggtgcgccgcctgaagtcgtagcgaggctgga

SEQ ID NO: 64841 - DNA, 1035 bp, Cucumis sativus
  Intron number 1 from transcript Cucsa.256800.3 (locus Cucs a.256800) derived from phytozome v7.0 (chr-ID scaffold0222 9; pos 4309727 to 4310761 reverse strand)
tcgagatctcttgggttttgttagacatcatttgggtaattcattattttgttttactgtcaattaatggctgatgaatcaatccctgttctgaataaggatatgtttgttggattgttgtttaaattttatgtttctggatatggtggggatgtcttgtccgttctggtatgttcgtttttagtttgggttttattcttttggaagccaaattgcggggttcaaatcaccactttggtgaaaatactacatgggttttatgtttttatttctgtgaaaatggatctgatatggactttgattttttatttacaatttctcatcgctattatttttctgggttgtactggttttctgatatattgctgttgcttagttgaatcagccagttgagttcttatttgtaattgtaaatattcaacggttgtttgccatttccaatcccagcttctgattgtaattggcttgtttatctctcttgtttattgtgctttcttgcacctgtggccaacattatgagtatctcgtttcatttttcaatcccatagctcatgtggttaatgattcatcaaaatgaatcttgatccggatgtagcatcaagcatacttcactagcatttcattaggttcatgtgcaatatatttcttcatgagtgtttagtaaagacgatgaggaagtgttattcaaacttttttcaaatgggaactaggaatctgtctatttttgtgctctcgacttttggtttttcccgatcttttcacactgtcgaagttcatttggaaatatgttttgcccttacagttatgctctataatttaaatgcaacgtcagttgcaataatctcaggggaagtacacgcttcttccagactttgtagtgtacaagagctaaatttttttagcaaaaaatatctctgtatacattttttttgtcattttgatgtgttgaactatttccgtgtccatcattttgaattgacggacatactctgtatttgatgcatggttatcatacatactgtgaatgaaagttgt

SEQ ID NO: 64842 - DNA, 819 bp, Cucumis sativus
  Intron number 1 from transcript Cucsa.255160.1 (locus Cucs a.255160) derived from phytozome v7.0 (chr-ID scaffold0222 9; pos 3276028 to 3276846 reverse strand)
ttgggccaatccagtgctcgttgtcgccggtgagggtgagaatgaacagactgccacgcttctctagagtgcacatgtcgtcggggggtgacggtattttagaaacaaagttataaataaagaagagggagggaggagaaaagggcacgcatttcgaaattggctcttagaagatcagttgagaacaaagtaaaaatcgaactttatagaatcattaattattatgattatgttatggatatggtatataaaattggttggtcaaagaatatggttatttgggaatgagcattaatattggcgtgcctaaaagaggaaaaacacaaagcaacctcaccttagatggcaactttatgataacaagaagtcctaagccaataaacaagtaaaaaacagtaattacgggttaaaatggtatgaaataaaacaaaaaaaccaatgaatgttgaaataatttgaggatttgtaaaaccttcgttagttttataaataattatttccgtttttaccattttgcgggttctttttcccgcaaaatctgtttggcgattagcacagtaatcggcgttatggagagaaaaagaccgcgaaattgtgcatacaaattctggctggcgccaaattcaactcaacctcttctacacaaaacccttcccctttccctttcactccacacaacttctaatggtttgacgattttccacactatgcaactttgttaatcttgattaccctcttttccggaatacccaaaagttctttttgcctgattttcaacatggaggtaaacgccattctagaagagaaactcaaaaagat

SEQ ID NO: 64843 - DNA, 816 bp, Cucumis sativus
  Intron number 1 from transcript Cucsa.162270.1 (locus Cucs a.162270) derived from phytozome v7.0 (chr-ID scaffold0114 4; pos 1971181 to 1971996 reverse strand)
actattgggttttagtggtaagtttgtaatagtgggtttgatgattctatgttgtagtttcgttgaggtataatgtcgaattaaatggttgattaatattggaaaaattgcataccataccatgttttagaattttgcaaatatgacaaaatttccacttataaaaatactctccatcttaaatttgttattattcctaaactatcattcaataacttattttttttttcctctttttaatgtcatactcattatttatttattctcccgatttttaaagttctaattatttatttatttttatactagaaaaattatttattctttctgtcttaagcttgattttagaatatcaatattattgctttttaaggtcctaattatttatttattcttatactagaaaaattgtttattctttctattttaatcttgattttagaatatcaatatcacaataattgcaatatgaaatataatggttgttgatcggactaatttaacttcatttatgatattttttttactttcttcaatgtgtattttgagttatttcaaatgattttgttttattttttacattaattttgttttggatttactttgtctcagttttttatattagtattgtgatagttatattatatgtattagttggttaatatacttactacgtaatttttcattttttcaaattttatgcagttcattagagtattattaagtatatgaatgaggtaactcaatgtataattatcaattatatcaacaatatattgttaaagcatatcagtaaagtgaatcattatcaagtat

SEQ ID NO: 64844 - DNA, 990 bp, Cucumis sativus
  Intron number 3 from transcript Cucsa.136530.1 (locus Cucs a.136530) derived from phytozome v7.0 (chr-ID scaffold0104 4; pos 1157177 to 1158166)
tttggatctgttattcagctaattgcttgtgcaaggtctttatgtcactccatatctctttcttctctatttagccctaaaatgtcttttcctacctaacaaatctaatgtcacataacctaaattggaaaagatttttttttttgaaatgacctgccttttgtttctaaaactaatgttgttaaaactacaactagaattgaaatttgttaaaaagtttgaagaaaattgagacttgaaatgctgtaccatgttgctccaaactcgattttggtataatatttggacacacttatattcaaaatgtaatttgaatcttctttcatgaaaggtcaaaggtaacatgacatcttttaaaatataagaagtgtttaaacttcttgttgagtgagttgttataattcactccacgtttggaatttaaatgcgatagttgttgttttcgattattataatataaaattaactacaatatcactattttaaattatgttatgttaaaatgtctattattttctatactaaagtaatatattccaatcataaaaactaaaataatcttcatacaaaaacgaactattataactcacacaaattataatagtaatcaacttagctctccattataatgaaaagttttaaagatttttttttaaaaaaaatcatttagcctatcaaatatttaacaaaagtcgaaaatgaattactaaacttgccactccacttattatgtgggttcaaaacacttatatggttatgtgggttgtagacacttatctaatatagatatcaatgattgaaatatagttgttttttttggtgtaaagttggaaagatccaaatggaatgtaattaaaattattaaggaggaaaaaagagagtaaaaaaaggtgaagtgaaatgatgatataatattagagtaatgtgttttacttgttgggtttgattgatgtgttgttgttgaatgtggcagcaacatatattacataa

SEQ ID NO: 64845 - DNA, 495 bp, Cucumis sativus
  Intron number 1 from transcript Cucsa.241920.1 (locus Cucs a.241920) derived from phytozome v7.0 (chr-ID scaffold0204 7; pos 1778577 to 1779071 reverse strand)
tctctgcatcaaagaacgttttagatttaataaaggtaattctcactatgtctaacttatttttcacttgtttggcccttcaagtgctttcttactccagaacatttatgtattgcgaagatgggcatcgaacattttagtctttttggacacatttgcttttactcgctagctttcaagatggttgttgggtttaaatatagatcccttttcttttagtcagagcattttttctcaatggaagttgttattgattattaggacaattaggacaacgaagaattttcaatttctttttctccgaagggactttggatttatggaaggcatgatgccaatttttgataacaagtattaaatggctatggcatttattataaaacggagcctaggtagcaaatataatgtttatgggttcctttgcaatgatttaccttttttccgtttatttcttctttagaaattgcgcggtgaactagacaagcttttgaatag

SEQ ID NO: 64846 - DNA, 556 bp, Cucumis sativus
  Intron number 1 from transcript Cucsa.259520.1 (locus Cucs a.259520) derived from phytozome v7.0 (chr-ID scaffold0222 9; pos 5965278 to 5965833 reverse strand)
gaataccccaagtataaacctaatactcaacccaggttggttaaacaaatttaataagcttgctattttatttttatttagaaagaaaacaaattgaattaatttgtagacaaataatttattttaattaagaacatagattagatttttgaacttgcaattaaaatgtaattaaatagcaaaacaaaattaaacaagtgaaaacaaatggagtttataaacatcatcttgtaatcaatgttttgtttctaaaaattaagtttaatttctcttcaattataaattaaactttttcaaaaaataaaaaaatatgtttttaaaactactttaatcataaacaatttttaaaatatataaaacacagatgttgaatcaaataaatttatagaattagttgtgaaaaacaaaagtagagttactcctcaaaatagctatgaaacgaatcaaaattttgatgctttaatcatcgttacaccaactattgcatgaataacaagtatttgttcatatttttaacgaaggtcaccggaggccaaacaaaaaccagggatattcc

SEQ ID NO: 64847 - DNA, 299 bp, Cucumis sativus
  Intron number 2 from transcript Cucsa.232400.1 (locus Cucs a.232400) derived from phytozome v7.0 (chr-ID scaffold0198 9; pos 384164 to 384462 reverse strand)
tggcttgctgtttttcctgagggaaccgactttacgtataccttccactccctttctactatattctaagtttttttttttttttttttctgtttaaatatattcctctactaagcaaagaaaggatgggattggtcaaaaccatccattcctcctttcaatcttaatggtatggttgcaaaaattatgcctgatctattagctagtttgagctttgaaattttagcttttgttcttgatgatctttctgcacttaacaacttgtcaactcacatgaaagttacgtgtagggaggcaaa

SEQ ID NO: 64848 - DNA, 393 bp, Cucumis sativus
  Intron number 1 from transcript Cucsa.232400.1 (locus Cucs a.232400) derived from phytozome v7.0 (chr-ID scaffold0198 9; pos 385010 to 385402 reverse strand)
ttcttcaatctctctctttctcttcggtttctgaggtaattcttgcacctatagaatgcatttgttttttgtttttttttttaatgtaattcagctgttcttattagctttagatctgtatttgaattcagcatcactctgaaaattgttcttgttccttaaattggtatctgctttttcgtaattccctttttgggttttccttggaatggaatccttgatgccttttggaatgattctattggggatttcagtttatttgtcttttccatgtcttgagttgtttaaatttcattagatttgatgaagaaattgtgaatctcttaagggatgtaaaaaaacgtgtgtttgtttgcagcccccatctgtaggagaggaattctttgaatcggt

SEQ ID NO: 64849 - DNA, 993 bp, Cucumis sativus
  Intron number 1 from transcript Cucsa.273260.1 (locus Cucs a.273260) derived from phytozome v7.0 (chr-ID scaffold0251 1; pos 278724 to 279716 reverse strand)
ggatttcctttggcccaaagtggaggagcaaccaggtttcatttcatcatccaagtttattgttgttgctattatcgttatcgttgatattatgtttggagattggaacatggttagaggaaacgggttttttggggtgggattagttattgattaagcttcaaacggttttactagtcaagttgcttccaagttcaaagattctttggttgggttatgagtagacattgacatttatttgcttatgaaagtagaaaatacaattcgaagtgactcgataaaactccggttttcttctctggggaagtatagagatgccaagctcaggttaatcgagcaaacctcttattcaatctgaagaaaagaaatcattttgaagctagctagttcatatcatacattttcattatgctagcttcgattttcatttaccttacaaatcttatttggtatgaactcggtcccagtcagagtagatttttctttttttctgcacacagtgctccatttgaataccgagtcgttgccctcgttacttttttttggtctccatgttataacttatggcagtaatgacaatgtagaacttcgtccatatctcgaccagaaaatctaacctgcctctatttggtatttttggttttatattcatgatgctctttaattctgtttataaagtgattccctttctgtcttctgtttacaactgcacgtaatctttgttatcttaaattcttccattttcttgtttaaaatacattactcaatgcttagagagatcaaaacttcacaaagaaatgtactcatggtggtagcatgttttaattggtctgtaacttcttgatctcttaataacgtgcataggatcataacacttggaaagttaccgaactttttaattatctatcgtcaactaatattagttttccctgcttgtgctaaagtcatttcctgccataacatttaatatccatacaggttctcttgtattgg

SEQ ID NO: 64850 - DNA, 250 bp, Cucumis sativus
  Intron number 1 from transcript Cucsa.176590.1 (locus Cucs a.176590) derived from phytozome v7.0 (chr-ID scaffold0122 5; pos 774958 to 775207)
gacccttataaggtaacgaaaaattgttctaagtttttctctcgttgatgcattttgacatttgttgttaatcggcgtttttttttttattttgatgttcggcttgatcttcgtctaattgtttgtaactcaagaatttatcaggcgtgttgttatggagtattgaagttttgtggcgatgttatagaatggctcatgtttgttgcgtttttttttaaaaattgttttcaggttctcggagttgagcgga

SEQ ID NO: 64851 - DNA, 971 bp, Cucumis sativus
  Intron number 2 from transcript Cucsa.169190.1 (locus Cucs a.169190) derived from phytozome v7.0 (chr-ID scaffold0116 3; pos 147236 to 148206 reverse strand)
ttaaagctaaagctctcaagttgagctcttatttggtctgtcctcacgctttgtatggtttagttgctatatttgaaaatttgaatgttgtccattttgttgttcatgtcacagctcacagcactatatttgttaagctactaattcattttcttttcttactctagttgtaagcacgacaatatgagaattcttttagtactattttgataatgtacgaacttctcgtttgaaatagatgaacttgttcaccaagaaatgatatagtgaaagggcactccctcaagggtgtgcggacaggcaccgagtgcaggtctgggctttgccttaggtgcacattagacgtgtcttttgtgaagctccaaggctggccttggggatttttcattattaaaaatacccatactaattaggggttttcttatttattaacaaaataaaagaattttttctatgaagcttatatgcaaaattccttaactcgtgtttagggtaacatttttttccttcatttttctatgtcaagtcgtcaattatgctttcttttctttatggagtactttcatgtatattgcacctcacacaaaaaaccaaccttttttgtgcggaatgtgctcaagccctagaagactgttgcactttgttgcggcttgagttttaaaaatactgactcatatagggagtgagaaagaccaaagtaaaggaaaggaaaagggactataagaaaagcctagagggaatatcaccccgatttaaacaagaaatacaaggtattgataagaaaaagaacaagataatttataattatttgacaaaattgggttttcatttttgaggtataatgtgaatgaaaagggtgagattctaaaatatttaattgacatgttattttcttttctccttgttaaaaatataatattatcattttatttattgatgatgtacatttatctgtgggtttcagtgtttgg

SEQ ID NO: 64852 - DNA, 500 bp, Cucumis sativus
  Intron number 2 from transcript Cucsa.298370.3 (locus Cucs a.298370) derived from phytozome v7.0 (chr-ID scaffold0290 1; pos 24856 to 25355)
gacgtgccgggaacttgggtattgcttcaattttgatgtttcttgatgatataatcttgaatcttgattcggggactttaattttggttgaatcggaatatctgttatttttagttcttgaattttttaatgtatagtgagatatgggaacttctctttgaatcatctcattgaaatttctggtgttttgatcgtcttgtttcattcattagatagtggaaataagataattggaaaagcaagaaccttattgttagtatttatgtagatattagttatattttcattgacattttcagtatttttctacacatttacaatgtgatgttgaacgctttgatttgttggaatgctgattttattgcacaatgtttgaattgttgccatgttggcataaatttataatgtgatatccaatttttcttcatcatggtatgagtttatcttctgtagtttaagctgttcagattactaagatgcttttcaatcaggaaaaaatc

SEQ ID NO: 64853 - DNA, 813 bp, Cucumis sativus
  Intron number 1 from transcript Cucsa.205100.1 (locus Cucs a.205100) derived from phytozome v7.0 (chr-ID scaffold0141 6; pos 214430 to 215242)
tgtccctttgggaagctattggacgggtaattcctttctttctctatctctacgattttcatttttttttaaaatgaatttcaaatttttatatatatttagttttgaaatggacctaataatcttagattttatattcgtcaattaagcaaagcttaagtacgaatcttgctacgtatgtgtttagagtaaaacaaagtaatcgataataattggcgtcgaaattgattgttaacaatgattgacgtgtaagttattgaaaacatattacacagaattatatagctaaataaattaaattttgaagttgagttaaatggataaaatattttcgtgaatattaaaataatatgttaaaaaagtttataacgggaaaataaaagtatagaattcaacttttgttattttaattagaagttagtgaatgggtttcttttatttatcttgtcgtgttaatattgatttagaataaaaatagacttttccccttagttaataaaagctgcttttgtaatacaaaataaatgccataatttcctttttcaaaagtgagtgtatttgtatttccaactttataccttccttcaaagccaatgcatcgtattaattattttctaattttctttgaaatttgatatcatttaaatgagtgtatttattaatttatgtttctactactttcatatgtgcttaaaaactaaacctcatgagataacacatattttaaccgatcataattcatagttttttaaaaacaaaatcttcataagttttttaatactgacattatggtcattgcataggttgtgtcag

SEQ ID NO: 64854 - DNA, 513 bp, Cucumis sativus
  Intron number 2 from transcript Cucsa.138860.1 (locus Cucs a.138860) derived from phytozome v7.0 (chr-ID scaffold0106 6; pos 132092 to 132604 reverse strand)
acaagcgtcacaaagctcttcctacgatacgtcaagtaacttgattcaaagctctgaggtgccaacagcgggtaactgaagaaccggcgattggatattgaagattttagttgatttcgacaaaagaaaatataaggataagaaacagatcttgaaatggcgtcagagataatgtaagggaaattttgcggtatagccaattcgagcatgttcgagaactaatcggcgactcaattctctctctcggtttgtttctcttctcattttactttgaggttcctattgaggcatttggctttcggatttggttttgtctttctttctcttcatgcgatgccgtgtcacttttttgcgttggattaaatagtttttctatacaaaattactcatttaccgtaacttcataaatcccacttcttcttcttccaccgggaatttgggatgctctctcttaccggcggcgctgtatttcttcgagctccaaacagatttccggccatccttcgtgggttt

SEQ ID NO: 64855 - DNA, 425 bp, Cucumis sativus
  Intron number 5 from transcript Cucsa.161240.2 (locus Cucs a.161240) derived from phytozome v7.0 (chr-ID scaffold0114 4; pos 1150337 to 1150761)
cattctagagggtgaggcctctactctgtatactccaaatagtgatgatggataaacagttttctggtttgacattgtgtgattggattgccatggaatcaaatgggaagaaactcaaagtaatggcttttggattgacattttaggactacctcttttagttcatttcacattcacagtagagttaaatagggtcataggatgctgtagctgtaaagggacatgttaagtctgtcagatttaggtacctttgcacaaaacattgtgctgctcatgatgaatgatttttgcatctactagggctactgagctggactctttttacgtagttggctcactcactggcttatgaatgatttaattgtcttcttgtaattattttctgcttttgaatagctctgttaacttctctgacaggtacgtgc

SEQ ID NO: 64856 - DNA, 973 bp, Cucumis sativus
  Intron number 1 from transcript Cucsa.273740.1 (locus Cucs a.273740) derived from phytozome v7.0 (chr-ID scaffold0251 1; pos 789214 to 790186 reverse strand)
gaggatcgccataatccacccagaccttggtataggtaacaacatcagttttctctactgtttcaattgctgaatttcgattaacgtctctctttttcatttctctgtattggttagaattttgatttatcgaagatgataaagtattcctgtaagcgcattaggatatttttatcgatttttggcggattgcaccggcacattatgtgaatttggctcttgttttgtgttgattcgtgttgttactcttttctccttagatgtacggagtgctggcctgttcaacttaataaatttaaattgcttaatttttttttttttttatgtgtttgattctttggatggtaattcgttagtaatacattggaaaaggtggtatgacttttttgagcatgttaatcttcgagttacaggttgagaatacattgaaaggattaaacttcacatagatcttaaattttaaattttgatatcagtggtgatttaacatacattttgatggaatttcaccaaaggaagctataatcagtcatatttttctagttatcatctccccgtctgtttctatacaataatagtcgaaaacaatgaagggtgttaatttcccaacgattatccggaaaacggaagaaaactaagaatggatttcttatttcttagcatgcaacttaggcaataaattttccaactgactggaagtcgagtcatgcaaataataattctgagattcaatccgaagtctcatttttgatttcttaatatatatttttttatatctttgttcactttcatctattaagatagaagatatttaaaattagaatcaatggacgacaaagtttcttccattctatgcttcttcttgttctaattttgtatctgtgaatatattttctaaccttccgagttcatcgccatagaagtttgtaaccgagtatagtgtttacaggtggagctgagagattgattgtag

SEQ ID NO: 64857 - DNA, 978 bp, Cucumis sativus
  Intron number 3 from transcript Cucsa.176510.1 (locus Cucs a.176510) derived from phytozome v7.0 (chr-ID scaffold0122 5; pos 744927 to 745904 reverse strand)
taaggtatgataaaattaaaatatatgaaatccagacagcttttcttctagtaagaagtgaagtggtagagctggcccaatccactttgaggatagtaggcaggcttctagtatcctgcgcaactcagaaccctatggaattccttctcattaaatacaaactaaacttttcaatggttggatggaaagtgcaagtgtgatcataaaatttaggagcttacaagaagcaagacctatgtagctcacaatatcgatttcttagtagttaacttgtatagcctctgtatgctatcttttttcctggatggcttctgtgttgcctcctataagatttagttagtcagtaacatttgagtctctgactttctgttgtgaaccttagatgtcctacaccttttgaattctagtcctctcttagttctatcctcagttaggttatgttctatagtttgagatgtactaggaaaaatatttcctgatgcgatggattaattttcttgattggctactatgctttaaattattgtctttataaagggatgttaccatgctcgtactgtatttttatggatatgcaggtatcttccctctatccttcaccatgacatctaaatatctttatcctgtcccttcctacactatgcctctaaccttcaccatgacatcttgttcctacaattggttggattacagtcctgggtttgaaatatgtggaggaaaaaaaattcacctgattttctgtattcatttttattgtttgctttaatttagaattgttcttttgaatgggatgttgccacacatcatgatatttggatatgctagtgtttctcattccagagaatgtggtaaaaagttgcaccagatgatggtaactatttgtatggtgcagccatctctacattggtttcatttgcacgtcttttttattattatatgagaaaatgaaatagtgccccttgtctatctgttgcagat

SEQ ID NO: 64858 - DNA, 867 bp, Cucumis sativus
  Intron number 3 from transcript Cucsa.141770.1 (locus Cucs a.141770) derived from phytozome v7.0 (chr-ID scaffold0107 9; pos 152928 to 153794 reverse strand)
gtcacaaacttactgatactgctcttcctgaatcggtacatcattacgtttactcttgacaacttgaatccttattttcctgatattgttatttgaacgaactggagagtgtcggcgtcaattgaattctgacccaaatgattttagattagtctgaccaaactctgtagtgtaacatcaataagttacttagttactgtaaccaatcaactttgtgaattagcatggtattcctgcaatgtcatttatcggtttgtcatttatcttgccataaccaatctattctctttcattcgtggaacaaaagaagggcacacgtatacatgccagtttattaaatatacgaattttccatttttttttcagactagaaacaaattttgattatttatttttgtttgaatctatgatgaacttccctcctgttcttggttctacttcttccacttttcatcccatcttgtatcaccaaattgtgaaggacaaaatcaaacgcattcatctgtcttattgctgaaaaagtcatttagaaataatttaaaaggtgggtttagtattttttagataagaaaatgatgggtttagcagatgaaaatgtgtccctgagaagcagtgagcgcttgctctatttctcttttaaggccgtattttgtcgaatcatgagctacttaccatggaacgctctaatttcaccttcatacaattaatcagatgaaactttgatattcatttaaaagcctacgttttgctaccaactatgttcgaatcgggttgagcttagaagtacacgcattcaaacaattttttgattctgaaactttgtttacaaccttcctacccccgttttgcagaaagactggaggaaag

SEQ ID NO: 64859 - DNA, 864 bp, Cucumis sativus
  Intron number 2 from transcript Cucsa.307020.3 (locus Cucs a.307020) derived from phytozome v7.0 (chr-ID scaffold0297 7; pos 356131 to 356994)
tggtattgatactgaagcaacagtcgcccttttaggtttgtattattattcttttcaactcttttgtttcttgttcgtcaatttacaagtctactttatacaattttgagttagttacatttatttattctctgattgacttactcgaccttgattttattagacaaatacatatcgttttcctcaaacttaacttaataacttattagataattttaaaagagtaaaaaaaactcaaagttgtaatcttcaaaaaataacacttttggttatttaaaataagaaaaataaatcataagccgttttctaatatctaattttcattttaattttgaccaaatttatttcttatttttcttattccaatcgctttttgctattcgtatagttatctctaatattaaatgggtaattaggtgaaccaaataactgggccgagtaataataggtcataagaggcttgttcaattgggctttcctttgggtaaatgggccttcctttgggttttgattttatttttggaaaacgacgccgaatagcacaatgcacaaaacaataatatttgtaaaaatagtaatttttataatcatatggtaaactttttaaaaatattaattatgccctctcgtttccctatgctataaatgatagttgttatcacttataaatgtcatcggtgatagtttttaatttaagaaaattgacaaacaaaaaaaaaacatttaaaatggtgattggacgtaggtattttagttttttactgtttttgtgttatatatacaatttttaacttcactagcttatgtttgttgattaatttaatttcaggatctcactcagtcggtcgagttcattgcgtaaac

SEQ ID NO: 64860 - DNA, 608 bp, Cucumis sativus
  Intron number 1 from transcript Cucsa.136220.1 (locus Cucs a.136220) derived from phytozome v7.0 (chr-ID scaffold0104 4; pos 895353 to 895960)
tgtgtgggacgctgttgctggaatctgttctcaaagtgagtattttctataggattcacctttagtcaaacaatgagatggattgataatcgtggttgatttgtttttattgcagacacgtgtcatgatcctgatgggtgtaatcatcaccgaactgcactgattgcaggtaataatttcaccctttgtgtttttcgtcttaattcaacaaattaggacaaacttgtagaattaggggtacacattaggaaatcaattggaggaacatataatttcaaattaggttccttataagtaacgataatattaatggtgtatttaatggaaaatcaaaagttgacattttatatttaggtagtttatgaactcattaagtaaaagtatctctaattattcaacatataaattattggattaaagtgtatatttttcttccacatgtgtctataggtatgattttaaaattaactacataatattaatggagatgattgaaaactacattgaaaaggttttgttaattttgatgttgactaacccaaacaatggtaattaattgatgtgtaaccataggcgttgtatccggtgtgggtgcggcggtggtggtc

SEQ ID NO: 64861 - DNA, 404 bp, Cucumis sativus
  Intron number 1 from transcript Cucsa.298540.1 (locus Cucs a.298540) derived from phytozome v7.0 (chr-ID scaffold0290 1; pos 142285 to 142688 reverse strand)
cttaaaccctatcactccggccaatagtccctctggtatggttttggtttcttcatggttattcttttcatagggatcttagagtggtttaaatctgtttggttaatgtaattttttttttttgggtttgtaaaagaatatctgttcgttggtatctggctatgagttcgccatttccttgcttggtttcttcctttatatttttgcttggttcaattttgtttgtttgccgagaatgtttagggttttttcctttttttttgctacaaagaaatcttccattctttttaatctcaaattgcttccatcttcaacgtttgaatctgcgatctgtgtttttacttgtttattttttaataaaaattttagattatccacgaagaaactcagtgaacagagaaaat

SEQ ID NO: 64862 - DNA, 921 bp, Cucumis sativus
  Intron number 4 from transcript Cucsa.303130.3 (locus Cucs a.303130) derived from phytozome v7.0 (chr-ID scaffold0295 1; pos 1116815 to 1117735)
ctagacaatttttggtaagtacagttctcatttatctttggatgtagtcatatcatgcattgaaagcacttcaccatattcgttatgagttccgtagaccttgtgtaggtatccagtttggtagaagtaaaccttcttttagatcataaatattttactgaaagaatgttagatacaagatatcaacccactctatatgaagataattacaaaactttcctccaatttcctttaattgaaaccatttcaatttacaatctcgggctcgttatattctgttatgatatcttgttgagaaggtcaagggacctaatttttttattaatttgtctcacctatctttctttttctttttaaaaaaactactactaccgttattataatttatagtctcttaaataatgaccaaaaagattattatgttgatatattgtatcttgagcgttttaaaagaaatcataatgaaatttctctcttactatgttttcatgtttcccttcaatattttctctctcggtgttctattttgccatggcctggttctgctactgcttcagttgactctatgtactctttggtagtttgtatttaatttgattggccttttcaatttgtacgtgcgagtgcgtgtgttgtactgttcggttatcattattgttcaaacattttcttccacctggagttttacacagctactgcttcagttcactatagtgtactctttggaggtttatattcaatttgattgacctttttcattgtgtgtgtgcatgcgtgtgttatatactgttcagttaacattattgttcaaaaattgttttcttccacctggagttttacacagcaagctgctttagactaaatggtcctgcttgaatgtggaatgggaatgagtttaatctcttataacatctacgcagg

SEQ ID NO: 64863 - DNA, 1030 bp, Cucumis sativus
  Intron number 2 from transcript Cucsa.284980.1 (locus Cucs a.284980) derived from phytozome v7.0 (chr-ID scaffold0265 3; pos 1517743 to 1518772)
ttcttccaggtttaaattttttctcattctaaaaattaactttttcttagttttgtgtgtgtatgtatatatatatataacactccatttgcaagcttttgaattttttttctttcataagttgggttggtatatgataagcattttgattcttagttttcgaaaattaagagtaaacattcttttcactttaatatttttggttttgttattgacatctacttatgttttcaaaaattaagttgtgaataatcttttacttcttttttttattttttttattttctgttttttttgttaatgctttcaaaaactatatgtattaagttaaatagttcaaaaacttgatcattttggctcaaacttcttctttcttttttacttaagaaatatgcaaagctagaaattaagaaccaatatacggctaattttcgaaaatcaaaatgaatctaaatttatagtattttatccacttaagttttttttttggtttcaattattcaacctcacttctttaataattattattgagaaaatctttgttgggttttgttctaatttttcatagtcttggtaaataggttgttgaatttacaaatgattaagatgtttttatcttttctaggcccaaatgattaagaaaattctatttgataatgattatttgctttcaaaatttattgttttattctaataattactcttttacctttgtaagaaacaagactgaatttctaacgtagttctaaaaagtttcgttctttagtttttgaaaacttagattaaacataaaaacttgggtgtataatagtagtgtttatattgaaccataaataactatcacaccatgcttacactaacataatttatcatattttttttaacatattgatgtaaagattttatactaaactaaacaaaaagaaatataataataatatagatcagtttaaattgattaagtttggcattgattgattgattatggtgtgcagatccgaagagcagattttgggagggaacaagcaat

SEQ ID NO: 64864 - DNA, 813 bp, Cucumis sativus
  Intron number 1 from transcript Cucsa.205640.1 (locus Cucs a.205640) derived from phytozome v7.0 (chr-ID scaffold0141 6; pos 657089 to 657901 reverse strand)
ttgaagaggacggtgagtatgagttcgaatctgtttatctttcggtattgttttaaatttcagccgtgtctccgtgaatatatctgggttttttggaatttttggatttgaaagaaacgggatggttttgagggtagataatgtgatgttttcaaatttataagtatatttgttgggatgaaattagttggcttttagacatatgatgccttctgttccagttttagtgaattagtcactgggaatagtttctgcaatctgttaatactttggtgttcttcacctgaaaggagtcaaagcttagcaatgatttgaaatttctaaatagctttaactttaagagaactggcaactttctatcgaaccaaaattgcatccaaactggttgcatttagtcggccattgatatatttggggaaccttttgctggatcaggttatatgaaatgaaactaaaggtcaagctgatgggttgcggtaatttgatcatatcaatgctccatcactctcccttcactcgtgatttgaaaatttgtcgaagtagatcaaacgaaaatcaatattacttgttgagaaaatgacattactgttgtaactcagaagtttaagctcgtgggttattgtaattttagttattccaatacttcaacaaaataaaatgatggttgagatcattgtaatgtcttaattgtcatgattatgaaggttcatgaggatgtcaaagcaattttttagttgtgtttctgatttgatcttgttctttcttttgtcttctttagatttgaaaacagcattgggaaagaagcgcaaagat

SEQ ID NO: 64865 - DNA, 246 bp, Cucumis sativus
  Intron number 3 from transcript Cucsa.285760.1 (locus Cucs a.285760) derived from phytozome v7.0 (chr-ID scaffold0265 3; pos 2036218 to 2036463)
ctagtccaaggacttctgattttgttggtaacaatgtaagtttctttgatcgccaattcaaaggtttggttatgaacatgttcttccataaattaggaagatttcagtttatagaattgtggcttgaccgtggaatttcttaaaattaacttccaattttctttagactgctcacttctaaattattcagtgtgttctaataaggcgaatgttttgcagatagctttgtcatacagtccaccagat

SEQ ID NO: 64866 - DNA, 884 bp, Cucumis sativus
  Intron number 1 from transcript Cucsa.165880.1 (locus Cucs a.165880) derived from phytozome v7.0 (chr-ID scaffold0115 3; pos 1188270 to 1189153)
atccgatcccatcaacttcaggtaaatttatggacaatgttcaacaatttatcgcttttgtttccattcaattcgagtttatagtgaaggttttatgcaaatgtatactgcgaagtttaaactctctggctttgggtatagaaaatccatcggcagtaccaatggtactgccggttctggggattagcgaggatttcaaatgggagctgttttaactttcccttttgtgttttcgggtttgtttttgtttatgagctattgggttttgtttttagcttgaattgagttgtagtctgcagattccaggaattttagggggtgtatagatttgatctttgagttcttttttttttttttttctcctttcctttttctttttttcttttaaggattgttgaaggctttttgaaatggtttgacattttagtgtcttaatggtgaatcgctgatttaatttttttttcggtgaattatgaggcatctttgttagatgttttataagaacccgttctaaaaaattcccatttccagttgtttttgctgtactgtgtatgatgatacctggattatttactctgttataaaattaattcaattccattctactgatgggtctctctattttgattttcttctcttatgttatagaagatgacactttttcttttaggggaaaaaccgtgttgtttgtatgacttggaatgaagctcctgctgttggtggatgttgtttccaactgtttcttattaaatgtgtgcaaatcattctatgttagctttaatttatttttcaatgatgcttatttattttaattatcgaaaattcattttactcctttgcaaaacttgtttattgaatattattttgtgaacccattttttcag

SEQ ID NO: 64867 - DNA, 649 bp, Cucumis sativus
  Intron number 1 from transcript Cucsa.201890.4 (locus Cucs a.201890) derived from phytozome v7.0 (chr-ID scaffold0137 6; pos 114191 to 114839)
gaggtacttgaaatataatacattacgtgtttttttacttcaaggttttccctctcttgaaggaacattaaggcatggagaaattcagtatgggtttgttgattattatattttatataactggcatcttgttacagcttttttggtaattgttaaacaagtacagactgctgttgtttttttaaaattcaaggacaagacaacctatggaatagatattgttcaagtaactaagttcatagaggctgttcttttcttttttttcctatcttttgtttgttttttctttagaaaggtatgagtggatacctggatcctaatactgaagtatttaaatcaaccaaaatttggttatttatatttaattatcactgtgagatgggataggatgatttaaattgcatatatgcatgttatttgcaattaccaaagagtttatggcttaaccaaaaattggagttgtggttatcagttcttggctttgaattttttatttttacaccccatcttttagctgcaggtaccgttgcattgcaatttgtgttgatttccgatccacttaattactttggtcctctctggattatttgaattgatccattgtacctgtgcagggacaatctgccatttcagtggacgatacattaaa

SEQ ID NO: 64868 - DNA, 519 bp, Cucumis sativus
  Intron number 1 from transcript Cucsa.236380.1 (locus Cucs a.236380) derived from phytozome v7.0 (chr-ID scaffold0201 8; pos 14875 to 15393 reverse strand)
ctgatccaagggccatagaaattacaaaggtatattaattcaaactaaatatactaatttcatctctctttaagtttcttttcccattcttttcctttcatttattcaattatacatatttttgtacatttgtttttataacttttgaagtttctattatgatttcaagtacctattctacttttaaacctaataactagatgtcatgtagtgttatgatccacagattagtgagtgatgtagtttttattttattgttggagtttcacatacaaattaggaacaattaattactaaaatcaatcaatttatttttcattaagtatgttttatctgtttttaactaaaaccaacttattttataaacttgtttttttctttaaatataatctatttttagtgcttcaaacaccccaatttttcaagtataaattatgtgggtaatactatattttattattattggatggtgacaatataaatgatactaatgtgcatggaaaatgttagggaggcaaa

SEQ ID NO: 64869 - DNA, 958 bp, Cucumis sativus
  Intron number 2 from transcript Cucsa.201270.1 (locus Cucs a.201270) derived from phytozome v7.0 (chr-ID scaffold0137 4; pos 212863 to 213820 reverse strand)
gatcagttcccaaactcgaccactttgccaagcaagtatgtcttttattgttgcacttagtttgacaagcgtttattgtaagagcttttagttgtatattgttacatcttctttcaatctagcagttattgttcaagaaaaactatttggctagtaatgttgaaattttggccgatcctggcaatatcattttctgaatgcattactggaccaattcatggttctatactctgataagtactgtctgtgtctgacgctggagagcgttaatcctgatgacccatgtttgaatttcatgagagttcttgttgagcttttgctcatgtatgttctctgtccaatgtcagtatctatcatggtattctctatcaatatgctgatagttccatcaacatttcacatattcatggttcaatatcaacagaaggggtgaatccatttcgccttattgatagtctcgtgtgatcagcctggacattcatggatataaaaagatgtaaaatgtttatttatcaatctatatatttttccttgatttttgtttttttttgtttttaaattcttttagaaatttctacaaataattacgtgaccagatatcaaagattaaataaaaaatataaaaattgtttattgaactaagtttttactaccaaactaagttataaatcttcttcttagtgtatgtcttcatatagggatattgatgataaagttcaatggctatagatacattgacaaatatttttgaatgtgagaattttgcctataattaagtgatttatgcaattaagtgatgtttttttttgttcttgactgttactgatattgatgttaagttttcttcttttgttctctttaacctctacttgtaaagccattttatcttcacactaagtgacatgatttgtatcgaactgtagaggtttattaggtgaaagaactttgaagctgcttt

SEQ ID NO: 64870 - DNA, 606 bp, Cucumis sativus
  Intron number 1 from transcript Cucsa.161960.1 (locus Cucs a.161960) derived from phytozome v7.0 (chr-ID scaffold0114 4; pos 1720735 to 1721340)
gcgatttcgatccagatctagggttctgcttcccctttttctctgaattttgtgcattctaccatttgttttctactctagattttctcgttgaggctcgagggattcggatctcgcgtctgtggggtaatttcattgttcgtatcatttgttttgttttgtttttcttttcgttttgtctctgcaaattttggtgatatggaagaattatttggtttagatatattgtggttgatggtgtaaattgtggtttgaattattggattgatatgcaccgacatttttctagactgattggaatagggatatttgctttgaatccagtttcttcgaattattattgttatttttttgttttctatatgaatgcgaatgctttatgtatattagaagaagcgatctgaatttttgaattaatatggattataaaattgtggaagtaagcgagaaatgcttgtggcgacggaaaatatattgggatagatgggttttattttgttctataggagcttaagacgataatggttcaatgttcgagaatcaaaatccattgatgtaaatgcttttcatgatgttgttgtagagcttcagcttactgcgttgaag

SEQ ID NO: 64871 - DNA, 670 bp, Cucumis sativus
  Intron number 1 from transcript Cucsa.146750.1 (locus Cucs a.146750) derived from phytozome v7.0 (chr-ID scaffold0110 0; pos 129068 to 129737 reverse strand)
tttgagcactttcttgttcgttcgactggcttgaggtactgtaatttctgttctcattcgatcttagtatctgggtttgatttggaatttcatttcattttcttgtttctcattgagtctaagttttgtgtgtcgattcattgctgatttgattgagaaggggttggttcttctatgttaagctctggagtaatggcgttgaagggagttgttgaagttggtttgctagttcgttttgagttgtgcatttatgggttagttggaaatactatgattattttagataagaaatgatacccatttcttattttcgtgttttattctgagattttctgttatgtctctgtggtatggtctgtgttgtatacgttttccatgactgcttgatgtgtctttaagagagagaattttaagcgtcaaggaagtgtgcacggtatttttatgcataaagaaagttcagagcaaacaaacatttcaaccagtacatgcaatttatatgtgttttattttgtttggctgtctctttctcccactttgtatttctctccaagagtccatgggtctgtcttgtcattgttctttcctcttttcatttattggaagaggcttattttggttgagattttgagttatgattgtgaaatgatatgtaatataaattttatgaagg

SEQ ID NO: 64872 - DNA, 503 bp, Cucumis sativus
  Intron number 2 from transcript Cucsa.248960.1 (locus Cucs a.248960) derived from phytozome v7.0 (chr-ID scaffold0220 8; pos 133684 to 134186 reverse strand)
ttggaaaagaacgaggtcctttccgccgttgaaaagtaaacattccctttttcttttcttttttttttaccctcctagattagtttttctttgattaatgcactctcaactctaaaatcatgtatctgctttgtatttggtttgtgttttgggctgtttagagaaactagaccagctagctcgttgtcttttagagacatctaccttgaattctacgtctaagcttctgcatgttctgcttttttttcttgttttgtaattgggttatgaccccttgatctgtttttgttaattttagatttggaaggtttggatgaaaacagggcattctagaattgcgtatgatgttgtgtgcagtgacatagtgggagtgggaaatttgtgtagaatttcttgaattggtcgaaacttggcctgatttgttgtatttgaattgttgtttgttgtatctttgttattacggcctcattttgttctgaaactgttgcattgttggatcaggt

SEQ ID NO: 64873 - DNA, 970 bp, Cucumis sativus
  Intron number 1 from transcript Cucsa.187410.1 (locus Cucs a.187410) derived from phytozome v7.0 (chr-ID scaffold0128 6; pos 2990 to 3959 reverse strand)
tggtatgtttaattgatccactgaattctgctttcttggtttcttgttttgatattcacttcaccagattggattttaattttggcgtttcgtcttcttcttcatctctggaatttcagtatttttttttcccctctttttatgtaggtttgtgtacactggttttgtgatgtattggattcttgaattgacgctgtttcttcttcataatttttgtcatgcaaaagcacattgtcatctgatagctttggttttttttttcgttcacttgaaatgttgtgttttatttatttgtttgtttttgttttgaatccaaaaatttgaaccttgatattatttgatagtacgggtttcatctcaaaaactaattggcaataatggaaggtgtagtccatccattttataaggagtacgagtctccttggttgaaagggtgagattctcaatatctcaacaaacgtattagttgagatataagataataacaattttatgtttttaaaattatgcttgttttcttacaacttgttactatgaatttcatctttcataactgggaacaagtttttttaaaataaagccttttagttttcagaacttggattggtttttgaaaacgcttaaaagtgataacaaaacaaagaagggaataaatgaaaggagtgtgtataagcataattttcaaattccaaaaacaaaaaaactggatgttatcaattggagcctagttaattgagttagaattatactctgttaacattctgttgaggattccacattggaaaaattaaggaacctcacaattttaaaagatagatgtgctacttttctcattgccaattgttatcaaatacattcatttgatttgttctttggatttatgcttgggtgtctgtatgtgatacactgtgaagaaagcttgcggataaggctaatcatttccgaaattgacatatgcagtcttttgatc

SEQ ID NO: 64874 - DNA, 708 bp, Cucumis sativus
  Intron number 2 from transcript Cucsa.162070.5 (locus Cucs a.162070) derived from phytozome v7.0 (chr-ID scaffold0114 4; pos 1801034 to 1801741 reverse strand)
ttgctgcatcttatattgaggtttgttgcatagccttgcattcttttgatacaattgaactcggaaatgtaccttctgcatttgagtttcctgtttaaagctattaatatttcgtcctaatttcacattgaagaaataatttctttcttgttaacattttggagttggatatgccgttgttgacttaagtctgtattggtcaaacttactaccttcttcatattcttgattgaaattggaacccacaacttcagtttccctttctgtgcatatgacgttggggctaacttaaatagacagatttggcaataggtcaactgtggagtattgttttattaaatatttaaattgtctgtattatacctgccattattgttttgaccactgatggcctcgtctgcacaagggattattgaagcaattcccaagtgcatgcaaattattgttttctcatgacatgccctttattccttaatcctatcctatatgtataaagaatgcagttttagaatgtgtaggttctctttcacatattttgtttatggatttttttttctagggaaaatgttgtagattggacgaggaaacaccattcttaaaataaacttgagtcactttttctgtgcaaatttattatttgataccagaaataccattaaaatgttccctcatgacatgaaattcctctgcaaaagatacttacagtaa

SEQ ID NO: 64875 - DNA, 830 bp, Cucumis sativus
  Intron number 1 from transcript Cucsa.159060.1 (locus Cucs a.159060) derived from phytozome v7.0 (chr-ID scaffold0114 2; pos 1070048 to 1070877 reverse strand)
tcgatctcttgattctcttagagaacatctcattggtaatgtcactcttctaattcataattggacttcattttttaaaaaaatttggaacatacctatgtcaaccaaaatatttacaaaatttaattaaatatcatagtatttctacgatggaccgtgatagacgcacatagtggtctatcatgtctattatcgcaaatagattgtgatatatttttattatatttgtgaatatttttagaaattttgtcatttaaaataatttttctagaaattaacccaaaagtctaataaaagttacaatatattttgtatctagtactatgttaaaaattaatttctaagcagatgagttatgataaatttattgttagaatattatatttccgatcgatgaactttgagtttcatcaataaattttaaagatagtccctctctatatatatttagtttagtaaaaaactagtctctcttaactagctttttcgttattaattttgagtatatttttttctctactagtataagctgtcttcctattcaaaatataagtactaaaataaaatgaaacctaaagaatataaataatcaaatgatattttaacgtagtgtaaaaatttatagatcaagactctaacacatgtgaaataaacatcaatatttgagaaaaaaatgatgttattaggagttcgaacaccaaacttcattatctaatatattattatgttaagtatctaatatattattatgttaagagcttaagctgatgagtttactattcttacgttttcgttattgtattgttattagggccactgccaaaacaaga

SEQ ID NO: 64876 - DNA, 794 bp, Cucumis sativus
  Intron number 1 from transcript Cucsa.307980.1 (locus Cucs a.307980) derived from phytozome v7.0 (chr-ID scaffold0297 8; pos 261551 to 262344 reverse strand)
atcttgccagaagctgggttgggttgggtttgtcaatggtcagaatagggagaggcgtgatgatcgtcgtccgaggtgaaaagagaaaaagaagagctgcggaaacagggagaagatgaaggaagaattaatagtgataacgccctaagacgggaacctttaatttctactttctataattttatagaatcactattcttgaaagaaacttagaccaatgagtactttagggtttagaataatttttactattttttacgtgctcttgttcttttgttccctttcaagttgatcgtaaaaaaatagagattattattacgaaattaaaaaaattaatttcatttcatgtgtgtatatatataataatgggtgtgttggaggggattgggttttttgtgttgagcttagttgaattggttgaagaattgataaaataagaataatttttaaaatttcttatgatttgttaattttaaatttttgtggatcataggaataggtgtgttagttaaaactttgtggccatatatgaattaggtttttgatccagcgtatgtgcacttcaaacctcctcgatcttcatatatttattataaataaacactcaaatcttttttctccctcacttcatccatggctgattgcgatgacctctttttaggtaaactttcctgcgcttccttatttgtttagactcacactctgcacactatttcactttccactatctttattggactaatgggtgattggatggatgggttttttgttgcaaaaatcaggtattggaatag

SEQ ID NO: 64877 - DNA, 409 bp, Cucumis sativus
  Intron number 1 from transcript Cucsa.157360.1 (locus Cucs a.157360) derived from phytozome v7.0 (chr-ID scaffold0114 1; pos 325877 to 326285 reverse strand)
agttatatttcttttttcgtctcttcgttactagctatttacgtttatgttttcttcaacttaatttctacgatttgtttctttctcctagttgcgtgtttgcattcaaattcaaatatctccggttgtttcgttctcacttacattcggtgttaggtcaatttaacgtctcaagctaaatttggattgctcattttcgtttgtttgcttgagtatatgattttcctcgtcatacataatgctttctgcttgcatttctgacgtcaacaagtgttcagaaaacgaataagtacaggagaaagaaaatcttaatctctctgtcgaatgatcgaagccgagagtgatgtttctactattctttggatgttatataggtacgtgtttgcaaggccttccggtaaacggtgct

SEQ ID NO: 64878 - DNA, 947 bp, Cucumis sativus
  Intron number 1 from transcript Cucsa.288970.1 (locus Cucs a.288970) derived from phytozome v7.0 (chr-ID scaffold0269 8; pos 464579 to 465525)
attgaaatcaatttcattgactgataactctgaaggtagttgagttagctttggccgttactcttctttcttttgttccattttgggtatgctgctttgtttttgctttttttggttaaattttgatgttgttggatttctgttgatatgagtttgtgaagttttgtttttctatggtttggacaatttgtcatctgggtttttgatttctctgtttctttgtatggattatcaatgatgatggtttcagatggtggttttaatttattttttttagctatttggtggtcgagaatgtattgtgttgacttcatcaactcaaaaaatgtttgctccccttttgttgctgctcatatcgtttatatgccactttgttctttattatttcatgggagctttctatgtttttgttcattttcccattgctcatcgctttcccctcatatccttgaaaattcttcatcttacgtcaaagcctgccttcctccaaattgttggaaggctttgcctcgctcaaagtcaactccagattttccgagtccctaccatcttggaggttctttggagtctgttctcctcacagtcatatgtatttttgatttatgagtgtggaaggcatcttgttggtggatgaccgctatggttgagtttggagtcttgttattttcacgtaatgtttgagttctaggtggatgacagctaccacttgaactcatttcttctaagttccttgctatttacattgttccttattcatcaccaggccaacaaatttatttatttagcttttggttaaattacccatataagaaaattgtaggtagtgggtcttacttctatgttattttgtgtgagttcttactgtttttttttgttgttctgattttctacctagcttttcacttgtttcgcttgtactttatgcagaaaggaacttaactatactc

SEQ ID NO: 64879 - DNA, 476 bp, Cucumis sativus
  Intron number 2 from transcript Cucsa.308110.1 (locus Cucs a.308110) derived from phytozome v7.0 (chr-ID scaffold0297 8; pos 334768 to 335243)
cctcttagtaaggtaaaagggcaaaaaagtttctaaactagtcactctagatgaaataccaaaaacgttttgtttttaattagtattacatctttaaagtattaagcaggtttgctcaaaatttatctttgatttctagaagctgcagactataaatgaaatccccacaaaatgagactaaagttttatcttcattgatgctcgttgcgtccaaactggtattagatacgttgcatggaagaaagtgtttcattctttagaacattgttctttcgaagcctttttttttggtcaagcttgccattttggtccataaaatgttcggtacattttgtatctctttgaataacttgatatcttgacttgttttcttattgtcaaatgccattgcatactacggctgagattgcaatcatgaaaaatctttcgtttggatattgtgtagcttttagttggtgtggtgagttccttcaggc

SEQ ID NO: 64880 - DNA, 723 bp, Cucumis sativus
  Intron number 1 from transcript Cucsa.185140.1 (locus Cucs a.185140) derived from phytozome v7.0 (chr-ID scaffold0127 4; pos 717376 to 718098 reverse strand)
ctcaaaaaccctaaacggacttccgatttcttcaggtttttctcttcttcatctcttttctttaatctttgcttcatccatcttctctgttactggtatgccattcctctctttccgtttttttgtttgactttgttttgacccattttcttttgtcgctgctcttcgtgtttactggtttcgatcgaattcagaattttccagtggttttttctctgtgtattttgctgcattgtttccgaatgcgatggatgttttcttccttttcatgcaatatactactgcgatttctgttttcttcgagttatggtgcattgctttgatttattagattcttcttgtctattatgtttagcggcctgaattctgttgtttgttaactggactcccgagcctttggatcatgtggcacgatatctgttgctggatggatgttttggtttattgtatgattctcttgcttttatatcaaccgatggagctctttcattggaacactcatgaattttgttcgagttctgttgctttagtctacactgtctttgttttttccttctgttttgttatctattgacttgtgttagacacattgagatgttatagcattgccaagttcttaagatgttctcaacttgtgtgtttggtgaaggatattatgttgtttataagttgttaatttatgttcgttcactgctgctccaggttttccttttagtttaaaag

SEQ ID NO: 64881 - DNA, 693 bp, Cucumis sativus
  Intron number 2 from transcript Cucsa.288900.1 (locus Cucs a.288900) derived from phytozome v7.0 (chr-ID scaffold0269 8; pos 402058 to 402750 reverse strand)
gaaacagagaattcactggagttagtagggaccaggtatccaacattttattttctttttccctattttgcttttggcatgctattggagttaaatgccagtttccttccaacttgcattatgtacatactcagggaaaaatggaatgctcaactcttgtttctgatgaaagtagcttaacttgagggtgtatggaatatttggtatagttaccaattatagtgtattaattcctagagagttgcattttctttatatgaagttgcataaggtttctaacttctgctacctgcagctctagggacctgatcttcttatgagagaagatgataattttattattattttgtattagatgactgcatctgcagatccattggaaataggaaatttatgtttgaggatcattaaaagaaaaaaaagagaggaatttggttctgcttgcaaagaattactattattattgttgtcacaattaattatttgattttattttctttaacaaaatgcttcgtgattttttatgttggtgcatatcaaccaatggtggttgctagtctctttaaggtcttcttgcaagttcccctgcaattacttgtatttaccttcaaagagtttctgttaatgtggcatttttctttctctaatcatctgtcagtaatcccccgaagaggacatttctttcaagaaatt

SEQ ID NO: 64882 - DNA, 668 bp, Cucumis sativus
  Intron number 1 from transcript Cucsa.242860.1 (locus Cucs a.242860) derived from phytozome v7.0 (chr-ID scaffold0204 7; pos 2495041 to 2495708)
ctgtcctctcatcattcgccttcaccccattttaggtactctctcaatctcaaatgggtttgcattatcgttttggttttcgtctgaaatgcttgctttgattagtttttttttccccattttgtgtatgtaatgtttttcttttgggttttgtgttggggatatgatttttgttgttggtggtggttttgaactttaatgccctgtttttctctgactctgtttcttgggaaattttttgaagatgaaattgtattttgggttttgtgggttttgaaactaaaccctgactgatgtatagagagttctcgaaacccaaatggttgtttggggtatggcgtaattagcattacatacgaaggtctattttgtttccagaaaatgacgaactcaccgctactttcatggctgtgtttttgtttttgtcctttattgtggacgataacgtaataacttcagctttaaccagcatttctcttttgcatttttttttaaaaaaattggtggagtttttagaagaaagcccttcttcttccttgtttctgattgtttttcttttttcttcttatggaagtacgaactcttctctgcgcattagttaaacttgtgatgtctctgtcttggaatgttcagggttctggcacttagatctgaaaccgtccgacaag

SEQ ID NO: 64883 - DNA, 376 bp, Cucumis sativus
  Intron number 2 from transcript Cucsa.307370.2 (locus Cucs a.307370) derived from phytozome v7.0 (chr-ID scaffold0297 7; pos 543903 to 544278 reverse strand)
gccgaacaacctccgctcttcgacggaaccaccaggtatatatgttcgtttacaactttacttaacttttttcttcttccttggcttcttttcaagtacaagagacgagtgatcatactttgtattgtccggattagcacgtaacttgtagagatctttggagggttggctatcataataaattaataatacctttccaaagtcaaaatatagtattttaattagacactacaacaaaaagtttagaatgagagaaaaggttggttgggaaccaatagtgggtttctatgcaaattagctaattcgtatgtgcgttgatttaaattgtgtaagcctaaaattttccattcggggtttttgtttatgaaggttatat

SEQ ID NO: 64884 - DNA, 790 bp, Cucumis sativus
  Intron number 1 from transcript Cucsa.199050.1 (locus Cucs a.199050) derived from phytozome v7.0 (chr-ID scaffold0135 7; pos 1881243 to 1882032)
attgttgggtaatatttcaattctataatcttctttaatttaattttgttcttataattcatgcttaaactcatatatgaatgtgattgagaagaaattaaagggtttttttaaaaagaaaaaaatattttccatgggaaaagttttttttggacgtcatcatatgtcatcatatgagaagaaaacaaaagaacttctgacagtagggcaaaattagaccactttctagtttctgcttctttcataccaatggtttggcttaaaatgttaataaaaatgttgattttgctttaacctataaatttatgtgttttgggtttagtaacaattcattatatatgtaatctagataaaaacaaagctaaaaataatatgtacatgaattttttttaattttttaatttagatgccatttgtttttgcatatgaatttattcattttgttattgcgtgatgttttcaaatttcaagttctcaaaactgtaaattcatagctttgtaacacaagaaaacaaattataggatggtagaggcaaatttcatctttttgatgaacaactaggatcaattaaaccttctatatctaatatgtgtaaaagatggtgtcaattattgttgagcataaccataacataaactctcactaagacaagtatagaattaagagtaacaagtagaaaaagttcaaccatgagattaaaggcttaaggagaccgtcttacctattttacatatggtgccttgttgttgttattaattgggaagaaattgatgatattttgcaggagga

SEQ ID NO: 64885 - DNA, 1014 bp, Cucumis sativus
  Intron number 1 from transcript Cucsa.248980.1 (locus Cucs a.248980) derived from phytozome v7.0 (chr-ID scaffold0220 8; pos 153722 to 154735 reverse strand)
cgcaaactcaaagccatccttataaagaaagtcaggtatatatgtatatatatatatatataactcttttctttcaacagtaagcttttgaatagtgatgcaagcgttcgaatggattctgcatagtggcctgatcatacggttcttctagctttgcttataacctgcttgctaattttagcgactagggattgcatagtacctgaagtgtatacttagtgttatcaaatgcaacaagtttctgcccgttgaactattggaaaattagacttcctgcctaaagcatcaacaactctatttattgccagcacgatatctatagttcagagtaaagtttaaatgttgaacgtttcatgtattctactgagattcttttaggaattgttgagttggtgatactagcaatctgtaaaaatcacaagctttctgttcttatcaatttagtgattaaccgagctttcattgagaagaaattaaagaatacatgatcatattgaaaagtgggaaaactataagacggttctcttccaagagaaataaaacttgaggacaaatagtatagcgatttgtaattgaagcctaccgggatgcatagaatctaacgaagaacaagacttcacttaggtaactcttgagccctcaaaaaattatatttttcttctcatcccatgaccccttaaaatggcattgccacaaaaaaacttcccttcttacgagttacaaaagggaggatgtagacaaaattcctccattatctcccttgagccctgttgcctggctaaagctagtttttttttttctgtgacaagaaacagaaacatgtattcttagaagaacaaaactaaagctagatcaaactcctctaactgattccagactgcatatgcaaaatcacctgtctggcttagattttcttttgattaaagacgatggaactaagattatgatttcttaaaaaattatttcctcacatcgttagctcaaagcagttgtatctttcaagcgctacgggga

SEQ ID NO: 64886 - DNA, 366 bp, Cucumis sativus
  Intron number 1 from transcript Cucsa.179980.3 (locus Cucs a.179980) derived from phytozome v7.0 (chr-ID scaffold0123 3; pos 348233 to 348598 reverse strand)
gccgcttcttcgccgtcaccgtcgccggtcaggttttcgtctacaatcactctgaatcgtcttctcattgtttttattattattttccgtccatttctgtgttgcctgacttcggctaatttctgattctccgttcaagtattggtttgttggctattaccgattaatagtttctgttttcaaatatcagagcgtgtctcgaagcggtttgtgggtcatatagactatgttgtgtgttgttttcaaacttttttttatgtttgattaaagttatcgctgttctgttatggtgtttgattgttgttattgaagttcgttctgttatatgaaattttgtagggatttttgaagatttaagtggacagg

SEQ ID NO: 64887 - DNA, 955 bp, Cucumis sativus
  Intron number 2 from transcript Cucsa.179860.1 (locus Cucs a.179860) derived from phytozome v7.0 (chr-ID scaffold0123 3; pos 224448 to 225402)
accagagcgaagaagagctgtgtgggcgatttacggtatcagtcatcctcttccttcaccatgctatcttttttatctttttatctgctgcaacttttattcatttttgtacaccaagttgtttgttggatatgacaatggacagacccaagttgtagatatgatttagctttcctagtagtttctattgatgatcctgggttttgtgtgtgccagtgtttttttttcttttcttattgaaagacatgtagagtcgcaagttgtccttttaactttttggttgggccttgtactccaagatttgtatctaggtcctttgacaagtgttcatttacttgctaatttttactggtatatcctttaagttcttgaacttcaagaagtttctaatagatccttggattttcattattgtatcttacggatttctaaattcatttttgtatccaaaatccccaacttaccagacattttctaaagttttggaaattattgactacaaatttgatagttgaagaacctattagactcaagttgacgtttagaaccttatgagacacagtcccaaaagcttagagaccaaattctcatctctacactttttatttcacaattggagtatcaaagacccatgacctccattcattgagaaattttggaagacaacaaaagttctaatttagttatcaaccggaaaattagaacccaagactttcaagggtatctcaaaacatcttaagctcctacttaaatacagcctcagggataattctatatttgcagtcctgttacattttatacgttatttcaataaaatataccttccgagaacttgctattctatcctttttgttcatactacggccatattagcagtttgccatgcagttcttaacattccttttgacattcaagagtgcaactctttgtaatgcagtgtggtgcagaaggactg

SEQ ID NO: 64888 - DNA, 814 bp, Cucumis sativus
  Intron number 1 from transcript Cucsa.272030.1 (locus Cucs a.272030) derived from phytozome v7.0 (chr-ID scaffold0250 0; pos 750530 to 751343 reverse strand)
ttcttacggcgaagaactcgcccaacggcatccaggtttattccgtcttataactatcaaaactatatatacttttcaatattgaattttattatttcagaattttagttgaaacgttctttgattaggtagctgtttggatggaagaagaagggcccttttgtatcccaacccttctcccttttttcacattaaaaactcccttctcttttgcttcttttataagcctacacttttttgcttcccttttaattatttccttttctttcttcatcaattttttttacaacactaataacatcgtattattgattaaacctagatttaatttgaattgacaacttagctaaatttcaatgtttcatatcttagtccttctgattgattgatttagagcgttttttttctttttagtttcttagctttatatgattttggtgaaagtaaattaagatcaaacaaaagaatatatatactaacatataattgaagttttaagtttaatgtgttaccaaattttaataatttagaaagatttaatttctaaattgaagatttgaaggaatcatttcgtgggttaataaaaggaatgttatgccattgccacctatgattataggggttgtgaacatttctagaaaaagtatggtttaggggagtgtgataattacatatttcggatgttctcactttgtgacacgtgtccgtcaaggataggtgttgtatgttaaattacgattttgcccgttcgatatattaatggatgcgttatcctgcaggggcttttgaagtattttcaattggtggaaggttg

SEQ ID NO: 64889 - DNA, 968 bp, Cucumis sativus
  Intron number 2 from transcript Cucsa.177190.1 (locus Cucs a.177190) derived from phytozome v7.0 (chr-ID scaffold0122 5; pos 1170509 to 1171476)
acccagtaagtagcttggtttttcatcacacaccgaacattaatattgatcttatgtgcatgtaattattagccattcaaatttttagtttagttttaaagacaaatggcaaaaaccaacttaaatttggattgtgataattgcaataataatttaaatagtctatataatttatataattttgtaagtttgatggttcaattttaaaatttgaataaacgaagtcttttaacttaactcatataattcaactaccaacctaatttattccgactagttttaattatatcacccatacaaaaaatataaattaaaagttgataataaagtatcactatctcaaccattctccatttaacttgaaaattctgttgtaggaaaaatcatccgagagaaaatgattttacacattcaacctcgtgatttaaaccatgttaatttccatgcatcttatcaatctcatattaatccaccattggccctggaagcttaaatgggtaaatttttggtaaattatagaaatatatacttcaacctaacatttagtattaatttgaaaaaaaaagccagaaaaagttcttttcttcaaattcaatatagggacgacactgtaacctcaaaatttcggccaaaagtatacactttatatcagttgaatatgctctctttaataaaatattgatatattcatttcttcatttgttgttcattaaaaagtagacacacaacctcataccttcttggtaggaagatcatgttactcactgctaagttaaactttatttggacaatttattaatttattatagtaatacaatttcttcttcccttaaagttaagggctggtaacaacttattataaccgaaactgtcgaccaatttaaaattttgaattgagtgatagtttagtaaaaaattcctatgttgatataggaaaaggtggagcaggcaatatttgggacaaaaaa

SEQ ID NO: 64890 - DNA, 603 bp, Cucumis sativus
  Intron number 3 from transcript Cucsa.255430.2 (locus Cucs a.255430) derived from phytozome v7.0 (chr-ID scaffold0222 9; pos 3436566 to 3437168)
ccaggaagattctgcagcttcttcgtttgagacaggtaacaagttgctccattgatttcatcttgtacacaatgaatttatacaattgctttaattttatctcaccaaaaatgaatatttgatgtaaatctaaatttgatgttgttgcatctacttttcatgtataataatactcaagtgatttcactgatttgtagagtgggtctggcctatttccttgacaatggtcttgggattttttagtaataggattctccccagttttttgcattattttcggtagttaacctatatgattttgccttcgaatatttttaattccaaagaattgtgcaacttcgttactttctgggcctttgacggttatgctcttctgtgctgttgatgtttggagaactttgagtttttgattgtatcacagaaaaatattctattgccttgtcatttctttcatattggttcaattatactgatgaatgtgttctggaggtttatatgtccgtaaacaaaaccactaggtttatttcgtggaaatattttccctgcaattgcttgtcttgtttttttttcttactcctttataccaaatcctacagattttca

SEQ ID NO: 64891 - DNA, 281 bp, Cucumis sativus
  Intron number 3 from transcript Cucsa.249050.1 (locus Cucs a.249050) derived from phytozome v7.0 (chr-ID scaffold0220 8; pos 201679 to 201959 reverse strand)
ggtggcaaaactcttgcaaagtgaacagaggacttgtaagtatatatctcaactttgaacaactattatttcatatctcatttccttgataaaaaccattggctgatgattgttttttttcttggattcttctgcagccttgcaagagagcaccaacggttcgttgcccgtcgctgtccttttgatcttcggaaacttgtttgaagttctctaatcgaaatgttcatttgttttctttatatgcaggctgtaactttttaccagtgcatcaacttggttgt

SEQ ID NO: 64892 - DNA, 357 bp, Cucumis sativus
  Intron number 1 from transcript Cucsa.213120.2 (locus Cucs a.213120) derived from phytozome v7.0 (chr-ID scaffold0154 3; pos 864211 to 864567)
gaggattaagcgagggaagaaatcaactcccagtggtaaggatgaggaaactttctcctctctttttccattgaaattgccttttgcgtttagcatgaagtgaaagttcgatctcttacagcttcaaacattttattttgagtgtcttctgtgccgattgttatggcagatttatctggtctgattgtttgctaggatattgtggtttttgatatttatggaatagaatgatttcccaaaattttttacaactttgaaataaacaactaatttaacatggagtggtcttgttacaatcttctattagaaatattagtgaactttttatgttctttttctttctagggaatcctccag

SEQ ID NO: 64893 - DNA, 661 bp, Cucumis sativus
  Intron number 3 from transcript Cucsa.169510.1 (locus Cucs a.169510) derived from phytozome v7.0 (chr-ID scaffold0116 3; pos 281820 to 282480)
ggctggcgtaagtatttaatctgtttagccatcgagatgaaaatgttttagttttggtagtttttttttttgtttttttgctatctctcccatcaggtattgtaattgataattgttctactatgattgaacctgtacctgcactgcttagctagatgtttttacctgttgatacttagcttcatgtatcacgatgtgtttttacctgcttgccttgattcagctcgtctcttacttcttgcttcttcttggtgttctctttgaaaggctaattattctattcacgatatcagcttgtattggagtactcttattttttttttttgttttgtcttgtgaaattccttcagttactgtttcttgtattttcgatcatcttttttcattattcaatgaaaggctcttctccttttatgtaatccatgcaaaatacacagaaccttttctcactaacatttccattgggaaaattcgtttttgcttgtgatatttgcactctacatcatatattttattttggtttcaagatgtgattaatatgcgcatattagcactcagatcaaaaattttcatcttatctgagttctggataatgagttattttcttaatgtttggtctaatgcagctttgcaagattgattccgaaggaaaggctaggaa

SEQ ID NO: 64894 - DNA, 597 bp, Cucumis sativus
  Intron number 1 from transcript Cucsa.136780.1 (locus Cucs a.136780) derived from phytozome v7.0 (chr-ID scaffold0104 4; pos 1382040 to 1382636 reverse strand)
atatcagagacgattgagaggttagttcttcaaatttccttttcaatatctgtaattatccgtcttcttcttcttttttttttttttctttaagtgaatagttgactgaggaatttatgcttggcttgtagctttttgcatccttaatttgcaatattgaattcaaattttgagttcttgagatttatcttttgggctttgcttaaaaattaggtttccagcttattctggaagtttcttcgttacttttgatgataatttattactcttcactttccttattttaatatttgtttcaatacttggggctcaaggaatctgcgggtttcttctcccttgtttagaaagtttcaattacttgactccgaattggtttacctggggctcaagaaatatggggttttagttcttcttttgttaggaagttgaagttacaaagcaatcggcgaactattttttttttttttttttggtttcttcgatttcagttgaaaatggtcgagaaaatgggtcacagtgatcaatattctgatgcaatttctttacctacaaattcaatcaggaagaggaagtcacggagtagacgagatcgatcga

SEQ ID NO: 64895 - DNA, 363 bp, Cucumis sativus
  Intron number 1 from transcript Cucsa.143750.1 (locus Cucs a.143750) derived from phytozome v7.0 (chr-ID scaffold0108 0; pos 89903 to 90265)
tgttgtccatcgaagagattaaggctcaagtcacggtaatatatgatagttttgtttttctttttatcatatattgtagcagatttgacatcgaaattaaagattaagagaccgtctcacaactatatacgactttctcttctcattaaaatttcatctctttgtttaattaaaatacttagatacatcataggctaaatctttcaacgtccatccgagcaaattaatcattatttgtctcctaaattaaattaactttatttcttgcttagacatatttgattacttatttcattttgtgaaattatcttttcttatcgtatggcaggatttgcaacttgcaagcatagataatccttcaaa

SEQ ID NO: 64896 - DNA, 820 bp, Cucumis sativus
  Intron number 1 from transcript Cucsa.197440.1 (locus Cucs a.197440) derived from phytozome v7.0 (chr-ID scaffold0135 7; pos 831044 to 831863 reverse strand)
aaggtacctacacaaaccctttgttgttattatgcagattgttggggctatgaatttttctgaacactgattgtatttttctctgtgagagatttggttatgttgactacggtttagatatatgtccctttgagtgtttaagtgatggagatgaactttggttagttggattcgttctttacaagaaattttatcttgaagcatagaaattgaagaggatggtggaaccaccaaaccaatttgtctttccttattgctctgttcttctctgccatattctaattttcatcatgaacgcgaccagatcaaaaccccaagtaattgtcgtactaatttctagacccagaaattgatggtgttaaagcgataatgctgaacttttaaatttgtaggagtctaacagtaattttctacaaccgattctcttttcttctgtggaaaagtgggaatcagtatctgaatggtttcaaggttcttatttgacaaagtggggctcactactgctttcctttggtgcaaatctaagtactttttttctcactttagcttttcttatttattctccaattggaggcttttattgttgtaactttttggttttgggtttattctgttatttgtctcgtcaatggaatgtttctattttaaaaaagaaggttttatttgactacgctgtagttgcctttggtgaatctgagtgcagattccaaagactttccccagattttgtgtcttgaatgtgctatttgtgagttcatatcttgtgtctcctttttcttggatagggatatcttggtctcagtggagcactgctaatcca

SEQ ID NO: 64897 - DNA, 730 bp, Cucumis sativus
  Intron number 3 from transcript Cucsa.161340.1 (locus Cucs a.161340) derived from phytozome v7.0 (chr-ID scaffold0114 4; pos 1243801 to 1244530)
ctaatcccaataccaccacatctattattgttcaggtaagtcttacctttttcccgtttttgatgcaaaatgcatttgatttcgtgatatgctacatgtagtcgtcttcttttgttcctgttctaaaaactctatagtgcttgctccatggtgattttttaaagcgtatttaacatacatccaataggcatctcaaaatgttgtggatggtaagcaagttgtaacccaagacaaacgatcctcaacattcaattttcaaatttatgttatagttattcagttttatagtcgtgaaaaatatcattctttagagaattctttctattccaatgttccttatagtcccatccaacccaagttttctgatttttgctatactactcccgacatgggcatttacatagcgccacggcatgttaatcattttgtttttcatgtgaaacttcaaacaacttgggaaataattagccgcagtatgctattctgttattgagcctatgtttatggaaagtggaaatattcttaaacctttaaggagacctttattttaaaattgtcgctgatggaaattggtccaacatttgttccttcccacatcatattatcataaaaaatgttttggactgaactttgaaatacattacatttaacgccttttcattacttttgctgcaaactagtttcttatctcaaatacattgatgtttccccccataattgcaggttattc

SEQ ID NO: 64898 - DNA, 210 bp, Cucumis sativus
  Intron number 1 from transcript Cucsa.306890.1 (locus Cucs a.306890) derived from phytozome v7.0 (chr-ID scaffold0297 7; pos 285090 to 285299 reverse strand)
aaacccgaagcatttcatcgcgagggccaaacttggtaccccattttgttattttgattataaatgatgtttctcttgtttgcattgattgattctgtaatgccaattcatacgattctgttttttgttttgatccatttgatttgatctcgttaatctttttggttttcttcattcctattaggctttgctcaagtgggttacccagcg

SEQ ID NO: 64899 - DNA, 551 bp, Cucumis sativus
  Intron number 3 from transcript Cucsa.179660.1 (locus Cucs a.179660) derived from phytozome v7.0 (chr-ID scaffold0123 3; pos 46177 to 46727)
caggtgaccgtttccaactccatcggtacactattcctatgttttatgtttagatgttttttgtgagctttctgcagttcttgtcaagcttcttttccctgcccatacccagtttgtttttctttcttttgatccaataacttcctcacaagaaaaaaaaggacagaaaagtagaaacgtgaaatgccactcatcccattgcaaaataatacctatatgattattgtcataattgacagttttctgaaagctcttgcacatatcaaaggtagtttgtttaataagatgctataattttttttttatgataaggtattttgctggaaatttttttgtgaacatagttctttttagacaatttgatgttcttcatagttctagaatttagtctattaatcattaatgagcttctgataaaatataatatactttagtctatgtaaaaaaatgtcggttgattagatttaacatttattaccgttttcaactgcgcacttgaatttgagaaatttgtgttgtaggtatcccctgatcaagcacaacttcttgca

SEQ ID NO: 64900 - DNA, 548 bp, Cucumis sativus
  Intron number 1 from transcript Cucsa.212950.1 (locus Cucs a.212950) derived from phytozome v7.0 (chr-ID scaffold0154 3; pos 726618 to 727165)
cctttcgccgaggagcctcggtaagaaacaacataaaggataacgaaattttgctattatagaaagagaaagcaataatagagacaaatgaaaaaaagaaagaatggatagtgagatgtccacgtgggaacacgatattcagaagctatatggcccatcagtgaattggcattaaagaaaaccgacctatataacatacacagcttgtggatatgatgcaatttggatattcatagaatttcatttttctggagaaaatcagatggaagcagtagttttcctgcctcgaattctaatccgttttcccaatttaatctctttgagaagaagacccacgttcgcttcgaaaggtatcacaaacttgaaactcccaaaaaccagtcttgaacttagcaaatccattgtttgcttagccaaatgtttaaaatgaaaattttatttgagttttgtcaacactttttattgcagaatttgtagatcttgtgtacttctcacaagctgagggattaatttttgatgcagcttgttaaatttggcagacgttgcag

SEQ ID NO: 64901 - DNA, 777 bp, Cucumis sativus
  Intron number 1 from transcript Cucsa.299640.3 (locus Cucs a.299640) derived from phytozome v7.0 (chr-ID scaffold0292 0; pos 164784 to 165560 reverse strand)
cttctgtctccttcaccaaccggaactcctccaaggtattgaatctttctttctttgttcactggagactccgtttttggagcattttaagtgagggaactgacgtggattcttcgatgcatgttttttatgtaatacaaatagcgtaaacctactgcttatttactgcttgctagtttactctttggtttgttcaaactacttagttagttaatacatgactagcttgtatactttttcatcaataaataaacatctcctctcatattgagagagaagatttcattcaaaaaagaaaagtttagtgtttggtttacaccagttttcgattgtgctcttcatttgtttctataagattattgtccattttcagctcttgtgacggaattggattttgacggtgttaaatttcggagtgaatgatcgagtctgaactttctgctgtgttttagttttcgaaatttcacggtgactgttgatggttcttgtttcctttgagcatttcgaaaattgatatctggaatgttgccttcgctggttaatggctcatataaaacctttccaactgtcctgacgactaaaagttatgtgaacagaagttcaacatgttttctaacgacaagtgattagcagacgtgtatttcctatgaaacactgtaattttgtttatgcattttcgattttatctgaaattgtttggaaataattttaatgcttctttgacgaacaattgctggcgcaggttatccagccttcaagcattcaagagtgtaaagt

SEQ ID NO: 64902 - DNA, 854 bp, Cucumis sativus
  Intron number 1 from transcript Cucsa.148290.1 (locus Cucs a.148290) derived from phytozome v7.0 (chr-ID scaffold0110 7; pos 436916 to 437769 reverse strand)
ggaagctatccaatcattaaacggacatccctttggtgagataacacaaaatcaaactccttaaagaaacaatttcacacataactctcaaactaacactttcagaggttgaattgagactcttattatcacctgacaaagaatagaacaagaatattatagcccacccaacataaaggaaacctttccatcatgttcgcacgaccaaagaagacttgctaagaacaaaacctgactctcttaatcatggacaaaaatattaaatactgactggcaaataagaaaaaggtctaatagaatcctagaggaaaaattcttacaagagtaaccctcttaaggattatgactccaaacactatctctcaagtctaagattaaaaccctcaaactgaaaagaaaagggatcaccttcaccttcattgtttccttgtttagttacgttttcataaacagaattctacagatgtaaaactctatacccaatcaatatccaaccatgtttattctaagactggtttttatttgtcacaaaaccgtacagatttattattaaaaaaagaaacatctaaaatcactttaaagttatatatgaagtacactcttacattaaataaggatatgaataaaatttaaatcttatcttacatcaatcaaatatgaacaggcattttagtcttaagtatatcctatgacaactccccttctatataaattagatactctaacaagaaatgaatatcaactctcaaaataaaataatctttcatttcagaccatgagacaatcgaaaccatttcttccaattctcctcttgatctttctctcagccttaggcaatatcataaccacagtca

SEQ ID NO: 64903 - DNA, 966 bp, Cucumis sativus
  Intron number 1 from transcript Cucsa.135970.2 (locus Cucs a.135970) derived from phytozome v7.0 (chr-ID scaffold0104 4; pos 748428 to 749393)
tggctctcgttaagaaattgctggtgcgtctttttttcaaatttgcatttctgatgtggttttggttgttttacttctgcggttttccgtctcgtcgtgagcatttaacgacttgtttttttttttaaaaaaattatatatgtgtgtgtgtgtgcgcatttataatcgttgattttctcttgtccctaagtcgtttgtatttctcggttgctttaattttcctctgcgtcattgttcattggcgcgattttaatggtttgaatctttgatgtatttcactgagaagtgcttgttgactttcgaattcggagagttcaaatttctgatgagtttgtccagaatattttgttacgatcacattgatgatttctgttttgaacttcagtgttcagatcgattttacgtgctcaacttagatgtttactcatttactctacgcgaggttgccgatttactctcagttattagcgaatcagtcacttgctcagaccctacgtcttcatactttcttttctgatttctatatatttctttttttttattttcaacagtgataggttcttttcactgatttttttctccaattttactattgctttattattgtatatttttccgttgtcccaaaaaattatggaagacgaagattttaagtggtttgcttatgcgtttatggtgataaaaggagacatctaactgatataagtaactattattatactgaagcatattcattgtgatcggtttgtaaaagcgatattcaattatttttcatcatacagctgtttattcgggattttatgcaataactattacttgatcaaagttccaaaccattatgtctacctgtcgcatcgttcattcttctgcgtagagtcattagagttctgtaatttttactttttttagggaaaatgggaagtttctaaaaccttcagaatgtgattcaacaattaggtttgtaga

SEQ ID NO: 64904 - DNA, 759 bp, Cucumis sativus
  Intron number 3 from transcript Cucsa.278230.1 (locus Cucs a.278230) derived from phytozome v7.0 (chr-ID scaffold0260 9; pos 71817 to 72575)
gaaggaccaccatttagatttaagctatctctcaagtttgttgattgttattctttctaaatgcaggtcgtctgtacttcccttccgtatttattgatgacattataacgaacttcaattgcattgtgttggagtctgttactttcggaacttagtgctgataatggccatctgaagcatgaaagtttgtgttactagtttctacagtttgcttttggcttatagtcttgtcttctttgtaattatgtaatattgaaatattttaggctaggctatgagaagctaaaataatggatgctgaagccaaaaagtagtaatctattcctgcagctgaagtgtgcatgtagagttgatcaagaaacaaagaagttttaccccaaaaagaaaaatacttaggtgtatcctagaattttttctttttgtgtttagggtttagggaccattccaagatggacatacaattcttcattttttctttgtgtgtaataagaatgggatgaacaaagatgagtgcactattgctcttaagtttgaaagatatctggtgacttgtttatttatttattgttattatttcttttttgttcttagatattttgtgtttactttgtaatgtgatatgtttattcttgataagattttattatcaatcgaaattttgaaattcatgtctctttttaaatccataaagtcctcaatggaaacctttgggatgtgtcttcagagaccattcaaattttgtcaactgtttaaggttca

SEQ ID NO: 64905 - DNA, 983 bp, Cucumis sativus
  Intron number 2 from transcript Cucsa.280900.1 (locus Cucs a.280900) derived from phytozome v7.0 (chr-ID scaffold0263 3; pos 863002 to 863984)
atcgtgaagtctctgtggcaggtttgtgttccttcattgtctcttttttctcctgacactgttgtcaatttcattgaagaatgcgaattcgtaatctcgtcttaattattttaagcttatttcatttgagggaatgtgaagttgaaccactttttgactatatgatcgtttgcttatagtgcgggttcaagttggctccgatttatgtgcaataccatgagaattgggttttgttagaaatagtaaaatactgctggttgttcaagatacaagctctcgaaagggagtgaaatcaaaacaaaattcccaaataaagaacaaagctatgtcagtgactgtacaaaaaatacaaaattggagagctaaattcctatgctcttgacaggattgaggatcctaagatttagggtattgatgggtccctaaagtttatagttagtatagtacaaagaaaacttcatttcgatggcgtttgttccacttggtgttcaaacagttgatggcttaatgtagcacgctggaatggaatataatacacctatggagtcaccaacttgagagcaagtagcgaagacttagatattgtttattttatttttagaaacaatattttaataaaaagaaaccagctttcattgagggggaaaaaatacagaagggtttacaaaatggacagcccaacaaaaagagccaaatcaagctaacctaagttggtcacggtcggaggggatacagtagctttgattgatagttttaggaatgtgtcacagtattagatggatattctccctcctagttctaggtcctccagtttggtaattatgtgataaatttttttttcttctgttggattagcttgctaatagaaagttggaaatataattctgtatttctcctatactttatagttttggcattaggaaaccatttctttaaaatcatattttgtcactcaggaggaatagtagcattaggaaaatttg

SEQ ID NO: 64906 - DNA, 561 bp, Cucumis sativus
  Intron number 1 from transcript Cucsa.286390.1 (locus Cucs a.286390) derived from phytozome v7.0 (chr-ID scaffold0265 3; pos 2447408 to 2447968)
ctgaattcgattagggagtgtttcgtttccatttggtaaattatcttctttgcatgcatgtttgtgtttaactgctaatcttcgtgttaatttgtcatttcagaaattaaaagagttctaagttttttggtctgttattttgcatgcattagattgcttcggggacattgttctcttcgttgatcttgcaatattggaagaagggactctagttgcttgaaatattatgggtctgttaatgggagtttattgctgttttcctcttattcattatcataagcaacataaaacttctcatattttgggattagatgttcataccatacacgaaactcaatccgtgaactggtatattggttgggagggtcgatacaaagtggacctctcactctgataccatgtcgagtgaccactaaattcaaatgcttgagctaaccattaaatggataggttggcatatattttagatcatgtttgataaggtcttggtgttttgtttctaaaaattatgtttgataaattgcagcttttttgcctgtattggagtaacagctacaagag

SEQ ID NO: 64907 - DNA, 460 bp, Cucumis sativus
  Intron number 2 from transcript Cucsa.286390.1 (locus Cucs a.286390) derived from phytozome v7.0 (chr-ID scaffold0265 3; pos 2448066 to 2448525)
ttcgagcttctgagcttcaaaaagaagggaaaaaggtataaagttcattttcatctaatcatatttctgtcaattgtatatcgattgtttgaggagtttgtttaattggtcatgttttacctttgatcaatgctttatcctattgtgacttattactaagtttttggaataaacttagcatgcatcttttaaatgatacgatattagccacttgagcataagctctagagactttgtttttaggttcatttgaaacgtctcacaccaatgatggtattgtctcctacttatatacgtaagattttcttgttatctagccaaggtggggactttggtcgcacacctagtatttatttcctgtttcaaccttgttcgggatatttggaattcagagtaactcttctagcctgaacacttgtaatgctcacaatttcaaaaactctgcagattattttcacaa

SEQ ID NO: 64908 - DNA, 501 bp, Cucumis sativus
  Intron number 4 from transcript Cucsa.286390.1 (locus Cucs a.286390) derived from phytozome v7.0 (chr-ID scaffold0265 3; pos 2448926 to 2449426)
caaaagttacctttccttgattccgggaggtctaggtaatttcttaatttgatttcataagttagagtgattttggattaatcattgtgaacgatctttctgggaaggacggggtttcacgaaatcataaaatcaaggacacataggatagctttagtttcaaattttattttctgtaatattttcaccattggtaaatacaaacttctctatgaccacaaaaatcttacatataaacattgggtctcagggccacatttatccttttcttagtctacattatttagtttgttaaagttttataaacttgacaacaccaatttctcaatttccttttatttactacatggagggactgggaagtacagatggttcagaaagttctgaaatcggtttcatagaagttaggatcttctagaagctacatataattgattggcatttaatcctatcaaaatacttctaggtgcttacagcgattcccgaggaatacctgcaatt

SEQ ID NO: 64909 - DNA, 528 bp, Cucumis sativus
  Intron number 5 from transcript Cucsa.234230.1 (locus Cucs a.234230) derived from phytozome v7.0 (chr-ID scaffold0199 9; pos 182777 to 183304 reverse strand)
ggtggtgtgctcgcaaattcaatcaaggtacttacttactctatttgtgcttttgcctgctatatgtatacgatcaaatccttgtgaaaatgtacatatattagatgcaattatctggtgcatatcatggtttctgtcattattctcttttattatcttttctttctgttattcggtaatatgaaagtttttaagtttgaacagaaataaatgtttgtaatttcgtgatacccaatgttgagtactttaattgaactaagtgaaagaataacctgtgcttggtgactttgacttattatggaattgaactgttattgctttttttttttttgggaaaagaagtacattaaagggcccttaagtagttgcctatgtaatttttttattgaaaggatggttgaagtgctttcaataacttaaactatgatagtcatttaaaaacaaaaagtcatttaaattggacaattatctgtaaaatgtaatgttttctttaatgattcagtttcgacatttggggctgtgctggac

SEQ ID NO: 64910 - DNA, 692 bp, Cucumis sativus
  Intron number 3 from transcript Cucsa.267140.3 (locus Cucs a.267140) derived from phytozome v7.0 (chr-ID scaffold0236 4; pos 231647 to 232338 reverse strand)
ctggcagtgaaaagatatataaggtattgctttggatcataatcatcagattttagtattttcattttccaacgagaagttggaatatagttttacatacacttaaagaatgcatatgcatatcagcatacgaatgaatgcctgttaatttagttataggagatatcttatttttctcagttgttatatgcattttaatgacaatagtaattatagaaaaagaggaggggggaggggggtgtgtcagggggaccagaaaaaaaaaatcgaagaggttccagaggtagagaagaaatccactcacggagcagcacaaactgagcatattcagaaagtcaataattgagatagagaaacaattcactcaatgagcagtatccaatgccagtctatatacattagggaagtgaataatccatcaaattgcaagcaccatccaattggtagccaagggaaagagaggatggaaggcttataaacatgaaaatggttgatggtcataaaaaaaagttgaagttgtcgaacatgatatttgcttatctgtcagctaggtgaacttgccatggagttgaacgtgcattgattatttgtagtagttgtacataaattttaattgtatgatttactctcaggtatttaacttgcttccattccaactttgatctgctcttctttgcagagttttgttggtc

SEQ ID NO: 64911 - DNA, 774 bp, Cucumis sativus
  Intron number 3 from transcript Cucsa.184700.1 (locus Cucs a.184700) derived from phytozome v7.0 (chr-ID scaffold0127 4; pos 340705 to 341478)
gaccggagccgttcaccgtattcatcctacagcaggtgatcccgtttatgtttttagttttatttacttttgagttaatctgttgaataatctccaacgaaattatgagaagattgacgacactgtatcttttcccgcggtttctacttcattgacatcggagtttctgcatgaattttgccccttttgctgtaaatttcccccttttttttcttctaatatgaaggacgtgttctttgtcgaattaagaggacttccatttcatggaatgttcatttacaatttattcttattattttgacaaaaaccaaatcgggtatctatgttgctgcggtagtaaattttgttgggttttcgtgtttgttttattgttcaactacaaaaaatttatcattataacttagggttgcttgtacttctctttcattgagttatatcttccggatctttttgacctcttttattgtttatgtgctgatgagacttcacgacctcttttattgtatatgtgctgatgattttttatcttgttttgtacatgtgctttactattttgaatttcacataaaatttctgatttttgtggcataattgtcaagtacctcctaatggtatttaatcatttgttgagaatggtgagtgggggagaaaattttagaagtcttcagggaaaaaactctaaaatgtggtagaagcaaacagaatagacatgatcttgctaagaaaattgtgaaataagtcagttattcctattacatgggaagcgaccaggtt

SEQ ID NO: 64912 - DNA, 491 bp, Cucumis sativus
  Intron number 2 from transcript Cucsa.273400.2 (locus Cucs a.273400) derived from phytozome v7.0 (chr-ID scaffold0251 1; pos 497638 to 498128)
actccaaggtacttgattttggttttacagcgttttttcttttcttctttttctccagattttcttggaaattgggttttttttttccttgctggattggtgggaacgttgaatattagcgaagaaatccgtagaattttgcgatctattttcttttgggttttgtcttttatatttatatatttttttctaaaatacgatacggttatgattatgaactgaggaagtattgggaatttttttagaagaaaaaagttgtgagttttattagcagtatgttaatcgtcataatactgctaggatgttggtttagcagtatatagattgaacacgttgatgggttcttcttaccggccttgacaacttgaagctagattattataaatcaaatgggttgtgggttcttgtggtggtattgttatcatttgaggtgtatctgctatgattctctgtatcttttgtgcttttgattgcttagaaatttcccatat

SEQ ID NO: 64913 - DNA, 603 bp, Cucumis sativus
  Intron number 2 from transcript Cucsa.164270.1 (locus Cucs a.164270) derived from phytozome v7.0 (chr-ID scaffold0114 8; pos 112015 to 112617)
caattaacgctcacagtaagagttctgttcggaaggtatttttcctttctacagtgctgcagtggtattcatttataggttgcaattaatctcgagattctagcacctcatttcctatgatatattgaattgctagaactatcgaagatcgcatactttgttgatacttttttttttctttggatgatggcactagttatgttatttattatttattactcactttaaagatgaaaactgatgagttagacaagtttctagttgtttagatttttcttcatcctttctgttttaaatttaaaattgaatgcttattagttttgtgcatgtatggtaagtaaacttaaaatgatcctttgacaactctttaggcttctttttgtatttacttacacattacatctcaatgttgaattgtcaacttgtcataagtgtattgcaaattgcagtagcttattattgggtttagtgtttaactagctagtttgtttgatttagtgtatttcaatatttatttattttatttttctgctaaaaaggcctaactgattttttattgataaaaaagcttctcgagcttgtggaatttaaactgaaggaagc

SEQ ID NO: 64914 - DNA, 736 bp, Cucumis sativus
  Intron number 2 from transcript Cucsa.204910.2 (locus Cucs a.204910) derived from phytozome v7.0 (chr-ID scaffold0141 6; pos 73726 to 74461 reverse strand)
tttgtcggtctgagtaagtaaaggtttggatttgggtatgtttgtactaaatccttgctattgggtttctgggttattcgatttggctcattttaggttattttccattttatgtttgtgtttaatgggtttctttttaatttctgtttgcttcgatcctttgtttagttttttcattatcatgtctagattgatgagttttgggggattttagtggtggtggtgtttgtgtgttcttgtttttatcatttttttggagtgtttttttaagtttgttttggcattaccaaagttgttgtttggttattggtacctaaatattggtgtcgacccatttcctgtgttgttctttttctttttcaactattgcttttatggttgcttttccttcaccaatgctatgatatgttagttatgttaactttttatatgtttgggaatttgtatttcttcttcttcttcttcttgttttgattcttgttttcttgcttattttgtgttaatttaggtaactcatgggttagattctttggaggtccctttgatgtccttgagattgactttgagtatgttttagttgtttcaagacttttgaaattttgcacttgctatgttggacatttcatcttgttgaagtgctgattgctttactttttcttcttttcataactttatggccattgctatatcacaacgattaggaaatttgcattgggattgaacattcatcttcaat

SEQ ID NO: 64915 - DNA, 571 bp, Cucumis sativus
  Intron number 3 from transcript Cucsa.281110.1 (locus Cucs a.281110) derived from phytozome v7.0 (chr-ID scaffold0263 3; pos 1017042 to 1017612 reverse strand)
ccatactggtatgtttgcatttctactgttaatggttttctatctcttggccctggtcagtagaaaacagaaattatggtctattaatttgttctcaagtttacaaaaatatcattgaaaagattgacaaaccaattatttgatagttctcttgaaacctcgtacattttttatttgtcttgttcttcttgtctacgataatcaaacattctagtgtagaaatttcttcctcttgttctaacatccttttcttttgaattttttttcttgaatcaattgcctctcattttattggagcacttttaacagatcctgtgatgaaaacaacatgcaattaattctagtcacgttaatctccctccatctacccccgaaagaaaaaaaaatccatgtgcactatggtaaatagtaataaatagatatatattaggttattttaaatttaagaaagattaatgcagaatcattttagctaaaaatctatttgttctttcatgtttctttgcactttaacttagctgtactttcatatccagagtttgactggccatacgagcggaatagattctgt

SEQ ID NO: 64916 - DNA, 353 bp, Cucumis sativus
  Intron number 1 from transcript Cucsa.281110.1 (locus Cucs a.281110) derived from phytozome v7.0 (chr-ID scaffold0263 3; pos 1018292 to 1018644 reverse strand)
acgtcttgaacttcgaatttctcgtttctaatactgtactgtgtttttctttctctctttcgttgtcttcgcgttttgaaatttggcttttggttagtttttttttttttttttctgtttctgttgtggttaatgtctgtgagtgtggagaaagatgaagctaacttgagttggaagtgtagcgtgttgttgtacctttttcttgacttgcttgaagcaaactgataaacctcatttctggttttcttctttggtggtttgtttgtgtttttttcttttcctaactttgatctggttgctggtggtttcttgatttaatttttattttttctttggaaatttgttatacagtg

SEQ ID NO: 64917 - DNA, 677 bp, Cucumis sativus
  Intron number 2 from transcript Cucsa.237760.1 (locus Cucs a.237760) derived from phytozome v7.0 (chr-ID scaffold0202 3; pos 502040 to 502716)
agacattctttgtcactgatacactgtgagtggattctttcttatgtttgtccagtgtattttggtaaaaggataattttattttgaaggcatagtatatgtgttcttgttatttggttagccttatttttttgttaagtcttgtacgtgaacttggaatgaattgaagagatcttgaatgagcatcaagttaggagatcttgcactccagctttgggtttctatttaaaattgttgctttttttttttaatctactctttaccaatgtattttttcaatttcatttttccttttttaacaatggttcgagtgggttgcgacgcgtttgaaatttgaatgaaggatggagctttaaatcaactgatttaattatgtattcatttgatttggatcaagaaaatatagaatatttgtgttggttgcctcaattatatattcatttgattcttagtgtagtagccctttatgatgtgaatccttgtgttggttggctcgactaaaaatattgatctacttcaatggagactaagaagattaaaagattatgaaaagtgattcatgaatttagagaaaagaagagttgggtgatgatcatcaaaggcatgcagccaatgttttgttaagcctttcttgaaagagccatcaatccttatgtgtttgtttttgttggtttcag

SEQ ID NO: 64918 - DNA, 662 bp, Cucumis sativus
  Intron number 1 from transcript Cucsa.153350.1 (locus Cucs a.153350) derived from phytozome v7.0 (chr-ID scaffold0112 4; pos 491720 to 492381)
aggaggagggtacctcagcaccttttccggaaaaagtatgtttcattttgatttacgccctagattgcttcctgtttttcatttccgattttcgtttatttatttatttattttgtttgggctaactgttcgtaggctgattgggtgttgtcaatcttgaaaataagcgtctttcttgcatttaatttcgggtgatggtggtttttcataagttttcttacagtgatcgtggatgcgtggccagctcacttgtaatattatggggcaatctcttgccaaacgatgtttaagttcgaaatgtccatatttaacagtttagttgacagtaaagtttaacttctgagtcatctgcattccattaagtttctggcctaacctatcatggtttattttgacaagaatatttcctcagtaattttaggctcttagttcaatagttgtttgtttaatttctaatgtgcttatttctaaatgattactgtgttttctcatgtatagagttaaaataagaaagtcgtatatctatttttggctcatttactttgctggacatcttaaatcttaagttattgagtgaaggactgtgttcaaattttctgtttcattgtaagtttatttatttctttgtggcatgtttcaaggttcaagtaggagggtcacca

SEQ ID NO: 64919 - DNA, 373 bp, Cucumis sativus
  Intron number 1 from transcript Cucsa.280800.2 (locus Cucs a.280800) derived from phytozome v7.0 (chr-ID scaffold0263 3; pos 747833 to 748205 reverse strand)
agctttacgacagtgtttgcaagcaggtcttttactgttattttgattctttttcccccaacagagaaggaaggaagtagaagtagaagtagaaaaagaaaaaagagataactttatgccctcaattggatggctaaataatttagaactagctggaggtggttgagttcatcgactacaattcgcattatctgactgctgagaagtaataataataagttgacaggacgaagcacatttttactatgattttgccgttttcatggtctaaaatatttagcgatttatctgtaagtttgtcaaattttcttcttaatcttgtattcttatctttacaggaggttgaaattgttcttacagcacatccaactca

SEQ ID NO: 64920 - DNA, 409 bp, Cucumis sativus
  Intron number 1 from transcript Cucsa.162330.1 (locus Cucs a.162330) derived from phytozome v7.0 (chr-ID scaffold0114 4; pos 2002151 to 2002559 reverse strand)
tccctaggttctcctcctttagagaaaacggagatcgccctatctccttgatatatattacaagtgagattcgtacgtggtttgggtttgttcctaaatataagatcaataacgtgtatcataaaaaatcaaatcacttgcttgattccttaggtttttagttctctcccttgccccctaatgacgatcatacgcagaacaagcaagatgagacaaaatatagtgatcaaaacgacaacaacttgttattaaggttctttcgcctcctctttccagctcattggcaaaagaagaatgatgatttctttggtgtttcggccttgagatgttttttgaataagaaggcaacaactcatgagagaaacagtaaacattatttcaggttgagtcctccatctataactgagct

SEQ ID NO: 64921 - DNA, 923 bp, Cucumis sativus
  Intron number 1 from transcript Cucsa.192230.1 (locus Cucs a.192230) derived from phytozome v7.0 (chr-ID scaffold0133 3; pos 133967 to 134889)
tctggagcaggcctcgtcgacgtccagccgtcgtacttcttcttccttctccgtttttctggaatttcaatctctcctactccttctcttgattccctttgtgttccacttgcctgatttatttctctatttgttttatttggttgcgtcagttagttctgtgatggaagctggagttacgtgccttttgttttttcgtagtatcacttgatctaggactgtgttagaagcaaactggtttatctgttgtactcgagcatagtttggcttagttagcgaggtgaggacgtaagttctttggggctagttgtagcataagccatctaaatcatcttgcagcttgtgggtgatcatgttgatttggaagtatttttgttgcatagactgtaagagaatgaatcaggattactgatatttgtagctgatggaaactgggtcctggatttaggatatgcatgattgctgtatggagtgaaatctgtagtgtcactgaactcttattgtttttttggataataaacagtttcattgatgtttgaaattataaaaggggaaccccgataagcgtaattacaaaaggcttctccaataagagtggaaggaggaataattatagtgatggcactgaactttgaacgctttagtattgagtgggattgggatgtttcatcaaaaaattgcttaaaagaagaattttcacgaggtaaacattgcacgtggaatggattataaattctggagcttcggttgtagtaagtctgtggagaaattttaaaccatggattcaaaaggcagtggtgggattgtagtatctgtgtgtttttgtcattacagctttgtatcgttgtggtttaatatttgctttgctgatatggttatggcaaacaggtgaacgttcctaagaccaagaagacttattgcaa

SEQ ID NO: 64922 - DNA, 671 bp, Cucumis sativus
  Intron number 1 from transcript Cucsa.280620.1 (locus Cucs a.280620) derived from phytozome v7.0 (chr-ID scaffold0263 3; pos 538951 to 539621 reverse strand)
agcttgtccagaccgcggtgagttttttatttgtttgtggcgatttgatttggaagggtatgtggggttgttgtcgggatttggatctgatgtttgatttgcatttattggagttttgagttgatcgtgatgtatttactgattgtttgcgtttgtgggtgggttttttttctctgtctttatcaaggtttggatttgtttttactatgactttgaccaagaagttgatttttcgcgatctttatttagttgggtgttttgggtttgtgtattttttccctctcttcattgagatacgtttgagagattggttttggtgtttgcaattgtgggtatttgttcactagtgagatgattatcatcatgttacaatgatattagtagtagtcatggactttttcccctttgggtttcgttttttattttgaatatactagatcaatctttgatttttcatgaattatgaatatttaataagaaaaagatcgtagtcactctcagagcttatactatgctttaaatcatattgcatggcgttgtggaatggcaagatcaccttcatatgctgcaatgcgtggaaattcggttgtgttccttatattaagtaattatcttgctctattctttggtttgcagaaatcagttgcatcacctggacgtggtattcttgc

SEQ ID NO: 64923 - DNA, 1003 bp, Cucumis sativus
  Intron number 2 from transcript Cucsa.220280.1 (locus Cucs a.220280) derived from phytozome v7.0 (chr-ID scaffold0165 8; pos 1773939 to 1774941)
ctcagatttccttaaagcaggaggtatggtgaaaacatttgttgtagatattatatgaagcttgtaaagttgtaatgggtttgtttttgtagaagttccattgtgttcaatgagaaaacaggcactaaaatcaccgagcgtttcgcggggtttccgggttgtggattattttggtgcagtgttcttaaaggaaaccagtctgaatatgaattgactttttaaatgtttaaatacgtatctgtggctaaaaacaaaatttctatgagcacgtagaaaataatctaaatgggccatgaattccaagtgcctttttgaaatggttttaagcatttacaagttttttggggagtactttttgatatgtaatgtaacctagcaatatgaaatctttgagaagtattgttgtgaatcgtgatatataaaccgaacccattctcaatcgaaccttcatcatataagggttatttattctatattcctatggtttttaatctgtgtttagaacatgttgtttgaaccagattgttcgtgagttaggagtgatgttttcaaatgaaacagttttcttgctaacacttgatagaaaggctaaggccgtttggattgtttttaagaagttcgtgttttccaaaaaaactcaattatatttaatctcttttgataaaaactattaaattactcttcaaaagctattttgaactattaccaaatcactctaattttttcaaacatgttttgataattagtatgtatttaaaaaatgcctaattcctagtgtttgttcagaggaaatgtattaattcttttgaatatttttttatttgatactaaaatctatgaaactttgtaagttgttggatatgtaaccaattaagtttgtgagtcaaacttctagttctgatcgagcttgtttgtgatattcttggacgttctccttagcatactgtgtgcttttttttcccctacagattctacagcttgaagaacaattacaaagccagtt

SEQ ID NO: 64924 - DNA, 922 bp, Cucumis sativus
  Intron number 2 from transcript Cucsa.256990.2 (locus Cucs a.256990) derived from phytozome v7.0 (chr-ID scaffold0222 9; pos 4402910 to 4403831)
tcttcggagcagcaaattgaacgatttagtaagttcataagatatatatatatatatatataattctttattttccttggagccattgagaaagaccatttattttatatttgttattgttacccttaaaatcatttttattttgggatattagaataactttgtgtgcatcagtgcctgttagttgatatgtggttttcacatcgttttacatgccttaagagagcgtatcagcatgataacaatgaaaaaagtgctcttcctccagtgttgtctactttaattttagttaatctaatgctttgacctgttaaatacttcataaatttaaaataattgttagcaaaatttctctttgtcatcaaacaagattatccttgtgatcactggtgcacattcaatatagtagctctgaatttattccacttaaattggagcaacattccttcagttgtttactatagatctcaagtttataggttgtatctcaatttacatttcattaaattccttgctgttaaaactctcgtttcatcttcaatgcttttttctggtgtaaaaattcaacctatcaatactttcagcttgaatttccttgtatcaaattggaagtccactttgcaacacctttaccggccccttttgtaaccctttgaacatttcgttcatcaatgaaattgtttcttttaataaaaaaaactcttaaatttatcttctagatagtatgcagcttcaactttccatcttattttttttgatcttgtatttgtacttgttagaccaacaccggttttctttagttcttgtcgcagcttcttcttttaaaatttagaaaacaaattctacgtagctttgacctgcatgtcataactctagataatttacagtggttgacctgaagaggcttgaagttcaagcaagg

SEQ ID NO: 64925 - DNA, 579 bp, Cucumis sativus
  Intron number 1 from transcript Cucsa.301760.1 (locus Cucs a.301760) derived from phytozome v7.0 (chr-ID scaffold0295 1; pos 47378 to 47956)
caacgtgttcattcccgccacaggcgatctagaaggttttatttgcaaatagaggactttttgttgtttatctgttgcgttttgatttgtttgtagtttggatgagtgcattgagattaggattttttgcttcctttatttgtggttgattcttagaaactggagaatggaggttggagagatatatgggctaattaatatcattttttttttttttttttctattttcaccttcattacttgttgaatgttgaaagctggatccgttggtttcttaaagaaaagggaaagtgcaagcaaatgaagttctcagtttactaattgggggagctaaacctgaatagagacaaatgtggggatggcaatatgctgttgtttcacttaatgttctcatttgtcgttcatttttacttacacaaagtttcttcacgactcatgaagattttatagaatctatgaattgataaagtcatttcgtcactctttaatgatcattacttcatgtcactaacttacgagttataaccattttgttcttcttttttctaccccctttcagctcttcagacaagaactcca

SEQ ID NO: 64926 - DNA, 764 bp, Cucumis sativus
  Intron number 1 from transcript Cucsa.257880.1 (locus Cucs a.257880) derived from phytozome v7.0 (chr-ID scaffold0222 9; pos 5059890 to 5060653)
aacctattaaaccggattttcctctcagatcaaaggtgaatttttttttttaaatagtaacaatgacaacaattaaattcaaaataacaaaaaaaattaaaatttacaaatataacaaaatctgtgtgagtttatgtatgatagaaaattatcacttataagtatattgcaaatattgatctatcattaatagaacataagagtctatcatatcaactaggttttgctatatttataattttttaaaaatattattatattattgattattattctttaaattgctattcattataactacattttttaaatcttatatccactcgttagcatgtgcatttagatctcaataatagaaatctacattaatggatactaattagaatttaattggtattttagactttttagatgaattgcattgagattttgctatacatcgtcttacgctttgctatttttctattaaattattttgttttgtcgtagacagcaaaacaaaaaagttttaagactttgtttttaacttagatctaacttaataacatcaaataagatattatgacaatgttttataagtgtcgttgacagtcacttcttcctaggagatttgggaagttaactaagtgtcacgaaaactattaaaagatgtaaaaactatttgttacattagatctcaatttggatgttggttttttcaatggaactgaaggttaagaattttcacagttgagcggcaagcaaattgggatagttggattggg

SEQ ID NO: 64927 - DNA, 731 bp, Cucumis sativus
  Intron number 3 from transcript Cucsa.231800.1 (locus Cucs a.231800) derived from phytozome v7.0 (chr-ID scaffold0198 9; pos 19916 to 20646)
gctgcacttctcaggtaataataatattaacaaattttaggtccctaagttatacaatactgcatgcccatcatctcaatctctagttattttttcagtttatagaataatctttggaagataattttccaaatacctaaatattattatgggtaaaattaattaaatttatacataaaacgcagctaattattagctcatgcatactttttgtttgagtggccaaatccagcctttaaatttcttatttattaaggaactttaaaataagggttaaatcacaactaaattctaattaaaactggatgggaagggttaatatatcaataattcaacacctttttcatatgtggttttgaaaacttgtaatccatgatcaatattaattttgaagaaattgataccaaaacaattggactaatttaattttgatatcatattaaatcactaatcatatagaggaaaaaaattactataacttcacaatgtattaacgtgtttctgctgtgctccaaacatgggtaagctcacaagtgaagtgaaaggcaatattaaatttacgtcaaatgaaagtataataaaatattgtaatttaataagctttaaattggtcagtgacgtaaaattaagaagattttgtatagtttaatcttaaaattaacaacattaattaattctaatttcttccccctttcacatcagaattgagcaagtacgactgaaccggaaag

SEQ ID NO: 64928 - DNA, 818 bp, Cucumis sativus
  Intron number 1 from transcript Cucsa.280670.1 (locus Cucs a.280670) derived from phytozome v7.0 (chr-ID scaffold0263 3; pos 598367 to 599184)
gtcggagggcagacccagtggcagtgggggggtaccctcttcttccttcctctccactgtccttttacagacatggcgatcatcaaaaaaactcggagcatgttcaactttatccatccaaaaatgggcaaaatcttattttctattcctccacccacaaacctagtgcccctctgtgtcattttgcctcagattcgtgtacccacaaagcattcgccattgtaacccatccccacaacccccatttttgtcattgccctctacgtgtttgatgaatgtcccctttgaaggttttgctcctgttagtgcaatgtgttgcctattcaacccctccttttgcctcctccttgttcaaatcccttttggcagctcccaaatgtaagatcgtacttcctttaacttaatacttttccatttatgattgtttttttcttcttcctttttattgattgtttgtttcttatgtaagttcctagttttctgaaattacttcaaccgttgatataaatttgaatttagactaagattctttcagctcagtctctcttacccactgagcaattgccagcttctttctttgtttagccttgatgaagccccgtttcattaagcaccgtcaatgactccctccttctcactctctctccctgtgtttgtgcatgttgagcttttagctttgtctcttctctttttggggttctctcagtttctctcacatctagcagtctaacctccacttttcagactatctctgtgggtaatggaggaaatgggtcattgggtcactgattctctccctagctttgctaaaaatcttc

SEQ ID NO: 64929 - DNA, 466 bp, Cucumis sativus
  Intron number 1 from transcript Cucsa.280970.4 (locus Cucs a.280970) derived from phytozome v7.0 (chr-ID scaffold0263 3; pos 902211 to 902676 reverse strand)
tatttgagcagtagaagaaggcagagcataaggaggtagtcgggttttggcttttgcctgttgttgtcttaggttcataaaagttgaaatcatattgtagagatttgagttttatggtttggaccgtataagccgttcttgtcaactggaaagatgataattgggtttttctttgctcgtttgtttagtattgaaatcgtagactctcttctaccctgtagatttctggattcatccttgtttggtatatgctgtccttttcagatttcatcatcaggagatgaaattctcatttgaaatgattcgcccattcaattctatcttttgctttcttttgaaaattgatacatttgctctttttactatggattttcagttttttttcatgcaggcagtcattctctggctaactctgttctttttattcattgataggttggcttcacctgaatctagcttttgagct

SEQ ID NO: 64930 - DNA, 605 bp, Cucumis sativus
  Intron number 1 from transcript Cucsa.249630.2 (locus Cucs a.249630) derived from phytozome v7.0 (chr-ID scaffold0221 2; pos 30666 to 31270)
cttcatttcaacccctcttccatatctgtgaaggggtatttgcctccttcatttctgttattctttctttcttttttgttgttttttcttacgattctgcatatgggttgattttctctagccttctttatcgccaaattcgcagaatttggtcgaagatactcaaattttacagttcttagctcctagatttgtgggggtggctgctggctggaacagtatttgcaagtccagtttttttatttttcagtaccataatattttattaaacgtttgagttccttggttaacctttttttacataaaagaaacaaaagaagggctgagagattattggttgtttgtttgttttttttttttgtttttgttttagttgatttcatggtggtttcgttgaactggtaacttactgattttcttcttcttgtcatcttcatcaaggttttttgaccaattgcttggtttggtttttattgtcttccatgcctctgtaaaagttccccagtgttttcaaaatttgctttgttatcttttatactctctactttcaatctatctatctatctatctatcaataaagctttattaaaacatggatttagcga

SEQ ID NO: 64931 - DNA, 794 bp, Cucumis sativus
  Intron number 1 from transcript Cucsa.273140.1 (locus Cucs a.273140) derived from phytozome v7.0 (chr-ID scaffold0251 1; pos 139213 to 140006)
tcatttaaccttatccagaaaccaattcaaacaaggttggtgtgaataaaattcccacatttacaatcaaaatgagattgatagacatgacaaatctatcaagttgagttaaaggcatatcttagatggctatttcaataatagaattatacactctttcctaaattgcttgactttagatcattaatgaaaagagtagatattaaaaactaaaaaagtatgaactatcaatgctgttgaaagaacacaaaatcaaagaatcaagggtttatctgttaccaaacaaatgacacgtgagggtcgacgctggtcggtgggtttggtttccactggccggaaaaaaagagacgaagcttctgtttcatagccttttaagctccatttgattcaatcttctgattctctacaacctctataaagacccttcaggacaatcccaaccatgccaaaccactgcaagaaactcaaaagaatgaccactatttctatcgatccaaggctcaaactccaaataccaaagctctgtattcaaaatgaagccacaacagaagagattgaaggggtaattcgagtttatgcagatgggcgtgttgaaaggcccccaatcatcccaaatgtatcctgcggcatcacaacatcaaacaaacgcgtaattgcaaaagatgttctcatagaaaatttcacaaacacatgggcgcggatttacgtagctacctctcaatgaaacctccccttacttgtttatttccatggcgatggcttctgtgttggctctgccgcatggagctgttacc

SEQ ID NO: 64932 - DNA, 933 bp, Cucumis sativus
  Intron number 1 from transcript Cucsa.252350.2 (locus Cucs a.252350) derived from phytozome v7.0 (chr-ID scaffold0222 9; pos 1272570 to 1273502 reverse strand)
atatctgaatctttttgctggaagcttgaaataaggtagttgattatttgcagtagatctccacggctctgcttcgctctgttgatcgattgctgatgattgtgttacttgaagtggaatttctagcttggtagcttcggatttttttttcttctagatatacgattttcaaatacttggattctgtttagttttagttcatttcctgtatgccacttgaatttgtagttgagatccttcgctctgttaatcgaaagctggcgcctgaaattggtgcttgaagtggaatctttacgatcccaatagcttttggtttttttttttttttttttctataatatatgatgttcagatatttgatttcggtttagctttagcttatttccgatatgcgttcgattttttggttaaaatcctttgctctattaattgattgctggcgccttacagcgttgcctgaagtgaaggaaattatagctataatagctttgatttctgtttcttatatatatgatgtttaaaactcggattctgtttggctttagctcatttcctgcatgcacttaaatttgttgtgaagatcctcggtgattcttcgattatgtgcatatggtgaaattggtttttcacaagccagggcttcattatgtgagttaagagccgccattgaaaataactcggggacaaggaagctctggacagcttatgaatttgtatctgtgtgataatttgtcatgacgcccatgccccatggcagtcaaaacttgttgtaatttatgaagggattcatttttttccttatctagtctagattttgatgatttgaaaacaatttagtgcaccattttgatgtgagttaaatattaatgtctctgatttgaagcgtaactctgagtctctgagtggcgaggtatgcattcacttgtttgcagg

SEQ ID NO: 64933 - DNA, 376 bp, Cucumis sativus
  Intron number 4 from transcript Cucsa.192520.1 (locus Cucs a.192520) derived from phytozome v7.0 (chr-ID scaffold0133 3; pos 382766 to 383141 reverse strand)
ctattcgagtagcatctggtactatttttaacgaggtgcctaatctttctttgtattggagctcgtgaattctatgttttaaattcttcttcatatctgtttctaattccagaatcccttgtttattcatctgatttctttatgtagattttgaatcttgagcctttttcaccacttgtagcttcagtacatcaaaactgtaggctactgctttgactgattttccccctattatgcctacagattaaaatttgttaaaaaggcttgtggattcctaatattccttttgtcgttggtcccatttcaaattctaacattttattgattatcacttcttgcagataattgtttgggaagtggttccttcaaaaggtaa

SEQ ID NO: 64934 - DNA, 481 bp, Cucumis sativus
  Intron number 1 from transcript Cucsa.179980.7 (locus Cucs a.179980) derived from phytozome v7.0 (chr-ID scaffold0123 3; pos 348233 to 348713 reverse strand)
tccgattttcttcctattccgacggccatcctaaggtttgtatcattttctgattttttattaccaaaactccttaaaaactctccaaaaaaataattggaaatttgattactcagccgcttcttcgccgtcaccgtcgccggtcaggttttcgtctacaatcactctgaatcgtcttctcattgtttttattattattttccgtccatttctgtgttgcctgacttcggctaatttctgattctccgttcaagtattggtttgttggctattaccgattaatagtttctgttttcaaatatcagagcgtgtctcgaagcggtttgtgggtcatatagactatgttgtgtgttgttttcaaacttttttttatgtttgattaaagttatcgctgttctgttatggtgtttgattgttgttattgaagttcgttctgttatatgaaattttgtagggatttttgaagatttaagtggacagg

SEQ ID NO: 64935 - DNA, 681 bp, Cucumis sativus
  Intron number 2 from transcript Cucsa.135810.2 (locus Cucs a.135810) derived from phytozome v7.0 (chr-ID scaffold0104 4; pos 613726 to 614406 reverse strand)
gtaccagaacattcaacttcacaggtaaaggatgctgtaatggaactctttactccctgttatggagatacatttttcccaatttatgcaggcaaaattaaataattaagaatcttatgttcaagtattttttggattttttattgttatacaataatctcaaattaatggtggctggttcttccaaaaaaaggaaaaaacagtggctgggcttcggtcaagaaaggggcgagctatatggttttgattgttcaatcagaataccctaatgatataggagcatcctagacgttaggttatttgttgggggattcgctaactataataaagtgagtgggtttgaggaatttgaggtaggcatatatattggccattgggattcgtattggaaaaagattaatcttctcgaaccttgagcacctgtgtaatttttctcctggtaatgtcaataacatatttttatcgataccacattcaatctctggcttaatagttattaatatttcttattttgctaatgcctgtttattatcacaataacatattcataatgttcttctattaagaaaacctatcacttgtttgaattgagtacttagttttatttgttaatgatgaatgaacttgacaaacagatctatgaatgccttctaggagcttgcagatttgcaagaagggaat

SEQ ID NO: 64936 - DNA, 569 bp, Cucumis sativus
  Intron number 1 from transcript Cucsa.135810.2 (locus Cucs a.135810) derived from phytozome v7.0 (chr-ID scaffold0104 4; pos 614498 to 615066 reverse strand)
atttgtggttaatctaggttaattccatttttactaccctttgtattactttcctttaaataaagggctctcccatgcatttgacaattgattcaaagtaaagattttaaagtttgattctggaagaattatttccttttatcctcttagcttacacctcagtggttagtaagggagaaattctcttctagaaatatccttggctcatgatgtgcacctctttaatcgggtgttttttagaatatacaaagtggctaattccaagatttcatatctacagttatatctaatggaagtctgttgcttaaggggattggggcctaaaatttggaagaagccttttcgctgagaagtggtggagtagtttggttcaggagttattatttttggctattgtatatagtttattaatattattctttagtttttatttttaaaaagattatcatgatgtcatggccacatatcttgttattataattttcttgatttatctttgccttttgtgttatttgtatttcgataattttgtagggaagcgatcaatcacctagccgactgcttagggg

SEQ ID NO: 64937 - DNA, 723 bp, Cucumis sativus
  Intron number 1 from transcript Cucsa.302800.1 (locus Cucs a.302800) derived from phytozome v7.0 (chr-ID scaffold0295 1; pos 887753 to 888475)
gaggaaggtaatcaaagcaactgaatctaacactcatccactggtatctacctaagctttaacgttgatatcaatgataaacaaatatcgccaatatcttcctatttatatcattgatatcattaacttatatatgtgataaatgaacatcgttaatacctacctaagtcatactaccaatatcacatattattgagatcatcaacatttaagttatgtcaatcatatgtgaggatataactgatttgtggatatattatcgatatctacctaaattatatcactaatatcatagattttaaactctaaaattactaaactattaatagtttctatttttgaatttttttttaaatttaatgttatattttaaagtttttgaattatttctttaactttttaaaatttaaagatacttttttacccaaaatacaaaatttaagagtgtttttcatttttgtataattaatacttaaaattaaattagtaataggagaatggtcatgaacagaaaaaaaagtgacaatatttataaaatatattactattaactataaaataataaaagttattttcaatatagtaaaaataattaaaattatttaagttttgttttttaaaataattttttagtaacgataataacatatatttttttttaaaaaagagtttttttgtagcgtcgcagagagggcgcccaaaagaaaactggcggagctttgt

SEQ ID NO: 64938 - DNA, 966 bp, Cucumis sativus
  Intron number 3 from transcript Cucsa.212350.1 (locus Cucs a.212350) derived from phytozome v7.0 (chr-ID scaffold0154 3; pos 149692 to 150657 reverse strand)
gtaccttcttacgtgataaatacagtctagctgcagtaagtgtgattttgaattgagattctgcatatcactttcacttttcagatcctatggttcccctttctgattatgattacttgtttctgttgggtttgtctgttgtgctttgactttgtctgtatatacccattttaaaataacactcactagctctgcacatgtatagaagagattgcatattgtggtcatactatatgctggtatatttttactatatatggaaacagctcggtgcaagttattgtttttcatttgaatttcaaggatgagctttttttcactaactggtgtgcggaaatccatgacagatttattttcgacttgtttgataattatttggtttttggaattttcattctgaaagttaaacttatgaacactacttctactataagttctatgatttgttatctgttttctactaaaattttcaaaaaaatcaagtcaagttttgaaactaaagagtttttgtttttaaatttgactataaattcaagttttcttagctaaagtcataattagaaaattgaaagagaacaagcataaatttcaaaagctaaaaatgaaatcgttaccaaatgggagagtatactgtcagattgctcttaggattggatggtatttggacagttaaaacataaattttgaccaaattttggcattgtcatattagagtgccaaaagtttagtaagataatgagttgtgtttttaaagtaggctgattcgtcaccaaattttttgctatagtaaatttatataactaatattgtggtagaatgaaatgatggtagaaaattgagaatgaaaaatcatcaaacataagaattagattttgatctttagttttgatttgaagaaaaaaaagatatgtattcagattgattgggatcactgtcaggtcacaaacgacatcttcacaaaagagg

SEQ ID NO: 64939 - DNA, 571 bp, Cucumis sativus
  Intron number 1 from transcript Cucsa.242840.1 (locus Cucs a.242840) derived from phytozome v7.0 (chr-ID scaffold0204 7; pos 2484621 to 2485191)
agtctcctctttccacagagcttcatcagaaaaaggtactttttctcttaccttcaatcaagtcctttgtgttcattgttttcccccgccctaatttacaatactttacgacctatcatgatcgtgttccatgtaattgttcacgcaattcgtttaggttttgcccctctccgcttgctctgatctgccccccattttatcactgaagatcatttccatgattttcttttcgagcgatttgagaaatttcatattaatctgcatttgtagcggatatcgtttggtttgattttggaattgtttgttatctagcatgttatttgattcgaattggcgatgtacattagcatgtttgctaatagctgcttttatgtcacaggatattagaaattcgataacgtaaaggaatgggattaggatatatatacatgtttcgttattatttcaactaattaattttctgttaatgtacatgatttcattatgtgggcagaagaatttaggcctgggtctttgtgtttcttttctttccgcagctttggtcatcgttagtgacttgaaagaaagaaag

SEQ ID NO: 64940 - DNA, 947 bp, Cucumis sativus
  Intron number 2 from transcript Cucsa.257590.1 (locus Cucs a.257590) derived from phytozome v7.0 (chr-ID scaffold0222 9; pos 4825932 to 4826878 reverse strand)
ggtaaagataaaattgacgctcttggtagactcttgtaagcatatttcgtctattggtatcttgtttgggtgccatttgtcttacattatttgttaaacttattgtttattaagcttatggaagattgtgtgaatgctcttttattttgagttattttttttatctatggtgaaaaatatatctacaaatagtgattcatgaggttgaaggttaatgttagattatatagttgccttccccctcagcttattgggtatttaacaaggtattagagaagatggtataggaggtcttgtgttcaaactcctgtagtgttatttactctccatttgatattattgatttctacttgctgggacttctctaaatttcaagaccatgatcaggggagtgttagatgatatattattaatttttccatcatcaacttaaacttttaggttagttggtgatttaactcttgattttctagaattttgatattttcttctttttctcttcacttcgtgttggccacgatcattttgtggggaaacatataaaggtacgcagaacacgatgatcaaactttaaaacggaaacctttaatcaattacgcatatataggcttgagaaaaatttcacagagagtataatttagtctcatggctttcaaatgttctattccctttttgtagtgctaccacttgacactatatctttataatttggggtggtttattaacaatttttaactaagttgttgtgagggtccaggttcctttatataactgtttatgattggttggtgaagattgagtaagccaaagtggatgtttgagaggaattcaaaagttatgcataatgcatgtaggatttgtttttaacagcagtgtgatatggttgatcttttatcgattgatgtttgctcgttttaatgaacttcaggacacgagtcttgcgtcat

SEQ ID NO: 64941 - DNA, 610 bp, Cucumis sativus
  Intron number 1 from transcript Cucsa.178130.1 (locus Cucs a.178130) derived from phytozome v7.0 (chr-ID scaffold0122 7; pos 117636 to 118245 reverse strand)
aaagaccctgttctcttgattaccggtcaggtttgtgatttttctcctcttatcatttctttttctttccaattgtcttgggccttcataatatctttttgtttcaagattgtgttgttactaccatgaatttctctctgttgcctctgttttctttttcaattttatgtagcctctgttcttcttcgttcatcattacgatcttttagtcttttgaaaagaaagaaaaagatgatattcatttctcctatggctctccagtgtctaattttaatgattggagtttctttgtttcataaagttaacttcatcttttttgcaacgatatgtaaatttgcattgcctcttatattactttctttttttctgtctaaaaacatgtttaaatataatgaatctatgttctctaatccaatgtctaatttcagtgagtgggtcttgttttaattttatgagggaagttgctacaaatatgtatgaaaggttggatagatataataatctactggtgttttaagaaaaattctctgtgaattgttgtgtgtgtgtgtgtgttgcagtttgattttgtgtttaatgttcttgaaacatggtttggaattctagacat

SEQ ID NO: 64942 - DNA, 678 bp, Cucumis sativus
  Intron number 3 from transcript Cucsa.141790.1 (locus Cucs a.141790) derived from phytozome v7.0 (chr-ID scaffold0107 9; pos 181654 to 182331 reverse strand)
cactgttgcctggggtatgctattacgcctccattttctctaacattgattttgattttagtttccttgtttgagatgctttggtagctctgtttgctatattttctttcctttttctgtgagatattttcagtttgtctttggattgtttgtgcattttgaattgcagctccccttgagatattagtggaaaatcatcccgaactattattttttcttaatttaaactgctaaaagataccaattgtcttgctgaatggacctttctttcctttgatactgatgaatgaaagctactttaaactttagaaggttcatactaatctaggattttcactcttgatttctcgttgccatttgttagatgatatgatattaagttcattagtttaagtttttgggtcaatcgttgatttaatatggtatcagagtattgcttcaagagttcttcaaagtaattttctctccaatattttgatttctacttttcgggtcgtctacatatatcaagcctgggtattaggtaatatgatgttaaagctactttcacttcagcttgaatgatttaagaccatttgatctcgagagtcattgtgatatttttttttgggtgattaggtcttcatttgcttctatattttggttttgttctttattaagattcttgtttgcaggggt

SEQ ID NO: 64943 - DNA, 471 bp, Cucumis sativus
  Intron number 1 from transcript Cucsa.292700.2 (locus Cucs a.292700) derived from phytozome v7.0 (chr-ID scaffold0277 9; pos 276916 to 277386)
attgttttgttcaggtttttcatttttcctttttctttttctccaatttttaaaaatggaaattatataaacggtctaacacagaattattatttatattctattttaaccatttttacttgtttttctattttctcattttattttttaatgacaaattaagtagagtatatttatgttgtcaaagtgaatataattcaagagtaattggtatgactttctttttacaaaattcaattcttcatctcaacaatagttggtccttgtaaaaaaaagggatttggttttagtaccttttgaaatcaaattgaatgtttgtttttagtaaaataattgagaggatggggatcaaaccacccacctctcatatggaaggtcacactaatattttatgctgataaagaacatagaacatgtctaataaaacatttcatcaattaagttgctgattttgattgaactttgacaggg

SEQ ID NO: 64944 - DNA, 472 bp, Cucumis sativus
  Intron number 2 from transcript Cucsa.273200.1 (locus Cucs a.273200) derived from phytozome v7.0 (chr-ID scaffold0251 1; pos 244075 to 244546)
ggtatataagcatacaatttatttcctgtaatatttattttttggtcatgatgttcggttttgatcttgttttcttataattaggttgtagcttcttgtctcccacactctgtagaatactagaatacttgttacactgttagttaatttacaacttatacgaggtttcagattttatgcttttatgtggcctatgtttgtatttgcctgtaatgggagcaagcatgggttactttcaaatggctttaattccattttcattttttgagggcatgtttagcaacttgtaaaaagtgatcactttctgccttttgagtttttgttaggattacctttttctagagaggttggtttcaggaggaccatagctttgatgagcatttcatgtcaagctgttctgatttgtttctctagtaggttaaatttatcttttggtaagactaagagtatttaacttgcaatttccagagtc

SEQ ID NO: 64945 - DNA, 843 bp, Cucumis sativus
  Intron number 3 from transcript Cucsa.273200.1 (locus Cucs a.273200) derived from phytozome v7.0 (chr-ID scaffold0251 1; pos 244589 to 245431)
acattggaagcgattgcatccacaggaaaattctggtatctttcttctccacttaatttctattgaatcagtatgaatatgaagatgctacatcaaacgtttgatcacagctcagacattggaactgaatgagctgttccaattggaactgctacatcaaacgtttgattaaagcactttgatatgttgaatgcttacagcttcctgttgtaatttaaatagggtggcgaaggggttctttggttaaattctgctagacaagtttatgaaaggttttgcttaaaagaaataggaaattgtatgttcttgaaaaagcttactaattgggcaaataattcttttgttactcgtgtcccatttcaaagaacagtgtaatttctcctcttgtggttattttcattgaagtttcttttttggtacactctctgggacgtaggtctacccatggaaatttcattagtcaattaacttgcgtttttttaaattttccttttttgatatattatctatgggccttgtctttatggaattcctgtatccatcattttctgttccatagaggacatgatttagaccttattttgcagtcgcattttattttattggaaacttttgttttcctttatcattaattggttctctgccgccttaatctagggccacactgctttatttgtatgtctccacaaaagcttattctttctcttggaagttatgcgtatgcacatgatatttgtactgagcacacaatcagctacataaaatatgaactgcgtggatcagtttaatgttttcttattaacttacaatatacatgtgtatatgtattttatgttctcaggt

SEQ ID NO: 64946 - DNA, 988 bp, Cucumis sativus
  Intron number 1 from transcript Cucsa.177380.1 (locus Cucs a.177380) derived from phytozome v7.0 (chr-ID scaffold0122 5; pos 1402351 to 1403338)
aatttccattctccattaccttttccatcaactctgtaagattcactctctttacctctaattttcttcttctctttcagatctgcatttctttttccctcttttcttttttcctttccttccctttcctcttggatcttgattttcttcctacttccacctcattcttgcgatatttaatcttcaaatcgattagatcggactttctttttctttttccttctctttcttgcctccttttgacgcctgttgtttatttctctcttcctatttgccttgcgttttttcaatttgtttagaatgttgtagatttattccgtgtttaattttcttattgaatgttggctatggcgcaatgtttatggatttggagatgggttgagctgatgcctgataatttccttttcgattgtttgttttgaggttccataaattatattttaggtgtcgttggatctctatggtttaatggtgcatttctgagtttaggttaatttatattgattacttcctgctttttgctaatggattaccgatctttgatgattttgcggttatagccatcttcaatgttgacttgaaaaatatagggcaagttttttaatatcaagttaaaagttctttattgcctctgactattgcgacatatattcatgccatctataaaatcacgaggatatcttctctgtcttgccttccgctttatatatctagcagttttaatatgtgattcaagttttgcattttatctttccttaaattcgacaaatctacaagttttaatccatttcaaaatgctttgcttacctgctgcagattacatcgtcatattaccactttaaattcttatatgtttgaatgaaatctgaatttattgaaacacacttgctgaagaaaagggggctgcttgttgttatctgtctaatcttgggcccctcttgtttttgtagaagattttgtgtttggtgctaaatttcagaggacatag

SEQ ID NO: 64947 - DNA, 633 bp, Cucumis sativus
  Intron number 2 from transcript Cucsa.253020.1 (locus Cucs a.253020) derived from phytozome v7.0 (chr-ID scaffold0222 9; pos 1798126 to 1798758)
ttggtttatcaggacctcgtctctggtaattcttctttcttctcaattattttacgtattttttcggctttctattgttctatttctagggcctcgatactcccgttgttagggttttcttttcccttcttcgatctgtgatttatatggattcctctgtcaccgtttggatctggaacatattttagaccaattggtttttgcattctctgttcaatttgattcgctttggattttctagtacttatgtgttatggggttagtatattatcagcttggctgttaaaagggatgtttttttagtttgtgattgttgttgaagacagctgtttcttgtggttggagtatctaataactgagattgtgtctttttgggatgaaaatagtttttttttttttttggagttatgcgtagatattaggagatgaaattggggtattgacgattgattattgggttattttctcttcaattctatgattgaagaagtgtattcttcatgatcgattatcttctagatgatttgatgttgttgtagtaatatctctttgggtttcattcatttacattgtggacttatttcaactttcatatcaggtgacgagcttctctcggattcgtttccatacaag

SEQ ID NO: 64948 - DNA, 943 bp, Cucumis sativus
  Intron number 1 from transcript Cucsa.192170.1 (locus Cucs a.192170) derived from phytozome v7.0 (chr-ID scaffold0133 3; pos 77819 to 78761)
gctccgccgatcatttcacttatcgtccccgtcatgtaatgtaaccttcttcaagctccactacttttgaaaagtttgcacgcatattggctctagtctttatgtttgcattctttgtttgttcatataatgtatttatcctcgtctatggaaagatcgagttaactgtttactgagtgcgtttcagttttttgtttttctttttcgttcatgcattagaattcaattatattgttgacacaattagagattcatcagatattgtaaaaatgtggtcaaacttaaggaaatgctaaattgctcagttttttgtttatttggactcattaatttacaatgtgtctgataagttctttggctaagagttttgtgtttaattggtccttgatctatccacgtttttttttaaaaaatctcagcaagattgaaaccgtagggtaaacgtgaatcataacatttaaatttatatctattagaggaattactttttaaaatttttgaaaatcaaagaccttttggatccaaaagtctagggacttgttaaacttttcatgttcattgacttatttcacacaaaatttcaaaaacttgttagacactttttgttgttgaaggaccaaatagacacaaaatttaaagttcaaggactaaacttaccatttaacttaagtaaattgatcgtttgtgatgtgtgtatctcggtaatgagcccagagcttctggtttaatctgtttatggaattctgaaatttataggtgtttagttttgattccaaatgaaagaaattcagtgtatgttaggaataggttttttctgttagtaagggagtagaattgaaggtgctggagtttataactgtactctcgtgtttacttctaatcttttcactttctaacaaaatgggcaggctggaggtgaggggtcttctgttgctggttcttc

SEQ ID NO: 64949 - DNA, 1061 bp, Cucumis sativus
  Intron number 1 from transcript Cucsa.219780.2 (locus Cucs a.219780) derived from phytozome v7.0 (chr-ID scaffold0165 8; pos 1409277 to 1410337)
atttatattaaaattttataaaaaaaaatttaaaggtgagttcccattttatttcactcctagtctttcccttttttgttgctgtttttgttttgttttgttttctgtctcactgttcaacaaatggatatgtttttctcctcttttctgttctttgatttcttttttcccttcttttctgtattgggtttgtgtttttcttgatgttataatgttggtttgctctttaagatgtttggagtttctaatccttaaatggatctatgaatttggaagatgggattaatctgcaatgatgcctttttttttaaaaaaaggatttgatctgatgattgatcttgtttttgaggtttttgatttgaacttgtctgtttggtctctgtttgaagcttgtgtttatagataaaacaaaggtcagttttagaaagttgagatcttttgatattgttattttactgctgtttttggtatgtagaacttggaatcagtgatcctaatgttttagacttaagctcatcactttactaaattggttgaactgaagttttgaattacactggtgctttcttttttatggtttaagtttttagtatcagtttcttgtttcaccaattatatataacagtgttcaaggatatttcttattgagcggtgataaaattacttgtaaaagttgggcgattttttaaggaataaactctaaggtcttttggaatgacttttaaagtgtttttaagcaattatgtatttttgataaaatgaaatcacgcataagaacaaaccaaggaaaataacttctacacagttccccaatatgttttccctagttttgtttttcatgttaagttacattcagagagttcattttcctcctggaaaacctcttgaaggagaatcttgtttcgaagtttttgtttgtctcttatgtgcgtggaatagtaattgaaggacaatgtttatcagctatttaactcataattcagagacagtcccatgaaaagtatttctctttcattccattggcaggttttccttcattcagtggtaagaaaactgagatt

SEQ ID NO: 64950 - DNA, 721 bp, Cucumis sativus
  Intron number 2 from transcript Cucsa.158890.1 (locus Cucs a.158890) derived from phytozome v7.0 (chr-ID scaffold0114 2; pos 921698 to 922418)
tgcttgtggagcggtccattcaccggttaagcactgtaagcatttcttgattttatacctttttctttctggtgtcaccagcctttcctccatgctgcaataaatggactaataacatcacacgattcatcttgacgaggttattaattcttgtccagtaactatttggtttttgttttttagttttttgaaaactaagcctacaaacatctctcttccgcgtatgattttctcttgttttgttattgactttctatcaatgtttaaaaaactaggcagttttcaaaacctaaaatgaagtattttaaaaacctgttttttgtttttggaatttgaggaagaattcaactctttcgttcaagaaggacgaaaccatggcaagaaatttagaggaaatagacttaattttcaaaaataaaaaaatgaaaaccaaattgctacccatctggggccatagtttgtctcattgaatttctattattctttcattttaactgttctgtccgtaatttgtttgaactttcatgtaatgtgtaatatcatgaatagagaatgtagctttacgtttctttttttattaaagagctagtatcctgcaaacttggattatttttttggtttgtttcagttcattaactagagatttttatgtttttatgatttttgattgtttgttttgtactcagtggttggggaaaactaatcgaaagccactgtttga

SEQ ID NO: 64951 - DNA, 360 bp, Cucumis sativus
  Intron number 1 from transcript Cucsa.187460.1 (locus Cucs a.187460) derived from phytozome v7.0 (chr-ID scaffold0128 6; pos 63587 to 63946 reverse strand)
gctgatatttgtcgtcctggtatgtttccatttatggttttacattactacaagttttgagacactctgtatacattttataaagtgtgctcctgagttttctatttcaatgtttacaattggggttagattttttgtaatcgaatatacccatttgaagcatctttttgcatagaatgtgtttctgagttttgcttcttcattataattatgagatacttctgttgatgatctttagactgtagttttgtttggattatctctttggatttttcatatggtcgtgattatttgattatttgttttggtatataattatgattagagaaaaaccagtggccagaacttgttggaataaaa

SEQ ID NO: 64952 - DNA, 962 bp, Cucumis sativus
  Intron number 1 from transcript Cucsa.172460.1 (locus Cucs a.172460) derived from phytozome v7.0 (chr-ID scaffold0119 6; pos 307227 to 308188)
gtgatgatcaaaatctagaagacacagtaatattcaattgagttgaggaaaaaaaatgaagatataacttcactacttgttttcccactttgttgcttgcaaatcaaatggggttgttataactacatcggtaagtgctcttacctattatagttctagttgaaatttataacaagtctaaaggttaaattggaacttagattttcgagattaatctcaatttgaaattgttggataagaagcatataatataaatttggttgagaatggatttgaaaagaatgaaggttgagtagaaagtgattgagacaacatttgtttcatttgaaagagagagtaaaattcaaggaaatgatgtacggataacgaatttagacgagagtgtaaaggacactcgaggacaaaataagcatacttaggaaaattcaagtaaaaaagttcacatacaatgttatagatcgtcttgataaagattatctactactctaataatcacgttctctgctatcgtgtttactattttcatattcttaacgtcggtattttgaaaaacagtaaaatttaaattattaaggtcattttgataattaatgcttaaaaaaaagttcgtagaaaggagagaagaaagaagaaaagagaaactataaagaacttggggaagggaggaagaaggaaaaaaaagtaatgttaaaaaattcatcaatagctggagattcaactgctggattttcgtgaaatctggacagctttatgaggacaaacaatggcttcgttttatctggttggatcgttgttttgagtttcggtttctccgcaatcgtcgatgaactacaaagggtttgaaaattcggaaaccagaacacgttgtggtattttgaagattccgagcattagaaaagtaatctgaagctgaaattttgatgttagtacaaaaacatgttgattaacaactttcgtgaagg

SEQ ID NO: 64953 - DNA, 619 bp, Cucumis sativus
  Intron number 2 from transcript Cucsa.281190.1 (locus Cucs a.281190) derived from phytozome v7.0 (chr-ID scaffold0263 3; pos 1075937 to 1076555)
ccaaaattagcgtaagtgttcctcagtgaaatggcataacagtaactgcagtttaatgctttcatgctgtagtgttgtatccacttgcttcagaatatagtgccctagttttgtcactgttggttatttgtatttcatctggtctcatcggtattttggtttgaattgtgttactatttcttatatacttcagaattgaacttctatattacatacatggctcaccagctctgtattttgaacattaccagcaaaggaaaacagagagaggcattttgtactattttaatttgttattggacactatagaaaaatattaacaaatgagagggagagacagagaaagagatttggttcttagcagagtaggagaagagaagaggtggtttttgatgcatttggctggttgtagacactggaagtttgtttctataaagttaattttggttgtttaactgttcgtttgctttctattgacttcagttgtttatatgaatagaacgtgggcagtaaatgaaattttaggcacgaatgttcttgtatttggacaagtgtatgtgttcctgattagatactaccgttccattgtcataggccaacgatccattgaaatctgagg

SEQ ID NO: 64954 - DNA, 486 bp, Cucumis sativus
  Intron number 1 from transcript Cucsa.163580.2 (locus Cucs a.163580) derived from phytozome v7.0 (chr-ID scaffold0114 6; pos 44130 to 44615)
tatcgcacaccaaagattcgtccatttacttctccgtaagtacttctatatgtaaatttgtgtttgttttctaggaatttagaaagtttagtggctgataagtgtggaaaaatggaaatctggcaatagttaattttttgggtgataaggaagctcagctaggaaatgactgtttttgagcagaaggtaacattcagtgattgtttagctggttgggaaaagtataattctgctgcaagactggaaatgaaatgtatcctttacttgaatgtagattattttctttgcatactgcgaattgctgtatgattattgttggaaatttttttctttgttctcattttcttcattgacaagggtattttttttttatcatttctttttttatttagtgagaaatgcgtatgtttcggcttctcattttggtctaacaatgttattttcaaattgtttaatgctcaggattggaagttcagcaaactattc

SEQ ID NO: 64955 - DNA, 919 bp, Cucumis sativus
  Intron number 1 from transcript Cucsa.273080.1 (locus Cucs a.273080) derived from phytozome v7.0 (chr-ID scaffold0251 1; pos 71617 to 72535 reverse strand)
ctcagattcgaagcagaagtgttgaaccaacacaggtattttccactcacatgccctaacttctttcttcttcttcttcttcttcttctttttaacacttcgagaacaatacccgttcttattccaccgattcatgaactatcttttcttacttttctctgtcactccctaagttttcttgtttctttttgcttttaccatgcgttgttttgttctgctttgcttttttttgtgatacgtgttgttttttggggtctctgttgatttgaagcgttgtttatcgcctaagaaaaaacctaatgcgatgtattttggcgacttttctgttgtgtttttgggttttgtctgaatttcagtttgtttgaaatgagttgtgtgtttgaagtgagtatggattattattcctttcgggccttggaatgttctacattcgcatttacagttagattgctttttcgtggaggggaagagtgcgaatgtacttgaaaggaagagaatgtgatgctgcgaatgagaaaagttttgtctgaagcattgccttgtgtaaagataaagtttcgttactactcttcactttattagattcagcttccgagtctcccccccgttggatttattcactgtgttatatgagactgagattggtaatagagttcacttttcatgttatttagtgcttttgattaccatgaagatttggtgttagagacctagaatggtatcgataatttgttgctttgagagttgttcactatttaggcttttccttaaatcttgtaatcctattggaactaaactgtctttttccatggggttaatgcttgggtaatgtgaagcgtcttatgattggtggaagatttcacggttacgttattaaattgcagaatccaatcaagagtaagtagccttttcattagat

SEQ ID NO: 64956 - DNA, 587 bp, Cucumis sativus
  Intron number 2 from transcript Cucsa.167010.1 (locus Cucs a.167010) derived from phytozome v7.0 (chr-ID scaffold0115 4; pos 389288 to 389874 reverse strand)
ccttaaaacgagctgaaggtgaatgaacataatgtttttcttttggatagtcatatttgcaagtatgtccttaatattctgggaactttattttagtagaatgcttggttcttttgatgaagtttggtactttaagttctcaaaattcaatgaatgtattccattttttgtttgttgggaagtcggttcagatatgcatcctgagtgacattgagaatatagagattattggtgtgttgatatttgtggatttaatgatttgacttctgtaagttctttgaactcactgcttgttcttatcttttaataattataattataatataatgtgtataacataatttttacgggtagttggaagatattagaaaatcattggagtatctattttctaattctgggcatataaaatgtcagtttgcctttgttgtgacgtgtgtttcttgtactggagttccatgtttgtgcttccagtttcccactgttgatgtatttgccctattttgaaatttacaatatctattgttttttgtgaaataaagcatatcatatttaatttattcttcttgtcttttcagagctgataa

SEQ ID NO: 64957 - DNA, 889 bp, Cucumis sativus
  Intron number 1 from transcript Cucsa.167010.1 (locus Cucs a.167010) derived from phytozome v7.0 (chr-ID scaffold0115 4; pos 389943 to 390831 reverse strand)
tcacacaaaactagtctccactttttcgtcttcaagtaagtttttcttctgatacttatcgtcaatcgatctgcgatgatcatcacgctcgaagctagtttcctttttccttttctgtgaatttggcgggttttttctttcttttctttttgtttcttgaaacttcatgcaattgaatgggttgatttttcttcgttctcgtctctagatacctgatcaaatgggtttccttctatggttttgcctgtgatttggggtttcttagaacgttttgttttcctttaagttgtaatagaaaaagacaacggagatttagtcccaatttttcctccctcggcgagtggagctgggcgtttcaataaccccattgttttcgcgttcgccattgttgggaactctttatgggtttattttcagagatttatacgagtttctgtaaatgatgtgagttgaaaatcagagataaatctagagtttcagctatgtaatttgatgggtggaaaggaagaaaatgataaattgaagatggggaagagaaagggttgcaggaaagagatgaaatgaagccgggatgcttcaatttttgggtttatccacgtttaccaataaaacgttgagatttttttctttaaatattgaaacgcataattcgaaacacaaggaatttacttctgtacttttgttattattaatatttctaatgaacaaacttgctttcctcttgagggtgttgttggatttgtagtttagttttctttgtttttagtttttttactcttttttttttattgagcaggatttggttcccagtaatgctcatgaattttgatcgtttgtttaagtctttgtaatggttcttcatggttgtctcaggtcattcacgcgttgc

SEQ ID NO: 64958 - DNA, 782 bp, Cucumis sativus
  Intron number 1 from transcript Cucsa.172900.1 (locus Cucs a.172900) derived from phytozome v7.0 (chr-ID scaffold0120 1; pos 20958 to 21739 reverse strand)
aagcctccaccagtcaagaaggtacttcctattcagcttcaatatgcattacaatcctttttcagctgtcatatataaataagtagcatgaagaaaactacatttttttccctagtttcaaatctcataatcatgaagaaaatcagtgttcataggcattttcagctgtgtgatataaaaaactgcccaaaaagaagaaattattaatgggtttgtgagtgagtgtgtgtgtatctgtttctctatccatgactatggaataggagctattcagaggaggagagttcaattggaaatgagtgaaatgcaaccaaaagacgagagaagaaaaggcggtggaatggtaaatgagtggtttggcagaagggggcagtgtcagaaatacagaaagtacaagaataaaaaagaaacagagtaagtaaacggtggaggagactgtttaagaacagttggtaaaagttcaagtttgaattgttcgaaattattacagagaatcagagtagacaggttctgtaatcacaaagattaggcagaaactagacagaattttgggataaaaactctgaaacaaagtagtggggaaggggcaaggaaaagaaaacagaagttcacatctggacaacactgacgaatatctttcatttttcttttctctctttcttttactattagttaattgcatatttatttgagagatcagtctttggatttaatttttttttctaatggggcccactaaaaaaatgatgtagattcgttcatctcaatcaactttgggaaaa

SEQ ID NO: 64959 - DNA, 882 bp, Cucumis sativus
  Intron number 1 from transcript Cucsa.143190.1 (locus Cucs a.143190) derived from phytozome v7.0 (chr-ID scaffold0107 9; pos 1502883 to 1503764)
acatatgtgatacatatatatttatcatattttaatatttcaaagcacataacatatatatgtatatgtatatatgttaaaataataattaaaaaaggaaacccatccaatagcttgtagtttggcctcactataagaagccaatgagaaagttgaagtatctcaccaatcgaaaactaaagccaagaaggataataagggttttttcttaatttcttggctctaatttctttgacgtatttttcccttatccttgtatactactttcaatggctgaagaggcttcagactcctctttcattcccataattaggagaagcaccttccctccagactttgtttttggttctgcatcatctgcttatcaagtaccataaaaacacacttccttcttttcacttttattctttgattttctaaacgtacaataatattaacatataacgtatgtgtatacatatacatatatattgtattttaatagtacgaaggtgctgcttttgagtatgggagaacaccaagtatttgggatacatttactcatctacactctggttcttgatctttcttcctctccgtctatctctttcaatatgaaaaaataagaataaataaatgaggaagtaagttatgtttgtttttgtggaactccagataggattgatgatggcagtaatgcagatgtaactgttgatcaataccatcgataccaggtttgtaagatttatattatagttgcagtacaaaaaattaaaaaattggccgaccacaattcttttaattatcttaataactacttgatttatccattggaaatgtgcattaattattgttggtgtacaatacaggaagatgttgagattatcaagaaaataggttttg

SEQ ID NO: 64960 - DNA, 700 bp, Cucumis sativus
  Intron number 1 from transcript Cucsa.255280.1 (locus Cucs a.255280) derived from phytozome v7.0 (chr-ID scaffold0222 9; pos 3329680 to 3330379)
tcaactgcttacttcttcaaattcactgctttttggtatgtgttcttcgcaccccctttttgttcctctatttgactttaaatacaatctgatgattctctgtatgaacaataaacatccattggttctgcttactttccattctcagagataatatcacaagtatttggcatctaagttgtttggtttgtcttatgatcaattctgaaccatttcttgtgagctagcagtctgattgtttgtttgtacggtccaagtggtcaaagtatagcaatcttgtttccttgcaaattctaagagcaaatatgaaaggatgatgtacttacatacaatctgattgatcaggagaaatgaaattgcctctaatttcaacatagtctaaatcgttgttttgtttacgttttccctgccataattactgaatatgaccctttttcagcaatttgggttgtccttgattgctgacagtgaccaaaaatatccatctccatattttttaaaattaatctgcaatatgagtagttcatcttgtctgcaatggcctttgtcataactatagcgcttctagttcattaaattcatacatttatgtgatggagccaatagagttggaagcactagttcaaacttgtttgatgtgttcttatcatttattctttgtgcagctacctgattgcttcattggggttacaaatcacct

SEQ ID NO: 64961 - DNA, 777 bp, Cucumis sativus
  Intron number 1 from transcript Cucsa.172950.1 (locus Cucs a.172950) derived from phytozome v7.0 (chr-ID scaffold0120 1; pos 115210 to 115986)
ttactcgtactcactcccctacattaggctagaaattgaccaattcaaattctagtaatggttcaaattccagtaatggttgtgagctaagaaccacagatacttcatattagagttggtatctatgtcggacacttaacggacacgaattcgtctggacacgttgcggacacgtgtcggacacgccaaaatttgtgtcctttttttaattgtccgcacaggtcttagacacatccggacactccattttcctttttggaagaagcccaaagcccagaccagcccagaccagcccactaaactaattctaataaataatatttaacttccagcccaaagcccagtccactgaactagttctaataaataatcaaatataaagattttattagataaacatacagtaaatcaaatcttcttcagttttcttcctttctcttccgtggaggagggcacgttttcttttgtggaggaaagttttttttattagtatttaatattttattcttttgtatgaaaatcactgttgaatatacctaatatgttttgtactattacaacctataatagttaaatgttaatttgacattttatgtttttttagtgaagattgaagaacatttagttttttttttttaggaaatgaaaaacatttagtgttttgtatcaaatttatatatattatataaaaaaatactttaaaaaaataacgtatccccaacgtgtccgtgtcctattattttagaaattgacgtatcgtcgtgtcctatcgtatct

SEQ ID NO: 64962 - DNA, 695 bp, Cucumis sativus
  Intron number 2 from transcript Cucsa.237370.1 (locus Cucs a.237370) derived from phytozome v7.0 (chr-ID scaffold0202 3; pos 302943 to 303637)
caccatttacattggtaagtttgttattatctgtatctaactatcttaattcatgttctttgtactctaatttgtttttctttcatgaggattctgtttgcgggttaagctccatgtttttacttctgtgaagcttctagtgaaaattatgatcttgagtggttggttttataatagttgtgtttatttctttctattatgatttgctattggatgtatatgacacatggcatttgacatgtttgttgcttctctcacactattggatttcttcctctccaaccttttcctcttttgtaaatatgtttgatttctctttatatcattattgatttggtgcctttggtgaagagagttgatagttaacttctttttgtttttcattgatctcttagattttcttcatttttgctttaattggtacaatctaaaattttcactttcaccatcgtctttgatctgcttctatgtgggctttacctatttgagtattgccgccagtttgtctgtaatatttctctaacataactggttgttcggtgaacttaattttttgggaaaattttcttccccgtttgtacttgatacaatgttatctattaagttttaaggatgcagtctacttgaattttagatgccacatatttatctgaatttgattttgttactttcttcacattttttaggtaatttgg

SEQ ID NO: 64963 - DNA, 518 bp, Cucumis sativus
  Intron number 2 from transcript Cucsa.249370.1 (locus Cucs a.249370) derived from phytozome v7.0 (chr-ID scaffold0220 9; pos 113908 to 114425)
ggagaatttggaacttagctcgtcagaagaaacaggttctttttttgcacttagataatacgcatgcacataggctaacctgatgaagtggtggattgtttgataggaaaaaattatgtatcaatctcgtcttctcttcagtttctctctgatatttgtggcctaccttgtggcagcattctcgagttattctgtatgaagcttgtgattatgtactgtccacaccatcacgcaaatgttagattatattttgcgaaaactagtggggttatagaaaactgatagaacatgtagctatttacatattaacagtttgtggttgatgatcattaagactgttattaaaacaacaaattttattggaataagaaacaatgcatgcctgttcattagaatttgaattatatgaatgcgaacttttttctgtaaaagtggtggttaaattggaaaatgtaataagcagattggtagttatgaaatctatggttttatagcttgaaggagaggaagcactgagg

SEQ ID NO: 64964 - DNA, 546 bp, Cucumis sativus
  Intron number 1 from transcript Cucsa.228720.4 (locus Cucs a.228720) derived from phytozome v7.0 (chr-ID scaffold0193 6; pos 18095 to 18640)
catagctaacttttcatcttcactttctgcttgaggtatttttagcaaacttttcctcttctgcttcccttttttttcttcttcttttgataaatgctgcttggttcttcttgtttccagtcactattttcccttacacatgtgggttttctttcttgggctctctctctctctctcttttttcctcttatttgttaagctatctcttgtgttgtcttaaatatatgtaagttccttttgtgaatttagtatgtgattatgttgtatcttatggtttctcttctttcttgtctcttcgtctgtgctttgcgtgtttgtaatttattgatttttcaagagatttcttgcttgttgttgttttagtccatttgggttgcttgttaattaagcaaacaagttgaatctatttttagatttcaaatcttccattaaaaatggtgtcatgtttttgttagttaacaattttgtggacttttgattgtaactgttattgcttacctgtttttgtttgtgaatggctattggttttatgtatgcaggaagaag

SEQ ID NO: 64965 - DNA, 916 bp, Cucumis sativus
  Intron number 1 from transcript Cucsa.250080.1 (locus Cucs a.250080) derived from phytozome v7.0 (chr-ID scaffold0221 9; pos 190245 to 191160 reverse strand)
gaaatttgtgagtttagctttcccttttcgttttttttttttttttggatttggtctctgttttctatgtatatgcataattgtttagtttgttcatattgttactttatgtagaatcttaactttgattcagagttttaaatatttttttcattgttgtcttctttgaatgcttcttcatttacaaaaggtttaaggttattcggagttcagtttcattctggctttgtataggaaagagagatagagctaatgatatcaggagtttaatttagaacattgcatgtaaaagtaaagctattaatttgcaattgtttaagcttattgatgaaatgctgctcctaggactttgttgctataaagcaaaatataatgatcacttttccatgtagaagcaaagctgttaattttcacttgttttggcttattgatgaaatgcagttcccatggcagtatatttttgttgtttaaaagcaaaatataatggtcacttttcctttgcttggcataaaatatcctgcaatgaattgtcaccctcaatttggtatgaatgcacgcatttcggtttaggttacattttcatgtcaacacatattttgcacaaatgatgtcctgtgaatcgtgaggtagttctctagctgtgtcatgtcacatgaattgctcaagatgcaaatgcattgtgtagcccaaatttaaaaatggaatgttctactgaactatgtgctgataaacttaaacatagttattcaagagaatcaggaggatcatcagtttacaatctagcacaacgttcgttttcttttttatgataaaattaatatgaatatacttgagctgtaatcatttgcacaattgattgcacaatactttctgcagttcaaacttttagaaatttctttgtttaacattttgcagg

SEQ ID NO: 64966 - DNA, 811 bp, Cucumis sativus
  Intron number 1 from transcript Cucsa.286330.1 (locus Cucs a.286330) derived from phytozome v7.0 (chr-ID scaffold0265 3; pos 2408545 to 2409355 reverse strand)
ttcgtgataggaagctgtactatcctgctctcaaggttcgcctaaccaaacatttgaaattctgttgtattttgttgttattggctatgcgttctactcgtcttacttgcggaagcgtttatttgctaggaatccaattagtctaaatcattgttgttcgataatttcagccatatagcccgatagatacctcctgccttttgatgtagttttatttttctcgttcttcttggtgaaagcatatgattaccttatggagcctaagttcttagcattgggataaagactactatatttgcagagaagtattatatggttgaatggaatagaaaccagtggacagaatagtattataatgctagaagtgattccattttttggagttaattatgaactttgcacttcatcgttataacgatcatgggtcggccattgagtttgataaagagccaagagaatatgggttcattccatggtagtcaactacctaagatacaagtttctttaggatcaggtgtgctgccccgtgaacataaactggctgataaaaagaaacttggaacttcattattacaatttatacttttcccttctgtggttgttagctactaattatacatttttcagtataaatatttattttcttcaatttgttctcttttttattattatgtttctttttggaggaggggaactggagggttgtcaaatttcctttattgaaactattgcaaatagtttattgttgttgcttatattacttgtgtgggatggttctgataacgaaactatgttatagctttcagaaatt

SEQ ID NO: 64967 - DNA, 886 bp, Cucumis sativus
  Intron number 1 from transcript Cucsa.302370.1 (locus Cucs a.302370) derived from phytozome v7.0 (chr-ID scaffold0295 1; pos 537016 to 537901 reverse strand)
tgtgagtaaaagcaagttcgaagtagataatttaggtaatggggatttattgatttaatcactctgctcaacttggagggattttttgtttctgcaacttagtttttttaaaaatgaaaatagagctttgttttggttctattgatgttcgtggctagttagtactgttattcgttgggatgatttgggaactgggttttggagagaagtgtttggattttaagattattacttagtgattctgtgagaacttcttttcttgctgggtggaggatgtgggtcctctggtttggattctttgattaagttctcgaagcatattgttgttctgattctcaaaagattgagagctttctaggttggtctgagaatgtcggaatcttcttgtttttttagttcttgtttgaactctctgtctctgtctctttctctcattttgactattttctgatcctgaaaactcatgattcgttcacatcgagaaaaggggtcttcaatttttttgttctggtgttgggttctgatttgatttttatttcttaccagttcatagactccatgatctttcattatcttcaaatctttctacatggacccaattaagttttttccattacgtgcctctactcagctccagtttaattctctcttagaggtttatggatagaaatctctaaatctgtcacttgatatggaagttttaggattctgtaatggttgcaaagattcttttaatgttgcccacttcaaatttttttttctttgaagattcattctgctgctaaattaccaatcattcaatctagtttgtcgttgtgttacaatcctgtcactaaatccgtccttctcaggtgactgggttccgtgttctcttggtgcaaatttt

SEQ ID NO: 64968 - DNA, 673 bp, Cucumis sativus
  Intron number 1 from transcript Cucsa.242440.2 (locus Cucs a.242440) derived from phytozome v7.0 (chr-ID scaffold0204 7; pos 2182431 to 2183103)
cattctgcagtgaagagtgtgagcaacattccaaggtatcagtacaattatattctctcactgttttaattaggttaatctgttttaaattttgtttgattcttgatctgttttgcgttaattttattttgtgaaactacaagccggtcttacacgaattcgttttcacctgcctcttgtgttgtacgaattgtctgcacgaattcttcgattaaatcgtatttatgaacttatttaagactcaattgagtattattctctctctgctgccttattcgacgttcgttcagaagtttgtcctatgtccgccatgtgtttgtagttttggttctgaaagtgataccatttatcaaattgtcatttcgcttagatgcatttgaaaaacttctatgaatatcgaaataagcaagttcttacagtagaaatttaaaaagttcaaggtagaacttgattttttcaagtggttatttcctttggatccgaagccaaagagatgcatttggattttgggagtcttagaactgaaaatttagcagttggagagttgtttatcatctttgtcttttatctacactgtacatggagagaagaacagcacccgtatttttcctgtctaggcgtgggttggttaagtttcattatgtatatggttttttctcttaggttttccacg

SEQ ID NO: 64969 - DNA, 897 bp, Cucumis sativus
  Intron number 2 from transcript Cucsa.163730.2 (locus Cucs a.163730) derived from phytozome v7.0 (chr-ID scaffold0114 6; pos 169633 to 170529 reverse strand)
ctaatctcggtggttaccttcctctaattgatcaggttaactaacctaaccccttgcttaacccccatcccccaatacccatctcttcttctcaaaatacacccatatttacttatttatttattatggtctttttgcaaaggttaagtttaattcgatggagtttttcgtttttagtgaatgttcaaattgaactaaacgagtaagactgagacggttagaaagactttttgggagggagagaaattgtaaaaaatagtcaatttgacaaaatatctacagtatatagcaaatcttgtttattagtttttatcgttgacaaaattaaaaattttgatgtagactcggaagtattttagtttattttgctatttttaaaaatgtcatcttttgaaatttttttatttgaaactttttgaaactgaccatttgttttcgactcatcgactttggtgtggccgatcggcttgtttttcggtctattatgctcatttcgggttaagtttagactattatatttgaaaaattggatttctaattaatgaaagaaaaaaaaattaaccctcgaaataatacgcttgtatcaatttctaccgaatataagtttaaagatagaattttaacatgtgtataagtttgagagcttaatttttgccattgaaaaataattgcaactaggcccaaatttgtctatcaaagagtaatattcataagagattaacgaacaaacgttgatatatatatttttagtacaataattatgaaagaggccaccatgattatgttcatatcacttggaactatttagtttgttgatactttgtgtttggttgagcaaaactgaaatggggaggtggggggtgattggtttggacagggcgtgtcgacggcagggca

SEQ ID NO: 64970 - DNA, 445 bp, Cucumis sativus
  Intron number 1 from transcript Cucsa.201460.2 (locus Cucs a.201460) derived from phytozome v7.0 (chr-ID scaffold0137 4; pos 372011 to 372455)
ccgaacccgagtattttgaggataagcgtaacgtattctatattctgctgttcttactgcaagattttgtgttgcagtctcttttgagtctttagctagttttggttgtcattttgttggggtttctttaatttcttaaatgggtcttgagttcccaatgttatgaattattcgattctccattttttttcatttttctttttagtgggaaattgagcaggggataatgttggttgtgtctaagtactgtaatggatctttgtaggtggcaaattgtttgttgggatagtttcatttgctcttctgggtttcttgaatgatacagtgttagaaagtacgagcttcaataaacttttgtattttgctttgttaatgatttacttgaacttggaaatgaagtttgtttgttttttttaaaatgtttttagcaagcttttggacccag

SEQ ID NO: 64971 - DNA, 355 bp, Cucumis sativus
  Intron number 1 from transcript Cucsa.160200.1 (locus Cucs a.160200) derived from phytozome v7.0 (chr-ID scaffold0114 4; pos 444740 to 445094 reverse strand)
tcgcttctcaacctttcttcctcttcttcatccaggtttgtttctctcctcttttttcttcctttcttcttcttcgaatttgtcttatttcgttcgatttttcattcaatttcatgctagtcgttacgattaggttggttttctgttcaaattctttctcatagattgtaattgatggttagggtttgcttttatccccattccttctggaatttgcttctgagcttagaactttgtggattagtctttcgaaacatttacatcatcgaacaattattcatgataattgcgattaggaacctgggaacgcccttgaaattgaaattgccttagaaattttttttgattgatacag

SEQ ID NO: 64972 - DNA, 979 bp, Cucumis sativus
  Intron number 5 from transcript Cucsa.181770.1 (locus Cucs a.181770) derived from phytozome v7.0 (chr-ID scaffold0125 1; pos 42985 to 43963 reverse strand)
cctacactaaggttgcttcatcaatgtaatgttttctttttctagaaactagaaactacactggatcatcttttttctaatccattagaatattctttatgaccctgttaacttcagttgtgatacttatctttgaatgttccgaattttaatttgactataatatggaaggagactaaggtgcaagtttgccatgatttctggaatggtgaaagatgaccaatttacttgatcaatatctattatatttctatagttttgaagcctttccaacccctgcagctcatctgcgaacttttaagtcttttctgcactattgtacaaaattctatgtatccttgttttagcatagctccatagctcatagcagttattgttttcttaaatagtcataattaaagcctattcaaactatgctccaagaactaagaggtaaggaattgttggacttggagggtctctctacctgccctttataagatataattttgaataaaaaactggtgctaccaacaaccttaaattcactttctccatgttggtgaaaccttaaacaagatcgctttggggaagtgccaattcactagtggttatcaacaatctttgaaggttccatggttaactaatggttgtactgataatgccattttgaaggttatggaacataatttttacgctaatataattttgaagacctaaaaattttggtctcggacaaatattcttgaagaacaaatctagattcacacattcacttcagttcttcatcactaactgcttaaccaaatgtttggtattaaaatgcttttgctcaatcaccctcctcctcaaaggttgtccaagccaaccaaaaaactccgttctagctattgccttaattaacaagcctttttgttgtacttcatcactatattctttctggaacctcagttccagattatgacttgtattgcctatttggtttgcagatcccaacatt

SEQ ID NO: 64973 - DNA, 527 bp, Cucumis sativus
  Intron number 2 from transcript Cucsa.181770.1 (locus Cucs a.181770) derived from phytozome v7.0 (chr-ID scaffold0125 1; pos 44364 to 44890 reverse strand)
ttcaaaaagtgagctttctcccatatctatattgctcgttattcagctataatgtcatgttttctttgatgattgaggaaaatgattaataggttttgttttttggggggttaaaatatgaggacatggtttgatttcttcacttgttaacgtctttatttgttagtggtttctggattttgctccaatagtgtcttctttctcgtttttatgatggcgggtttgtttttggggctccgtctgtttgattctccatattggaaaaatgaattgttctacttctatttctcgtttgtttcttggggctgctatggaaccattgtggctgaatttgaacattttaggaattaatacacatttgatttttgaattgaaatgatcgtatgttaatctaataagagtaaggactaggaggatgcttacttgtgagttcagtgagtgtcttcaccatatcttctatacaaatccttaattttgttcctttttttcattgtgttgctgtcttattactaggttttctactgagg

SEQ ID NO: 64974 - DNA, 671 bp, Cucumis sativus
  Intron number 1 from transcript Cucsa.198380.3 (locus Cucs a.198380) derived from phytozome v7.0 (chr-ID scaffold0135 7; pos 1454692 to 1455362 reverse strand)
ttcccttttgggtaatttctctttcttgctttgaagtttatactgcattatcttctacatttggtcttccaactacccttttgtttcttcttgtgattcttgttaatttcccatctgggttcataattcaagtgattcattcatgggtttgcttagttttggaggtttaattgatggattggatccttggttagttcgtgaattgccatttgggaatttcttaaactaaattggaagctgaatatagaacctttgttcttgagtgttctctagacatcttaagggatagacttctcttttttagccatggatttagcctaatactttgtccgctgcatcaacttcaatcatccttcaattgtttggagtggagtatggtaacgttttgatgttacctttacttactatattggaaataatgatgattggagatctcaatcaatgggcgtgtgtatatgtttgtattctcttattctccctgattccgagtttgaggaatgatttattacaagacaattgattattgtgttcttttgctgttctaaagaatactgtttcagaaactaaagttttcttcaagtaggacatactacattatgtactgcgttagactccactctttaacacatcccatttatatgctctattcacagatacggttggcgtggggg

SEQ ID NO: 64975 - DNA, 845 bp, Cucumis sativus
  Intron number 1 from transcript Cucsa.272510.1 (locus Cucs a.272510) derived from phytozome v7.0 (chr-ID scaffold0250 0; pos 1014137 to 1014981)
gtgaagggattgttggaggtgtcatccaccaaatagttatttgcaattgagtcgggtttaattgtaattgaacaagatgtttttgaatatcgttagaattataggagtaaatatcaggagactcttatctcttcaagttggaactacttcggtgagaacatgcagtagatgagcacttctctgacaacacattcaggtgaaggaagtttgtaaactaactttctactattatgatgaaagtcccatacgcaaatatggatatagccaaacgtctagccaactcataacagaatgaggaagctaactatgaccaagtaaaacaaactaacaacatgtagttaataaaagtaagacttttgttatttctttttaatatttgtgaattctaaacccaacatcacaaatcttgactcttctcatagaacaaccgtctgactctactatacttgggttctattgactacagtgaaatatttgctaattgctactataattcttcttctagttaacttatcatgaatgttccaattcaaaatttggatacctgtttaattttttaagtttcattgtagaattgggtcagtagtattcttaaatatttatttcatttggtttcatttgattgtctagcatctttcatgttctgcaaactttcttcattcttgaaattgagtacatggctattatcttttgatcgtagtaatttacattgtattggatgtggtattataaattattatttttccaactatgaatgtttaacggcgtaaacaaatagtacattttaatccaattgggttgtgttgtaaatactattctattggtgaataattgcagctcgtggt

SEQ ID NO: 64976 - DNA, 581 bp, Cucumis sativus
  Intron number 1 from transcript Cucsa.161500.3 (locus Cucs a.161500) derived from phytozome v7.0 (chr-ID scaffold0114 4; pos 1407292 to 1407872 reverse strand)
cagagtaggtgtttgatataatgccgctttgaattgttttgctttctgttccttataatagtttgtctttggctttcttttcaagttcaaactcttagcatacgttctatcataacttttgagagttgagatgagtttaggtgtttgattttcttgtgggcttttccaaatccttgcccatcgatcttcgttgcactacaagatgctagagtcttgaaattggataatcttctcctgtttttagttattttatggggaaattaatgtttggaattagttgcattgcaaatgccctgccttatgagagactagatggttctcttttgcaaagtgcctaaatactagaaactaggaacttaaagctgtcgagagctttcttatgttcttatttgcattctaacgaacttactttttttaaccatcgttgtattaaattaattttcagtagtttattgttaggccttattgcatctcaacccgaaaaggcttacgaaatagaggctattcttatatgatttgataaataatttccttgcatattgtcagagacccggatctcaacagaaagagttaagattgta

SEQ ID NO: 64977 - DNA, 738 bp, Cucumis sativus
  Intron number 1 from transcript Cucsa.163120.1 (locus Cucs a.163120) derived from phytozome v7.0 (chr-ID scaffold0114 4; pos 2560898 to 2561635 reverse strand)
tctactctttcatttcgcgctctctccccttctaggtaaacctctctcgcctttttttatacactgcaattctgccatttttggttccttcctctctagtgtcgatcatttttttctcttctgtttaagtgcatcatttgctttcatgggtggcttagtttcatgcagtgttagattttggctactgggtttttcttcttttgttattctgggtcgccctgaaatttgcttcctctggtttttggaaatttgttcagacatgagctgttaacgtgtatttgggtttgttcatcgtggttaaggatgtggcgtcttgattctgcatagctttgagcctaattttgtttttatatgagattttgatttttcattgtgcgtttcgttaatattgtaaatcaaatgactgtggcggaagggactatgtggatttgtagatatggtaggacagtgttttaaccaatggagtatttggttggtatgagtttaacatagaattaattgtttaatatgagctgcaaacttataattacaaattctctgcaagcggcaatttgttcatgctcatttctggtctttcaacttcaactaattggtagcgcaaaaagtggatatttggatgtgctttatcagaagttgtgacttgtgataaggactaaagttagcttccagtatacttatgcgatgcagacttgttaaaattcagggttgagcgagattaaacaatcgctccactggtgc

SEQ ID NO: 64978 - DNA, 922 bp, Cucumis sativus
  Intron number 1 from transcript Cucsa.201360.1 (locus Cucs a.201360) derived from phytozome v7.0 (chr-ID scaffold0137 4; pos 257163 to 258084)
attcctcaccaccaccacccacatcaggttctattaaatcatcatcatcttcatcttctttcttctctcgatcgctttgagtttctattttgttcaattgtacttttaataaatatttgcaattttaactctatattttctcttatccatttgtaaacttttatagaaatttgagaactaattctttttagttaaaatttatatatgatgacaaaattgttccataggtagttaatatatttttactattcaaaatatttacaaaaatatatcaaaatatcatattttatctaaatatacattcttgttagcgtctataaaatacattagtggtagtctatcatacctatattgtgtgatagttactatactttgtaaataattttaaaaaaattatcatttaaaatattttttctatattaactatattatcatacttatttttcaaaacttaaaatggttaccttagtttgggaagtttctggcaccaattaaatcttgtaagaaaaataattgtaaatagtaaaattagtttgtgaatgtcatatgcaggtgaaatatgaaattttatattagctatattttataaatattttgaaacattaaaaaaatatacaaagaaaaattagttgatgaaatagtatatataataaattgtgaagaaaaaaatatagtaacacactgctttaattttttattctcctaccacataaaacataaattgaggtacactaaatatggagttttaaaattctgagatgtttaaggccagacttggattttggagaagcaattcttggttcttcattttggttctttcttataagatgtgagttatgaattacaatctaattttatttatatatacatgtaatatattatcatacggtagataattctccatctccaaagtccccatccg

SEQ ID NO: 64979 - DNA, 992 bp, Cucumis sativus
  Intron number 1 from transcript Cucsa.176190.2 (locus Cucs a.176190) derived from phytozome v7.0 (chr-ID scaffold0122 5; pos 526031 to 527022 reverse strand)
caggtcattattattttctcataccgatttttctctcgccttttgttaaaaatcttgctgtattctggttggatctgaattttattgtcgtttgattcggtttgatacctcaaggtggattctggttgatttttgtttcaagggttctaggaatctgggtattttgttgggtatttgtctgaattttgaagttagttgaacataaaatagtattggctacagagactggaaatgtaccattctcgtggttgccctgattcgcgaaaaaggcacgaaaagagggattgtttgtgctttgattgcctctcattgtgaattaattagggcattcagctgcctgctttttccacccaattaattagggcattgtgaattgattgactcctttcatggtttggattacagtggtaattcgttatactcgattgattcctttaattgggaattgcaggtttgaaggattatatagccagttttttcccgatactctacgcgcacactgttttaaaactttgaatatctttagaacattagtattatccatctgagtcaagattgtttggacataagatcgaaccattttaggctttagctatagtttctgtttccctccattgtagttttctggtttcatatccacatgttcagtagggtggttcttgttcaaatgggtagtgagcaagtttatatatatacatgtgcatgtgtgactgtgttatttagtcttagtctatgtctaatggtgacgtttatatggtgtactctcattatttcagtcccctttgaagaagatgagaaagatccaagcatatggtttcttgaccacaactatcatgaatcaatgttttcaatgtttaagaggataaatggtattttctcttgttctagtaccttttctggtttttatttagttagaattgtttgttcacaacagccatgaatttgtggatgtggcagccaaggagcacatcgtaggttggtatagcacaggc

SEQ ID NO: 64980 - DNA, 1004 bp, Cucumis sativus
  Intron number 2 from transcript Cucsa.138760.1 (locus Cucs a.138760) derived from phytozome v7.0 (chr-ID scaffold0106 6; pos 55634 to 56637 reverse strand)
tccatacctttggttggaggcatttggtttttaatgtgagttgcgtaatccaactttctaaagacttgattactatgaaagccatagttataagataagataatttgacgttgcagatgaagtgttggttatctataaatacaagtgtgtttcacattgatgtgattttatttcatggagttgttttttcccttcctttaaatgtttttctctcttatgaatccatggaatgtaatgtctataatgtttaaaagtaattgctgtggtcgttatagtaccatttttaaaagcagtgatgctgatttagtagtactcttctttcaataaaacaaatggtcagttgtaaatttagcaattaggctaaagtattaacaaatatagtacaacataaaataatttgcaaaatttagttaaactctcgaagtttattagtgatagaccatatcattgataggagagtagtttgtcacttataggagtaaaaaatgttgttatgcactaaattatcaagaatacctaaagtgctacagtaaaataaatttattttcaaaattagtctaaattctatcatttaccatttttatcttaaaaaaagtttccatttttgtgtgtgtatatataaatgatgagaaactacgtggatcttattttaattagaaagaaatcatagttgaattgatttttgatagctaaagtaaatgaaaaacataagggcaaaagagttttttttttccacacagtcatttataattctgttaaaattacgataattcttaaccatttgactattcattcacaaggttgttgtgttggtccttgatcataccaacacgtcaattgtcctttcttaatcttcttccttcttctctctcagtagttaattttgaatcataggagtattagcataatccaaagctaacaccagatttctgaagttttgtatgttgtcttacggatgatggtttccattttcagtttcttggcgatatcaaccagtgttgtat

SEQ ID NO: 64981 - DNA, 631 bp, Cucumis sativus
  Intron number 1 from transcript Cucsa.143080.1 (locus Cucs a.143080) derived from phytozome v7.0 (chr-ID scaffold0107 9; pos 1364067 to 1364697 reverse strand)
ccctatccgcattgacgcctaaatacaccaacacagctaagctcgctaccaagggtgaaagagagcatagtatttgtattcattgtgtttatttcaatcggggttctttcttttgtttctttatgttcaaatgagataattggagagggaaatggagattggaaggcatagtagtatgaatcaaactggtgattgaaaatagctaatgaaattcagaaccacgaatcaaggagaaactctcatttccgcctgggtatcgttgaaattttgagtttctcccctttattttcgttatccatgatcttttgacccaatttggttttatccacttggagctacctacaatactcagctttacatgttctgggtctatagttgttttttttccatttttgttgaatgatcttgttggttacgctgctgtcatgaagaaacaaaatcattttagtgacttgtatattcgctaccaggtttgatggttttgttaaagcatctcatcataatttatacatttgttgtactcttaatagagagtttaaagttctcaaccatttcttcaattcttttttttattattattaatgttatattgtttttcttcctgcagattatttgtagaaagaataaacac

SEQ ID NO: 64982 - DNA, 589 bp, Cucumis sativus
  Intron number 2 from transcript Cucsa.197230.3 (locus Cucs a.197230) derived from phytozome v7.0 (chr-ID scaffold0135 7; pos 700177 to 700765)
tgccaagtatttgcgtgctattgctgccaaggtcggtgggttacatggatgtcttacttttatttgattgtgatttgctctctgttttcctattggactgatgctaaggatctttgatgcttttgttatttgtgtacgattttagtggattgaacccatgaattggtttctgatgcgaatctataaaaagtgagaaatatggtgccatccatcttcccgttatagttcatggaagaatcagatattaggatggaaccgttttttatatctcgtcttaggaatgatacttcattgtagtgaactgccctagcttattacaacatggggattactcaccttgcacgagttctatttaaattcatatttatattgtgagagtcgaaaagttttagtgactttggaagttatatcatgtataaattcaactttactatcatgttgagggattcttttctcccattggatatgttaagcagttgggttgttgttgttattattattttgttaagtgttaatgtcatccatcctgaactctgtttgttgttttctcatagataacagagaggaaatcggaattagcaaagcttga

SEQ ID NO: 64983 - DNA, 654 bp, Cucumis sativus
  Intron number 4 from transcript Cucsa.197230.3 (locus Cucs a.197230) derived from phytozome v7.0 (chr-ID scaffold0135 7; pos 701008 to 701661)
gaacctattggagttgttgggttgattactccctggtacttgttgcctcttactgctttgattctttttttagtggggttctttcttggcatagcttctcaacttttgttggaatactacagttgttattattttttaaatcatagccaattactgtctctcaactttgaaactgttgattcattaacttaaacattaggatattaaatattgcaaatttttcttaaatatatattacttggattgattgttcaaatacaagtaaatctgttgaggtatttgtttaattgttatgtttgttcaacaagtgttttatacatgtagaacaaggattgaatgttaggttgtccaacatatggtccaacaagtctcaaaatactaggacgttcaatacttgttgatcgcagattacccaaacttgagtaactctggttcatagttttcattttacctttaatttggacaagagtcatgctttgggatgttattagttattaacctccagagtcatatctggttctgctctcttttttcgttctctttgtctacctttatcattgttctcagtctgtagcatggtgctctatcttaatttttgataagctttaaactttgctgatgtctatcttttattgaaggaactatcctctattg

SEQ ID NO: 64984 - DNA, 598 bp, Cucumis sativus
  Intron number 4 from transcript Cucsa.241560.1 (locus Cucs a.241560) derived from phytozome v7.0 (chr-ID scaffold0204 7; pos 1514953 to 1515550)
gggttttctgtggattctcaggttttgtttggaaggtgagaaaattttgggaacgggatagaaattgttgaatacttcttttgtttgtctttgttttcattgtgttggattataattctctgagaaaagagatggggaaatgggattctgatagggtaaactcttggaaccattcttgagctttcaagttttgtgtttctgttgaatttacgtcttgaatgttggggggaaaaccaaccttctttactttgatgaagaacattgctgaatttagtctgagttgtttcttgtagatctatttggaatcaaattcagcttgattatgttttctctttgtttcactctaacttctatattcgattcttgcttctagttaatttcttttttaagaatatatcaagtgagttagtgtatttgacttataattatcgagttatattgatgcatagtgatgtatatgcagctattgggtagggctggtaacttgattgctttgggaaaacataaaacttggttgtaataatgtcaagaccttgggttcttgtgtgtcttctgttactgatcatcttctcctcacaatttgagtggaggcaacagt

SEQ ID NO: 64985 - DNA, 880 bp, Cucumis sativus
  Intron number 2 from transcript Cucsa.255510.1 (locus Cucs a.255510) derived from phytozome v7.0 (chr-ID scaffold0222 9; pos 3477592 to 3478471 reverse strand)
ttattgaccagaacagagtatgtttctttctcctattacttgtggttttttattcaaggtttactagttttcattttgcattagaaactttctcttttactattgttattcttgtactgtagattagatttccctgagtttgatgtttacaccatgacccgaagatatgcctctcattatttagtttattataatgatctaaacgtttacgaaaaccattctatagcttaattttgaagtgtggtgactgttgaaacaatttagggcatttcttattcatcttcacgtttattaagtgggtctttaggtagcttttgttgattcgttagtgggttgaggatacaacttgtaactgatagatggttaccttgaaggctgaatgtgttttctttgactgattctcttccaacccaaagggatgtttggcttatagttgtatttatgattgtttgaggatcatatgatttttaattttttttttagggcttcccttgagcttacaaggcagataaatgacctattggttgtttgtagtagaccttgattcttgtctcatgggaagtgttgtatttttctctcccaagtttccatctaaatgtaattagagaatataccctcgacctattctcttttggataagaaaggatttgaatggaatttgtttatgtatctgttttttttttgttgaaatttggtggtcacgaagttttagtttcaatatttaattagttgctaccaacacgagcacagccttgtggggttaagggatctatacctcctctgctaagttggaggtacaaatctcccacctcattctcacaaaaagcttttacgagttgctcattctatttatttttgttcatgctacaggctttggttg

SEQ ID NO: 64986 - DNA, 907 bp, Cucumis sativus
  Intron number 1 from transcript Cucsa.185750.1 (locus Cucs a.185750) derived from phytozome v7.0 (chr-ID scaffold0127 4; pos 1191515 to 1192421)
atctttctggtatacgcacaacttctctatttccccctccttttgtatttcgttatagattgtttataaaatgcaaatccaaagcaagtagtggggttcgtcattacaaagttaacgtattttcataaggttcattttgatgaaaaaaaattgttgctgttgtttagtctagactagagtacacaatattttcttttgttcaaaatgatttaaaaaaaagaattattggtaaaagaaagagacgatgcatgaaagtgataggtatatatagctgataatattgcacttaaccataatcctctagaaagtaaatgttttgatctcttcgttttcaattttaaacaatcaaaatggttactttttaaatgttaatgactaaattaaagataaaaattcaaaatatgtatttaatgtatatattaggtgtagtataggttatacccaattgttgttagacataatatagccaatagttgactacaaaagttacgagtacaagtgagtgagagtcgatgctttttgaccgatttaaaaaacaaagctcagctaagtatttttctctgagaaatatggaaaaattcattgttcccaaccatattgatatcggactcttttatcttagaactgtgtctctaacataaatcctcacattctaataaaggtaaaacaatcattgttaaacaatttagagaattaattcataaattgtttttttcgtactagacaactcttcaatttttagaggagttcatgccaactaccaaaacaaagatgaaggttaaattgatctaatgtagtatataataaataattctccacttcatagtcacaatttcaaagttttggttctttttacttttcattcacttggagtgttgacgccacaatgtcattagggatcgttgtg

SEQ ID NO: 64987 - DNA, 650 bp, Cucumis sativus
  Intron number 3 from transcript Cucsa.165360.1 (locus Cucs a.165360) derived from phytozome v7.0 (chr-ID scaffold0115 3; pos 727356 to 728005 reverse strand)
gcttccactttgttgatcacaaagggttagttcaacatatacttcaacttttctttttttctttttcttttttaaattttattattgttttaaattaattgaactgagttttaattttagaataattaatttgtttgtacactaaatcttcatcatcaattccaaaggaacaaaatcattccacatctaatcatttcaaaaacataaattacacaataaatctattctcactatttgagattggcattttttccctttgatatcttaaaatttacgtgtaattcattttcataaagatgaaactcgagctttcaacttggaggaaagttcaaaccaattattattgagcttagctcgtaaactttattttcgaagggattagagcccttccttaacatttctttcctgtaaactaaataaaatggcaatgcttttcataataataataaaaaagaatctagagaatgaaacttagtttgaatgttctctaaatctacaaatatagccaagtttggaatcaccacaacttggaaacttgtaattttaatatttattgttgattattgttgtacaaaataatattgacaaagaaagaaagcgtaattgaaattccagattcgattggggacagagcgtgaggaaattaagca

SEQ ID NO: 64988 - DNA, 901 bp, Cucumis sativus
  Intron number 1 from transcript Cucsa.197640.1 (locus Cucs a.197640) derived from phytozome v7.0 (chr-ID scaffold0135 7; pos 965853 to 966753 reverse strand)
gccctccacaactctacttcttcctcaggtattcttctccttcctatcatggggtgttttgctttgttaattttttgaatattggcgatctcgatttgggaatttaggtttcaattgatcgtaacaagatttgtatagtgagagttcgatcgaatcgattcatatgctctaagttacttttttttttttccatttttatacggttataagttaaaagcaactaaattaattaagtagaattcttctcttgttcagattttaatgtacacctgaacgcttagcggcacttaagatatttgatctgatacaatgtaatagaaggataacagcacattcataagaaatctgagcttacactttgatctgatatcgtgttgttaggaattgttgttaaaaaagaaaaattaaagttataaaatatttgattaaaaaattaggttgttaggtgatggtgaatttagtcaaattcattaccaatatctaacaatacttaaaatgtttttttggttgtagggtttttctactaattacttttttcaatcttgatttttttaggcgtttttatgtcgaaatacaaagtttccttttataaattgctcttgaatttactttaaaagtttcaggaaattggtttggactgtggctaatttgaattcctaatctctacatgaccaaaaaagctaacaaaactgctttgtacttgccattttttcgaagcttttgtgcttgttgcaaccatgtgtcatgtcatccgaagaatctaatattactacttgcaattctataaatgcgtttaattttacttgggtttaatttagcaaggtatatgaaatgaagtctatccctttcctgataacgtctatcagattcttcagtatcaaattctgagttaagatcaaag

SEQ ID NO: 64989 - DNA, 457 bp, Cucumis sativus
  Intron number 1 from transcript Cucsa.255100.1 (locus Cucs a.255100) derived from phytozome v7.0 (chr-ID scaffold0222 9; pos 3202430 to 3202886 reverse strand)
gctgaagaatctgctcaaagtaagtcccttatatacattgatcaccctatcaacttgctttaaatttttcaaaagtatttgttccaaagtagtttttaatttcgaaacaatcttctttttgaaaaacgactagtttcgattaaatatatgatctgtaaactaacatgaaatttgatcaactatcacaaagtattggaagtcaaatcaattaatcaatacacacacaaaaacaatatccctataactgtgtatattaattttatcaattatcacaactattttatgttcggtaggattggactttattcaatttgaagttttgtatattttgtgttcgtttatttatgtaattttgagttatattctatcaagggtatacttcggttgaattttagattaatctatatgcaaaatttaacatatactcaatatataattcttaaataggaaaaactcg

SEQ ID NO: 64990 - DNA, 851 bp, Cucumis sativus
  Intron number 1 from transcript Cucsa.259790.4 (locus Cucs a.259790) derived from phytozome v7.0 (chr-ID scaffold0222 9; pos 6143034 to 6143884)
gcagctcagtgtcccctcgctgctgcatctctccggttcggtgctgccggctctgtcctgattttggttttctatttattttattgttagttgtattccctcagcctctatccatatatatctatttcgtcttcctgaaagggattctgaatttctaatttttccttcttcccttcttctttatttctttacaatcagtaatctatgccttattctcaactctctttgatgcatagtttatactaattcttttgattgtcccaacaaccttaaccttgtttgtatttttgggttttagttgaacgaagacaattagtatttttttttgtgtaaaaatcttctccaatacaattattcaaataccattgatactttgaatttattggagttaaagaacattctattctttgtacttcatggacttcatatagaaagtttagaaaatatctagaagggcaggggtgaaagggacggcctaaaatttcatcgtttatagccatttttattgatagtatagatgttgtagatatggatgtagattacaaatatagtcatagagaaagaacgatcttctcaatacacaattgaagagaaaaccgaactgatttacattcagtaattggttaactttatcacagaaaattattgtttgaaccctttctaggtttctcagcacttccttcaatagtaaataatattgtttgctggaacttgacaatctcactttctcttagtaataacgtttatgtttttcatatttattttgggaggctgaaagatgacgatctctttgtattacatgtttggatgttatggatgatggctcaacgtgaattttaggttggaataaa

SEQ ID NO: 64991 - DNA, 298 bp, Cucumis sativus
  Intron number 3 from transcript Cucsa.303990.1 (locus Cucs a.303990) derived from phytozome v7.0 (chr-ID scaffold0295 1; pos 1768841 to 1769138 reverse strand)
gaacaagtctgtctaatgttttattcttcttcgtctttttttttctttctgtttggtgcttttcgtttcagatcggttcttgttttgtgtttatttacttggaatttgtttctgaaaagcgtgattcatgaggaacattgaagttggcgtgtttgttgttttatgggcgttgaatattgtagtctgtcgttcttcagtttctgaatcattattttgtgtatgtggctttgaattgggattatgacatttcttatggattgtagttagaggcatcgacgaatctggagctgaataagag

SEQ ID NO: 64992 - DNA, 374 bp, Cucumis sativus
  Intron number 1 from transcript Cucsa.282640.1 (locus Cucs a.282640) derived from phytozome v7.0 (chr-ID scaffold0265 3; pos 52462 to 52835)
tttttcatttgctttcaaacaactctccctaacaggtcattttctttattctctcctttctttttctaactttatcggatgaaagattcgaactttccacgtctccgataaaatgttttgttcaatcacgttagacttgttttaacacttttctacgtacctttctcatcccaattcgcataactatatcatagggttactattttttcttctgggtaataatttcttgataaatcttttgtttttaattacgactttagagacaacctaagtgtctaatagcttgatcattaaccttatatggtaatttttaaaattcaaagaaatagatatgtgttactgcagacaacagtaagcaccaagaaagtgagcat

SEQ ID NO: 64993 - DNA, 902 bp, Cucumis sativus
  Intron number 1 from transcript Cucsa.136270.1 (locus Cucs a.136270) derived from phytozome v7.0 (chr-ID scaffold0104 4; pos 934023 to 934924 reverse strand)
atcttcctactagccatttgcttggctcagtccctgtacgtacttttctcagacccttttccctccttcttcctttatttatatctacttcttaagttgacctcttatttgtattaagaatttcgcgatgattgatctgcttcgcaatgtgatctgttgcagtttcgtcattacactttcgtcatgtgtttttttgctttgtttggtggttttttgcctgcatgtcatggtatttttgagaattcatcgtaagtaaaaggaaaatggagtactgtttttttgaggccatcgagatttttctttgctaattagtgtggagttcaatcaagatattattggtgatttaaattttttttttcttttctttggtggcacctataaaacgagcattcgtgattattgttgaatatgagtgcagtatttctactatttaagagggaaatatgttttgctaattccagttgcgtcttctgaatgatgccttttgcaatatgttggctgttggcatgtttatttgtagttgaaatatgaagaaccggtccccccccccctcctgagtttagaaggttcaaaatccattttgatgataagggagactcaatgttattataatcattgaggggatctggtattttagcacgtatgcattgaatctctcacccttagggcttattatgcttaagaagcaaaccaacgatagtattctagtacaataacagaagttttttttaaaattatttcttggttaccttaaatccttgtgtgcttaaatgttaccgtgttctagttactttatttttcaaatttatggccttctttaaccttctcttcgttttccaagcttctttgtctacatatatttatattgtccttttttttggtggatcgataggctgtaatca

SEQ ID NO: 64994 - DNA, 1038 bp, Cucumis sativus
  Intron number 1 from transcript Cucsa.202120.1 (locus Cucs a.202120) derived from phytozome v7.0 (chr-ID scaffold0137 6; pos 269331 to 270368)
ggccgccggatcatcatctacattaaggctggaaagtaagaattaactataccctttttttaaatactcttaggaaatcaactctcagctcagttattgtttattttggcataactatacttttctctaaatattctcatatacatcttttttactatttaaattatcactgcactctaaactatcatacttttagcacgtgtcgacttatgagtggacactagtgtttagtcagagatacacatagtaattatttttctaaaagtatagtgtttcaatgtctacaagagactatatatacatatatttgccctttgattaatacatttttgctagtaatgtaataggtggttttaaaaactttagtttgaagaagatagctagaaatctaggggtatagttagttggattgttagagagtagtggatgatgattttctttataattaattattaagttaattttcttaatcttttttacctttcaaaattcgaatgattattagtgaaacttctttttcttgggaaagtggagaaagaaaatggttgtgattaagccataactaaccaagattaatcaaaaggaagcagggaaagaaggaaaaagaaaagttttattgacttcagtgtcataatcatgcaaagctgttactttaccaattcctaaagtccgtagtttttttttaatatcatgataataattatacaatcaaaacaatattttatatgtcccctcacaataattaatttaagtccttttcaatttagttgctttcataataataactcttaataacaaccaaaaatttaaaatcaataaaattcaacacatgaataaataaaataacccatcattagaataattatcagtatatatatatttaaagggaaacatttttaggagaatttatttatttaattaaaattaaaattaggatgttttgataataataaattgagaaatggtgtggagtaatagcagggagataaatgtaaatttgtaggtacgaagaggagaatttgaaggtgggaaggaaga

SEQ ID NO: 64995 - DNA, 406 bp, Cucumis sativus
  Intron number 3 from transcript Cucsa.240220.1 (locus Cucs a.240220) derived from phytozome v7.0 (chr-ID scaffold0204 7; pos 172170 to 172575)
gtggcgaggtaaattgatggatttatctgtttcagcatgcatgtgtatgactgttcaatgattatttttcatgtaatgtctttctatatatataaagccgaccctcgtgagatcttgccctgtttttcttttcgttttttatttttattttttggtatatttcagcaaacattcttgctttgttcttctatgcgtgagttgggggacacttttttcttattttacttctattttaaatgttatcaagtagagtacgtagttgaagttttggcggcttgatgatctatttgaattctttttgtacatataattaatcatggttggattcccaacctagcctgcatattgtaatctctgcgcttcacgaatggctatctttttaaggttgacctggaccttggaaact

SEQ ID NO: 64996 - DNA, 328 bp, Cucumis sativus
  Intron number 3 from transcript Cucsa.196720.1 (locus Cucs a.196720) derived from phytozome v7.0 (chr-ID scaffold0135 7; pos 299950 to 300277 reverse strand)
aggtcagtattttgttcttcttcactcatttagtttaagaattaatgccgtgagatggatttggttgtttgttgtttgatctgggaatcaagacaaaactgtcttgtcattttgttttcctttccaaatgatttaatacctctgtagttcatccattgaaaaggatagctaaatttccaccattataggctaagaacctacattacaccaaattacatcctttcttcttctgggacatatcaaataattgagggaatctgaaagggcttgaaaatttataagtttgtggtcaatttttttgacagttttactttccatttcttatagc

SEQ ID NO: 64997 - DNA, 776 bp, Cucumis sativus
  Intron number 1 from transcript Cucsa.220030.1 (locus Cucs a.220030) derived from phytozome v7.0 (chr-ID scaffold0165 8; pos 1592166 to 1592941)
actatcaaatcgtaagaactttaattgtcaaaacggaaagatgaaatattagaaattaccgagacaatagctccttgggtgaagctagaagcaagcatagaagattcagaaagccaaactttacaggcagtagattgaacaggatccttaataagtcttccaacaaaagcagatttaccaatcaaaaaaggatatttacttgaagcttcttcaatggaggaaagaaactcatcttcagaaacttgggagacaggaggtattgtgaaccgtgacacaggagattgagagtggtttgagttagacaatctagagagtgtctttgcgttcttctttcccttcgacggcatatttgtgcaaagaatgaattctaagctgcaaatatgatatctccaataaaccctccaaaaatgtaacccaacgtatcaagaattcgcggcggcggcacaacggaggatttaacggaaattctttactaaacggtaaggtgtaggactcaaattagttcttttcttttcatttcttttctcttctctaatttataggaaactaaaatgaaataaaaagaaaaagaggttttttttcttttataattaaaataatagttaaaagaaaattattctctcaacattttgttatattggtaaatatgtgaagttaattttggtatattaaaaattaatttttataaataaaaattgataaatcatcgggcagacattcaaattccgggacgaatctaagtagaaattggtttcccggttcaccagccactggct

SEQ ID NO: 64998 - DNA, 509 bp, Cucumis sativus
  Intron number 1 from transcript Cucsa.219630.1 (locus Cucs a.219630) derived from phytozome v7.0 (chr-ID scaffold0165 8; pos 1341531 to 1342039 reverse strand)
cgctgttgctactgttaaagatcaaggacagtgtggtgggttttcttttttatttttctctctttttttaactttttttttttttgttgaattgatcccatgagaatgatggttggattttgtgttttcttttcgttttctcatttggtctttgatgttttgactcttgtttgggtcgtactggttttaccaggaaatttgttatgagatccatatttataggtaacatttcccacaaatagattcattagatattggtcaatactcaaccttgatcgtaacttttatctgctataattagcttcgcttcatctctgatgatttgttgatgaccatcgattacatcagaaaacgtattagaaactttccgctcaaaacttgttttccaagtaacctttttatctcgaaggattgttttagtaaaggcttttgatggatggcgattgacgtaattgggttgttttttgaatgaagggagctgttgggctttctcatcagttgctgcggtg

SEQ ID NO: 64999 - DNA, 404 bp, Cucumis sativus
  Intron number 2 from transcript Cucsa.158850.2 (locus Cucs a.158850) derived from phytozome v7.0 (chr-ID scaffold0114 2; pos 891762 to 892165)
cagaggatttgttctcatccacgaataaacggtttgttttattttattttattttatttttctctctttctttattgattattagcagcattgagatcgaggcgtgtttctgttcttcgtgctttcggctcttattctgttggttctttttatttttgggtttaattcagcaggaaaaattgaatgaatttgttgagtacttatttatttcttcaaagctaatttgatttcatgctttaaaaatctcaattttagtgtagcttttaagataacagcattcctttcatatgttctgtatgaatgtgctcgttcttatagtgattttgagctggtttttagaatatgtattttgaattttgcatgtcttagttgggtaatcccttatcaggcaacgtggagttgat

SEQ ID NO: 65000 - DNA, 520 bp, Cucumis sativus
  Intron number 1 from transcript Cucsa.229240.3 (locus Cucs a.229240) derived from phytozome v7.0 (chr-ID scaffold0193 9; pos 34403 to 34922 reverse strand)
ctagggctgcaccaccaccacattcgtagccgccggtaacctctctcttgaatgcttcttaattttatcgttatctcaggaattcagaatctttgcatccttcttacctcttttgttataatatttcttgtttatctttgttggagttagatttgtgtgttgtgattttggttccatggagtaactgttgttaatatcgtttttcttctcatcttcattattgctcgcttggtcttcaggtgggtaatttcgatacagctatggcgcctaagggtatgtgcgctttgtctttgttaaagtattagtgtattatgtcctttttcctcttaattttgctcactgcattttcattcttgtgttttagatggtacttttcgttttcttgttttgatggtagcttccaagttcttgagacggtttaatggacattttcagtatataataaactacactctccctggatgcttatgaggttttgcaatgcagagtttatatttaatttgatggttttgcagctgac

SEQ ID NO: 65001 - DNA, 669 bp, Cucumis sativus; identical to SEQ ID NO: 64064
  Intron number 1 from transcript Cucsa.267170.2 (locus Cucs a.267170) derived from phytozome v7.0 (chr-ID scaffold0236 4; pos 268465 to 269133 reverse strand)

SEQ ID NO: 65002 - DNA, 846 bp, Cucumis sativus
  Intron number 2 from transcript Cucsa.257320.1 (locus Cucs a.257320) derived from phytozome v7.0 (chr-ID scaffold0222 9; pos 4675071 to 4675916 reverse strand)
gaagatctgtacattgctacgttacttgtattcaagtaagaacctcctttttttcttttcttcttttttcttcctccttgtttggttcttgcttcactttttagctcattcattcagttataagatagccttgtgggacatcattttttataataatatgcacatgacccaccatttattgtggggtttgtgagagttgctgcaaacccttggtcaagaacaggtttgctaatatttccatttctaatttctcaattttcttttccaaaaggaaaaaaaaagactaaaaagtagatgtgtttctggcttcttattaattgttcctttttgtttcctcttctccaaaatttaaaaattttaaattattgcataaaaattatttgctttaaatattcgtatctttatgttatgatttgtactattcatttttatgcgcaaaaagataaaatgatgctttattaaaggtcttgaaaaaacttgatttcatcgtttaaaagattagaaacaagaaagagtaatagtaaccaaaatgtttgtgttactcaaaagttgaattttgaaaaccttttgtaatttagtctataggtgtgatttctcatagttggagtccctcccttcttgtgggcttgaatatttttttgtacactgtgtattctttcattttttttctcaataaaagtcaggaaatgagaaacatagatactatcaaattggggttcaactttgatccttggagatatctatttaaaatctcaagctcttgatgatttggcatttatgggcttggtttaatactgaacaaatacatgtgatgcagtgatattaataagtatttgcccggacagc

SEQ ID NO: 65003 - DNA, 410 bp, Cucumis sativus
  Intron number 2 from transcript Cucsa.235550.2 (locus Cucs a.235550) derived from phytozome v7.0 (chr-ID scaffold0201 2; pos 79490 to 79899)
gaagggtaatttgattttttttgtgtgaaagaattactggcttccttgcttctgatccgattgttgaatttaaaattgtttcaatgctcgtagggcgtaagcccaaatgagcagtgttatgaggggcatgtttctttttttttttcctttttttggaacaatatattgtttatgtggtgttgttcaagtgtttatttatgtctggaaaccatatctaatttcttataatttccaattccatttttggtctttgatcttcgaacttttgtaaatgagtatggatttctgttgcttcttctctgattattatgctaactattgtggtatatctatcatataattgccttaatgagactgttgcttggtgtaaaacaggctgaggggcttctagttgaattgacaatttcgtc

SEQ ID NO: 65004 - DNA, 752 bp, Cucumis sativus
  Intron number 2 from transcript Cucsa.179840.1 (locus Cucs a.179840) derived from phytozome v7.0 (chr-ID scaffold0123 3; pos 203505 to 204256)
tgttgcagggtccccttctaaagcgatctgaaacagtacgatcgttaactaatgcattgcaactctttctctctttccttttgttttgaattgatggttactgcttaattgcgctgcctttaggtcttccatttaaatctttctcgtcgaattttgggtgattaaattgggggattgttcgacgggtttgtctggcaaaaaagttgttggttttctatttatgtaggtgaatttttattatttcatttttttgcctcccccattccctcattttgtgaactgggcggctctgatagctgaatttcgctagccatgataaaaactgggaaacttttgttggtgattcgtctggcattggttttttatttgtagcaggattttcaaattttcattgacaactcgtttaattgtggaaattagaatgttttagtgatatttgaagacttaattaaatcacttagaagtacctattaagattataggaggtcggatttgtgatttcaaggagattagaaatgtgagaaatgcccatgttagtgatctaactgttggcatatttgtgattatgaatatggccgtcgatgtgctagtattctcagactgttttatagtgcgcatatgcagaattgtggtcacatttgatcagccttctattttctgcgtttctgttcttagacagcattttttatggcaatgagcccttcgttgtagcaaatctgattttctctgttacaatgtttgcagttgaggaa

SEQ ID NO: 65005 - DNA, 427 bp, Cucumis sativus
  Intron number 2 from transcript Cucsa.166510.2 (locus Cucs a.166510) derived from phytozome v7.0 (chr-ID scaffold0115 3; pos 1684901 to 1685327)
acacgatcttttcgtaaatactcggagcgacctaggtgggtatttttctttttttatgttaaaagcattactctggtctctgaaatatctaagtgaacaaagtcaaataaagcgaaatcagtagcagattttgaggataatggtaaaatgcttattctgtgtatgttcttatgtgctgttttattgcttctcaatgtttattcttatctgataagattgtaatttgcgtttaataggtttacttataaatagtaaatgtaaataaatgttattttatgtttatcctttccttgcagactttttttttttttcaataagaaacattttccttgcagagctttggtttataatatttaggaagagtaatttgtttctaagattgaattcttatttctgctttttggatcaggtccttgtactaggatac

SEQ ID NO: 65006 - DNA, 802 bp, Cucumis sativus
  Intron number 3 from transcript Cucsa.166510.2 (locus Cucs a.166510) derived from phytozome v7.0 (chr-ID scaffold0115 3; pos 1685331 to 1686132)
accagaaattgaaagaaaggtgacaaccaaaccaagttccaaatttgatttcttgtataaccctgctagcatcgtgaatttcatattctttatgtacttgatttagtaattgctcttgctcgtgttacaaactaagcttctgttttaaatatttatatttggactattctctttaaaggtctgccgattgcactagctatgttctgggaaaatattaaataacaatatttggtgggttatcttttttcatgagtggtgattgtctattgttttatacatcaacgttccagtttactgtttgtaatgtagttttataagtatcaccatatggtcttctcttaataaaaaagagtattttattgcgagacatgtggtttattttcgattggagcaatgtggattatgtattttcaatcttcatgaaatatcttgctgatttctttgcataactcataagtatcacaacatttttatggataaaagggcttcactttactaatttctcttaaatatgaggaatgttcttgaaaggaagtaatcttcttggacatcttgaagcattgcttagcttactggtttgcttattttgagcatatcttttggtctttcaggactcaaaaaatttcttcaggtttttatttttcgacatgtggaataagttaatgcatgtctcactttgaaatatgaataaaaggattgactgttaactgtagctataatagaaatgcacaatctttcatcttttactaatgttttcctaattttatttttaaatatttcagctttgagaagtcacccaggc

SEQ ID NO: 65007 - DNA, 533 bp, Cucumis sativus
  Intron number 1 from transcript Cucsa.165710.1 (locus Cucs a.165710) derived from phytozome v7.0 (chr-ID scaffold0115 3; pos 1041761 to 1042293)
ttgtattcaggtaatcaattaactgattttaatttcatcctttttctttccattcttaatataatattattacgaaacattttatcattgaagacttaatagataaacattctatatatctatatatacacaaaccaattgagtcatgtgctcaaataacaatgataaatgtttgaatattgaccttatagttggatatctaatttttaaacttcaaataaaataaaggggtatagtaaagaattttgtttttatttatattttaaaaaattctcaaacattctctaaaaagatatttaaaaaaatcccaaacattctctaaaaaagatattaaaaaagtctcaaacattcatctatatatatatataatagtaataaaaaggaatctaaggatatataaaaaatggaattatatttttaaaaaattaatgatgattattattgaattattttcgtaaatatttgagtttgttttgttatactagaaaataatttagttaaattatatttatattttgtatgaaaggttgaag

SEQ ID NO: 65008 - DNA, 644 bp, Cucumis sativus
  Intron number 2 from transcript Cucsa.167270.1 (locus Cucs a.167270) derived from phytozome v7.0 (chr-ID scaffold0115 4; pos 637421 to 638064)
aagatctatttcttggcatcattttgactggtattcttttcttggtctgattcatatattgtttatttatataatatattccacttctttgaataattttttcaatttatagtatttgaatgaaaaggaagccacaccaaatggttttagaaaaagacctattttcaggagagatttatttgtattttacatgtgtactaagtcaattatttgaaaatttgactagattttatacatttacaaaaaagattgtgcttaaaataaaccctaacatttaaagagtgaaggtgattcaatttataacaggtttaattaagatactgtttaagtttgaattgaactattttactatatatatatatacaccccttacttacatcttcacaaaacaaattcatttatatttggttatttaatttgtttttaaattttgacattttttctcttactttaagttatttttttattagttttgaaatgttataaaagatatttatattacataaaaagtatgatatttaaaatgtattaggaaaagtatttaaaagatatatattttattgagttatttttatagtttatttatacatgttgatttatgatatataggtggaaaaatttcagctgaaggaggaaaaataaac

SEQ ID NO: 65009 - DNA, 578 bp, Cucumis sativus
  Intron number 3 from transcript Cucsa.159020.1 (locus Cucs a.159020) derived from phytozome v7.0 (chr-ID scaffold0114 2; pos 1035355 to 1035932 reverse strand)
cacctgagaagaagcgccggctgactcaagagcaggtatttgagtaatcctattttgataataccctgcatttgttttcacttggtgggtgtggaatctaaaccctgaactcgatgcattttacttgtgggcatatttcttatattcaatctatgttgttgcttttaatgttattacctttgaatcaatgctggtctccttgcttatctctcttggtgaaaagaaaaagaatggcataattctcagattctgtaagataaatactaaaggaaaattcccatgggggaattatttacatgactgatatggattctgtttataatgactttctaagtgcaaagaaatttcaaacctacccatgactgggtgcaattcatcaagttcaccctggaattatattttgtttttcatttcttttattgtacttattgttcatcctccaatgttctcatttcttgataataaataaggttgaagaaaaaaaaaatgatttgacaatctacgctgctgaatgacccttattaattcatggccaatgattaggtgcatctgctggagattagctttgagtcagagaa

SEQ ID NO: 65010 - DNA, 747 bp, Cucumis sativus
  Intron number 1 from transcript Cucsa.256840.1 (locus Cucs a.256840) derived from phytozome v7.0 (chr-ID scaffold0222 9; pos 4328036 to 4328782 reverse strand)
tacctcaagaccttccgacaccatctcctttaaaggtaagctgagtaaatttattttggttagttcaatggtagtatttttgttggttgggatgctaatcatggttatttttcatattctagacttgggagaacagcatgtaacatttccacttcaatttggatccttaagtcccggtttccaggtgttctacccattctatgactatttagtaacgttgccatgatatatattactagtttttcaatttaattcctggtggttaataaattatatgattatatcttttgtgaggattgacactttggtatttcagattccttggaccagctcagctccttcaaatctgcaagaactgatatttaaccaggttagaatgcgtcttttcaacagatgctactgtcttgatatatgggttaccagtggccgagagctctggcactcattaaatatttttttttgagtgtttgattatggctttcataaatcttgagcatagcaattgtctaaatctgttggcatgtatgtcccatggtcatttctacttctttcggatggtatttcagtatgcatggcctaagcttgagattttaacgtttctgctcatgctcagttgacatgatttattcactgctaattatggttcctgtttctttttcttggcaacttgattggtttatctttattcttatcagctgttcttacctgctaggcaccacgccacttgtttaaatctgcaccttcggg

SEQ ID NO: 65011 - DNA, 485 bp, Cucumis sativus
  Intron number 3 from transcript Cucsa.177590.1 (locus Cucs a.177590) derived from phytozome v7.0 (chr-ID scaffold0122 5; pos 1567249 to 1567733)
gggtacgtggccgggtcctttggatatagttgctttacttttaacaaccatcaaacacatgattttgtggtcgaaggctagaatttatgatcatctttcagtttcttatccccacacccttctatgtggatggattagtttagtaagtaataaactaagtatgctgctttgaatagccgagatgacccattcaccataggcctcttcgtttatataaacatatgtatggtgttgcctccagcctaatcataaatctactcaagacaagtttcagaactagaaattttctacacgttttatgtaatgtactgaacgttttgaataggcttcaactttatttatatttatcttttcttgttgaagcttctaagtcctgtcatgtcactagaaatcacttgctttttatatttctagtggacctgaaaactaatgctgcttctctccgtacagttgctttgggtcatattagtggcttcctttgctgc

SEQ ID NO: 65012 - DNA, 534 bp, Cucumis sativus
  Intron number 2 from transcript Cucsa.219280.1 (locus Cucs a.219280) derived from phytozome v7.0 (chr-ID scaffold0165 8; pos 1117471 to 1118004)
gagaataaaaggcataattcaggtaaatttgatagaacaaatcttgctgctttcttgttgttagtactctcatgggttaataatcaaaactttgtcgaggtctctttgaatatgtcaaatgtgactcggtaatgagaactctgctcttctttttgttggaaagagccgcaatggtagaaacgaacaatgcaaatgcagagccttcttcatatgcaaaatgcttcatccttagaatttagatccattaccaagtatatcagcttgtttgattggttaaacatcaaattccctgctgggatgttcttctcattcatcaaatttgatgtttgcctgaactttatattagtagtaatcctttgaaattcagatgctaactggctttttcgtcgaatttttctacttatacttatagcttgtaatgtaatgtgattacttatggttggtgcttatcgaagttactaatctcttttgtattattcttctccttttgaaagttcaggtttcaagatctattggcgacgtttatttaaagaa

SEQ ID NO: 65013 - DNA, 448 bp, Cucumis sativus
  Intron number 2 from transcript Cucsa.239790.1 (locus Cucs a.239790) derived from phytozome v7.0 (chr-ID scaffold0204 6; pos 672949 to 673396)
gaagaaatctcacaagcactctaaacgccactcaggtaaactcgaattgccaatttgcagaaatatgcatgttacggttcctgtttgatatcattatgtttcatctcatagctggtcgactggttgttttttggtattaaactgactttgaaatgtggatactatggctaggttatgtacaaatcaaaatccttttattttcttatattcttcaaatttattatctctgctattttttcaatctctttctccaaattaatgtttgaaaggaacttgtggtttcaagaaagacgcagatgcagatgcagatgtaaacttttacttgttttactttttgatccggattgtgaagaagtactttataaatatgttttcaaagtaaagttttgtcatgccctgcatttttctctcagagaagaagtcgaaggatcttcacaaaggcaagcat

SEQ ID NO: 65014 - DNA, 634 bp, Cucumis sativus
  Intron number 1 from transcript Cucsa.232210.2 (locus Cucs a.232210) derived from phytozome v7.0 (chr-ID scaffold0198 9; pos 277113 to 277746)
tcagtacagaaattttgagccaaaacgtttgtcaggttagtaagaagttcaatttgatcaaatttagccaataagagatctgggtcttttcttttccattagaactatttgggattagtgaattggcaatatgtaagttcgtggttgggtggattcgctttctgctaacggcttctgtatttccaaatctaaggagtttcatctgtaatttcttagttgatctctctttcaatttgcttacatccagaggtcataacttataagtatactactgatgaaattcgttacgtagtctgtttcttatcctctttgtttggatacttggatctcattcaactggtgttggttggggttggttttgccatttgatttgagtttgcctgaattagaacttcttttattttgatttcgactcctcttaatttaagagttttctattcctgaattttctattgatgaacttgattacctgtcgtcgtggatgcatgcatatggtgctcatcgtttggaattgagactttctgtttgtttttctttacttaaaagaaaagatcaatttttttcttattttaatggtattagcaatatgtatgtttcagggttgaattgtgagacgacctagattttgcccttt

SEQ ID NO: 65015 - DNA, 523 bp, Cucumis sativus
  Intron number 2 from transcript Cucsa.232210.2 (locus Cucs a.232210) derived from phytozome v7.0 (chr-ID scaffold0198 9; pos 278508 to 279030)
atttacaggtacattactgatactctgaggttggccacttgagatttcaattccctgttagtttgtttacacaaatattgctccgttaaccttctccaattagattgatttgtttatggccaagttaaatttattagcgaatgtctactgcaaacaaacctacacacaaaagtgtcttaattatattcaatgcttgatgatatcatccaaatcaaattctagggtatgcacctacttgtttataaagaaaattcagccctgattttcatccagtgtagttggtagccttttcattttgaatcgatcatcattttctgcctagtataatgctacgccctttgggtttcagcccatattcttctctgctagctaaatctttcttgagttcaactgtcatcttaatttgtaatcgacaccaagtctcaaatctgcatagcttatctgattatgaggtcgattgctctaatgtagttttggccttcataccctcaaatatccatttacttcttgtaggccacagaat

SEQ ID NO: 65016 - DNA, 565 bp, Cucumis sativus
  Intron number 1 from transcript Cucsa.254630.1 (locus Cucs a.254630) derived from phytozome v7.0 (chr-ID scaffold0222 9; pos 2882416 to 2882980)
gactcaccgtgttcatcaagcttgtgagcttttaggttggttatgtcttcaattgatttgaattgtttaagagtaggatttcgttgtcttaaactttgttatgctattggtttggctcttaaggaagaccgaatacggaattgaatatgatctaacttctggattagttagatattatatgttagtggacactatatgtgccgcataagattccattagcccttgattagtgcgttggtgccatgttggagcttttatgtgctatggttcagaccgacagattcttgtgcgaataacattttttttttttgttataattaagcgaacactgagtttgtagctattgcctctccttgaggttgggctgcggccggcattagacattattctgtaatttgctctgttttccactacatttggaatcctggaacttattaaatcttatttcaatgtttagatacaattgctgttataggttttagcaaccttgttcatctttacatctttttagctttgcgaaatttgtgcagcgacaaacaactacaggacaaggcatcttgcaaag

SEQ ID NO: 65017 - DNA, 777 bp, Cucumis sativus
  Intron number 1 from transcript Cucsa.161150.1 (locus Cucs a.161150) derived from phytozome v7.0 (chr-ID scaffold0114 4; pos 1117321 to 1118097)
ccctctcctctcttccgacggtgatctcaaatcaggtataaaattatttatctattgtttttggtataaataaaatttaaattccaatttttatgtttttggttttccttcaaatcattatgtcgtacatattcttagtttgttgagttcaagactgacaatagacatacaaggatagcaccttgttcatgcaacttctccgagacaacttgactttttggacttctgatattggtaatcaacctggcgatagagattaaggaagcaccaaaacgtgaatcaggggagggacatggacagtagtttgcattgttgagttgatacttgataggagtagttgtattcttctctttttttagctacttggtttgaatgtcttattatttatgagaatctgatgtttgaatgatttgatatatatattttgtttgaacacattgatctgcatttgatattaaattgaaaatgttaaagcataaaagttgtaagtaaatcctaaacccaaagaaaaaaaaacctacaacccaacccgtttacactcctagctctcatctacagtcgaatcgttttggaattcatgatattgcgtgtattttggggtgaaagttgtctttaattagactagtgacagttcattattgattgtggagaaatttatgaccatctaattttaatttgaacaagggaggatgaaaataattgggaaatcggatacccattgcatgttatgtccaactagtactcattttttctttgttctgatattcttcaggaaca

SEQ ID NO: 65018 - DNA, 990 bp, Cucumis sativus
  Intron number 2 from transcript Cucsa.178390.2 (locus Cucs a.178390) derived from phytozome v7.0 (chr-ID scaffold0122 7; pos 575906 to 576895)
taactccacttctgaaaatattagtaagtttttattatcatcttctcttccttggaaatatcatcttctgataatgctctgtttgattgtttgttatgaagaaatttctgaaagtgagtggattgaggtagaatatcaagctcttttaagaacgtggtaaatacaatttggattgaaaacatttgagagttagccaaagatggccaccattttgtgaaaattcagagagttctaatacaaactagactattttcttataaaactagttgagctggcattaatattggtgaaaaacagaagttagcttaaagaagaacttagtacctaattatgatattaaatttctttttgagttttataatacttaatgttgtagggtcaaactattagattataagatagatgaatgtgtataagtttgatgaaaaaaggaaatataaaagttggccgtagaataagagaaaaaattggttattctgaaagcttgttttctagcttttgtttggattgtggaaaaattcattagtataaagctgtataagaatgattaaaaagtataggataagatactttaagttggaataacttctactttaccctaatgcattttgacttcaatagggcagttgtttcatggttagtaaattcttcaaagttctcctgtttacaatcttcatgaagaagctatttgttcccttttctatttttttatttagttggcaattcatatgattttttaattttaatatttaaagataatttaatcaattaagcaatttcaatgagaagtcatctttaaggaactgtataatagctaacctttcatcaaagaataaggaaaatcttttcagctatttgaaattgcttccaagtagtgaattatttgtcgttcatcattgactaatctcaattttagactcctttttctgacccaacataatgtgaaatctgtcagactgtaactttagaccaaaggagatagaggaactg

SEQ ID NO: 65019 - DNA, 676 bp, Cucumis sativus
  Intron number 1 from transcript Cucsa.308420.1 (locus Cucs a.308420) derived from phytozome v7.0 (chr-ID scaffold0297 8; pos 552027 to 552702)
gggattcttggtctgtttccacttcttttttttcattctctatggattatgattacagttttggttacgagttgtctcatttccctgtttggatgggaatgagtgtggttgattttttgttcatgcgtttagttgattgaaaaaggccactagtttagtgtattgtgaaggttgattttatatgaaaaatttgggtgtcatctcatttgttgtagggagttatttgctgaaggttaatcattattgagaagattaaaacgttactttgtttgcttttcccaatgtgagggaattctgaatcaatgatatgtcttccattgttaagacatttctatgttcatgccttctttttcatgatgtagctacatttccaatatttggttgatgggattgttctgtttttctatgtaaatgttggagaaaactttcaattggacaaacaacaaacaactgaaattatgttcgaaggcaatagatcaggtgtttctgtttataattctggagttctcttcagatttgtaatgatatcattgtggactttgttgtctattatatacacacacatacattcatttagccatattttggttcttgttgtatatcggcgaagtcgactttctaattatcaaaatgaactccctctgatctaggttttgctcatctgggcttgcaagtg

SEQ ID NO: 65020 - DNA, 659 bp, Cucumis sativus
  Intron number 1 from transcript Cucsa.160830.1 (locus Cucs a.160830) derived from phytozome v7.0 (chr-ID scaffold0114 4; pos 906347 to 907005)
caataaaagccttcaagataatcaaggaaaaggatgtcatttcatggacttcagttatatcttcttgttgtgataatggtcaagcagctcggagtttaagtttcttcatggacatgctctcggatggcatgaaaccaaacgagtacactttaacaagtgttttgagcgcttgttgtgtaatgctgacattggatttaggagcacagattcattcactaagcattaagcttggttatggttcaagcatactgataaaaaattcgatcatgtatttgtacttgaaatgtggatggcttattgaggctcagaaattgtttgaaggtatggagactctcaatttggttacatggaatgcaatgattgcaggccatgctaaaatgatggatcttgctgaagatgatgttgcagctcacaagagtggttctacagcacttgctatgttccagaaattatatcgctcgggaatgaaacccgatctgttcacattttcgagcgttttgagtgtttgtagtaatctagtagccttagaacaaggggaacagattcatggtcagataatcaaaagtggtgttttggcagatgttgtggtgggaactgcactggtgagtatgtataacaaatgtggaagtatagacaaggcgagtaaggctttcttggag

SEQ ID NO: 65021 - DNA, 851 bp, Cucumis sativus
  Intron number 1 from transcript Cucsa.201890.7 (locus Cucs a.201890) derived from phytozome v7.0 (chr-ID scaffold0137 6; pos 113895 to 114745)
acttgattaaggagctggataggctaactggtctggtgggtaattctgttcggccattaatgctgcttaattatctgtggaatttagcgactattgagcatctgcatttcttattgtacttgtactgagcttaagctgaacttcagctactactttctgaccagcggttcaagtattacattgattgaaagttcttttttcttttttaataataataattaattggtataaatatccttaacggcatcgtagactttaatatgcgtagggaagaagcggtggttgattgttccatggaggtacttgaaatataatacattacgtgtttttttacttcaaggttttccctctcttgaaggaacattaaggcatggagaaattcagtatgggtttgttgattattatattttatataactggcatcttgttacagcttttttggtaattgttaaacaagtacagactgctgttgtttttttaaaattcaaggacaagacaacctatggaatagatattgttcaagtaactaagttcatagaggctgttcttttcttttttttcctatcttttgtttgttttttctttagaaaggtatgagtggatacctggatcctaatactgaagtatttaaatcaaccaaaatttggttatttatatttaattatcactgtgagatgggataggatgatttaaattgcatatatgcatgttatttgcaattaccaaagagtttatggcttaaccaaaaattggagttgtggttatcagttcttggctttgaattttttatttttacaccccatcttttagctgcaggtaccgttgcattgcaatttgtgttgatttccgat

SEQ ID NO: 65022 - DNA, 409 bp, Cucumis sativus
  Intron number 1 from transcript Cucsa.265810.2 (locus Cucs a.265810) derived from phytozome v7.0 (chr-ID scaffold0235 2; pos 261165 to 261573 reverse strand)
ttattgatttcctcacattgtgccatcggcttaaggtatccgtactatttggtcaagtcccgctggttgtctatgaaaatttggggggggagggggattttcttgatccatattataaaacaattcgttaaatcaaacttttgtttttgcctgattcttggagaatattaaactacaaggttggtgagtggttattgttgcttttctgagttgataaagattttggattgtttggccaatgagaatttgtttttagatattttttttcattgttggcagaagaactgatatttgtttatgcgttatgggagaaactaaggtggtctgaaaattatatccattagaggttataatcatttagctattctcttttccttgtagactacaaagagaaagggctggatcaatc

SEQ ID NO: 65023 - DNA, 776 bp, Cucumis sativus; identical to SEQ ID NO: 64997
  Intron number 1 from transcript Cucsa.220040.2 (locus Cucs a.220040) derived from phytozome v7.0 (chr-ID scaffold0165 8; pos 1592166 to 1592941)

SEQ ID NO: 65024 - DNA, 758 bp, Cucumis sativus
  Intron number 2 from transcript Cucsa.142960.1 (locus Cucs a.142960) derived from phytozome v7.0 (chr-ID scaffold0107 9; pos 1281723 to 1282480 reverse strand)
aataacagattgcaacaatccttccggccttccaggtatcagttcatggtcaatatcttatcattttgtgtagtgtttcttagtggcttattaggaaaatttgataatcactcgatcaaatttactaatgatactggtcatgatgaacatattaagaaactacagcttttgaatttctcaatgcatgacaacatatactgtagaaaaacttctacatggtctgatcttccaacctctaatatttattgctttgttttaaaacaagggcgtcaattgttaagagcttcttaatctgctacattaagctctatgcagtcatgttttgtgttaactctactgtaatattggtacttggcacaaggaatcttatcctttcctgacatgagcttattgcttgaaatttgtggcagtaactagaatataccttttgcatcttcaataatttttttttttaatatataagtatcgatggatcttaatcttgtcaacttttcttatgttactctcatcttaatagctctataagaaccaataaatatctttaattttgatgtacataatactttgtcaattgaattctagaatttactgtaaagattcttcaaataattcttttagttttttacttttcggtttttcttttaacataataagttcattcttgcgttggatccccacccttgttttagattctaaaggaaggcttttggcttttggttgcagggagaaaattttgtacattaaaattgcaggaacct

SEQ ID NO: 65025 - DNA, 894 bp, Cucumis sativus
  Intron number 2 from transcript Cucsa.193090.2 (locus Cucs a.193090) derived from phytozome v7.0 (chr-ID scaffold0133 5; pos 95914 to 96807)
tactttcgtaaatactcgtattcttgtaaaaggaggtggagatccatgaaaatttctgttaaaaatggaactaaagttaatggtatggcggtgatgtccttgaaacggtgtgaagttgttcaagtttcaattcttgtttatatacgagcagatttctatagctattttttaagcacagggaaaagttcgagagctatgtttgtaatctcgtttttgtttttagtcctattgcttctcctcttagcaaagttttcgtaccttcatatatttctataataatttattttggacggtagtagttctgcttgttttactataagcatgtgggtgaggattctaatagtaaagacagacgactttcattacactttttattctacaaactaaatcaaaagaacatctgaagacgaaacattatgacaagcaaactatggggactaaaagaatattctttaacaaaagaaaatgtcggtacggcttttgtcttcagatttctattgctgtaagaaagaggttgaggaaagaaattccaactgaaaggttgttagatgatatgacttatgagccatagttgtttggtttctactttctttggaaacgaaaggttgatgacttatttatatatttaatctgcattcttaatcctattctacatgtttttctaagtatgattggtgattagttttactatttaagcaagcattctcttggctggatgttcattactcaacacaggattaatgctgaaactacatttctgcagtttcctaaattttattttgtttttgctttggaaccaaactttgctagttgctcttttcaaaatactagcctcttattcttgctgatgttacaggagcatcaagcggtattggctctgaaactgcacgtgtt

SEQ ID NO: 65026 - DNA, 537 bp, Cucumis sativus
  Intron number 1 from transcript Cucsa.242070.2 (locus Cucs a.242070) derived from phytozome v7.0 (chr-ID scaffold0204 7; pos 1900540 to 1901076)
gaccagttggtggattattttcagatatttggattgtaagtgtatagaataatgagggttgctttacgctttcttgatttatgttaactttgtattggttgctgaggaaagtgagtagaagttggaatttgattgtctgctgattatcggaagtgatgaaagatttgaacttagggcttgatgggtcggtctgttgtaatccattttctttgaaacttgttgggctcaactcgaatgaaagttttctgatgtattgattcgttacaaagcttctctctctgttctatcctgtgtgaatgtacctcttacctctaattactcaaggtccatggaaaattgggataatggtttttctttttaatttggagaattgatgcaatcaactggtcatgtttcttatcttaaaccttcaggctcactcgctggaggacatatggaatgtcttctctgactcattgctagttggtgggttatagaattcccgaacgaagtgatgtataattagaattcttaaatctttttccagggaaaaggagt

SEQ ID NO: 65027 - DNA, 770 bp, Cucumis sativus
  Intron number 2 from transcript Cucsa.142810.1 (locus Cucs a.142810) derived from phytozome v7.0 (chr-ID scaffold0107 9; pos 1028313 to 1029082)
cgttgggttggagagcctcaggttgtacatgtgtctaagtaaattatgttcatattgacaatcaaattgaaaaggacaaaacttaatatttttcatcaaaatttgacctatattataccaaagtagataataaaataatgaaacttataggtaaaaacgaaagtattttcaaggttaacaattttatttaacaaccatctctttctcccttttagaatttggatatcgaaatattttgaaataatatattctcacaaaattaattgaaattgctcaatcaacttagctaactcatctttttaacatctttttaacatttgtcacctcatttgctttcattagttaactaacaaattttagaactatttaaaaccatttcttaaactctataaattaaagttttcattttaaaattttgagattaaacacatacatatggactagttcattttataattttaatttttagccaattttctaatggaaatatcaattaaaattttagcccaaatttaaaggacaacaattttagcccaaactagaatatatatcatcataaaattaacaaaatatcataaagtataactattttattataactttgaaaccatataagaaagtagataataataaaaattcaaccataaggctaaagttgatttttattttcttgaaatttgtcgttagtatatttgtttgattcatgtaaaatacttgagatttaaatctaaaatttcttttcctcttgttattgaagaccatactcataa

SEQ ID NO: 65028 - DNA, 695 bp, Cucumis sativus
  Intron number 1 from transcript Cucsa.215290.1 (locus Cucs a.215290) derived from phytozome v7.0 (chr-ID scaffold0159 3; pos 84852 to 85546)
cgtaagtaattctaattatctctttatagtgatatctaatcttcaatcatttttaaattcaatcttacaaaaccctctttttctccctttttctcttaactttcagcttctgatttagtcaatttactcttttcttctgctttattacaaaggaaatagggcacacagttttagtttttcaacagataattagttaaataagtagtgaaaaagatgataacttttaagaaaagcttgaagaatattttggggttttttttttttttcataatttaatcaccaaaagttttagctccttatatcaaacaaaccctttttttatttttgaagtaaaatttcaaatttcttataccaattcttgtatcttgaattacttaattgtagctgtcattcgttttcaagaaattttggaattcttcaagtggttatgatcttgatgtaaattagggtttttgatttgtactttgtccaatttcttcaagtaaaaaaaattgacactaaatttgagggttttgtgtatgatgatatattattaattaattatatatatatatactttcttgacaaagctaatgctaatgcattgtcaaatttttacacattatttagctgcagacaaacatgatgagagacataatatgattaaaaattctaaagaagagaattcaccacctccaaaactagcagcaggttca

SEQ ID NO: 65029 - DNA, 757 bp, Cucumis sativus
  Intron number 1 from transcript Cucsa.136040.1 (locus Cucs a.136040) derived from phytozome v7.0 (chr-ID scaffold0104 4; pos 797061 to 797817 reverse strand)
cagctgcaggaagaggacaagttgaggtgatctatattataatgcttgtcgttttcttactttattattcatttttcatgctatacctccatggatgcatccatgtttcttatgattattgtgttatattcatgtaattctcattatgttctattttaattgtttagttgcatttagtttctgtcatttgattaaatctttcaaaatctagtacattttgtcaaaaagagctttgctcaacttgtatcataggtgtcacctagaaccaaagagaatcgaaaggtctaaggtttaaattctccaaccttatttgtactaacaaaaaaagatgaaaagaagagagtgcaatttttttttaacatgacaaaaagggttgaattttcctttcagataatgaatgtgtggatagtaaactagctagccggctaggttttcattacctattctactattttttgcctctttggagttaaaaatttggggtagagaatttgaatatctgatctcaatctccaaaataagaaataaatacattttagtgctgacatattttacccgttcaaactttagtacaatcgactttaagataatatggaaatttaaatttcacacgtactttataacatctcattgcctctacgacatttaatgaaaaagataatgagggtagggaattgtttgactcctgagcgtgagaactgaaactttgttgactattgcaggtacttaaatatcttgtccaaacattccctatcat

SEQ ID NO: 65030 - DNA, 604 bp, Cucumis sativus
  Intron number 2 from transcript Cucsa.155260.1 (locus Cucs a.155260) derived from phytozome v7.0 (chr-ID scaffold0113 6; pos 38856 to 39459 reverse strand)
ctggttgaaaggcagtgggaagttcacgctacgtatcattcaaatttctcttacaagggtgttatttatttaagcattccactgcacatttagaacaaagatttcaagaactgatactgctcgttgctagtttattgatgtccttccacatttcgggttcctgaatttccctattcgagctgaactacagctctgatcagacattgcacgtttttctgtatccagaccgaatgtccgtagttactaagaatttactagagctcggatttataggtcctttatgtggcatattcgtcaatacatcttgctagcgaagggaattccaaatagtatcaatgtcttcccttttgaacagaagtttttttttttttcagtaggtgtttaaccaattgaaagtagaatggcaaacggaagcttggtgcaatttacaatttggatcatcaaagcactaaatgctgtctacaatcttaatgatatatgttgtctttgaacaagttgtacagctttgattttcaataaccgaacgatgtgcaacttattcacttcttcatttgttgattgattttacatatgtaggtttatctgtggcatacttatctggtag

SEQ ID NO: 65031 - DNA, 560 bp, Cucumis sativus
  Intron number 1 from transcript Cucsa.206800.3 (locus Cucs a.206800) derived from phytozome v7.0 (chr-ID scaffold0144 1; pos 2495 to 3054)
cgtccatctccaatctcaaatcttgatcctcctccgtaagtatattaacattttgtttcttgaattttttaataattcaaaacatatttttttacaaaatgttcaatccatcgccaaaatgttcaatccatctccatttacaaaatgttcaacccgacaacccgtaaaatatgggttggattgaaaactaaattcgggttattcgggttgccaacccaaataatcagaaaaatatgggttgggttgagaatgtctcccaacccaacccgttttcacccctaattctacctcacaaaaataaagggaaaataaatcagctaaacttattacaattattttatttatttagttttggaggaaaataaagctaagtgagggaggaggagaacacttgtaaaataaatataatgaataaaagaaagcgaaaaaccctaaaccatttcgtaaaatcaaaataactctttcatcatcatcgttttcttcttcttcttcttcatcttcacgccgtctcctactctgtttcagcagatcggtttcgccgccgccgtcgtctttcttac

SEQ ID NO: 65032 - DNA, 530 bp, Cucumis sativus
  Intron number 3 from transcript Cucsa.185100.2 (locus Cucs a.185100) derived from phytozome v7.0 (chr-ID scaffold0127 4; pos 684480 to 685009)
catacttggcatacttgcaagtaagtatgtgaagacaggtttacctagtattctttaaccgtcgatcagtcaactaacatgttgacttgctatttctcattatcgtctccactatttgtatattgttagataatgattagatatctaacgctttgtaaggctggaagatatttcaattaagttaaaattctttcaatagcttgttattgtgcacgatttttcacttctttttctgggaattaaagtattggggtttgattaagctagacaaaataggcattagtatccctgttataattatcttgcatgatagtttggaggtgttttccggtgcgttggatgtacctattaaccagcttaatttgtctatgcctatgttttattttcatattcttcttcagacagtctattcctacaatgacgcatgcacgctattttactttacttatttcttttagttgcacaaaacttaatttagcgtccttctacttatgtttctttattttaaggtgacagtggtaaatcctgcc

SEQ ID NO: 65033 - DNA, 937 bp, Cucumis sativus
  Intron number 2 from transcript Cucsa.253600.1 (locus Cucs a.253600) derived from phytozome v7.0 (chr-ID scaffold0222 9; pos 2147483 to 2148419 reverse strand)
agtctgatccatccttcgacaaagcggtccaaattgtacaccattcttccctttttcccttaaaaaatgggatttcattgttttatgatctgctatcaattattatgtgtataaaacttcctattagcttggaaatttttttcttcaatgctcccccccaccccccccaggtttctagattttgttgatttttacttgattggtgtggcaacttgttcttcccacattttatggaactaggagcttgtatcctttaatttttttcttctcattcttaattatatatctatatctctatatttttggctggtgggacattctgtacttagtttttctaaggaggggttcacaaagctttttcacattcttttctttttgactttctgtttcaagtcgttgcgtttggttgttagcaattttattctaatgttaggttattctgatttgttatggcaaaccttattttccattaggtatattgtctattaagggtgtccatgttttccaatacattcatacattgattttttgttattatattcttacaaacatagtgtttttgtgtctatacacttcattattaaaacaaatttaccataagggtaagtaagaaacgcaactcaagctagagggctaggaagatcaccaaaaagttcctcaattaggcatgatatagagggaagaatgataaaatgtcaaagtgtcgggaggtctgcagggactgttaaaatggcttcagttctgaatttttcctacgcaaacccttgcttttttgtggaagtttcatggattgtttttctgaggtttgagcatctagattaatgaccgatgttataatttgcagctatttgttgagaaacggtcatcacgtatatgattcagttccttttatgttcttgtaggataactggtgaagggctgttattggcatctgatt

SEQ ID NO: 65034 - DNA, 482 bp, Cucumis sativus
  Intron number 1 from transcript Cucsa.253600.1 (locus Cucs a.253600) derived from phytozome v7.0 (chr-ID scaffold0222 9; pos 2148476 to 2148957 reverse strand)
atcaagttgacaaaaagtaaatcctcctctatccatagtttttgcttttttttagtattttcttttctaatttatgatttaggatatatgatgcatgtgttattcatacaacacacccacacaaccttacgtggcaatattatatgctctgatttcccatatgaagcaggagtcagaatttcacattgagatgtgtctggctctcatttcctctattgaacttttgttggctaaaattaatgcatgttgcaatactagtgatttaaggttttgtattttaagccggattttttttggataataatgttatttaatttaagaggtgagccagtcttcaaatcaaatttaattggcattccacggtgagcaacatactaggcaaattgtaatataatgattactcaacctttcaattacaatggctttaggcttatataagttttttcgtatgatttattttccaccaggaaatttaacttgta

SEQ ID NO: 65035 - DNA, 528 bp, Cucumis sativus
  Intron number 1 from transcript Cucsa.166030.1 (locus Cucs a.166030) derived from phytozome v7.0 (chr-ID scaffold0115 3; pos 1320471 to 1320998)
tttttggagctagcaatatcatcaagttcctgcaagtatgccctccatttcttttcctttttttttttaatcaaaagtttatcattagaatctccaactttcctacaatgccctttgaaatggtctaatatatcttctcatatatacttactataatattctatattcttttagatgagggattttaaaaaaggaagaaaagaaaatctatttttgtttagagtttaaggttagaaaattactattagtaataatggtaacaagtttctttggtatttctaaatgtaagaaaaatatataagaggggtatagttggatttaacttagaaaagaaaatgaattgatttgatttgacttaactaggttttttttacttttgatgggacttaattaatgtatcaattcccgtaattggtggaattttggtttaattaaactttcatttaggttagattaaaatttagttgaattttgatattgagaaaagtttacaaattttgtaggagcttcccgagtgccaaagaacgg

SEQ ID NO: 65036 - DNA, 474 bp, Cucumis sativus
  Intron number 1 from transcript Cucsa.198240.1 (locus Cucs a.198240) derived from phytozome v7.0 (chr-ID scaffold0135 7; pos 1338608 to 1339081)
ttcacagatccagagaagacagaacacaaagctttgtaaatttctggttctctgtctttgtatttcacatttttctttctataatcaatcttaatctgtttgcttcattgctgttcatttttcactcgcacccatttcagtttaccgtttattcgtttggtttttggggaagatttgtggaaaaccctggaaaaaaaagcttagtatagggttaaatttatcttgctaccattttttcttattgttcttcgtgattttgttttggatttttatggtaaatttatgttttcttttgggttttatgagttcatgtggatctaggttccttaaatcatattatatcacatatatattaatgggttgttgttgatttagtgatttctttgattgaattgaactgggttagtgttggagtgtatgtgtcgatcaggttcactgatttggatactttgttatgtttatgacagataattg

SEQ ID NO: 65037 - DNA, 803 bp, Cucumis sativus
  Intron number 1 from transcript Cucsa.137620.1 (locus Cucs a.137620) derived from phytozome v7.0 (chr-ID scaffold0105 3; pos 382439 to 383241)
agagctttaaatctgtccctgtttccgggaacgaggtattattccctttatttctatttcacctccttttttgtactttctgttttttcctttatttcgtatctgcttaagcgtttattttgaagaattattccttaatcatgcctttttctatccgtttattaagcatacttgacttgactctggttgatatgatagtttgttctgtctttcatatagttggaaattggataaaagataagaaatgcctaagggtccacattgttcacttcatctaactgcttttgtcttatctgtgcggattattgggcttctctggatcatggacactattatagctttaactgaagttattctcattatgaatttccaatcagcacgcccttcgaggaaaactttgtgtaagttgtacaaattggtttttgatttgtccaacccatggttaaactcgtcatcttcttaaacaaagtcccaatagttttttattcgtctttttcctcctgttcttcttgctgtttctctttaacaattcaatagttgaagacactcgcaggagacttttatttgagtatcgttctgtggtaattgacacttactcccttccttgaagttggaggtttttatccctagattttggcttcttgtacatataatgatattaattgcatgctttggatgcatttgcattttgtagtttcttcaataatccttaaattgaatattgattaaacaaaaaggtatactaattgagatactgtttttcaccaggaaccaaatagaagtgcagtgattgactcctatat

SEQ ID NO: 65038 - DNA, 684 bp, Cucumis sativus
  Intron number 1 from transcript Cucsa.299200.1 (locus Cucs a.299200) derived from phytozome v7.0 (chr-ID scaffold0291 3; pos 4248 to 4931)
tagtaataagactttctttgttggcgataggttaagtaagtaatcatatatatactctacattttaattttaacttccaaagctttcctaaatttctattagatttcaattatatatattcctaaactttgaaaattgttctgaacgattacataaacctcttagttctaggatagaaggtaataccaactttcactttcacatgttattatttacaactatatatataatatttggattattaacattttttttattgtctcaaaatgtatcatattataaacacttacgtaatccatttttacacttcaaccattgtgtcaaattagatgattaaatgttgtatacaatgccagttgttgcatgaattttcatcattttgtttatgatgaataaaagaaaattaaggataatttggaagataattagtataattcatttaatatttgtttacttgctaacttagattaattatattttagaatactaattagttaaatgttttattttcttgtaattggctataaataaccactagaattgtgaaagaaagctttggatcatcaatttgaaatagaatgtccgtccttagatatttaactgtcatctcaagggattaaacttttgtttgtttatagatttgacttaatacttttctcaacctagggttcaattcaagtgcaa

SEQ ID NO: 65039 - DNA, 1047 bp, Cucumis sativus
  Intron number 2 from transcript Cucsa.174820.1 (locus Cucs a.174820) derived from phytozome v7.0 (chr-ID scaffold0122 1; pos 595102 to 596148)
actgcactttcaggttattatgtatttctcatatagatggatgtttgtcatatggatattgcactattaatttctgctacagatttcagtgatgtgttacacttgaatgcttatcctcattaatagaatagtctcatttttcttaaatgatcgccttcttagttgtttttattgaatgttttgagcttccacacatccaatattgtaattgtgaacggtcttggagtctctagcacatttgacgtgcttatttaggtatatttctaggctacattgtgatcctttcaccagatgcttagggtgacgatcagtcgtggttgaagtcacagttcaaggtagaatatgtaattaggtgattttgatcattattcattactcatcttatcctagtccaacttgttctgtctctgtacatgtgtgtacactaggatgttttccttcttagctatatgcccttagttgtgctagtagtgttgttagtgagttggaattagtaagtccaggcattcaaatattttttccagattgcatcagttttaacgttcacttttttaaaaaaaattaagacacgagaagttcaattctgaagctgaattttcaatgctcgtattgtttttaaaggtctggtgatgttttgttccttctctttggtattctatattagatgtagttgtttacatgcaaagataaatttgtcactgagatatgatataccaaattgctatatatgttgcttctagcatttgcttgattgaggaattttctcgataatcgtggaaacaaaaaatgtgaactacaaatttggtgttttggaatgtgagtttcttttcattcccctttgatggcaaccttgttactacaaaaaggaaaggaaaaagaaagaaaactttccttgttctccatgtttagatctctgaattgtacaactggtctgcagttagtattccttggcttttgcgcttagtgtttcattgcttcgttaatttattccatatatttgtttttttttcagattctactttgccttcagaaaaggagctgagtaca

SEQ ID NO: 65040 - DNA, 338 bp, Cucumis sativus; identical to SEQ ID NO: 63727
  Intron number 2 from transcript Cucsa.284360.2 (locus Cucs a.284360) derived from phytozome v7.0 (chr-ID scaffold0265 3; pos 1174095 to 1174432 reverse strand)

SEQ ID NO: 65041 - DNA, 1009 bp, Cucumis sativus
  Intron number 1 from transcript Cucsa.237700.1 (locus Cucs a.237700) derived from phytozome v7.0 (chr-ID scaffold0202 3; pos 479706 to 480714 reverse strand)
aagcataccaacgaagatatcaaggagtgtaatatgtaagttttgagaattggaatttggaatctgattggttttggtctgatttacgttcttgcttgtttaatttatgtgtatttttcttttcattggaggtgatcaatgtctgttttcagggtttatgcttttctttatctctagttgttgaatttttttaagtatcatatgcggttcatcgatttcagactggaaaatttatttcattttgaactctttttcatttatgaatttctgttgaggatgtagttttctttaatctttaatatatgaaattatacaaacaaaatctactctcccaggggaaatatacaaaagaacatcaaattaacagttacataagtctcctcctgatttttttttcattctttgtcgttcttgaatttcttgttaactgtaaagcccataaaatggtagctgcattgatcgaacgagtttttgagccttttcttcaaaagtttttgccacccaacaactatatcattgttttctaatggatcaaagtacataggaaattgttatctaaaaaaagaaaaagaaaaaagggacctaagagagagaaaaatattgaaaaggaatatccctacatctcttctatatgagcaaagtagtagtagggaatgttgggcattgtttgtatgcacttctttgatctttccttcagttttcccttcatcaatgaaattaatgattcttaaaaggatattcaagttttaagtttaagctatgtgtatggctgtattatgaacatgagtgatacatgtaaagttgatgttatcattagacatatttacagcactggatcttgaggaatccttgttcaagtttctacaaaatctattgcaatagcatgatattttatgttaatttctgtagtacatctttttacacccatttttgtcctttcagaaccatgatgttatacatctaaaggctaaacgctgtaactgcaggtacaagtttggattctgtccaa

SEQ ID NO: 65042 - DNA, 1007 bp, Cucumis sativus
  Intron number 1 from transcript Cucsa.140620.1 (locus Cucs a.140620) derived from phytozome v7.0 (chr-ID scaffold0107 1; pos 567409 to 568415 reverse strand)
ctgctcttaaagagagttctgccctcgagttcaaggtctttctctatatcatattttgtgttttggcgagttctatgtaagaaattctactttctggtgacttgaaatgattggaaattgatgttttggcttttgcggatgacttcattgttttgttaaccgtggtttgttaaatacttaaattcatgtggtttggttaattgctctaaatccctacgagttcggctgaataattatgttacaataagttggacatgaataaaagtgattgaactgagcttgtagtcctctctttttcgattttttgttttaaagtgggtatgccaatgttcaatagtacttcagaaggtgatcacttgaaagtcttggtgtgataatttattattcttctgttgtttttccagtcgttttgtattctttattcttcagtatgagtattgtgaaagtacaatctgatggtggtggcttttcatatgtttgttactgaaaatttggtaaaggctaatctgtgatgaggaaattaagtttctgaatccggtaatctattgtttgaacttgaaatttgaatggaactgaagtttggtcatgattgggagggtttttaattagttaaaaatcactttatcatcgacaaaatcactataaacatatatttaatcgttcaaagcagtttactgtttggttttatacttttgtacacgttgttcatatgattaaaattgatcataaatgattaaaaatatgttttgaagtgattttgaacatgcctaaagcaattttaccaattcaaaatcactagaacatgacctttaatgctcaatgtctcaatatcatttgataaacaagtttaaatgacctctatcaatatcagtctccgtgtggtgttggtagacactatcatttgataaacaagttagaatgaactctatcaatctcactctccgtgtgggtagatctggttttatcttttaagtttcatatttttttctctttgcaggaaaagggga

SEQ ID NO: 65043 - DNA, 866 bp, Cucumis sativus
  Intron number 3 from transcript Cucsa.140310.1 (locus Cucs a.140310) derived from phytozome v7.0 (chr-ID scaffold0107 1; pos 117226 to 118091 reverse strand)
ctcctgcggaggatcttcttgcatctgttttaaaggcatgattaattcattcattggtgttttttatattcttctcaagtattaaattttgtattggcttgtttagtttcacgtatatgtgttgtttaccacttaaacttgttctcattaatcacctggaaatcacctactagtcaccattaagatcttgatgaagctagaaacttttgaatggtggtccgtaggaagatttgtactcacactctgagcaatcattattccttttctttttatgtatgctttttttttctaattaagaaattgaagaaaatgaacttttttcaatgtgtgtattttgagaacgcaccatttctttccttatttagttttttagtttaacaatttttcattggagattgaactgctgaccttaaatgagggaatgcctgcaacttacagaaaataagctcactttggcagtggttgttgttgccaccatttgaagtcgccccataaagttattcaattctgaaccccctaagtaatttcatttgtggatgggcatgtctgtttcaatgaattacaacttttaggtatttttgctttaatagcaaaatgtattatgacgttacaccatcatttccttaatcaatattgacgtttcatgacaaaatttggcttgattattgtaaatatagcaataaccaatgctttgtgattagtgatgagagtaaagactcaattcaatattctgccaactacttaattaatctttgtttcatttgattattttcatagatctctcttgaaaaaaaaaattcaaggttctcgaaacattgattgttgatgcaggctgtgattgagaaaacaaagttgaatccgattga

SEQ ID NO: 65044 - DNA, 824 bp, Cucumis sativus
  Intron number 1 from transcript Cucsa.284910.2 (locus Cucs a.284910) derived from phytozome v7.0 (chr-ID scaffold0265 3; pos 1475612 to 1476435)
catcatttccgattgcgatctgattctccggtaacgtaagtaactcatctacaccttcttccccatttttttaaatcctgaaatagatcaacaatcgtcaatttaacgacccagaagcgttgatttttcttgtattggcaatgttcattcgtttcgttaggcctgtggaagttcatttctatgttaaatgtgatcattgtttcttgctggtgaagttcttattggtttagatttagctccattaatgaattggattggtttttgttagacttgagaggaaaggattgtggggtgaattgggaattctttgaatctggactttctttttggatttgattaattacgtgattgaatttgctatggatgattgtggaaaggaaactgtacgattgacagagcatcataaatcgtaagatttattccaatttgaggtactttattttgggtcaataacgatatgaaagaaagctttcactttgtcgttttctcgtcggttccgtatttggttgatatcggtgactttatcacacttctctgtaatgttcggcacctggaccaattacatcattcggatactggaaaccgtaatatttgaattgattttgacccgaatgtttatctgggggtgcttttgttaaaatttccattttaatcggtagtgctctctgtcaaagtgcaatttacttggggtttgttattactgttaatgtgaggggtattttcttttagtccgtgattgcagggtagtgattttttagcaacctttttgacttattttattatttgcagttatataccgttcattttcaactataatttttgta

SEQ ID NO: 65045 - DNA, 694 bp, Cucumis sativus
  Intron number 2 from transcript Cucsa.282950.1 (locus Cucs a.282950) derived from phytozome v7.0 (chr-ID scaffold0265 3; pos 230240 to 230933 reverse strand)
catcgcctttaaccgtcgtggtactctcctagcaggtacccatggctggcttagtttgttcgtgattagaagtgctttgttgtcgcttataggaagaagattttgcttttgcttttgttgttttttgggtttttttgctgcagttaggcctgtttctgttcgtgttttaattgttagtaaccgaagttgttgctctcgatgactttatatcatagaatggagcttttgttgtctattcttcttcttctcttttttaacagtcactgttatttgatgaagttacttacaaaatattgatttctgtaatgactaatgattacgcgtaagaatgagttcatgcgggggtgttgaaatattcaatttttccttcttatctcctcagcttgggtaggtttctatgttcttacctgcgtttcttcacctggacaactaatttcgtctaggcggtcgaatatgcatgattataggagggaatcgagggatacagtatatatataaattctatagttcttctacatttctcaaagacaatggacagtctaattttgtgttgttttttggtcaagctcagataaacatgttaagtttcatgtcacactaactgatactggggtcgattacacaagctttgatggcagccatctaggtaatacccgctaaattttattgctttgttgttattgttgacagctgg

SEQ ID NO: 65046 - DNA, 927 bp, Cucumis sativus
  Intron number 1 from transcript Cucsa.166350.1 (locus Cucs a.166350) derived from phytozome v7.0 (chr-ID scaffold0115 3; pos 1562185 to 1563111 reverse strand)
aaatctccattagctctcaagctactttcggtaaatttcccttttcttttcttcatttggttttccttttcttgttatattaaattcaattaaatcacttttaaggctatttttaaaaataattaaattaaatcaactctatatagtctattgaaaaaaaaaaattctatattttataaatagttctattttttttcgtcattcaagtttcattactagttgttgatttaataaaaatatttaatttatgttacttttggtgaattttaggcagttttgtaattatttgttttaaaaaaattaaacttatttttactttcaattttatatctacatttttagaggcagaaatagaaaaatatcgttgtatgtatagtaaatagttttgttttttttttctatttttaaccatttttttatttagtaaattttagttaaattctaaaattaaaaaaaattaaaatatatctcttttttttaagttttcaaaactcagttagtaaatactcacactctctagacttcaaaatcaagctaaatcttaaaaacttgtttttgttttataaaatcgataataaccaaatcatctttttataactgttatatcgaaatgagtgaaaacaggcttaatttttaaaaatataaacgaaaaaatcaaacgactaggttaaaagagtatcatcattttcccaacttcttcttcttgattttcatcacccttttaagacaataaaacatatataaatgaatggatacaaaagtgatgtttatagacttaattttaagaaacaaaacaattagcaaacacaaccctttgaaactttgtatggtatttgtgaaactttgtatggtatttgtgagtggaatgataaaatagaagtttaatgtgaaagaaatgaaataatatatgcaggggaattgaagaaa

SEQ ID NO: 65047 - DNA, 784 bp, Cucumis sativus; identical to SEQ ID NO: 64139
  Intron number 1 from transcript Cucsa.300660.2 (locus Cucs a.300660) derived from phytozome v7.0 (chr-ID scaffold0293 1; pos 196685 to 197468)

SEQ ID NO: 65048 - DNA, 410 bp, Cucumis sativus; identical to SEQ ID NO: 64202
  Intron number 1 from transcript Cucsa.167560.3 (locus Cucs a.167560) derived from phytozome v7.0 (chr-ID scaffold0115 4; pos 944127 to 944536)

SEQ ID NO: 65049 - DNA, 442 bp, Cucumis sativus
  Intron number 1 from transcript Cucsa.239760.1 (locus Cucs a.239760) derived from phytozome v7.0 (chr-ID scaffold0204 6; pos 629822 to 630263 reverse strand)
ttcccaccggctgggagaaaagactcgacttgaaggttcgttttcttttcttttttaaaatttcttctgttaaaatttttccaattggttatggaattaagtcaatatttgtttgagaaattaggcataggctaaagaaaaagaagaggggaatggaaaattgtttcactgtacttgtgggtatggttttatgaagaagagactgcaatttttatttttaatgacattaattgcgatgcttcattttttatatatatatttatatgaagttttggtactcctgattaattatccattctcctctggaatcattaaatttcttctttttcgtatgaattgaaagcaaagcagccgtatcattaaactttgattttttaaaataattttggtgtgttttgtttatgcagtcaggaaaagtttacatacagaggagtcaaacgcc

SEQ ID NO: 65050 - DNA, 833 bp, Cucumis sativus
  Intron number 3 from transcript Cucsa.152030.1 (locus Cucs a.152030) derived from phytozome v7.0 (chr-ID scaffold0111 9; pos 324904 to 325736)
tgaaaaggctttcaaggaaagacccaactaccaaggtaatttgtatatatttatctgttgttttttctctaccatgaaacaaggctcttcacgaggaattaagtcgctagagtttctgacgtatgagtaagaatgcgtttttatgttgttgagagatgattgacatttctcttccaatgtgcaacactactccatagtctccgtgaccagttaagaactatcaccggactacgtaactgccgtctgttcaaaacatcagttgtcttcttagtggaaataaaagagaaaccaaactttcatttttctcactgaaagttgttgcctttataaaaagtgaaaggaaaaaaaaaaaaacatggtctggggcaattttttccttttctatctaaatgctgtattattcttgtaccacttctcattgtttggaggagtggttgcttcttggaatgagattctttttgatcacacattcctctctccctcaaattcagaatggtagcacaacgatagtaacaatggatcaattgcaatgtgtaattttatcaagtgaaaggtgaggtgtagtgcaggaatcttttaagttcaaagttagtcagaacactcctgcatttgaaagcaccattgtcaaccaagtttggctcagtcttttgcatcaaattttcacttaccatacatattgtagaggaaactttttgagcttctacggtgaatgatatgcacatttttcttttttatttttattgttgaaactataagggccctttattaagaactaatttgattttagattttcaacagcttaaagcattggcctctttgtctgagattcttaa

SEQ ID NO: 65051 - DNA, 731 bp, Cucumis sativus
  Intron number 1 from transcript Cucsa.249920.1 (locus Cucs a.249920) derived from phytozome v7.0 (chr-ID scaffold0221 9; pos 75695 to 76425)
actaagtgagtataatgttttgattttgttttagagtgatagtgcttcataatggatgatcgaagatgaatactctggctactggttgagtaatttcttcctcttctagtagcattcctcttcagctcatcggagctgaatacttcagtagataatggcttctctatgcacattattgctttattgaactctttttccctttgcttcaattgtgtactgatttaacgacatttctgtttgcatttctgcaaacaaatgaaataataatttagcgtttgtgagattttcaattcaatatgcagtataaacaaggtcattccctggtcacaacttgttcttccttactgcgttctgtccatgcgtttcgttacatattttagctttagttgattgagttttataaatttgtttagttgtttgtgtttgaaagtttgtaagttcttgtttatttttatgcattttgcccaattttttcaattgcattagtcttttatcttcggtttgataagctttagttgattggatcaataaagttgtttatggtttggtttgctgattaacattgaaccacatctttttcttcttttggccattgttgttaatgttctatagtttcaatggtgtgttgccaaatgcatagttcaagtattatcttgtatttgttaagattgttcttgcgtatagattgatcaatcgatttcatttgtaaaaatgtaattatggcgcagggc

SEQ ID NO: 65052 - DNA, 509 bp, Cucumis sativus
  Intron number 3 from transcript Cucsa.232510.1 (locus Cucs a.232510) derived from phytozome v7.0 (chr-ID scaffold0198 9; pos 436900 to 437408 reverse strand)
gtatagaacagtgaaaagcactgacaaagccactggtaaattactatctttcctttattattattttctacactctcattttgggcgttttcttgaattcattttaaacaatactgaaaaattacaagaaatatatatagattcatttaaaataattgtttctagagtttgagtaaaaatgaatatgtttcctcaaaaaatttgtgtcatataatctttcttcttctgttaaatttttaactctcatttccggagttttaattttcaaaatttctttcataaatttatgggttcttttctttcctataaaaaagatttactgtttgtgtttgtttatatatatatactaattttacctctgagttaacaatgttttcaatatccacgaaggttctataaaaaaatagactgcttatataaaattaaaaaacacaaatttcaaaaccatttgatttagggttttgaacctttttttttatttatgaaattctaaatctgcagactcagcc

SEQ ID NO: 65053 - DNA, 879 bp, Cucumis sativus
  Intron number 2 from transcript Cucsa.184820.1 (locus Cucs a.184820) derived from phytozome v7.0 (chr-ID scaffold0127 4; pos 493834 to 494712)
ggttagttactattcttcattatcaaatactttgtataacacatttattatactaaacattctaactatttggtttcaaaatttagattctaacctaatcattttgttttgattcaaatcttttatgaattgcaatacattatgataaacaataatctatagatttcaaaggttttgttatataaaataaattttcatttattaataatggaacaatagtgtttacaaagttcaaatctttttagtattaaactatagtacaaaaatttaagtaaattaaggaagactatcacctaatcattaattataaggtttcctttatagaaataataaaaaaagaaaggtttcatttttagagataattaacaaaagggtttagatcactttttccatttttctaaaaaaaaccctataaaaatatatttaatttgatgatatgaaatatgtttttaaatgattttatatagttgtttgggtttaactatgaagtgattttaaatatttttttacatttctacacaacttatttaaacacttaaaaaagtcaatccaaacatatctgtcttaaaaataacaaaagtgattttggttattcaaacttgaagagccactaaatggaggtactaaatttcatttattttccgctttttttattgaaacataaatagtaaccatttactgttccttttcttttctccaaaactttgaaagttttgcatagttcatttgtatattttataacaatgctttgatctatgttttcgaaagaaaaaaagaagcaaaaagttataattattaaagggtagtaacctaactagcatttacacatgacaatgacaaacaggataattgtacaagaagaggagttgttgagaatag

SEQ ID NO: 65054 - DNA, 743 bp, Cucumis sativus
  Intron number 4 from transcript Cucsa.143250.1 (locus Cucs a.143250) derived from phytozome v7.0 (chr-ID scaffold0107 9; pos 1570912 to 1571654 reverse strand)
gagggagctcaaggtcatcaactgccatttaagaagtcagtgcatttctatcgaatcatctttaagcaatgggatgtgaattgattgttttattattgctattactattattttttctttctggttgtttaattcaactctttactggtttttttgttggggtaaaagaattcgcatctctataagtactcattttcttcttttattttcagttcatcggttgttaacaagaaccaagacttttttcttcaaagggatatagttttgatttttttcccctttatctttggttcaacgattattattatacgaaaatgttcgatttttgattctgagtctctctctttttttttcttttaaatcctagatagctgtgaagtttttaaatttaaattgtagcgtaccttcttcagttacccagatcctgctgccaattcctgaaaagcctatcattttgaggaatatataatgtatagaaaagaatgacgtgttttctgtttatgtatcatttgattagttcttacatttttattttctttcatttcctgttttttcatctggaaaatcattcttcatgcaatttaagtgattgtagtacttcttacttcatgaatcttatccatatttatcacctttcctctcttctccctacaataagactaaagaggaaagggggaaaaaagaagctaattttcattcttttgccagacaaggcatatctgccgtggacttcgacaacaagg

SEQ ID NO: 65055 - DNA, 527 bp, Cucumis sativus
  Intron number 1 from transcript Cucsa.160580.2 (locus Cucs a.160580) derived from phytozome v7.0 (chr-ID scaffold0114 4; pos 735948 to 736474 reverse strand)
cggacacagctcgattttgtcaagttggtttctcggtaatggttattgttttgatttatctttttccaattctgtgaaagcttctatatagattgggcaactggatttagaaatttttgtctatcgtactcatatcctaaaaatattatatatttcattagctatttttttcttgttcttctgtcttgattctacaatctggaaacttggtcaaaaaccttgaagaatcttagatgattcctgattttcaaggcctgaagtggtcaaacagagtaatctctcttctttttcttccttcctgagcttgtgagattctttggatacattcaaaactccatcgtttagtctattatgctacattaaatgtgatgaaattcgattgtttctttcttaatttcgttaatatcggcaatctatgattgcagcaatctcgtttgttgtcgtttcgcaatttgatttttcggtttcttcctgctttcttatcctttacagggaaaaacttgctccatttcacatctcatacttta

SEQ ID NO: 65056 - DNA, 694 bp, Cucumis sativus
  Intron number 1 from transcript Cucsa.288790.1 (locus Cucs a.288790) derived from phytozome v7.0 (chr-ID scaffold0269 8; pos 326742 to 327435)
tggataatcttcccactgggtaattttatcttctttctcttatcctgttttttgtttcttctttttgggttctgattaaattggtagaaactttgaaaaagtggatgatattttgttttttcatagtgaactttgatatgaacttgggttttgtgaaattgaatggtgaactttccaatgaagatgaatctaaaccctttcaggaaaactagcaattcaactgaaaaaagttaaattttccctttagttcaatcgttatttatgtctttttaatttcaatgtagtaccaaatggcatgcttgaagttctcgcggttcattttgtcaataatgtactagttggagtgatcaagtatagtttgaaattggtagaagcttcatttttttttttatagtgaactttaatatgaactcgaagttttgtgaaattgaatggtgaaccgtacattgaggatgaacctgaactcttccaagtgaaccggcaattccaacttaaaaaaagtgaaaatttatgtattttttttaaatgtagtgcttcatttacttaataatgtaaaaagatacagtgattaagtatagtttgtcatctcattacttgttgtttgatgtaatctccatctttccgattgctacaaaaactgaagaggatttttttttcttcccatttcttaattttcttgtcaatactattaggg

SEQ ID NO: 65057 - DNA, 638 bp, Cucumis sativus
  Intron number 1 from transcript Cucsa.201170.1 (locus Cucs a.201170) derived from phytozome v7.0 (chr-ID scaffold0137 4; pos 116580 to 117217)
aatcctccgccctgcttcgtcctgtattcaggttccttcttgccttctttattcatttcgtgctggaattttctaattatcataccttgttcacgtttacaattgggtttgccgttgttagaggatatatgattatgagttaattaattccatagggatggtccttgatattcagaaactagctttgactgccccttgggatgattgattttatgaaaggaaaagaaaaaggcctagaatggaactaaaaggttacaggaaaaggaattcggttttgaaaaagtcaacttgtccaaagactgcgaaccattcttaatccaagtgttttctccttttaggaaaagtaaatttaaaattgaggctgagatattattttaccaaaatcaacatagctcagctagcataatgattctactatcaactttgaggttgcagggtctattctccaccccgtatattaatcacaaaagaaaaaaaagatgtttaaagcttaagaatttgaaatgatctatttcaatgttttcccggttacttatttatttggcaagaatttgttggtccatcttccgaggactgtcacaatgctgatttttgtgcaatcaggtttttagagattgactctgctgcttggtctggac

SEQ ID NO: 65058 - DNA, 825 bp, Cucumis sativus
  Intron number 2 from transcript Cucsa.184310.1 (locus Cucs a.184310) derived from phytozome v7.0 (chr-ID scaffold0127 4; pos 46734 to 47558 reverse strand)
gcggattatcgaccgggtgagtctttttaatagtgtgaatggttttgattttcatatctgtttttgagctcaaacttcattgtttttcatctgaaatcctaacttgattgcttttctatgatttatgaacttaatttgcattaagtcactaaatcttgcatgtctgtaaaactatcttctaaacttgaaaagcttcttccatcaatactattagatgaactggtagttaggttctcaagaatactaaatctttcatgtgtgcaatatgccctgcagggaatggcttgaactcccgttccttgaactttattcagttctgattcgtatagtttaaattttgggttgggtaacaagcttcgcttaccatccttagttattgtgtttttacccaccattatgatgattccaatcaagggctcccttaatgtttataagatagatgagtcaattctcttattaccaatttaaaagaagcctcatgctatctatatggtatcatatccataaagctaaaatgaatattcaattcattaaaaatttaaattttgatccaagaatagtgaacccaaaaggggtactatcttgaaaagggtcatgttgagaatgtcaaactaaaaaatctaacgacctcgtaatgtttataaggtagatgaactaatcctctcattaataaatgattttgaaaaggaatctcatgttatctaataatttgttgtcatttgattaacaaaagcatatatttattaccactggtgacaaggcaacatctctcacttcagctttcttccaggttcgagatcttgattttcctgtaaaaattgtggg

SEQ ID NO: 65059 - DNA, 804 bp, Cucumis sativus
  Intron number 3 from transcript Cucsa.256570.2 (locus Cucs a.256570) derived from phytozome v7.0 (chr-ID scaffold0222 9; pos 4164717 to 4165520 reverse strand)
gaattttgggtatatcctcctgtcacccaattagtgttttcttttactagtcaaatttgtgagagttggctctctttgagaccgtgttgtttgttatattgtacttatcactttgaaactgatagcatttacgttttgaaacctggcattcatttcatttgaagaacaaaattagttcttggtatcatctagtagcttaatacttagggctcaagataacaacgtgacatgtcggcatctgaggtgtagtattatgacttactaaacaaaatcaaagttcatcctgattacggctgtttgccatgtccattttccagtagcatatttaaaaaagaatgtaatactacagtagataggttaggtaaaacaggaaataaggaactattttagacacttaaaaagatgtgcatctgttgaaaaattctgtctggatgagcttctagtccttacacggacgacacaactccgtacaactactgatgtcttgcccatctaaaaattattctcctcaaatttacgaaatgttaaccgttatgtagtatgggattattgtaggggttttcctttgtggttgcgagatgtacctggaattgaatttcgaacagacaatgctcctttcaaggtgcatcagcatctcttaacgtatatttgtacttgctagttgattatatcttttttggagccaaaagtttggcatgtaaccttcataaatttaccttaaacatgttggtattgccaattaatgtttgttgcattgctatgagatgattaactgtagcaacacttcatcttttataggaggag

SEQ ID NO: 65060 - DNA, 744 bp, Cucumis sativus
  Intron number 3 from transcript Cucsa.289170.1 (locus Cucs a.289170) derived from phytozome v7.0 (chr-ID scaffold0269 8; pos 650346 to 651089)
ttgtcactctttcaatcttgtccgatagattgagggtacgtttttcagtctcttcttatccataacgtggaatatgctttatgatttttcttgctcgtatattccatcacaatgattcttttcaagttcacgatctgaacagtgttcatactttttcatgaaaaactatgtttaaaatgtttgattcattcaatactacttctatccaaacttatgttagacatgagatccaacattaggttagtatcaaagacctaattatcaatgacacaatgaatactgcattcttcctactccaaatatcatttctacaattgtgaatatgaattctagaatcaaaatctaagaagtaccaatacatgaaggatctcctagtcgacttgacactttttttttaaaaaaagaatgtttaagaacgtatatcgtttttattcctaccataaactcaaagtaaatgggttggtgaatctatatgtttaaaaatttagtttgaactatttcatacttaaatttaagtattctatacatgtctaacacatttgtcgtcttaaaaagtatttgatacatgtccaataaatgtaccaagattgtggccgatatgtgtcaaacacatcgtttgaactcagaatgattatttgattcttggtcttcggtattcttttatgtagtttgggaacatgatttgattgaactgcacggttgtatgttgacaaatgattttatgtcatttgaattatcagatca

SEQ ID NO: 65061 - DNA, 692 bp, Cucumis sativus
  Intron number 2 from transcript Cucsa.286120.1 (locus Cucs a.286120) derived from phytozome v7.0 (chr-ID scaffold0265 3; pos 2277891 to 2278582 reverse strand)
gcttggtgagatcgtcacaacaatccccaccattggtgagtttctctttccacaaatgtagttagtggatgatctgtctttgatctatgtgtctgtgtatatatgtagatagatagatccatgtataacctgttatttgataaggaaagcttgctgacatctcttatttctgtattatatgtcttgtattattaggattccatcatgacattaagaaacccttcatgctgagttcatagttttcttctgctcattaatgtactacactcgttgtttgtcaaacacattagacagtgaacttgtaacatttcttcttctggataaatgtttttgtaaaatgaatatgtagcttatgcagaagtaaggaggaaggaacaagcaaatgtctctcgtcactggtatatttgactgtaccatggtttcacgcattcttcttcatgttggttttacaatttacttctgcttaagcacttggttgtttattaagtttatgacgtgaaatattgaattgcctgcatattatccagttgattttgtctataaaaaaagaaaaacagtccacaacatagtcaattagctgattgtctcactgactgatgaaatactgaaacgtctcttggcacaatctactctgtagcacttgtttcagggaagaccataatttagcctatgtcgtttacttgcagggttta

SEQ ID NO: 65062 - DNA, 571 bp, Cucumis sativus
  Intron number 1 from transcript Cucsa.286120.1 (locus Cucs a.286120) derived from phytozome v7.0 (chr-ID scaffold0265 3; pos 2278696 to 2279266 reverse strand)
tgtctgtcgtagattctcggcggtgattgtccaaggtattgttctcttcccgaaattccttctcctttttcctttctccatgtgattctatagtctttctgatattgagattcttcaatttctgatggcccttgtgtttttttttttttttcaatctataacgtatgtgctttgttttgtaattcgaattaggcgtttgtttgattggtattgacatttcttgttccgatctgctttttttatggcggttttttgtggtttattcttcaattcgatgcatggatttcttggatgagcttaatatgcggtcaatttccttgtcttaaggcgatctgaagttgcgatgtgatttaccttcagatctctcagagagagcgtgagagatgtgattttgttatagtgaagatccttagctgcatttttttttttcgtgttgcacattattgtttggaactggatttctacgtgtagtattttcttgattttcattttctccgttgttatcttctctcgatcattgtcgatgtgtttatcgatctcatcttttgattcacgtaggctgtgacagaga

SEQ ID NO: 65063 - DNA, 661 bp, Cucumis sativus
  Intron number 1 from transcript Cucsa.251770.1 (locus Cucs a.251770) derived from phytozome v7.0 (chr-ID scaffold0222 9; pos 841347 to 842007)
ttcgcaataaggatcagatcgttgcaggtcttttgcttctctctctctttcttttggttgattgtgatatgctgataagttttacttttgaattttttgttgactggatgaagttggttgaatgcaaagaattctgagctttttcctctgtccgtggaactggttgcattataagaggatcggtgtatggatttggattgccttcgtgtagttggagttaattttattctatgaaaataatgatggctagaattggaagatgatttgattgttgagacagtttcgatcataatgatagtaagagaaactgctgtgatctttgaatttctcaactgtatcataataaaaaaaaaaaatcgatggaggattttttcttcagctatcaatagcgttgggaggtttcccataaaaacctttttaaagatgtaaggacctttattttcttgattgcttagagaaatgtaaagagaagaaaactgagaattccatagtgagtcgttattttttgtgaatttattgtcatttcattgttgctacttccatccacacctgcctattttctatcctgaaatatgtcaatagcttattgggtatcaactacttgtgtgacgattttttttttccttttgcagctctcagtggttcttctgtcgtgttttat

SEQ ID NO: 65064 - DNA, 836 bp, Cucumis sativus
  Intron number 1 from transcript Cucsa.241030.3 (locus Cucs a.241030) derived from phytozome v7.0 (chr-ID scaffold0204 7; pos 1210970 to 1211805)
aaggttctcttcttgcttccctttcaccaagaaaggtagacatacccttatgttgtggggtacttcctttgttttgttcctttttttgtgtgtaagttttggtttttgttcttctaaattctaagtttcttcttcttcttcttcttcttcttctcttgtgtttttgtattgaattcttcaatttgatgtctttttccccccctcaaaacaatttatttcctctgtttttggtgcaaattacagaggcttagtttacaaggaaacttaagaggttcagaatttttaagtttcttatggtcttatatgtggttgaatataactttaattatccttttctttcatatttgggcaaccgaaagaacaacccatttcttcttttttttccccccctttttttcttttcacaatgagtgtacattttgtcatccatttatccttattctctcttttatttatttttttcactcaaaaatcttttgtttaaattttttttaattaaaaaaattccctgtttcgaagctgtttttgcctcctcttttttcccatttgtttctgtctctttctcttctaactctcattattacatatggctaagaccaaagcttcttcttcttcttcttcttcatcttcctcgttactgttggatttatcaatctctataaattaacctctcactattttttccatttcctaatcctaaaacccatctcaacatttctatcttgtgtgcttctaattcctcttctctgcttcttctcctattattcctttttttttcctaaataaattctttgttttccttttcagggtttttttatttatttggaatttggttg

SEQ ID NO: 65065 - DNA, 476 bp, Cucumis sativus
  Intron number 1 from transcript Cucsa.242730.1 (locus Cucs a.242730) derived from phytozome v7.0 (chr-ID scaffold0204 7; pos 2404760 to 2405235)
gaaaaaaccaaagccaccgctcaagaaaaggttttgagttttttttcttgaagaaaaaacttttttcttttatttattaacttgcaagttgcacacgtgtttggtcgatttggtcggtttctttatttattaatttttttattgacatttctttttatttatttaaacttctaatatttttgggaactctagtatttagggagaactagagaggtgaagttatcaaagttgagattaaaaaaaatcaatgaattaattaattgaataaggaagtaataattgtaatctttttgaggacattgacgagaaaggaagggtggccggtgttgtacaaaggcttttttttaataaaaacacgtggcacgtggtaaaataaatataataatatagaatgaataatcacgtaaataaatttaaatagaaaagaattgtaatgtgaattacatttccacgcgtgcaaatgccaggtggacaaa

SEQ ID NO: 65066 - DNA, 711 bp, Cucumis sativus
  Intron number 2 from transcript Cucsa.135840.2 (locus Cucs a.135840) derived from phytozome v7.0 (chr-ID scaffold0104 4; pos 636104 to 636814)
ctcaaaccgctcataaatttggttctcaggtatgctttcatgaatttttttgctatcagttttgattggttttttctatttgaaatgataattttgattgctatataaacttataatcagtctttgttgcttctctgttaaatatttcatcgcatttaacattgcctgggcaaagatgttttgttattgcaacactagtcataacatttcgtacttgaatgtgttttctaaacttaagattatttcataacttttatatccggtcttaatttatgattattaatattactactgtataactttcatataatgccttaaatttcaattgatattatgtgatggcatttctgtagtgatacttaccccatgaagtatagaagcttcaattttattgctccttccatcacttactaatttgatcttcaagtcatcaacatcatctctctctttgttctctttgtatgaagcattttatagaactcaagaaactctttcttgaagcatttctttggccatcgagaacatgttcactcaatttccttcccatcaatcctgctttgccctgtctcctaatttaacttctcccttctcatgctcagttcttagatgtatatgtttgatctttagccaaattcattgcctgtatgaaatgaaaatgatggcattcactttgtagggattcttcaacttcacatcccggagaccacgaca

SEQ ID NO: 65067 - DNA, 720 bp, Cucumis sativus
  Intron number 2 from transcript Cucsa.308850.1 (locus Cucs a.308850) derived from phytozome v7.0 (chr-ID scaffold0297 8; pos 827128 to 827847)
gttgattctattgaagggaaggaggctattacaaggttggtttactttgatactttttttgagtggaggtctatactataagtgatggagttttttgtttcccaaaaaacgaaaaaaagcgatggagtttgtaagtcgtgtgttttttctgcttatcttcagtaagaattcttaaataatgtggaattattgtattgactctattttgtacgttttgtttttaactaagtaaaacatcaataattaaaagataattacaaaataggagattaaggaatcctccaatttaactaagtaaaacattaataatgaaatgcacgtaaaagaaatgccaaaagctttaacctgatgttatgaacgtgttatggttaatgtttacaaacacagggttatattgttaatatttttttaattacagtgtatagatgttctttttctttgagtagtacttatattttaaatcgagaaactgatgccatgagaatttcgtttttctgaaagatgttgaaattagactactgtgatagtaataataacaaacttatttggagaaacttgattcagaattatgaatatctgaatgcttatgcatttccgtgcttgtttggagggaccttttcttgacatggtataaataattccgtaccgtcgatgtgaagtggacttatttttcccttgacatggtataaataactcatggctttccacgtatgcagcatt

SEQ ID NO: 65068 - DNA, 582 bp, Cucumis sativus
  Intron number 1 from transcript Cucsa.176950.2 (locus Cucs a.176950) derived from phytozome v7.0 (chr-ID scaffold0122 5; pos 975164 to 975745)
aaggcaggtcagtgtgattcttttctcccatgtatttttgttttctgtttgccactactctaaacattctcatggtttagaaataatgaattggcactaacaatttccttattcaggtaacttgttgttagtatgagtttagtttcatacgtatctaacctgcatatcccatatgattttatttaaatttattccataaacaaatctcttagaatctgcacgtactagctgttttgaggaaatatttgaaacataaaggttaaatgcaactggagtgtctgactcttacactgagcctctagtcaaagtggtatgtgcttcctacaataaaaatgttctgtttccatttccacgattatggaacacattgtgcaaacaaattataaccttagctgaactattcaagagctcgtacatgaattccatgaaattaagcctgtttttgttctaaattagttattgccatttgccacaaattcttgcctgacaccatccacttgtacactggggttgtacacctatgagaggctactggactttgttaagcgactgaagactatttgttattttgaaggtaccgga

SEQ ID NO: 65069 - DNA, 730 bp, Cucumis sativus
  Intron number 1 from transcript Cucsa.237920.2 (locus Cucs a.237920) derived from phytozome v7.0 (chr-ID scaffold0202 3; pos 606825 to 607554 reverse strand)
tctcaacctcctccatccacgtccaacttcatcaggtactccatcctctcatttccctttttccattttcttctaacgatttgctcgtttctatgtgttgttttggttttgagatgtgtagatttccttgatgaaattcatttctggttgtggttttgttgatgtgctttattttttgtaatttcttccaaggattggttgaggttcgccttctgtgttgtttttggagttaatggttttgtaattgttttaagctgcgaaagtttttttttatttggatcttcttgatggaattcatttcagatgtatgatcttgttgatgggtctacttatttgattctactgtcttctctactttataatttgtttccgaggattgattcgccttgtgcgttattttcgagtagatacttcgatgattgttttaagttgtggagattgtttttagttttgttattcttgatgaaattcatttcagacgtgtgattttgttgatgtgctttcttctttatactttgcttcaaggattggtttgcctcgtgtgttggttttgactaaatgcttcgatgtctgctttaagctgcgaagttttcttttggtttagatcttcttgtcgaaactcatttcatatgtgtggtagtagtacctctgaatttctagctgtattgattagtttgtactatacatctagaaagaaatcgttggagcagatttttggatcggtgctcgt

SEQ ID NO: 65070 - DNA, 357 bp, Cucumis sativus
  Intron number 2 from transcript Cucsa.296010.1 (locus Cucs a.296010) derived from phytozome v7.0 (chr-ID scaffold0285 6; pos 25556 to 25912)
gactaataaggttgaaggagcatttcattgattgtgtgattattatttgataatgtcaatgtcaaaagaaaaacattcacaaacacaatcgtgtactcctatcgaaggatttagctttcaaagtcaaagtgaaatgccttctatctcatctaatgcatcttataagacacatgttgctgttcttgatagatttaaacaaaacaacaaaacatgtcttgatgatgctaaaacagaggtggctcgttatcaagatgaggctcatatagaagatgaatatttagacttgataaattggtcgaaggtgaatttctcttgatttaagatcattagccaagtagccaaggacatctacaatat

SEQ ID NO: 65071 - DNA, 800 bp, Cucumis sativus
  Intron number 1 from transcript Cucsa.166730.1 (locus Cucs a.166730) derived from phytozome v7.0 (chr-ID scaffold0115 4; pos 84168 to 84967)
gtcccaatcttagtctttctgctattctgatagaggtgaatttaacgagctactacgtgcatatatcgttgcttgcatttatcttttaaattgtttttgtgtgtgtttgattcacaacctgcaaccacagcagtattcttaactcacaaagtctatattacttagctcctgatctttgctaaccatttttgttttgatttttgaaactttattctattgcttcttcttttcctgcaatgatctattaattttctaagtataatgttgaattcttgatccattctaaaagcaaagaaattttttaaaagctacttttctttttgttttttgttttcaaaatttaacttttcaaccatggataaaaagtaataatatcttaagaaagttgaagattgaagtaacgtgtggcaaaatttaaaaaaaaaaaagaacaaaagggataccaaatagggccttattaatatatggtcctattgaacttttcaaactaatgattaataggcaaagtagttccagtctataacataaaaagaacatgattatttgaattgagattatgtatatggcagtgaccagaacaacatattgatcagggtacttaatgatttattgacatttataaaagggcaagagtagtacaattaaaagttaattctttataaattagtaaaaaagaacaataatagggtaaagatcatgcaaatttttcaaaccaatgttgtattacgaagaagcaatatcttggtagtaattgttaacatttttttctctttatgctattattattcacaaagtgaaga

SEQ ID NO: 65072 - DNA, 698 bp, Cucumis sativus
  Intron number 1 from transcript Cucsa.278520.3 (locus Cucs a.278520) derived from phytozome v7.0 (chr-ID scaffold0261 5; pos 74966 to 75663 reverse strand)
gtaaacatagctgtttctaacagttctcaaaaaaggtagcacctctctttctttttccatattagttttattcttcatgacaattgaaaattgaagcatgtgtaaaaggacaaaggttttatcacaggtttgtattgttcactgtggtcctcctggtccttgcatttttttttctccttttctttctattttgttaatgaaaatgggtctagttttatctttcctttggctgtttgttttttggccttggtcttatccaaaggttcttctcattttgttcaattttttaagctaagttttgtttcaatttctaaatttagtcaagtgaatgatattggcttataagggtcaagttcttggtttattttgatctaagtgtaaatggacaagttgatgaacaagacaacccacctaattgccctttgtttttttgtaaaatggagcaattttcagatgttacaacttttacttttgattaacagtggatgttttttttcttataattttgttatgtttttctattagtgtcttcttttttccagttgtcgccatgtttgctatttctgtgccttttatttttgtcagtatcaactttagttggaattctctgtttacaaagaatcaggttctgaaatacactaataattcttcatctttctgaatgaaattcaaaggactgcacctgccccggttgtggg

SEQ ID NO: 65073 - DNA, 321 bp, Cucumis sativus
  Intron number 1 from transcript Cucsa.299510.1 (locus Cucs a.299510) derived from phytozome v7.0 (chr-ID scaffold0292 0; pos 78096 to 78416 reverse strand)
ccgtcattcttcctcctctctctttcaagctcaaggttcgctttctctttttctttctcttacctttgtttttttttttttcacattttcttctaggtcctttaatttcatgcgattcgttttcttgttcttccttgagctgtccgatcgcttgcagtatggtgtttctttgattctctaatttttcggattccattaaagatttgagcgaattttattttcgctttcttctggtgaattccttgaatgaagttgtgaattctcgttggttttttgtgttgtataggtgataagggcttacgcttttaacaaaacgtggat

SEQ ID NO: 65074 - DNA, 844 bp, Cucumis sativus
  Intron number 1 from transcript Cucsa.232060.1 (locus Cucs a.232060) derived from phytozome v7.0 (chr-ID scaffold0198 9; pos 181901 to 182744)
cctctgatttcgttggacgatatctcacaattcaggtttctaatttctacaagagaaaaacatataatattcatcttcgaatctatttcggttatcttaatacatgaaaacaataaataataagaacaacgacattattgtgtttctaaattttgaaaatcttaccatttttgcgggtgagagttttgagcttttgtgttggttttggttgtttttgaaatttacgtttacatttttttatttaagaaaaacaagggggagatagtttttaatttaaatgaattataactaaaattattattattatttctaagtctttcattaccattaaatttaacttttcaccctcgtaaataattttaattactttgttgaaatataaggtcatacactcaagataagtatggataaaaaaaaatgaaaataaaatatttaactttttaaacttagaaacaaaatcaacttttcaaaatccaacaaaaaaaaatatcatattttgaaatttaagaataaaaataaaaataaaaatgtaattaaaaacttttatggtttgacatcaccagcatccagtaatttactataaactcaataaattatgaatttgctttcctctatatatatataaattacaacaattctaacatttttctaaacttatacaacacttttttttttagtttctaacaaccaaagtaatgttctgattaacatatatacataactattaataaaaacaaaagaaataaacataaacataagattttaagattttatttattgggtataattaagagaaaagtttgattaacttattatttaatttaattgattggtgggttgaaga

SEQ ID NO: 65075 - DNA, 662 bp, Cucumis sativus
  Intron number 1 from transcript Cucsa.248400.1 (locus Cucs a.248400) derived from phytozome v7.0 (chr-ID scaffold0220 7; pos 229377 to 230038 reverse strand)
ttttcacccgccatcactacaagaattagggtcttctccaatgcagcaacacgtcgtcgaaagccttaaaaatgtagtgtaaagtttttgcaacgttgtatgcgacgtcggcatgcacgtaatggaaagcccgtcggggatactttccgcaacgtaccttgcgccaacgatggcgaaactttccttagtgcatagatcaacacgtcagataaggcttcggggcgtggcttcttcgaggactacctcgatgcagatgttgcaaaaacctattgcgacgaagcgtcacaataggttttcacgacgtttgcgtcggggaaggttttttattatttttttttatatttcatatttttcttgtattattatgatatttttattgttttctattatttattttactaaggcctgatgtaataaaaattgtaataaatactttatcactatgaatgttactttctctgaggcccaacattactttctcgttagccatcctcaaggggacagtgtgagtgaagagtctaacaacacctttgaatttatcaaacctactcctagcgtcgtgtcagacatcgatcctcatctcatagtcctacccacaaaccaagttcactagaaaacgtattacaggagaagtctaaaaaaggaagtcgctttcccaacta

SEQ ID NO: 65076 - DNA, 1025 bp, Cucumis sativus
  Intron number 1 from transcript Cucsa.150020.3 (locus Cucs a.150020) derived from phytozome v7.0 (chr-ID scaffold0111 0; pos 985425 to 986449)
ggcaggggaagctgctgaaaacgtttggcatcacagttagtttttcttttttttttttctttatcaatttaattttgtttttagtgttcgaatttatatttttaaatgttactatattcttaaaattggttttgcatagttgaaactatgattttggtgattttgaatatgagaagagtgactaaccatttcgaaactaatctgcagtgtgtccgtagatgctgaaatataatttagtgtttaattttacttttaagtgcagtttgtgatgccatcaaatttggttttgaatcataaaaaagcatgttgatgattttgaaaatgacaaaaataattttaatcatttcataaacactttcaaacatgtttcaaatttttcgtattcggatagaagatgatttgttacattgatgaacatcctaatagtgaaatagttcatgtgggatcaagtttctaattgactatgtttttaataaatgatagtttaaatactaatttggtcttataattttaaaatgtttatttggttatttttacttttaactttggttcattttagttattgtagttttgaaaaaatttgtccttccaaaaattaaataaaacaaaaaatgaattgaataaaatgatcactttttaaaagtacaaccaaagttgtaagtacataaaccaaagtttaaagcatgaggattatatgaaagtacaagatctaaaataaaccaaagttgaaaatcttcaaactaaagttggaagtataaggaccaaaaacaaatcatgttgaaagtgcaagaatcaaagtagtattttagcccaaacattaacatctccattcattggaggtacgtgattgagggaagctgataaataacatgtaaaatgagatcagtcttattttggagggcctctaatgttctaatatcgtttgcttttagttttatcgagaataataccttgaatgttgacatattggctcctaatatgcaatatacttttatcaacagtaaaagttagtcctagcattggtg

SEQ ID NO: 65077 - DNA, 425 bp, Cucumis sativus
  Intron number 4 from transcript Cucsa.179920.1 (locus Cucs a.179920) derived from phytozome v7.0 (chr-ID scaffold0123 3; pos 282924 to 283348)
ttgcttgtgaaggaaatttgaaacacttccttgtggtatgctaacatatttcatgtacttgttttgcaattctgttgtatttctaaatgtccttagaacgacttgctctagacattcatatttgagtatttaggtacaagatgttgaaatttgataaaaacaagcattgattttctcttattgactttaagctcctagtttgccttgcctcttgacttaggcgttttttttattatagctccaggaacaccaaaacatgggatatttgagaaatatgctgcctcagttttgcaagcgtctgctatattgaatggagtttctttgattatagctcctaggaaacctgttagattgctgtttttactttttgattttcttgtcgatacttctttaatgtgaatgtatttccaggccgtagtgagctt

SEQ ID NO: 65078 - DNA, 902 bp, Cucumis sativus
  Intron number 1 from transcript Cucsa.193880.1 (locus Cucs a.193880) derived from phytozome v7.0 (chr-ID scaffold0133 7; pos 16976 to 17877)
tgggtctccattcatattcgacctggtctttacaggtattttttttttctaattttgaattcttatttaatatagttttgatttttactaagagtgctttttttattcaaatatttgaaacaaagaatatattaagtgggtctgattttagttggtttaggtttttgttagtgcatcactagtttgatattttgaggggtttgttattatgattactttggattgatgggttggttcatcttcaattaagttggtagagcaagtgatttgattttcattataattattttttaataactagattataaaatgtcaattaggtttcatttcttaagtaaaaaagattgaggctattgatttttttgaaaatacagattataaatactcttacgctttctttgttttgttatatgatgatctcactttttggaactattttcaaaatctaagctaaattattgaaaactgagggtgtttttggtttatttaaaattcaatgtgtgaaaatcaaatctgttttaataaacagtaagaaacccagtgcaatttccaaatgtgtgtgtgtgtgtgtatatataattaactatttggtttctaaaatttgctttctccatgcaagtttttggaaattttgtttagttttcaaaattttcgctttgatttcaaaaacagaatattacatgttttgtataggctttaaagatacatatataaataaaaaaaattcaattaaccagtgattatatatttgcatctattttcgattatttcctaaaataaattaaggaaatctactgtaatcaatgacaattattctgttaaaaattaatatacgatggaggttgattttgctatatttccctaatttgtttttgtatacagagagaaggtgaagattccgt

SEQ ID NO: 65079 - DNA, 582 bp, Cucumis sativus
  Intron number 1 from transcript Cucsa.175760.1 (locus Cucs a.175760) derived from phytozome v7.0 (chr-ID scaffold0122 5; pos 300077 to 300658 reverse strand)
aagtggaacagccgtctcaagtgcaatctctattagtacgatcactctctccttcaattctttcgagctaactacatatctttttgtatatatgtgtagtttttggcatgaacttctcctgagagccatgattgtttgagttagtctgattaaactgttacaaggttcttttgatggtaacgtcttacataacatatcggtttagttcgcttttcacgaatcaagtctgcacggaattatatgctctgaaagtgaaatggaatatgattacacaatctcctacgtgtaaagggaaaatcaagttgtatggctgacgtcttcggttcatctgtttgagtttgtgaatttgcttattagtcaaagacgctgaaatctatatttgcgttgcttactctatttttctttcagttttcctcggaaatcatgttatgatgtgtgccaatacttagtttaggcgatcatactgaaatttatatcacatcatttcatttgtaaactgattgcgattatgtgctttgttcaccctactaattttgaattttaatttcttgcactcgcagttaccgaaccaactatttcatt

SEQ ID NO: 65080 - DNA, 692 bp, Cucumis sativus
  Intron number 1 from transcript Cucsa.283140.1 (locus Cucs a.283140) derived from phytozome v7.0 (chr-ID scaffold0265 3; pos 356920 to 357611 reverse strand)
gacggcgtgtgctcaatactggttctcctatcactgtgagttttcgtgtttgcttaatcggtaatgatttgattagttgaattggttttttttttttttaattcaaattttgactttacattgtgcattatattggtgtttgtatgaatgaaacggagatgaatttctctttcgcacgaggtgaagttagtgatcagcgatatcctcagatccctttgttaatcgatacccaacgtaggatttgtgtaggagattttttgcaggatgaattgatgtggacgatggtttcagggagttgtaaatcagcaattcagttatgactaatttgtgatcgactgatttccacttgttatgataacgtcagtatgaagaaagtcttctcttgtcctgttccattttttattaaatggcgaattagtattgtgcaatgtgatcatctacttctgtacgtgtcagttgactgctgcagctgatgcacgttcttgagtttgattggttcttctattgatcaagacatcatgctttttattatgttcagctcctatttcttatctatatgacgttttgctttgccttttggacaatttgtttcttaatttttcagcatatttcatgggatttttctttttctttttttaatttttatgaacttgacaggtgcctgttggtagggcaacacttggccgtatcat

SEQ ID NO: 65081 - DNA, 619 bp, Cucumis sativus
  Intron number 1 from transcript Cucsa.212310.2 (locus Cucs a.212310) derived from phytozome v7.0 (chr-ID scaffold0154 3; pos 109787 to 110405 reverse strand)
tgggtttgcaatgtattgttctattgttgtaatttcagattggaatttttgttttctttgcataggaatgtgggtttgtaatttgaggttgccattttctgattgtttgaagattttggacaattggggtttttgttactggtcacttagtgattgatacatcttgttgatcggttcgttattgagtttgttaactgtttgattttctgtagatgactaaaatggggtttcaaattggtctttggactttccttcactgagatttgttctttacccacttcattactgttgcttttactagccttccttttttttttttttttttctctttttaatttgttagctaaacttggttagttggcagcatctgagaatagatggctttgcttttgtgctcaccacttgtttgatattcaatagtattgctttaagcagtcctggggactttccaagtcttagttgtattacaatttcactatcaacacaccactctctcctttattattatttccttgttttattgcaatatggattatttttgtgtaagaaaaataatggctatttataaacattttctattccagttagcgaggattcaatcaagagattcacgtggttg

SEQ ID NO: 65082 - DNA, 612 bp, Cucumis sativus
  Intron number 2 from transcript Cucsa.178780.1 (locus Cucs a.178780) derived from phytozome v7.0 (chr-ID scaffold0122 7; pos 1143197 to 1143808 reverse strand)
gcaagaaactgtggccgttgttggttatcctcagggtattgacttctaacattgtctcaataaattaaatattgtaaaatggtaattagttttataaattaacatctctatcttttgaaaatgcttcttctccaatttatgcacatttgtttctatatgttgaatgttaattttgtttggtgtaaagattgttttaaatttgataattttctggctataattttttagattcttcttatagtttttgtttatttgtatttgttgttagtttaagggactgggtttcccattattacatgggtcataaggtatcttttatagttttgtttaattgtgtttgttgttagtttaagggactaggtttcctagtattacatgggtcataaggtatctttcaaaactaggaatttgatcatcaattcttaataactgtgtctctgtttacttgtaaaccatgaaaaaattcaaggaaattaaaggcaaaccacttctaatcgcatgcatcccttttccgctgttcatttccatgtgatgacattataatggccttgacatccaattttggtttttattgcaggtggggataacatctctgtgactaaaggtgttgtt

SEQ ID NO: 65083 - DNA, 617 bp, Cucumis sativus
  Intron number 1 from transcript Cucsa.178780.1 (locus Cucs a.178780) derived from phytozome v7.0 (chr-ID scaffold0122 7; pos 1143985 to 1144601 reverse strand)
ggttccggtttgtggcttaatgtacttcttttgtgttagtttgattgattgtgctctgttttatgactttcatgcctttaatgccttttgaatgttggaacttcagtggttgtcttactattcacttctggctgctgttgtgttagttgttaaaacttgagagtgctttgttgtgaacttttgttattttctggcattccagtatttcaacttcggttgtatgaggaaaatctagtaactagttcacaatgaaatctgttctaccttttgcatactgtcgttgtggccatgaccattgaattgtttttggatttcatttgttgtggaaatacataaacagttacactcaccgcaaaatgtgaagattcagtctttatttactagaactgatttgatagttatgcttttttattgttatgcatatttacatgttaggcagttttaatagcgttcatttgactgagtatattttcatttccatttgtgttttaagttgatcccaatgacatatgtcgctgttctctctaagtgttcttacttttgtccatatttcttgtgtctattatgaaaaaacaaatgtaggattcatcatatctggaaaaaagattcttacaaat

SEQ ID NO: 65084 - DNA, 985 bp, Cucumis sativus
  Intron number 2 from transcript Cucsa.285780.3 (locus Cucs a.285780) derived from phytozome v7.0 (chr-ID scaffold0265 3; pos 2053346 to 2054330)
atttggatcgcttcctttgttcacgccgtttgccggtgagagaaaaaaaaaatatcatctgcgtgaattattttgaagattcaagataatcgtcgagcgattcgagtgatcattgctttttttttttttttgttacatttaattggagtaattatgtttgacttttccaaaccatgaaaatgactacactagactatatcataccaatactgagtatataacgtaatatttaatatatataatatacatatatatacttcctgtatcaagattaagactgcatttaacttgttttcaaatataaaatatcaaattatctaaatgctaaaataaaatataatattcaactagtcattcacgtgacaaattagaacttattgtatattttaaactatatatctatatacatttaattacgtaattgcatctcaatatttacctatatttctaggttctgttgtagaatgcaaaaagatgggtgtatgttgtaatattggtctttgatttttttgtttggtagaaaaaagctgaagataccttagcctttatgtattttattgatcggacaattgtataagttactaaaggtattattaaaaaggtttgtttaaccttttgggaattggggaaatagttaatcaaataattaataagtagtaaattatgagtaaaaatattgatggtgcatataggataggctaaaggtcttgaaagtacgattttatgttcattatgcctttcacaaacttttgtttctcctgtcgcggcacatgcaatgtgtaggcacagtgccggcaaagtaacggataggatgaactaatttgatatgaccaaaaatcaccaataaactctcacctaaaataccgatgggcatttattgttcccttgatagtgatgttgattccattattaggatatagaaaatgattagcccctaacgttaattttggttaattttgccacactgttgctgttcagcaatcaa

SEQ ID NO: 65085 - DNA, 521 bp, Cucumis sativus
  Intron number 1 from transcript Cucsa.234250.1 (locus Cucs a.234250) derived from phytozome v7.0 (chr-ID scaffold0199 9; pos 196448 to 196968 reverse strand)
gatccaactttgaaattctggcatctctcttaaaggttttgtatcctattctctttcgctttctttccgattattgattctccccaagattttttttaccgtttacttgtcatttcttaattgggttttaggttttgcttgttgggttttcttcctttttcatgctctttcattgttctcttcttaatcatgaaatgaaattcgcttttaggtgtttgattcatttgagggtttttttttttttcttcttttgtcactacttgttttgttagcatgctcttcttgatgtagaggaaattagtgttcttaaagggtgaggaattttccatgtgggtgacctaggaatccccatcttagctgataaattggttcatgttggtttttgttgttgaattgtgctgaatcgttgttatgtttatctaattgtttaggatcttggtttgagttgtttctccttggtgttgctgtattgaagttgattttcaagtggttttccagctgtcttggttgagatatctata

SEQ ID NO: 65086 - DNA, 638 bp, Cucumis sativus
  Intron number 1 from transcript Cucsa.219480.1 (locus Cucs a.219480) derived from phytozome v7.0 (chr-ID scaffold0165 8; pos 1261481 to 1262118 reverse strand)
ttcttcctgctggctatccttgtgctgagcataaggttctctatttctctcatttcgcttccaattttttggttgattaattagaggaaggtgtggacaattatgtgaaatgagactgtaatattagagttcatcgctctgtttcgactggagatacttggatggattttagtcaactaattgcctctaatgcttcttgtttgagatttcctttgagtttcttgtttattttcttttctgaggtgagacagatggaattaatttctttgtatttttagattcgatgcccgacgtggttttgatttgtttctgtcgattttctggataatccgatgtatatgtatcgttctcgaaagtgtgatatgcgaagaaatatgattgaatttgatttttatgtagatctctgattttatcaatttctcattaaccatttggagcttaatgcatctctactgtgtaaatttgttactataaatgatgttgttctttgatcatgctcgagttttgaggaatgttatccattattgcagactgggctgatgaattgtgcttttagtaatgcacttgagtacggttttgcagtactgagtcactgacggacgtgattttctcataaatttcttagattcaaacaaagg

SEQ ID NO: 65087 - DNA, 354 bp, Cucumis sativus
  Intron number 1 from transcript Cucsa.308290.1 (locus Cucs a.308290) derived from phytozome v7.0 (chr-ID scaffold0297 8; pos 440902 to 441255)
tccaatcctatcgattccaacgctgttgcacagaggtgattcttctttttcatcattcttttggtttatttattgtttcgttcccgggatttatggagaatgtaaaaaatggacaagaaaggattgaaaacgatagcaagaattcagggacgtacgatttgttgttactttctagttttttttttttttttacactattctgttatgttaattattgcttgcttttccatgttttgatttgattatcaaatctgtagcaggcttcagatttacggattcttattaattgcggattatagttgtggggttttgacatttttttctttatttggctgcaggctgcaaaaggagttg

SEQ ID NO: 65088 - DNA, 968 bp, Cucumis sativus
  Intron number 1 from transcript Cucsa.275410.2 (locus Cucs a.275410) derived from phytozome v7.0 (chr-ID scaffold0258 1; pos 286406 to 287373)
tctgaccattacacctcgaatctaatagattagtggtaagtttcagtgttttagttgggttttttttcccgaagatttcgaatatacattgagttttggcttggattaaacaatacccatcatgtttctttgttagatttgaatttttttaagagttaagttgttatccagccggtaggaagtttagtctagatagaaacgtgattgatatgagtctaaggacaaggaaatttctctatggaacgtgttagaaatatgggcttaggtttagcccataatttttcattcttttaattaggctctaattgcctgtaaattttccccttgggtatctttagcacccctagtttccatataaatttgtgttctttggctctacttttcaatagaacaaacatgggattgcaagaactttatggttttgagcggacataagaacgtaactttagatcttcatgggactattgatgggtctcagatagtttgtaccaatcttgacaaaaattgagaacatgaatattagtgttggtaaataaatattaaattgtcacacttaatttagctcaacggtgagtgacacaaccttccatccatgggtggaaggtttgatccgccatctgcacaattgtttatttttaaaaaagattaaatgatcattttttaattgtaatgactaaaatggacctaatatcatcatttttttttatgattaataatcccaaaccttttttggacgacacaagttttgtaactaatattgttaatgaaatgagtatggggatttccccttggaatctcactagtattcctagcagagaggatccatccttgatccatgctcaaatttttaattttgtggaggccagtgtcaattttgtctaccttgccattttctgtgtccttgcaaatatattcttattctactttgaatttttaattttcagggtattgaaaagacttagttggca

SEQ ID NO: 65089 - DNA, 687 bp, Cucumis sativus; identical to SEQ ID NO: 64194
  Intron number 1 from transcript Cucsa.289160.3 (locus Cucs a.289160) derived from phytozome v7.0 (chr-ID scaffold0269 8; pos 647615 to 648301 reverse strand)

SEQ ID NO: 65090 - DNA, 512 bp, Cucumis sativus
  Intron number 1 from transcript Cucsa.258440.1 (locus Cucs a.258440) derived from phytozome v7.0 (chr-ID scaffold0222 9; pos 5403600 to 5404111 reverse strand)
tcctggcaatttccggtcgcgtattatcttttctggtacgtttcttctttcaacccttgattgattcttttctgtgtgtcttgttccgttcagaacttgtgttggggattcttaatttttacctatttcatggacgatccgctctttttagttgtttagatcggtggcgatctttgttgttgcttattggtacggtgtgttagatccgtttcttgtttgatctcgaattattgaatggatgattgtacgacctagaaatgattgcgtgtatgtatgtgctgggtcggtaatttgtatctttgtaggtctagcttctattgattagattgaattgtgttttctcgttgtaaatttgagtgataatcgggatgtgttcattacttgtcgagatgtggcgggagggagttgtcttgttgatcgcacgatttattgctcagtttcatattgttgaacttgcatctgggttttttttttccaatcttctctcttatttctaatcgagctgttaagat

SEQ ID NO: 65091 - DNA, 1031 bp, Cucumis sativus
  Intron number 2 from transcript Cucsa.242380.1 (locus Cucs a.242380) derived from phytozome v7.0 (chr-ID scaffold0204 7; pos 2127172 to 2128202)
ttggtaagtatgtttagttatcagtgcttccaaattgttctccatcagtggttttctattcaataagaattgttatttgtctctcaattaagttagtgttatgctctagcatttatcttctgattcctaaggttcgtggtctctgtttttgttggttgataagaaaagtggatggactcatagtccccaagggatggtcacattgtttaaaaggcctgttgtctttgggaaaaacctactcatagtttgtgtttttgaagctggaagccatgggtttttaaaagaatagaatgcttgtattggaggaggagggatgctgaagtgaaggaacaatttgcaatccatccccatgcaaagatttaaaggttgaggcaaattgtaaagaaaatgtgcaattagcacatgcaaaaatcaaagtacagctaaaaaaaaagatttgatgaagattaccagctagattagtagacttagccatatctaaattaaattacagagacacacacgagtcccaagactcctacatcatacatgtgcacgcttacacccactcatacacatccttttatctacatttttaatcacgaaagctttgctttacaattgaacctagaactgcaggcagggaatagttaatcagttggggtttttttttttaataaaaaaaggtccgataattttccccagtctctgagcaccagtgtgatggttttaaggccttgacaatcgggttgggattttcagatttctatttctgtgtgagtatttgagtggttctattcgtgattgtgaagacatgtggtactgtatttatagacatgaaatgtgttagtggtattggttgtaatattctttatagatctaaaataaagaccctctttacctacgacacttgctcaatgaacttgaatggagtgcttggagtaactctctcctctacaggcctgctccttaaactaactcacttagctgacattattacctgtggttctttttcagattataagaaggaattgagatctctgaatagagaa

SEQ ID NO: 65092 - DNA, 538 bp, Cucumis sativus
  Intron number 1 from transcript Cucsa.244600.1 (locus Cucs a.244600) derived from phytozome v7.0 (chr-ID scaffold0213 5; pos 482223 to 482760 reverse strand)
ttgcccaagccgacgcatctgttaaagctggtacgttgttctttttctgttttgtttgacccaaacatttttgtagaatctttgtgttgtgtagtttgttgtttgctttggatctgctcgaaaccatggaaagatctcggccttttatcttaataccgaagcagcatttcatttaaatctgtccgaagaattattttaatgtttaaagcgaatgtgccctaaaacaattccttatacgttttgttttttaagtatcgatgcgcgctttaaaaagtggaatcatgtcgggaggttttatttaaaaatttcctatctcatgcttgtttagtttgaactttatgatttcaagtaattagcgaaggaataaacaatttctctctgcatccgacgatctctttcccttatgggagcctgtcgacgatatgatcgtcagatttactgggtgtgatgttgtatacgagatatgcgtttgttcaaaggaactccttataggcttacattttcacctccaccgcagggaagtggcaacgcaacaaat

SEQ ID NO: 65093 - DNA, 893 bp, Cucumis sativus
  Intron number 1 from transcript Cucsa.240190.1 (locus Cucs a.240190) derived from phytozome v7.0 (chr-ID scaffold0204 7; pos 119191 to 120083)
tcagaaaaatactcatcagctcgttcaagttataggtaagtaaaccatctttttttattcacgaagaggaaaaacgcttccttgtttaatttatttatctctacagatataaactttgatgtaatctgaattgtcttcgttttatttacatacttcttggagataactttaaattgttgtcatgaaaaaatttaaaataatgttactaaagttaaatcggtcctactatgaatgcttccaaaacttcgcttggttagttgttatggtagaattagaacagaagaaagtaaagagaactcaagaatttgaaatgagatgtctagcagatggtctacttcaagttggcaaatttgattacagatactttgaagacagcccctttattcaacggattaattgtaattggttttcccttagttgtcttagtgcatcggttattcaaacggtagctctatatatgagattagtacgattacagatggggaatattattctgatatttctctcgtactcagtgtctctcctctctctctgttacacttcttatttggatgtacttttttttctctttagtttccattgttgttttaatgacccagagtcatttttcaagtttaaatcgtgcttggaatagtatctaccattggagaagttcaattaatgaaacgacagtcagcctcttggctcttgaagccatccttgaagtgtattgcttaagtttcttctttttcttctttcaaggttcctcctccacgccttctgtttcgtctatctctacaaattgttttatgcttcccatccaaccatatgtcatatcagataatcaattcaatgatcttattttttgatatactttagggttgaagaaaatttctatatctggtgatttgggt

SEQ ID NO: 65094 - DNA, 447 bp, Cucumis sativus
  Intron number 2 from transcript Cucsa.151810.1 (locus Cucs a.151810) derived from phytozome v7.0 (chr-ID scaffold0111 9; pos 193181 to 193627)
tttctctccattggtaattttcttctaaccaaaattcattacactctaacccacgattattgatttaacaacaattaacaaatctttatcttttaatggcaaatccctaactccacaagtcattcccaaaaaggtaactctttctttttgtttccaattatacaaaaagaaaaacagaatagaatagtgtgtttaagtcaaacatatggattaaatagtattcattattcaacagtttagcttaatcccttttggatggtaagtaggtgatgattaagggtgtcaataattattcaatttaaattttatttttaaaaaaagggtttctataaaatgattttaaatgaatataaactttctctttggctaataaaccctttcaagttgtggtgacaacccttgtttgtttgaatgtttgggctaattttgggtgtgatacgaataggc

SEQ ID NO: 65095 - DNA, 900 bp, Cucumis sativus
  Intron number 2 from transcript Cucsa.197030.1 (locus Cucs a.197030) derived from phytozome v7.0 (chr-ID scaffold0135 7; pos 574325 to 575224)
tctgatttgatttgattcctctgttctcgtttcaggtatcgttgtttgtttgtttgtttgttttgttttgttatctcttttgtttatgaaggcgtttttctgttcattagcttggtgaaaggctgtgaatttcttttttcttttttcttccatctttgttgttattttctaaggaaacaaactgatgggttgttttgggtcggttgggttgggttgggttgggttgtgaatgaatgatctggaaatccaagattaaggatttgtttattgtttaagattaaaagtgatggaaaaaaagtgaaattgcaattattatacacttttgttgagtgaagatttcagtaacttaaagataaggataagtgcataaccatttgacatttgtccttatcttgggtttgaattttaaattcatcttgtcggtatggtatagatttttaaaaagttgatcggataacgaccaatttgtttttaattatttttttatttcttttctctagatcttcttgcactccaattgcgtcttttgaagattcaattttactgttagtttaagattagcctttcatatatcaggtggatattaccataatctcttatgtttagttgacttgtttaaagaatatatgtgtacctgtctgtgtatatatattggaatttgaaaccaacctttgttattgttaagttgttggtttcttggttcaacaatttattaaaaactttgaaatacattgtatagactgatcttcaaagttgcttggctgtggttatgagtagttatagaacgcttgtttgtattaataacttattgttataaagagataaatagaggtttgatttttcctacattttgatttttcttcaggtttttggttatctgttcttctgttgtacgtggaa

SEQ ID NO: 65096 - DNA, 519 bp, Cucumis sativus
  Intron number 1 from transcript Cucsa.183280.1 (locus Cucs a.183280) derived from phytozome v7.0 (chr-ID scaffold0126 1; pos 64010 to 64528 reverse strand)
tggagattgccggtgccaaccctcaccatttaaaggtaatatctaattcttttctaaatttcctttggaattatgtataatttgatcgttgtgggtatgcaaatttatgtgcttcgctgaatcctggtatccttttgtgtttcttctttggctaccatcaagataatccacatcgtaacactacgtccacatctctggttgaaaatttcagtttccgcaatccactcgcacgcactaacacctatgatgaggagtaccgagataaagaaaatgtatacgttcattggtttcttcgtttagttttgaataaaaatgtcgttttaagactgtgttcattggaagctgtggatatttgtgaacttgcttggtgctaaacagggcaaacaacaatacctccgtatgttaccaagtgctaacaaaataacttgtatgtgaacaaattgcactgtagctgaaagggaaaaagaagatggacataagctaaagatcttccactgaattattttatcttcaagcagg

SEQ ID NO: 65097 - DNA, 1033 bp, Cucumis sativus
  Intron number 1 from transcript Cucsa.237730.1 (locus Cucs a.237730) derived from phytozome v7.0 (chr-ID scaffold0202 3; pos 487508 to 488540)
tggctcttagatccggtggctacgacttcaagaaggtaacgtaacgtaacgttaccgttttcgtttatttcggttcatattttattttttaatattcttcaccaaatttacaaaacaaaaaccaaaattttaaaaatttctccatttagtattaatctttattttggtaaatattgtttaagatacaatgaaatggttactaaaagctttaatttttttaaataacttatttgttagattattcaaaacatatccttattcactactatgatatactggatggttcgacaataaaaaatgaagggtgtattgagctagcattgaaaaaagtatttgtaaatgtaactcatcattttagtgtgtttcgttccgttttcttataattactaagtcaatttctttgtttcacattcgattgttgaactaaaaaagaaaacaaatgcgtagccaaaaatataattgtgtgatcaatattggctccttcgatcaagctttccccacaaacaattcttttagtttagtgtatatttttaagtgtgaatcttaacttaataatgatgtcgttgaataatagtaaattttagactaataacgaattgtcgtgtaatatcttaaactaacgatgtaattttaaatttcaaattttacgatccaattaaaagttatacatgtttcaaattaaaattgaagatataagttcacaaatcacgatgatgtcatgtgtttttattacgtgaactttcctcaaaataaaaaaaaaataggcccaatttagctgaaaagggctaatcaagttcaaattcgaattagttgggctaggtgctatgttgatggaccaatcaaaccataaatcctaactcttcgagttgaatcatgctcttgaagatatagatactctgttccaagacctttaacttaaaatatattatgtttggagaaagattatgtgctcgaaacgtattgatttatagaaagagaataagaagattaattgcaatacaaccactttttggaggagaagagagaatcacca

SEQ ID NO: 65098 - DNA, 684 bp, Cucumis sativus
  Intron number 2 from transcript Cucsa.291900.1 (locus Cucs a.291900) derived from phytozome v7.0 (chr-ID scaffold0276 6; pos 506811 to 507494)
gttttcaagacactccttactcttctcgcttgaaggtgagttttccctttgctttatgctttaggtttatcaaaatttgaatttgcttttgtctattgattctttatgtgttttttctttatccatctgccaccaatcatttgggatttgtttgatgttttgatttagttgttcttatagcttctgctcgttgttagggattgtttggtaggctggaatgtaatgagtttgtaatgttctgtaatttcattacattcctttccctctatttttaatccaacactctttcacacatttctacccttcacgatcccatttgaacaccaattttaatccttgttttcagtaatttgattacatgctcgtcttccaaacaggctcctatttctttcagttgtatgaattacttgtacgttgtactcatatctatcctctctcttttgtagtaggcaaaatggaaaatctttccactttttgaaatagctcattgattagttatatttcccatcaaattctcttaacaactatttgaatgaaccaaccaggtgttgttctgtattggcagatgtgtgctttttcttgaccttttgttggtgtttttacttgattgatattttgagtttctcaaacttgaataataatcgatcagttcttcatcttgatatgctcaggttattcaaggag

SEQ ID NO: 65099 - DNA, 846 bp, Cucumis sativus
  Intron number 1 from transcript Cucsa.182140.1 (locus Cucs a.182140) derived from phytozome v7.0 (chr-ID scaffold0125 1; pos 235373 to 236218 reverse strand)
cccttgactggcctcactttcgctgttaaagacatgtgagatttttctttttattatttactgttttttatttggttctggaaattcatgaaggatttggtgataacagcttgtgagttgtgtaacatttttagtattctggatattgtcaaaggatttcaaatttaattgtaggtgggttaaatccatttattagtacgacaaatagaattttccctagagaacaatcaattcatctcatggacatatatgttgatccttgaaataatatcggagagaaacatctattccacttacaatcaaaatttaaatcctttgacaatatccagaagactaaaaatgttgcacaacttacaacctgttatcaccatttatcaatgttgatagacattcatagaactctattattgataaaatctgaaatgttgttatattttagttcattatgttatatttgaaaatgccccttaaaaagggctaaaggtttttgtctgttgaaattttatttgaattattcttttagagtagaagagattatataggtactaaggtgaagtttgaaattgtgatatggcataagattacatatccgtaaaaccttgtctccgttatctctttagatattaatatttgcattcttacaagccatcagcagttggttttctattgtaatgggttagtaatgtgtgcaagatgaagcttatttcaatgtagtaattgttggttctgtcggttctttgtttactttatgcatggtccttctgatataagtgtgtcagttttcatcatgaaattggggtgttgatgtcaaagttctcgttggaatttgaaccaaacagatttgat

SEQ ID NO: 65100 - DNA, 868 bp, Cucumis sativus
  Intron number 1 from transcript Cucsa.241950.1 (locus Cucs a.241950) derived from phytozome v7.0 (chr-ID scaffold0204 7; pos 1814861 to 1815728)
tcttgatatctacaggttagattactcaaatttgactgtctcaagttctttgtttcctaactttggcttgaggatgatgaaattttaagacccatcatttgctggatcaccatgatttgtgatggggatttgttctgagatgttggtatgatcacatgatataatatgaaattcatctatagttaagttaagttagagtaagaatatttgttccaaactgcatctgatgagaagttgaatgacttatatatatattccccatttgaatgtgtttatataaatgcttgaagatcatctaaacttgctgtaaggtgatgtcaaggggggaagtaggttttgtttctttgatcccatgttttttatgttctctttcattttttctaggagatggatgccgttatttggtgaatgaataagattgagttttcaatatctttggaaatgaaggatgtagtgtttggtatgtgggaaaaaagggaaatatgaatatattttgtattggaacattgtcttaaaataggatatagtgttcaagagtcttgttttcttccttcccctgcgtgatttaatttgtttgtgtcacgtgatgtaattttgtaaggtttgttgttttgtttgtttttcttcttaggattgctagaaatgagatgttggatggtttgaatcccaaatctaatcccatgggctcatgcttgtgttctaaattcctcaatggttatatatcaaatgcgtgattgatgagaagttcaattgctcgagttgatttcagaaatttaatctcaagacgaatgattaacatctgctaacacgataagatatctccaactatgcaggtgaaagtgagacattcttgcagaaagccattcaa

SEQ ID NO: 65101 - DNA, 981 bp, Cucumis sativus
  Intron number 1 from transcript Cucsa.193150.1 (locus Cucs a.193150) derived from phytozome v7.0 (chr-ID scaffold0133 5; pos 129344 to 130324)
atcggtaaaagtttgtttattgttgttcaatggatatgctggtgtgtgccatgacttttgctgtaggaatatgaatgagttgtttattgtttctagttttggaagtggatgaagtgttgaattggattcattgccattatcgctcagtaatttttctttatttgtggggctgttgtttgtttttttcttttgggttagaatttatcatttgggatgtggttgatgaaagggataggaaggtatggtatggttttgttagccatttccatccccgagagataaggtttcaatcttcaattaggttaaagtctttttctttccttaaattaaaataattaaaattactttactggtttttttaaaaagaaataaactattttgctatttttgacattttttctatgctttattttttttattattgtgaccattattagaggcacagataaaatttgattccatgtataagatcatgtagttttttttttttttacttgcgttctatgtgaagttacggaaacaatcaatcaaagcacccatggtggccatggactcttcacattcgcttctcgctcatttaaattttcaacttaaatatatgaacatttcatttctttcttgttttcttattttcactttctctttatcaaacacttaaactcgttgattttgctaattctctgagttgtcgtttggtgtttgtcatccttcttgagcacaaagctgtttggattttctcgactttctacaatacgatatcacttttgatactcttgattgatttataattttttgtttttgttgaatatggtttagagtgaaagttgatgggcgagaatgagtatcaagcagcaagtgatgattgagattatcaagtagcaataattttacataatttcaaaaacttagcttgccttctaagcttttactatatatttttgttcgagttcaattttacttgtttttaaatgtaggactaga

SEQ ID NO: 65102 - DNA, 823 bp, Cucumis sativus
  Intron number 1 from transcript Cucsa.275200.1 (locus Cucs a.275200) derived from phytozome v7.0 (chr-ID scaffold0258 1; pos 30163 to 30985 reverse strand)
tagcagtgacttgctttggagatttcaggttttcttccttcattcccatgcatgtttattacaacttgttagatgatctaaacttttgtattaattagtttgttggtttatctaaaaaatctcaatatttttcttcattgatacatcactcaattgcaaaccaaagtttaattataatattttgttatttttaaaaatgtcctaatttataatttatttttcaggtttaatttttctcataacataactaaatacattaattttagaagaatttttaaaaatagtagattttataaaatatttacaacttatagcaaattctatcacttatagtcattcatagtaatagaagactataaataatagaatccgaaattttgttatagcatgtaaatattttaatttatttcgttattttaaaaaatgtcccttaattttatcctaaagaaagtttatccttaattcaccttctggaaagtttgttcaatttgaatccatctactttgaatatacaattttaatatatatgttaaataaatcttatatttagaatatagtactaatttacatggtttgattctttttttaaaaaatttaaaaattatttattagtatttttaatataaaattttaaaacatacttgtattttattccatgaaaacgattgtttttattattatttaacccaattggattaaaaaaaaaagtgtggcatgtgaaattatgattttctttttaagataactgaaaaaagtgaagatgatcactaattttggaagctttccagtttctaagagagaaaaatttcaaacaaacaattcc

SEQ ID NO: 65103 - DNA, 415 bp, Cucumis sativus
  Intron number 1 from transcript Cucsa.280190.1 (locus Cucs a.280190) derived from phytozome v7.0 (chr-ID scaffold0263 3; pos 107045 to 107459 reverse strand)
acgaagttgttgagaacaatcctcttctcaccaaggtattcacagcttctgctgagttgttggttggttaatcttatcaataatttcttcatttgtacttttaatatttattcgaactgttttaattatctgttgagaatgtcaatttgggttgtttctacttttatgagatttatactgcaatgatcggaatttaataaaggacttaaagaatgtattcgatcatgttagtctaatagttaatgggagtcatgggtcgtaatgtaagacggtatgtcctataagttcagtcgaaatgcgtatacactcacaagaaagttagttatttgaaaaattatcccatcaaattcaaagaacaaccattttactctcggaaacaaaacatgttgagcattttccttcttgattcagcttt

SEQ ID NO: 65104 - DNA, 664 bp, Cucumis sativus
  Intron number 1 from transcript Cucsa.255010.1 (locus Cucs a.255010) derived from phytozome v7.0 (chr-ID scaffold0222 9; pos 3156026 to 3156689 reverse strand)
caaaggtacgtgatgagtaaataacatcattattgccctcgatttttttaaattaggcttatgaacgtcatttttatcttttgttcacttttcatttctataatacttgtgaaaattcaagtttagacttgaaagagactaattttcaagataattgtttttgtttttcaaagtttgactaggaaccattaaactacttttcaaaaaatatacaaaaaccataatataaaatttagaatgaaaattgaacaaacacgtaacttcactagcttaaaactaaaattaagctaaaaacaaaatctctaaaactatgtttagcgatcgtttggattttttattttatattattgaaaagcatgtctattaactcttcttccaccttttaatttcttgttttgttatctgttttaataattaaaaaaaaccaaactataactttcaaaaaaattaacttttaaaaataggtaaagatgatcataaatacaacaataatattaagtaacatacccaaaaaaaatgtatatattaacaaaatattatattcaacttttaagatatatattgttaaaatatagagacgtaacattttaatttggattataattttttttggataatgtaaacatttgagttttatgtgtttgaaatttttagggaagagttc

SEQ ID NO: 65105 - DNA, 514 bp, Cucumis sativus
  Intron number 1 from transcript Cucsa.299480.1 (locus Cucs a.299480) derived from phytozome v7.0 (chr-ID scaffold0292 0; pos 59260 to 59773)
gtcctatcttcaggtcagttttctgttttcatcttctgactttcctatctcaaaactccttcatttttatggtactcaaacgacgtcgcttgtcttgccttagcttgactgtgcaattagagggctagtgtaggcatcatctgattctgttcacttgcacgctcgaaaaaatagccttttcttttcgtaaaactgtgaacgtaaaaggccaaaattttctatatatcccctgtaaatttcaaactcgatggatggctgtgtgatagacaaggggaatttgatatctattgatgtgaaatgaaaagggaataacaacatgtcaatattcaatgattttaatcatatgctagtggcctaagattttgatgggattgcactatagttcgttttgccgacgttaaaagttacaaaaacatacagtgatgagtggaaacctcggaaacctgtgcctagggaagaagtgttgcttttgtttgtattaatgtccaattacttttaatcaagcaggttccac

SEQ ID NO: 65106 - DNA, 377 bp, Cucumis sativus
  Intron number 1 from transcript Cucsa.181730.3 (locus Cucs a.181730) derived from phytozome v7.0 (chr-ID scaffold0125 1; pos 25820 to 26196)
cctaaacctgtagagaaccttacccgccggcgccggtatcttcctcttcctcaaactcaaactcaatcagtttctactcattcataaatcttttaagcttttcctcttcttcttttttttggtgtaatttcgctgtcacctgctcgatttagggtttcgttttggttttttgcggtttcgttttggattttactatgtttggaggttgtggatccaacaatttgagtcatagggaaggatacttggcaacgatataaattgctagtcaagtttataactaatattgacactgatttgatttgttttgtttgtactgaatttgtgttgagctggatggattcctttgatttctgagtaatttttgtttttattttcag

SEQ ID NO: 65107 - DNA, 793 bp, Cucumis sativus
  Intron number 2 from transcript Cucsa.181730.3 (locus Cucs a.181730) derived from phytozome v7.0 (chr-ID scaffold0125 1; pos 26423 to 27215)
ctctcttccaccgactccgaatctgattactcccggtaacctcagtaatttgaatacttcttctcttattatgatgttttcatacctttgctgatgttcattagagtttgaaacagatagggtgatttagttattctgagttcctatcggaaaaaagatttaatttttctgagtttgtcattttttaatgctttctgtggaactctgttgagagccttatttgatttgttcttttttggcttttcctctcttattggaagtcttgtgatttaatacgcttatgattaagttgtttgtgagagtttcctggaatgagaacttcatcgcctgtttcagaattcgaaatttatggattttttttatacaaaaaagctaagaatttggggctcatcgtgtatttcctactctggtacaaaagaggcataaatgtgtttgcctcttttagtcaataaaaaatggaaaatgaaaattaagaatgggttctaaacacttgtttttctcaatagtaataaataagaaacaaaaccattagaatggaaactttaccccataaacgaccataaatttcaaaaacagaaaactaaaaatgtaatagtcatcaaacaggcctaatttataacctaatttatactgttcaagattatgtctcagtgagcgatgttactgggttttctagtcaattattttttgcaaagcacattttatgtacccaagatagttctaaccagttcttgtatgtatacatgttgaagcaatagctcttctgaaagtgagcctgaaacatcaagccgct

SEQ ID NO: 65108 - DNA, 687 bp, Cucumis sativus
  Intron number 1 from transcript Cucsa.303140.1 (locus Cucs a.303140) derived from phytozome v7.0 (chr-ID scaffold0295 1; pos 1125181 to 1125867 reverse strand)
tcgcaaagaagctgagaattgtgactgtttgcaaggtatgagtatgagatttttcttccttgatcttcatttcttgggccatttgagtagaaagatgttaacaattgctccttagagaatgaaagaactctgtttggtgtattgagatattgatatattgatatattgtgaatgcgaattgattctataacctaaagctgaaaagtgtgaggtgtcctgttttggttaactttaacttatcaaattattaggagcttaatatggaatcataagaggaaacccaagaaatgttgttggaatgtcttagatttattatttgactattcaaaatgcggtatataaactctctaactctagagatgatgctactttgtaattctgaattattctttctgataacaaactattctccctttgccatagattagataacaaattgtcactgaactatgctaactttttgttgattctctattactttacatgtttatgttctcttcatctgtcaattctttaacatttcctttcaaattaataataatggtacttagaaagttgttccaaatgaactcttatatttgtgaatacaagtgtttaacacaaaggttgaattcaaatcttagtttgaatctcgtttggttgtgtgaaacagggtttcaagtttgccattcacttggaggagggact

SEQ ID NO: 65109 - DNA, 862 bp, Cucumis sativus
  Intron number 1 from transcript Cucsa.162550.1 (locus Cucs a.162550) derived from phytozome v7.0 (chr-ID scaffold0114 4; pos 2148835 to 2149696 reverse strand)
tcttccgtttatcacaatccccgcgctttttatcagttagtattattcttacttacttaccaattacacagatattcgttcttttctttggaaggtggagagggaaggaaaaattattaattattttacgttataatctataaatctgctcgtaatcatggcaacttcctcataaattagagtaatttcgatttttctatacttatacttatcatgcaagggaagcaaattaaaactattttctttttataaatatgatgatagtaataataaaaaagtagataaagagaataacgtagtaaacacaccgtcaagaacggaatatgttttctagtttgattaaacctttcttttaatattatattacgtcataatatatctttatttcctcacaatttttttttgtctcttaaatataaaaatacctcaaatttacttaatgtgttcgttattaagatgcactcatagaaaaattgtaatattacttgtgacattctttggagaaaaataaacggttgcatcctattttgatcactctgacacagataaagtattaagataaatttgatttttttggtatttattatttactttagctgtgacccgaggatgactgactgtaggcgtgttaagtgcgcacactcatttccaattttcttttttgtggaatagaattgcacattactcaattgcgacagtgaaagccacgtacaccacacacactttctactatcattactattttcttcactaataatccattcactaattatctaataaaccatgtattatgactatagttacccccactggcgacttataaccaataatcatccaataattaaacaggagctacgtggaa

SEQ ID NO: 65110 - DNA, 643 bp, Cucumis sativus
  Intron number 1 from transcript Cucsa.219100.1 (locus Cucs a.219100) derived from phytozome v7.0 (chr-ID scaffold0165 8; pos 962151 to 962793 reverse strand)
ctaccattgtaaaggcactctcaaggtaattatataatataatatgtgtgtgtttgcttatggaaaacgattctacaaccatgcattccatgcttgtttgttgataatgatttatcataatttttttgtttcgatactttattgatcattccccaacatgacgtgattatcggttatcaaaatcactttagatcgttatttggaaaactattttattttattatcattacttttaagaaaataagcatacaagtgtgtgagtgaatttatgttgatcatgttaatccctgttttatatatttaccgtttcataaatttggtgttgaacaactttacattgtaatactttgttaaacaacaattatgagagatcaaacttgatgactaagggtaaatttaacagtctatttttgtattattttcaactaaaacaatattaattaacattgtttctagtttcttatctcccacttattagatatcttttttaacatataaaaatgagcaaaataatttctaaataaaaaaagaaaaagaagaagaaaaattgaagaaatagttaataaattgatttgtatataattaatatgctatatatggttttgcagcttagcaactattgttcctttgagggagtgctcta

SEQ ID NO: 65111 - DNA, 587 bp, Cucumis sativus
  Intron number 2 from transcript Cucsa.175990.1 (locus Cucs a.175990) derived from phytozome v7.0 (chr-ID scaffold0122 5; pos 416981 to 417567 reverse strand)
agttggcgttgttggtcaatctgaatctccagtaggtaatgccctaaaactttatctgagttaaatggaatgtatttgttttctgaaaaccccactgaaatgttgttaggattgattaaacgtttgaatctatgaatattatttgggagttcccttactggcttactcaatttgatcagtgcaggagagaacggcataaatgatttctaaactcatcaggagtgaaatcatgctttcagtcctttaaacattattaacttaggctataatctagttctaggtggctgcctgttctttgtttttcttggaggcttttagggagtgggtttttctacaatttttcagtcataactgggttttgctaagcagtgtttttaattgtctgtgagaacttccaactactggtgaattgtgtatacagaagaacagtctaagactgttctacagtaatttccccacctaattcagcaaaatttgcaagctatatcataagttaggaaattgtgagcttgaaacgtttgtgtgaattttaacgagaccaacttctctcaggttgtcccattaacatcaaacaacctgttcgtcca

SEQ ID NO: 65112 - DNA, 805 bp, Cucumis sativus
  Intron number 1 from transcript Cucsa.164370.1 (locus Cucs a.164370) derived from phytozome v7.0 (chr-ID scaffold0114 8; pos 241970 to 242774)
ctgttgtcacgaagaccattgttgaagttgttcaggtaattaattaacaaaaagctttggattctttggaaattttggtcattctggtttagattttttgtgaattttagtttgtttgtatgttgttaatattgaagaggttcaccttttttaatgatcttatttgtttcctatgtcattggttttagatatggattatatgatctggagattaagaaatgattatcgtaactaagaatcttgagggggcatacttcgacttcagtctttttgtctcgttcattgtatagaagaaaagaacagaggtctgtgttaagaaatcaaccattaaacagtacaaaaaacgtatagaaatcgacacaaagatataagtggttcactaacagtgtgttgtgttagctacgtccacagggtagaggaagaacaattttgttagagaaagttttgcagaatacaacgcggggctcctaggttagagaatttatatattggacttctctaaaccttagggtcaaaatcgtaaatatctcatgaataagtatatatactcaattacaaaaattgaagagtcctgtactaagttgtttgtagcgctacataccgaattcaatgtctgacattggttatgtttgccgtggttgaatgactcatcttctctattggccaaaattcttgcccatcttgtttgacccaattttctccccaactccattattttaaatcaaattgagttaggagttggaaagttaatttttctgtttttgacagttattcatgttatttattactttttcctttgtttcag

SEQ ID NO: 65113 - DNA, 565 bp, Cucumis sativus
  Intron number 1 from transcript Cucsa.283560.1 (locus Cucs a.283560) derived from phytozome v7.0 (chr-ID scaffold0265 3; pos 635884 to 636448)
cctcatcaccgccgccgcccaacacctccgccctggtatatataatttcttctctttttcctttttcttcctctctttttttcccttttcaccgttgattttattatacatatataactaaaaaagttaaaatatgtaaaatgttggagaggatggtgggtttttttttcttttgaaaagcaggttggacgttaacaaatttcataatgttaatatgaaaaatatactatttaaatgttaaaataacaattaatataattaaattttacagaagatacaatcaagaggacattgaaaaatttaagctgataagttattgtgaattattaatgaattatgcgtagatttaatctagactttttccatggtactaaaactctttcatactttaattactattgtaggatttttaatcataacgcattgatttgctaagtttatgaatcaaagcacattaattatttgaggagactgttgtcatgttggtgatatataacattgaagttgtcttcctgttgtgtttttcttagccattttcaagtcattgctgtacgaggcgtgcggt

SEQ ID NO: 65114 - DNA, 949 bp, Cucumis sativus
  Intron number 1 from transcript Cucsa.149970.1 (locus Cucs a.149970) derived from phytozome v7.0 (chr-ID scaffold0111 0; pos 935779 to 936727)
aacaagaacaacaggttatctctctgcctaacttatatttatctctttcctttttccctttttctttttcttttaaaattatatttttaaaattacaataatacctctctattttcgatatcctttttagaatatgtttaatttagagtgaaaatacgtttgatggaacgttttgattgtaacatctaacatccaatattcttttagactccattttattctctaattctttctcctttttgtgcattaattacttcctattttacattttcaaaacttttaaactacaaaaggataagtggttaatcaaatttttgttctacatcattttatatacttgtttttcttcaatattttgaagaaaaaaaaactattaatatactttttcaaaacatttatgaaagttaggaataagtttgtaatgtttaaagtatatagttctttttaaaaaattttaaatatgtcataattttttttgggtgtttttttttgaaaatataaccatatctttttattacaaaatatacttcaaattgtaaaagctatttttaaaattgtaataatagtaacgtttgatggtaatttctcttttgaaaagataagtacagtttgagaaagaatttgaaatcaaaatctttcgtttttacaaaaataccgatcttagttgagttttaattttaaaggtgaaaattgatttctcaacctatataaatagtaatatgtaggtggattaatttaagaattgaattgtgtggaggattagtttgtaagcatggtaaaataacaattcatgaagttggttttttgtttttttaaacaaaccaacaattgtaaaacatatatagctttttctacaaatgtcttctcttttcctcacttagttcacttggctcaatctcctttttctatcttttcattttctggggacaatgttcaggtgttagagtgg

SEQ ID NO: 65115 - DNA, 902 bp, Cucumis sativus
  Intron number 1 from transcript Cucsa.258410.4 (locus Cucs a.258410) derived from phytozome v7.0 (chr-ID scaffold0222 9; pos 5383959 to 5384860 reverse strand)
tttcgctggatctcaatcgaactcactggtctcaggttcgtcttcttcattttctgagatactgcatcttttttttcttggctatttaaacttcttgtgactggattctgggtttttattgggtaactatggggtcttgtttaccggttacgttggttttcgcgtttgtcggagctggtcaaagaagaattatactaaaaggcttttgctatttcattgctttcaagttgtcactacacagaattcaattaaagcggttaacgtttttgttgttgttgaaatcttaaaattagttgacattttcacgtttttaaagttcctagttcattcaattcgagggttattatcactatcatcattactactattattggaagagtattttgtagttctttggtgtgatatgtacatgggacataatgcttccgtctattttttttggaaactgacatgtggtcgtgttgtattcgcgtttgtgactattggggaagaatgtaccggggatatggcaaggcggtctattcacaatgtcatgtgatgagactagtcatgttgtttctgcgttagttcacgtcttcaaagttttttttcgtgtttttgttttgatcaaagttccaaaactagcacgtttgctctcattttgatgattatctcgttcaatgtttctttgaattatttatttttgtatgaataaattattttcaacgatgttcctaataaaatatttactcacgttttctttaaacgaacccttttcttccagttggttttgagtctgacttatcatgcacgaaggaatcttatttaccttttattttccctaattattttgtttgaatcttttgttcatttgttttcatgcttcaggtttgaattttatcctgttctcaggccccactctg

SEQ ID NO: 65116 - DNA, 1053 bp, Cucumis sativus
  Intron number 1 from transcript Cucsa.149880.5 (locus Cucs a.149880) derived from phytozome v7.0 (chr-ID scaffold0111 0; pos 793959 to 795011 reverse strand)
ttacaaacacacacacacacacacacaaactcaaggtaaaaactctgtctatctctctggactttttagtctattctattctagaaattttcgtttcatttctttcttgaaatggctttctattctatttttcttcttctttatttctcttccacaaacagatctcactctatggacgcctcgccattcttttctcttctgttactattattagattctgatgtgtcttcattttttaccattttcttttttttcaactcacttctgtcttcctttttaacattttcgattcctcgttgggggaaattattacagttgttttttccctcgtccatgtttcttttgctccatttcagcaaatacttggcggattttgcttcaccctctacttcttttaacaataaaagaaaattataatcttcattttcacattggtgaatcagaggagggaaacgtctcattatcaaaacggtgattgttgaatttgatttgggttttaatttctctcattgatacttggattcaaggggtgggttttccctttttctttttgttcactgtgtgtgtttgtgtgtttggaggggcccaacatcatgtgtgaaaattctaatcaatgggggcaaaggaaagtggaaattgtcggttgttgttgtcggatgttaaattttacagctgcacttgatatgctttcatgttcatcatttgacaatttatctccacttatcttttttttattttctactcctttatctgaattcttcatcttttcccccccctgaatgtcttaactcaaatctgaagattttatttcaagatcaaattaattggatccgttgttttcccatcttgccagattgtagcttgtagggtaggttttgttttctgttgtagattcaatagatttgttacaagcttctgttttcaagtcacattttcgtgtttcagacctataatcaatagatgcaaacattcatacataagaaataatgaaaatggactgtgactaataatctgtccccatagattccttttgcagatttttgataggcaatc

SEQ ID NO: 65117 - DNA, 900 bp, Cucumis sativus
  Intron number 1 from transcript Cucsa.239700.2 (locus Cucs a.239700) derived from phytozome v7.0 (chr-ID scaffold0204 6; pos 568809 to 569708 reverse strand)
gccaaccttgaattgtcaacgccatcaacaacaggtaaatctttaatctttctctcttttcacacttaccctcatttcctcacctactctctgccttcacgtttgtttttgagaattttattctcccagtctcagccggcgccttaacggagcttccatgccacccgacaatactccttcatcattctactcttaactgtttcaattcgattcgaccacatggggtttcctttgtttatatgcttaatcaattaatttatttgggaagttgaattgttcgcaatagtctccctcatggtcttcttttccaactctcttctgctttttgtcgtcatggttttggtcagagcgtccccttattgcgttggctatcccaatctctagaatttaagtatcctcgtaaaaccgaaatatcatttcctccctccataatcctgttacaacttatggcgtcttcttcttctttaggtttcatctttgttctttgtgctattgtttccatcgttagccacctgattgtttcgtctcaagctcagaattcaccacaacccatcaccgatcctgatcaaggttctttatctctctccttttccatctttagtgtgttctcggatgaaaaagttgtggtgctcacttttcttatacacgaccaaaaacccacttacatcttttgattttttcagtccaaagttaagaaacactatacaattcacctgaatcttttattttgttcatggattgagattatttatttatattcatctttgtgaggatcgccaaggagtggatataaatctgaacgctttactccaacaactatattatatttgattgattatgtcttctgagtgtatgtgtgtgtgtgcgcgcagcaagagctttgaattccgtatttagaca

SEQ ID NO: 65118 - DNA, 398 bp, Cucumis sativus
  Intron number 2 from transcript Cucsa.175550.2 (locus Cucs a.175550) derived from phytozome v7.0 (chr-ID scaffold0122 5; pos 200239 to 200636 reverse strand)
cattttgcgagtatgtattgtatttatatagtaccttaccgcctaaaattttatgcagatgttgtcctaaaggttgtttataaactttaaaggaccaccattgcatttggataaataattgcgtcggccatgaaaactataaggtgttcttcgtgtttgtcgtgtacgctgtagttgcatgtatctactccctggtaagacatttgatgcaatgtgatttagactctctatgtacagtctattagcttatttacttgtgattcttcctttgtttttttccttctgtcttactcattgaaatagttgcacatagacatcctccttataattaaatttctgcaaatttttatgttgaatcttcagatattactcattggcagtcttacaattgaacctcc

SEQ ID NO: 65119 - DNA, 900 bp, Cucumis sativus
  Intron number 2 from transcript Cucsa.250030.1 (locus Cucs a.250030) derived from phytozome v7.0 (chr-ID scaffold0221 9; pos 148356 to 149255 reverse strand)
agctctgtgagttacccattcattctttgctgctctttatttgatttctcaaagctacttgaattttcattgtcaattttaccactttccctaattttgaaattgattgtttttgttatttgggacttttggtgaagatcctgttcttagtttgttgaaaattgtgtgtttgatcacccatttgcatttgagggccgttattgctgttgttttttttatgcataacagaaacaacattcttcaatttgatgaaatgaagagactgctgctgactatgtaaattcaaaatattagagagcggcaagtgcacccagctatgtcaacttggttaacacaccgatagtacccacatcacaccccaataaagtacagcaattaaattagagtactatataccacgatgacattgttacattgcacgaatgaatgtattccaattaagacaaatatcttgaactgaataatatgaaaatagtttggaaagacagcagcaagaggaagcttaaaacggtcaaaccactaaagtgacttgtcagatgtgaataacgatgtgtagcaatctgttatccccgttgcttcgtaggatgtgtagtattttcgatattgggtcgtttgaagcttaacacattttcatagtagctataagattcctcaaattcaaagcacttcttttaggattaaactctaaatagctcttatattagagctctcaggtatgctttcttcatgttgccttgagctcttttctctcttctcctctttcctcatgaagcttggtactccaaatgatgaaatgaaaatgaagatctcctttgcatgaatcatatgaatgctgcttccttaactctccttatatttgttacaggttttaggtgtcaaaagaagacaagtgtctatagg

SEQ ID NO: 65120 - DNA, 334 bp, Cucumis sativus
  Intron number 4 from transcript Cucsa.252300.1 (locus Cucs a.252300) derived from phytozome v7.0 (chr-ID scaffold0222 9; pos 1240791 to 1241124 reverse strand)
tcgggaaagtcccagatttaccaacgctatttgaggtttttcttttagttcctctctccttatttattttcttgtctctttggttttcatatttgaatgttttctaggttgtcaattaacttgtttgagtatcaattctttgggagttttgtaagttcagcattatactcttttcatttcatcagtgaaaagtttgattttcttttaaaaaattaacttgtttgagtattaatgaattttcttgcaaatcaatggaaagttttgtttttggttatgaaaagtaattattttatattacattttggacatgacagtgtcgctggcaagcaagtcc

SEQ ID NO: 65121 - DNA, 825 bp, Cucumis sativus
  Intron number 1 from transcript Cucsa.220090.1 (locus Cucs a.220090) derived from phytozome v7.0 (chr-ID scaffold0165 8; pos 1639507 to 1640331)
tcgttgccgtcaagtacatcgagagaggtgagaaggttagtcagctggtaactgtcattgctacattattatgtttatttctgccaattctttgaattttaagtggggattgtttcaattttctttgattttcgtgagttagtttgaactattgtgaatctgcttctgatagtatacatttttgtatgtttcttgtgttttcgatttctagagtcggttgaagatggttttctttttttcttgttgatttgagagaaaatatagagttattcacaccttagaattttgtttcttatcaattacaaataattcgtttgtgatgttcttcaatttaatttctagttttttaagtttttattattgccatcagtcactatgaatttatacgggttatgatatttagtgtgacaaaaaaattgttatgatagagaacatggaaatgccatatacttgatataaaattttgataatttaacaaatattagtgtattatgaatttcaagacattctatggagtataaattattatttagtttattacaccacatgtggaggtcaggaaatgggttaatcattgagttatgctcatgttatttgagggttgccttgtacacaaaatctataaatttagttttaattacttgaatttaatgtgaagagataataaaaaaacgatcaagacattctatttaggggtgaaaagaagtgcttgcaacatggttagtttagtgacaacatgttacaatatttaattactttagtcagaatacttcatcaaatggcggtttaatagtatttaccagctccattgcatttgacagatag

SEQ ID NO: 65122 - DNA, 973 bp, Cucumis sativus
  Intron number 1 from transcript Cucsa.273180.1 (locus Cucs a.273180) derived from phytozome v7.0 (chr-ID scaffold0251 1; pos 223481 to 224453 reverse strand)
tctcttacttgtgagttccccaatttcttttttctccatttcgaacttcatttttctcctaattcttcacttcggttgactctattttggttggctcctattgttttgtggatttggcgttgttactatttctgcctccacggaattgctttcaggaacttcattttttttttttgaaatctctactttttgaccgttgatttagattattctatctcgcagttgtagttcagcaatgcaactactgtttcgcttgtggagtttaaattatccatttttgaaattgaaattggaactacttgattaatgcgaatagcagcatttatagcattcattttcaaaatttaactgcgcatagaattatcggtagtagccgacaaatttggattaatgaaggtataggcgtcggttactgcttcgattttcatagtatactagtttatgtcatctttcaatcgtggaagtctgtaggctattaggcgttccagctaactactcacctgagatttatccctcactcaacttagttattgtgaactgctggatcatcatacgtagttgatatctgtcgattaactagagttgtattactgaattatgctgtacattgtctccatatttgacttgcttgtattctagcctctatgtgatgtttttcgttcaagtttttgctaattattctattcaagacatttacttgtattcaaatgcttttattttctccatttaagtttgtatggtctctattgtgttcttattctcctatgttttctggtatcgtgtatttttaagcattagtctcttttcattttatcattgaaaagtattttttttttcaagagtagggaaaaaaaagcagttgatttctcttccttttagctaaaaaaagagagttacatgctatagatttctttccatgtttatattgatattattattcactttgatgccatcaacagaaatctcagagaag

SEQ ID NO: 65123 - DNA, 894 bp, Cucumis sativus
  Intron number 2 from transcript Cucsa.149300.1 (locus Cucs a.149300) derived from phytozome v7.0 (chr-ID scaffold0111 0; pos 143207 to 144100)
gtcgtttggtatctgactttataggtaagatttaccatatttttggtttatgtcattttcttcttgtccaaacccatctctgttttctcgtcttctttgtgctgctaaactacttggtttccgatgaccatttctgtttttctctctatacatttggggaaggctgaacttttcagttttcgtgacttttgtttctcttatgaagcacaatacttcatatgagctaaagaatcatgttttcattctgacttatttgacacatctcatgtatggatgacctttttttagcatatcctttttctaaaccaaaaaaataagcaactatttttatgatgatccttttaagaattaaaaagctatcatctaatattttctaactcaaagttaaacaacttatttaaaatactttttctctcgttcaaaacttaaaccgacaaaaatagatagaagttcaaatcttattatcatctcattcttgtcatatcattgaatctctacaaagtctcgtaaaacataactcttttgaatatttcagtaatttaaagaagttctttgtttattttcgttcctttcctatgatcttttgtctaatcattttgtctctttcttattgcattctattgatcagtgtacttcaataattttgatgtgtttttttattgtactttagtatttgtatttcatttcgtactattcttattaattcgacattttatgatttttttgtgaacttggtgaattatatttagtatccttatttgcaaacatatcagtatcttggttttttaaaaattgacatgtcctcgtattttatcgtatctttatcatgtatctgtatttgtgtttctctatcttatagctgaattcgccaagctgcctttgatctcacctttt

SEQ ID NO: 65124 - DNA, 573 bp, Cucumis sativus
  Intron number 2 from transcript Cucsa.251160.1 (locus Cucs a.251160) derived from phytozome v7.0 (chr-ID scaffold0222 9; pos 275988 to 276560 reverse strand)
cagataatcgaagaagggagtcttcaattgagaaagtacgaattttatctttaccttttcagatctaatttcagacgcattttacgccttgctttcttacgtgtttcttttgctttcaatttgattatcacttgtttttctatcttactgttgaaggaaattgaattctgggacgttaccctcgtgtacattctttagatgttaacggatattggtataggaactgtttatttataatacaaattgctctagtattcaattaatggtaccagaggaaatcctgatggaaccatcccggcttagttaagtttactttttccttgaagtacaagtttgagccttcaatttatggagaggaaccccgcctatcttctgagctaataggatcagtctttatctttgaaaatgataccacattagaatcgacatttggacctgttgtgttaattactccaagcatgaaattagtgaaatgaagttgattatccttcatcaaggttttttattttccctttttacctatttccttaaacttgaaatgttcttcatggcctggcttgttattttgtctag

SEQ ID NO: 65125 - DNA, 455 bp, Cucumis sativus
  Intron number 1 from transcript Cucsa.219540.1 (locus Cucs a.219540) derived from phytozome v7.0 (chr-ID scaffold0165 8; pos 1277335 to 1277789)
agtgcttagaggtaagagtttttagtcgtaatttctttttatatattgagatcggtagaatactaacaatatcaattaaaactaaagttttctcttatcaaattctcttctcttccatctcttattttcgtatcaggagacttcaattcatcttaattttttttcttctcttaattagctttgagatagaaccatgctataatagtaagtaacatcttgaggtacatgttggagatgttgagtcttatgttgtaaaaatcaaaagatttatattctatataatatagataaattactcctttcaatttcaatttattttgagatgaaccagtacaatcaaacttatagcatatatttacatgtaaatatatgtaagagtattgtaaatgattaaatagaaacggagaatttggattatagtgatagagaggaggacacgtggcagagtgggtttc

SEQ ID NO: 65126 - DNA, 528 bp, Cucumis sativus
  Intron number 3 from transcript Cucsa.219540.1 (locus Cucs a.219540) derived from phytozome v7.0 (chr-ID scaffold0165 8; pos 1278141 to 1278668)
aattggaaccaccttcgctactggctctccactcggtactgattctttttatgtctattacccgtctaatttcagtgtttcttcttgatgagttttatgatttgacgagttcttcttttcaattttattttggggttatttttttcttttagtattcaatgtgatatattgtgaattatagtagtgaacattgaaactaccctaatttctaaataaaatctggatgttacgtatgtgttgctaattgttacagttttaagaaagaaatattgcatattgcataagtttcagtctaagtgatctaatgcgacttccactctaacgttaaagagttttatgattgctcttgactgttattggaatattaagaaattgttgctggagctgtttagaaaataacatagtagttggaatttttgagtttgttgcggattttggcaaagattcagcttcattttattaggtatcagctaagggttattcttgatctcagtgttaagcaagccaactggtcaaaagaagcacgct

SEQ ID NO: 65127 - DNA, 1012 bp, Cucumis sativus
  Intron number 1 from transcript Cucsa.234800.2 (locus Cucs a.234800) derived from phytozome v7.0 (chr-ID scaffold0200 4; pos 10425 to 11436)
ctgccctactttaccgcgccttcaaaggtcagtcttctaatttcccatttcttctgcttctctatttacattttactctcccaattgcttatctgttctttttttcttttttctattggctggcttgaggttttgattctctactggagataatcgagttaggaaaatgggtggaaaattggggataaaggggagaatctattgagtatgtgggtttttttctttttctttttttttttaatttttatgaaatttaaattgaaattgacctattcaattgtcctgttttgatcgttgagataagataaggtgggtgcaattccttttgtctttgggttttgggtgttcgttttcctttggtgtttaagtttcaagtcttggagtttgattttagtccgacaactttactagttttatttcaaaatttagtttctagcttctatatctacacttttaatcttgaatttttactgaaaacttattttggttgttattgttaatgtttattaattaatttgaaatataatatcaagtagataaatttggcttgtctcgaaggtaattgacaagattttcctctttattgattcctcatcttccaagttgctttaacgaaaaaaaattatgaagtggaaatctaaacttaattttaatagtgataaaaacaacagtgaaacttagttaagcataatttttttaattatttttacattaattaagaaataaaaacagtaaagatcgaaagtaaacatttagtgaaaagttgaggttggctaagagtacctttgaaatatgtaacattatgaaaccaagacactaaattgaaatgaaactcaagatttaaagacgaaaagtgtgaggttttgaaacatagggaccaaatagtaggagaccaacaatgtattttttttctcaaaagtaaagggtttagatgaaaattgaaatgagattgtggtgactgatgattttgttttggtattgattttatttgattcgtttttggaggttttgg

SEQ ID NO: 65128 - DNA, 1002 bp, Cucumis sativus
  Intron number 1 from transcript Cucsa.197760.1 (locus Cucs a.197760) derived from phytozome v7.0 (chr-ID scaffold0135 7; pos 1031516 to 1032517 reverse strand)
atcacattttgccttactctaaggtagttcccctttccgaattctgttttttttttttgttattcctctgttttaggactgttgtgaggtgtttttgtttagttctcgtaatttaggctgtgggatggaaatgagtaagaactcttgataatgtgctcattagagacatggtaatgtattacttccaattcttgttgggccatgctgaaattagcttggtgggtttttcttctttgtacatatatgattaggctgttatttttaatgtattgtgacttgaaaatcttcaatttctgtttctatttagttttttttctttttgaaaaggtattgtaacagaagttgggagtggaggatttgaaccggaccttttgtccgtggtacaaacaagtggtggttaagctgagctcatgttggccaatcctatgtatttaatgagttgttttcaattttagtattggatatttgaagtttgtatatggttgttgaattgtcttattatattctcttctgtctgtcccagaagatttgtgtacaatattgtttttttattgtttcctaagtttttgtggactttaccaaccgaagagatagcattggaagatgactgactaaatggttaagtttatgcgaatggaagcttagtacgagcaactaaatgtgttaagaaacgaatgaaccgatgaaatgaaaattaaattactttggatgcagttagttatcagtaaccatgaacttctttgcgacttcaaaatttttaagggaggtttgggatcttatcctaattgagtgtgaatattccattaggcatccctttatcattttttgtatttgctgaaaagttgagtatgagattctgagagtctacttgttatgaaatatctttgcgatatttatttcttaataaattcagtaagtgtttttgagttacccttcaggctgagtgtatgaatacttcatattgcagggaggaaaaagcacactggaaaattgtcaggtctt

SEQ ID NO: 65129 - DNA, 791 bp, Cucumis sativus
  Intron number 2 from transcript Cucsa.238290.1 (locus Cucs a.238290) derived from phytozome v7.0 (chr-ID scaffold0202 3; pos 910884 to 911674 reverse strand)
gttgtgcagaggctctagaggtatggtttgtggaattcctttgttatcttcattgatctcaatcaaatatgcatgtaaaaacgtagagtttgtgaaattgttatgtcttcacctttctgttatcgacgtcgagcttgaatttgcttagaagcaattgtatctgcttcatccgaagaaatttaatcttgaaagcttggatgtttcgaaagaaatccattattatcgagcttctgcgtctatacttccttttagggatttctgggttgtttcccaattgccaatgcatggataattgatcgaatttagatattaagttgtatgttaaactatttctgggtaattgccagttcacccggtgattactttttttttttctctctcttttttctcttgagctaaattgtgtataggacctatttgatagccattttttagtcatcttttgtcaagatataagtttgtttgttcataatcccttttatattctatcaacgtgtttagcaattttaaaatttaaaattagtattttgaaaagaaaaaaaaaatcgaaatttggctaagattactaaagagttttcttgataaaggagtttaaaagtgaaaaaaaaaaggacaaacacgataagattgcaattaaacaaaagtgaacttctcgtcgaataaggcttcaattttcatttgtatctattttgggtttgattcatgcaactcttttaattgacatcatgttcttaaacttttctgacatatatgaagaaggaaaaagttaactcaaataccaagattgtgca

SEQ ID NO: 65130 - DNA, 507 bp, Cucumis sativus
  Intron number 5 from transcript Cucsa.193420.1 (locus Cucs a.193420) derived from phytozome v7.0 (chr-ID scaffold0133 5; pos 352736 to 353242)
acaatcagttgcgatttagtctattgtgccaggtgattaattcctttgacttgcagatcatattttcatcctctagcgggtggcattgtatagagtgaagatatatacattttccttgttctgttttgaaatgtttgttcttgtgcaagatacgtttctgggtttgctttaatctagttggttatttttcactgaatacacttccaacgaaaaaaatattaactaattaatcacacaaaaaaagtaatcgagtgtcattttgtaacatatataatttttttttttgtaaatttcatttatccatcgtctagaaatgctgaacgacatttgtaagtagtttatgtacagaatatccaatttgctaggtgactgagacattggtaattatcttaccaatgacatgatttctttctagtggtacaacttccaacatttattttatatttaaccattgaatctctgtgctcatcaggctgctctgttggcgcctttggttttaaatttgaa

SEQ ID NO: 65131 - DNA, 722 bp, Cucumis sativus
  Intron number 1 from transcript Cucsa.138870.1 (locus Cucs a.138870) derived from phytozome v7.0 (chr-ID scaffold0106 6; pos 132718 to 133439)
ttaataaagaggtaatcggggaatttctgccctatttcttaatttgcttttctgggtctcttttgtaatctggttggagtttggaagttaagtttcttgataaactaatctacgtagggaattgcaggagaaagtttcaagctactgagatagggatttctgttttttaaaaaaatgatcaataagttgtggaatctgatctactatctttagtttgtgggggaaagtctaattaactaagatgattcaatgattttttttacctcgcatttagcgaactcagttcttgttattttagaacttaaagatactgttgtacaacctgtagaacatatctgttcaagtatggtcgtaactcggttctttttcctccatgcttgttatcttaaaacgagtgcaacttcaaattttctattgtttccaaaagatggaaattggtccacgaagagactaattaataaagtctataaaagtacccatttaacttggaaggaagacagactcggtggtacagattccaagctcgcacgtctagtctagtcgggttatgcttctgttatatatatatatttaatgtagtggatgttttagctttgacagacatctctatctgatgagttcttttagtaattattttgaggttgctttttaatgttttacctgaaattgggtgaaatgttcattaaccaatctctttgttttttggttaattttgtagccta

SEQ ID NO: 65132 - DNA, 1045 bp, Cucumis sativus
  Intron number 2 from transcript Cucsa.198110.2 (locus Cucs a.198110) derived from phytozome v7.0 (chr-ID scaffold0135 7; pos 1254020 to 1255064)
ctggtatcgtggctttgcgagattcaaagttgaaggttatcttcattattatctttctatatgaattgtatattacccttttattgggattcgactttctttcttgttcatattctgtttgaatgagagtcatctttcaaatggaaacacggctttctttgtaggaagccgtgggttgctattgcttgcttttaagatttttttttgctcttttgtgagtatgtgcttatttcatatttgataagttagcttattttttagctatatttttatattgttgcattgtttatgtatgtaactgaatgtggtggagctggtgaattaggaattagctatggaatctatcgaacttgtaaattagattttgttactaggaagaaatcagagaaaaatgtatcttacaaaataaaatgacttcgggattccaaatagttcttccagttgggtcaaataaaagaaagattacaggtacaggtcctgtatatgcatgctctatttgtactcttcagataagaacctctaaattgggtcacctggaaaatttacccatatatggacccttgctcttcaatacatttgactgtgtcgatgtcgatgttgatggtactttgagtgtttgaattgggctttcattgcatagcataattataatcattctgaaaagtaatatacgagttcatgagttccaacaagaataaatcatgctgttctttggaaatgcttgaacagtgattggtttctttggccatatgcttacacatctactattgttggaacagacttttcctgacgaagttcttgacatggaaagatctgttcgtacccttgatttaacaaacaataaaataggtgggtgtcttgcactctcctttcttgtggtggtcgtggccgtaaatattcttgaaactattttttggcattaatcatccttgcatctatcatcttactcaaactggcaataatgaaactcctaatctaccaactataacaatttcaatacttttattaacttgccccttttaattattttgcagttgatattccc

SEQ ID NO: 65133 - DNA, 1016 bp, Cucumis sativus
  Intron number 1 from transcript Cucsa.158960.1 (locus Cucs a.158960) derived from phytozome v7.0 (chr-ID scaffold0114 2; pos 988396 to 989411)
gaagcttattcaaccttctccgtaattaagatttgaagcttttttatatggtcatgtttcactttaaactaactggtttctttgttttttcttgtttaaatcaatctccatttgggtttgatgatccatccgtttatgaatttgttgaatttgttcgtaagggagaagaatggagaataaaaaggaaaaaacttgcagactaatgtgtcactcccactctagtacttaagttagcggaaaagggtaaaaaatagaaagtttgagagtaagatttaagttgtctgatacggaacaataacgatatatttatagaggaagttgacgtagctcttcttctcttccctttcaaaatctggttattttacaatctgataagaaaatttgtcatttcattgaattgggtcattctggaaatgccccatatgatgattggactcttcggccttgaaggttgatgtcaaccagctcaaaggggggaatgagtcgaaggatgtataacccaaaggtcatgactcacacctcgtgtggtgactgccttaaaatacaagtttgatctttgggttagaagtatttaggcctaatgatattccaatttctagaaataccaagattagaattttctagagaaattactcgtagaaaatgcatagagtatatcttttagaactctctataatagatcagaaaaaggtgtagtttgaaagaatagtcttgaaagttatttccaaccacttgatcacgaatgagttacaaaattctagtcataaatttaagggtgtcaattcgtataaacagaaggatatctagcttataatttgtgtcgagccaaaaaaaaaaaaaaataagaggtgattcaataaaaaaattatgatcttgtcatgaggtctcggtccatcagttttcgtttttcattattgttgtgatccaaaactatccgatacaaattacaaatccaaaaagcactaatttttctcatttgaaatctcagaatcaagccacaacaacaaaccatttcc

SEQ ID NO: 65134 - DNA, 820 bp, Cucumis sativus
  Intron number 1 from transcript Cucsa.218190.1 (locus Cucs a.218190) derived from phytozome v7.0 (chr-ID scaffold0165 8; pos 335882 to 336701 reverse strand)
aggtttacgcttttgattctgtatcgccggacaaggtttggctttcaattgagtgtcaatgatcttcgtaaattgtgcattacttgtgtaattattcctcattctagttgctgaagatttttactatttgaagtataagtagaataaattttctagtttccgaacaatttgatgattattgttggcgtggtatgaaaccgttgatttagccaagactcaatccttctttatgatatgcaatcttgaagttcgttttattttacaatttagattttttcgtaatttgttcaaattgtggaccggttaaaaggattttgtgaattattagagaagtcgaactgtcagtctttttttttctttcaaagtttcctacatggacttttctgtattgcgttgctgtattgttggaactttgggatgatgaatggaaaattttgtttcttataaaaaatgattaaaaaagaaagaaatttgatgttaatgaacggatagtgcgagttgaacttgagattacggtttcaaattggatttcgaaatgctttggtgcaaagtccacaatgccatagcatatactaaaggtggtgtttttcaagtacatgaacacaaatatgagaggttggcatttgagtgcacctccaagtccttgtcgttcacatcttcctatggttatattctctttgtaattcaagtattagtcccttttcatttcatcccctgataatccttatttcctaaagaaaaacaggaacataaggagtttttaagtttttccgtggttacatttgataggttcaagccgtgcttttgcttttaggtggat

SEQ ID NO: 65135 - DNA, 908 bp, Cucumis sativus
  Intron number 2 from transcript Cucsa.249040.1 (locus Cucs a.249040) derived from phytozome v7.0 (chr-ID scaffold0220 8; pos 192752 to 193659)
ctgctgaaacaattgtttatcaaaaagataatcttgtaagtttgcggcagaatcctttggacaataattaattgatcaattttgcctacaactttacccaatagtgttgcgtttatttattaacgatggttgtaagaggcatatatgcaattttcttgattttccattttttactcgaggcttttaaaattgtatgcaacttttttcagcctcacaagacacattgcctccatgttaataggttgggttaatgaatgatcatttttggccccctgcccccacccttatgagaagttttgcctccagttacctcaaaaaaacatcctgacccttaatcctacaatataccacaactttcatgtttgatgtctgagttggaccatggtggtctctggttttacctatatttggtcaccaagagtgacagtgtgatggtcttttcagattgtggatgatctaatcaaattgaaccttgtaacagttgactactttgagtgacctgtcattgctgggatctgcttagtttccaaattggtctgacctcatatcttgtttgtttccttgtcagccaagttggaccagggttttctcactttttttattagacaaatatgcactggtctaggactgttgatgaatatttgatcggcgagagtgaagaaattttgtgtgctttatttttctcaaaaagaattaccgacttaccatcttattgctactattgtaacttgcatatctggtctggtaggtgttggaggcatatgacaaattcctttttttttattcacaatcatacttgagttacataccatatgcatcaacaatctttgttttgaccatttttttcttgtaatcttcatttattttgcacaggacaggttcttagcattttctccagatcaacatcc

SEQ ID NO: 65136 - DNA, 673 bp, Cucumis sativus
  Intron number 1 from transcript Cucsa.192270.1 (locus Cucs a.192270) derived from phytozome v7.0 (chr-ID scaffold0133 3; pos 147314 to 147986 reverse strand)
gtacctcaactcccccggtggcgccgtcactgctggtattttagaaatatatatgttactaattcagctacttttttgtttcatttgttgtcataatttatatcagtttttggacttgtcattgctgactatgagaatgttgtcaagagcttgaacagtgattgaattaggttaaggttgatttatcatgatattgaagtggtgggagatcatccatgaataatctatgggtttaatttcttggggtttgggttttgtagttaacatatgaacacatgtagtattactatattcgtattacatgctcccaatttgatattttttcacaagaaaacagtaggatttcatcagcgaaaacctatactccttccctttagattggaggttcaaatcttcctacccaagtaccaaagaagatagaatttcaaattatcacagttcgctaattatgaaatttggctaatctcaggctggaattgcacatccctgcccctaggccataatgttaatttccaccgtttgttacccctaactggctttgaattgttttcacattcaaagcttttaacgttccaagagccaacctttcctgcttagaagattcaaagttttcacctttgatagtatcaccaataatggtcatgtatttacagggcttgctatatacgatact

SEQ ID NO: 65137 - DNA, 755 bp, Cucumis sativus
  Intron number 1 from transcript Cucsa.188900.1 (locus Cucs a.188900) derived from phytozome v7.0 (chr-ID scaffold0130 2; pos 4741 to 5495 reverse strand)
tttatttcgcagattcttctaactctctttctcacgttctctcttttttatttgacttgtatactttttgcctctcattgttgcttgttctgatgataattctatgttttccattgccctctttaatgggtcttgtctagatttatgaatatttatgtagtttattgtgggcaattttatctaaatagtttagtttaaatgggtttgcttatatctatatgagtgttaagttgcgaggagtgttatgatgttcttaagtttcatttcttcttaaaatcaggatttgcttgacttgggtatgagtattcagtatccaaagaatgaccaatgcaattttcaatacaataatggttacatagtctgttgaacattcaagttgtactttaacttgacaatgctgacttcatatcttaatctctggttcttcataggtgctttgatcatacttgatacaaatactgcacactgaaaattgttgagtctttagaggaaaactagcatttatagcttgcttggttttgttaactgccattcataccttactttgtttgtagaggaaaataatttatggttgacatcttttccgtccaaacatggattgctgctggattttattttattttatttttgagatactaaagtcatgggatatgaagctaaatggttttattttaatcaggctggcataatattgggaccttcagttcttggctactaattatttgcaagtatagttttcccatagagtggaataa

SEQ ID NO: 65138 - DNA, 764 bp, Cucumis sativus
  Intron number 6 from transcript Cucsa.237280.1 (locus Cucs a.237280) derived from phytozome v7.0 (chr-ID scaffold0202 3; pos 243633 to 244396 reverse strand)
ctattggtttctggaagttgggacaagacattaaagtaaaaattaatttgttgattcttaatttatcctaaagtaatttgaacattctgtgacattcatatattctcttcaatatgagttgcacgatttcactattagagctcagttcagtattgtgaaacattgaaaacgctgagtcagattcacatgatttgtctcgcttgcctgttttgatctcgtttcattagtgtgggcatgtgtttattcaaattaaggcatgtgtatgccaggtgtgtgcctttgacctctgtttttttatggtatgagttgatgtagtcttgctccttaaattttttcctgttatgtttcattgtgatatgattcatcttaagattaactatgaatacaggtgcatattttcttttagcatgaaatcatatgttaaatcatcttaattagtcagattcatctcattaagatgtcgctggaaacaagcctgttcatatccatgaagcacctgtttctcgttctctctcagaatttgctcttggtttgatactctggaactagcatcacaccattcacttgttaataccatgaagaatatcaaatgtgcccttgagaaggagacaatttgtcgatttctggtctacatgtttactctttgccttctgtctgtctagatagtggtgaattacctatgtttctaattatgatgaaacttcttttatgatttttctatcaattcaggtattgggatacaaggcagccaaaccctgtacaca

SEQ ID NO: 65139 - DNA, 456 bp, Cucumis sativus
  Intron number 1 from transcript Cucsa.205130.1 (locus Cucs a.205130) derived from phytozome v7.0 (chr-ID scaffold0141 6; pos 268619 to 269074)
ttcaagtaagcccccttctttcacttctcagtagaaagaaaactgattgttttgctctgatgacaagcaaagaggaatttacacttttaggaaatgcgaattgggttactgtttgggcgtcaattcaattgagtggagatttttttttttttttgatatgtcttatatacttgttagaggcagtgttcaatggttgttatgattttgagttatttaattggagttcacatcagttttgaaaacataacttcaattggattgacgagatttagggtgatcgaaatgggtatcttgagattgaatttccatgaaaataaagttcatgatttaatgtttatttttgttctcactgaaatatcttcgagtggtgtggaatatttcattttgggtagtaattgctttaaccctatatccattttaggaatcttccgaggcaccaatttggcaatcttcaaa

SEQ ID NO: 65140 - DNA, 606 bp, Cucumis sativus
  Intron number 1 from transcript Cucsa.212500.2 (locus Cucs a.212500) derived from phytozome v7.0 (chr-ID scaffold0154 3; pos 295922 to 296527 reverse strand)
gctaaacagagttcaatctgttacaatccgctcaggtaatttcaatgacagattgattgagtagtagtggttttggttttaaaaatttgagagttttgaaaagaaaagttgtttgatcaggtttgctgtcggtagcgagggtattaacaagaagaagagtcgtggtttaagtgctgtttgttacgctatgcctgttaacactcgcactcttcagtggatctccaccatttcttctgtgtaattctctcttctttctatctgagtattgtataattggatataagcaccatctcgtctaatatatgatattgtattttatgtggaactgtgcttttatttatcgttagtaatttgtgatacgtttctgtagcatcagcacagaatggtcaattttaaccaatactcagatggggttcaaatgctttgccacaattcttttgattccggtggttatttagtttcgtttaagtcggtagcattcagtggttatatttatacagtcaacatgccaccagtttcacctttatctgctgtttcagagtccattccacctccacgtatcaaagtataacttttaaaaccctaggtttcttcttcagggtttta

SEQ ID NO: 65141 - DNA, 441 bp, Cucumis sativus
  Intron number 1 from transcript Cucsa.165040.3 (locus Cucs a.165040) derived from phytozome v7.0 (chr-ID scaffold0115 3; pos 432878 to 433318 reverse strand)
cttcatcctcttcgattcttacctttttgcttcgggtaatggtttagtttctgatgaatatgtctttaatttcacttaattttttagttctgatagaaatttaatcacgttttataacctttaaatgggcgttttctatcttaattcgttaacgtgttgtgttttagattgtggggtttttagttgtagatggttgaattctacgttagctcaacttaaagggtgtctttctttgaatttgtttggttatgtttgcttgtttcagaatgtgactttaattttgagcaaaaaagagaagacccatgttgaagttcttgatggagatactaaattatgttgagaacggtgaggtgaagaacaataattgctatttcgtaatgctttcaagtttttcaaattcacattttgctgaacttttacttggtctgattcttttgcaga

SEQ ID NO: 65142 - DNA, 614 bp, Cucumis sativus
  Intron number 1 from transcript Cucsa.306550.1 (locus Cucs a.306550) derived from phytozome v7.0 (chr-ID scaffold0297 7; pos 60127 to 60740 reverse strand)
gccacgaaattattgtgagtatatatattcttttccttacatattatgtgggttttgtgtatttctttttcattctctttaatcagtttagaagcaaaattgtattttcttcttttacttttaacagcatgtaatttcttgatctcaatttttaattagggaagaaaggataaggaatatgaaatttattaattatgtatgttgagagacattctttttctttatgattattataatatgtaataactcgtttcaaaaacctaacaaatggataactttttcccttcttcatcaaaagaaaaaaaaagaaagaagaagaagactacttttttccttctaaaaaaactttaagaaaacaaaaggagagagagagactcgttgaaaattggacgtacgatgatgaatcaactgaaaaatgagcatgtttatgtttgcaagattcctagatttaactgattgacgttgattgggtagcgatcatgttctaatatttgtgtattttgttgcataacttataatattatctcctcttttctttttaccttaagtttatgttacatttaatttgttgaaattaaaaataatatgagtgcaggtagattggacaggaaata

SEQ ID NO: 65143 - DNA, 769 bp, Cucumis sativus
  Intron number 1 from transcript Cucsa.140250.1 (locus Cucs a.140250) derived from phytozome v7.0 (chr-ID scaffold0107 1; pos 34604 to 35372 reverse strand)
cttctacacttcttcaggtatatctcctcctcattcattcaatctcttctctttcacttccatctccttaaattcgacttattcttcctgattttctgccaatgctgtttctcttctctacaactttcctgtttttgttttttgatttttttttaatttggaacagttttagtgttttgtcgatttgggtatttgtcgttggatgatttttttttctatagtattagtatgttaatgatgacttttctgatatgtttttgggtcataattagttttactggatgtgcctgctgtttttacaatgaacaaatattggaggattctaaggacataatgaacacactctaattggtgactgactgactatggaggaaggggactaattacaaaactcattgaactagaactatgcagataagcaataaaaacattagtctccaagctctatatttaaggtttaaacaatcgtgtaagttattttttttacttcatttataatgtgcccactactttgatgtcctactgtcatcttttctagagatagacgactttagctttaatgccttgttgcatctcgtcttcttattcttctcatttttttatcttgttcttgttattttttaagcacctttttcttctgtatatgttgtttgtttgaataattgtctatagtgttttggttatcagtaaaaactgtaatacatagaatattggtgttcttggaacttattcaggaaaaacgtgtcagagagatcgtcttaaaagcaat

SEQ ID NO: 65144 - DNA, 915 bp, Cucumis sativus
  Intron number 1 from transcript Cucsa.282780.2 (locus Cucs a.282780) derived from phytozome v7.0 (chr-ID scaffold0265 3; pos 136323 to 137237 reverse strand)
cattctgaacacattacagctgcaaaaaaggcaaggtaaggcgaatgaaacgacccaaatgcaagaaaatgccaaaactgaaatttataacttcatgggtttttcaaattattgtgaaaattcaaaccccttttgctttctttttggtttcccacttgaaaatgctttacaagaacttctgtgttctctatgtttttgttttatttttttttaattttagttgggggttctgtttttttctttttcttttttgttcgttgtcgatttcactttttatatttttctacagtgtggatcgtttctcagtgcggtctcactgttggattgtgatttctctttaagctttgaaaatgtttaatgcagcttgatttttttttcttagctgcattgatgaatgcagacctcatgcgttttttatttcaacttgtggggttctaaattattagtaaattttggaggtgatgatgtttggtgactgagaaaatgcgagaaagtaaaagaaaactctgcttcgagagtttactgtggtttagatggaggtaaaaattaacagaaaatcgaaaagataggagtggtctgacatcttttatatcgttcactgttctttggctgcaaatcttagggtttattttgttggtttgtataattttcacgagaagtttgattagtgttgtagaatagaatgagaatctttggtgttttagctctggaaaagtgcgaatgattttttaaattgaaaatattttatacatctcttctgcagattttgggtcattttcttctcttgtcgtgaagtttgtttttctaactgctttttgtcctacactaaaatttaattgttgtttgtttttccccccgtgatttcggctgttgtaagtggtgaaaaaatttaataaaaatttttctgccaggaag

SEQ ID NO: 65145 - DNA, 505 bp, Cucumis sativus
  Intron number 2 from transcript Cucsa.161360.1 (locus Cucs a.161360) derived from phytozome v7.0 (chr-ID scaffold0114 4; pos 1263037 to 1263541)
atcgcggctggctctattttcagctttttggtaatctcttattgtctgttattccaatatgattaccctaatcttacaatgatttctctattttctgcaatgtggagaagattttgtatatgcacagaagaaagagttgatatgactgttctttcttatgattatttctttcatgagatcacaagcagttcagactctgatttgggaattgttcatatattataacccccatgagatcacaatcaaagatgtataaatagaaaacaatagtacatattttgttttgggtgcaattcacctaagaacacgcatttaatcatccaaaatggagattaaagatctgaacttctaatttttccaagaagggtttttatgtggatgataaaaagaaaaaagaaaagaacaaaagattcattctcttttttatttttggtgttggtttggcaatgttgtaacgtttactttgtttttttttttttttgttatctttcttttgtaacagggg

SEQ ID NO: 65146 - DNA, 978 bp, Cucumis sativus
  Intron number 2 from transcript Cucsa.253030.1 (locus Cucs a.253030) derived from phytozome v7.0 (chr-ID scaffold0222 9; pos 1801900 to 1802877 reverse strand)
catcgaacacaatgtaaatttgactttcacttagaaatttcatggttgcaccatttatcttcatatagaactgcaacttaaaaagttgtcttccattctcattgacgattgaattactcttttacaaaatcaaacttggatttatgtttggatagtatttctaaatcttgcacattctgattaactgtaaagaatgttcttgcaccacccaaagaaaatgggttgtttgggaggtatgaaagtaatggggatgaaatatgaggtattgaaatgaatggggaattgagggtggaatgagaatgagatcatgtagcatcaaagtgatgggaaagagagttaggttgaaaactgtgaaaagggaatagcccaactcaaatatgagcttggaatttaaactcattccatttcgtcctctcagacatgttcatagtgattaattcgctccatctgggtacacttacattatgtagatttcctagcccctctatagaaaacatgtctagagtggatgcttgaataagcttttaaagtaggtaaaaatattgtttctaggcacttgggatgttaatccaaacaaaccctgaaccttcatggaccacctactttgataccatgttagatgaaggtaaatttttagtttcaacgctctaacttgtgaacttgaaatatgtagaagacccatcaaatgaaaattctcattaattagtcatcctaagccacatactctacaacatgtcaaatcactaactgattgaaaagttttaagtttacaagtaaagacaaattcagtattatataatcttacacatgatgagttgaaaatggttgagattcgtgtatggagctatccagagtttgagttgaaactggagcaccatttattctgcaaaaggttttaacataaccatttagcatgctcattgagatatcttcttccatgtaggttcaaagcgtggagactgaagttgtggagggtga

SEQ ID NO: 65147 - DNA, 323 bp, Cucumis sativus
  Intron number 2 from transcript Cucsa.183380.1 (locus Cucs a.183380) derived from phytozome v7.0 (chr-ID scaffold0126 1; pos 251432 to 251754)
ggtggaggtggaaagttgctactggaggtaagctaccctaggattttacagcaactaaatatggcatgcttgtcatgttttcttaatgaactgctagtttgtaataactgctgtctttaggagctgttgtatatttgtgtttattttctatgtttaaaactcaaaaggtaaagtttcttttctttctatcttttaaccttttagattggggtgggataacaaacttttaaaggttattagtttttgttgtagctgttctatatttgtgtttgattgatatttgtttctcaatggtgtctctcagatcaagtataggacttttg

SEQ ID NO: 65148 - DNA, 607 bp, Cucumis sativus
  Intron number 4 from transcript Cucsa.249880.1 (locus Cucs a.249880) derived from phytozome v7.0 (chr-ID scaffold0221 9; pos 21308 to 21914 reverse strand)
ctcattactagtatcttcaggtaggatctttcttttccttattccttaattacagaatgtaaatatgtaatttactgaaaggaagttatgaagatttctgacttgacatttttcactggtttttcttgaaaatgtatgtgtaattcttgatcaatcaacacatgcataattattatttttttaatgttgatcgcagaacatagtaaataatttgacttctacctaagcttcttgatgaatattgttgcacaaaaccatcttgggtatcccaaatctttaaaaatggattcgtacgcaggatttctcagtcggcatcagtttagccaaacttttctgagttttttgtaccacatcttagtggagaaaatagttttctgcctttgggtcaagtccaagatcttaacaagatggtatattcttttattactaatttgcctggtgaagtttaaactgaattgtcttctactacccaaaccaatttttctaaaatgaatcaatccttttgggtttggatcagttatatttctgtctgtaacttatctgtaggtttgtgtttcatgtactttcttaagcagtgtttacttctcctgcagtttgaaatacatta

SEQ ID NO: 65149 - DNA, 588 bp, Cucumis sativus
  Intron number 1 from transcript Cucsa.172210.1 (locus Cucs a.172210) derived from phytozome v7.0 (chr-ID scaffold0119 6; pos 131706 to 132293 reverse strand)
ccaggttaagtattcatgtaatcaaactttactatctaaattaaaacatactttcagagaaagtgaaatagtaacaaattagagatagcttcgttgaaaaataaactcctatgagttagataattaaattgagccaacttactatagataatcaaccaagaaactaattaataatacccaataacaatccaactaattaagtttacaaaggctctagtattagctattgacatttagggtcaattgatttgatattacgggtcaattgataatttaaaattaaatgacattagagtagggaggtctagtgcgtttgttaacatattgtttatggttggtgttcctctccaataaatattgatttctatttgttgtgtcttcttctatatcgagtccacgagcaaggaaaaacgttagtgatatatatacataattaaatttatctttaatttatctattagctcaagttttttggtaaattaaagtacactacaaattctattagattacttattcgatctcttaagttgattggtgtaatttaatatgtcaggttgaattttataatcaaatttaacaagatagaat

SEQ ID NO: 65150 - DNA, 266 bp, Cucumis sativus
  Intron number 1 from transcript Cucsa.167540.1 (locus Cucs a.167540) derived from phytozome v7.0 (chr-ID scaffold0115 4; pos 922150 to 922415)
ttcaattcctctcccccacttccattcaattcctggtaacattctcctctttctcttcttttccttttctgggtcttccttcgtttcatgtaatctgttttcccttttcatcttttttctttataatttgcttttcatgaagatcttttgattcacaaatgccaaaattcaaacggccttctttctaatcatcttccttctactgtttctctcttgtttcccatttttcagttacttctttgcgatcaaagccgttcagttacctc

SEQ ID NO: 65151 - DNA, 682 bp, Cucumis sativus
  Intron number 2 from transcript Cucsa.167540.1 (locus Cucs a.167540) derived from phytozome v7.0 (chr-ID scaffold0115 4; pos 922386 to 923067)
tctttgcgatcaaagccgttcagttacctcgacgtgtacgtttttattttgatgattacgttactttttgttttcgttttttgtttttattatgtgggattctcttcctttcatctccgctttcatctctgtttagggattgatttctttcttctttactcgttgaaagtggaaatgactggtcagatgattgttgttttttaagaaaattttattttttagtgtcattcttgtaatggttacttggaatgggaattgatctgtatttttaaatttgtggtttgattggtacttggtttccattaatgcatgctgattactataatttgcattatactttttctaatcttatcagcatctatgaagtggagttggtttttttcttttggttctttcttgttatgtagtttgaaaaaagaagttattattttttatatttcctaatttttttttaaaaaaaaattgatttttgtttatatttgtgttttgcttttgatttctgcttatggggttttctcctgatagtattttgtctccatttgtcattcagaagttttgagatttgaaagtaatcatatcttgaggtttcacatttgtggctagtttagtttcagaatttactgatatgtttttggttaattttgcaggattttataccacagctccatctgtgaagtagact

SEQ ID NO: 65152 - DNA, 753 bp, Cucumis sativus
  Intron number 1 from transcript Cucsa.307220.1 (locus Cucs a.307220) derived from phytozome v7.0 (chr-ID scaffold0297 7; pos 461400 to 462152 reverse strand)
ccaggcatttactccaatctctgttattcttgtttctacaatgattatttatgcttttttttttgcattttatacccatatcttttctgtcttgaggtttatccaactatgcagttgtttgtttctctgtttttgtcaagtcttatgtggcgttttctccgattcttcagttttcactctttctggtctgctcaatgacttttgatgtgtttcttggattctggtttagaatgaatttttggtgttttagattttagctctatcgtcacccttacctaaactttgattctagattatgactgtcgttttccattcttgaaatttgactgaacgtattcaaaagaatacattccattacggaaagaacgtgatggtatttatgtactatatgtcgtttctggtcttcgaatgttttgttggagatattttgatctttatgtattgggctcaatgttgactaacttgataattttgtattgcatggtttgttattttttattgttgaagtgatttttaattgtttccctctaccttggaacattactgcacttttttttttaccttcatttcattttttatttgattgtggttttatgttgcttgccatatattattccttcgcatgctgattctcattgtggaatatggatattgattaatcaaatggtcgagtatttattacgaatctaaagtattctgtatattgtgtgtggagtaggttttgtaagtttggactgtggaggtcaagaaagt

SEQ ID NO: 65153 - DNA, 644 bp, Cucumis sativus
  Intron number 1 from transcript Cucsa.202200.1 (locus Cucs a.202200) derived from phytozome v7.0 (chr-ID scaffold0137 6; pos 319756 to 320399 reverse strand)
tctttctttcaatcctctcaatttccccatttcaggtactgttttctacaccctctttctccttttcttctttcgctttctttttccttccttttgatctgtccatttttttattcatttttctccgatttatccattttacgtttctccatcttcaccacgactcacttctccatttgttttgtattctcttttcactatctgtgtttttattgggtttttcttcttcttttttttgaactgtgacgagtttctgattgtggtctgtgtaccatcacatttacctcatttcgatcctctaagcatctgttttcgttcttatttcttatggtttttgccggaacgctgtaatacatacatagatggttggtccacatgactttgagagctggattctcgatagatcacctgcagttcagttagttttattattagtcgttggctgtgctgttgagatctgggttttggctctttgttcttgggttttgttactgctattgtagttttcgtctttcccttaaaatttcttattgaggttttgggattcgattagtacttgtctagtagatggatttgtgaaatttaagcagtggggtaagtcaccaatttcctcaattaacaaattgtttgttttcaggtgaaac

SEQ ID NO: 65154 - DNA, 1058 bp, Cucumis sativus
  Intron number 1 from transcript Cucsa.167210.1 (locus Cucs a.167210) derived from phytozome v7.0 (chr-ID scaffold0115 4; pos 576580 to 577637)
cgattttccaccccataatttcagggaaaacaagagtaagtattctctttttttaatcatttctttgtctcttttgtgcagttgatctcgtttttaactttcatgattttccttgaaactgatgaaaaattaacacttcctttctccaaaaattaaaaaaaaatggtatggtttcattttttccctatgattgtggcatcgaacttatttaaagtagttaatattgagcatactgctaatgcatccctcttgcaattgtagtctttgccttccaatgtctttgcaattaaccttgaaagccttcagcactcctcgattttcttttatgctgatgtttttgttttagtctctttagtgtttgttatgtgctgatattatttgttagtttgtagtcgaggtctcagtcaacttcttttgccttctttagggctggcatttttcacaggatgttacgttcttctttcttgtttttaagatgcctactcggagatcttggaaaataagtgtataaccaataagattcaggcttttgtttaaccgtagtttcagataatacaatgcttcctttactaatttagtctctaaacttaaaaagtatctaagaagtctaaaatttcaatgtcatgcctaatagtttttttttatttcagtgagtttttcgtttttaatggattttttaccttcggaaaatgactcaccgatcatgaacctcgacacaagagtttattagatattttaaatttccagagctattagacagaatactgaaagtttaaacgcctttgaaatgcttttttaaattcaaaagtgtattagacacaatattaaaagtttataacctcttagatgctcttctaatttcagagatatttagacattaactctatacctttgtttcttgattaaaaaagggaaagtatcatagtttctttcataagctctattactttaatgcaccatcaggcctgcttcagtttccattactttcccgtaaattcctcaagcaactattgatcctatgattacagggaagagaagcaattctgctaaagtgttca

SEQ ID NO: 65155 - DNA, 654 bp, Cucumis sativus
  Intron number 1 from transcript Cucsa.212430.1 (locus Cucs a.212430) derived from phytozome v7.0 (chr-ID scaffold0154 3; pos 249332 to 249985)
gggaagctacttcggccatctttttcgtaaacgtgagcacatctaatctttctggttggcttcttccattgcagttcttgtcgcctttttctgccccatgccaatgatagtcgttctagtatggatttgtgaagaagtgttttgaatctattttcttcaacacttcgaatgtcgtcgtcaaggttcttccgtctctgtttcaagattttgctgctaataatgtagtatgaaatccggagtttaatagagcgtatggttatatgattatcgtgattaatactcattatccaggatattaggttatttggtatgctcactgccatgttttgaaatttagggttttaggcagtggtgggatatagtagattgggagtggattcgagcttttaagttgtctggtttggagtctattgtttataagaagtacctcgtctttgtttgcttagcagaggcagagatgacctatatttatttatgggtttttgttcatttgtgttttgtgctttatgattcttctcaatcgcctatggtttcttagtgactggctttatgtttcagcatgaaaatctgttgaatataggaatctttactttgcttttgtttgtgttggattccatagtctggttcaaggaggaagaccagggagcctaagga

SEQ ID NO: 65156 - DNA, 399 bp, Cucumis sativus
  Intron number 3 from transcript Cucsa.212430.1 (locus Cucs a.212430) derived from phytozome v7.0 (chr-ID scaffold0154 3; pos 250162 to 250560)
tctttctgggagggaaactcttgtccgcattacaggtgaaacaattgaatagtttcttccttctttaaatacttgaaacctggaatttttgaaactttgaatttgggatctctctatttcttagattttgttccttccgttgtgtaatttcattgattggtccatatatgtatgtaagtaaatttaatacaagctgtagagaatcattaaaattcattgtctagagtagatgagtatgaaaaccttctgcatttatgaataagaagtgttatgctttatggaacactactaaaagaagtgttatgctttatttcttcttcttattatttatttatgttatattatttttcatgtggggtttggaaagtttaattatgcattttgatgaacgcaggtggt

SEQ ID NO: 65157 - DNA, 692 bp, Cucumis sativus
  Intron number 1 from transcript Cucsa.238350.1 (locus Cucs a.238350) derived from phytozome v7.0 (chr-ID scaffold0202 3; pos 933992 to 934683)
ctggagaggccaagggccaaactcaggtttgttttattcatctattatgatcatgatcctcatttccttttcttttttaacaaaatgaaataattaatttgatactacatgtttaacatagcatagatcatcatagattttcatcgataattattcgtagtaatgcattcgatgattagccttttctttaacatgtttattaacccattttgtaaatgtaatttgattatcattgtgttaagtttatttaattgttactatttgcgtaaaagtaatgataatcttgtttttaagattttttttatcaataccgaacaaattatcttccatagtttgagattttttttactagtgggtctcacattcttttcaaatttaatatgttgagtgtcctttacttctattattttcaaatggaatatgtttatggattattcacgattgatgaattaggttactcgtgctgtaagtgtaaccccagtgaatacagcattccattatatatgttaatcaatacactatcattttatttagtaaataacattttatttcacatctttctatttctagccgtccatgatatagcctagctaagcaataattctatattattacaggggctggtttgggttgtagtgatgggtaacattgttaagttaagtttgtatgtgttgattaatgtgtaggagaag

SEQ ID NO: 65158 - DNA, 314 bp, Cucumis sativus
  Intron number 5 from transcript Cucsa.247010.1 (locus Cucs a.247010) derived from phytozome v7.0 (chr-ID scaffold0218 8; pos 44803 to 45116 reverse strand)
caggtcagtcactcgtacacatatttattagccttttcttcattactctcgatgaaagcacagttttttttatcaatatgtgtgtgtatgtttgaaataagcttaaaaaaatttgcatccatttaacaggcagttgtttatttgttagttgctgactcacatcaaccagcagatttgaatttagtgaagcatgtttcctatttacgtttagttttattttcatctctaatcttgccattcttaatgtgaagttgtttacaaagttacaagtgctaacttcatttttttttgttcctctacaggtaatttttctg

SEQ ID NO: 65159 - DNA, 221 bp, Cucumis sativus
  Intron number 4 from transcript Cucsa.247010.1 (locus Cucs a.247010) derived from phytozome v7.0 (chr-ID scaffold0218 8; pos 45238 to 45458 reverse strand)
gtgaccgtactgatatatttggaacaggaacaaaggtgtcttaaatgcactcctttcttccaatttcttttagtaatttatttatttgtttttctttttacattgttcattagaaaccattttgatatgttcttatcacactagttgtccctggtctaatctttcttacatcgtaaaattttgcagagttacaatcgagatcttttcgccttcctcttgct

SEQ ID NO: 65160 - DNA, 740 bp, Cucumis sativus
  Intron number 1 from transcript Cucsa.247010.1 (locus Cucs a.247010) derived from phytozome v7.0 (chr-ID scaffold0218 8; pos 45864 to 46603 reverse strand)
gagtacttagtatttaaaaagaagtcttccaaagtgtaagttgaacgattcctttctaactgtaaatttttgttgtcctctcttttcttaagacgtgttcatttttacgtcatctctcttctctcagcatacttctacatctgttaatcaagaggagcgcagaaattaggtttattaggaagagctacattacttttgattagaaattcaacttttttttctttttgacccattagacgatataggctaaccttttggttaagcagtaatttaagatgatattagagcatgtagtttaggagatcttgtgttacttcctcttcaattaatatcaatttccacctattaagtctttcaagtatttcaaatttacaagtgagagagagtgttagatgattataatattaaatttgatttcactcattagtttaagcctttgaacccgtcccatttcttgttttccttgaactcaaatataacttttcattgatcactaaaaggtttggtttcttgttgaaaaagtaaaccagcctagtcagtaaaaagaagactaataattgctaacattgagagaatgtagtttctccgaaagtggtagtatctggtgctttttgttatatatgttggctctagatgtgagggtatttgaggacaaaagttttcatcttttaacattttccatgttgaaactgaattatttttcagaaggcattctgatattggcttgactgaggtagaaa

SEQ ID NO: 65161 - DNA, 601 bp, Cucumis sativus
  Intron number 1 from transcript Cucsa.258500.1 (locus Cucs a.258500) derived from phytozome v7.0 (chr-ID scaffold0222 9; pos 5440073 to 5440673)
tttgggttttggtagtgaatttcgtaattcttcaggtaatagttgattttaagggaagggaatgggaatgacttggatcgtgctgtctttgcttctgttttcacttttgagaaactagtaatgaatatgaatgaataggtattgctgtggcgtctttccagagcggttaactttttgttgttttttggatcgtgggtgttcgtttgaaattttggtgaagattttatcccaattgtttttttttctgcattatttccatttggaaaatctttgttcctgctaattgcaaaaagatttccaccaagaatcgtttaatctgtttctaactgaagatcgtctgagatagtggatttctttatcttgcgttattagagatttgaaacgttttgtcttttgcgctttaaattctatcattttgttgttagataactagagcaagatatgaacagttgtattcttaaaatcatttagaaaagtccctgaaattgacccagtcaagaaactgcaattactagttttttcttcgtgggctcacttgattcaaattgttctcggtttcaaagagggaaatgagcattgtgtctatatctctgtaattcag

SEQ ID NO: 65162 - DNA, 378 bp, Cucumis sativus
  Intron number 2 from transcript Cucsa.301850.1 (locus Cucs a.301850) derived from phytozome v7.0 (chr-ID scaffold0295 1; pos 101560 to 101937)
tgtctaacaagaccgatagctacgttgcatttaaggtgtgggttttgtttctctctgtttgaattcttttgggttcgattcaatctctgtgatttgtgtaattgatcttttctactgtgaaaataccttgatactcgtagtattcagctgttttggatttggaaatgtaggcgtttgaactttcttttcttatttcttttccttttctctcttgatgtatcatttttgcgccagatcacgttgtgaactttgttaatttcgtcgattttgtattagcttgtgttgattaatttgttccactatgcttttttgtctacttaatgtgaaattgatccttttctaggtgaaaactacgaaccctaaaaagtactgtgttcg

SEQ ID NO: 65163 - DNA, 737 bp, Cucumis sativus
  Intron number 3 from transcript Cucsa.142530.1 (locus Cucs a.142530) derived from phytozome v7.0 (chr-ID scaffold0107 9; pos 790262 to 790998 reverse strand)
atttggcatctctctttcatgtaagtaatgagatttttctatttgatgtagatgcagactaagaaacatgacactgtagtttggctctcgtgtcattgtttgatgtgtattggacacttgagcactcccatcacttgttaaaagcgttaactgcaaattgtacaaagttaaaataggaccaacatttaacacacatgcatcaaacacttgttacataactaagtcggacacatatatgacaaaaataatagaacttgagagcaaaatacatcaaactaatttttcaagcatataaatgaataaactactctgaattttcttcttgtttgaaaatgatttatattttaaaaatgtatgttttaacatgttcttaccgttgtcgtgtcctaattttttttaaaaattacatggtgtgtccatgcggactgtgccttgtatccgtatccgtgttcctgagagtgcagtcaagtttcaagttggggtgcgtttgagaggcttacgcctgttattagtatattctttttaaaaatctcttttgatgttctctttgaacgtcatgaaacttttaatttgctaaaagcaactttttacaattcaagaagtcataccaaactcacctttagtcttttagaaggagttgagatgttaataactttgagaattttggatgatctgttttctcctttttttttctgcccttaggtgataagcttaggggatactattaaattctcttt

SEQ ID NO: 65164 - DNA, 864 bp, Cucumis sativus
  Intron number 1 from transcript Cucsa.144130.1 (locus Cucs a.144130) derived from phytozome v7.0 (chr-ID scaffold0108 0; pos 557176 to 558039)
aactgggtcagtttcttctttttttttaatgtttttactcaaccccattttgtatgttgcaacgtttcaatcgctctgcttctgcaaattcgataacgggtaattttgggggaatttgttttatttgaaatgagaaatgaatggatagtaattgagaagttgatgtattgaagtgcttttttgattttggtatgagatgtgcaccgttgagctctctttgtggacttttagatgatttacggtagctttttgctgaagttacaaaaagctagtggtggtttgagaaattaattagagggtctagagttttattggcataccaacattgataacatctttgaactacgagtacggcagagcgtgagaggcactccgtcctctggattttcaatataacatctttgaattgtttggtaagtgtaaaagaattgtgggtcatctctttttgtttggatgaaaaagtttcaggttatgaaatctcatattggaagcagttttactggtcactaaggtcctgtttggttctatttcaggagataagtcaacggacaacaattctttaacagataaacttttgctgacagaacacagggttttatctttcagtaaaactttttctgttttcatctgaaaacaaagagaagattgaaagaatgaatataaattttggctttaataaattaatgtttttgaaattcattttctagttcacatttggcaaaacataaattttttgtgctcgtggcatctagcttaaaatacataaaatgatgaacagatttgttaaaatatacttattccaatatgaagcgatatcagtctgctaaaaactgatgtatagtcacaatgctcctccaatcaggg

SEQ ID NO: 65165 - DNA, 606 bp, Cucumis sativus
  Intron number 1 from transcript Cucsa.198030.2 (locus Cucs a.198030) derived from phytozome v7.0 (chr-ID scaffold0135 7; pos 1212744 to 1213349 reverse strand)
aactttgagctacttttcatttttcttccgcataggtgcgagagtttcttctcttctaaattgtgtttgccagtgtggaaaatattggtagctactttctttgtttcagtgattagtcatgaatttgaggtcatcagactcggattcttggaaatgggttcttttattgcatctaaagattatgttctgttattagatgaaagcttgagcgacatagttatttgtttgtaatgtaggtgctttagaaattttaccggcatacgagtccaaatagactttgatatgtgttgggccttctttccttcttgaggtgctgtaaatgttatgcaaagcatttctttgttcacttttgtagaaatctgagttacatgcactgcatcatatgatataacgttaataccattcttgtcagccaattctttttcataaatgttcagtttcctccaactctaactattgggttagttcttatctattttacattacgaggttcctcgtaatactcgaatcatatcatatgtttgtggcagcgaagctaacattttattaatttgtctactttgtttcccagaagcacaggagcagttctaagttttccctacagag

SEQ ID NO: 65166 - DNA, 486 bp, Cucumis sativus
  Intron number 1 from transcript Cucsa.251200.1 (locus Cucs a.251200) derived from phytozome v7.0 (chr-ID scaffold0222 9; pos 336635 to 337120 reverse strand)
gtgaacatcgccattggagcagccaaaggcttatcgtgagtatttttttttaatttaaaatcactttttaggagtcaaaataaaaaacttaaattttatcatcaattttatgtcactagaaggattgttcaataaaaaaaaatatactagggtcgtacaactcactatctcatcatataattttacatgataaatttattattgaaaaatcaattattaggcgcagtctagagtacaactaatcaagcaaataactaatgttttgaaaaaaatatcaaatggcaagctaatttttattggtatgaaatttgaactccgcgagaataatgcaccaaaggttttttcttctgtaatattgtattttaaattgtttttctaatttatgatggaagaagatgtatgaaaatgagtgcattcatatatttctgttatttaacttatttaattgagaaaattttgtgttattggtgtgaaggtacttacatc

SEQ ID NO: 65167 - DNA, 479 bp, Cucumis sativus
  Intron number 1 from transcript Cucsa.252470.2 (locus Cucs a.252470) derived from phytozome v7.0 (chr-ID scaffold0222 9; pos 1394034 to 1394512 reverse strand)
ttccgtttcatttctcccttctctcgccgtcacaggtatcattcattttcattggattttcgctttttctattgctcttctgttccttttgcgcttcattctgattgatttttggttattctactgctttctctcttcggttttactctcttgatgctttgattccactgcttcttctgctctgtttgtttattcttgtttcccttgattcgttttgtttgattaattgttgttttcgatggagtgggattttgctttgtgttcttcttcatttgttttgttgaattgatgaattttcgtttcttgtgtcctttttcttttcttttccttttttaaggaggattggatttgatctgtgaggtgaagaaggcagtccgtacgggattcgttgtggaataatttagtaaaaaggttttggtagttacgggagtgagagtatcttgaatttgaattggtgtgttgtgtgtggtggttttcta

SEQ ID NO: 65168 - DNA, 451 bp, Cucumis sativus
  Intron number 1 from transcript Cucsa.304240.1 (locus Cucs a.304240) derived from phytozome v7.0 (chr-ID scaffold0295 1; pos 1931688 to 1932138)
gtagagggaaagacgaaggtacataatctaacacctactaaaagttttaggtttatatatgtttccttgattgaattatgaatttggttcttacactgtcattttcctggggagaaattttaccctatcaatttgatttttataatgattcaaatgtatttaatttaattttagttttggtttgatttattttcatatcgattaactttcttttaacgcgttaattcgaatcatggatgacaattaacacaaaaggattgataattaaacattaataagaaaaaaacttaattattttcaaacgtttgaatccgagttcttcctttatataacaagttaaatcaatttttcaaaattaatttaggtttataggttacaaagaaattaaatattttacccttttgttgaacctataggtattgtattttgagacggtggcaaacccgacgct

SEQ ID NO: 65169 - DNA, 1019 bp, Cucumis sativus
  Intron number 2 from transcript Cucsa.281060.2 (locus Cucs a.281060) derived from phytozome v7.0 (chr-ID scaffold0263 3; pos 980234 to 981252)
cttgatactaaggtttgttgctttctcttaaaatgatttttgcttgaaaatgatgagttatgcaattatgtgtgatagtattttacttgcttgggtgctctggaaatggatggaagaaggatctggttaatgaacttactttcatccattttgctgttgtggatgattgattttgggaaatgagaaaagaacctgttgggttgcttcttgattcaattgctatgttaaatacattgcaacaatgacactttgttgaaattgttttttcttatttttttctctgtcaacacgtctaatgaaactatctaatttgttggaaattcaccacatctaccatgctgaactatatatctgtttgaaaacttttctctgtcacctttgatgcaaagaagtaaaatgtgggttgtatttgaaacttagtaaacctgataagataagggtatgtagtcaacgaaaagtgttagtctagaactttatacataagaaatggttgggttcactactgtattttgattaattattatggatctaaataaggtattgctaacttataactccttcattatcctttccgcaacaaatgcctaatgtgaatatgatgcctattgaagataattttcctgccgatgtaccatcttcctgcaactttttgtaattctaagttctaactatagggcttctaaaatctatatgcttgtctatgaatatatttttttctgggtaaagatggaccttggggattggatatacacttctacaaaagaaagcatagacctactaaaaaaaggattgaattaacacctattatgagaaagtggattgaatatgcatttcttattgaaaaaggatttactatacactgaaaacaccaactcatgaacttttgaagagttcacagatcagagcatacttagttcacatggtatcgtgattttttagcacttgcaaactgatttgtcatgaagcctcctcttattcaccctggcagggaccggagattcggactggtttcttgaagg

SEQ ID NO: 65170 - DNA, 929 bp, Cucumis sativus
  Intron number 3 from transcript Cucsa.251450.1 (locus Cucs a.251450) derived from phytozome v7.0 (chr-ID scaffold0222 9; pos 521791 to 522719 reverse strand)
aagttgctaaagcggtatcagaggaacttgagaaggtgacttgcgcttttaccatattgctcctcacttgaatttccccctccaaacatgaaaacattgtgggtgtcttttagctttggatgccatgctattccatttaacccgtgattgtattttttccattctttgctccaaatcatgtgattatttataaggcctgcttagattgtgcagataacttaattacagaagttgagattatgtagcctatatttacttggtagatttttttatttgtaaaactctgtgtaacttggatacaaaagcctaggttttgtaggaagaatttgtttagtccatgcagaccgtaatgggaagaagaacaaacgccatatcaaacagtccatggattgaatgccgccacagggttgtgtagccatgattttagaccacctttgccttcttgacgtattgaacatttttctttccacacacacacagttatctaagaggtttactgtacgttggatctaacatttttttattggagcctagaaaactttcatggggtgtttattggagtctagaaaatggggtgtttgggaacttggaatgtaatcagaactactgagaatcggagtagtgttgaatgtgtgtcaaattgagagcggaacaaaagtgaaaacgatggaaaatagagttaattgaaaactgtagggagttcaatattacaacctgggttcaaatggtcaatcaaaacatgaattgtggattatattaaaatgcatttcaatcccattatgggtgtccaaacacccctaatgctctaattaatttttgtcttcaagtaagagactatattatatggtgcatcttagatatagaatttggttgggactttttaaaatgaccgatagatttcaacacatattcacctcttgaatcaggtg

SEQ ID NO: 65171 - DNA, 704 bp, Cucumis sativus
  Intron number 1 from transcript Cucsa.271200.1 (locus Cucs a.271200) derived from phytozome v7.0 (chr-ID scaffold0250 0; pos 122688 to 123391)
aattcaaggttagttcattttctatttcgcctcatctgatgatcattttctatttttgtttggatttgaattatacacacactctcgagaactctacacattatgcttctattcgttttccttaactttcttttcgtaccgaaatgaagcatctcatgatgcggtatacttttattgatcctactaaaactcaagcatatcggaaaaggtggtgtgttttgtcgtcgattttttttatttagttctttttcaatgaatatatatttataggcagcttcttgtagtgattgttaattagtttgttggtaacgaaaattgagatcatttattgatttactatttgtttagaagtgctaggagtttgagatactttaattttagaagtgatacatatatgtaaaagtactttgttcatctgaatcaatttaagacgttattgattcttttttaaaatgtcaataacaaaaaaggtaacaaaatgctctaatttttaattaatttattagtgataattttagccaaacacaaacacaatagtgataaattttgaaggttctcttgaattaaatcaaataagttcatattaaatgcagcgtagaaatccttcgattatgaggatgaaaattgaaaatagaattgtgtttttgaaaattcatcggcattttacaggtatcaaaggaggaattcatagaactggcgcggaa

SEQ ID NO: 65172 - DNA, 747 bp, Cucumis sativus
  Intron number 2 from transcript Cucsa.218600.1 (locus Cucs a.218600) derived from phytozome v7.0 (chr-ID scaffold0165 8; pos 639733 to 640479 reverse strand)
ggtatcgggtaactttaaatatttaccaacttttgatttggtcagatattgatgatgatgggaggacaaccttaggctgttcttaagtagagctgagcctgatgtatttctattaaactatgagagctacgcactagccaactgcacctgatgtatttctattcattattcaagatattaatattttaaattttagtgtagaggatctttagtgtcaaaactagtggagtatgagttaatgtcatcgctaatgagaggatctctgatatattgtgagcttcatatttaaaactgtagaactgttcactgtatgatatcctctcatgatttatttgtttagccaaacacccaatttattttgaatgtagatagcttacattaagttgttactcgttcagaatttgtttgcaaggaaaatttatgactttaataatattacttgatcaaagtttgagttctcataatatacattaagtcactaacagagaaagattgttttgtccaatttcagcatcttaatgcatatcactttatatattaagatatcgttctgtatatatactgtaacttcattcttcttcgtgatggattgctgacttcaatcatcctcctgtactgctcctttgatttgtttttttaatatttttttaattttctactcaacatcattattttaaaattttctgcgtaacttttgactgaattagtccattatgtggacattttggcctgaaatgtaggcagttc

SEQ ID NO: 65173 - DNA, 389 bp, Cucumis sativus
  Intron number 1 from transcript Cucsa.218600.1 (locus Cucs a.218600) derived from phytozome v7.0 (chr-ID scaffold0165 8; pos 640612 to 641000 reverse strand)
acaacttccccgatatcgtccagtacatcattgaggttttttgaattcttttttccagcttgattgaaatgatattatgtttgtctagaatgttggaagtagattgattatcactattatattgcaattctttgtgttcagtcgcagttgtcatgtttctgtaatgcaaagctggtgtagcatgattaatttgttgtttgggatagaggaagaagagtagaattttttggacgtgaagaaagtgcatgtcctagatttttatatgatggatttcgcagcattagggcattttttatgttggtgtggttatgaagtttaatttgatagccttttgaggtttatgtcagttctgtactgaagttttttatgatttttttgtttttatcagc

SEQ ID NO: 65174 - DNA, 516 bp, Cucumis sativus
  Intron number 4 from transcript Cucsa.141760.2 (locus Cucs a.141760) derived from phytozome v7.0 (chr-ID scaffold0107 9; pos 147404 to 147919 reverse strand)
atctagtataccaagtccacaaaattcgtttgcaggtactttatattttgttagacaaagtttctaaatagtttttatatggaagaccttttattggttcctctttccattgcaagtttgaagagattgaagatgccagaaacttagagatcgaactagtaatatgaactaaaagtattggttgttatggtgatgaaataaaatgtttttatgagccatgactcattgctttcttttgattgtacgtttgcaatcttcttagattaggtctttccattgcaatggattttcttgcaagaaaagagatttacttggacaagatttgttctatagcttgtacaactatcgcgttgagttttaataatttttcttgaatcaattatgtatttagatcaattagtttcttttcagtctggtggttgcatttcaaattcagtagtttatgatgcaattaaatggattctctcttttttatttgtagggttattatagctttagccagaagttaaagcatat

SEQ ID NO: 65175 - DNA, 572 bp, Cucumis sativus
  Intron number 1 from transcript Cucsa.271550.1 (locus Cucs a.271550) derived from phytozome v7.0 (chr-ID scaffold0250 0; pos 372224 to 372795 reverse strand)
ttcctcagcttcaccgggagtgattgtagggccaggtgagtgagtatactgatcgaattgatttgtgcttgcgattttaattggtaggatggctttcgaattgataatgctagtgtatttatcaatgttaatcaaaacgattaggaaacggaagagatggtaattttctaatgccgaatggattatgcatgcctacatctgaatctggaaattcgtatgccgacttttcatatgataacaaaaatttgatcgaagttatattggcaacgtactaaacttcctttgatctttctttttatgggttgatgatggctaaacatgtttttaataactcaaaatcaaatcaaatggtatgaaaattccatctcaaagggtataattagacttgaaattgtttttgaagaactttgtaaataacaaaagtaattataaccatttcaagattgggagagtctaatggattgagttttctatatctctatgctgtccttgttttctcttattgtttcaatttgcttgtgtgcttaaaactcacaggactgagtaggaaagaagacacatcattcaacttg

SEQ ID NO: 65176 - DNA, 824 bp, Cucumis sativus
  Intron number 1 from transcript Cucsa.196990.1 (locus Cucs a.196990) derived from phytozome v7.0 (chr-ID scaffold0135 7; pos 539466 to 540289)
ttgccggttagtctccgatttctactttttaccctatttttagtttaattactctctgacctgatcttttagaatggttacacgatcatacactacagtttatgtcttggttttgttttattttgtgaatttcctttagcttgttttgaagttttgttgttttaatcgtcttaattaaatgttcatcattatcatttttttcaatctttactgctgaattttgtttgtttacttatgggtagttccttgaaatctcataatttaggaaccttcttattggatcccggtaagtaattgtttagacttgtttgagtttaggctgacgttttattttgaagacattttgccactaccatgaagtggtgattggccatttgaactctcttttagatgatccgtgatgcatacacgagattgagttgaatttgtttatgacaacgatgtcctgaatgactttgttgtaaataaaagttttgaactttcatgtgattccagctgttggataaaatttgacttaggaaagctattataatgaaattggccatttctgctaacttctactgatttgtattaatttctgtctttatcatcattatcgtttgctttttttaatgggatcattatcattcaattattttaagatctattcactccctcattcaatcactcacttgctcatatattattttttaaaaatattatcttagtttgtagtttgtaaaggttactgggtttcagttggttgttaccatccactgaagttttcttttgacttttttaatgcattagtcaagttgctggattggggagaagaaggtcacagg

SEQ ID NO: 65177 - DNA, 570 bp, Cucumis sativus
  Intron number 3 from transcript Cucsa.167810.2 (locus Cucs a.167810) derived from phytozome v7.0 (chr-ID scaffold0115 6; pos 9608 to 10177)
aataacaattggatatcagattgcgtcctcaatcagtatgatgtaagctcaacattcaaaacatttccaaactataatttaagacgaaaatcttcttctataaacatttaacttttgaaaaaccaagttttaaaagctaacacataatgcttctttgataaccatttgtgtttttatgactaagctcatagacacgtgatttccacacataaatttatttattttaatatttactttccatctacaggacttttgtatttgttttccaattttcaaatctgaaaatcattataaaaatatatatatgtgtgtgtgtttgtttcatgattttcattttttttacgtaaatatatagaaaattaaacaatttctcatagtcatattctaaaaacaaaaatgagttgttagattattattttttaaaaaacttgtcttagatatttaagaatgcgtaacaagatgaataatgataaaagtgatatttatggaaataaaattatagataagaaagtgatattgttgatttaattggcagggcaattaaaaggtcaaattgctttcatagtagtg

SEQ ID NO: 65178 - DNA, 926 bp, Cucumis sativus
  Intron number 4 from transcript Cucsa.167810.2 (locus Cucs a.167810) derived from phytozome v7.0 (chr-ID scaffold0115 6; pos 10323 to 11248)
cattggcctttcccttggaatagccaaagtggcaggttcactttttctcttctcatattctttttatttaactacacaaacatatatatttcattattgatttaactccattttcgtaaacgttactaaatttggatccctaactgaaaatatgttttcctttggattgattaatccaaactacaaaacatttgtaaatttttaattcatgatatcataaaaaatattcttaataagcatatttggaataacttttttaaataaatgttttttttattaaaaagacggtgaaaatcacttttcttaaaagaatattatttggtgtaacttatttgatttattttctacaatcaaaagtttttttccgaatcttaattaaaaaataaaaaataaaaagaagcctaatttaaaatttagggttaacttaaaagctttggaagaagaaacaaactccacaagtttattattaaaacaaagaagagtttagaaggattcatggaggtggaatcttaaaaagattttcaaaaaagaaaaaacatacatttctatcacttagtagaatcaattttgattgtagtggaagatgtgaataaagaaattaatttttgtttgaaaaataaaaatgtttcaagtagatgagagatacacagactctcaaaatgcttttccatttctgttttactacacggattctagagtagaatttagggcatgaaagtgattggataaactactattacttttttaaaaacaaaaagcatagaatcaaagtatcatttagttaatgagtataaataaatacagcagttaagttaaaaaaaaagaataatagatatatatatatatatctttatttatgttaatgattattgttggtttaatttgatgcagaaagtgggagatttaaaggaacaattagtggagta

SEQ ID NO: 65179 - DNA, 838 bp, Cucumis sativus
  Intron number 2 from transcript Cucsa.178650.1 (locus Cucs a.178650) derived from phytozome v7.0 (chr-ID scaffold0122 7; pos 982723 to 983560)
cctaggtttgttaactcgttacttccacttaaagttcttgtttatatttgattgtccattataatcattttgatgcttgaaagttttaactgaaatctttagcttcagatttaaaagtggtacttgtgggtaggagacttttaatgtataccttttgtttgattattttaaacatggtgaattctgatggttgtcttgaaaactaaactttttttttaactaaagaaacaaatctcacagatgtatgaaatttagagaaagaggctgcagcccaattcaacagatttacaactccaattggtcaaaagagaggatagtctgtacaaactatagaaatggaagatatacgtttgcaccaagtcatagcataagttcagaaaagttatcaaaagtgctttccttgtcgtttgaaaggcagttgtttctctccttccatgtaatccataaaaaaggatgaatcaaattcgtccatattctcttctcaatgttctcattagtgtaggggtggccaatgatattgcattggtcattttagcctataatatcgtttgcatattcaaatatcatagtttttagtctatatggtcatatgtgatgcctttctcccaagattctttgtaacagtgcttcattttgtctgacatcctacagttttgcaagtaccttttttcaccatcttagtgttggttgagtttttttaatttatttttatgtttaactattttcaccatctcagtattttgagttcttgctgtatttcttattcattttagttgcaaactgaatgtttcttcactcaacagatcctgaacgcattagacgtgtttgctctagccat

SEQ ID NO: 65180 - DNA, 1024 bp, Cucumis sativus
  Intron number 2 from transcript Cucsa.160870.7 (locus Cucs a.160870) derived from phytozome v7.0 (chr-ID scaffold0114 4; pos 940740 to 941763)
ttcatcttccttcttcgattctttgttgtcttcatgttagttttcttgcttctttgttactgtttttcttttcttctctatttctgtcttcctcgagcttatacagtttatgaatgaatctcgtagtctgtgagttgagaaaattggtgaaagatgaaggtactttggttatgaattcacgtatatgtagttttcggttgttttggctaatgtgtgctgcttgttagactgaatcttattcttcttactttttttttcgtttgctattatctgaaagaattttggaatttaagatctgcgacgtctgtcctttgttttacaacttgctgaataggtagtcaagagctacggatttcactcttaatttgtttatttattttttgtttgtggaacgaattttcttttttctttttgatctttggattgatttcggtttcagttatccctgtgaatttaatgcttttataccagcagctacacacatgttcattttgtagatttatttgttttggcttagatactttgttttctctgcctcttatgcttcctgatttttggggggaaaggctacgagtagaagattgttcttgttctttatttgattttcttttctacgtgactgtttcagccgctccccaattcctaacagttatgcaaataatttaggcggttgttatatgtgaaattccgatatgttattttggaaacgtttctgttcctcactgaatttcacgtcatatttgagagaagaagtctctttgggttaatgaagatgaaagtttccaatcataatgtccattttcttctttatttatttgattgtttttcctcaacttgttggatggttagaagaaagtaatttgaaattgggagtggtgtcttatagtctaggcagctggacaaataacaaagtagagagaacagaagaatctttgcagtttggctctctagttgaaattgggagattcatcgtgttttgttttatgcaggtataaaatccgggcctttttctttctggaatttt

SEQ ID NO: 65181 - DNA, 521 bp, Cucumis sativus
  Intron number 2 from transcript Cucsa.136080.1 (locus Cucs a.136080) derived from phytozome v7.0 (chr-ID scaffold0104 4; pos 824179 to 824699 reverse strand)
gaatagaggaggaggagagagacaaagagagcgaggtgattacctactgcccttctcttctttatgtggttcaagagatggaagtcaatgtttatggcgtttggtcttgtgattctgcttaaaacgatctttgaatatttttctttgatttgatttgattttcctatgcatctggtcatctgggcctgttggtataactccagaggagaaaatttgctgttatattatcgatggtagagtaggcattttttgtttacttcttttcctttctgaagtcaatgacaataaggaaatgaaattttaaagattttataactgaagtgttgaatagattttgtttctcaattaggaggttttcctcattttattgcaccatttcctgtagggctgagcgtcactgttattattattgaaatgatgttaaatcttatggctattctctctttctatctttttgaagatggaatttggttgactacatttgggagtttcttgttttgtcgtaggttgttcattgttcc

SEQ ID NO: 65182 - DNA, 570 bp, Cucumis sativus
  Intron number 1 from transcript Cucsa.255550.1 (locus Cucs a.255550) derived from phytozome v7.0 (chr-ID scaffold0222 9; pos 3494149 to 3494718 reverse strand)
ctgagctccttgcatccttgaaggtcaagctactggtgggtcttttattcaatgtttccatttcctaatttgcttggtcttgttctttatttgaggtcctgctcctttttcctctgtttctatggataattcgaaagtgggtgttgagaatatggggaggagattaaatatagcattaggtagagtagcccatctatcttaaaagagtttgagtcttgtttttccaaggtcggattcccaacgaaaggcacaagcgtcgtgttagattaatagtcaacgagctttaacttgtgggtttagcgtgttagattatagcagttcagaccaaaagaaatgaagttgctaatatcaacatagagatgtatgtatgttgcaaactagcgtgataaatttgagtttttgattcttgttgaggagggcatcccctttatccacgttttatagttcatatagcaaactctttgccatattctcttgcaactatgatttctggttctgacttgttaatgctttttcttcgatttttttatgtcagactgcggtttcagggttaaacagaggtcttgctgc

SEQ ID NO: 65183 - DNA, 633 bp, Cucumis sativus
  Intron number 1 from transcript Cucsa.288930.1 (locus Cucs a.288930) derived from phytozome v7.0 (chr-ID scaffold0269 8; pos 430670 to 431302)
gccgattcttctaccggtaatcgccataatctcttcattctgctctttttttttcttttttcaatctgtttctcttgttttgctttgatcttgcattcccttttgcccgaatgtcaatctatgatttgggttttcccccttttttgttcttcttgtcgtattaccctgttctgtaattgcttgtttttaggaattttgttttcctccgatctctctggattgtttgttttgactttgcatgggtgtttctgattccgcttcatgatgtggggtttcttagaaaccgttgtttgatcttaggggatcgaaattgaagagtgttttggtgttaatttgtgaaattaggatgttattatttttttttctgtgatttggagtttgctgagacgtgtttgatggttgcttgtatttttgtatttctgaactcgagtcaatgatgaattgttttctaatttatttatttatttgtttctgtaagtggatctgagtcaagaactttattccttatacatatggcattgtagattcgtccttgaagattataagtggattgagattcatataattttgttgttctttcttccaatatcttaatgggtttgtaattttgtctttcagtggtggaagctattg

SEQ ID NO: 65184 - DNA, 688 bp, Cucumis sativus
  Intron number 2 from transcript Cucsa.288930.1 (locus Cucs a.288930) derived from phytozome v7.0 (chr-ID scaffold0269 8; pos 431307 to 431994)
aactatttctgtagcatttggttgtcatcaagaaggtactaacaaaacattaaacaaatctttttccgttttttcaatatttccttttgctttcctctcatcgtaagttaacggacaaaacatctatttccattttaatttttctattagttttaggtctctctatatatatcaaaattgttcttgttctcgtctgtttcttggattgctctaagttcatacaatttactttgtcctacaaagcagtaaacttctacagttttgcttccttctttccatggttatgactgattataaattgggtataatctattttgtcattgtaatatcttttacgtgagatttccagttctaaacaatcaagtttctggaagcaagattttgctttagagaggattttttttttttggtttcagatttattcttaatttgaacccattaggattcttttttttctcaaaattaatcttgaattctcttacagtacaatctaaataatagatacaatttcccttaatagctggccactgctttgctacaagcagttattttgttcattgtttagtttggagtctgaatgatctaaatggtccaaacttttatgatcaatggatttttaacaaattccactattgtcttcttgtttaaaccagctgtacaagacagagaccacaagttcttgacacaa

SEQ ID NO: 65185 - DNA, 1011 bp, Cucumis sativus
  Intron number 1 from transcript Cucsa.189420.1 (locus Cucs a.189420) derived from phytozome v7.0 (chr-ID scaffold0130 5; pos 162128 to 163138 reverse strand)
gtatcacacttcttctctcaccacccctaaaagtacttactctctacattttgtttatcgcgattctctaccctgtattttaatggcgcctcttattactcttgaaatttctgttcaatctacgtacccaactgctatgttattgttgttttattactcatgagcagcagctcatggcctagtttttgttgtatccaatcaatgatttgtttctgttcaactctcatgctagagatctctaaccattcgacaatctctcgagcttgtttagagtacttttcgaatgttaaacttctccaactgttgtactgaatttttgttggattttcgtcttcaacattttaaataacataactaagaatttagtgctggcaagaatttggatgaagttgtaatggggtgattgatgggtccgtattatggttcttcgattgtaaaaaaggggtttcttttttctggaataaagagcgtcatcttgaagtgttcttcgacatcgttaattatcaagccatttgctgttgcacattatgtaatcgatttgtttttttttacgtttctttttggacgaattggataagccttttgtaatccattagaattctccattcatgtactgattttatttttgtttcaagtaattctattccatgttatctcttgtttatttgtttgtttgataatgttgtgggagcattctgtccattgtcctgaaacattatttttctggcgtttattgattgtaatgcattgaatacctgaacatagttggggttttatattatgggtttcacgatcaagtttgttgaccttcccacttagttcacgttgtttcgagcattcctataagagcatgggaggtataaatttatcaagcggcattgtttctgcctctgatattgccatgaatttgtatacttctcttgaaagtgttgatggaattgcatagaagttttaaaacactaatgctgaatctaccttttgtttctcttgttggacagccaaagcaaatcc

SEQ ID NO: 65186 - DNA, 514 bp, Cucumis sativus
  Intron number 2 from transcript Cucsa.192580.2 (locus Cucs a.192580) derived from phytozome v7.0 (chr-ID scaffold0133 3; pos 477692 to 478205 reverse strand)
ctttaagaatcgttctcttgagcttcaatcatttggtatgttttctttttcttttcattttttatttctctcttcttcatcttatagaaactaattataaaattatttaaagtggattggccgataataatagtttatgtcccaattggtaataaccatttggttttcttttatagtaatcaaaatggagagaaagtaaacacaatatttaaaataaaagtaaaaatttcaatattatccaaggagacctatttaaatcatttcattaacatcaatcaagctgtgtaacacatttgaagttttaaacaaaaaaaaaaaagaccaagtcacatgcaagcttacgattcaatctaatccaaatgcatggggtttgagttattgttaagtagatgttaaaatatttgattgagtacagttgttccatgaagaatttggttaaattaatgaattaaaatgaattaaaagagaaggtctgaattatataatatttttgatggcaggtaaaatagagaag

SEQ ID NO: 65187 - DNA, 923 bp, Cucumis sativus
  Intron number 1 from transcript Cucsa.254700.1 (locus Cucs a.254700) derived from phytozome v7.0 (chr-ID scaffold0222 9; pos 2934720 to 2935642 reverse strand)
ggattggattggtttggttttggttttggttttgggtgagtttttgttttgtgtcttgtaattctgggttttcttcctcttctttactgttacttcttgtgggcattcaatggggcctgccttttatttttttacatcattaaatctttgggtattggatggatagtgagtttactacccttttcaatgtttattctttgtctttggatttgttcttgatttttgttttcttctggatggttttattctctgtctctgccacttccctaagttccatatcttcctcttccttttaataccatttttctcttcttttgtatatactcctcttgcgtttttatctgtttgggtttacccatcatccccatcgagattttcgtttctgatagccagacaacactagtaaataggtttgtcttatgggtatttccgctttgggtttatttttctgggttttctccgttttatcttacttcaatggaagatttagtcgaaataagatctggatttcgaatttctgtcactttttttggactcttctccttgcatatgggaattttctagccgtcggagatgggttttcttttatgctatgtagtattggttcactgttctatgaaaacgaaagcttcgtttggttgaatttgttttaccatgttttctttagggatatatatggtgaaacaatggtttttttaattgggtttttgatttagcaaaggaacagtaatgcttaaaaatgtagaagaaacggccaaaattttattccgctttcaactttactttgcgtatgaaacaatggatgtatttctctgtatcattgtctctgtttttttaaccttttgaagaatttttcgtcatcttgtttgctgacatgcaattttcctcttctgggttcttttttttttcacctcctcagcagg

SEQ ID NO: 65188 - DNA, 263 bp, Cucumis sativus
  Intron number 1 from transcript Cucsa.144020.1 (locus Cucs a.144020) derived from phytozome v7.0 (chr-ID scaffold0108 0; pos 411582 to 411844)
gcattaagattagcaaactttattaggttaagtcttagttaatgtttttgtttttcttattaaactttgttagtttgatggattttggaatatgatgagcgaaagttccattatgatttggactctttttcttattaaacttgtgatgttcagaatggattttgcagatcgggaacaaaattattaagaaaagaattcatgtcagagtcgagcacgtgcaaccttttgatgcaccgaggaatttcacttgaggaaggtgaata

SEQ ID NO: 65189 - DNA, 476 bp, Cucumis sativus
  Intron number 3 from transcript Cucsa.201900.1 (locus Cucs a.201900) derived from phytozome v7.0 (chr-ID scaffold0137 6; pos 120216 to 120691 reverse strand)
ctcctcctaaaccagtggagtccacatcttcagtaactctttctttttaattcgtatgctctttttttcttcatcagcgagcttcttaactaagactttatctatgaaagattctccctgtaaacatatctatgaaagattctccctgtaaacatatttgtaatttttaatctgtagtaggttatttcctcatcgttggcatcattaatcacatttatattgcattagaaattttattgtttatgatctgcaaactaaaggtctttgtttcttgttatttatttattcattcattttgtgttgactatctcttgaaaaacaaaaaaactacttgattatatttgatttcgcttttttcacttttcaaaatagaactatatggtatgtctcacagtcaatgttccacaatctatatttgtatgtgtaaacacatgtttccttgtagggttcaattggagatccagttgtgagcaagt

SEQ ID NO: 65190 - DNA, 916 bp, Cucumis sativus
  Intron number 1 from transcript Cucsa.303560.1 (locus Cucs a.303560) derived from phytozome v7.0 (chr-ID scaffold0295 1; pos 1441001 to 1441916 reverse strand)
cagtctctgcttttccatctccaggttttgatttacttacaaatcatctagggttttcaagtttgttaattgtttttttcgtattaacttcgatttgtatgatttttcacgcaatgttgttagttgagatgatttgagactggtaaaacgaatacgtgttgttgagtagtttgtttggaagattgtgtgtggctgctggatgtattgtgcttcattgtttgttcattttgtttctttgatttgggaatttcctgcggatggaatgctgggtgggttcatttcagatttttacttcagtgtaacagtgttataaaataattgaagaatcctatggtttttcaaagtcaagaagatggttctgaaagtagttttatttatttttggtaagaagagatgcctacacatttcgctagtcagtttcttcttatggagtaagacgtttaaggaagtggtttaaagacttctgcacacgtcctgtaattttgttttgaaaactcagtggttgcaaacaaggggagtcaaagtaacgttaagtgagtccatctatattaaaacaagtgtacatgttatggtgagacaactcaaaatagtttttgccattattctttaacaatttgatctcttgttctattataatgtcacttaacgtcttgagctacatgaatatcatgttaatttttaatttcctgcactgcaaggttactactgtaaattcttttgttttcttaatgatgtacttttgtttgtttcaagtgttttttgtaactattagatcttactagagtgaacaaaattggtttttcttttcctccttaaattccttttatatgcgtgctttagcttctgctcataaccatcaattttttatcttccttgattttccttctttaatgttgataatacagaagtattgact

SEQ ID NO: 65191 - DNA, 768 bp, Cucumis sativus
  Intron number 1 from transcript Cucsa.137650.3 (locus Cucs a.137650) derived from phytozome v7.0 (chr-ID scaffold0105 3; pos 417741 to 418508)
gaggaagcacttcatttctagctctcttttcctctgtacggacggtcttaatcataattatctttatcaattcttctctttcccttctaatttcagctttttttccttttcatttctttgttgtatctgtgaagtaaattaagacggttttttagatttgtattatgggtttcactcagattctgtaataacagcttgacaattattgagttatagtctagagttttttgcttctttttttttttctttttttttctttttctttttgtatttttgttccgtccatttggggatttggggaaacgatttggttgattgtggaagaatcggtgtgggttttggtttggaatcttgagttctgtgtaaatgacagcgaatttgagtttggggtttcactgaagtttcattctcttcgattctatttggatgttatttcggaggagtcaacttttgattcaggataagaggtaggataaatttttgttttttgtttttttgttttatttttcattttcttgatgaatgtgtttttagcttctgtaaaaatcacaatagatcgactggtggatatttgttttttccttgactcattttgatgagaaaatgcgtctagttgtttttgtggccgatttctgatattttgtattattattcagcttttgggtgtcttagagtttatttatttattttttgttctgatttttccttttctatttgtttgtttgttctccagtaatcaagcttgggcaccggagctttttgttgttc

SEQ ID NO: 65192 - DNA, 525 bp, Cucumis sativus
  Intron number 2 from transcript Cucsa.256750.2 (locus Cucs a.256750) derived from phytozome v7.0 (chr-ID scaffold0222 9; pos 4279664 to 4280188)
gctccggtgtggcacccgatcaccctgaaacaaaggtgtgaagcttggttattatttcttctcgctactttgtagattttgaaagtgtagcattagttgtaattgcttgtgaagaaattgttgaactgatttagaagatattggacgattgagaaaaagaattgctttcagaattatttctatgcgttctccttgttctgttttagttatggcttagattgtaactttggttggaactagtagatacgaatctcatacatattttagcttgcatgtttggtagatgatggcagctgcagacgtgttgttcacctaagtatggacatttgtaatagaaagttctaggaaatgtgctaaagcggaaagtaatcttattggcgtcaataacattccctttacttgttgtgaaaaagaattagaagtaatgttttatttggactgcaaaaatatttctcctatttgagcttagtttattaaaatcttgcaacagattgtggttaatcaatttacgcgggttgcacaaca

SEQ ID NO: 65193 - DNA, 554 bp, Cucumis sativus
  Intron number 3 from transcript Cucsa.170010.1 (locus Cucs a.170010) derived from phytozome v7.0 (chr-ID scaffold0117 4; pos 280823 to 281376)
agagtgagttcggatttctgacattaacttgatggtgtttgttccataagttgcttcactgtccttgtttcaaaaaactattcatctattgattctatctgatttgaaataactggagcttctcttttaaagaaatattatttgaatacagaaatatagattaacaaatgacaaaacatatttgattgcatactgctaatgtgatgcaaattgcaaaaaatgcagacctaaattggccacctagtgcaggttatcaaaagaatacaggcctaattttacttcagttgtcagttttcattctaaaacttgttctagtactttttcaaagcaaataccaatgtgtttcagttgattttttgatttccgaataaatgaaaggtcacctttcagaattgccaatcaagttatatttcaataccattttgttgtttagtatcttcaatttaactctagggatgtttattttcatttttgagcgttgtttctggtatcataaacaattacatgttaaatctggccacatgcaggagttggagaaactattactaccttga

SEQ ID NO: 65194 - DNA, 617 bp, Cucumis sativus
  Intron number 1 from transcript Cucsa.300800.1 (locus Cucs a.300800) derived from phytozome v7.0 (chr-ID scaffold0293 1; pos 400961 to 401577 reverse strand)
tcgtaatcagattgtgttggtagccgaggatacaggtctgattttccctcttttatgtctattacgaaattcgtgtttggtcactgggtaaaactaagttgagatgtttcttcttgtttgattgttggtcagtttagacctcctagataattgtttttattatgaaatggacaaataaagatacagcgaaaccacaagaaccgacacagaaattcagtcaattgtgagctagctatgtctctggcaaagggagaataatttattattaaaaattataattcaaattgtagatcagaggtgcctttgtgggtagacaaattatacaatgcacttcaatagtttcagctacagtgagatatgtacttggtgttcgaagttctagatatgaaatttaaggcattcaagtagtttttgttattaacatcctataagtttactttacaacgcaatgctatagagttagatggatgtgatgtgagattaattgactccaagctgaacggagtttaagctagtctggacacttccagatactaggaacaaaatatttgttttggaatgaagtgaaacgtgttcttgcaggtggatctgctataacggaattgcggggagcgctg

SEQ ID NO: 65195 - DNA, 763 bp, Cucumis sativus
  Intron number 2 from transcript Cucsa.232240.3 (locus Cucs a.232240) derived from phytozome v7.0 (chr-ID scaffold0198 9; pos 290961 to 291723)
agcgcaaattgtgagttaatatcagtcacttggtattcagatgagaaccttaatttattttacaattatccaatcctgatggtgcgcgttttctgaaggatctgaattttttgtctcttcttgctatccttaccacttgaattgcagcagtcaaacgctcgactgaatgtgaatattggcgttcttcgatttttatggatgttttgtagaattttaaaactgaaacatctgtgatgatggcatattgaagcctactaacgtcattttgggattactattagtctaaaccaaggttttcaaatgacattttgcagccattaaatacttctgtcttgcactttgatgtgttttttctttctttttacgtggtgaacttagttttggaatttatatatttgagtagtgttgcatatgactctatttgaatgattttcaattattgtttcacagctggagtttatcagaatggtgagtactaacctacctgaactccaacgtttgatacattatgctactgttagaccattggctggcccgttttactcgttaaaatttgtttttaagattgtgagaaatgattttgacgaatgggttttgtttctacaactatttctatttcctggaagccacgttacatggtcattggactagtttaaagttcaagtcttttacagtctttcaaaattaaatgtcatgactatttctgtttagtaatcacggacgtaatgttgcagggtttctcatctctaatatttttatgcag

SEQ ID NO: 65196 - DNA, 703 bp, Cucumis sativus
  Intron number 1 from transcript Cucsa.142590.3 (locus Cucs a.142590) derived from phytozome v7.0 (chr-ID scaffold0107 9; pos 831771 to 832473)
attttgatttcttcacagagtattttcagtcgtatgtaagtctaaacttcaaccttttctttttgtctttagtttttagtctttttttttttttatgggttttcttctttttgttttgggttattgtttttgcgaattgggttttgggttttgttgcttatgtgcttgttggttgagactttttgtgttttgggtttgattttgatcttcaattctaatggtaaattactgcattgtttgcacctcatcgtgttttttattggtcaattttggctgccaattgggtatttgtattcgtgttctttggaatggctgctttctgtgatgggtgcttggtgcttattaaaatttatgaaaatagagaacaacattagacaattattaatcaatgaattttgttgttttctagctagagatttttttttaaaaaaaagtatgagattcattagacgtctctgaaagaatgatcgatcctacaaagttaagctagatagtccttactgagctcgatattttatcagctagttttctttacctcttttatggcatatctttaggaaaattgtttttgaacattgccctagaaataattttattgtttaagggagtttctttttttttttttttgtttcatttggttatttgtttgctctggtgccgtaacagaccaatctgttggtttacagagcaactcggctaaaaa

SEQ ID NO: 65197 - DNA, 885 bp, Cucumis sativus
  Intron number 2 from transcript Cucsa.142590.3 (locus Cucs a.142590) derived from phytozome v7.0 (chr-ID scaffold0107 9; pos 832721 to 833605)
agggcttggctgctgctgctaagttatcagaagaggttagattttttccaatgataagttttatttctatcaaaacaaaacaattcctcccgcttgtccataattggtttgtaagctagatatctattttttgtattgcttacttactagcaggttagcttatcctgttcaataaaagattgaaagttaaactacaagtttggcacctgatttattataattttattaaaaattcatggatgtttgaaaatgaaaagtgaaagttttataggagatagaattcagttttgtgtttggcaggtcaatgaacattaaatattggaaaagttgaatgacccaagtgacaaaaaattgaaaggttaggatttgatgtagaaatctgttagacactcttaaatatcatgattgtattagacacaaaattgaaaaagcttgggaacctgttagatgtactttaaagtttagggatctattctagacacaaccttcaaatgtcagggataaacttgttatttaatcagaatgagacagatactcttaaaactatcttcttttaattcttaggggttaattattctgcatctcatataaatgaataataaaaaaagacttcctctcatacttagcgtagatattatacttccttttgatatcaaattcttgttaatagttttatatttacttgattcatttcatttgcatgattggtccaaattgaaaaatatggatcagttccctttggtgaattcttctttcatagatctatttcaatcactagctaggtaaatctgtaattggttatttatacgaaaaatgctccaattataatctttttatttgtgcaattcaggctagactaagagaggcagcttcactggaaaaaca

SEQ ID NO: 65198 - DNA, 973 bp, Cucumis sativus
  Intron number 1 from transcript Cucsa.274770.1 (locus Cucs a.274770) derived from phytozome v7.0 (chr-ID scaffold0254 1; pos 174157 to 175129 reverse strand)
atattcaatctgataattcctctgcagcaattcaggtttagttctcttccttcttgacgttttttttctgggtttctgctgaaatgcgtgattcgcatggtgagttggggagtttggagcccttgttaaattcattcgcgccatttcttttgttatgattgcttttggtgcttaaacaagtggggttggaggggcgggggatcgtagttttccaatattaaacatttgtaatgggaactgtgaatgtgatgatgcatcgttgttggaagatgtgggatttcaatggtttctttgattgttttggaggaggttttgagtgggactttgtgagagtggatgtgctcagatgctatatttgtttggatgaagttcgtctgtttctttctcatggatctgacagataaattatttttagtttatcaacttctttaacggcttgattccagcatgcatttatttctgattttcgaaacagaggagagtaatagttcatgtacttgtgaaggagaattgtttatcactgcaaacagtttccaataattgtttttgtaaatctgtgttcatggatatggtagtttgtaaatgccaagtttattcatacagttgaaagttattgtttgaacaatctgaaaagcaaacaaatacataaaacaaacaaagagtaaaataaaccattgaaaaacagttggtcaaactcaaacatgtttttattggattttcatcttttcaagctataatgagctgagaattattttctcaacactgatgctacatggggcatttcaatggaaattttatctcatttggacttctggatatagttgtaaacattacaagatccgataatgttgtggtctagattagtccacttcttttaatgatttttttctggagtggcattgctctaactctgttacaatatgtaatttctcttgcagttgtcatcagtttggaaatacaaaaggctgaagga

SEQ ID NO: 65199 - DNA, 487 bp, Cucumis sativus
  Intron number 1 from transcript Cucsa.202310.3 (locus Cucs a.202310) derived from phytozome v7.0 (chr-ID scaffold0137 6; pos 381489 to 381975)
acccaattccccattctcccaatcctcatccccatgtaagaaaccttttcctccttttccctattttaattatttacttttcattttctttattaatcctttttttttcttctttctccattcgcatttccttcacctcttttcctctgatctttgatttttggtttattggtgttccagttactgtgctaattgactcattcatgcctgctaaatctttctctacttcacaattccattgctttctcgttttccttaaacattttcttatcttttctttttgtttgctgtttgctagaccaggttcaatgggtttcgcttgggatccaccccttttgttttttcggtttactgcaatcattgtcattctttatataatttattaatttttttttcttctcttagactgatctgcgttttccttttatttttttttttggattcttgtgtagtgggtgctcgttttttttcctcacattttcttccc

SEQ ID NO: 65200 - DNA, 679 bp, Cucumis sativus
  Intron number 1 from transcript Cucsa.162870.1 (locus Cucs a.162870) derived from phytozome v7.0 (chr-ID scaffold0114 4; pos 2381210 to 2381888)
ttgctctcacctcaccttcactacgtttctccgtaatttacacccttctcttgaacttttttctttctgctcgactcttcctttctacttctttcaatcgattaagcttcaatctcacattcccggcacgaatttggcctatccacttatttgaatattgttagggtttccttaccagtctgaaacgcgtcccaatatatgcgattttaaagtattaatcatctcactatctttgttctactcaatgaacgtatcgaatagtaactgtaagtatctttctctgcctccgagctgaattagttcgtttgcttcttttcccccattgttttacacccctcagattttagggttaggtttttcttttttttctttttaaacagaaatttgcatatgttacactgaaagagattcagttccgttcgggaatagttttgacaatattgtacaaataaaacttgtaaatgcacgtaatatctttaaattgcttgagcatgtgatgaataaacgtaaacgctgtcatggtatgatgtcatttgtcaagaagtagaagatggttgcgcggtttgagcttctctttgattttctgaagagttaccctcacatttattggtgagtttttctttaatcaattatattctttttctatctccttcaggctaacaggcacaccattcttctt

SEQ ID NO: 65201 - DNA, 714 bp, Cucumis sativus
  Intron number 2 from transcript Cucsa.236540.1 (locus Cucs a.236540) derived from phytozome v7.0 (chr-ID scaffold0201 8; pos 331349 to 332062)
tgtaagtctcatgatctctcacaactgttaagaatatggaatgagtaaaattgttgtctttattttcttttagttttgaagaacgcacctagcacttaattaataatgaaataagaccacagacaatcttgtgtttttgaatttcctacaagtttccattttttttttgttctgttattacgttttaagctgaccagtgaagaagaatgtcataaatatgaacaagaaaaagaaacatatattagctttgaaacactagttatacagctatgaattctgaaaaaaagtagggagttcttgaatccacattgtaagaagtagttgtgttttttgttttttttttataaccagtgtaagaagtactcaatagaccatgaaattgatatttatttttaaattatggatcacgaagtctcaagaccagacaagaaaagaagtgaagttaactaactctctatacgactaatcccaatttttaagtccttgggttaaacacgtccttaaaatttattattctacgagtttaaattcaggttcgatggattttttaataaattagacaaggtacgtgcaaaccattcaaatacacacaagacaaggaaaatctatatcaagaataaattataaaagattaatgtataatatgtgataataaattgtaattctttcttcttttcaggccaggaagtttatacgtggcagagttgaagcaag

SEQ ID NO: 65202 - DNA, 639 bp, Cucumis sativus
  Intron number 2 from transcript Cucsa.292560.1 (locus Cucs a.292560) derived from phytozome v7.0 (chr-ID scaffold0277 9; pos 41262 to 41900 reverse strand)
tcagataactgcattcgggtatccctactctttatgtaatcctttttgtgcatttaccatatggatttaaaattattcatctatttcactgtcattattgttttagtttttgattttctggactatcctcattttgtgcattatttggacctataatttcttggttgtaggatgttaatgaactattgccttgaacacgattaaaatatgagtgaagaatttgagatttgggcattttcttgttatcgcttcaaatttgggcatttgctttgtcatacgtgatgccctaaagcgaggcttaatttatgatgccaaaactgaagtattaagaagaatatatggtgccagttataataattatcttattcttaattttttaaagaactttaaataaatgaaaggaagtgagacttataaacttaggaatgaactcttcacaactagatgtatgatgtattatctgttaccaaagggctaaattagttaatactcgcaattatgttattcatcacggttgacatagtccttgatcttcatcctttaaaagcattcttaccatcatttttctacacatttttttgcctgctgcactagtgtaagttttgaataatgctgagtattgagatgcccttgcagaga

SEQ ID NO: 65203 - DNA, 418 bp, Cucumis sativus
  Intron number 1 from transcript Cucsa.162160.1 (locus Cucs a.162160) derived from phytozome v7.0 (chr-ID scaffold0114 4; pos 1867121 to 1867538)
caaactccggctctgttttccatttttcttccaaggtattgaagcactttagctcttttctttgttgtgaaatttgtgcataatcgtttggtttctgtgcatgtgaagtgatgatcattaattttcagtgctgggatgaattcctaaatcccaatggtttcattgcgtgtattaagtagactgtgaagtacagttagcaaatctttccaatgttaaactagtgagggtcgttaacttgtttagatgatgatgttttgaatatctaaatccattttctgaggctgaattcgcttattggttgatcaggattttggcagtgtttagttctagtgtgtgttcattctatttcaaaatttgattgtaacatagtcttcttggtgcagtcatcagtttgtaagatccatagtttacctgacat

SEQ ID NO: 65204 - DNA, 565 bp, Cucumis sativus
  Intron number 3 from transcript Cucsa.180430.1 (locus Cucs a.180430) derived from phytozome v7.0 (chr-ID scaffold0123 6; pos 19185 to 19749 reverse strand)
tctatctcacaaagaatattgagcacaaaggccaggtaataaatccaatgccctcgctcctttttttccttttggtcaaaatttcttaatgtactgaagaaaatgcttttttgtgaatctttcttattttattttcttgactgggttgtacaactgtatgcaaattcttgtttctgaaggttttcactctgattttaagctgtggatgaagtgacttgtcattaattttggcaatgattgaagttatgaggaagttatttgttattgagatttctcgtttattgaaatgttattagaaattaaaatttctttggaaatgctgtgagatatttgaatggtattattatgaacaagggaagtgggtagaaatggagctgaatatgagtattgatttacattcctaactatagtattatgatgactttgatattaacaatgtgaagtagcttctttctattaaaacatttgggagcgatttatgctccatgcctacatttctaactttttattaatattgacacggattgcaggttgacttggtcactgaaactgacaaggcttgtga

SEQ ID NO: 65205 - DNA, 840 bp, Cucumis sativus
  Intron number 1 from transcript Cucsa.198630.1 (locus Cucs a.198630) derived from phytozome v7.0 (chr-ID scaffold0135 7; pos 1630311 to 1631150)
tagcaggtttgttaattttcatcagtcataatcctatgtgtttactttttgtctcccataactgataataattaacatgaaaaagaaataacttcatacttgaacaaagcttcatacgtcggttgtactttcattctttacatctattgaaacaaaaacaaggtttttctcctaaaaagaaaaaagcaaaaagaaaggaggttctatttgtacaattgctaccaactcttctttcaagtaattaatttcctcgaatcaagatccctgacttcttttagtacttttttctctcttacttatcctgaaatctctattttccctttaaatttgggatctggatgttaagtgttgtgctttgcactgattcttctgaaattataaaagtaatttttgtttatctttacttctaatattttctgtgcttatctctttcttcatcaaggtcaatgtttttgctaaattagttttggttgatctatatatagttggtttcaaaattagcaaataacttttacatactgttctataaatgtctctggtgtagaagataatccaagctttatgtatattttgatcgttctctctggagatcctcacaggttcataaaattaattgtagtccatttgaacctgatttttatgctgattaacatcgtcattaactttacacttaacataaaatgaggggaaagtgggtggtctcattgaaagttctgatagggcatttatccttggcttttaccacttgtcccacacccacaaagcaaatcatttgtatggattgctgctgtaatatgttttagcttttgacttccaggtttcatttgctagctgaatttg

SEQ ID NO: 65206 - DNA, 851 bp, Cucumis sativus
  Intron number 1 from transcript Cucsa.157730.1 (locus Cucs a.157730) derived from phytozome v7.0 (chr-ID scaffold0114 2; pos 17416 to 18266 reverse strand)
tggtttatttctattgttcaaattttgatcgtatcacccacctcaatttactctcctcaattattctcctatgcaagaagggcattggaagagcaatatgctttctcttttctactttctcctttttttttctcaagatggtttgttttgctaccgtagttcccttcatataactttttaggttgttgggttgcgtagtttgttcacatatacatacaaacacacataaaataatgagtcaaatacatgaatgaatataatacgtttggttgaattagtataaccaaaacacatcaaataaacctccctaaaaagtatgaattctaaaatatgaaaacaaaattatattctacacgaatccaaactagtggaagtcttaactaaaacgagagagaaacaaatatatataaaaaaatctgaatattttattgataggaagaagtcacacactttcaaaaaaaaaaaagttcaaattaactgacacttgtacgtaattaagaacaaaaaagagtcataccttaagcattgaaaactaatacaacatcaacataattcaaataacataaaataaaataggaattaaaagaagtttgggaagaaaaaaaaatgtgccaacaatggtcaattccaacccaactaatattaccaaatgaaacttcctaatgttcacaccttccaaataatatctcatttaatttgtaatgcccaacaaacaaattaaatacccacctaattaaacatttgaatttcttcttctcttattgatatatgaattaagatgaagaaaccctgttttcatatcaacaaacttctaagtatttcattattcctcatcttctcattacttcttg

SEQ ID NO: 65207 - DNA, 892 bp, Cucumis sativus
  Intron number 2 from transcript Cucsa.198950.2 (locus Cucs a.198950) derived from phytozome v7.0 (chr-ID scaffold0135 7; pos 1829016 to 1829907 reverse strand)
ctcctaaggctgttttcccttctgtaagcattccctgcatttgacatgttctgtgtataatattgatgcttatggcgggctacattctggtggtctcgattttgtcaactatttgagtgttcattgtcgtattagggcgagatttagttgttgagctgcacagaacgatcaggtttttgagctttggatgtttttttttaggatttgttggctgcattgatttgccgcgcccagtttatgtgtcagagtgaaagtgtgaagtgcttgccactttcgagttccaatatcaattttgtggtcattcctgaagtcttgtaggtgtaattaaatgttgaaagttctagaaaccagtcctacatcaccaattttggtaactgagagttttgattaagcaatgcgaaatttggtttctaatgagttgaaattttcattttttcttagagttttgggttgggatatttctttttttgggataagacctgatagcaatgcaatccaattcttggcgtgacaatgataagttattattaggaggatctgagattgatgtctggtataattgtgatttctgttcttggttgtggtagtagagttcgtgatttttgttcttctttctacttttaattgacataaactgaactgaacttgagaggtagtgttgtagaaagattccatgggaaagaaaatgatatatgacaaatggttcttgcccatataaggaccatgtgagagatggtgtgtacaacagctatatttctacgtacatttcaatatatgattggtttatatgatgcctgtggtagctgataggtctgttattgcttctgtaatgatgtaaggcatatagctgtatctatctcaaccctttacctttgtttgataaggttgttgg

SEQ ID NO: 65208 - DNA, 861 bp, Cucumis sativus
  Intron number 1 from transcript Cucsa.209340.1 (locus Cucs a.209340) derived from phytozome v7.0 (chr-ID scaffold0146 6; pos 69184 to 70044 reverse strand)
gctgtgatctcccgaggtatatgcaacgtgtgtgggttttgttggtcttaatttggtcagttttcttagatggatttgagtgaatgtatccttctttgactgctccattggatagtaataggttttcattagcattttgttagattacataatattaaatttagcttttgagtctttcaagagttttccttaattactataatattaattttaccttcatccaacttaagctaatcaccgagcttttgcgtaattgttgtttttgagggatgaatatgagggatagaattctttcaaaaagtccccacacatttccttgtctaccagccttggtagtgttgccttgtaaaagaaatctaaattatgccatttatttattgggtattggtgggctaaattgcctgatgcttcaacataacaatggtcttttctagaaacactcgaggctgtctttttcacatactgtatgggatttctgtcaatttggaagttggattaatgcttttttaacaattacttaggtacttgaggccccaaagaagttgaagagtctcccaaggtgtacacataaagctagttggagaattgtgggatcttaatattctttttgttgtctacttttggagttagccccaaggagtgggcgttttcctctcctatttttgtttgtgtgggtttcctataccttgagttcgttagctgactatcttctctcctttgattttgtaattatgtttgtttgacttcatgctttagttctgattagaaaaacaaaaacaagcgattgagtattttacagtcaagtagatatttcatgtatactaagaaaagtatcatcttttcacttggagctcagattta

SEQ ID NO: 65209 - DNA, 778 bp, Cucumis sativus
  Intron number 1 from transcript Cucsa.267120.1 (locus Cucs a.267120) derived from phytozome v7.0 (chr-ID scaffold0236 4; pos 214139 to 214916 reverse strand)
gctccgaatttggcggtggtacccttcatataaaggtctgttccagctttgttttttagtttcttggtttgtgatatttcggattgagttttgtgggggtttgatctttttaaactaggagattctgataaattgctgtgctgtggactgtgtcgtttattgattgtagtgtagctgattttttttgcttcctgatagagtagggtcgttaatttaataagataagtctaatttgagcttgtggggttttggattacatttataagtttgatggcagttggtaagtgggaagaatgaacctaacgtttactctgtggatatcacatatgaggtcttgaattgatcccttatgattcgtatcacttgtcttgctagattgaattaatcgacgagaattttttccctttggattatttgtttgtgtctttacgagctgtgagttccaggtgatccttatctatttgtttttttgtgtttgatctttataatctgatttcatctttattaaaaatgtaaattttttgttctgttttttcgtattttgatttcattttttgaacggaaagaggattctgggtttctgagatgtgccatgtttgaggtttcttttcgcgcaaattattgactatcggaaaataattaagcgttaggtttgacaaggattgttttgatgctgtcctctagcatggttttacaaaacagatgtgaaagaatttgactgccggtagaaagttttatgtatcttcaacaattaatatatgtcctatgcaggctagtg

SEQ ID NO: 65210 - DNA, 317 bp, Cucumis sativus
  Intron number 1 from transcript Cucsa.193440.2 (locus Cucs a.193440) derived from phytozome v7.0 (chr-ID scaffold0133 5; pos 369124 to 369440 reverse strand)
ttatttctaatcggtaatttgttttttctgtttttccttttttcctttattattgggttgatggattatcaaattttattggtgggttttgcgaattggttccgtttaattttttattttctaatttttactcccaaaattatgtctttttttatgtgtatcttcacccatcaatttatgggcattcctctatcaacgtttgatttctttatcataggggatcttgatttcttgatttattattattactttctttgaggtatacattggaatgcaagaaatgtttcatgttgttgttcatgcaggtggtttagaag

SEQ ID NO: 65211 - DNA, 782 bp, Cucumis sativus
  Intron number 1 from transcript Cucsa.271540.1 (locus Cucs a.271540) derived from phytozome v7.0 (chr-ID scaffold0250 0; pos 366295 to 367076 reverse strand)
caaggtgatttgtttgtgtttattgcgatgatttgatttttttttctcatcggttgtgtttgttttattgtgtggtttgatttatgttgtttagggttgagttttggatcgagcgatttagatctttgattgatattcgagggttttctttttctggattaatgattcttatactgtaagttttttatttcttatgatttttgagtcttggatttggggaaattgatggatctgatgttgaaattgacattgacgattattcggatcaatgtttgtttggagtttggggattttgtaattatgacttcgaaagatctcttgatggctgagtttcgtttggtcaacgataaacagtgtgttatattatcctctaatccttcctatgaggatgctggtgtttatagttgtttacagtgtagttttagtttaatattgattttatctggagaagatgatttccatagtgtcgtgttttttcctttttgggtatttctttgtcaccagccacacgggggtgagtttatgtttgtttgagactgttattgctacctgacattaattattgaaaaagtataacgagggtccaaaaggacaaattgattaatactactaaattataactttaggcattgaagtggataagcacttgatcttccttaatttgaaagtgtactctctagaaggcatttctgcatacctaatcccactaatttatgttacttttctttgggttgtatggtaatgcaggtggttgaggtttcaacttctaagacaggaaagca

SEQ ID NO: 65212 - DNA, 851 bp, Cucumis sativus
  Intron number 1 from transcript Cucsa.286360.1 (locus Cucs a.286360) derived from phytozome v7.0 (chr-ID scaffold0265 3; pos 2427722 to 2428572 reverse strand)
cgtatcaatctaccaaaggtaatcttaactatttttctaccaaaggtaatcttaactatttttgaacgagtgcaaatcactttaaagttgaaaatcactttaaaacagaaactgattgacgaattatttacccctataacaaaatttcatatgtgtattaagatcgataaacgttgatagaatctaaaatttcttataccttaaacaatttcttaattttcttattagtttttaaaatatcaaaattttatatgaaaaatattgtaaataataaaattattaaaaaatatttataaatataacaaatagagatatctaataataaattatagtagtttattagcatgtgatagtgatattttactatgtttaaaaatgattctttctatatcacgaaattgattttaagtgattggtatatttgagaatgagttaaaatcactatatagaatatgcttggtagtgttttaaaaccgttctaatagtatcgaatttacattttgaaagtgtgcaattaaatattatgtttcaagatgattttaaacctagcataaattattttaaccaattaaaaatttactttgaaacatatcaaaaattaatttgaactattgtgacatgtttgatgataacctcctaaggtggcatagttataaatatgagatatgaccttgacacagtgtcaaagaattatgagagatggtcacctacaccaaaatttaatatcctacctacggtcttgtaacgttagattatttgttccgtaaaattagaagaaaaaaaagttgtaaaagggatgcttttagagcttatttgctctgtttatgtggaattagggtcgacaaagaaac

SEQ ID NO: 65213 - DNA, 417 bp, Cucumis sativus
  Intron number 1 from transcript Cucsa.192110.1 (locus Cucs a.192110) derived from phytozome v7.0 (chr-ID scaffold0133 3; pos 29479 to 29895)
aaagcaggtctgtaaaaaaaagaaaattacccgtagtagtactaccctttttcgaagggccacctaattcatattcataatcaaaatcatgaaaacccttttgtttcaaagtttagatctgatcataattatttacccatgttctaatttcaaggatttttcatgattttgaactattttgcttactttaactgaagtcagggaccagagttatactgtatcactctgttttttagttttttttttttttttgtatacgcttaaagttaaaggtattttcctgtcatccctgttttggctgctatctaaaaccacacatgacaagaaccgatccctccatcaatcttaataaaacaccccaaattccgatctgggtaaaaaacagagagtgatctaatgaaatgggtttccaggaaa

SEQ ID NO: 65214 - DNA, 680 bp, Cucumis sativus
  Intron number 2 from transcript Cucsa.167420.1 (locus Cucs a.167420) derived from phytozome v7.0 (chr-ID scaffold0115 4; pos 788280 to 788959 reverse strand)
tccctggaaaatactattgcctcttctgtcccaaggttatctgcttctcttgtttctacattttgtggtttgaattaatgcatgaaaatccaaacccatcttttcatttcaattgtctttttcttttttgttagattatagatcatagacaagctccttttttcaatttttttttttatgttcaacactaaaaatgcatttttaaaattttgagataaaaataaaacaaagttagcctaatttatatatttccagaagcttttaagtgattaaaagtttagaagttttatctatttcacttatcaactttaaaaaatttatattgtgttcttaacttcaagttttttgtgtctagaatttttcttcattctactggtaacttcataagtttaggagttatctctccatatgcatgatctagcccgtatgccaagtaagtactaaattgttaaatgctaatgacatgacatggactcattggatatataggacctaaggaaagttgtaggactaaatagaaacacaattttaaaagataaagacttgttgaaacctcttataggagccaaaataaacataactgttgaagataggagaccaaacttgtaatacaactttcttttattattatctctataattagatatgttcacggttgacagtgcaagggtggtcgttta

SEQ ID NO: 65215 - DNA, 488 bp, Cucumis sativus
  Intron number 2 from transcript Cucsa.258270.1 (locus Cucs a.258270) derived from phytozome v7.0 (chr-ID scaffold0222 9; pos 5297275 to 5297762)
gaattcttggaaacaggtgatgcctcgttgtttcttcctggatgttatcataaagttgactgattaaattaatgtcatcattcctttgatcacctttaaaatactaattcaattcaaatgagcaacaatgagatatttggaaagagctaactacgtttagtggtctttcttcctgactttcggttctagagagagatatttagtccgtgtttggccattggaaccactttaaaaaaaaacttgaggctaagtctttgactctaaatagtagtttgtagaatctggaggccaatcatgttaattggttgtttgctttctctgaggtttgaagcaaaaaaaatcgatcttcttctacttcttgaacaaggatgcaatggggagattgtttgtcttcaactacttgctgcattatggaagtcgtttgatggagttttactgatcaaattcttgcaggtgggctgccattgcttctcaactgccaggaagga

SEQ ID NO: 65216 - DNA, 947 bp, Cucumis sativus
  Intron number 1 from transcript Cucsa.185290.1 (locus Cucs a.185290) derived from phytozome v7.0 (chr-ID scaffold0127 4; pos 838681 to 839627 reverse strand)
aatcatcaccgctatcaaattagggctgtcttaaggtcaggctccttctcctccttctccttctcctcattcttcttcttcttcactctttactcttcacttcagtcttcacttcactcttactccctaattcccaaactctcttttccttgtggctggatcgagcatttcttttcaggtattcaactctttccatttccatttccatttcttttgttacttcgctttcatgtatgtttgattccctggaaaacgaatgaagttaagtttgttcttaatagccaatcaatatatattagttggcatggcatctgattaagaatcttggattcaatctttgtggtacaatacaatcaatagtctcatgttttgagtttattactggttgaatccaaagcgcttttctagtttgtggggttattcgcgattctcttacttacaccttttctgtttttagtttaatggggattctcttatcatggaaggttccttcgtgaggaatggattctttaccatgtcttggtttgccccacgagctagttttctaaatgtactaacagtgatgggattcttttcctttcttttacatgattgttggttggttgagcaattttgtttgacttaacatttcccgacattggttttcttgaaaaattaattatgtgatatcgttgctgataagtcttgaatttttatcagctttatctttttttgtcggttgtcagaagggtctgaacactctatatatcttgaatgccagactcactttttagttttacgtattcttggcttgctttagaatagataaaccaattattacttttgcttgtgttttctttttccatcccagagataactacattctgttgcctggtgccttttttttttttattaacaagcattttctaatttctttgaatttacgcttttagtgttttatggagcag

SEQ ID NO: 65217 - DNA, 661 bp, Cucumis sativus
  Intron number 1 from transcript Cucsa.218820.1 (locus Cucs a.218820) derived from phytozome v7.0 (chr-ID scaffold0165 8; pos 763396 to 764056)
ctcatctcaaccccaccaaccccaaatccgtttctgtcagtaattctttctctcatcaatcatcgtttgtttgtttgtttttttttttaattatttttatttttatttttattttgtggggttttgagattttgatatgtttttctgttttgattgaagtttttgtttttgaaggatttggttttgttgttttggtgtctcgttttgtattctttgatgggtctggctatttgatgcttagtttgcaacttttgaggatttttttggtgtttgattgggtttgttcttgttatattttaaaggatttgataatttgtttcttcgtaggtttctgatttgatgcttaatctgtggggttttgatcattttctgctcacattgtgttgtttgattgtttctctaaccagccagttgggattttaaggatttgattattttattttgtttttgtaaatgtttgattcctcatgctttaatttgtggattttaggggttttgttagtttttcctgcttagattttggtgcttttattgatgggctgggtttgttggctttttgatgaattgataatggttttctaaatctctgattattgatgcttaattttgatactaacattgtggcgtttttattgttttctttggacagtcgattgaaact

SEQ ID NO: 65218 - DNA, 976 bp, Cucumis sativus
  Intron number 2 from transcript Cucsa.175250.1 (locus Cucs a.175250) derived from phytozome v7.0 (chr-ID scaffold0122 5; pos 8041 to 9016)
taaggaaggttttccgtccaattttgtcgctcaaggtgaattgttttttggttaattataatatcattttttgttctttaaacttaagattagtcttcggtaaaaagaaaacacattttggtgaaacaatttaatctcaaaattaaataagttctgatttttaattatctatagatcgacaaatccaccaatcttgaaactttttatcacaaaaactaaatcattgtttatttatgtttagtgataaaattgtgataaaatttaaaacatataattttgttacctccatttaatattttgattttatatttctaattgtgattttcatatgtttggtcaaaataagtaaaactatgtctctgcattaattattaacgataaaaataatttaaaccatttgaaaactgattgaattaacaaattcaattttagacggaagaataattacttctttttttctacatgtctaaatttagttcatatctatatatcttatgaacttttagacaaatgttatagatatgaagcaaaatcggatgtctattttatattttgttgatctattagttttaagatttcaaatcttaaaatataactttattatttaagacatttgccaaattcaactataaatatattgtcgcgtgtatatgcaataattttcaagtaattaagtgaaatctacgttcatctctcaattttatacattggatacggaaaagtaaaagcttattcacttattacacactttttagaaaaggataatttcaaggtttgtaatattaaatttcaccaaaaatatcaattttaatgcatatttatgagtaattatggaaataaagaataaaaaaacagcaatttaatacgtttattatttatattttgtttttcaatattctgaaaattggaattaattactaatttggttattggttgagcagagagaagaaggagctgctccgatcaagaccgctgc

SEQ ID NO: 65219 - DNA, 727 bp, Cucumis sativus
  Intron number 1 from transcript Cucsa.199910.1 (locus Cucs a.199910) derived from phytozome v7.0 (chr-ID scaffold0136 5; pos 275410 to 276136 reverse strand)
tgaggttgactgtgttacttgcagtcccgtttgtagtaagtttctcctacctttatatacaatttattcgtacggctggttttcatattttctaaatagatatttaatttcacaaaaaagttttaaaatgaattaaactcttttgagttttcaaaatttgaccatcaaaatacttttagaatgtggacaatataacatagccgaatagatggaaaatgacattgtaggcttaatatagtttcataaacaagaaataaaaaaataaatggttttttttcagttaattttgaaaatgaagttttttgttttgtttcgtcttgtctttttaacgatttattaattaattttataaatactaattttgttcctaacttttttttgtttgaagtttctatttttactaatgttttgaaaaactaggcaaaaatatttgaaaaggaaataaacatttttcaaaaacttatttgttcatcgaatttgctataaaagccgaagtgttaactttaggctaattaatcaaaaaattgataatagtgttgaggatattattgttggaaagccaagttattgatgagagtacaaccaccgcatgccaataataataaaaaagagcgaaaaaagaaaacatatatataaacatatgagccgtattgcattttcttaacaaatattcttcaattacttacgcacagattgcaaccgtccgggcgccgtgtgccaagaccca

SEQ ID NO: 65220 - DNA, 487 bp, Cucumis sativus
  Intron number 1 from transcript Cucsa.304060.1 (locus Cucs a.304060) derived from phytozome v7.0 (chr-ID scaffold0295 1; pos 1817451 to 1817937 reverse strand)
gctccctcatttggaatcagaaattttccttcagtgtaacattctcaatccatcatttactttcatcatcattgtttgttacccaattgaaactttaattcaatccatcaatctaacttcactatcacatctctttctaatgggtttacagaaaaacacttgatcaagttaggagtaagaaaaggattagaaatttagacctaacgcaacttggtttttgaaaacagtgtttgctttctttgatgataataataagaagcaaagaaatcaccaggaaaatcaagtgattattaatcagagctttaactaaaccagaggaagaaatccaaatccaaatccaagtctgacccagtagttattgatattagattaaacactaaatatggattccattgcaagattaatatataaaaataatgtgggattctcaccattttgatggttgaatgcagttttaccaggacggtcagaacgtgacgacgatcgt

SEQ ID NO: 65221 - DNA, 770 bp, Cucumis sativus
  Intron number 1 from transcript Cucsa.230110.1 (locus Cucs a.230110) derived from phytozome v7.0 (chr-ID scaffold0195 4; pos 45 to 814)
aaggacaactcaacccaacccgtttacacctctaggtttgcttttgccgcccccgatttgcctttgccacctcactccggtcaccgtcgaccacgtctcaacataaagactattttgtttaaattggttttacgatttgtatataacttagaatttgcataacatcaatgctataggtccaatattaagttttaagattgttgttaaggttagaatatgtcccttgagcattgttgtaaagtttggccgctaaaactttaattcttcattgttgtaatgtttcaagtcccaattgaatttccctagttgtttgaatcgctagtctagttgctttttcttgtagaagttgcagaagcttttcaaagcaggcaccatttagtaagcatttttctgttctctacttcctacaatgattttctcttggctttgtatatctttgattccaaattcgccaatttttctggaaggaattgcacatataccttctgtttactccctttttagaatcaaggtcttgaaaaaaaccaactcaacttgattatttgaattatggaggttcagtttggttggtcactttggtcatttcaaattcaaccaaactaaattaagatgattcggttggtggtcaaaatgttatgatttattgtttgtaattgtacaaaaccatgtaggtgtttcttctcaaatctcattttcagccttaatgtctctgtttcaaaatttctcaaaaaatatgttgttggtcaatgttttcttgggcagagcacata

SEQ ID NO: 65222 - DNA, 865 bp, Cucumis sativus
  Intron number 1 from transcript Cucsa.146590.1 (locus Cucs a.146590) derived from phytozome v7.0 (chr-ID scaffold0110 0; pos 35193 to 36057)
tcgagcggcaggaggaggttgctttagctgtcaaggtttatttccatttccttttcttcaatatgttctgtcgtttttgctgctctttctggatcttcacattcattttagattttacgtaatgggtcgtctcagaaattgataattggcttctgtacattacacataatatcgctcttgtttgttgtcactgcaacttctttttcttgttagttgatgctgtgagttttcttcttaactgtgatgttattgatggttagttcctttattgaataactttactaatgctgcattcaaggttctattctgttcttgaatttggaagattatgtttctcagcttctagcttccttagtatcaatatgatgttcttgactttttccctgcatcctttcatggagctcttgtgcaatttttattaagtttcaattatttccttctttattcatggtagtaatcgaagaatgcttaagggaggtcagagaggaagtaaattcgtgtattggggttcctttaaatgatattgttattttcgcacttcgtctcaatagtttagcttcatttatgtcgatgttgctcttgcattcaaaattatttcttccttttgaataccgtcttgtttctctcctgcttaactctgatctgcccctttgagtgcttatcagatctacatcaaatgtttcgaatgagttaaaggtctcaaatatggaacatagttcattttagttgcgtgtggaaacattttcttttacattctttttatcttcaagattgaattgattttactttattagtttctggcaatcttacatgcttgttgaaatttccagatatttaggttgattcggaagcaagactggtacaa

SEQ ID NO: 65223 - DNA, 851 bp, Cucumis sativus
  Intron number 2 from transcript Cucsa.172990.1 (locus Cucs a.172990) derived from phytozome v7.0 (chr-ID scaffold0120 1; pos 182770 to 183620 reverse strand)
gcgacataacacttgtacagaggtatgtgaatagcccaactgaaatctttcctttccatttattatggtaaattctgactgcttccaagtacctaagtttccatttaatagatcaaagagaaaataacaaagaatctagcaattattaaaacatggatgacaatatactgcaggagttaccactttctgcctgcttcattgaacttattcatgcagtaatgtaattactttgttaaatcgattgatgaaaacttgttagctgagttcaacatgacttatggctataaactgtgataaagaaaatctccttaggtgtaaattagcaaaaaagaaagaagaaaaactccttggatggctgatgtatgtaattagctcttttgtttttactttcctttgcgctatattattagcttttgttttcactgcaaccccaaagccaacgatctgattgctgaaaagaaaatttgttgaattgaatagtagtattggtgggaacgcaaaacgttacggctttaccaattggttagaacttggaagaaataagttcaatccatggtaattatttatctaaaagagaagatgaataggagttttacagggctcgatagtccctattggagttggctagatttagttcttcattcttctgtctgtgtatgtgttaagcaggttaggtaggtaaatatcaataccttagagtttgaatatgttttatttcgaaatacttttatagttgtttcatatcaattcacacaaaaattggtgcatttctcatgaacttcattaggagttgtgtttctaaacggtatctgatataaaggttgatgtgttatggatgtagattgagaaaa

SEQ ID NO: 65224 - DNA, 270 bp, Cucumis sativus
  Intron number 1 from transcript Cucsa.149630.1 (locus Cucs a.149630) derived from phytozome v7.0 (chr-ID scaffold0111 0; pos 501167 to 501436)
tcgcttgaagaacgggtgaagggagggagacgtaggtttaaggagggtttaatggcacccaccctgattctcttctccattttcccactactttgaaaattttaacttcgctttgagttcttcgtcttcaagtttgtttgctcagcttctcacttttcgaaacttcttcggagaaactacatatgtttaccatcacatttttttctttttcttatccatcaactgccttttgaagttttgaagaagaaactgagcctgtggccgaacagc

SEQ ID NO: 65225 - DNA, 842 bp, Cucumis sativus
  Intron number 1 from transcript Cucsa.250330.1 (locus Cucs a.250330) derived from phytozome v7.0 (chr-ID scaffold0221 9; pos 495211 to 496052 reverse strand)
ctgcacaccgtgagtgctccatttttatttttaaatgtggataagaggactctgacaacataatcatagtaaaaataaatataataaaaagattagtaataattttgtttcttaatcttttgatagactatctgcttttaaaattgagttaaacttctttgtttttgtttgaaaaatcaagctaatatacactaatttcatgtcatgtcaaactgaacgtatatcaattgacatataatatgttttctctaatgaatggttcgaattccttgcttggcacttacatgcatgctgttgaactcgaaagaaaactgataattcaaacccatgaatttgtttgttctattttgaaaacttaagatggaattggtatttgtgctttatttatatttgaaatgtcacacatttgaagcatgaaactgaacttgcctgtgagaaaaatccaactaattatcaacatagctcttttcttttaggtagcatgttaatgtgtctaaaactttttcattcttcatggtcaaagataaagatatgtgcaagaaatagtctttgagtgaaatcaatcttaaataatatagtattaaatttatatttaccaatcaacttaacttatgcttttggatcaatcggttattaaaaatggtatttaagtaaaaatggtatttaagtagaggttatttactcccaagttaatattgatttctacttagtcggtcttactatgatcaagataaactagaaagacgcattctttgtattttgcaatctcgaactttgcctgatcataatggtttttacctacttttatgatgtgctttgtataaacaggcaaaacgactaaa

SEQ ID NO: 65226 - DNA, 874 bp, Cucumis sativus
  Intron number 3 from transcript Cucsa.170130.1 (locus Cucs a.170130) derived from phytozome v7.0 (chr-ID scaffold0117 4; pos 440577 to 441450 reverse strand)
aggtacactattcctattgtttcagtactcttttatcttcactctctttattaattactatgaattgctgcctctcagctgcctttatttttcactacttttttccttaggagagtaagatgtgatttcagaaccttgactgtatttctgctaattttgattaaatccattcaaatcgcttttacaatccatgtttttttcatgcaacttttcaaatcaatgttcatttttagattggtgtgattttagatttaacgttgagaaaattatcattttagtcgaccgtgacagcatatcttagtttaaaacacacattatatcagtactacgtaggttttaaaccgatatcgtagtttgtgttattaagggtctatagtgtcggttgtctttaatgtcggtttaaaactgtcttttagatgacaaaaattataataacagtggttttggacggataactgacattgaatatcatcttcaatgttgatttttcacttgctttttatcagtaactgtccaatatttaatgtctaatatcatttcgttattgataaaatataaaagggatagttgcaaaatcgagattctgctgataatccacgacaactacatatgtacgtacatttggtattcattttgtttttttatttgtagactatgactaaggattcaacttctctatttgagaaaatgaaaactatagtaataaattgaattttaaaacattgatttggttaagaattagtggtgggactaggacctgactaccatagagaagaattagtagatttttgagattgtagtttaatgaagtgctcttttgatcatcatatttattacaggcaaggtattactttcgacagctgatttttggagt

SEQ ID NO: 65227 - DNA, 388 bp, Cucumis sativus
  Intron number 2 from transcript Cucsa.228380.1 (locus Cucs a.228380) derived from phytozome v7.0 (chr-ID scaffold0193 3; pos 312652 to 313039 reverse strand)
cgttgctgaaactaaaagaaggttttttctcaacattttcccttttttcttttctcaagactatgcagttcactctatacaagtcttttccctatagtttggcctctaatatttagaggttatgattttaatgccgatattttcccatgagtccaaattccatatattcaacaatcaaataaacttacgaacatatatatatatattatctagctgatctcactaaattatgaattaatgatatttgatcatcacacgttggtatgggattttcctctatctttattgtgtaaggtgttcgttcaatatggaatgtgtaattacaagaggtgcagttgaacgtttttcttataactttctctctctatctctcttttttacagagtta

SEQ ID NO: 65228 - DNA, 622 bp, Cucumis sativus
  Intron number 1 from transcript Cucsa.155270.1 (locus Cucs a.155270) derived from phytozome v7.0 (chr-ID scaffold0113 6; pos 52123 to 52744 reverse strand)
ttcttgaactcgacgtggttacaggtactttaatcaaattactactcaactcaaaaagcttatcagtttcatactgcaaattctttttcaatttgttaacttatgggaatttcaaaatgataattgaagtgtttccaaacctattaaaattagtttttggagtactttcaaaggttaaaaatgaaatcaattttacataaaaataagttttgaaaaaacacattttctagaaaaatacatagccaaattcttctcatatttttcttaaaaaatatatatacttcaactttttcccactttgtgtttaattggagagtagaaatattgtacaaaaggataagtaaaattctcaatattccatctcttaattttcaaaattctggttggatatattattttccaattaaacacattaaaaacagaagaagaaaagcttaaactacacactttacagcctatcatgttgtacaatcacacgtagcaaagttatttatatttaaaattaaaaagagatcgtatttttcagaagacaaaataataattatattcaagtttaaatttgttgttgcatgttgttgttttgttaggaaaaggagatattgtaagctgttcagcagaaaaa

SEQ ID NO: 65229 - DNA, 319 bp, Cucumis sativus
  Intron number 1 from transcript Cucsa.179240.1 (locus Cucs a.179240) derived from phytozome v7.0 (chr-ID scaffold0122 9; pos 6574 to 6892)
tacaggttagttttttattgaaatcttaattgtggagatttttagttttggttttgtgatttcggagaatctgtgtttgatgatttgctttgagagaaagaaatctaatggaaatagagatcgatgtgttttgattaagtaatattttatttccttatatttgttgaatatttagaaattttcgagatctgtttaaattagggagaagaagaggaaagaatactagatctgtggactgtgtttgatttaattctgattattttgttcatgattatgatctgcagaggagacactccattttgcagcgaagagtgtaggc

SEQ ID NO: 65230 - DNA, 915 bp, Cucumis sativus
  Intron number 2 from transcript Cucsa.258640.1 (locus Cucs a.258640) derived from phytozome v7.0 (chr-ID scaffold0222 9; pos 5488724 to 5489638 reverse strand)
aaccacttgggattgctgcaaccctaaggggaaatgtgagtttcacttgttttttctcatagaatttccaactagtcgttgtttcttttggtattttggcttctgttgtagttctcagtgctattttgttcagcatatcttgatatgggaaatgcattttgatacttggatctggctctaattttcaaaatttgtagtcactaacatttcttatgttttacatgtctatctttccagtcttgaattattacattgataatcgtcttgaattattacattgatgatctgtatacgcttttatcgtagttggtgtagtggatgtctctggtatgataatgatgttaggaattcgattgtttgagataataatataaaagaagtgcgaaagaatgactttggaggagggagttgccccttcacgtcatgggcttgatacattttatcctgaactcgtctaatgaagaagatttgtgtgaaatttgtcaacgagtggaaaggacaagatagatgcaacgtttttttgtgcattgttataattgaagagatctcacatcattaaatggaaaagtttatgtgtgtggctctaggcatttatgatccgtaaacgccttaatcagcatatttctctgtttaatgatgttaggaatttggttctttgagataattatccaaaccaagtgcaaaggaatgggctcatgtatggagttgctccttcacaggcttgatactcgtttagtgaacaatatttttgtgtcaatgttaattatgatggagtatgtggaaggacaaaataatggaagatatcttgcatcaatacatagaagaagttttgggtgttgctgctgccattcgtgtcctgagtgttaaaacagcttgatttttatgttacttgctcgttgattgtacttataggtg

SEQ ID NO: 65231 - DNA, 569 bp, Cucumis sativus
  Intron number 1 from transcript Cucsa.258640.1 (locus Cucs a.258640) derived from phytozome v7.0 (chr-ID scaffold0222 9; pos 5489770 to 5490338 reverse strand)
gacgagttctcatacgataatatccaccaggtattcacagcttaatttggtaggtgttgattgaattattgatttatttgctcgattggtcgttggagttcgtcggatttttaatttggaggaagttgggttggattttgattgtttccgaagtataatttgtttgtttattaactatttcttacaaatgctagaaggttcggaaattattattggttttctactaaaaatttctagatacaagtacttctgtgaattacgtacagccgcgtggaagatgaggattcttgatgaaataaaatactctgaaaactgagacgaagttcatatttgtattcagcggtggtattctacaatactttttcttcttctcttggattaagttggagttttcatttttggttgtgattttaattagtgggtctcaaagaattatggctttagtgtttttttctcattccatctcaaaatttgacagcatatgacgactaagtacaaattcttccaatgaaatatccgtaccttttctcttaggtccccaaaattgagaagatagtggtgaattgtgg

SEQ ID NO: 65232 - DNA, 991 bp, Cucumis sativus
  Intron number 2 from transcript Cucsa.152970.3 (locus Cucs a.152970) derived from phytozome v7.0 (chr-ID scaffold0112 4; pos 237189 to 238179)
tacccttttccgccttattttatttatccgctgcggtagtcatttcttgttgggatttggaaatctttattggctcttactttctagtttcttgttatgtcatacctcattgatcgcttctttttctttttctttttattctctctctctctccctcttttgtatatatgtatttactgatatattcctccatgctcttacgtggttgggaaacaattcttgtgtaccagaatttgagttatgaaatgaaaatcgaatcgaacacaagcttgtcgcatttttttcgtgtgtctcatatcaaattgtcggtttccaacgtatttgtataattttgaaatgcgttttcattgaattaatgcttctggtcgaagaaaatgataagaatgcaatctggaaaagacgccgtttcagatctgaactaatactgtaacatgataacatctttctgtctacacattatggtgtcttattgacctctatttcttagattgaaaaccataacatgttgaaacacatacacatagatagataatggcaatgggctaagaatattaaagatctttcaacaaacaccaaactgctttgcaccattatcaatcactgaaagtgtggtcagactaactaaaaagaagttttcttccatcaaaccaaactctcctggacttaacagctaaaggtaataatgttctttatagttccttaactgcgtcagttctactttactttagacatagtcatgttctaggtgtgcaataaataataatttccttgaaggtggtttcctcactttgatatgaattatatgcatgcttctgactacagtgttcatggcaatctgagaacttccccttgtccaattaaacattttaatagcttttctgtgcaaagtcagtgatcgtttattttttgttggtagttatagcagttgtttattaaaaaatgtttggagtaatttgtgctactattcttctgtggttgcagtcaagtttac

SEQ ID NO: 65233 - DNA, 1021 bp, Cucumis sativus
  Intron number 1 from transcript Cucsa.163190.1 (locus Cucs a.163190) derived from phytozome v7.0 (chr-ID scaffold0114 4; pos 2610910 to 2611930)
tcgacaatctcacccggcggaatttgattcagcaggttcgtcgtcaaattcatattctcttcctcgattgcatatgcaacttattttggttatagtagtgagctaagtatatgcggtcgagtggagatctggatagtacatttggaaatggttaattgggcaaaacaatattactttttagtttgtgccttagaaaggtatatttccatttccacaaatggaagagtgatgtattgtaatgaagaaatgcatttctggttttcctttctcaaaatgaaaacgtggattaaattttcttggaaaccgctaacctaaatacagaaattctggcaagattctctacattttgagtaaatcgaaaacctcacgcttctcgcttgatttggttgacaaatttgggtataaacagaaattgcatgtaattagtaagtagttcattgcatttagctagcagcaaaactatgtacagaacctgaatcgggtagttttacaaaaatagaatcatagttccccgtatccctttttgaaattttttggaggcatcactgccaaggtaactgattggttttaagtatcttcctcttagatttgatcctctaaggtatacgcttttgccctgttaatggatctgttcagggccttttacttctcactttctttgaagttcattaacatctgggtttcagttgataatcagattttctttgatctacttcctcttggccttgtgtttaacgttctgtttattgggtttcaaggatgtcgattacaattgttttggatatcaatttttttataataccaacaattaatttgtcactcctctctgcacatcaactaattttcattttatataagtagtagttcattagtaattttgtggccatggaagaaaagcttatagaaagtattgttttctttgttacttgtgatcatgaataacatcaatattgttctcttttggtaactggcattcaatgaaacagaatttgagcagaaaacttgtccacatattgtccgg

SEQ ID NO: 65234 - DNA, 552 bp, Cucumis sativus
  Intron number 3 from transcript Cucsa.295160.1 (locus Cucs a.295160) derived from phytozome v7.0 (chr-ID scaffold0285 2; pos 150384 to 150935)
tgtgcagtgtgaaaatcattgagttttatcattatgttagttctttgaagatggagtaactcatgatatctcctatagttttcaaccactgtgactgttggccatgctttctttgatctcaatgataatatttttattttcctattagttatttgatctcaatgataatttttttattttcctgctgagctgtctgttgaggaggtgataatatatatacacacatatataactatattgttattatttcttggtaccaaagttaattataattagttgtcacatttttgtgttaattttagtgcagaaaagtgatggtgttgaatacatgacaataagaataagaaagaaaataattaactttgacgattttgttgaagacaactgtttttctttgaactctgtttttcttattaaactttgttagtttgatgggttttggaatctgatgagagaaagttctattatgatttggactctttttcttattaaacttgtgatgttcgtaatggattttgtaggtcgggaacagaattattaagaagagaattc

SEQ ID NO: 65235 - DNA, 542 bp, Cucumis sativus
  Intron number 2 from transcript Cucsa.143000.1 (locus Cucs a.143000) derived from phytozome v7.0 (chr-ID scaffold0107 9; pos 1305789 to 1306330)
cgggccaatcgctgggttgccagttgatttaaaaggttatccatttacttttctggtttcttcttttatgagttaaactttgttctatcaatatgcatatgtttcttagtttgatatatgactggtttttcccttcaatatccttacttttacccattagttaaatttcctcatcttttcaacaaaagattttgttgatagatgaagacaaattgggagactttgttttctatgttattgctcgaatactctttgttaagttgatatttatgcactacttgatcacttaatctttggtaactgtcttgtaggaaatataccataaatttaagttttcaagtatatcttagaattttcattacacgtaagctcgaactttgaatttaactggagaactaacgcttgaacatttcattctgaaacttagagatgaggatataggatttgatgttggttagttaattctctaaatcagtttagcaaatttgtctatatttgggatttctgtttaggtaagcgggcatttattgctggtgtagctg

SEQ ID NO: 65236 - DNA, 480 bp, Cucumis sativus
  Intron number 1 from transcript Cucsa.281950.1 (locus Cucs a.281950) derived from phytozome v7.0 (chr-ID scaffold0264 1; pos 104318 to 104797 reverse strand)
aagaaagcttcaaacttcacaccacattgaatccggtatgcttctttttcttttcttttcttttcttttttttttgtcaatacctattttttttccatttttatcaaatacccatcaattttttttgttaattttttgaataaccatttcacttttttcactcttttccatttttatcaaatacccatcaatttattttatgaaaaaattcgatcttcttttgtttttttaatacccatttcactttttttcattctttccattttttatcaaatacccatcaatttattttatggaaaaaaattcaatacccatttcacctttttttttgtttttcattctttctacttttatcgaataaccataatttattttttccgttttctaatgaaaaaaaactgaatcttttattgttattattatttttttctgcatggatttgcaggctcagaaacaggcacttgcccaacaattaaacct

SEQ ID NO: 65237 - DNA, 610 bp, Cucumis sativus
  Intron number 1 from transcript Cucsa.158710.1 (locus Cucs a.158710) derived from phytozome v7.0 (chr-ID scaffold0114 2; pos 815708 to 816317)
gccagattccaaatctcacctcacttacggtaaatttaatgttctattcatattcttttcatcaccaattttttttctttcgaattttaaggattttcatactctattagaaaaatataggattttatctaaaaaaaacaatatcaacttctaagagaagaaataattatgtagttcattaagattcatgtttaaaataagaaaatatcatgaaaataaagagaatatattattttatttttaaatgaaaaaatgaaaaaatgaaaaagacatggttgctagaattaataaagatacatcacaatcgtttttattttattttcaaatagaagttatgcgtaaattagatggataaataaaagagtacgaaagagaggcaaaaagaaacatcttccaacggagagacttcctcatctttctaaaatgatatattagattactcatcttattatcaattatctatttataatacaaattattataaatattgtagattttttcgtctattttgataatgtgatagtatcgttgaattgaaaattttaaactaatgagttgtagtaaatgtgaattaggattcctcccaggaactccgtcagaggcgataagt

SEQ ID NO: 65238 - DNA, 643 bp, Cucumis sativus
  Intron number 2 from transcript Cucsa.181200.1 (locus Cucs a.181200) derived from phytozome v7.0 (chr-ID scaffold0123 9; pos 185177 to 185819 reverse strand)
tgactgtgggactccattttcaaggtaacccttattaatacatctctcgttttttgtttttgaaaattgcgcttgttttctcatcaacccatttcttatttgcagttttcaattttgtatgtaaacattttaagaaacaaatttaccaaaaactatcctttctagatttcaaattttggttttgattttaaaaatatatgactaaaaaaaaaaatgtttctatagatttaactttcaaaaatataaaactaaacgattacgaatcaaggatttaaatttccttctagcattatttaaataatatcatcctaatgtaaagagtttaagcttccataaatgtattctctcactgtgtgtatatatcaatatagattcattctatcgagctaaaggttttctgatcacattgtttgtttgttttttttagttaacagacagagagaagaatatatataatgaaactacataaacataatatcatgaagatattcaaatggtttaggttgagatgacaaggcaatctaaaagcttaacttgatgggtctatatatagtaatttactttctacatttgccttcatatttttatctctcaccactcattcataggtttgaaagctatcacaagattcaatcagattact

SEQ ID NO: 65239 - DNA, 606 bp, Cucumis sativus
  Intron number 1 from transcript Cucsa.146950.1 (locus Cucs a.146950) derived from phytozome v7.0 (chr-ID scaffold0110 0; pos 284996 to 285601)
gaggtttttactaagcttaaatgacctaataattattttcttaaaattttcaattttcaaaatagaggtcttaaaatatataaaaatgttaaatttaaatcagtttgaggttcaattttaatatttatcgaattttaggacataattttttatagttgttactgattttttttaaaaattagcaaattataattttatgtttataatatttgtcccttttccactaagcttggaaaaaggaaaataaccaccacccttaaaatgaaataaacttaattaattattatcacgatttttttttttgcgtattatcattgttatagaatgtcaagtgaaattttaaaaacgtttttttttttatttgattaaaatttcaatttttactaaaaagaaataaacaaacttaaaaaaaaaacagaaaataaaataatcatcaaagaaaacattatttattaaattaagaaatacttaaatataatttatttacttctactactttcaaactcttcgatatacttaaagaatattcatgaatgctaactttttcttcttcttcttcttcttctcttttttttcgtaaggttggagaaggttttgggcattgga

SEQ ID NO: 65240 - DNA, 1009 bp, Cucumis sativus
  Intron number 1 from transcript Cucsa.197140.1 (locus Cucs a.197140) derived from phytozome v7.0 (chr-ID scaffold0135 7; pos 645319 to 646327 reverse strand)
ccaccattgcaagagcactctaaaggtatctctttttttattaatcttccttcttcttcttcttcttcttcttctataaacagatatgtttcattcttaatggtttctcatgttaagaaatctacaatcaaagttaaacagaagcaacgtaaaagaaaacaaataatcaatacatgattcacaaatagagagggagtgaacggtttgtttgttattagagagaaaatattgagatatcagatttaaagggaaaattagagtttcagagtttacataaggcacccctctaaccaacgttcttggttatctagagtgctacataacagattcaaaacattctaacgtcttcaatgcttgttgattgagattgaaagttgaatgaataagaacccttattgatttctgattatttgttcaattctgaccatatagattttttgaatagattatattgatgtatgcctgctcaagatatcaagattgtgtctcaaactgatgtaaaatgatcctattttccatttttatctatgactaatgaaaacaccgttgttggaatgcttcaagtattgtaatttggctaaaattttcctggagaggatttcataatgatcttaaatggttcccatatctcataagggtctgatttctcgagtctgtaattgtgaagcttctccgacaaggaattttgctaactaagatttcgtgtgtattaagatcacgtttgttggtgcattagaactcaaagacacagttgtacaacctatagaagtagaactgtttttgttcaagtaaggtcatagtttgtctcctgagttcaataacacgagagacttaacatgagagattaaagatttgaatcttcaactagttgaactatatttaggttgacttggaatctgtaacttgaaacatcaccaccatcaccaatatcaattattattattaatttcatttttattttcctgttgctccagttgttcaattactcctcctttgagggtgtattgta

SEQ ID NO: 65241 - DNA, 869 bp, Cucumis sativus
  Intron number 1 from transcript Cucsa.260950.1 (locus Cucs a.260950) derived from phytozome v7.0 (chr-ID scaffold0224 4; pos 61522 to 62390 reverse strand)
cctcctattcttgttcttgctttactcacaaccaggttccttctcgtttgtttgttgctcttactttttttttgttttttgtttttgtgcatgtgtttgtattttgatgtatgggtttcgggacgagttttttatttgacggaaaagtcgtgttctttggatgttggtttttgagttgagtgtgaatcttggttgataggatgaatatggagtttgtttgatggaatttttcttaactgtgaagaaattttggagattcttctcttttacgatgcctgcggtggtttggagctcgggttttaatgatcatctgtgcacaattgcttgttacttttggcctgaattgtgcttacgtgatcctatgtgctgtttattttcgtttttcgatcgaacttctgaagttatgagttgaattggaattcgctgatcatgaatttattaatttcttttgtgtacctaaagggcagtagttaggttttggtgtttatgcatagtataaatagtataatacatttttgttcaagaatagtttttgtttgctaagatttatccaactggattccaaccaggatttggatgaatttcctgctggatattccatctgtttgatgtatttgatacattatgcatttcagtcgagagtggcattttgtgtgtgtgtgtggtgttctttgatctggggtttagctgtagaatttgatgattgatttgcaggttttcctgtatattaattgctacttggatctgttctgaatttagtttgtttcaccttcatttgtgaagttattatcaataggaaccattgttgataattgttattgcttctttctacagagtcatttcaagaagacaattccagccagtagcat

SEQ ID NO: 65242 - DNA, 413 bp, Cucumis sativus
  Intron number 4 from transcript Cucsa.138460.1 (locus Cucs a.138460) derived from phytozome v7.0 (chr-ID scaffold0106 3; pos 131521 to 131933)
cgtgccataactcagtcaactgttagtgaagtcaggtttgccccatttgataattcttttcagggaaagagcagcttttgatttttcacatatttagtttttcatttgcgcttcaaagtagtctccttctgttactgcctagaaaaaatgttgcactctagaagttgtttactttgtcactgaagtttccccttgatttacaccgattcttatgaagtgggaaggaaaaagaggaagaaaaagaaaatgattaagtggtaaatagtttgatgattgttagaaccttatgttatgaggtcagatgaaatggtacatgtacgttttagattttatcgtgtcagtgaagataaatgcattgcgaaaattattataaacaaagcttaaaaccttctggaatttaaataggtatctcc

SEQ ID NO: 65243 - DNA, 502 bp, Cucumis sativus
  Intron number 1 from transcript Cucsa.201390.1 (locus Cucs a.201390) derived from phytozome v7.0 (chr-ID scaffold0137 4; pos 299394 to 299895)
gatctcaattttctagattcttctccgccgattcggtatgacctccagtcacagcttttcattattgaatttgagcttgaacatttgtctggatctttgcttttgattatgttttctcgtttcttgtggttttttgtcttcctttttatttgtctaggatggcatgtggaatggatgaagagactatatacttcatcattctctcgctgttgtttgttttttatatcatcgtaatggattgttagtgaatcgtgtttttcaatattgtgttcatttggctacttgcgtgctcaaaagaacgtaatgttattattttttgcattggttgcattgattgtgctgatcgtagcgactgtctcatatttctttcatacggctccggtgtttgtgttaaacttctccgagaaatggtgactgcttataggttttatgtaatactaaattatttcttctttggctcatgtcagacggctggtcgctcctcatacactgtggttgatca

SEQ ID NO: 65244 - DNA, 752 bp, Cucumis sativus
  Intron number 4 from transcript Cucsa.179820.2 (locus Cucs a.179820) derived from phytozome v7.0 (chr-ID scaffold0123 3; pos 189552 to 190303)
ttggtggtaagttcttcctccacttttgaatttgcaaccctatttcttttgaatcattcatgcatgcatatgatatatatatatatatatattacagaaatttgagttttatacgttatttatttgaattgattgtggctagttaatcaatcctagatttgcaaattgacttgataacttggagtggaaaagtttatatatagtatttctatattattatactccatttgtttacgctctaaatttgtcaccaatagattctacgctaatactaatacactccattctattttttaaaaaatatgatgacatgtcacaattaaatagagaagtacatgacaattaaagccgtagattacaataggttattcattttatatattcttaaccctctctctcaaagccttaaaaaataaattgttgttataaattaaaatagattacaatgtttccatttgaattcaacccttcttactttagaagcaactggcatgttaaatatttttttgatccaacgatgtgcatttgttttttactttatagttaattctaatgtaaataatatccatgcagaaaacttgcatcaaaattatgttaacaaacagaagtcagtatcaataccttgtgtgaaaaagggatactattgaaatatggaattgcattgtgattgaacatgaacatatttgttgatatattatggacaacattgaatttcaggtactactgggttagccatttgggcagcgactttg

SEQ ID NO: 65245 - DNA, 403 bp, Cucumis sativus
  Intron number 2 from transcript Cucsa.257900.2 (locus Cucs a.257900) derived from phytozome v7.0 (chr-ID scaffold0222 9; pos 5069953 to 5070355 reverse strand)
agacttgtcctttgctgcttcgtgttttcacgaaggtacgttgttcatttatgctggcttttgtttttgtagattttgttttgtatctatgcaaagtacccaaaaacaagtgtgtttcatcggcttgggaaccgtagtttaatccaaccgttgtattagggatgaaatgaagtgcgttgggtgttgaatttgtgttaaatgttcgaatttgtgccattgttttgatagatgaggtttaggaatctgattagaggataatttaagcaaatttccgtggtttcgggttgctacatttaggttatgaggagtctggttctaattaatgttacacttggataaggaagggtgatattgctgtttttttcttcttcatatttttggtagactgggagtcatcatttca

SEQ ID NO: 65246 - DNA, 424 bp, Cucumis sativus
  Intron number 2 from transcript Cucsa.259130.1 (locus Cucs a.259130) derived from phytozome v7.0 (chr-ID scaffold0222 9; pos 5767271 to 5767694 reverse strand)
attatcctgtacttgcttatattactccgtattcgcttagaaactcactttgtgccacttttaagctttttgtaattttgggtttagagaaatgtatttgataaaaggggctgagtttattgctagtttgggggttcctagtaaaagaatttcacttccattggagttgcatgaagctccctgcatttgatacttctgagtcgaatggttttactatttgtgggcttttaaattattttgttatatgttgttgtcttgtcaatgcacttttttctctttctctctctcacttcttttcctttcttttctttgttctgactttgaactttggggcattttctgatcttcgtggcggtctgtatatctctcaacttaacacttcaacgctgtttacatgttaaattgcgcaggaactccaggggct

SEQ ID NO: 65247 - DNA, 687 bp, Cucumis sativus
  Intron number 1 from transcript Cucsa.308380.1 (locus Cucs a.308380) derived from phytozome v7.0 (chr-ID scaffold0297 8; pos 515010 to 515696 reverse strand)
atctttgcaggtacgcgctttgtttctgtttctctctatttgatttacgttttgctgtgagctatttgtttgttagatgtggcgatcttacggtttttagctgaatttgatacgagctggtttattctaattatctttctttttatttatccacctgattgtcgtatattgtttttgcaaaacgaaactatgtcagttagaactattaattaggcatcttgttgaagaaaataacatgatgggtaaaacattggaccatttcctgaagcgaatgatcataattcttccaaaagtgcttgtccttgaatgggtttttttcctccctctgaccctacaataagcaaaaacttttttcccgacccatctgaccctacaataagcaaaaaaatatactcttaaacggattttggaagcctaccttcattcaaatgagtcaattgacagtttagatcttatttgataatgattttgttattagttttatgtttttgaaatttatgtttgtttcttgccactttctttactggccttcacctttcttgaagaaacattccataaatacaaacgtgttttaaaaatgtaatttttatattttccgaaaccacccatgtagaggtgtcattttgatgccttctttttccctcatatgcagccgatttgtcttaaacgtgccaaaggaagatctac

SEQ ID NO: 65248 - DNA, 589 bp, Cucumis sativus
  Intron number 1 from transcript Cucsa.280440.1 (locus Cucs a.280440) derived from phytozome v7.0 (chr-ID scaffold0263 3; pos 372958 to 373546 reverse strand)
caaactataataattatctcaacacacatctaatagtcaataccaaattccaactaatcaaaattaaaatatttaaaaaatatagaagaaataacaagactaaccataatctgtaaccatacaaaaatgaggtaatttcttataaataaaaaggtaaaaagaagttaaatactatgtaattaaacaacacacagaatacataccatttattttataaaaacacaaatggtaaaaagttaactattcaaactcatagtagctaccaatttaattcatgaatattcttaactataatatatctacataagagagatatgttcatcccataatcaattagatgaaaagcttgagtaataacttggaaattagtagaaaatttactgatctaatataattatatattaattaaatcaccaattaactcaaaaatttaagtaaaagtgaaggagctcccttcagtccaatacacgacatcgatgatcaaagattgctcctacatcgttagatcaggagcacatcacacaactttgatatcaaaattatagagatttggaggataatgagctattgaactaacgaatgagcagca

SEQ ID NO: 65249 - DNA, 842 bp, Cucumis sativus
  Intron number 1 from transcript Cucsa.158270.1 (locus Cucs a.158270) derived from phytozome v7.0 (chr-ID scaffold0114 2; pos 397898 to 398739)
cttcgacatcgtccagatttatcgacaatattgtggtaacaacttccttctccttcccccactctttcaacttttcgattccgccccttttctcttcaattcttcctaaaacccttacaatcttactctcttgcaatctttatttgtagatatctatcttcggtatgctaaaaatctggatgcttttatttcttttttgaaaagatgggttatttgctatgtgggtttggatgcttaataagttttggtaccttttatttttcgggtcctgcattaataatttggatgataaagagtgtaaagattcagtttatgggtgttttttttaagggtcaatgtccattttatgttttggtcagttagcttcctaagaaaattatgaattaaatttatcgaaacgtttgagtttttacttaatcgttgcggacagatgaaactaatattgttttggatgacagaaaacgagagtaaaaggaactgagaaaatgtggggttaatggagctaagtggaaacattaaattttactcaaagaaagacaagtagtatcatgttctggctcttaattgttttgaatcaagttagttatatcatatgaggttatcatgtgcttgggtttcttctggtttctgagcacgtcaaggtttgctattttagtttgattgtattgccgcttcgttgtcatgaaaaaaagatcacaattctgatttttgaaatctccctcgttggttagactatgaattaatgaacttagtctgatgtgctttgtgttagcaactcaaattagccatataatggagttttaacttatttactaacttgtgtatagatattcgatctcaaa

SEQ ID NO: 65250 - DNA, 774 bp, Cucumis sativus
  Intron number 1 from transcript Cucsa.140590.1 (locus Cucs a.140590) derived from phytozome v7.0 (chr-ID scaffold0107 1; pos 548132 to 548905)
cctctgtcaatttcaccatctttcttgaagaagcggtctactacattattgaggagagttgaaatagtgtgcaaagtccatcagagttgagctttagagattgaaatggattttttggcttccacatcttcaataataaagtcttctttctccttccaattatagtaatgagattgattaactctgcagctagcaactttcatgttgaggggctggttggagaggcttgtctgagccggggagaatggtggagggaggagagaggagagagttttaactgaaggaattgaaatcaaagaaactcaccagaaacctttgtaaacaatgaaagctcaaataccaatacgatagaacatcaatagatttattcgtatatattgatataaacttgcaaattacactatagaattgatgatctcaattcttaaaagaaaaatacagaacaatgcagaaatcaagaacctgaaaatggaaacctccctctctgcctttcctttctctcaaggaaacttgtagacctttctcagcaaaaaatcctccccgtaacttccatatttcaatcattttctctaactaactgtggtccccctccctcttattcactcccccactcgcacatgcactattatttctctcctactattgttaaatacaataggggtctaacatatatattctcttcttttggcattattattttttaataagactagctcgaccggaatatactctgtaagtttagttttttaagtattctgtggtaggtgctggaag

SEQ ID NO: 65251 - DNA, 805 bp, Cucumis sativus
  Intron number 3 from transcript Cucsa.196970.2 (locus Cucs a.196970) derived from phytozome v7.0 (chr-ID scaffold0135 7; pos 522201 to 523005 reverse strand)
ggtttgtaaggctttcaacttttggatttaagtcaattttggtagcaaaatattccagttctttttattaattcaacgtgaacaaaaacctttatagagatattgtattatccaaaaataaattaaaggaaaaatgttcctccgatacctttattggtggggtaaagatcaacacatagatggattctgattgcaaagatttgtcgacatttgactcgtaatcagaagcatggctgctgatttaaggagttgtgttctgtttgctagttttatttatttctcatgggacagtaattatgtagcttcaaaccatggttgtgtagacttactataaaccttacttccatataggctgaacacgttttgccaaataagttagtcactttagaccaagaggtcttgaactgagaattttttgcccctgaactaattgtttggttatttattaattatatagcttcaagtgatggaaaatgtttattagctgctgttttaaataagtgaaagttgtgatcttataatttgtcaagtttgaattccatttttgtttcatcttatgtactttgagcattaaactcattcagttttccaatgaaaagtattgtttctgtttagaaaaaaagattttattacttgtcactttgggattgatttatcatcttaatgattgctctaaatcttaattgacaaaacatttttcttgctctattttcttttccaatatttctggtgtagttgatgccattcaagattttcttatcttgtaaatttgtgtctcatagggactttgggtggcagcagaggt

SEQ ID NO: 65252 - DNA, 476 bp, Cucumis sativus
  Intron number 1 from transcript Cucsa.303050.2 (locus Cucs a.303050) derived from phytozome v7.0 (chr-ID scaffold0295 1; pos 1065515 to 1065990)
acttcaccgtcaaggttcgttttcttcttcatttttgcatgtttttttagtttgtttggattttagatcggcttgtgtcgagttgatacactgatttccaatcctggaaatttggaatttaggggaaatggtttcttttgttcaaatattattttggagtttaaggttattgtaattgaatcatatgaataggcacccttttgagggaattttggaggtatggtatcatttagtgtgttagcttgtaaaggtatgagtaatttgttcatttgtgtttatggcttcctcttcaagttaggtggttcttcaccattcaattgactgtgtaattaaattggggaatttgaactcccctttttttgtgaagctttacatgatttgctttctgggcatgttattaattgccaattggttggattgcccttttataaaacattttgaactgcttgtcaatgatttttgtctctgcttacagg

SEQ ID NO: 65253 - DNA, 312 bp, Cucumis sativus
  Intron number 2 from transcript Cucsa.285430.2 (locus Cucs a.285430) derived from phytozome v7.0 (chr-ID scaffold0265 3; pos 1811036 to 1811347)
gagccattctggttttgtttcaggtcagtatattaggctcgtttgattacaatctccttagttgttttgggttttttgaaaattaagtctattttcttttcatttcttacaacaatttggcttggttttagacaatgttgatagataacaaagcatgaaatttagaggtgggataagtgtttgtaggcataattttttagaacgaaatggttgttagaagggaccttaattattggtttttcttccatatgaagttttgcagtacgtctttcagtagatccctctttcctttcttatggtttattgttttag

SEQ ID NO: 65254 - DNA, 407 bp, Cucumis sativus
  Intron number 3 from transcript Cucsa.285430.2 (locus Cucs a.285430) derived from phytozome v7.0 (chr-ID scaffold0265 3; pos 1811482 to 1811888)
cgccactcgcttgcattggtgaaaggtatataagagtttggatgcgtataatccttgtaatgtaatgtttcagtgtgaagatcaaattacttgaatcattatccatgttttctttagtttattgattgctaatgtaactgccgttgttctaccttctctatatctatatctggggttgtcaataattttgtatgttctgccttctctccttttaatgaatcaactgaaattagttatccaagttgtagacggcaaatcttttgatgaataacttcaacctccattgccattggtagctttttaagtctatggctatttcaatgtagttcatctcaaattttgacaatgatgatgatgatgatgatgatgcaggctcttctggtgagcaagtttacggatttggagct

SEQ ID NO: 65255 - DNA, 637 bp, Cucumis sativus
  Intron number 2 from transcript Cucsa.271920.1 (locus Cucs a.271920) derived from phytozome v7.0 (chr-ID scaffold0250 0; pos 694086 to 694722 reverse strand)
agaagcgtgtttggtaagagcaaccccccccccccccccccaaaataaataaataaataaatagataaagggagacagttctgttggttaggttaaatgtgtgtgtgtttccaataacaatataaattgctttgattttcattttcgtttatggtttttgtattctgaacagaactgtagttaacttttcatgtaagaagaaagctttgttactgagggaaagtaagcgcaaaggttaatgaaataaattgcctatagaaagtgaaaaacaagttcataactagagcatattatctaacaaatgatttgaaaaataaaaaattggatacatattgtttttcgctcttacatgggctgatctattgtaaaattcttttgaagacaaagtgaagtgttagattagcagaaaaaaatgattatcatataagctctaaaacgataacctctttgaaagttattgtgattgggagatttcatatgtgacatggctgaagtggtttatcctcttaaaacctctttcgtttgtgctgccaaaccttgctgacgttggattttacttagtccatttaatgtgccagttcatattgtagttactatttttcatttctgcattgcaggctgtatttgaaaagaaaat

SEQ ID NO: 65256 - DNA, 875 bp, Cucumis sativus
  Intron number 1 from transcript Cucsa.240860.1 (locus Cucs a.240860) derived from phytozome v7.0 (chr-ID scaffold0204 7; pos 1038114 to 1038988)
gcttctcaaatccctatacattcctcttacctaaggtgcagacctttcttctcttcttctccctgcttaattttcaactctttggcttgggttttgttgattttcctctgattttgattcctttctcttctttttctgcttttccttgtaaggtttttccatttttctttatcttctctctcttttgttcttgatcgtccaccaaatggttgtttgtgtttatatgagttcattttagtttaggatatcttcttgttttatcatctgtcagtaagagaggggcgtttatttgcttgagggtcactcttgaaattatgtttgttcatttttcttagattgttgtgtgattgtcaatagtaccagttactagggtagaggctcatgttggtcgtgcatgcttgtctatttcttttgttcttttgattttatctttcttatctgtatgttgcctctttctgatcatcctgttataaacgtttgtttagtggagactaatgatatcatccatcataaatcgaatttctaaaagagccgacgcctcaagttctctgatcatgataatttattttctctgtttgcgattccttacttggaattgcaatgtatgaatattctagtcttgattctgttagaataaggtttattgagtacgaatggaatgatattatttcctacgaatgagcttatagccatttaagcgatcaacatagtttcaaggacacgtgctatccattatatgtatttatagtcattgtcccatttcattgattttcttggcgttttttgcatatttttaatttgatgtgatgctttcatatttgagttttgatcattacgttttttttttttttttaatttttgcgtagaagtcatcg

SEQ ID NO: 65257 - DNA, 881 bp, Cucumis sativus
  Intron number 3 from transcript Cucsa.240860.1 (locus Cucs a.240860) derived from phytozome v7.0 (chr-ID scaffold0204 7; pos 1039722 to 1040602)
actttccaccagattatccctttaagccaccaaaggtagtgaagccttccttgctcagtctgcttctattttctttccctcttgattgtattctagtatttgtcaatgaattattttgttcatgggaacacgttcacgatcccttgcaactcttggtttgtggcaacaaagtaacaggtttctaatgatttttgtttccattggtactgttgcctgaaagtctgtacatgacactaaggttggagaataagtttgaaggttgagcatctattccaatggatggaaactgtttttgttttccttggtacttcaaaatatatttctgctctgtgtgctattcatttcttatctatgagtgtctaattggtttctgctattcccatactaacagaaccttactgcaagttcttgttacttaatacctaagattttgatatctaggtaggtagggagtttagcttgaactcattcttatagagtcctttgctttttcacacatgcttcagtgttacctcatcaaccaaatcccttgcccttgtatgataaaaaaaaatgttaccccttcaaccaagagttgttatatgtctccatattagaataaaggaaaggttggttggtcacgttttgtggtttagttcctcctttttttaattttttttgtgtttaattttattttattttgtactttcatgtccttggttcacacaatgtagatttggtttaattgttgttacctaatgctgctgttttgaattctttctttgtaaccttgaaaaagcgatcaaaatcgaatgtcaaagaaatggccatattatagtaatggctgttgtattgtgtgttaagcaggtttcctttaaaaccaaagtctatcatcctaacat

SEQ ID NO: 65258 - DNA, 651 bp, Cucumis sativus
  Intron number 1 from transcript Cucsa.163170.2 (locus Cucs a.163170) derived from phytozome v7.0 (chr-ID scaffold0114 4; pos 2597135 to 2597785 reverse strand)
ctgggtttttttaaaaggaatctctccttctccaggtaagtcgcctccttttctctcaattttgttgatatcttctgctttcaaattctagatgagttgcgagttttttttcgaaataggcgattcatgtgtgaatttttcaatgtagtttaagattattggttagaccctgatttcaattataggctttaaaccattatggagagataaatggtagcaaagttttacgccccccaaaacttagaagtcgttttggcttgaacaataagtgagtgggattcagacttttgacctgttcgtaccttagctgtgttcacgttggtaaaacttggatgttctttgagaacagtttccaaataacaaggccttaatcttccgttagacaattttgtgcatccactaagatgtcatgaatgttagacttggcctaaggcttacctttatgctcaaatttctcatggtttgccctccaattcaatttttgttgagttatttgccaattttggattgctttgtgttgaatcaaatgaattttttgggtgtttagaccatctgagatctgagaggtatagtttagttaaatgatgggaagacgtttctggtttatctcatgcaggtaggggcgacgctcatcaaacaaccctccaaatt

SEQ ID NO: 65259 - DNA, 574 bp, Cucumis sativus
  Intron number 1 from transcript Cucsa.148460.2 (locus Cucs a.148460) derived from phytozome v7.0 (chr-ID scaffold0110 7; pos 538933 to 539506 reverse strand)
ctctaattgcagtggcttcttgggctccgttcaaggtatatccctttctttctttcttcttcttcttttccttcatctagtcaaactcccttcaataattatatctactgttcagatgctacctagctctgaaatctaaaatagttatttttatttatttatttgtttgtttttgagtttgagttgctctagtccaactcaaccatcatgttcgttcaatttatgatcgatgatttaacaaatagtttttttatattttctttgagtttctgtaatcagtactcttgagagttgagtcaaggataaaaggtggtcaaccttccatttagaagctttttcattcaactgtccctcctttcattttttaatttttataagactatgtatacaaaaagttcaaaaaacgtaaaattttgcttctctctgtcctgctcttgtttagtcaaagtttagaagttattgtttgagcctccttgttctttgctgaaaatgtggtcaaagttttcatccttatttcatgattgtctctccatgggtggtagctttgcaggtacttgagaaagagattgtagcc

SEQ ID NO: 65260 - DNA, 626 bp, Cucumis sativus
  Intron number 3 from transcript Cucsa.219250.1 (locus Cucs a.219250) derived from phytozome v7.0 (chr-ID scaffold0165 8; pos 1102272 to 1102897 reverse strand)
cctgaaattggcgacctccaacacctccaatatctgtactgctctatgtcattatcattttgagaattatttatatatttatatatttcttttatttgagctctgccatttttgatatctcataaaatttctttgtgagctgacttgttatcacccctataaaaatttgagatgcacgtaaactgaagaaactaacagaaaaagtataatatttgggttctatggtaagatctgtgaacatgttaggatttcttgaacacgatgggtctaatatgtgctggattgcatagctagacaggttatggggttgtttctctgagaatttcatccaaaagaaaaaaaagaaaattacagtttttgttgtacttattttttcattcacttcaacttatgtatgataaggtattgaatcctttataagttagacattctatggcttaaagaacagaaaaccctctgatttgcttaagagttcctctttcatttgtttcccaatcaacgaactaaattgggttaattagcttgagatcttagcttctttatggcaagtcaatggttttggtatacttagcagcactactaacttttgtctttgtttttcatgccctgcagggaactctacagga

SEQ ID NO: 65261 - DNA, 458 bp, Cucumis sativus
  Intron number 6 from transcript Cucsa.149420.1 (locus Cucs a.149420) derived from phytozome v7.0 (chr-ID scaffold0111 0; pos 253342 to 253799)
cgacttggtagaagggaggctgatataaagaacaagtagcaatgcttcacatcttagggcatgttttggaagttattttaggaatagtaattttagtggaaataatttgttttcaagtgatttataatccttttgttttttattttacactttcaaacacattttttattctttcaaaattcattttgaatggctaaatacatgtttgagaacctctgagcaagagtaatttaaccatgtcaaaatcacttctagacatgccgtggtttcttttctatctaatgcgtttcattcctttcactgagtttaaagtttgtcattgtatggaaaaaattcatattcctgtatcagactgttaaatcatgagataggatctgttcttccttatctcacataaaaattagaaactgtacattgattttgtctcatctagattagtacttggatgaatttgcagg

SEQ ID NO: 65262 - DNA, 798 bp, Cucumis sativus
  Intron number 1 from transcript Cucsa.282910.1 (locus Cucs a.282910) derived from phytozome v7.0 (chr-ID scaffold0265 3; pos 204074 to 204871)
aagcccacattctacgactccaactccccggtcctaaatttcacttctctcttcttgattttatttttttttattaaattaaaaaagaatcaacctctaaactttgacattgatattcactatactttaaaattttgaattctttcagtttagacgttgatatccactctattttaaaattttgaatactttcattttcaatgtttgaagttcgattttttcctcaaaacaactcttaaactttaaatcattgaaacaaataaaaaaattggtgatatgatatgagatgaaaaatggaaaagacaaaaaaaatatgatttttagataccatatatttggctacaatttaaatattagtatgatcgtgaacattttttagccgatataattagaaaaaatgtatagttaaaatgagtatatgaatatattttattatttaactattattattaattaaaaatatagtttcaagtatctttaaacattttcaaatatcaaatataaccaacaaacaagattatttacaaaaatataactaaaatttaaaacaatgataataattgatttacaaaatataactaaaatttaaaaacaactaaaatgtttattatgcttgtcgaaatttggctatattttaaaatattttaagcgttagtttgataattttgttaataagaatatatatatatatatttttttttcttttttttttttgttgacaatcttttgatttttgaaaatttattacttttatattttattttaatttggttgaatttacttatgcaggtttcagcc

SEQ ID NO: 65263 - DNA, 827 bp, Cucumis sativus
  Intron number 2 from transcript Cucsa.213840.1 (locus Cucs a.213840) derived from phytozome v7.0 (chr-ID scaffold0154 3; pos 1783143 to 1783969 reverse strand)
tcagatttggcagcgaagggagtaagattttcttggtgagtttgtgttattgtgttgaatcttcatttcttaaactcgttagttctttgatacagagtattgcattattggagctgcttctcgcaattctgtgtttcttgtgcttttcgcttcttcttttctagcgcctaattcgcgtgatcgagaaaatcgagtgaacatcggcttccattattccagaattgtatatttgctggatttggtttaacagaatactatatatgtagacgaatagcatattcgatgcaaattagaaacacttcaaaacgcggaaaaatattgctgttacgttcactccggaattttgtgttccaagaatgaaaaatttcgaagactagacttttagtttatgtttgctatttttggttaatatacatccttatgaaaggatattgatgtaaaatttatcaaattccttgtgaatttaccattttactatttcctctttcagatgacattttccaatagatgtttttttttctataattaaactttacttgtatttctgtctatgattcaactacgtccgttttaaatccaatttcaaatgaacaagctaagcttaattggttttatccatatgactaataaatccgatcgaatatatgtcgtgacatccatgcaattgctttcaatttctagtgagatgttgcatcaaacttctatagcttgtttccctacaaaatgaaggagtatagcttaagcattatagatatttgttagcatatctactctttaatctaacttcatttcattatccattccaggctgtagagagggatcaaata

SEQ ID NO: 65264 - DNA, 469 bp, Cucumis sativus
  Intron number 1 from transcript Cucsa.271080.1 (locus Cucs a.271080) derived from phytozome v7.0 (chr-ID scaffold0250 0; pos 28077 to 28545)
ctgtgctaccgttggtgtggtggactctggtaagttaccattaacaaatgagatgaagaacttgaactttgaaattcccttggtaatcaaatcaggacgaatgatgaatactcttctattctcaactctaggagggcttggtagaaagagaagtttatccaagaacatgcgtttaatcagtgaatttggcggttctaatgtactttttcaagcattatttggacaccctttttcaaggaggcttgtggttttttataatgttatttcaacagttctcatttttaaaatctaatctttgaaactagtgctagggaatctcttgttttgaaaactattgggtctttctgaaatgctctgctatgtttacattattctttgtctctgatggttatgaagagttaagatttttagttacatgtttccttatgttgaaggagcaacgttgttggagataaagaaatcatacagg

SEQ ID NO: 65265 - DNA, 395 bp, Cucumis sativus
  Intron number 2 from transcript Cucsa.139360.2 (locus Cucs a.139360) derived from phytozome v7.0 (chr-ID scaffold0106 6; pos 582213 to 582607 reverse strand)
aggtggcagttgaggtcgacaaactctctcaaaaggtaattaaatcattataaatttagaagaattttacacgtttgtttttttttcaagtttatttcttaatttttgaaacataaaaagggttgctgataaggtcattttaaaggttgtttagatttgaatgagaataatatttgaaaagaaattacgaaaaaatattaaatatgtgagacaatgaaagtaaacttacaatataaaataattgatgaagtaaattgaattgagactgataattatatttgttttgataatatataattgagactatagaaatagtaattaaaataggggtgggggttgttaattgttaaataatgtttaagtactataggttgcagcggtggaaggtggcgtta

SEQ ID NO: 65266 - DNA, 998 bp, Cucumis sativus
  Intron number 2 from transcript Cucsa.265720.1 (locus Cucs a.265720) derived from phytozome v7.0 (chr-ID scaffold0235 2; pos 115757 to 116754)
ggaagccgaagttctgccctttcaggctttcaagtgtaagaattttgttaatttattaattattataatatatatatatatatatatttttggtgaaatcgaaagctccagttcttaagtaaatatttgaatttgaaaataatttatctgtagttatattactgaaggcaaatgatgtcaaaagataaacatgtactgaccagagaatgaatgttgggggcagtatgctatgttcccgtttatttcttattatttcctctggcttttgaactatgtaacgcataaatattcatacctgattttcccccactctctagtctctattagtctgtaagagaaaagacgttatttgttatgtttattactttgtctttttattttcaaaaagttgaattggtgctatttacaaaaggttgttacagattattctagacaattgaaaacaaaaaacttttgttactcttagagctcattgattctgcaccgtgatagaattattttgatggcatgtagtgttggtaaagcataggtagcctcattttaattttctcatgccctgcatttcccgattgtttgttttgtccatgactccatgctctaaggctgaaaccttataaacaacttttcacagaaacattgagcaagtttattaaatgtaatactttgctacagtaacgatcatgttttatgtttttgagtcagttttaagatcaaggtaattgcagcatttcaatattttggaagttaagttatttccggattttgatgaattttgccccgaattatttgttgatgatgtagaatgtcaaattgaaaaaattgtaaccaacgcaaaactgtatcctattagttctcatgcattgaggcatctatagttgtctatccggactccaaccagactaagtaatgccattatcttttcttctctctttttactagattggaattctgttacaggatgtctttttcctttttttttcccttttaaatgtaacagg

SEQ ID NO: 65267 - DNA, 418 bp, Cucumis sativus
  Intron number 2 from transcript Cucsa.205510.1 (locus Cucs a.205510) derived from phytozome v7.0 (chr-ID scaffold0141 6; pos 576381 to 576798)
tgagaaagaggaagaagaggaagaagaaacggacggtatatcgaattatatattgattggagtgatttttattttttccgtcaaaaagtcacatgcatttgattccttgttaatgtctattggagtttctagattagttagtgaaccgaagcatgttcattttgaagaaaatgctgcaaaacttgtggttataagctaatttagtaagttgaacttggaagaagaattcaattgtgaaatcatagtaattgtaaatcatgattctgagttgtaaatgtactagaagtgtcgatagtagagagctgaaagtggtaaaatgaaaatgttcttgatagaaaaatcatttagaaacaccagtcactatatatctatttctttttattagagaaaatttatttttccgtactttgttcacagc

SEQ ID NO: 65268 - DNA, 653 bp, Cucumis sativus
  Intron number 1 from transcript Cucsa.157870.1 (locus Cucs a.157870) derived from phytozome v7.0 (chr-ID scaffold0114 2; pos 97207 to 97859)
ctattgctcagatcacacctccccagctcgtcactgtacttcttacctcgccttgccttgtgggtttttgttttttttaacgaatcttgcttactgggtggctaacaattaggctaattgtgaagaatatgtggttcctctttgaaattagcgaatgaataattctatgttgttggtggtgtttgattttgttgacttatttgggggtttgtgatgttcgtcagtaaagctacgcagcaattttagggttctgagttaaatttttgggtgttgggtttgaagcaattgggatttgtttgtttaatttatagtccacgggaattcttttcaattcatgatttgttttcgtgctcttcatgttaacttagttatttttggttgtacttgtgaagtttcgttaatcatgtggtttttgtatgtaattgtcactctatggttgtttgccctttattatttaggattttctgtgactttaaagcattgagcttttgtaattttaagttctctttcactcaagcctcaaatgggttcagggcgctgctcaaatggaaatgaactttctgtcctttccgggttgagtttcttgcttgtgtgttcatttgattataaccttataatgattttccctctactttctgggtattagggctgca

SEQ ID NO: 65269 - DNA, 760 bp, Cucumis sativus
  Intron number 1 from transcript Cucsa.172980.2 (locus Cucs a.172980) derived from phytozome v7.0 (chr-ID scaffold0120 1; pos 173196 to 173955)
ggcagcaacaagaatagaacaaaatccactggcaggtaacagtaacaccataactatcaatcaattgcttctttgattcactctaccttttaacttgagatatgaatgtgcatgtttgatcttctgtgttgatatgaaaaacagagaaaatcaccaccgaatagatctatttctattttgggtcattctccgggctgtctgtagtatcgtaagaatttactgagttgaacataaatgggtttctactgaaatgaagaacttgcaaattcagtatctctaccattttgggtagtagaattcctcaagctgttttatgcactagtaattctaagaacttgctgagttaaattgaataacatgaatgaattttctctgaaaggaagaacagccaaattcaccattaaataaggcatcagtttgggtagtataatttttcgagctgtttaagaattttgggaagaataggaatgggtttcctctgaaatgaagaacacacaaatctctccattaaaagggaatcatcgcttctctgcaccattttaagtagtgaaagattctcaagctccccatcctctaggaacataggaaaatctgatgagttgatgatgaatgattttctctctgaaatggacacacaatctcacaattcaatagaattatctctactatgcattgttctgggtcttgaattttctttaagaaactgctataaactgggttgatcttcattcttatgaatcaatttaatacaggcgtgcga

SEQ ID NO: 65270 - DNA, 707 bp, Cucumis sativus
  Intron number 2 from transcript Cucsa.251350.1 (locus Cucs a.251350) derived from phytozome v7.0 (chr-ID scaffold0222 9; pos 455100 to 455806)
gattgtgggagcttaaagtacttatatttaatattttgtttttcttttccatccattcttttgtggtggaaacacatatttcctctaaacatttggttctgtgatgttggattgttaggttgaggagtgaataggaatgtaattttttaacttgcacaagtgttttgaaaattatatcataatgtcactgtttgtatttaatctgaagttgatgaaccaaaactcgtctgtgaaatgcaatgcatggtattcatatattgtccatgtcatgttttgtttccctcatatacctgcattgctgtttaaagggctttgcagggctcaatgtgatgaaagttgaaagtttaaactgatgtttttaggctaagttaataaaagttttgaacttaaatcatcttgttttctttctttatcaatcgtgttattcttaactaggatttattgataattattcttatgattgtttatgtatccaacttctctgttttctctttgtttcttttgtctttttgccttattcaagaagtgggttgctcgttgctgtctgccattccttaaacatatccaattacctttttctgtttgttactttgtgtgtctgtctgtgtgtgtgtactgaatattgcttttgttgtattaccttcttagcaagtttgcattcagtcatccaggctcttgtctaaaaaacaattcaatcattgtaggct

SEQ ID NO: 65271 - DNA, 589 bp, Cucumis sativus
  Intron number 1 from transcript Cucsa.166970.1 (locus Cucs a.166970) derived from phytozome v7.0 (chr-ID scaffold0115 4; pos 344992 to 345580 reverse strand)
ttaaggctaaacaagttcaggtttgttgatttttgaatttccggttcgaattctttttttgattggtactttgttctgttcttggtgggtctgttctgttttttgtgttttgaaaattctggttcttgaattgaatattgttggctctgttttgggttttcaagagggatttgtttttttttttttttttgggggggggggggagggggattaagtttggtgcaaccatttgagttttgaagatgaaggctatttcctcgcgcaacttcttacaatgttacataattctttaagtacgagttgaattcttagccaaatttaagaacaaaaacaagtttttaccaactagtcttttctagtttttaaaagataggcttcgttttttaagacaggggtaaaaggtagattacaaatcaagaaatagagaagtgggaagggtgtttatgtgttcaatattcaaaatctaaagacaaaagtccaaatgtttaccaaagcaggctttgatgttttgaagtgatgtaaatttaaatctttggtcatttttgcttctgcagttgatagataaagatccgaatagggccgtttctct

SEQ ID NO: 65272 - DNA, 328 bp, Cucumis sativus
  Intron number 2 from transcript Cucsa.303380.1 (locus Cucs a.303380) derived from phytozome v7.0 (chr-ID scaffold0295 1; pos 1339311 to 1339638)
cttgaagaggtataacttttatttaattacacttttatcttatattctcctctcaaacttgggttaaaactaaaaacttctcttctttatttcaaatgggtaggagtaaaaatcaaaactttaacaagaaattgatataaagttcacaactttaaatttccccttgatatgggattgtggggttttttttttcttttcattaaatgctcttgcccacaatcataactatttctgaaaccctcccatacacatatatacatacaaattaacataaagaggtttgatctttgtaggttgaaagaaggtataggcattattgtgagcaaat

SEQ ID NO: 65273 - DNA, 713 bp, Cucumis sativus
  Intron number 3 from transcript Cucsa.284520.1 (locus Cucs a.284520) derived from phytozome v7.0 (chr-ID scaffold0265 3; pos 1265769 to 1266481 reverse strand)
cagatagaccaaattttatccaacagctttctcaggttgctttcatatatttactcttgaaaacttcatttgcatcatattttttgttccattactacaaaacctggcaaatcattgtaattcttgtagcttaattggatcatttgttaaaaataatgtccgagtcttaactttgtttatagttcgttcgtttgaaaagaatgggttgaattcatctcctcgtttttcaatctcacgaccttttctcgtaacatatggtctgttttcattcatatggttccacttgagttgaatcatgaagtgatttcttagagattagtctttaaacatcacttcgttcattgtcttctatattttgttgcctacattttagaaagtgtttttaaaatcaaaatcacaattactagtttttgtgtctgcaaattgatcaagtattcacattcttacataggaaacatgaaaactattggtaagaagcataatttttagaaaccaaatagttatctaacagagttttagcttttcttagttttgtttttttcgatctatgtaggtaaacttggaaggaatcgacgaccaagaagaaatttctattcaatcttttctaatcttctgctattcttgattcatctacatttgtaaatcatgctgcaatggtgtataatcttctaaaatattgtttgcaggacaattggccttctgttatatttgcc

SEQ ID NO: 65274 - DNA, 675 bp, Cucumis sativus
  Intron number 1 from transcript Cucsa.254910.1 (locus Cucs a.254910) derived from phytozome v7.0 (chr-ID scaffold0222 9; pos 3097795 to 3098469)
agatattggaggtttgctttctttgcagttctttatttgtttgctcatgaaatttttggcatttgcaaaatagtagcgatttggcttccataatcataatgttatctcacaaaaagctgacgattgagctagcaaatgaagtagttataatagtgatgataaaccgattggaaactaccatggtagatagaagatcaaatgaccacatggaaggcgttccttgcttgcaaagttcctttcctagcataggctggatatgggcttagttatccacccagtgtgctttcattgtaagaatagtcaattgatgctgagacaactgtttgagagccatgtctcagccaatgatgaaaatatgaaattgtatatgagttccctttgttggcgtgctaccatcttctctggataaacatatcaagtatgcctattttgaatgtagcattcatgattagatactgggataaattttttgcaatgtttcagaatgatcaaaatacctgcaagcttattgatgttcagattttgattttgagctttgtaagaaatcattgtgttcccagaaacttcttaatagatatgatttctatttttgcgactaaaggtgtgatcgtttatcatgtcttatttgttcttttaacagagaaaaaccggtggactggttatttggaggtcggg

SEQ ID NO: 65275 - DNA, 940 bp, Cucumis sativus
  Intron number 4 from transcript Cucsa.282710.1 (locus Cucs a.282710) derived from phytozome v7.0 (chr-ID scaffold0265 3; pos 92882 to 93821 reverse strand)
aggaaatcaaatcggcattttattctctgtccaaggttcttatcactttccactctttggaattggttcctttaattttgactataacatagcatgtttacgattgaaagttcactcaactttgtttctgttctgtatgagatagctttttatttcctttgaaattgctgatatgaatatatcaaatcagataaggtaatttgtctcgaattagatgatgctgattgttataacccaaacttaagctaatggattatggtaaattcaaatttaattcaccaattgaaggttctctctttgagtttgttgtttccaaggcatgccttgaagctgctgcttggagttcaaagtggcaccatcttgaaggagcatgttgaggatccacattagaactcatttcatctaataatagtaccaataaaatagttgtagaaattggatcaccaaatgataaaaattgaacctcaatcttgtacaattattacaatttctacaattatgtaagtttgatggttcaatttttgcacttgcataagttcgaagactcaaattttactattgaatgttagaggtagaattgcaacggtctaccatactttagggatggtttctacaagtttccctataattgcaactacttaggattttagagacaacgttgtctggactggaaggaacacattcacacatgtattggacaccaacttcacattataaagaaagccttgaatttcaccttttattatatatgaatgagcttacacccccactcctatcaatatggtaggttttcagtaaagggatttgaatgtttagggatgaatagaaaatgagatgaaatcttctctaaataatcttctacttcttgttgcagtttttgaggattcttttttggtatttctcaggtcttcagtgaatcaagaattgtggaatacaattt

SEQ ID NO: 65276 - DNA, 593 bp, Cucumis sativus
  Intron number 1 from transcript Cucsa.197230.4 (locus Cucs a.197230) derived from phytozome v7.0 (chr-ID scaffold0135 7; pos 700173 to 700765)
ttcgtgccaagtatttgcgtgctattgctgccaaggtcggtgggttacatggatgtcttacttttatttgattgtgatttgctctctgttttcctattggactgatgctaaggatctttgatgcttttgttatttgtgtacgattttagtggattgaacccatgaattggtttctgatgcgaatctataaaaagtgagaaatatggtgccatccatcttcccgttatagttcatggaagaatcagatattaggatggaaccgttttttatatctcgtcttaggaatgatacttcattgtagtgaactgccctagcttattacaacatggggattactcaccttgcacgagttctatttaaattcatatttatattgtgagagtcgaaaagttttagtgactttggaagttatatcatgtataaattcaactttactatcatgttgagggattcttttctcccattggatatgttaagcagttgggttgttgttgttattattattttgttaagtgttaatgtcatccatcctgaactctgtttgttgttttctcatagataacagagaggaaatcggaattagcaaagcttga

SEQ ID NO: 65277 - DNA, 1032 bp, Cucumis sativus
  Intron number 1 from transcript Cucsa.236590.1 (locus Cucs a.236590) derived from phytozome v7.0 (chr-ID scaffold0201 8; pos 437388 to 438419)
gggcctcagagtagtggtatgtttgtggagattgcactctttcaaactattctatcgttgcattttgatctatttatatctatctgtattcttttttatagaaaaagttgtaatttatcattttcattttacattgttttactagctagcttgcttgcaaaattttggtcctaatattgcaatttggtgtggtgttggtctttgttggaatatagaaatggcaatgtttaagaaatgagaataacgttacatcagatttcacattgaaggtcctttgttaaatgctaaaggcgagataatcctttggtccaacgggatctcctccctcatgtggaggcttttgattgaaagaaactctagaatctttagtgatcaagaaattaatagtgattaattttccttttttattcttttcatattattaatatgttagttacttttttggttacgcaaaatattagttagcatgaaaaagaacgggaaaaaatgtcactaatgctatcttgagatgaagatggcttaaaatcacaatgttgtgcgtattattttattatttgtctctttttgtttttaggcgttgaggaagtcagtacatgtttcagagtgattttaaattcgtttaaaatcactttaaaacacgcttttacttgctcaaagttaattttaataccatgaaaaatgcatttaaaagtgtaaaagtaaacattgagttgatttggagagattaaaagtgttctagagtgattttaaacacgacaaaattgtttaactgtttcaaaattgcttccagacatcccatagtgttgttgtctagtcaattgggaatgcccaagagctctttttctgtctctgtgtctctaccattgtcttttcatgggaatgaaggtccctagattacatattctgtaaccttaaattctctcctcattttgtgcatccaatgtgcccaacttgctgcactaatactttgttctcctcctccctcttgtatggtcagggaagagcacattactgaatcatcttttccacaca

SEQ ID NO: 65278 - DNA, 688 bp, Cucumis sativus
  Intron number 3 from transcript Cucsa.280280.1 (locus Cucs a.280280) derived from phytozome v7.0 (chr-ID scaffold0263 3; pos 225057 to 225744 reverse strand)
gggttattgtcgaatcaggcttaattactaaactggtaagactttttttccaacttatttcttggtttgtggaaaggttaaaattgcatttcaagcagatgatgaattttggaatattgtggttagaagataatgttatagattataacaagaaaaagttttgtttataattatgtatgatagtaggtgttgttaccgtacaagtaactcgaaagtatagaattagtgagataaataaattggagaggagaggaaactgaagctacacaactagaaattctaatccactttttttctttaataaaaaaaaagaataaaggaaagagaggaactggagagtaattctatataatttgaaaacttgttcaatctccaattcttgctaatttaaaaaatccaatcaaatgaatctgaagcagatcaaacaaaattttatggaattcacctaatatagtaattataacaatttgtgttgattttattatctattcccgttccatatcaaccgctcaattatgtttaatagtttgtgcattcttaccaccagtctgtgcttcaatcatgtggaagagcttgtttgaatctagacagtcaacaaattaagtggccaattagaagtaaaccaagtattgacttttggtctgtggctgcaggcgtatcagttgaaagctgaggcagacagctcaaa

SEQ ID NO: 65279 - DNA, 959 bp, Cucumis sativus
  Intron number 1 from transcript Cucsa.283940.1 (locus Cucs a.283940) derived from phytozome v7.0 (chr-ID scaffold0265 3; pos 890644 to 891602 reverse strand)
attgaagttgaaggagacgactgccatccatagtatgtgattttgtttatcaatttctagggttttttttgttctttttcctttacgacgtgatgattcaacttgttcgtagaaatctggatttggaatctattttgtcggttcattcgtttgccctttgttggatcgattatcgttagggtctttcttattttgaaagaatttggcgggtgcatttggaaatcgggtctcttactggtcttcgtttttccgtaggtgaattttatgattttcgggtagttgaagttaccatctttcacaattgttttaggtcaggaatcttggagtattttgttggatctaacctgaaaattgattgtctatgaatgtttcttgcatgatttataccaagtaattttgggtctttagcagctaacttcaaatccgtgttctatatatgttttttcaaacttcctatctacttttcagaacaaattgaatcctgaagagttgatgattatttttttccgggaaaaactgttaattagaatggcttatatagatgtattgggtacggatcaaatgatttatataatttagtgattttggtctaaaattatgggatcagttgttggatacgacatcaaaaatgattttctggagatggatcttagaaggattgtgcaaagtagtttagaaaaaatcctttgctattcaataaagttgattctgttgctagcttagcaacttcctcttttcttcaagttataaagtttatgtatttcgtgtaaaactgctgttgcctgggaagtcaatcagcttgtactggatctatttatatttttttttgtggaaatactaacggaatggattacaaatataatgattggctatacatgttgaagtgttgaggtttattaacctatgttggtttgcatttttcagtcttcgcttgcagctgcgagagcagacaacttcta

SEQ ID NO: 65280 - DNA, 934 bp, Cucumis sativus
  Intron number 2 from transcript Cucsa.189410.1 (locus Cucs a.189410) derived from phytozome v7.0 (chr-ID scaffold0130 5; pos 146546 to 147479 reverse strand)
cagctcgaaggagaaacccactcttgggtaagccttgttctactattatcatcttctactttgtgtattcttttaatgaaattagtttcttgttaacttttttgacatgattgatgtgttttagatggttattacgttctgatacaagtgttcattttttttctctttatagtatttgactgtggtttctcagttatctgttcatggagtttttgggttatttttgatatgttgaggcattgcattgtagtgtggagctagatctagttagttaatatttgctgaacttgcagtcattcagaaggataagaagatagattacatgcgtgttccccttcttctcatcttaataaaatccctaagaaaagaaaaaaatgattgtgataccttgatggttaccgtatagtagtatctcccattatttattcagttttttacatggtccgagggtgtaaatgtaaatgaatgttttttacattttatcaatttcaatgctttgcattgtattatctcattcttgatcactgaactaagacgtcgtctacttttgctgctttttgactgaagttagttttggttattcttccattctctgatagttactattttagagtaagaaattgtgtttcttattctgacagagtagagaacaattatgcattttttctatttatatctgtcgtatgtgaatatgctctttccattctaaggtttagactttgcggggcagttttgtttgctcttaaagtgtgttcctgttccaattttagtgtatgatgctactgtttggttgttcaggaatgttatattgcctacacatccttaaattttttgaaacgtattcttgttatcattgacttgtcatacttaccttcaccccttattgtttgacttgacagtggcacgcggattaagacccgcaaacggaatatta

SEQ ID NO: 65281 - DNA, 611 bp, Cucumis sativus
  Intron number 1 from transcript Cucsa.260330.1 (locus Cucs a.260330) derived from phytozome v7.0 (chr-ID scaffold0222 9; pos 6697900 to 6698510 reverse strand)
ttcttcaacgctcagcgatgtatgtatattgtgcattcctaactaccgttgccctggttttttatcgttgtggattaagaatggttttttttttactcctcttctttgcttatccaactagatctggtttttttcgccatattttttccaactgggtttggattcagaacacgagatctctttttttttaactcgttctctgaagttcttgtttataattaattggtttttgttgaaaatttgtatccttttatttgatttgtctgttgaaaatttgagattcattgttaaggaaattagttggtaatggaaatgtttataatgtcatcttaagatctacatgtgaattgatgatcccctcggtgaataaatagatatatcattctgtcaatttccaaatttattaattgctaaccccttaaaaaacttgaaatctgacttgccacggataagttctgatcaaatcggacttgataaacttgtagatttaggcattaaagaattagctttatgtttgttattgtttaatagttaagagagcacatgatttggtatggtgttatttactttgctttgttcgaacgtagctggtaagctcccgaagcataata

SEQ ID NO: 65282 - DNA, 434 bp, Cucumis sativus
  Intron number 3 from transcript Cucsa.158490.1 (locus Cucs a.158490) derived from phytozome v7.0 (chr-ID scaffold0114 2; pos 618319 to 618752 reverse strand)
cttgtacctcgcactaggtataagtctgcaatcatttaacttcatgaggactttattttggaaatttagcaagtgtttctctttgttttatcatgaatggttagtatgatatattcaactgttcttctcgatgtatcaaatcattcactgaaattgagtgccattttccattaccaatcatctattcaacatgattcaaatattgcaaactggagatcttttttatttcgaggttttatgtaatggaacatgcattctactgcagtttattttctatatacgtgtttaccatttttgtaagaaggaaaatgtaaaaccaacatcatgataaatttacttgtcaagataatgacgttgatataaattcttagttatttgtggactgtttgcaaattatagaccagatcgagaaagtgatagtgaggcagaggact

SEQ ID NO: 65283 - DNA, 699 bp, Cucumis sativus
  Intron number 1 from transcript Cucsa.244350.1 (locus Cucs a.244350) derived from phytozome v7.0 (chr-ID scaffold0213 5; pos 191046 to 191744 reverse strand)
aaagaaaaagttgaagaatttgattttggagcaaggttggtattgcccacttcctctgtaagaacaagtgtttgactgacattggtattcaaattttttaaaatttgtcacgttttagtttaaaagtatgcatttagtactaggattatgtgatcatcagttgaagtataatttattatttctgttattttaatcatatgtatgggatgttcttatcgattttttttaaagtttttttagaagtatggaaattcccgctgcttatgctatcaatattcttgtaatttgatctaatcctttaatatacttcaactctgcaaattatagtttcagatgtttaccatcgtgttctaaatgtatcttccgctgtagtttcttatcactttaaattatagtttcaattctgcaaatagtgattagaaaatctctctatggggcacctaggttcttaatttggagtctggatgtggatgcttgttggatgtttgtcaagtttgcacaatgttttacttgcataaaagtatttgtgggtgtaagtatggcatatcctgagacttgaatttgatttgataatcatgatacttcattacttttgtttttttcacaatcttttatccttctgagtcatttggtttaacaatgaaataaaaaagagcgttttctcttttgtctattttgcagtgtggaccagttttttga

SEQ ID NO: 65284 - DNA, 829 bp, Cucumis sativus
  Intron number 1 from transcript Cucsa.165860.2 (locus Cucs a.165860) derived from phytozome v7.0 (chr-ID scaffold0115 3; pos 1156226 to 1157054 reverse strand)
tgcccgtgtggttgctgttccgatatttgtttgcagtatgtttcacaattttctcttctttgttaatcgtaattgtgtttgtttttatcgtctgattgaattgcgatcgatgaatgctgtgcgtgttacgatttgtatttggcttcacattgattccgatcaaatgtatggagcttttgggttgttatctttggatttgtattggaaatagacgatatcaattattctttgtggtttccgctaacggttgttaaaggggtttcatctataatgctttacgttttgttggaaggaaaagtttttgtttattttgtttaaatatggattagtttcacttcgcttaacgaacattgctaatctttgctttatttttcttgtcattggacaaatttctgtgctgcgactgcttatgcactaatgattttatagcttgttattatgcaaaatcttccattgtcataccatttgattattactgtggatttccaggacttatggtggcagcatgtgattaaaattagacttttgcatcacggatagctgaatttgttccctaaattgtctctgaaaaactactggctgatttcaagtcgaattcatttagttgtgagaaagagtcattctagtgcatttgattttaataataataaagacaaatgtttctgttattaatcttctatgttgatgatttgtttgttcatcttgaaatcacttttctctagtttgaagaaatcaaagaagctaattttagtgcactcgaatttaatcataacaatatgtgtttctgttattagccttctacgttgacaactggtggggaacaactgcg

SEQ ID NO: 65285 - DNA, 837 bp, Cucumis sativus
  Intron number 1 from transcript Cucsa.143040.1 (locus Cucs a.143040) derived from phytozome v7.0 (chr-ID scaffold0107 9; pos 1325705 to 1326541)
tgttcatcgaattttgttggtgggttcttctgcaggtatgtgtttcttttttagtttctgctgtgggattttgtgaggatgtgacttgattttggtgaaatgttttgagattggttgtctggcttggtgattgcttttaggtatgattattcttgcatattgattgaaattatccgcaacatcatgcctatattgttgtttgtcacatttggattcttatatatgttagacctcttgttagttgttgtatcatgtatgatatctaatacttgaaaagaatgaattttttcataatctctcatcgaaaaattagtgtcttgacaaaagtgtttagctcttttagtcggtaattgaccttatcattcccgcagttctcaagaaaggaaagtcgtgcccgaaatggcaggatggtatttaagatatggtgtgaatggttttctgagatccaaagattgatcaaacagatactttccttcaaataaggcatgatcttagggttctggttgaattgtgtcctttaattcaatggcaatgatgtttcagttatctgtatggtttagtttcctccttgtacatggttttttgcaacttttctttcttttaaatcgagataaaacaatggcacacccttttgttttctcattttaaattcccagacttgatggtggaattgagggggtcgtatcacattgatgatgcaattagtaaagtctaaaccaagtaacattattttctattaatttgtggggacaaaaagagcaggtgaagtattttgaatcacatgtaatcatgtccttttcaggtgcccccattgcaggctcatctgtggatttgata

SEQ ID NO: 65286 - DNA, 577 bp, Cucumis sativus
  Intron number 2 from transcript Cucsa.253140.1 (locus Cucs a.253140) derived from phytozome v7.0 (chr-ID scaffold0222 9; pos 1862244 to 1862820 reverse strand)
aggagaatctaacccccattggctccaaaattacggtatatatattctttttctttttttggactctattacttttatttgtgaattttgccttgtgatgttgagattatgaagtttaattgtaagatatttgagaactaaattgtacattgtttgaagttgggattttgagaatatgaattatatgtgtttgggacttttcagattgtgcagctaaagagtgtaatgaatgtaaataagagatttttgagttttcgggtcctgctgatgtagtattaataattaacatggtttcctaaaatgtaggaagtcctgagttcaaatttcttaagtgtcatttcctattcgtttcttgtaattggatacttgtagggttatctactaattttcgaactagagatgggaaggaaggagtgttaagaacatatagaaaaagtatatacattagcttattagctaagtcttttgggtgtggggtgtgatttcaaagtctaactgccatttaactttgatcttctgagattttccacgtttgttctcaggaattgaacgaatcaagatcagagctgcttaatag

SEQ ID NO: 65287 - DNA, 924 bp, Cucumis sativus
  Intron number 2 from transcript Cucsa.188150.2 (locus Cucs a.188150) derived from phytozome v7.0 (chr-ID scaffold0129 4; pos 48540 to 49463 reverse strand)
cgttggacccaaccgtagaccttctgtttctcccagtatgtgttcttctcattatctgcttatctgattcttatgttgcccttttccttttgagctttgcatgctgtgattgagagctttgaacacgtatttatggaggaaagaggatggagattgaagaactatgcgagttagttgaggaatttggaacattctctgtttttcttcatagttttgctttctccttgtattggactcttattgaaatgtttgtgaataaggtgagttttagaagtgaagaatttttatatccaagactatctgttatatgtagcaatgcatatagtttcattatttacatattgctacttgataaaattattttgtgatcttaaatgatcattggatttcacttgtataactgtttccattagttttgcttaaattgttctattcttagataatacaactagattaacatgtatacttcatcaaacgaaaactggattatttagtaccggattttatttgttataattcattgatttattggatagcaattaagggcccatctggattgaaaaaattgtttttcagaaaactcttttttatttaaagattaaaactatttaaaacatacttcaaaaagttatcttgggtggttgccaaacacccttccaactattactagttcgttgaagaatctccgtgtagtcttttagttttcagttgtgaacatgaaacatatcttagggaaaatatgtcaaggtatcacatctatttgacgaattttaaggcttttgtgtcatagaaatctgttgtttagttttgaccatttggagccttcgacccaattattgtttccagattttgttcttttttggtcaaatgatatgatttttggtttgatgatacttgaattactgaaatttatatgtacagttc

SEQ ID NO: 65288 - DNA, 804 bp, Cucumis sativus
  Intron number 2 from transcript Cucsa.300020.1 (locus Cucs a.300020) derived from phytozome v7.0 (chr-ID scaffold0292 5; pos 33933 to 34736 reverse strand)
attggaattgaattgttgacactaaagtgtctgaggtaggagaactaaatctatatgagatgtagtttatggaattaatctatactcttccctctcagttgcttgactgcatgtttgtgaagactgtttgggtttttttttttttttttttttaataattttattttattttatagatgtggcttgctacttaattttttagattggttataatcccatcccatctcgtatttttttagtgaactgggctttgtttgcaaattaagcatacatcatgctgtgttaccaattgatgacttatgtgactgatgtataacatagcttcgttttactgatgtagcatctttgtactccctgccagtagatcagttttgattcataagctcctatttgctgtatccttgatgcctttacaattcatccctttgtattcaactcataataatacgtttgactttctaatttttttttttttgggtatttgcagagatgttattaacaaagatatccctgctaatggttctgctgcatctgaaaagatttacaatgcagcatggctatgtgttcgattattcagactatctttgaaaattcattgatatagcttataggcacttcacatttgtaagtagacggatttgtaactttaaattcttagattgcttggactatgtatctgttggtagccggaggttattcagtagcccggttatgcttatcttatctagttttcttgtactaaggcaatttctatgattttctcttgcagtttggctaatcttgttgtaccttcgtcctagtttg

SEQ ID NO: 65289 - DNA, 503 bp, Cucumis sativus
  Intron number 1 from transcript Cucsa.300020.1 (locus Cucs a.300020) derived from phytozome v7.0 (chr-ID scaffold0292 5; pos 34808 to 35310 reverse strand)
attacttcttctccaactacaatcttcaacgtctcgtatggattccttctcattttttccatttttgtcgccacattcatcgcccttttaaccaatcatcttattcttcctttcttttcttcatttcaatccaattttcgaagctttgtttgaatgtgtgtgtgaatcttatagcactcatgtttttgtaatgggatctttctgttttttactctaattaatcgctcttcgcttcatgcatgttgtggctttcaatttgatggttttgggtttatgggttgggtaattgaagttcttgtttaaagtttttttggggttaaattttgatttttgagtgggaggtttaatggggttggcacggaaagcattttggtcaagaaaataatttaagtttttaatttctatttagaaaggtaaatttataagtgcaacttttgaaattgatgttctaattggttttccttttaggtggtggagaacttctaatttgttttgatatttgg

SEQ ID NO: 65290 - DNA, 601 bp, Cucumis sativus
  Intron number 1 from transcript Cucsa.201460.1 (locus Cucs a.201460) derived from phytozome v7.0 (chr-ID scaffold0137 4; pos 372011 to 372611)
ccgaacccgagtattttgaggataagcgtaacgtattctatattctgctgttcttactgcaagattttgtgttgcagtctcttttgagtctttagctagttttggttgtcattttgttggggtttctttaatttcttaaatgggtcttgagttcccaatgttatgaattattcgattctccattttttttcatttttctttttagtgggaaattgagcaggggataatgttggttgtgtctaagtactgtaatggatctttgtaggtggcaaattgtttgttgggatagtttcatttgctcttctgggtttcttgaatgatacagtgttagaaagtacgagcttcaataaacttttgtattttgctttgttaatgatttacttgaacttggaaatgaagtttgtttgttttttttaaaatgtttttagcaagcttttggacccagatggttgttttcagtagttttgacgttacctgcattggtgttctttttggaaaattcgactgtttgtggtttgcgaattaatattttctcttgatttacgaatagcaattactgaatgcaggaagatttgtggaaagcagcatttcctgttgggac

SEQ ID NO: 65291 - DNA, 301 bp, Cucumis sativus
  Intron number 2 from transcript Cucsa.277600.1 (locus Cucs a.277600) derived from phytozome v7.0 (chr-ID scaffold0260 4; pos 15812 to 16112)
aaactactgcctgacttgctctcgtctgttgaactgttaaaaaaatgaaatgaatcaagttgctaatgtgaagccgaaactggtagctaggatcggaaaagttctattctatgggtgagaaatttcttgtatgttaacaaaagttcccataagatatttgtttttgtaacatattacttgtataaaatcttcaacttttgaagccatgggatggcagctcttttcatggacatggacaataagaagtaaaacttatgaggtcttgtttataaactggttgttactttgtcatgcagtgact

SEQ ID NO: 65292 - DNA, 815 bp, Cucumis sativus
  Intron number 4 from transcript Cucsa.161910.1 (locus Cucs a.161910) derived from phytozome v7.0 (chr-ID scaffold0114 4; pos 1691639 to 1692453)
ctttcgtgcaaggtgaggagtctagtcactgaatgagttggcaggtagaaacaacaaagatttacaagatatccatttgcaattgattttaagcaagttgagtggttgagattgaacctccgcaggagattaaaatagttggctaggtagtcatttcatgatcttattacacttgaacatgaagaaataatccttttagtacaatagattaaaagtaaaagtttctctgagctgcatccgagtgatctttaagccttgtttgataagccatgttgttttagggtttctcttttcttttctaaattgacacttaaattacgtccacctatgagtttctattttgtcatctacctttatcttcaaaattcaagccaagttttaaaaaccaaaacaaatagtttcaaatatttttttcagaaaagataaaaactattataaagaaatgatgagaaaacatgctcaatttttaaaaacgacatggttgggcctaaatttcttcttccatatatattgaggaaggtctaaattgtttgatgtgggagtctgctggttctggcacctttgggtttttgttagattgattgatgatgtgatagtcatgcccatttgttttgaagtctacaggaagctactatcgtctgcccagatgagagttaattgaaaattatgaatgaatacacgtgcatattaagatcatagtaaactttgtttgttgtctattcaataggaagcacagtacaaaaggttcaaaattggtgacatttgaaattttattcgtagtttgaaggttctgaattggtggaacgccaaaacga

SEQ ID NO: 65293 - DNA, 518 bp, Cucumis sativus
  Intron number 2 from transcript Cucsa.242500.1 (locus Cucs a.242500) derived from phytozome v7.0 (chr-ID scaffold0204 7; pos 2254895 to 2255412 reverse strand)
caaaatacggtatctatcgataactacaatttcttttttaagatatttgaggaaatgatgttttttaaaggagaaaatagaaacatatatgaggaaacaaataactgtagagtccgattaacaatgattttgattttggttttctgttttctaaaatttgtgcttatttatttatttattcattttatttgtttcccaatctactttcaaaattttgtctttttgagatcatggccaaatctaaaactaggaaaattttggtcaagattgctaaagttttaatatacaagtgaaaaacaaaattaagaagaaaaaaactgttatacataattttaacgagcttaattttcaaaaacaaaaacctaaaaaaaactgcttaaaaatgatacttggctttatctcatttaaatatttgctctcaactaatcaaatggttgttggatagcttcgggggaaataataagcatcattgctttattgaagaaactatcaatatcagttgtaaagcttggagcagt

SEQ ID NO: 65294 - DNA, 841 bp, Cucumis sativus
  Intron number 2 from transcript Cucsa.196880.1 (locus Cucs a.196880) derived from phytozome v7.0 (chr-ID scaffold0135 7; pos 454262 to 455102)
gacagggaagaggctgacaaattgcaggtattttgacattttgcatttgaaatttatcctaattaagcttcccttcatactttacgttcactatgtgatttgattgtatgaaatattggaattttctaatataaacataaccttgttccataacttattgcaggtatgatgttttgtgttttttttccattttcgaagcatggacgagatcatgatgttttagctgatatctcactcattatgttagtgaagaggcttgtttccgtataaaaaactaataattcagtatagttagacatgaaataaattaattactcgaaaaatcattgttgttgttctctttatatatccattgacatgtatatactatacattcataggcatgtatgtaaagattttagaatttagacagttttttggcaattatttttttgtttctctttctggaggaatctatgtttatctaatttactgataattgttttatctttttgtaatgtttttttaatatttaatgataagaactctttgtggtcaatgagcgtgttatactaggtgtaggttaagccttaagcagtagtccatgcttcacgtcttcatgtttctatggaacttctggcttttttgtttttctatgccgttggaatttctgttatttaggaacatttcttaaatattcattgtcactacttctctttgactccattgtctgtattgtgtatctagtctagaatataaaaactatattgcacatatcaaaatatattaatatatttgttaccatctcaaaagatagacaactcccacaaagtcttttttttcccctgcaatttgtgtcagg

SEQ ID NO: 65295 - DNA, 988 bp, Cucumis sativus
  Intron number 2 from transcript Cucsa.158070.1 (locus Cucs a.158070) derived from phytozome v7.0 (chr-ID scaffold0114 2; pos 226333 to 227320)
tcttttagcattggggtttcttaccttcctcccaggtattgatgaaatttttgtttcacagttttttgagtgctgttctttgtcatttattttcatggtatgcaaagtgtagtcgtttggcttttgtttgttgagcttaactcatcattcaagaacccatataagacttggtgcgaacagaatcttcttagttttggtctaatggtatcattgttagtcacaacaacttgaagctgccacctggattgtgataatctaattcataaatagtgttaaaagaccatcgacgtcaattttagatatctttccctattcggggaagagcttagacaatatcaagaggagaatgttgaaaggagtgcttaatcaatctggatagggaaaataggatattttagaaattcaataatgaatagtttagattttagtttgacaccaaaaaacttgtgatatgtggtcatgctatgagccattcgagtttatctcgatggtatattccagccataagcaagcacgtaccacagttgcatgagatgcacaaaccaaaactaaattaacagtgacttaagtttggtaaagcacaaaactattaacgagtactttaagtataaagtggtccataggttagaaatttgttgaatatcgatattttcattatggaactctaatatactttcaactatcaggcttcctactaaaggaataattacaatttttagtaaaatcttgtcacaccatcgactttggcaatgggagtatattcaattctttggccgactctttctatattctatcattatacttattatacttgaccataaagccactggaatacaaaaccaaatcatgtgactgttaaaaccaaatcacaaacaacctgcaaagttttgttatcgttcaatatgtcatcagtagaaatgccgttgattcatcctgttcatgaagtttgataatctgaacaacttttggtttgttgatgcaggctttt

SEQ ID NO: 65296 - DNA, 799 bp, Cucumis sativus
  Intron number 2 from transcript Cucsa.163150.1 (locus Cucs a.163150) derived from phytozome v7.0 (chr-ID scaffold0114 4; pos 2583793 to 2584591 reverse strand)
caagtaagttgtttttttaggtataaacatttgagactctatatttcgtgtatcttgattggtaaactgtgatttttgtttttcttatagataacgccaattctgttcatgtacttaaatttgggttcccatatgaaattgagatttacattaatttttttttatttcaaatgacaattcaacatatctgtgttatattacttcaagggacatgtgcttcttctagggcataactttctgcccaagttatcatctggattctggcatgactagtgattaggtttttatattcgttttagcacaagagatacgattacttgctgctggctcactgaactgtgatatttttttgttcaaacgcagcctcagtcacaaatggaaattgatctggtagtataatgtgtttggatacctaccatgtaaataataaaaggcttgagggaatgcatttaattcatcaatggtcactggtcacccatttaggacataacggtaatatgttatgagttatcttgacaaccaaatgtattgtgtcaaatagttgtcatgtgagaatagttgaggtgtggaaaagtttttccagaattttatgaatatgaaaaagaagtacagcgagtttaggtttttttccctgcagtttgagtgagtggctgtttgcctgatgctctggcagttcattttctcttattatcactataaatttataactggcagttactatgataagatttgaagatttagtgctctcttggttcatcttgtagattatttgagctgtgtggtcaagaattaaacgtga

SEQ ID NO: 65297 - DNA, 381 bp, Cucumis sativus
  Intron number 1 from transcript Cucsa.241130.1 (locus Cucs a.241130) derived from phytozome v7.0 (chr-ID scaffold0204 7; pos 1269929 to 1270309 reverse strand)
agcaaagtccctcctctggttcgtggaattgcaaggttctatttcttctgtcgatttttgttgaatgaatagttattaaagctcgtgtgttattggatttgaacgtgaatgtaatcattttagtttattggaagttgttcgtcgagctggtagttttactatacatgactaacctaaacagaagaagctatgcatcggagaaagtttcttatcttacaaaagttccttttgcttgatgcaatttttttttctatattttatttttccatttgattatgagctgcttcatcgatgtcttaggtgtttgtcattggcagctgaaacgctaatgtagtgttctttgcaggcagttttggaagaaacacatactagaactgtgag

SEQ ID NO: 65298 - DNA, 682 bp, Cucumis sativus
  Intron number 1 from transcript Cucsa.189460.1 (locus Cucs a.189460) derived from phytozome v7.0 (chr-ID scaffold0130 5; pos 241498 to 242179)
attgtttgggaggtttgttcttctttctcagaacttatttctttttcctaacacctctgatcttagatccaaatcctacagatgctggaatatgaatatatatgttcataagtttgattgaattgcttgctttcttggttcttactttgagtctgttttattaattagttatctgatccaacatagattgcatcacttgggttgcttcttctttactcaacttttttttgtgtgtgtgtgtgtgtgtgttttatttttttgttcctctctctattatgtggttgaaaagttatagaaaactttagtttctttccttttcaaatttccaatatccactaagcctgggaggccacacaagtttttgagctattaagttttcataaaggatttgaatcagggatcttggtgggtatctttgttaccacctggaaagtgggcaccctctggggtctgtctgttgtgcttttgttaactctctttttttcttcatggcttcttggggtggggtcaacatttaggctattttcttaatctttttgtccatttttcatacgataatgatactacatggcatgatctattactttctgaaaatcctaacatctcaacatgcatctgattgactctgatttcaacttgggtttcagaattttggctctaggaccgatacgatcttctgtgg

SEQ ID NO: 65299 - DNA, 563 bp, Cucumis sativus
  Intron number 1 from transcript Cucsa.257850.1 (locus Cucs a.257850) derived from phytozome v7.0 (chr-ID scaffold0222 9; pos 5043868 to 5044430 reverse strand)
ctcagaaccaacttcgagaattttggcaaggtatcttgtctttttcctttttccccttcctttttgggttgtgagttgaaatctctgattggtcattgcgtttacctagaaattaaactattcttccttgctagaaaggtaaaattgcaaataatggagggtgtattcaccatgaaattgagtttgttgttaaaaatattgattaattaattttatcgtaattgatgagcttaaactttcggattcaatgttgtcataagccagagagcgaaggtcctatgtgttgaaccttgtgatatcattttaagaatttggtgatgatttaacatagtattagagccgggagattttgtatttgaatcattttctctccaatataattgatttctacatgttgagggttcctttaagtttgatttaacacttgattaattagagtttttatggcattttattttattgattgatgcttcaaacatgatgtttttggaccatggttttgattgagttctgtacaatgttctttagggatcacataactacagaattctcagagatcttct

SEQ ID NO: 65300 - DNA, 683 bp, Cucumis sativus
  Intron number 2 from transcript Cucsa.136290.2 (locus Cucs a.136290) derived from phytozome v7.0 (chr-ID scaffold0104 4; pos 945394 to 946076 reverse strand)
cccccaccaatatcaccaccgagcagatacaaaaggcacgctctgtctatttcttctttacttcttactcaaacgtcttttttctttttttcatatggtattgaagtgactgctcccttcggtggtgcgtttgatttcatgaaactttgttatgacattggatgtgattttgaaagaaacatgcttttatgcttgataagttaatagcttcaacatgaaaattaatgaccaaatgtttgctgatggaaagaaccaaataaagcaggcctttgggaattaatgcgattcataaaaagaacaatgttgaattggagtttttgattaagaattgaaaatgataaggtagtgttctgttggaaacatgtttcgaggactaatgtgctggactgatggtgcaaatttgatattggagctgggtaatgctgtgttttattaaaattttgtggatttttccttttgtttcaattgtggattggagagcttttcatcacatttgcttcctcttttgcataagatttgaacttctttttatgttcattttgtctctggatgtttgaagtgtaggtgtttattaaaattaactaatatgaatttagatttagctgctccacaatagatccttgttaagacatttgagttgaagttatcaacaatgaatggtttcaactgcatgcagtatcttg

SEQ ID NO: 65301 - DNA, 970 bp, Cucumis sativus
  Intron number 2 from transcript Cucsa.167820.2 (locus Cucs a.167820) derived from phytozome v7.0 (chr-ID scaffold0115 6; pos 32021 to 32990 reverse strand)
ctcctgctgctgcgtcccactctgtttttgttttggtccttagatctcatttccttcttttgctttcctttttctttcccagctttattccctcttttttttttctttttctttgtctttatcttttactgctctctagatttggttttccaacttcctgtagttttttttttcttttttttgtttctaatgagcttcgacttcgctttggaactatggatgctttcttcttttaaccttttttaacttccgtttcatgaatcttgcgtttctgttatgcaatgtgagatgattatttgttaaaatatttggaaatctcttgttctctttaattctgttttgttttttagttcttgtcggtgtagcgagaaaccaggtttgggagttgttagatccttgtaattatgtttttcaattagcttgaggatacagagtatgggattccttctatagttgctgtaatattctgaatttctttataccttttggattcatttgaagaggatggtgattgaatgtttgattgctgtaatccttgattgaagttggcggctactgtttctgactttgagattttgatggatttagtacattacgatgagcgactgctcatctattgatttcgattttataaggagccgagtcagagttcagcattttgtttcaatttgatctatattttgcctttgcacgtttccagattcataaaatctaaagatgaccttgtagttgtttgccgttttctttctacagtttcgtaagagggttttctttttggctcataaattttagttatcattactattttatttgtatgggaaacaatagttcaatgttgatgcttcattcatgttgctagcatggcttcgtttttcaatttattatccctgtggctacttattagtgttgctcattgatttttattttaattgcaggttttaagatagtttaacacctagaatcgcctgag

SEQ ID NO: 65302 - DNA, 856 bp, Cucumis sativus
  Intron number 2 from transcript Cucsa.306620.1 (locus Cucs a.306620) derived from phytozome v7.0 (chr-ID scaffold0297 7; pos 91782 to 92637)
tcatcgtaggagttgccattgccctcgctttcaaggttttttttctttttctaatgccccagtttgtttagtgctcatcaaaattatttatcaattatgttaataacttgcgtttgggccctataaaaactactactcattcaccaaacaaacaaactaggagtcaaagttcataactttactccatttctctactttatttggactctctttgtagattttgatcaaaaacaaaaagttagtttttaaaagtggttctcttttaagaaacatcatatgaatagtccatacttagaaagtgaatgataatgaataaaaataaaaaagacaaaatcaaagcttgatcttttttttaactaccatttcatttttctaaattttgatttttgaaaagtattatgaacacttctttcatctctagatttcatatttgatatctactttttacaaaaaaagattaaaaaacaaagtaaagtttttaagaacttaattttttttttttgaaatttgtttaaaaaattcaactctttatacataaaaagaaatacatattagagtgaaaataagcttacaccttttaaaaagaaaaacaaagggttgaattattactgaaggagatctttaaaaaattaactttgtttcacattatcttctattattttgaattcttagacaaaattttaaaaaaaaaatagttttaaataacttagttatgatttaaaatttgactagaaattcaaaaaatataaaactaaaaatggaattgttatgaaacggatggaaataagattataggattgatgaaggatgaatttgaaatatgttgcagagaattgggagtataaaacaaggagtg

SEQ ID NO: 65303 - DNA, 856 bp, Cucumis sativus
  Intron number 2 from transcript Cucsa.259660.1 (locus Cucs a.259660) derived from phytozome v7.0 (chr-ID scaffold0222 9; pos 6053654 to 6054509 reverse strand)
atcagaaactgttagatttcaaattctcttattctttaatttgttgtcaaagtgacgaacggtggtgcattaattgtggatgagctttttgtccatctttagtcgaatgttcatattgttacaataacataattatatggacatggggttggtctaattgaatattgaaaagcatatttttaattcaaacactgtgattcgagttgcataatactacagtagataaatggacccatcttgatcagtagagtagtgttgaaatcgtttattcgatatgtttgccgtttaaattttgtagttaccgttcagccttgctttgtgggatttcactaaggccatgtttggtatggatgttttatatgaattagattccccctgcttgaactgaattgtttttttaaaaatgtttttgggctgaacagtccgattcgtgtaaattctggaaacattttccagtaaattcaaaatttaaattttaaatgcatattaatattaaaaaaaaacaatcgtagtatttcatattataaactcaattcatttatgttaaattaaaatttgtattataaatgatagatattacaaggttttcaaaatctacatcaaattttggacattgtaaagttttagtatttaaaaaaaatggaatttggctaagaattcaaatctttaccacaatttaggaaaatggataactaaatatcaaatgattatatgaaatgttgcttagctgtctcttcttgtttgttttgtatgttttccatcattttaaacctggtataaatttcatcatgtactaaaactatccttttgtcattgttcagccgtgctttttttgacaagaggatctcccaggagg

SEQ ID NO: 65304 - DNA, 619 bp, Cucumis sativus
  Intron number 2 from transcript Cucsa.158450.1 (locus Cucs a.158450) derived from phytozome v7.0 (chr-ID scaffold0114 2; pos 581196 to 581814)
gcaagtctacaaaaacaaatatcattagtattgtggttcgtattcttattcatatattttaggtttattttgatgtgattattatgatttttttccctttaatttttaagttatcatttccttttttattcaaaagaaatgatcttgtggtgatacttagttatgaatataatatgtgtgtttcaaaatggtgaaattaattaagaattaggagttacttaataacaaattaaattaattgagctttttcaggttaaaaatagtttaatttaatcatctttgttagacctagatatactcaaatggtagaagttaaaatactcttctagggttttgctaggatagttaaattataatttagaaatatatttataggaatatgacccgaaaatataatgcaaaattagttagttactattattattatttagaaaattggatagatatatactcaatatattatttagaatatttaactttttttttctttccaaatctcaacctcacatgaacggtatatatataaatgataatacaaattagggatgagttagagtttaattataatattttgtgtaatgaatttgaattttggttgtaaaattactaaattagattg

SEQ ID NO: 65305 - DNA, 952 bp, Cucumis sativus
  Intron number 2 from transcript Cucsa.252640.2 (locus Cucs a.252640) derived from phytozome v7.0 (chr-ID scaffold0222 9; pos 1553647 to 1554598)
gccgtggtgccttgcctatctactggtatgtcttctctaaatccactccacttttaacatcccactgttgattggtggaaggatatttactgaagtttgatggttgtgcttctcgacttggaattttgaattcgtgttgtgttaccattaattaccttaaactaaataggatttattggataaacatgatatggtgaacaaatggattagaaaagtggtcagtttaacaaaataaagtgagtttaggctatataataatagatttagaagttgcatccaccatagattaggagtgtgagcgaaaactgaacaaactgttcaatccgtccaaaggcgacttatttatttgaaggctaaacccgaaataatatgcaatgtttgtttgtatattgtatatcatgatcattccctccttccggtcatcttttcggccatttcagcgttgtctcatggcccattttgtcctgcccctggctaatagcctatggctaaccggtcaaactgaatcgattgaactgttggttatcggtatggagcagttcagtttttattattatgtgtatatttaaattgtttggtgttagtgtaatggtcaatacagataatgtcaaaaaataaggaatgggtcaaagactcgaattcatagtagtcaccgtgcatactatatctgtagagtcacaaattaaaatctagaaacatcatagaagtttttttattgttaagtgacgagatggattcaattgtaaaaatttatgatcttagatggtgtcaactcaatcattattcaacactcttattaatgtcattatttggtgaatgatgccaaaaccataagtcaaagttcaaaatctatagtttacagaccaaatagatgtgtgcgtagaccaagtttgtcgttgaaacttattgagctactttgtgctgaatatgggctttaccaggaactacaact

SEQ ID NO: 65306 - DNA, 578 bp, Cucumis sativus
  Intron number 2 from transcript Cucsa.192320.3 (locus Cucs a.192320) derived from phytozome v7.0 (chr-ID scaffold0133 3; pos 198587 to 199164)
tggtaagtaagagctacttctgtttttggtccgtgtttgttctgctgtcaatgtgcataaaatgatttggaataaaggaaacttttcgatgtcacgctataatagttgttaatttgcatctaaaattggttattattttcaatattcagcccgtttctggaataataaatattttgtatcatactaatcactattggttgtctggttttaaatggataattagatgctctccaaattatgcgttaaataggtgatgattgtcaatgtgtgtatcaacattttccatatttgattgttactattgcatttgtgagaaattagtggaggcatgttaatttagttatgacttgcatagttctgtgtaaaaaagatcatcatgcatttaatttcatatgtattatcttcgaactttacttgattattcataaaagatctaacaatttttatgtaattgcgtattttagttgggaaattatccatttacaactagtaaataggaaagtctgccaatggttcactttattaccctctacgtattgaactataattttcttttgtatcatataggttataagacg

SEQ ID NO: 65307 - DNA, 767 bp, Cucumis sativus
  Intron number 1 from transcript Cucsa.178370.1 (locus Cucs a.178370) derived from phytozome v7.0 (chr-ID scaffold0122 7; pos 556976 to 557742 reverse strand)
ccagtcttcgtgccgctctcacttactctatcggcgtaacaatctctttctctctcttttaaaccatatcttcgttccttcaacactcacccgccattgctgtgccaatttcctttttgtgctctattcttgccgaattgggacttcttttttcattgttattagttatttcagcttttggattgttgtttcgttctatacattcgagaaatggtggggttctatttgttgctaaatgggtcattgtatttattgataacattttttaaaaatcttaattcggaatatgttatcatgtgctttaggctcttggcgaaggacctatttcttgtgtcaaaagtaatttttgatcgaggatatcttgtttcttcaactattttaactgttttttaccatcaattatgttcgataagaaactattttctagaaagtatggacctatgaaaaggagaggaggaaagcttatgctaagttatgttacaaacaagtccttttaaggagaatccacctgcctaagatatactatcctttgagttaccctagtgccaaatatagtaggaactggtgcttgcttgtgagaatagtaggggagtgcacaacttgacctaggcactctgatgttgtgcacattatgcatccttatatggctgtatgctgtttcctcactgtattacatttttgttgtttagtcctaatgcttgaaattcttgtggattggtaaaataatttcaggtcttagctctaagaagaccattctttcacaaggt

SEQ ID NO: 65308 - DNA, 526 bp, Cucumis sativus
  Intron number 1 from transcript Cucsa.255950.1 (locus Cucs a.255950) derived from phytozome v7.0 (chr-ID scaffold0222 9; pos 3722691 to 3723216)
gtatccaacttaatgaactctattcctttgatttttcctgcattactttagctgacttgtcccaactccccaagttccaataagcttaaatggaaatttggaatttgaacccttttggttattgccctcaactctgtgtttcgatttgtatgcatgcctttctagacgtcatgtcagtacagaaatcatttactgcagtgctgtgtattgtatttgaactttttatgctgtttcttttttttttttttttttcttgtggacatatatgcattaagagttagagtcgtcaccctactcatgtaatattctcttacttctctctttcgtccaacgcgggttttctctttaattttgacgaagagggtgagtttattctttttgttgacgtataattttgcctgttctgcaatgacattttatatgtttgtattggcacttaaacggtggaccctggtatgtattcggtacattaaaacatcttattctgacaggctagtcaagtaaatctagcggttggatcacttgt

SEQ ID NO: 65309 - DNA, 582 bp, Cucumis sativus; identical to SEQ ID NO: 64343
  Intron number 2 from transcript Cucsa.239510.2 (locus Cucs a.239510) derived from phytozome v7.0 (chr-ID scaffold0204 6; pos 304428 to 305009)

SEQ ID NO: 65310 - DNA, 951 bp, Cucumis sativus
  Intron number 1 from transcript Cucsa.198440.1 (locus Cucs a.198440) derived from phytozome v7.0 (chr-ID scaffold0135 7; pos 1486311 to 1487261)
gcgcaagaaattcaaggactccactcatctttctggtttcaacttcctttccttttcacgccaacacatttcgctcatttgattattattattttttaactcactgattttccaaatttgatcttgcatcgacatttattggtttcacgatctgggtcgtttgcgtttgaatctgaatctatttcaattgttttttcttcatctagtatgatattagcacggctctttcggtagtttttccggttgacgtgaatgaatgatgaagaaagatttccttttgatgacgcctaataattttgaaaacgaagctgttcatgcctctcatcgatttaagtttcacatagtaaatgtaaagcttatgttgtgcttcgaatttcaattttgtttgaccttaatagagttatagaatgttctgccttcttatcttttgtattgaatttgataagaagaaaacgggattcactgctctctgtctctctgcgccttatcctccaagctacggtcgggttggccagtcagttgctgtcattaccatgttatatgttatctgcagtgaatcagtaatgttttaatatacttagacagatacccgtgcccatcaagaaatatatgtcattttacatgtatttataatgactattcttgtgctctttcgcttttttgagacttctcttattcagctaagaaaattaggttctaccgtgatctcttcatgattaatttctggataatcgcatcttctttttttgtttttagctccatcttaaaaataattgaccaaaaatgtatattggaaatcctttttgaaccaagatttaaagatttggttcttcgtagatagaagtgttaatgtggaaaattttgtttcatagtgcattctaatgaagtacactttcaatttcctggctagtcaaccaactaaaaccaacttttgttgccttatttgcacag

SEQ ID NO: 65311 - DNA, 984 bp, Cucumis sativus
  Intron number 2 from transcript Cucsa.295180.1 (locus Cucs a.295180) derived from phytozome v7.0 (chr-ID scaffold0285 2; pos 163242 to 164225 reverse strand)
tctacatttgcaagtgaaggtccttctccttccttgtaagttcttaacaactttcctttgatatacagtgtttgttattgttctttgaaagcggactttatccataattaggctaaggactcccaagctatttcttaaggggtatttcatgaaagtagtttgagtttatgtgaaaccaaagaggacaggactcttacatataaaattgtcaaaaaaaaataaaaaggcccgaggctgagcgcttccctcttgagttaggggtggcatggtattccacagggagaggtttttttttccttcaaattgtggtgcactctcagttgcattgggcctaacattatcactttccggtgagggcttcaatggccgctttactgccctagattttgcagtcaaagcgaggggttttgcccaacattaaaaataaatacatataaaattgtaaaacttttgtgaatgaaggcttgattcctggaaactggttcttcaaatttggcacttacaagttttcttccagttccatcctctacaatgcagctgaagttcgtttttgggattgttggaagatgttttgttatcatgaataatatgctcagtgcacttcttgttcacatatccatatattgcaagtttatacttgggattaatttgttaggctacttcctaactagaataatatttgaatatattgaaatataaagatgaagaaatacaagataaaactaaaaccaagttcaaggtatttgggaaccttcctcttgaacaaactaactcaaaccttaaaccactcaactaatgaataaacaagactcattcacggttctttaatctataacaagattcagtagctagctcactttctttctaattatccatttattcttatacccccttgtgtaatctcatgattgttgtagctaaatgcattaaacgtgacctgttttctcaggttctcaagaaccgaggtgaagcaagagattcttc

SEQ ID NO: 65312 - DNA, 140 bp, Cucumis sativus
  Intron number 1 from transcript Cucsa.302820.2 (locus Cucs a.302820) derived from phytozome v7.0 (chr-ID scaffold0295 1; pos 903358 to 903497)
gctttctgtaatgtctctgtcttcttcatgttttgccagcctaaatctttaatgggaattcattatggtttgatttcctttgtttgttattgttttttctgaaaggcaaggaaggcattaagggcactaagagggttggt

SEQ ID NO: 65313 - DNA, 641 bp, Cucumis sativus
  Intron number 1 from transcript Cucsa.198480.1 (locus Cucs a.198480) derived from phytozome v7.0 (chr-ID scaffold0135 7; pos 1502459 to 1503099)
aaattgcgagggcaggttctgtttcttaatttgatttcttgctcagctttttagtttgtaaatgagttatttgtgtgagtggattgttcgttacgttttgtttttatgttactctctttccgtaagtaattagctacggaaacactacaattttctggaagaaaatagatgttgatctccattaatgctttgctggtggaaacattgttttcgttttgatgtcacactctaagtgattagctatgaaatacttcaatattgcttgaatgaaatggatatttgtctattcatgcttcgcaactggaaacagtgttttcgttctattgttacactttgtggaaatacttcaatgtttctcgaatgtaatttttgttggtcgctattcaggcttcgcggctggaaataattttttttttggtttcttaataattgcaattttgttgatgatatttgatgaggaatgtcttaacgacttgttctggatttgtcgttgttgataactaacattttagctttaattggatgtctctttctccctcctgaaatattttaaaatgtttgcgtcaaattttggagttgagattgctctgtctttctcatgttcagatatctgatcagctaaagagccgtttctcttcagg

SEQ ID NO: 65314 - DNA, 500 bp, Cucumis sativus
  Intron number 1 from transcript Cucsa.256050.1 (locus Cucs a.256050) derived from phytozome v7.0 (chr-ID scaffold0222 9; pos 3776444 to 3776943 reverse strand)
ctgacaataaggtcctttaaattttcttacttttgttcatgtagtttgagcattaggtaggttccattcctcacttagtgcattcatttctatccctcatgttaaagaaataatttaattaagtcacgttttgttaaatagtaaatatagacgaagtttcatagatcaaacttaattatatcctaaacttgaagactaggttccacaattttgaaacttttttaatttagaaagtaagattgattgattttttactcaaatttcaagatcaaaagtcacatcttttacaaaattgtataaaatatctaatagaaactcaatcaatctttatcggtaggatcaaggtctttatttagtttttgaaagtttgacgatatccaaactttcaatttaattttcttaaactaggaaaaaaaaactttatgattcgcaaaaaaaatagtaacatgaagaagaaattggcagttgtttggaagtcggcttctgttcggttccagcag

SEQ ID NO: 65315 - DNA, 310 bp, Cucumis sativus
  Intron number 2 from transcript Cucsa.239260.1 (locus Cucs a.239260) derived from phytozome v7.0 (chr-ID scaffold0204 6; pos 145413 to 145722 reverse strand)
caattggagagttttttaacatgtaagtgattattttgtttttttcatattattaatttaagattttaaatattcttgtgactccgtattggttaataatttgtaggttcatatgaaaaagagagagattggagcaaaagcgcttaaatgattggtttacgtaaagtataatcaagtaattaaagagcagtttgatctaaaggatcaacttggtccaatctccttggataatatcaacaagaataatgaatggtgggaacattggttgaagaaaataatgaagctgaagttcacaataagagagtttttt

SEQ ID NO: 65316 - DNA, 811 bp, Cucumis sativus
  Intron number 1 from transcript Cucsa.296110.1 (locus Cucs a.296110) derived from phytozome v7.0 (chr-ID scaffold0285 6; pos 173140 to 173950)
gaggccaagtaagctctctttaacctttcatactaaacaaattttagaaagaataatttctacacaataaacaccaaatttctttttccttcttcaatctaacaaactatcaaactatcgtaatattagtcatacaagtctatcagtaatagttttgttatatatattgttatatttttaataattatttctaaaatattctccaaattattctttttaaaattattagttgaccttctatatatatatataatgctttttaaaaataatgtaagaaaattatttttacttccaattccattaagatttattaaagacccatgttctaacatcaatgtaaaaaaaaaaaattaagttgacatgtgaaataaatttaaaataatatatctaacatttattactttaaacctacattttaattgaaattagtgaaatgatgataataatttggataattataattatagtcattttagaaataataattaagaatatagcaatattttttaaaaaaatgcaaatatagcaaaactatcgttcatagactcatatggtttattagtgatagatcaatatttacaacatggtttatcgatgatagacttctattatttatagaaatgacaaattttactatatttataaattttttaaaatgttgttatatgcttaattattttgaatcttacgacaactattctgaatgattttcatctaaataaagtacactatatatatataatattattatttaaagatttttttttcttttgtaggacataaaattagtgctgcatcgatttggaagtaa

SEQ ID NO: 65317 - DNA, 379 bp, Cucumis sativus
  Intron number 1 from transcript Cucsa.300850.1 (locus Cucs a.300850) derived from phytozome v7.0 (chr-ID scaffold0293 1; pos 480188 to 480566 reverse strand)
tgccttggaagtaagtctctcttttgatcagaaccctaataataattctcttttcatttcaatggtttaaggatttgaactcatgatctatacgttttaaattgtatatattttgttttctcttacaacttctttgaacactcaaattcttagcaaaatttataaaaaaaatggttttaaaaaatttgatgaacaatatataatacatcgatggaatcaataagttgaagtagtttataagtttaatttaaaaaacaaaaaacataagaaaaagcctaaatgaaaaggctatggtcttatagatttatatttatatttgaagttttacatgtaaactctgggttgtgatacttagaatttaattgattatatttgtagg

SEQ ID NO: 65318 - DNA, 726 bp, Cucumis sativus
  Intron number 1 from transcript Cucsa.283530.1 (locus Cucs a.283530) derived from phytozome v7.0 (chr-ID scaffold0265 3; pos 616703 to 617428)
gtcttcatacccaactgctgccactttgttttgaggtattcttcttctacttcttcttcttccctccttttttttcatttgaattcctctgtttctcttgttttttttattgcttctctggcttggatctgcctatctgattcctgttaaatcttatatgttgtttgtggctgtagatggtttaattgtagtctgaactctttggtgggtgaacggagcgaacccatgtttccagtttaagtgtctttggatttttaggtcggaactgattgattcatgaatgggtttaaccggtttttagggttttttctttctttcaaaatttccatgtttcctctgctagatctatgtttctatttctttatttttttggggggttaaaagtggcgagtctttggataacatctgttggtgttgtcttagtatttaataatgttaagttagtgaaagaaaggatcatttcatgccaactaatgagctaactttttgtccgttcttttttaacttttaattatttatatttaattgtttgaggaaattgccgaacggattccgatctgcttaggggacaaaatcaaactttgaattttcttctcctttctttccgctttcatacgattgttttggtgccatttgtcgcgagcatgattttatttaatatgtttttggttttccctcttctctctctcagcttttattatttgtcccttgaaataacccaacacc

SEQ ID NO: 65319 - DNA, 414 bp, Cucumis sativus
  Intron number 1 from transcript Cucsa.249400.1 (locus Cucs a.249400) derived from phytozome v7.0 (chr-ID scaffold0220 9; pos 169661 to 170074)
gatattgtaaaaagttgtaagagggaaagaaagaattagaaaggtaaattggtttataaatgaaataattagtgttgaaaaggatttttttggaaggcaactccaaggccaacgccaacgccaaccaatgtttattgtattttattttatttttcaatgaatttgaaaatatatgattagaaacaaaaagaaaatagaaagtccaattcctcggcttcctgaactattattataactaaaatcattcttttcctacttttgtttgtatgtagaaccgagagcgccacatcgttctctctcgaacaacccctgctccagaattcaaactccttcccctcccccatggatgattcttccaagaacgaagatagcccacgagttgttagagttctcgaagctctcaagcaagcctct

SEQ ID NO: 65320 - DNA, 1038 bp, Cucumis sativus
  Intron number 1 from transcript Cucsa.157370.3 (locus Cucs a.157370) derived from phytozome v7.0 (chr-ID scaffold0114 1; pos 328997 to 330034 reverse strand)
tgtttctgcctttcctcctgcccctcttcatcaaggtacttttcttgattatgtaaggtttctgattctcagctagaattttttgtgaaatgattacacattggtttaaacttttgggtcagtcggtcggtggtttaagaatttgtatggtatgatctagactaaggggggtgtttttatttcctttgtttgaagaatctatcattgatttggatggttttgaagtgagtttgtgtttatttagggattgagataagatcggacagtagtttagctgaggcggttcaaattttggctgagcataagattctcagtgcgcctgtggtggatgttgatgcacctgatcatgctagttggattgatagatacattggtattgttgagtttgctggaattgctgtttggattcttcatcaggtttgaattttgccaatgaagcttcctatttttagtcatggattcaattttatgattgaaagttagttttttttttttaataaatgtgaatgttatatgttcgattcttcatgttaacatgttgttgcatcatgtcaattctccgaagcattgggattaagtcaatccgttttgaggatatagtgaaaagagattctttgtttttgatcattacgcttcaaccgggttattctattccacctcttagaaagaaaagaacttaaatcaaaatatgtgtttaattcaaactgttgtaagtgtattgttaaaatcatgttcgacggcagtttagttttctgttttttaaagaaacacttcaattcaatccatagttaaattctatgaacaaaatgcttttgaatagttttcatttctgttctttgaatttattagttgaaatggtagcaaaataaagaaacttataggtagagtagtgtttatgagtttagttttcaaaagccataaacccaaaataaatggttatcagaaggggcataagttttcttgtcatttcagtgagatctcagactggtgatttgtcttgcagtcggaacctccatctccgaggagtcgtagcggtgg

SEQ ID NO: 65321 - DNA, 720 bp, Cucumis sativus
  Intron number 1 from transcript Cucsa.284820.1 (locus Cucs a.284820) derived from phytozome v7.0 (chr-ID scaffold0265 3; pos 1441766 to 1442485 reverse strand)
aacagaaggcctctgttggaggtaagtgaagttggttgctgctcgttagatctgattcttgaagcggataatcatcattttgttgagagttctttagtttctagtcgatcttttaacaggctgtggaagatatcttccttaaactctttgtcttagtgcacctaaagctgatttctttatctgaaagtatcataggaaagaagagatcttaccttacatcacttctgatttaattcaaatttctgaataattgttcatgccattgttgtttagtatcaattttcacaatcatattccctaatgtgtctttgtcatctcgattaaagctccatctgaattccccctttctgctatcgttggagacattggcaaaaatcattacttgtcacttcatttatgaactacgtgttcttaataagaacttcacttgtgaactgtgtaacacgtgatttttctcccttttagaaactttctggtttgtatgtatgtcagttgcatggtttaacttttcatctggactttgtggagactaatttgatgatttcttggtttctgtgtgcggcatgggaactaagccttgtaaactgttgaaaagaggtgtatttgaaggctaacaatgtgttgtggtttagaattgtaactgtattttggttctttctattcttgatgtcttccacttatctagaaagaggttggagatatacctcgggtaaaagggtt

SEQ ID NO: 65322 - DNA, 925 bp, Cucumis sativus
  Intron number 1 from transcript Cucsa.147820.4 (locus Cucs a.147820) derived from phytozome v7.0 (chr-ID scaffold0110 7; pos 174268 to 175192)
tcaaactgattgtgagacggagtgaatcagaagaggtttgtttttatttcctgattctgtaaatttggttatgaacagattataagtcgcttttggagattgctttacacgtctgctgtttctttattgttaggaagtctatgtgacagtccaagtctcccttgattttttattttttatttatatacaagaaattgagatttgccactgttcttctgcttttcgtgttgtgcattattgttgtttttgctatgaaggtgatttttaattgatctcttctgctttctccctttgctctctttgaggcttttccctttgccaacatcatacttttttcagtccttttctgctttcctgtttctttctttattaccctttccctttctctcaagttggaattgaaggtttacaagttttcattcctttctcttctccaaaatggtttgaaaacggtggaaaattgaacttgtaagtattctgatatagatttaagccattttttttagcttgaaaccaagtaaaaatctcaactttttgtttcattctcatttgtttatggatcttttgaaaaatggagagggagggggggtgaacaagggttttcttaaagtctttgagatttctgaaatgattttaaaaggaaacaatgtcttcacacagtgcacttagttttttccaacgtgagtctgacgatggacaagtcaccgctcacaagatcatctggacattttttttattattttctgtttctgcctcacatggctgcttatttaaatgacctgttatttgcctttttttttcttttcttcatgaagttgatgtgcatcattttcttgattcgctaaaaactatggcttaaaaccatttatttaatgagccatttcttgttttgttcagctggtatccgtcatccactcatcctcca

SEQ ID NO: 65323 - DNA, 369 bp, Cucumis sativus
  Intron number 1 from transcript Cucsa.179980.1 (locus Cucs a.179980) derived from phytozome v7.0 (chr-ID scaffold0123 3; pos 348233 to 348601 reverse strand)
tcagccgcttcttcgccgtcaccgtcgccggtcaggttttcgtctacaatcactctgaatcgtcttctcattgtttttattattattttccgtccatttctgtgttgcctgacttcggctaatttctgattctccgttcaagtattggtttgttggctattaccgattaatagtttctgttttcaaatatcagagcgtgtctcgaagcggtttgtgggtcatatagactatgttgtgtgttgttttcaaacttttttttatgtttgattaaagttatcgctgttctgttatggtgtttgattgttgttattgaagttcgttctgttatatgaaattttgtagggatttttgaagatttaagtggacagg

SEQ ID NO: 65324 - DNA, 784 bp, Cucumis sativus
  Intron number 2 from transcript Cucsa.218430.2 (locus Cucs a.218430) derived from phytozome v7.0 (chr-ID scaffold0165 8; pos 544442 to 545225 reverse strand)
tatgtgcgtaatctttctttgcatacatattactatgctttggctgtttggcagttgtgctttctattgttttgatttttcaattctggaaggtagagagaggcttttttttcttatttttattttggcttgattcttttttctttttaaaaaatacagtgtcaatttttttattgataaggggatttatgggttttcatatttcgttagttcttgtttctgccactagtctactttactaaagttttttattagccaagcaggtaattgttattttagattgatcactttatcatatcttatctttctttgattatgcatcatgtccctaacaaaaactcttgtgagttcttcacaaagatggtatattattacagaattaggttgtgcttttttattttttattttaggatttctttctgtgttattacaaaatgatagaagtgaactgaaaggtcatgaagttctagaaattgaataaaaggtttgaacatgcctatgttttttgttgatgttgtgctaatgtcagcattgttatcgttatgggttcaacctccataaggccttcaatggatataagaaacttccaatacaaatggacacttaagagaataaccacttaggatttaggaagcatgtcatttcccttgaatataactctttttagtttttgccatcgtacatgacttgctccagtttggagtaattgacaaaataaggtggaaatcttttttgaatatgatattgaatttttgcagttcagcaattaattgccttttaggcg

SEQ ID NO: 65325 - DNA, 725 bp, Cucumis sativus
  Intron number 2 from transcript Cucsa.213380.1 (locus Cucs a.213380) derived from phytozome v7.0 (chr-ID scaffold0154 3; pos 1144961 to 1145685)
ttgtcattctcatttccacttccatttctcttttggtaatttcattttgttattacttctctttcttttctatctttaaatttcattctccaatttctttaataattaattggttttttacaaacttaattaacttaccattaatttatactaactttatactcaatcaatttgtgtctaatgttctctaatattctcttgtttgtttgagggtgatgataataataaatgttctattgatcttgttctttttttagaatatatggatggaagaatcaaactctaatcttcaaatattattaatagttcaaagcatatgctcattcctgaaatattattaatgttattagatgctaatcatctaaaatatttattatatttgaagtgtgttgaaatgatatggttgtggttattgatccttcaaacatatataaaatcaaattttaatagaaaaaaaatatttagatgcattttgagctgtaactatctttatgttattcatcttaagggttcgattcgttagataaataaacaaagatataataatagtgtttctacgttttagatcctcccaagatgatctcaatttttattttccggaatatcttcccttccttttcttgctttgctcttcctttatctacaccaattctctttactcattttcccataacatgcttttaaatagtaaaaaataataaatcatatgattcattttgtaggca

SEQ ID NO: 65326 - DNA, 633 bp, Cucumis sativus
  Intron number 2 from transcript Cucsa.238480.1 (locus Cucs a.238480) derived from phytozome v7.0 (chr-ID scaffold0202 3; pos 1034505 to 1035137)
attccaaacagggtgaaaaagagtttcagacagaggtgaggatgttagccacatttcaatttcagtcttctactggtagttgttccattgtcttttcttaccaatctaacgtttcaatgttggatcgattgtttctgctaatatgtcttttcttttttataactattttctccccaaaggacgggctagaggagcttctctaatcaggcatacaagaatcactttttttgtaagaatggttgaacttaggagaatggattcctaaaccaaaatactttagggttaagatggttatctcgtgatattagtcaagtggctcataaattggtttggccactatggatataaaagacataggtatctctagaatatcactgtactttatttgtgtgaaggaaatcttttaggattaattctcagcaaatggaggagaaattcaggatgaaattaagttattaaccatttgccaccttcatttgaaatttatttccgtacaccagtaatgccatgaaattacccatgtgaactctttgtattgatttttatttaggtatcaggggacactttaaactaacatccattgtttggtttgctgcaggtaagtctactaggaagattgcatcatcgtaatct

SEQ ID NO: 65327 - DNA, 1028 bp, Cucumis sativus
  Intron number 2 from transcript Cucsa.256300.1 (locus Cucs a.256300) derived from phytozome v7.0 (chr-ID scaffold0222 9; pos 3948295 to 3949322)
gcacccgccttgagatcattacgtctggtggcaaagtaagtccttcaaatgtaattttagaacattaaaaggaattgatattctttaccgataatattttgtacaaaattagtatcttcaccaccttgacataaattgatcatggaaattggaatgtacttgtttatgttaggaactaaggtagtatgagatgcctttgtcacatattggttagaatgggatgattggtatctaagtggcctgggctctcccaccctaatagctagcttttggggtgtggttctccacggtgtttaagtacctaacaacggtatcagagccggttgtcgatgttttggagtggaaccggcgaatgggttttgaccgggtgtggccgagtgaagggctgctaggatgtcagcttttgggggatggggtattattaggaatgaaggtagtgtgggatgcctttgtcccactttggttagaatggaatgaccaatgtggtacttaagtggcttggctctgccactccaatggctaacttttggggtgtggttctccaaggttcttaagtacttgacagtttattttttggattgttgtatgaattatatgtgggagtaatttttatttgttggatatagaagttgcaattttgatgtcttgtctttgtatgtactgttcaaatttacaggtactagtgtttgagaaatttgaacttttaacttttctgttcatgcatagttgattcagtgagcctgaagtatccatcagtttatttctttttctaccatatctagagaaaaaggctgttatttaaggccagattggcaattagtaattcttacagagtaggtttaagctcttatgatttggtaattgaaactttcctattaaagaaaagagaggaagaacagtattcatagcctttatgtattgctaattgtttttttacttttatttgtttttttttagttctttctgtttgtactctttacgctttaacaaatatatgtatgcattaactgctccttatttcagggttc

SEQ ID NO: 65328 - DNA, 383 bp, Cucumis sativus
  Intron number 1 from transcript Cucsa.292640.3 (locus Cucs a.292640) derived from phytozome v7.0 (chr-ID scaffold0277 9; pos 146498 to 146880 reverse strand)
ttctgcgtgaagacggtgacaaagtgcagtggacggtaggtaattatctgatctgagttgtatgtctgaatgattgattgactgggctaggttgtccgccgatgagaaaactgaaaaacatgccggtggagaagggctggaaatttcttttcttttaggtctctgatgccatgtgaatgtgataattttctgttgaacaatctttgaataggtgaataggagactgaactgctaattaggagaatttcaagctcgtccatatttacgttagagctaatattggcaaggaattgatagtgcgcactggcgaataattaaactaagccacaccgtatctctctgtaaagcgctctctctttgtttttctctctctagcttcttct

SEQ ID NO: 65329 - DNA, 742 bp, Cucumis sativus
  Intron number 1 from transcript Cucsa.142290.1 (locus Cucs a.142290) derived from phytozome v7.0 (chr-ID scaffold0107 9; pos 568796 to 569537)
gcggatttataggtaaatttttttattgttgtggatatactggtctcttcttttttgaattttccttggatgacaccagaattttatgtaatgccgtattagtttagtagtttcagattgtaatcaagcatgttgtggtatttgacatcataaaaatttacttttgtgagcatcactgctcaatgtgcgggttaataactgaatgctgggttgtcctaggttggaaagatttatattgaggcgaggagtctggatcaaacatttccttatgctctttcatgagtcatgattgagttatagttcttataatatgaaagccctcacggttaaaacatttaggtgaattctctggtttttgagcagtcaaatgaagataaacagtagtttaatatccgctgttttgtatcatttgttataatgaaacatattccctgatttttaagaaagaaataaatatcgaacattttccctgttttcaaatgtctgttcaaaattgtgatatcatttttctaagcctggtttttattctgttatgcatgcacgagtttaaaggaaactgcttatgtctttatggtacaaatgaatgcattttttgtcttccttttgtgcatcgtatatttctcaggtttcttatatatatatatatgtacatacacgtaaagattatattttcatcaattttaatgtaagcacaattattttttcagttggatctttgccagaaagtggccaaatatcttgc

SEQ ID NO: 65330 - DNA, 763 bp, Cucumis sativus
  Intron number 2 from transcript Cucsa.135850.1 (locus Cucs a.135850) derived from phytozome v7.0 (chr-ID scaffold0104 4; pos 645238 to 646000)
tattccaggtaattcgtttttgtaaagaccagaatgtaatagttgttacagattgtcttctttaatcccgattcaccttctattatgtagtttagtttttgtgggatttgttggttaggaaaggagtaagcatgcagtattcctggaattcccaacttcaaatatcttgatgctgttaatacttgatactgttgatactgctgttcttcatacatctttagaatttcctcacaattgttactgcctcgctggccattcttatctttgattttgttactctatttgtacttaataggataataaatgagaaacactgttggtttttttctctcttgaaatcctatggatgaacataagttgacgctatcgaacaatgcaacatcaaaatataaaggttgtatcgttgtaggctacactttgctgcaggatgttgacttaaatattattgtgaaggcatttatgaatttgttcaccgttctatacttgatacccccccttattgctatatcataccttatcctcttcgtcttcgtagatgcatatttgaaactacattatttgctcagaattcaaatattatttttcttgttttgttgacttgccaaattagaagtctagaactaacttcatcagcataaagttgccttatttactttatatgacatctgccatcatctgccatggaaattatatacacaagcatataattggacaattcaactgtttgctctacaggtttattctcttcaaggcgggccagcaa

SEQ ID NO: 65331 - DNA, 630 bp, Cucumis sativus
  Intron number 2 from transcript Cucsa.280120.1 (locus Cucs a.280120) derived from phytozome v7.0 (chr-ID scaffold0263 3; pos 11355 to 11984)
cgtggtcggtagagattttcttcctcgtggatccggtaaatctcctatatttgttttctttatttttttttgtgtataaatgatttgctatacctttttatgttctcccctctttttgctaatctgcgtgactttagagggataggtagatgtgtgataatgctggacttttcatttttactcactggtttactctgtactcaaggatcttcattttggcttagataagaggaagctaagtttttgtattcttacatttcctaatcgattcagttgagcttctaagttcccatcattaactaattatgcgatcattttttttttattttgggcttcgttgtatataccggatttttttccctgttgtacctcattggattatttcattcatcaatgaaatgtttcttattcaaaaaaagaaaagaaaagaaagattactcttagaatactgagaagtatgttggctttcttcttggtttatcacttaaaactgaacttgtattgtagtatgaattccagtttcagaatcatgcttggttaaggtgattgaccaaaatggtttctttcatctctaatttatctttcgtactggtaggtattgtaacacgaagaccattggtgttgcaactt

SEQ ID NO: 65332 - DNA, 741 bp, Cucumis sativus
  Intron number 3 from transcript Cucsa.280120.1 (locus Cucs a.280120) derived from phytozome v7.0 (chr-ID scaffold0263 3; pos 12031 to 12771)
ctccgaagaagaagttctctgattttggtatattgtatttcatcttcttcctctgatagagacagttttatttattggttaatgtataagaaacctttaacgttccacaattttcactaattatcccttcttcaatacacgagcattccttataaggctattttgtacacaaggtttggttaatgtatttggttttatttgttgatgattgtgtagtttttaaatttattcatgtctattttggacctaaattttcatttgatgttgtaaaaaattctgatgaaaacaaaatctgtgtctgggctattttcgattaaatttcaaagtttatgtctaaattgaatgtacttgttcttatatcaaaatctctgaagtttcttgcttactacgagcttggaaaattcataggttttttgttcctgtacattatcgactttgagtatattttgtagaagctagttgcataaccatggaaaaaggggaagtctgactaaattctgttcctgcattaaaattccttggcttgtttgtagattttttcgtgcctgcttggctaaagttttatcatataattctagcaatactttgacccattttcttgctaattaatactgtaggacttgctttctttccttcctccataagacttacatatttattcatgttacaaccatgaatgtcttgccaaataaaactgtccacttttctcatatgcagcttctgttcgtaaagaaatatcag

SEQ ID NO: 65333 - DNA, 987 bp, Cucumis sativus
  Intron number 2 from transcript Cucsa.137750.2 (locus Cucs a.137750) derived from phytozome v7.0 (chr-ID scaffold0105 3; pos 478205 to 479191 reverse strand)
tcggaagctgatttgcaagtggagcttgacagaaggtacttgctaggaacctcatgatctgacattttatctgtggctgcttgtgtaaataaaaggtcgaaatattggtagcgttcttggcatttctatggagctaatgttacttgttcattggttacatggagaatgatatttcttatcaatagaaattaaaataccgaatgatattcatgaaaaaccaattattggattcttttattaatctgttcagacatcatcatacaaaaatactatcatatataagatgagtatcttaatgtgttgaaatcttttgggataccagctagaagttggtgaagtgggttattatagcccactccatgtatagggcaccaacaacaatagtggtgttttactgtttataacttacaattgaggatagctatttcaaaattctctttgctgcattatttttatttactattttctacggtattcactatttttctctcatcctttattttcttctttactattttctactcaaacaaaaatagtttacactccaaatacaaatgtgatagcttagactaaaacaatctgcactccaaacatcaactatgatagcccattaattataataaccacatactataataactaactcaacgcccaaacaccttgtaaatgtattttcttgattctagttagactgatttttttccctacatttccacaaaaatcctacactcgagatatcttttgatattgacatttccatctttgttcgtcttttttttttgttgttgattatggctggtagaaaaggttcaattggtttatttgtccaaaaagttagaaagttaccatgtttctaagttttatttattttacaagtgataatttgatgcattccttagcaatgaattttctttcagcattaactgatagaatatatttaactatccaggagaccaggtcagagtagaattaccactccaagaaaag

SEQ ID NO: 65334 - DNA, 523 bp, Cucumis sativus
  Intron number 1 from transcript Cucsa.137750.2 (locus Cucs a.137750) derived from phytozome v7.0 (chr-ID scaffold0105 3; pos 479273 to 479795 reverse strand)
aatctcagttgggtctcgaaacgcgaagaagctgcgtatgttttgctttatcttcttctgtattgcatttcttttgctttcttctgatggtggagttttgtgttgggggtttcgtttgcttattgattattagctataagaattttgtacgaattgttgaatgacccatttggcttacttgatttctgacttggctttgtggagattcatgaactcggattttactcagttgcttttgttcgtttggttatagttttatggagggcttgaattgagctcatgtgataggtggatggaagttttttttgttgaaccgttttagcttttccccccttctcctggtcatccaatagtccaatgtggtgtcaatggtatataattagtgtagaatggtgggattgggctggttggtatgagttgaatggggtgtctggaaaatgtagtcttttaacttttgaatttcttacatttctttgggctaatcgcagagataaaagctgctggtagtacatttggaaattac

SEQ ID NO: 65335 - DNA, 497 bp, Cucumis sativus
  Intron number 2 from transcript Cucsa.180530.1 (locus Cucs a.180530) derived from phytozome v7.0 (chr-ID scaffold0123 6; pos 124689 to 125185)
cagttgcttctctcctctctatcatcttctccgaggtacttcattcacttcaaaactgcttcagccaaatctatagatcagtaatttagatccaaaattggaaaacctattatgatctgatttcaatttaatttttttttaaggtttcgtttggtttaaattcagatcaaatctgtttggtggttgacttcagtgttaccggaacgtgtataactctcaaatttgggaaattgtagatttaaaattcttctttgagcagttttaccaaaacgtagttaaaagcacgattcttcccccattccacacgacccccctttggctaatctacctcaattctttcagaagcttgtctctttaatctataccctaggattcttcaaaatccatttctatttgctaaattttatatggattagctttgtatttaggaattgcatcatatgtggaattgattggatcacacattaatgtttcttcactgctactcttttgcagca

SEQ ID NO: 65336 - DNA, 442 bp, Cucumis sativus; identical to SEQ ID NO: 64568
  Intron number 1 from transcript Cucsa.302710.3 (locus Cucs a.302710) derived from phytozome v7.0 (chr-ID scaffold0295 1; pos 821995 to 822436)

SEQ ID NO: 65337 - DNA, 642 bp, Cucumis sativus
  Intron number 1 from transcript Cucsa.201130.1 (locus Cucs a.201130) derived from phytozome v7.0 (chr-ID scaffold0137 4; pos 59292 to 59933)
aggtatttcacattttattgattagcttcatttcaaattattgttgagtagcaatttaagacctttggtttcttactcagaggaaattgcttgatttggatgtgagtatttgcaaacatgattaattttaaaaaactagtgatgtttgtccaatgtttacatttttgctgtctccggcaatttcagacctttggtttcttcctgcatcattcattaaactttcactttcttaattaccattatttttttgttatacaaaaactgtggggatggaggacaaactttaaacatcactttggcattacattatttagtagattaatttttctgaatggtaattatgtattctggaaaatgactatactttcccattgttgggatacaaaatttcgattcctttcctctcatttttgagtcataagttttttcttcatctagggatttagttttacattagtttattcttttataaaaagaaatgctagttgtgtattttatcttaacaaatgtgcaaagctttcttaaaagttgccttgagaattttatttaagacaccctgttccatgtaaacttaaattggtttgtatgaaaagcatctctaattttttttcgatctttgatgataggatatacggttgaggg

SEQ ID NO: 65338 - DNA, 1028 bp, Cucumis sativus
  Intron number 1 from transcript Cucsa.192420.1 (locus Cucs a.192420) derived from phytozome v7.0 (chr-ID scaffold0133 3; pos 278615 to 279642)
attgaggtcgaccttcctaaggtcaattctctttcatacttgatttcgtttatggacttttgcttgcttgcttttttgtgggtttaattcggttttgattttgatgttttttttttctcctatctgggtttcatttgatcgttacccagttgcatatagttgcgtttgggatcagcttgcttcgtaaatattcgatattttgggattaatgttcgaatttggagtcggagttcttttgtaaacattgagaaaatggaaaacttgttcatatgagtcgtgaccgctggattccttttatgtagttggaagagttgacagtacgatggactaacccagcagtgaaaaattatacaagcatgatcaccgattgttttgataagtagataaatggaaaccttaaacaagatttcagttgtgtgaaaattgcggggattaaacaataagaatgtttcttaaacattatgagtaaataaacttgtggtagcgtagcaatttccacagaactatgatagatcattggtatcccagaatgatgtgttagttgtcgcgtggtgtttgataatgccatagtaatccttttggtttattcggatggattcttatccgctttatataaaatttcagtagtaatgattatctatgtttgttaccaaatttacaaataaatcatgtcaaaacgatgaaaataaaaactcaagcagcaaggagaatttctatttacaaaatatccttaatggcttctcttggcagtttgatgctcatccacggtctgttagttgttatttttcccctcatttttctttcaagtgttctcacattaatacgaagtttttgtttcatttaaagaagtggaaccttgctagtggtacaacaagctctgctttgtttttatgaccagcaattaagttttgttttttggaattcttgactgttctccttgttggcaacatttaaaagtttcctatcctttttctcataatattggcaatacaggagcatatcgtagcttcagtggcagaggatcgaga

SEQ ID NO: 65339 - DNA, 642 bp, Cucumis sativus
  Intron number 2 from transcript Cucsa.181950.1 (locus Cucs a.181950) derived from phytozome v7.0 (chr-ID scaffold0125 1; pos 140398 to 141039 reverse strand)
gtatatagtaagtttagttattattacaagccaaaatatttactacttcttttcttcttagatttgggttagtgatttatttcaatttcaaattttgcttcaatttttcagattttggttttttgttttttgtgttttttctcatgggttttgtttattttctctctaccataattcttttctatgattttggttgatttctttgtatttgtatcattggttttgtttaaaaatctgaacttttcttttgtattgcttattttctctctaacaacatgacttagttcatcaatttttgctttatttcttcacatttggacatttgattgtgttcaaatccaaatttttcaacaatttctcacatgtaattctttattttccctaaaaaaaatttgggtttttcatttcttcaaattttgttcactgtttcatttcaaaaatcgaaactttccctcattttttcatctgtattttgatatttaagttcctacaaatccaaaatttatccaatttgctctcatgggtgttcttcaattaccttatactcataatttttcttcttgaaattcctcaaatttgtcaaaaaaaaattcttcgaaatcatcaggagttcactcagtagaaatcgatcgaaagcaacaa

SEQ ID NO: 65340 - DNA, 543 bp, Cucumis sativus
  Intron number 1 from transcript Cucsa.259780.1 (locus Cucs a.259780) derived from phytozome v7.0 (chr-ID scaffold0222 9; pos 6139316 to 6139858)
ggaaccaattagagttttagtcactggagccgcaggcatgatcagttcttcttcggatttttcattattttcttctgtgtataacaattgcgtttgttatttttagggaatgtttgctataattgaagtttgcttttcttgtttcttcttttctaatttttgggaaacgtttgattctgataagtatttaatttttaatgaaatatattttcatttgcaaacttattttgaaatatttgatttccctgaatgctgcatccaatctgaaatttttacgcgagtaaattgtggatgttgatgtcggttttttcacccgttgtcttatttcttcatttaacacataccctaagtatcacagaattagaataatgaaaggaaatttaagtatcttattgctagaaaagtagaacattggtttacattccttcattttttatttgctacaatgtaactacaagatgatgtatctgccagcaacaagtagttcttattgtattcggccagtaattctgctatccctttatggtacagggcaaattggtt

SEQ ID NO: 65341 - DNA, 971 bp, Cucumis sativus
  Intron number 1 from transcript Cucsa.137460.1 (locus Cucs a.137460) derived from phytozome v7.0 (chr-ID scaffold0105 3; pos 234171 to 235141 reverse strand)
ttagaaggtaagagcctttactgacaatattctttcattttgttcttaaacaaaaaaaaaaaaaacccgttacattttgttgtttttatctcttgcatctatccctatagaatacaacatatggtacaaattttcctggtccctatatgacttttgtcatcctacgagtcttctgactagttttattttcaatatatttcgcttcatttgattgaaacaagatttgcagtactggatcaacgttaaactagaaaactgaaataaggatgatagaaaaaaaaatacttgaacggaatgggggattggaaaaaatttcattgataaataaaatatccagaaagtcggtggacgataaaaaatacaagacgagccgatgtgcaacccaatcagttgaaaaaaatacaaatgtaccactaccatagggtgtaccagggcgacataaaaggatagaagaatagatagttgtaaaacggattgacgttgcaagaaacccacaaataaggggaaaactacacaaagcaacaatcccatacactccaaaagcaggagaggaatcaagccaaaaacactcataggcaacccatcacagagccaaaaagaggaagggagatatcacagagctctagtaatggcattcaaaccgacaaagagactcctctcgaagcaaagatttagccgtttaatcaaaatagatcgagccctctagcttaactttttattccgtccagcaattcatttttttaagatccatgttctttctaaaataactagagatctgggaacatggatcttgctctaatcccacaaattcaagatcagaactggcccatttcttagcttaactttctatttagtcctgatagcttcaattttattaagatctatgtagtatttgaaataagttgagatctgggaacatggtttttgtccaaattccagcttgcaccgactacaaacaaaactgccatccc

SEQ ID NO: 65342 - DNA, 571 bp, Cucumis sativus; identical to SEQ ID NO: 65062
  Intron number 1 from transcript Cucsa.286120.2 (locus Cucs a.286120) derived from phytozome v7.0 (chr-ID scaffold0265 3; pos 2278696 to 2279266 reverse strand)

SEQ ID NO: 65343 - DNA, 914 bp, Cucumis sativus
  Intron number 1 from transcript Cucsa.240680.1 (locus Cucs a.240680) derived from phytozome v7.0 (chr-ID scaffold0204 7; pos 795815 to 796728 reverse strand)
cacagattttgggctctctgttttttatcagccaggtctgtattttgcttttgttccctaatttgtgttctctgtcttctcattgccatggcatttggcatttgtgttcttttttcttcttcttttagtctcatgtctaatttgtcgtattggtgaactggactctgcttaaatatctttggagatttttacttgatgtgggtcattaaagaaaaggagaaaagaatatatgccacaaacccattatttgtacatgctttttgggtgttacttgctgcagaatataccagtcgtttaggtacctttatggaagcataagcgtgtaatcaagaagagatgcgtatcaactaaggcagcctttaagctttagcctatgtttttggcttcctttctttttcatttttgtcagaatctttaatgtctaatatgtaggcatcccccagcgtataaaaactttccatggaggttcatgtttctaaatatattatttttggctattaggaaatgatgatgtaataatggctgagtctcttttttttaactcatgcataaacacttcaatcttcattgctattgctagtttgttcattcgtttttctacttgtatatcaatctggaattagtttgatcccatgaaattcttcaaatagccagctttctactattagtttttcaataacattctttcaattattaactgctaactggtggataatggtactattttgggtgccttttcctgacataggcttttgtgcaagttgatatttttaatttggactgttctgttcaagctatatgcctctccttctttcttcggttaaaggtatgctttcttataaaaatatatatatttttaactgctacttagctttctgtttatgtatttttctttctaggaaactctttctgtg

SEQ ID NO: 65344 - DNA, 456 bp, Cucumis sativus
  Intron number 1 from transcript Cucsa.239900.1 (locus Cucs a.239900) derived from phytozome v7.0 (chr-ID scaffold0204 6; pos 799299 to 799754 reverse strand)
aacatccctggatttttcgccatttaaggttctctcaacttcaactgacacatcttttatcttttgaatgcagttcgcatctgcaatagtcgtgtttctgtagtctagattctgccgcatcgtttggttttatgagttttggtcaatttttcggttgatttgccttctttatagacatttttactatcaaatcttcatctgaattctctttcttactcaacgatgatgtccttatttcttgtaagttaatgacgaagaattagggtttaggaggaaatgaaaggatgccaagggtgcgaatgtttgctagatcccgacctttctactttatacttttatactgtattctcttatcctgtaggtgaaatattctgtaaagatcatttctatggatttgagtatgtaagctgattttgagcaggaaaccaaatcgatcagaaatcagaaacgggaaat

SEQ ID NO: 65345 - DNA, 701 bp, Cucumis sativus
  Intron number 3 from transcript Cucsa.254080.3 (locus Cucs a.254080) derived from phytozome v7.0 (chr-ID scaffold0222 9; pos 2489895 to 2490595)
gaagttactaatctcaatcgtcagtttctcttcaggtttcaattgttttctttgctctatttgtatctttggagttttattcgttagtttttttttttttaacaaccggggcccgggggtgggtgtagaactctcactttttgttgggtgtatactgaggtgtaatgacatttcaaattgatctctatttttaagttacatccattactaactgatgatatttatatttatgatttgatatcggtaaaatctgcactggttataggaattcgatggatcgaatgtcacattttgtcacattttacttgactggagcctttcttcatagtttgcttcccgttttgtggacttctctttttttatatcgattgatgcatttttcttttctcaatgaaagtccaacttttacatcaaaaagaaagaagaagaaaaaaaaataaaaattgatgggtcgaatgttctttcctttcaaccattttgtactaaaatgctgaaccagccgaattagaacggtgcttaaataaattttcctgtaagaaagttcttttcaggaaattttattattatgatatgatttgacgttggaatccttgaggaaatcacatttctcatatgtaaatctggatatggctttacagtagtcatttgattaaatacggcagtcagaggaataacactaaggtagtatcgcaggcttgaag

SEQ ID NO: 65346 - DNA, 995 bp, Cucumis sativus
  Intron number 3 from transcript Cucsa.234880.1 (locus Cucs a.234880) derived from phytozome v7.0 (chr-ID scaffold0200 4; pos 88273 to 89267)
ttggtgtagtccagagagggaagtttggtagtaaggtggttgcctcatctgtagtaacatagtgcttcattttttacaaaaattcaaacatatctataaccattttgtctaattgcaatagtagtgggcaatttcatttaacatattcgagaattgtcatttgacttctgtcaaggaagttttctgtatcttcacgactgtaccttcaaaactggagagtcggagaccaagtagtttcattccctggatattcaaggggtcactcttttgctagaaatcttccaagagagacttggtctctgtgttttgcagtctcctccattttgagttctcactttcattctcttttgtttatttacattatttttcttccctccagtttttctctcttgttataaaaaatgtttcttcttgtcctgtctaaaagactaattggattgcttcagttctgagacaatatcttctggttgtgccaaagactttgtgcttcattggcgggccactcttgcaaagatagctaaaattctttttcttcatgccatatttattgggaggaatgacagatctttatttaatttagtaccttgaaccggatgtcacactttttattttagatactctcgttctatgcttattacctatcggaaaaggtttatgtaatctccatttagtttgttaggattgacagacttgatctctcctccgtttctttcgttttaatcattaattgtctacaaaattacttttatattggttagaagcaaaaatctattagtgctactagacttcaattatgttgggtagaattttttattttatttttcttactactgtctgctgcaaaatgattttgcctttttttttaattttatttttattaaagtcttaattttttaatttcttttttgtcttaatcttaccatccaaaaactgatggtatgttatcactattgactgtagttattcaacaactctataagttcgaaaattgcggc

SEQ ID NO: 65347 - DNA, 412 bp, Cucumis sativus
  Intron number 1 from transcript Cucsa.151740.1 (locus Cucs a.151740) derived from phytozome v7.0 (chr-ID scaffold0111 9; pos 115711 to 116122 reverse strand)
ctctccatttttgcttcgacttcaacttcatacaagtacgtacgcctaaacctttctacatttttcaattttcctcattgattttgccaatattacgaacgtttttccagtaaaacaatttccagaaatgttgcgtttgatgccagtttgcaatatttagaatgttagaagatttcttttctttttttgtattttgtttgatcggttagttttacaagtttgattcatttcagaatgtgtaaatcctctcgttagtctattattcaacttctgtttttgatgatccttgaaattggatttattttttttactgtgttgctttaaacttgttcagtcgttgtgtttaatgacatttgttctggttattatgtttctaggcttatattgaaactcctcctgcttctagatccat

SEQ ID NO: 65348 - DNA, 398 bp, Cucumis sativus
  Intron number 1 from transcript Cucsa.219130.1 (locus Cucs a.219130) derived from phytozome v7.0 (chr-ID scaffold0165 8; pos 1003476 to 1003873)
caaaagccggtatttcttctctcttttacttctcacgcactgtgactgttgctaatctagggttctttttttttattgttttgtttatggtgtcgattaaaatttggagaactaatttatctggagggaaattttagtaaccgatgatgtcttctgatcgtgtatatgtatattatgcgattgaattcgatttcagtttttctttttaattgtttggaataaacatgtagaaatcagtaattgaataaaaataaatgagtataatggcagatttcaacaatacaaatggagactaggaacggatttaacttgtactctataaattaatgaattgtaactaatatattttgatatctagtaatcttaatccttctcttctctttttctgcgtgtaaggt

SEQ ID NO: 65349 - DNA, 854 bp, Cucumis sativus
  Intron number 2 from transcript Cucsa.219130.1 (locus Cucs a.219130) derived from phytozome v7.0 (chr-ID scaffold0165 8; pos 1004010 to 1004863)
agcttacagcaacggatctttctcagtatcaaaaggtagatttagctgtcaacccctccccccacctaggcacattgacatgcttattcatttatttcttatttttattctttattctcacattatgcaaacgactcccatttgttagaggattgagcttgtagttagatctgcactctgtagagaggttcgttcaatttgccgggaaatgatacacgtgggatcattgttttttccttacccttctccttctctgtattattatttttcagcaagactatctttttgtcttgctaacttcatggctaccaattagacatttggtgcagaaatgagaacatatgtatgctcagctcaaaaaacatctattacctattacacttggattaaactgggcggatgtcattccgtgcgattctgatcgagaacattttatggctgctgcagtttgggcttttggtgaacttggatgactttgattctaccctgtgaagactcatgaaacatttaggatttctttgtgtctttattccttgccacagtcatatggaatgacaatttagtactctgaaccaacctagacacgtgggtagcggtcgcattcttaattatttctaaaaaaatgatttgagttgatttctccatctatgtttagggaactgatattaaggactaatacgtataatttttttatttattactgcttgtgatcttcagattcttcttatcataccagtttcatcaagagcatagatctctaaagagcaggtttcagataaaagaattttggagctaagagcatagttctcttatgagcaggttgcagataaaagaattttggagctggaaagtac

SEQ ID NO: 65350 - DNA, 565 bp, Cucumis sativus
  Intron number 3 from transcript Cucsa.277310.2 (locus Cucs a.277310) derived from phytozome v7.0 (chr-ID scaffold0260 1; pos 539928 to 540492 reverse strand)
agtctacagttgtaaaggcaatttcaggagtccaggtgattattttccccatcactgatggctaatctcggtgctattctctattgcattattctgtctttcttctttggcttgattgttggttggattttatgttccatagaggttccttggttatcttatggtgcaaaacttttcttcccttctattttttttccttttctacataatgataacagaaaatcaaacaaggtattacataaactttctgtttcttattgactaaactttctgtttcttattgactaaactttctgtttcttattgaccagcacggaaaaaattgctattagtagtttgtctaaaacccaggcttttacatatttcacaatggtgtcaataacatgtgtttgcatggatgctttattgcattgaatttcacttggagcaagtagcacatatttaaagtggttttccttaaaaatttaggtcgtatgagtagagtttcccagaaaaccattataaattctgctttctgatggatctattaatggaatgtctaatctgcagactgtacgttttaaga

SEQ ID NO: 65351 - DNA, 931 bp, Cucumis sativus
  Intron number 1 from transcript Cucsa.277310.2 (locus Cucs a.277310) derived from phytozome v7.0 (chr-ID scaffold0260 1; pos 540814 to 541744 reverse strand)
tcaacacacagaaatttctgattgagcatcaccaggtccgacaactaaaatttccttgctcctgcatctctttttcttcaatttcttgtatagttttgatggatggattgtgtgtatccaatcatttatcgtgttttgatggatgaaccatgtttattattcttttttatgacttcaagtaattgtaactgggtacttttattttcaacttctgggctgaagtcatttttagttaagtgcaaacggacgggctgggaacgaaccaatctaacgcttatcttatcgaattttgaggagttggttttgtttgggtttatagcttaggaagggttttcggtttcggagaatctaccatttgaagggctgggtctaaaatatcgtttaattcaacccaatacgatcctgaatgttcaatattcaatctaccatttgaagtgttaggtctaaaatatccctaagctgtctgccaatttcgtgcgaaaaagcctaatagccagttttttctcggcggcagtacattcgccttccccttccaagcgctacggactgtcgctcaatctccagaatctcagtttgttttttggtgtataacttgtttgatggtgtatggattatgattcagtatcatttacttattttgtatcagcaacaaatttggatttgaaatcatttttctataccttttgatgttaagggtttaggcttattattatgattcagtatcatttcctacgtgttaaattagtttagtttccaagtatgcagttatgttcaagtagtttgtattctgatgtgggagatagtgctgttttcggtaaatattttctatttaaaccattgtgcgcttggttggtggcagtgcagataattgcatttctttttttggattggggcaggttggttactctctggtttaactttcacaaagaac

SEQ ID NO: 65352 - DNA, 975 bp, Cucumis sativus
  Intron number 1 from transcript Cucsa.261670.2 (locus Cucs a.261670) derived from phytozome v7.0 (chr-ID scaffold0226 5; pos 92255 to 93229)
gacgttcatcgacttttactgtttgttatatttttgtatgtgttgtgtgacttgcttgataaacatgattgaattaaatgcccttataaattgattatatggttaaagcatgtccatggacgtttcttttgtgatgattaagcatgtgaccttggtaatggtgtttatgttgagagcatgtccatttggttattgggataaatgcatggtctagacagcatgatataggattatgaattctcgagagactgtgagtctgattagtgcagaaaggggtcgaggtgaatattggtgtgcctcgagtagggagtagtggagcatccaatgtgacgagtctatggaagcaagtatttagattcttgaggaagagtggatacgttgccaactcattgatgttggttcttgttccatcaccctctggctgaaaaccagttgcttaattgagagtttatgaccatgattttgatgaaggaattttagtgattcctccctgattttgatgttttcttggagtctaacgtggatggttttggctaagttatgaatttgattggcatgaagaggatgaatgaagatataatttggagtttgtttggggatggttcatgtataatgtgtattgttgaagacttcaaggaagatttttgaagggttttgtcgccgtttctgataattttgaaacttttaactgttggaagttgactcttgaagttggaagatgagttcttaggagagatttaatcccaatgagaagaaggaaaggaaatgatccatttttgttttgacttccattatttttggataaaatttttgagtgggaattttagaactttgtttcaaacctgaatgtaatggtcactagcgttttacggattctgaacttacaccaaatcttaaagataaccacattgaataaattttcttaatgttgtcggacactgcagttctgttagaaaccatcattttcttgtggac

SEQ ID NO: 65353 - DNA, 695 bp, Cucumis sativus
  Intron number 2 from transcript Cucsa.166770.1 (locus Cucs a.166770) derived from phytozome v7.0 (chr-ID scaffold0115 4; pos 129203 to 129897)
tggtggttgtgctactttgactaagaaagacccaagtaaaatctctccctctctctctccctctctctctcttcaatgactttcaatgatgtcgatagatttcaacatctaactttatggtgtttcatgagttgatgaatgcgttctttttgtttgagattgtgttcggtaattgtttgattttttattgaaactttgtttatatcgacttaggctatctttgaggttcatttggttttttgtttttatttctcacatagttcttttgcttctataattcttagtttagtttcttatctactttttattaatgttttaaaaaattagattaaagtttaattttttaaaaaatagttttaagaattgaactctttaaagaaaataaaaagaaaataaaagataaaatataagcggtcgtaggaaaaatgggagaaaatagatttagctcccaaaatctaaaaaaagaaaaaagatgagctgaaaacttagaaaaagggataagtagatgattctatttaaattctatgcatggcatcttattacgtgtctttaattttataagattaattttcataaatcaagtataagttataaaaatccacgttttttctatcttagttaacacccattacattcacataaaaatgtaactaaccattcctcattaaatatttattttcttttttttacaggtt

SEQ ID NO: 65354 - DNA, 779 bp, Cucumis sativus
  Intron number 2 from transcript Cucsa.284330.3 (locus Cucs a.284330) derived from phytozome v7.0 (chr-ID scaffold0265 3; pos 1152835 to 1153613 reverse strand)
aagtggttagagaagagatccttcttcttcttcttcttcttcttcctcctcctcctctttctctatctctggaagagtctatttttgaaaattatttgctccggagcctttgaagtttttacttaaatagcgaacactcttcgcctttttctctttttgttaaagtctggacggcgtgttagctaatcgaagaatggggagttcattctaccggaattctgcaaatatagatattatggtcttttgataaattttggtttcttatgggaaaggaccgtaaatagtgcatcagtttgtgttattggtgtatgaattcttttttttttgtcaaatcacttcccagctcgtggcttgggggttcttattgtcgagtctagataaattctaccttttttttttttggttagtgatccattggaagttaattctgtatcaatattcttgctcttgtggtcaagtgttgatttttatgtccttgtgttatttccgcagatcatctgttgctgtgaatctggcgaaatggatctgtaggtgtagttttcggctggcatccttttgtctgtggtgccgtttcggtcacggggctttgtttctttgagaacgatgtctaggattgaggcttcttctatctattgatgattattcgggagtctagactctggttcttttcaaccagcattctgttttgacttgggcgccttctcgggagggaattcattctcttccttggccatttcagtctttggctgcaaacacgtcctccgtttctttcattttta

SEQ ID NO: 65355 - DNA, 1016 bp, Cucumis sativus
  Intron number 2 from transcript Cucsa.308160.1 (locus Cucs a.308160) derived from phytozome v7.0 (chr-ID scaffold0297 8; pos 365499 to 366514 reverse strand)
agggatttcttgagagggtacttcgactgaaggaggttagttttattttgattgacttgttacatatgccatgcttgttaggaattgatccaatgataattttagcagaaagattatcattctttatttttataattcaattttggtttttgtcagtgggtgattatatatacttcaattataatttttttttcgcaataaaagttgttccgataatatgtgtgtgtgtgtgtgtgtgtgtttcattgagaaaccactgtcttccagaggaatgtaagtagaatgagctatacaagtatgtggcctatccaagaatggagcgaccagagaaacttaaaatcatatatatttttatagaaacaaccactttcaaggaaaaaatggaagaaattaggaaagaggctctagtcacttgcgatttgaaatagaggaagttactaagatccaaccaggctggagttttccatttttttagaggcttcaaagccagaagaaagtatggttctttacttagctcgtccttggcttgaattcgatgtcttgtctaatctaagcagacgatttctatcatattttgtggttgtgccttttacttccaaatatggagttggatggggcagcgctttaatttgttgtaatggttgatgaagattgccacctactgttcagttgtgttcatgtttttttttcccttctgatgataaccattataagtaggataagttatgactttactttatggttatgattgggtatttagctttattgtatcttggtgattctgcttaaattattatttttatttattattctacttaaattattcctcctccctattgtaagtttcgatagttttcatttccacatgaatgtcttttttttaagctgttgactagaattaactacatgtttggttattttagatcttattttatcagtttttttaatctgaaaatgtaataacttctatttatgatgcagggaagagaaataagcattgcggagaagacaaatta

SEQ ID NO: 65356 - DNA, 494 bp, Cucumis sativus
  Intron number 1 from transcript Cucsa.136100.5 (locus Cucs a.136100) derived from phytozome v7.0 (chr-ID scaffold0104 4; pos 830712 to 831205)
gagtggagtatagagctttgaagtttggtaaagggaaaattctctcaatttatttcttcaacttgtttcttttcttgctcttgcatcgttctttgtactactatcttgcttttgcttctgttatttgatgcagcttcttttgcatttatttttatcaaattactgtttctttcccttcttttgatgttagggttcgattttatgaattatgctctcgtttatatatatcaaatttccctccttttgtttttctgatgtacaccttctggttctggcacattggttttctttttcttttttcgttcttttgtttttcgttttttttttcaaagaacaaaaattaattaggaaaagtatttgatttctttcccttctttcttgatttaaggatcgtttatgtagactcatttggttttctttctgttggagactgatcttttttcacaatttcaaccgtaggtaagacaaagaagaaactcataggtggaagtaat

SEQ ID NO: 65357 - DNA, 453 bp, Cucumis sativus
  Intron number 1 from transcript Cucsa.187420.1 (locus Cucs a.187420) derived from phytozome v7.0 (chr-ID scaffold0128 6; pos 15234 to 15686)
gctgatatttgtcctcctggtattgtttccatttatgattttacattacaacaagttttaaaacactctatatacattttatacagtgttcgtgagctttctaattcaacgttcgcaattggggttagattttttgtaatcgaatacccatttgaagcattaagaaaaaatatgaagttattgtctctcaaaaccgatttggaacgagtggaacaacatttatgtctttgattactgctatgaagatttatttgtaccacttatttcctttttggcttcttcatgattatggaatacttctgtttgatgatctttaggctgtagttttgtttgaatatttttccattatatctcttcggatatttcatattgtgatgattaaatttggttatttgttttggtatataattatgatcaggaaaaaatcagtggccagaacttgttggagtaaaa

SEQ ID NO: 65358 - DNA, 679 bp, Cucumis sativus
  Intron number 1 from transcript Cucsa.258870.1 (locus Cucs a.258870) derived from phytozome v7.0 (chr-ID scaffold0222 9; pos 5619714 to 5620392)
gcaaagacggcattcttgaagattttgctactcaggtccttgctttgcttctcttcttcgtacactggtgtattttcttttaatttatttatatgtgtaatgtactatgtacgtacgagcgtcggtgtggttgcttggtaaattgggggagagacgaggaaatgaagtgtttaggttgtatgataatatataaacatatacctgccttttagaatgtgttagttgtaagattttagaagataagtggggaattgtataatgagggttttaaccagctagaattgtagggtgattgggtaattcgcttgcgattttctttggctttggactctggtggtggaaatgaacggctacgcgaaggggttattgacaattcaacagcactttgtctctggggcgtcggtgggagagatgtgtttggtttctggcgtagtccactattgtaattttttcatgaccttgaatcagattctctgatcttcgtttcattccagctcttatcatatgacagaagttttatgggagctgagagattttagattacgtatattagtagtactgggtcacaatgaatttgattttagtcatatataagatattgtatgcataagttgcagatacatttcagtggaaggatgtgaacatattgtataatatatgcagggaggtgaccggaaag

SEQ ID NO: 65359 - DNA, 679 bp, Cucumis sativus
  Intron number 1 from transcript Cucsa.151820.1 (locus Cucs a.151820) derived from phytozome v7.0 (chr-ID scaffold0111 9; pos 198575 to 199253 reverse strand)
ctctccatcagcctaaaatcgtctctcagatcctcgtaagatctttttctatcccttcactcttattaattccttcccatatctatatatctattttatcaatctatctatctttctgctgctgctactgtttatttagtttttaaacttttacgagttatggctgattcttcaactcttattttcatttttgaaacaaaaacttaaaaacacctgatgtgtctaacattttgaaatctaaccacaaaaacaatgtaatttttggattcaaatttatatataacttagattagttattttatacaaatctatttatgtgataggtagattctttataactcatttaattggattctcaaattttttatataaacttaaaatggtctggttttaaatatatatgtagagcaattttgtggtttcaaaatgaccaccctaagtttaatgatagtactgaactttgaaagttaagatttaaatcttttttcgtaaatgtttttgcattttgttgttaatattttgaagtttagattgttatatatatttgagattagagtacatttcatcataccatagctcaaatctaatttatgattatcattggattgattgtggaatatttgattgtttgttgtgtataaaaggggggttttatcatcggaccatcggttctaggcca

SEQ ID NO: 65360 - DNA, 939 bp, Cucumis sativus
  Intron number 2 from transcript Cucsa.205280.1 (locus Cucs a.205280) derived from phytozome v7.0 (chr-ID scaffold0141 6; pos 393738 to 394676)
acgagcatcccgtagaagccaactttggggtaagaaaaatcgctaatttataacttgagaaccaagcgtttgcgtttttaagttttaagtggatttgttcttattcggttccctcagtttcagtaggagattcgatagacttttcttaatatatggtattttctctttaattacttaatgcttgagttaaagcttaaagggtctatctgtttagcgtcgttcaactgaagtaaccttacctggtaatagtacctaaagcagtagaaaattgggatggctctcaatgtttgcagaaattacatttctaacatatcattgatggatttagacggccgtcagttctcagaaatcagaatgtttgattgtcttccttgagtaacaatgaacttcaagctcaagtcataatcttgttgactgttaacaattcgtgttttgatcttttttatgcaagtctttcttttaaaaaaagcttttgtcgtgaactcgctttatgaatgagaaggtcctttctgatgtatcctcttactggctgtttatggaatttatcatcatctttcaaatatgttgtaacccacttactagtaggagatgttgtactgcattgttgcttaagtattatattttggggtttgacttgtaagttatattactatggctgcctttagcctgggtgccttggtggtattttgcttatatttttcaattcctagatatactcagtttgatattgtacttgagcacttgtcttgcctctagtcaagaatgtttgtctatggttataggttgatatgttggtaccggtgacggaagtttaaaattctttgtggggagtagtttatatcttcttttgaccgtaaagaccctctattggtttctggttgaaattagtttgtcctttttgtgctttttcaagaggttggctttcatttcttttcagat

SEQ ID NO: 65361 - DNA, 728 bp, Cucumis sativus
  Intron number 1 from transcript Cucsa.181880.1 (locus Cucs a.181880) derived from phytozome v7.0 (chr-ID scaffold0125 1; pos 97057 to 97784)
cccttcttcttctagccttcttagtagatcgatcggtaagagttcgtcttgagccttccaatttctttatcgccctttgttcttttttttttcttttacaagttaatcccaaaagttttagctctacctttttcttccatatatatttattttgaaaaagttttatgatcatcagtatcctcccttgtgttttctaatcaaagttagaattgaatcacccattcactttttaacctctctttgcctgttgggttttagtttgattgtgatattgtgtatggaaactgctaaagttttttaattgaattgaatggaaaacttgatgattgtgtggtattgttatatgtgtttttgtctgttttttgcttcattgtaatgttgcctgattcagtactacacattagaggtgatgaacaaaaatcaacatgatctccttattaggaaatctgatcacttccacctcctcgaggttgctttctccatttctccatcttctcaaggaacttcgttattgttttccattttgtctggaaaagttctatcacagtaaggaattagaagcgtcctctacctgtttgtcgaaatgactgagtgaagtttttgaaccttccatgtatgtttgctttagttgagatcacataaggcatttacaaattgcatcaccaaatccagttttttattgaatactatttggttgtttatttgagtgagttgaaatgggcagataa

SEQ ID NO: 65362 - DNA, 1054 bp, Cucumis sativus
  Intron number 1 from transcript Cucsa.249280.1 (locus Cucs a.249280) derived from phytozome v7.0 (chr-ID scaffold0220 9; pos 13004 to 14057)
gccgacgaagcctccggaagtaagtcttttctgtgatttcatttcttgattttttttctgatgcttagttcgaaatttcaatccagcaaggatttcaggcacggttcttaatagagataacaataataggttttcttagtgatacttgaggaaaggaaatgcgttatgtgaatctttttctggtagtttttacgttgctatgcttttgataaacgattctgagttctatgcgttgatttctgtcccttaaaattgcgaatgagcttttgtagcttggggattgggtgaaattgtgacgacttcgttattttcctcattctatttgttcgaaccatgtggatgtgtaatattatcaagagcgtagaacattatctatcgcattttaaaccgaaaatttggacgttctctgcttgtgttgtaattgtctgttaactgaatttcaatgttcttaaggacagaataaactgttttgctcagacggatttgtttgaaatgatttcttgatttactgtgtataatcaatggtttctactacttcactcactaggccgtataaatctgagaaagtaaagaattgatccggttatatgaatcttctttctatttgatggagaattgcaagaaaaaagttaatttacaagtcgtaggctgcttctgcaaattcacctgaaagcttctacgagatagtgtattttctgtttggtttccgtttgataatttccttgaaacataatgcaaacaaatcatatttcctgccgaacttcaaacaccaagtttatcaacattgaacaactttcgtgtaaatagtatatgatgtattaaaatagcgttgctttagttcttgttgaactcttggaaagtttttagatcaagattgattgctctgaatttgattctacttgtgttgaaattcaacagccatcttatacagataaactcttctctgagttggtagtttcactgccaacttgatcagatattaaacgatgataatcataattctatcaatatttgtgtagggagaattccttttgcatttctagaagacattcat

SEQ ID NO: 65363 - DNA, 350 bp, Cucumis sativus
  Intron number 1 from transcript Cucsa.283620.3 (locus Cucs a.283620) derived from phytozome v7.0 (chr-ID scaffold0265 3; pos 675822 to 676171 reverse strand)
cttgggataacacaaagacacagaactgaatcagagtaagtagctttttccatttttctttttcctttttctctctattttaatgtcggatgttcttggaattggaagtgggtcaattcattgttcctattgttgttactgttcatactgttactctataatttgtttttctttattaaatcgtatttttcgatttttgatgagatttgcagcataatcgatatttttttttctgaaaaattgaacaatgttgggtatagattggcgatcttcttcgctttaatctgtttgttgttttcaatctttgaagaacagggctcagagttttctccatctgggtctgtgtgctt
